United States Patent Application Publication US 2018/0305689 A1 - sequence listing, part 161

SEQ ID NO: 2339636 - RNA, 19 nt, Artificial Sequence
  Description of Artificial Sequence: Synthetic oligonucleotide
  Sense strand starting at position 768 of SEQ ID NO: 1885404
uuuauaucccagggaggua

SEQ ID NO: 2339637 - RNA, 19 nt, Artificial Sequence
  Description of Artificial Sequence: Synthetic oligonucleotide
  Antisense strand to SEQ ID NO: 2339636
uaccucccugggauauaaa

SEQ ID NO: 2339638 - RNA, 19 nt, Artificial Sequence
  Description of Artificial Sequence: Synthetic oligonucleotide
  Sense strand starting at position 1985 of SEQ ID NO: 1885404
auuugcaguucugacaaua

SEQ ID NO: 2339639 - RNA, 19 nt, Artificial Sequence
  Description of Artificial Sequence: Synthetic oligonucleotide
  Antisense strand to SEQ ID NO: 2339638
uauugucagaacugcaaau

SEQ ID NO: 2339640 - RNA, 19 nt, Artificial Sequence
  Description of Artificial Sequence: Synthetic oligonucleotide
  Sense strand starting at position 2053 of SEQ ID NO: 1885404
uaaugucaccgugggugua

SEQ ID NO: 2339641 - RNA, 19 nt, Artificial Sequence
  Description of Artificial Sequence: Synthetic oligonucleotide
  Antisense strand to SEQ ID NO: 2339640
uacacccacggugacauua

SEQ ID NO: 2339642 - RNA, 19 nt, Artificial Sequence
  Description of Artificial Sequence: Synthetic oligonucleotide
  Sense strand starting at position 2078 of SEQ ID NO: 1885404
guguguaugaacugagaug

SEQ ID NO: 2339643 - RNA, 19 nt, Artificial Sequence
  Description of Artificial Sequence: Synthetic oligonucleotide
  Antisense strand to SEQ ID NO: 2339642
caucucaguucauacacac

SEQ ID NO: 2339644 - RNA, 19 nt, Artificial Sequence
  Description of Artificial Sequence: Synthetic oligonucleotide
  Sense strand starting at position 2079 of SEQ ID NO: 1885404
uguguaugaacugagaugu

SEQ ID NO: 2339645 - RNA, 19 nt, Artificial Sequence
  Description of Artificial Sequence: Synthetic oligonucleotide
  Antisense strand to SEQ ID NO: 2339644
acaucucaguucauacaca

SEQ ID NO: 2339646 - RNA, 19 nt, Artificial Sequence
  Description of Artificial Sequence: Synthetic oligonucleotide
  Sense strand starting at position 2089 of SEQ ID NO: 1885404
cugagauguuacucgugac

SEQ ID NO: 2339647 - RNA, 19 nt, Artificial Sequence
  Description of Artificial Sequence: Synthetic oligonucleotide
  Antisense strand to SEQ ID NO: 2339646
gucacgaguaacaucucag

SEQ ID NO: 2339648 - RNA, 19 nt, Artificial Sequence
  Description of Artificial Sequence: Synthetic oligonucleotide
  Sense strand starting at position 2090 of SEQ ID NO: 1885404
ugagauguuacucgugaca

SEQ ID NO: 2339649 - RNA, 19 nt, Artificial Sequence
  Description of Artificial Sequence: Synthetic oligonucleotide
  Antisense strand to SEQ ID NO: 2339648
ugucacgaguaacaucuca

SEQ ID NO: 2339650 - RNA, 19 nt, Artificial Sequence
  Description of Artificial Sequence: Synthetic oligonucleotide
  Sense strand starting at position 2102 of SEQ ID NO: 1885404
cgugacauccuagggagaa

SEQ ID NO: 2339651 - RNA, 19 nt, Artificial Sequence
  Description of Artificial Sequence: Synthetic oligonucleotide
  Antisense strand to SEQ ID NO: 2339650
uucucccuaggaugucacg

SEQ ID NO: 2339652 - RNA, 19 nt, Artificial Sequence
  Description of Artificial Sequence: Synthetic oligonucleotide
  Sense strand starting at position 2103 of SEQ ID NO: 1885404
gugacauccuagggagaaa

SEQ ID NO: 2339653 - RNA, 19 nt, Artificial Sequence
  Description of Artificial Sequence: Synthetic oligonucleotide
  Antisense strand to SEQ ID NO: 2339652
uuucucccuaggaugucac

SEQ ID NO: 2339654 - RNA, 19 nt, Artificial Sequence
  Description of Artificial Sequence: Synthetic oligonucleotide
  Sense strand starting at position 2118 of SEQ ID NO: 1885404
gaaauuacaugggugaugu

SEQ ID NO: 2339655 - RNA, 19 nt, Artificial Sequence
  Description of Artificial Sequence: Synthetic oligonucleotide
  Antisense strand to SEQ ID NO: 2339654
acaucacccauguaauuuc

SEQ ID NO: 2339656 - RNA, 19 nt, Artificial Sequence
  Description of Artificial Sequence: Synthetic oligonucleotide
  Sense strand starting at position 2119 of SEQ ID NO: 1885404
aaauuacaugggugauguu

SEQ ID NO: 2339657 - RNA, 19 nt, Artificial Sequence
  Description of Artificial Sequence: Synthetic oligonucleotide
  Antisense strand to SEQ ID NO: 2339656
aacaucacccauguaauuu

SEQ ID NO: 2339658 - RNA, 19 nt, Artificial Sequence
  Description of Artificial Sequence: Synthetic oligonucleotide
  Sense strand starting at position 2129 of SEQ ID NO: 1885404
ggugauguuauugguaaua

SEQ ID NO: 2339659 - RNA, 19 nt, Artificial Sequence
  Description of Artificial Sequence: Synthetic oligonucleotide
  Antisense strand to SEQ ID NO: 2339658
uauuaccaauaacaucacc

SEQ ID NO: 2339660 - RNA, 19 nt, Artificial Sequence
  Description of Artificial Sequence: Synthetic oligonucleotide
  Sense strand starting at position 2142 of SEQ ID NO: 1885404
guaauaucccaguguacac

SEQ ID NO: 2339661 - RNA, 19 nt, Artificial Sequence
  Description of Artificial Sequence: Synthetic oligonucleotide
  Antisense strand to SEQ ID NO: 2339660
guguacacugggauauuac

SEQ ID NO: 2339662 - RNA, 19 nt, Artificial Sequence
  Description of Artificial Sequence: Synthetic oligonucleotide
  Sense strand starting at position 2255 of SEQ ID NO: 1885404
ggauaucacgaaugauauc

SEQ ID NO: 2339663 - RNA, 19 nt, Artificial Sequence
  Description of Artificial Sequence: Synthetic oligonucleotide
  Antisense strand to SEQ ID NO: 2339662
gauaucauucgugauaucc

SEQ ID NO: 2339664 - RNA, 19 nt, Artificial Sequence
  Description of Artificial Sequence: Synthetic oligonucleotide
  Sense strand starting at position 2316 of SEQ ID NO: 1885404
aguaauaucuucccaggac

SEQ ID NO: 2339665 - RNA, 19 nt, Artificial Sequence
  Description of Artificial Sequence: Synthetic oligonucleotide
  Antisense strand to SEQ ID NO: 2339664
guccugggaagauauuacu

SEQ ID NO: 2339666 - RNA, 19 nt, Artificial Sequence
  Description of Artificial Sequence: Synthetic oligonucleotide
  Sense strand starting at position 2317 of SEQ ID NO: 1885404
guaauaucuucccaggaca

SEQ ID NO: 2339667 - RNA, 19 nt, Artificial Sequence
  Description of Artificial Sequence: Synthetic oligonucleotide
  Antisense strand to SEQ ID NO: 2339666
uguccugggaagauauuac

SEQ ID NO: 2339668 - RNA, 19 nt, Artificial Sequence
  Description of Artificial Sequence: Synthetic oligonucleotide
  Sense strand starting at position 2355 of SEQ ID NO: 1885404
guguacacccaccguaaua

SEQ ID NO: 2339669 - RNA, 19 nt, Artificial Sequence
  Description of Artificial Sequence: Synthetic oligonucleotide
  Antisense strand to SEQ ID NO: 2339668
uauuacgguggguguacac

SEQ ID NO: 2339670 - RNA, 19 nt, Artificial Sequence
  Description of Artificial Sequence: Synthetic oligonucleotide
  Sense strand starting at position 2655 of SEQ ID NO: 1885404
ggagucauaucuccguaau

SEQ ID NO: 2339671 - RNA, 19 nt, Artificial Sequence
  Description of Artificial Sequence: Synthetic oligonucleotide
  Antisense strand to SEQ ID NO: 2339670
auuacggagauaugacucc

SEQ ID NO: 2339672 - RNA, 19 nt, Artificial Sequence
  Description of Artificial Sequence: Synthetic oligonucleotide
  Sense strand starting at position 2656 of SEQ ID NO: 1885404
gagucauaucuccguaaua

SEQ ID NO: 2339673 - RNA, 19 nt, Artificial Sequence
  Description of Artificial Sequence: Synthetic oligonucleotide
  Antisense strand to SEQ ID NO: 2339672
uauuacggagauaugacuc

SEQ ID NO: 2339674 - RNA, 19 nt, Artificial Sequence
  Description of Artificial Sequence: Synthetic oligonucleotide
  Sense strand starting at position 2657 of SEQ ID NO: 1885404
agucauaucuccguaauau

SEQ ID NO: 2339675 - RNA, 19 nt, Artificial Sequence
  Description of Artificial Sequence: Synthetic oligonucleotide
  Antisense strand to SEQ ID NO: 2339674
auauuacggagauaugacu

SEQ ID NO: 2339676 - RNA, 19 nt, Artificial Sequence
  Description of Artificial Sequence: Synthetic oligonucleotide
  Sense strand starting at position 2658 of SEQ ID NO: 1885404
gucauaucuccguaauaua

SEQ ID NO: 2339677 - RNA, 19 nt, Artificial Sequence
  Description of Artificial Sequence: Synthetic oligonucleotide
  Antisense strand to SEQ ID NO: 2339676
uauauuacggagauaugac

SEQ ID NO: 2339678 - RNA, 19 nt, Artificial Sequence
  Description of Artificial Sequence: Synthetic oligonucleotide
  Sense strand starting at position 3108 of SEQ ID NO: 1885404
ucggccaggaguuauauau

SEQ ID NO: 2339679 - RNA, 19 nt, Artificial Sequence
  Description of Artificial Sequence: Synthetic oligonucleotide
  Antisense strand to SEQ ID NO: 2339678
auauauaacuccuggccga

SEQ ID NO: 2339680 - RNA, 19 nt, Artificial Sequence
  Description of Artificial Sequence: Synthetic oligonucleotide
  Sense strand starting at position 3180 of SEQ ID NO: 1885404
aagaaaugaugucaggaaa

SEQ ID NO: 2339681 - RNA, 19 nt, Artificial Sequence
  Description of Artificial Sequence: Synthetic oligonucleotide
  Antisense strand to SEQ ID NO: 2339680
uuuccugacaucauuucuu

SEQ ID NO: 2339682 - RNA, 19 nt, Artificial Sequence
  Description of Artificial Sequence: Synthetic oligonucleotide
  Sense strand starting at position 3192 of SEQ ID NO: 1885404
caggaaaccuaaggaugau

SEQ ID NO: 2339683 - RNA, 19 nt, Artificial Sequence
  Description of Artificial Sequence: Synthetic oligonucleotide
  Antisense strand to SEQ ID NO: 2339682
aucauccuuagguuuccug

SEQ ID NO: 2339684 - RNA, 19 nt, Artificial Sequence
  Description of Artificial Sequence: Synthetic oligonucleotide
  Sense strand starting at position 3394 of SEQ ID NO: 1885404
uuccaauuagacugagauc

SEQ ID NO: 2339685 - RNA, 19 nt, Artificial Sequence
  Description of Artificial Sequence: Synthetic oligonucleotide
  Antisense strand to SEQ ID NO: 2339684
gaucucagucuaauuggaa

SEQ ID NO: 2339686 - RNA, 19 nt, Artificial Sequence
  Description of Artificial Sequence: Synthetic oligonucleotide
  Sense strand starting at position 3590 of SEQ ID NO: 1885404
uguaacaauucugagauuu

SEQ ID NO: 2339687 - RNA, 19 nt, Artificial Sequence
  Description of Artificial Sequence: Synthetic oligonucleotide
  Antisense strand to SEQ ID NO: 2339686
aaaucucagaauuguuaca

SEQ ID NO: 2339688 - RNA, 19 nt, Artificial Sequence
  Description of Artificial Sequence: Synthetic oligonucleotide
  Sense strand starting at position 3647 of SEQ ID NO: 1885404
auggucugcaagugugaaa

SEQ ID NO: 2339689 - RNA, 19 nt, Artificial Sequence
  Description of Artificial Sequence: Synthetic oligonucleotide
  Antisense strand to SEQ ID NO: 2339688
uuucacacuugcagaccau

SEQ ID NO: 2339690 - RNA, 19 nt, Artificial Sequence
  Description of Artificial Sequence: Synthetic oligonucleotide
  Sense strand starting at position 3673 of SEQ ID NO: 1885404
uugugaauugcuugcauuc

SEQ ID NO: 2339691 - RNA, 19 nt, Artificial Sequence
  Description of Artificial Sequence: Synthetic oligonucleotide
  Antisense strand to SEQ ID NO: 2339690
gaaugcaagcaauucacaa

SEQ ID NO: 2339692 - RNA, 19 nt, Artificial Sequence
  Description of Artificial Sequence: Synthetic oligonucleotide
  Sense strand starting at position 3771 of SEQ ID NO: 1885404
gagucucacaggugucuga

SEQ ID NO: 2339693 - RNA, 19 nt, Artificial Sequence
  Description of Artificial Sequence: Synthetic oligonucleotide
  Antisense strand to SEQ ID NO: 2339692
ucagacaccugugagacuc

SEQ ID NO: 2339694 - RNA, 19 nt, Artificial Sequence
  Description of Artificial Sequence: Synthetic oligonucleotide
  Sense strand starting at position 3896 of SEQ ID NO: 1885404
ucaucauccuggcugucaa

SEQ ID NO: 2339695 - RNA, 19 nt, Artificial Sequence
  Description of Artificial Sequence: Synthetic oligonucleotide
  Antisense strand to SEQ ID NO: 2339694
uugacagccaggaugauga

SEQ ID NO: 2339696 - RNA, 19 nt, Artificial Sequence
  Description of Artificial Sequence: Synthetic oligonucleotide
  Sense strand starting at position 33 of SEQ ID NO: 1885405
uguuauuaccuucgaauuu

SEQ ID NO: 2339697 - RNA, 19 nt, Artificial Sequence
  Description of Artificial Sequence: Synthetic oligonucleotide
  Antisense strand to SEQ ID NO: 2339696
aaauucgaagguaauaaca

SEQ ID NO: 2339698 - RNA, 19 nt, Artificial Sequence
  Description of Artificial Sequence: Synthetic oligonucleotide
  Sense strand starting at position 75 of SEQ ID NO: 1885405
accaguuugugaucuagac

SEQ ID NO: 2339699 - RNA, 19 nt, Artificial Sequence
  Description of Artificial Sequence: Synthetic oligonucleotide
  Antisense strand to SEQ ID NO: 2339698
gucuagaucacaaacuggu

SEQ ID NO: 2339700 - RNA, 19 nt, Artificial Sequence
  Description of Artificial Sequence: Synthetic oligonucleotide
  Sense strand starting at position 79 of SEQ ID NO: 1885405
guuugugaucuagacucca

SEQ ID NO: 2339701 - RNA, 19 nt, Artificial Sequence
  Description of Artificial Sequence: Synthetic oligonucleotide
  Antisense strand to SEQ ID NO: 2339700
uggagucuagaucacaaac

SEQ ID NO: 2339702 - RNA, 19 nt, Artificial Sequence
  Description of Artificial Sequence: Synthetic oligonucleotide
  Sense strand starting at position 201 of SEQ ID NO: 1885405
agcgaucugccguuuguga

SEQ ID NO: 2339703 - RNA, 19 nt, Artificial Sequence
  Description of Artificial Sequence: Synthetic oligonucleotide
  Antisense strand to SEQ ID NO: 2339702
ucacaaacggcagaucgcu

SEQ ID NO: 2339704 - RNA, 19 nt, Artificial Sequence
  Description of Artificial Sequence: Synthetic oligonucleotide
  Sense strand starting at position 202 of SEQ ID NO: 1885405
gcgaucugccguuugugaa

SEQ ID NO: 2339705 - RNA, 19 nt, Artificial Sequence
  Description of Artificial Sequence: Synthetic oligonucleotide
  Antisense strand to SEQ ID NO: 2339704
uucacaaacggcagaucgc

SEQ ID NO: 2339706 - RNA, 19 nt, Artificial Sequence
  Description of Artificial Sequence: Synthetic oligonucleotide
  Sense strand starting at position 297 of SEQ ID NO: 1885405
aggguauuagcgcaaacau

SEQ ID NO: 2339707 - RNA, 19 nt, Artificial Sequence
  Description of Artificial Sequence: Synthetic oligonucleotide
  Antisense strand to SEQ ID NO: 2339706
auguuugcgcuaauacccu

SEQ ID NO: 2339708 - RNA, 19 nt, Artificial Sequence
  Description of Artificial Sequence: Synthetic oligonucleotide
  Sense strand starting at position 431 of SEQ ID NO: 1885405
uuauaaaggucuuccagug

SEQ ID NO: 2339709 - RNA, 19 nt, Artificial Sequence
  Description of Artificial Sequence: Synthetic oligonucleotide
  Antisense strand to SEQ ID NO: 2339708
cacuggaagaccuuuauaa

SEQ ID NO: 2339710 - RNA, 19 nt, Artificial Sequence
  Description of Artificial Sequence: Synthetic oligonucleotide
  Sense strand starting at position 602 of SEQ ID NO: 1885405
agagguuagcguaaucggu

SEQ ID NO: 2339711 - RNA, 19 nt, Artificial Sequence
  Description of Artificial Sequence: Synthetic oligonucleotide
  Antisense strand to SEQ ID NO: 2339710
accgauuacgcuaaccucu

SEQ ID NO: 2339712 - RNA, 19 nt, Artificial Sequence
  Description of Artificial Sequence: Synthetic oligonucleotide
  Sense strand starting at position 608 of SEQ ID NO: 1885405
uagcguaaucgguccagua

SEQ ID NO: 2339713 - RNA, 19 nt, Artificial Sequence
  Description of Artificial Sequence: Synthetic oligonucleotide
  Antisense strand to SEQ ID NO: 2339712
uacuggaccgauuacgcua

SEQ ID NO: 2339714 - RNA, 19 nt, Artificial Sequence
  Description of Artificial Sequence: Synthetic oligonucleotide
  Sense strand starting at position 767 of SEQ ID NO: 1885405
ccguuuaccuugucaauuu

SEQ ID NO: 2339715 - RNA, 19 nt, Artificial Sequence
  Description of Artificial Sequence: Synthetic oligonucleotide
  Antisense strand to SEQ ID NO: 2339714
aaauugacaagguaaacgg

SEQ ID NO: 2339716 - RNA, 19 nt, Artificial Sequence
  Description of Artificial Sequence: Synthetic oligonucleotide
  Sense strand starting at position 880 of SEQ ID NO: 1885405
gccagauccgcguccggaa

SEQ ID NO: 2339717 - RNA, 19 nt, Artificial Sequence
  Description of Artificial Sequence: Synthetic oligonucleotide
  Antisense strand to SEQ ID NO: 2339716
uuccggacgcggaucuggc

SEQ ID NO: 2339718 - RNA, 19 nt, Artificial Sequence
  Description of Artificial Sequence: Synthetic oligonucleotide
  Sense strand starting at position 2412 of SEQ ID NO: 1885405
cguggaguagguugaaaga

SEQ ID NO: 2339719 - RNA, 19 nt, Artificial Sequence
  Description of Artificial Sequence: Synthetic oligonucleotide
  Antisense strand to SEQ ID NO: 2339718
ucuuucaaccuacuccacg

SEQ ID NO: 2339720 - RNA, 19 nt, Artificial Sequence
  Description of Artificial Sequence: Synthetic oligonucleotide
  Sense strand starting at position 2477 of SEQ ID NO: 1885405
aggaaaugcuuucuaagga

SEQ ID NO: 2339721 - RNA, 19 nt, Artificial Sequence
  Description of Artificial Sequence: Synthetic oligonucleotide
  Antisense strand to SEQ ID NO: 2339720
uccuuagaaagcauuuccu

SEQ ID NO: 2339722 - RNA, 19 nt, Artificial Sequence
  Description of Artificial Sequence: Synthetic oligonucleotide
  Sense strand starting at position 2506 of SEQ ID NO: 1885405
gcggacugucgcguucaaa

SEQ ID NO: 2339723 - RNA, 19 nt, Artificial Sequence
  Description of Artificial Sequence: Synthetic oligonucleotide
  Antisense strand to SEQ ID NO: 2339722
uuugaacgcgacaguccgc

SEQ ID NO: 2339724 - RNA, 19 nt, Artificial Sequence
  Description of Artificial Sequence: Synthetic oligonucleotide
  Sense strand starting at position 2507 of SEQ ID NO: 1885405
cggacugucgcguucaaag

SEQ ID NO: 2339725 - RNA, 19 nt, Artificial Sequence
  Description of Artificial Sequence: Synthetic oligonucleotide
  Antisense strand to SEQ ID NO: 2339724
cuuugaacgcgacaguccg

SEQ ID NO: 2339726 - RNA, 19 nt, Artificial Sequence
  Description of Artificial Sequence: Synthetic oligonucleotide
  Sense strand starting at position 2531 of SEQ ID NO: 1885405
ucagguuuaaucgagaguu

SEQ ID NO: 2339727 - RNA, 19 nt, Artificial Sequence
  Description of Artificial Sequence: Synthetic oligonucleotide
  Antisense strand to SEQ ID NO: 2339726
aacucucgauuaaaccuga

SEQ ID NO: 2339728 - RNA, 19 nt, Artificial Sequence
  Description of Artificial Sequence: Synthetic oligonucleotide
  Sense strand starting at position 2533 of SEQ ID NO: 1885405
agguuuaaucgagaguuua

SEQ ID NO: 2339729 - RNA, 19 nt, Artificial Sequence
  Description of Artificial Sequence: Synthetic oligonucleotide
  Antisense strand to SEQ ID NO: 2339728
uaaacucucgauuaaaccu

SEQ ID NO: 2339730 - RNA, 19 nt, Artificial Sequence
  Description of Artificial Sequence: Synthetic oligonucleotide
  Sense strand starting at position 2578 of SEQ ID NO: 1885405
ucaucugaguuucccugaa

SEQ ID NO: 2339731 - RNA, 19 nt, Artificial Sequence
  Description of Artificial Sequence: Synthetic oligonucleotide
  Antisense strand to SEQ ID NO: 2339730
uucagggaaacucagauga

SEQ ID NO: 2339732 - RNA, 19 nt, Artificial Sequence
  Description of Artificial Sequence: Synthetic oligonucleotide
  Sense strand starting at position 2580 of SEQ ID NO: 1885405
aucugaguuucccugaaag

SEQ ID NO: 2339733 - RNA, 19 nt, Artificial Sequence
  Description of Artificial Sequence: Synthetic oligonucleotide
  Antisense strand to SEQ ID NO: 2339732
cuuucagggaaacucagau

SEQ ID NO: 2339734 - RNA, 19 nt, Artificial Sequence
  Description of Artificial Sequence: Synthetic oligonucleotide
  Sense strand starting at position 2582 of SEQ ID NO: 1885405
cugaguuucccugaaagcu

SEQ ID NO: 2339735 - RNA, 19 nt, Artificial Sequence
  Description of Artificial Sequence: Synthetic oligonucleotide
  Antisense strand to SEQ ID NO: 2339734
agcuuucagggaaacucag

SEQ ID NO: 2339736 - RNA, 19 nt, Artificial Sequence
  Description of Artificial Sequence: Synthetic oligonucleotide
  Sense strand starting at position 2625 of SEQ ID NO: 1885405
gggauccugucuucuauag

SEQ ID NO: 2339737 - RNA, 19 nt, Artificial Sequence
  Description of Artificial Sequence: Synthetic oligonucleotide
  Antisense strand to SEQ ID NO: 2339736
cuauagaagacaggauccc

SEQ ID NO: 2339738 - RNA, 19 nt, Artificial Sequence
  Description of Artificial Sequence: Synthetic oligonucleotide
  Sense strand starting at position 2961 of SEQ ID NO: 1885405
gauaguagucucguugugu

SEQ ID NO: 2339739 - RNA, 19 nt, Artificial Sequence
  Description of Artificial Sequence: Synthetic oligonucleotide
  Antisense strand to SEQ ID NO: 2339738
acacaacgagacuacuauc

SEQ ID NO: 2339740 - RNA, 19 nt, Artificial Sequence
  Description of Artificial Sequence: Synthetic oligonucleotide
  Sense strand starting at position 3044 of SEQ ID NO: 1885405
guuaucuauugaccugaag

SEQ ID NO: 2339741 - RNA, 19 nt, Artificial Sequence
  Description of Artificial Sequence: Synthetic oligonucleotide
  Antisense strand to SEQ ID NO: 2339740
cuucaggucaauagauaac

SEQ ID NO: 2339742 - RNA, 19 nt, Artificial Sequence
  Description of Artificial Sequence: Synthetic oligonucleotide
  Sense strand starting at position 3047 of SEQ ID NO: 1885405
aucuauugaccugaagcuu

SEQ ID NO: 2339743 - RNA, 19 nt, Artificial Sequence
  Description of Artificial Sequence: Synthetic oligonucleotide
  Antisense strand to SEQ ID NO: 2339742
aagcuucaggucaauagau

SEQ ID NO: 2339744 - RNA, 19 nt, Artificial Sequence
  Description of Artificial Sequence: Synthetic oligonucleotide
  Sense strand starting at position 3073 of SEQ ID NO: 1885405
guuaguggaguuuacaauu

SEQ ID NO: 2339745 - RNA, 19 nt, Artificial Sequence
  Description of Artificial Sequence: Synthetic oligonucleotide
  Antisense strand to SEQ ID NO: 2339744
aauuguaaacuccacuaac

SEQ ID NO: 2339746 - RNA, 19 nt, Artificial Sequence
  Description of Artificial Sequence: Synthetic oligonucleotide
  Sense strand starting at position 3079 of SEQ ID NO: 1885405
ggaguuuacaauugaaugu

SEQ ID NO: 2339747 - RNA, 19 nt, Artificial Sequence
  Description of Artificial Sequence: Synthetic oligonucleotide
  Antisense strand to SEQ ID NO: 2339746
acauucaauuguaaacucc

SEQ ID NO: 2339748 - RNA, 19 nt, Artificial Sequence
  Description of Artificial Sequence: Synthetic oligonucleotide
  Sense strand starting at position 3115 of SEQ ID NO: 1885405
gaauguugccuuuacgaau

SEQ ID NO: 2339749 - RNA, 19 nt, Artificial Sequence
  Description of Artificial Sequence: Synthetic oligonucleotide
  Antisense strand to SEQ ID NO: 2339748
auucguaaaggcaacauuc

SEQ ID NO: 2339750 - RNA, 19 nt, Artificial Sequence
  Description of Artificial Sequence: Synthetic oligonucleotide
  Sense strand starting at position 3197 of SEQ ID NO: 1885405
gaguccuacuuucuuggga

SEQ ID NO: 2339751 - RNA, 19 nt, Artificial Sequence
  Description of Artificial Sequence: Synthetic oligonucleotide
  Antisense strand to SEQ ID NO: 2339750
ucccaagaaaguaggacuc

SEQ ID NO: 2339752 - RNA, 19 nt, Artificial Sequence
  Description of Artificial Sequence: Synthetic oligonucleotide
  Sense strand starting at position 3198 of SEQ ID NO: 1885405
aguccuacuuucuugggaa

SEQ ID NO: 2339753 - RNA, 19 nt, Artificial Sequence
  Description of Artificial Sequence: Synthetic oligonucleotide
  Antisense strand to SEQ ID NO: 2339752
uucccaagaaaguaggacu

SEQ ID NO: 2339754 - RNA, 19 nt, Artificial Sequence
  Description of Artificial Sequence: Synthetic oligonucleotide
  Sense strand starting at position 3200 of SEQ ID NO: 1885405
uccuacuuucuugggaauu

SEQ ID NO: 2339755 - RNA, 19 nt, Artificial Sequence
  Description of Artificial Sequence: Synthetic oligonucleotide
  Antisense strand to SEQ ID NO: 2339754
aauucccaagaaaguagga

SEQ ID NO: 2339756 - RNA, 19 nt, Artificial Sequence
  Description of Artificial Sequence: Synthetic oligonucleotide
  Sense strand starting at position 3259 of SEQ ID NO: 1885405
auuuguacaugagaacauu

SEQ ID NO: 2339757 - RNA, 19 nt, Artificial Sequence
  Description of Artificial Sequence: Synthetic oligonucleotide
  Antisense strand to SEQ ID NO: 2339756
aauguucucauguacaaau

SEQ ID NO: 2339758 - RNA, 19 nt, Artificial Sequence
  Description of Artificial Sequence: Synthetic oligonucleotide
  Sense strand starting at position 3328 of SEQ ID NO: 1885405
uuaauuggucuaugaggau

SEQ ID NO: 2339759 - RNA, 19 nt, Artificial Sequence
  Description of Artificial Sequence: Synthetic oligonucleotide
  Antisense strand to SEQ ID NO: 2339758
auccucauagaccaauuaa

SEQ ID NO: 2339760 - RNA, 19 nt, Artificial Sequence
  Description of Artificial Sequence: Synthetic oligonucleotide
  Sense strand starting at position 3509 of SEQ ID NO: 1885405
aguguuguucuguucuguu

SEQ ID NO: 2339761 - RNA, 19 nt, Artificial Sequence
  Description of Artificial Sequence: Synthetic oligonucleotide
  Antisense strand to SEQ ID NO: 2339760
aacagaacagaacaacacu

SEQ ID NO: 2339762 - RNA, 19 nt, Artificial Sequence
  Description of Artificial Sequence: Synthetic oligonucleotide
  Sense strand starting at position 3567 of SEQ ID NO: 1885405
aguguuucauuuguuguga

SEQ ID NO: 2339763 - RNA, 19 nt, Artificial Sequence
  Description of Artificial Sequence: Synthetic oligonucleotide
  Antisense strand to SEQ ID NO: 2339762
ucacaacaaaugaaacacu

SEQ ID NO: 2339764 - RNA, 19 nt, Artificial Sequence
  Description of Artificial Sequence: Synthetic oligonucleotide
  Sense strand starting at position 3568 of SEQ ID NO: 1885405
guguuucauuuguugugau

SEQ ID NO: 2339765 - RNA, 19 nt, Artificial Sequence
  Description of Artificial Sequence: Synthetic oligonucleotide
  Antisense strand to SEQ ID NO: 2339764
aucacaacaaaugaaacac

SEQ ID NO: 2339766 - RNA, 19 nt, Artificial Sequence
  Description of Artificial Sequence: Synthetic oligonucleotide
  Sense strand starting at position 3581 of SEQ ID NO: 1885405
ugugaugggcuugacuuua

SEQ ID NO: 2339767 - RNA, 19 nt, Artificial Sequence
  Description of Artificial Sequence: Synthetic oligonucleotide
  Antisense strand to SEQ ID NO: 2339766
uaaagucaagcccaucaca

SEQ ID NO: 2339768 - RNA, 19 nt, Artificial Sequence
  Description of Artificial Sequence: Synthetic oligonucleotide
  Sense strand starting at position 3674 of SEQ ID NO: 1885405
ugguuacuuauggguggaa

SEQ ID NO: 2339769 - RNA, 19 nt, Artificial Sequence
  Description of Artificial Sequence: Synthetic oligonucleotide
  Antisense strand to SEQ ID NO: 2339768
uuccacccauaaguaacca

SEQ ID NO: 2339770 - RNA, 19 nt, Artificial Sequence
  Description of Artificial Sequence: Synthetic oligonucleotide
  Sense strand starting at position 3675 of SEQ ID NO: 1885405
gguuacuuauggguggaau

SEQ ID NO: 2339771 - RNA, 19 nt, Artificial Sequence
  Description of Artificial Sequence: Synthetic oligonucleotide
  Antisense strand to SEQ ID NO: 2339770
auuccacccauaaguaacc

SEQ ID NO: 2339772 - RNA, 19 nt, Artificial Sequence
  Description of Artificial Sequence: Synthetic oligonucleotide
  Sense strand starting at position 3676 of SEQ ID NO: 1885405
guuacuuauggguggaauu

SEQ ID NO: 2339773 - RNA, 19 nt, Artificial Sequence
  Description of Artificial Sequence: Synthetic oligonucleotide
  Antisense strand to SEQ ID NO: 2339772
aauuccacccauaaguaac

SEQ ID NO: 2339774 - RNA, 19 nt, Artificial Sequence
  Description of Artificial Sequence: Synthetic oligonucleotide
  Sense strand starting at position 3773 of SEQ ID NO: 1885405
uuugauuaguaaccaauga

SEQ ID NO: 2339775 - RNA, 19 nt, Artificial Sequence
  Description of Artificial Sequence: Synthetic oligonucleotide
  Antisense strand to SEQ ID NO: 2339774
ucauugguuacuaaucaaa

SEQ ID NO: 2339776 - RNA, 19 nt, Artificial Sequence
  Description of Artificial Sequence: Synthetic oligonucleotide
  Sense strand starting at position 105 of SEQ ID NO: 1885406
gguaaagcccuuuauauac

SEQ ID NO: 2339777 - RNA, 19 nt, Artificial Sequence
  Description of Artificial Sequence: Synthetic oligonucleotide
  Antisense strand to SEQ ID NO: 2339776
guauauaaagggcuuuacc

SEQ ID NO: 2339778 - RNA, 19 nt, Artificial Sequence
  Description of Artificial Sequence: Synthetic oligonucleotide
  Sense strand starting at position 219 of SEQ ID NO: 1885406
agggaugccuaaucuugua

SEQ ID NO: 2339779 - RNA, 19 nt, Artificial Sequence
  Description of Artificial Sequence: Synthetic oligonucleotide
  Antisense strand to SEQ ID NO: 2339778
uacaagauuaggcaucccu

SEQ ID NO: 2339780 - RNA, 19 nt, Artificial Sequence
  Description of Artificial Sequence: Synthetic oligonucleotide
  Sense strand starting at position 231 of SEQ ID NO: 1885406
ucuuguaaugagggaauca

SEQ ID NO: 2339781 - RNA, 19 nt, Artificial Sequence
  Description of Artificial Sequence: Synthetic oligonucleotide
  Antisense strand to SEQ ID NO: 2339780
ugauucccucauuacaaga

SEQ ID NO: 2339782 - RNA, 19 nt, Artificial Sequence
  Description of Artificial Sequence: Synthetic oligonucleotide
  Sense strand starting at position 370 of SEQ ID NO: 1885406
gucagaaaucuacggauac

SEQ ID NO: 2339783 - RNA, 19 nt, Artificial Sequence
  Description of Artificial Sequence: Synthetic oligonucleotide
  Antisense strand to SEQ ID NO: 2339782
guauccguagauuucugac

SEQ ID NO: 2339784 - RNA, 19 nt, Artificial Sequence
  Description of Artificial Sequence: Synthetic oligonucleotide
  Sense strand starting at position 392 of SEQ ID NO: 1885406
cugacucucccagaaugua

SEQ ID NO: 2339785 - RNA, 19 nt, Artificial Sequence
  Description of Artificial Sequence: Synthetic oligonucleotide
  Antisense strand to SEQ ID NO: 2339784
uacauucugggagagucag

SEQ ID NO: 2339786 - RNA, 19 nt, Artificial Sequence
  Description of Artificial Sequence: Synthetic oligonucleotide
  Sense strand starting at position 454 of SEQ ID NO: 1885406
uacagucauuuagcacgua

SEQ ID NO: 2339787 - RNA, 19 nt, Artificial Sequence
  Description of Artificial Sequence: Synthetic oligonucleotide
  Antisense strand to SEQ ID NO: 2339786
uacgugcuaaaugacugua

SEQ ID NO: 2339788 - RNA, 19 nt, Artificial Sequence
  Description of Artificial Sequence: Synthetic oligonucleotide
  Sense strand starting at position 468 of SEQ ID NO: 1885406
acguauuugguauguuaca

SEQ ID NO: 2339789 - RNA, 19 nt, Artificial Sequence
  Description of Artificial Sequence: Synthetic oligonucleotide
  Antisense strand to SEQ ID NO: 2339788
uguaacauaccaaauacgu

SEQ ID NO: 2339790 - RNA, 19 nt, Artificial Sequence
  Description of Artificial Sequence: Synthetic oligonucleotide
  Sense strand starting at position 469 of SEQ ID NO: 1885406
cguauuugguauguuacau

SEQ ID NO: 2339791 - RNA, 19 nt, Artificial Sequence
  Description of Artificial Sequence: Synthetic oligonucleotide
  Antisense strand to SEQ ID NO: 2339790
auguaacauaccaaauacg

SEQ ID NO: 2339792 - RNA, 19 nt, Artificial Sequence
  Description of Artificial Sequence: Synthetic oligonucleotide
  Sense strand starting at position 499 of SEQ ID NO: 1885406
guauuccugcaauaaagua

SEQ ID NO: 2339793 - RNA, 19 nt, Artificial Sequence
  Description of Artificial Sequence: Synthetic oligonucleotide
  Antisense strand to SEQ ID NO: 2339792
uacuuuauugcaggaauac

SEQ ID NO: 2339794 - RNA, 19 nt, Artificial Sequence
  Description of Artificial Sequence: Synthetic oligonucleotide
  Sense strand starting at position 848 of SEQ ID NO: 1885406
cugguuuggcuccacugau

SEQ ID NO: 2339795 - RNA, 19 nt, Artificial Sequence
  Description of Artificial Sequence: Synthetic oligonucleotide
  Antisense strand to SEQ ID NO: 2339794
aucaguggagccaaaccag

SEQ ID NO: 2339796 - RNA, 19 nt, Artificial Sequence
  Description of Artificial Sequence: Synthetic oligonucleotide
  Sense strand starting at position 953 of SEQ ID NO: 1885406
cuugauuccugacucagga

SEQ ID NO: 2339797 - RNA, 19 nt, Artificial Sequence
  Description of Artificial Sequence: Synthetic oligonucleotide
  Antisense strand to SEQ ID NO: 2339796
uccugagucaggaaucaag

SEQ ID NO: 2339798 - RNA, 19 nt, Artificial Sequence
  Description of Artificial Sequence: Synthetic oligonucleotide
  Sense strand starting at position 1095 of SEQ ID NO: 1885406
uugacucuuugauauuuga

SEQ ID NO: 2339799 - RNA, 19 nt, Artificial Sequence
  Description of Artificial Sequence: Synthetic oligonucleotide
  Antisense strand to SEQ ID NO: 2339798
ucaaauaucaaagagucaa

SEQ ID NO: 2339800 - RNA, 19 nt, Artificial Sequence
  Description of Artificial Sequence: Synthetic oligonucleotide
  Sense strand starting at position 1260 of SEQ ID NO: 1885406
uacuguguuuccuugaaag

SEQ ID NO: 2339801 - RNA, 19 nt, Artificial Sequence
  Description of Artificial Sequence: Synthetic oligonucleotide
  Antisense strand to SEQ ID NO: 2339800
cuuucaaggaaacacagua

SEQ ID NO: 2339802 - RNA, 19 nt, Artificial Sequence
  Description of Artificial Sequence: Synthetic oligonucleotide
  Sense strand starting at position 1262 of SEQ ID NO: 1885406
cuguguuuccuugaaagau

SEQ ID NO: 2339803 - RNA, 19 nt, Artificial Sequence
  Description of Artificial Sequence: Synthetic oligonucleotide
  Antisense strand to SEQ ID NO: 2339802
aucuuucaaggaaacacag

SEQ ID NO: 2339804 - RNA, 19 nt, Artificial Sequence
  Description of Artificial Sequence: Synthetic oligonucleotide
  Sense strand starting at position 1383 of SEQ ID NO: 1885406
agggacuccugugucuuaa

SEQ ID NO: 2339805 - RNA, 19 nt, Artificial Sequence
  Description of Artificial Sequence: Synthetic oligonucleotide
  Antisense strand to SEQ ID NO: 2339804
uuaagacacaggagucccu

SEQ ID NO: 2339806 - RNA, 19 nt, Artificial Sequence
  Description of Artificial Sequence: Synthetic oligonucleotide
  Sense strand starting at position 1385 of SEQ ID NO: 1885406
ggacuccugugucuuaaga

SEQ ID NO: 2339807 - RNA, 19 nt, Artificial Sequence
  Description of Artificial Sequence: Synthetic oligonucleotide
  Antisense strand to SEQ ID NO: 2339806
ucuuaagacacaggagucc

SEQ ID NO: 2339808 - RNA, 19 nt, Artificial Sequence
  Description of Artificial Sequence: Synthetic oligonucleotide
  Sense strand starting at position 1442 of SEQ ID NO: 1885406
aaaggcugacagugguaua

SEQ ID NO: 2339809 - RNA, 19 nt, Artificial Sequence
  Description of Artificial Sequence: Synthetic oligonucleotide
  Antisense strand to SEQ ID NO: 2339808
uauaccacugucagccuuu

SEQ ID NO: 2339810 - RNA, 19 nt, Artificial Sequence
  Description of Artificial Sequence: Synthetic oligonucleotide
  Sense strand starting at position 1554 of SEQ ID NO: 1885406
ggauaaaggacgugacuuc

SEQ ID NO: 2339811 - RNA, 19 nt, Artificial Sequence
  Description of Artificial Sequence: Synthetic oligonucleotide
  Antisense strand to SEQ ID NO: 2339810
gaagucacguccuuuaucc

SEQ ID NO: 2339812 - RNA, 19 nt, Artificial Sequence
  Description of Artificial Sequence: Synthetic oligonucleotide
  Sense strand starting at position 1655 of SEQ ID NO: 1885406
agcagauccugagcuacaa

SEQ ID NO: 2339813 - RNA, 19 nt, Artificial Sequence
  Description of Artificial Sequence: Synthetic oligonucleotide
  Antisense strand to SEQ ID NO: 2339812
uuguagcucaggaucugcu

SEQ ID NO: 2339814 - RNA, 19 nt, Artificial Sequence
  Description of Artificial Sequence: Synthetic oligonucleotide
  Sense strand starting at position 1707 of SEQ ID NO: 1885406
gcgcacugaguuucugagu

SEQ ID NO: 2339815 - RNA, 19 nt, Artificial Sequence
  Description of Artificial Sequence: Synthetic oligonucleotide
  Antisense strand to SEQ ID NO: 2339814
acucagaaacucagugcgc

SEQ ID NO: 2339816 - RNA, 19 nt, Artificial Sequence
  Description of Artificial Sequence: Synthetic oligonucleotide
  Sense strand starting at position 1712 of SEQ ID NO: 1885406
cugaguuucugaguaucag

SEQ ID NO: 2339817 - RNA, 19 nt, Artificial Sequence
  Description of Artificial Sequence: Synthetic oligonucleotide
  Antisense strand to SEQ ID NO: 2339816
cugauacucagaaacucag

SEQ ID NO: 2339818 - RNA, 19 nt, Artificial Sequence
  Description of Artificial Sequence: Synthetic oligonucleotide
  Sense strand starting at position 1713 of SEQ ID NO: 1885406
ugaguuucugaguaucaga

SEQ ID NO: 2339819 - RNA, 19 nt, Artificial Sequence
  Description of Artificial Sequence: Synthetic oligonucleotide
  Antisense strand to SEQ ID NO: 2339818
ucugauacucagaaacuca

SEQ ID NO: 2339820 - RNA, 19 nt, Artificial Sequence
  Description of Artificial Sequence: Synthetic oligonucleotide
  Sense strand starting at position 1724 of SEQ ID NO: 1885406
guaucagaaagucagguuu

SEQ ID NO: 2339821 - RNA, 19 nt, Artificial Sequence
  Description of Artificial Sequence: Synthetic oligonucleotide
  Antisense strand to SEQ ID NO: 2339820
aaaccugacuuucugauac

SEQ ID NO: 2339822 - RNA, 19 nt, Artificial Sequence
  Description of Artificial Sequence: Synthetic oligonucleotide
  Sense strand starting at position 1739 of SEQ ID NO: 1885406
guuucugaaucccuagaga

SEQ ID NO: 2339823 - RNA, 19 nt, Artificial Sequence
  Description of Artificial Sequence: Synthetic oligonucleotide
  Antisense strand to SEQ ID NO: 2339822
ucucuagggauucagaaac

SEQ ID NO: 2339824 - RNA, 19 nt, Artificial Sequence
  Description of Artificial Sequence: Synthetic oligonucleotide
  Sense strand starting at position 1860 of SEQ ID NO: 1885406
ggaaguguacuguacagua

SEQ ID NO: 2339825 - RNA, 19 nt, Artificial Sequence
  Description of Artificial Sequence: Synthetic oligonucleotide
  Antisense strand to SEQ ID NO: 2339824
uacuguacaguacacuucc

SEQ ID NO: 2339826 - RNA, 19 nt, Artificial Sequence
  Description of Artificial Sequence: Synthetic oligonucleotide
  Sense strand starting at position 2089 of SEQ ID NO: 1885406
gaagauugauucuuacugu

SEQ ID NO: 2339827 - RNA, 19 nt, Artificial Sequence
  Description of Artificial Sequence: Synthetic oligonucleotide
  Antisense strand to SEQ ID NO: 2339826
acaguaagaaucaaucuuc

SEQ ID NO: 2339828 - RNA, 19 nt, Artificial Sequence
  Description of Artificial Sequence: Synthetic oligonucleotide
  Sense strand starting at position 2092 of SEQ ID NO: 1885406
gauugauucuuacuguaga

SEQ ID NO: 2339829 - RNA, 19 nt, Artificial Sequence
  Description of Artificial Sequence: Synthetic oligonucleotide
  Antisense strand to SEQ ID NO: 2339828
ucuacaguaagaaucaauc

SEQ ID NO: 2339830 - RNA, 19 nt, Artificial Sequence
  Description of Artificial Sequence: Synthetic oligonucleotide
  Sense strand starting at position 2095 of SEQ ID NO: 1885406
ugauucuuacuguagaucu

SEQ ID NO: 2339831 - RNA, 19 nt, Artificial Sequence
  Description of Artificial Sequence: Synthetic oligonucleotide
  Antisense strand to SEQ ID NO: 2339830
agaucuacaguaagaauca

SEQ ID NO: 2339832 - RNA, 19 nt, Artificial Sequence
  Description of Artificial Sequence: Synthetic oligonucleotide
  Sense strand starting at position 2199 of SEQ ID NO: 1885406
ccagauugccagcaucaua

SEQ ID NO: 2339833 - RNA, 19 nt, Artificial Sequence
  Description of Artificial Sequence: Synthetic oligonucleotide
  Antisense strand to SEQ ID NO: 2339832
uaugaugcuggcaaucugg

SEQ ID NO: 2339834 - RNA, 19 nt, Artificial Sequence
  Description of Artificial Sequence: Synthetic oligonucleotide
  Sense strand starting at position 2774 of SEQ ID NO: 1885406
uccauauaauguuucugga

SEQ ID NO: 2339835 - RNA, 19 nt, Artificial Sequence
  Description of Artificial Sequence: Synthetic oligonucleotide
  Antisense strand to SEQ ID NO: 2339834
uccagaaacauuauaugga

SEQ ID NO: 2339836 - RNA, 19 nt, Artificial Sequence
  Description of Artificial Sequence: Synthetic oligonucleotide
  Sense strand starting at position 3035 of SEQ ID NO: 1885406
auaugauugauguguauug

SEQ ID NO: 2339837 - RNA, 19 nt, Artificial Sequence
  Description of Artificial Sequence: Synthetic oligonucleotide
  Antisense strand to SEQ ID NO: 2339836
caauacacaucaaucauau

SEQ ID NO: 2339838 - RNA, 19 nt, Artificial Sequence
  Description of Artificial Sequence: Synthetic oligonucleotide
  Sense strand starting at position 3036 of SEQ ID NO: 1885406
uaugauugauguguauuga

SEQ ID NO: 2339839 - RNA, 19 nt, Artificial Sequence
  Description of Artificial Sequence: Synthetic oligonucleotide
  Antisense strand to SEQ ID NO: 2339838
ucaauacacaucaaucaua

SEQ ID NO: 2339840 - RNA, 19 nt, Artificial Sequence
  Description of Artificial Sequence: Synthetic oligonucleotide
  Sense strand starting at position 3037 of SEQ ID NO: 1885406
augauugauguguauugau

SEQ ID NO: 2339841 - RNA, 19 nt, Artificial Sequence
  Description of Artificial Sequence: Synthetic oligonucleotide
  Antisense strand to SEQ ID NO: 2339840
aucaauacacaucaaucau

SEQ ID NO: 2339842 - RNA, 19 nt, Artificial Sequence
  Description of Artificial Sequence: Synthetic oligonucleotide
  Sense strand starting at position 3130 of SEQ ID NO: 1885406
gacagcuugucaguuagga

SEQ ID NO: 2339843 - RNA, 19 nt, Artificial Sequence
  Description of Artificial Sequence: Synthetic oligonucleotide
  Antisense strand to SEQ ID NO: 2339842
uccuaacugacaagcuguc

SEQ ID NO: 2339844 - RNA, 19 nt, Artificial Sequence
  Description of Artificial Sequence: Synthetic oligonucleotide
  Sense strand starting at position 3285 of SEQ ID NO: 1885406
gagagaauuuguugauugg

SEQ ID NO: 2339845 - RNA, 19 nt, Artificial Sequence
  Description of Artificial Sequence: Synthetic oligonucleotide
  Antisense strand to SEQ ID NO: 2339844
ccaaucaacaaauucucuc

SEQ ID NO: 2339846 - RNA, 19 nt, Artificial Sequence
  Description of Artificial Sequence: Synthetic oligonucleotide
  Sense strand starting at position 3294 of SEQ ID NO: 1885406
uguugauuggaaugacuca

SEQ ID NO: 2339847 - RNA, 19 nt, Artificial Sequence
  Description of Artificial Sequence: Synthetic oligonucleotide
  Antisense strand to SEQ ID NO: 2339846
ugagucauuccaaucaaca

SEQ ID NO: 2339848 - RNA, 19 nt, Artificial Sequence
  Description of Artificial Sequence: Synthetic oligonucleotide
  Sense strand starting at position 3416 of SEQ ID NO: 1885406
agugaaaugccugagugug

SEQ ID NO: 2339849 - RNA, 19 nt, Artificial Sequence
  Description of Artificial Sequence: Synthetic oligonucleotide
  Antisense strand to SEQ ID NO: 2339848
cacacucaggcauuucacu

SEQ ID NO: 2339850 - RNA, 19 nt, Artificial Sequence
  Description of Artificial Sequence: Synthetic oligonucleotide
  Sense strand starting at position 3418 of SEQ ID NO: 1885406
ugaaaugccugagugugau

SEQ ID NO: 2339851 - RNA, 19 nt, Artificial Sequence
  Description of Artificial Sequence: Synthetic oligonucleotide
  Antisense strand to SEQ ID NO: 2339850
aucacacucaggcauuuca

SEQ ID NO: 2339852 - RNA, 19 nt, Artificial Sequence
  Description of Artificial Sequence: Synthetic oligonucleotide
  Sense strand starting at position 3895 of SEQ ID NO: 1885406
agugaaggugcauacuauu

SEQ ID NO: 2339853 - RNA, 19 nt, Artificial Sequence
  Description of Artificial Sequence: Synthetic oligonucleotide
  Antisense strand to SEQ ID NO: 2339852
aauaguaugcaccuucacu

SEQ ID NO: 2339854 - RNA, 19 nt, Artificial Sequence
  Description of Artificial Sequence: Synthetic oligonucleotide
  Sense strand starting at position 3919 of SEQ ID NO: 1885406
agcuguauuccuuagauac

SEQ ID NO: 2339855 - RNA, 19 nt, Artificial Sequence
  Description of Artificial Sequence: Synthetic oligonucleotide
  Antisense strand to SEQ ID NO: 2339854
guaucuaaggaauacagcu

SEQ ID NO: 2339856 - RNA, 19 nt, Artificial Sequence
  Description of Artificial Sequence: Synthetic oligonucleotide
  Sense strand starting at position 102 of SEQ ID NO: 1885407
gccuccaugcuauaaagau

SEQ ID NO: 2339857 - RNA, 19 nt, Artificial Sequence
  Description of Artificial Sequence: Synthetic oligonucleotide
  Antisense strand to SEQ ID NO: 2339856
aucuuuauagcauggaggc

SEQ ID NO: 2339858 - RNA, 19 nt, Artificial Sequence
  Description of Artificial Sequence: Synthetic oligonucleotide
  Sense strand starting at position 219 of SEQ ID NO: 1885407
guagcauuuacagguugua

SEQ ID NO: 2339859 - RNA, 19 nt, Artificial Sequence
  Description of Artificial Sequence: Synthetic oligonucleotide
  Antisense strand to SEQ ID NO: 2339858
uacaaccuguaaaugcuac

SEQ ID NO: 2339860 - RNA, 19 nt, Artificial Sequence
  Description of Artificial Sequence: Synthetic oligonucleotide
  Sense strand starting at position 273 of SEQ ID NO: 1885407
cugaauugcucugcugaaa

SEQ ID NO: 2339861 - RNA, 19 nt, Artificial Sequence
  Description of Artificial Sequence: Synthetic oligonucleotide
  Antisense strand to SEQ ID NO: 2339860
uuucagcagagcaauucag

SEQ ID NO: 2339862 - RNA, 19 nt, Artificial Sequence
  Description of Artificial Sequence: Synthetic oligonucleotide
  Sense strand starting at position 352 of SEQ ID NO: 1885407
uucuguccagaauaugauu

SEQ ID NO: 2339863 - RNA, 19 nt, Artificial Sequence
  Description of Artificial Sequence: Synthetic oligonucleotide
  Antisense strand to SEQ ID NO: 2339862
aaucauauucuggacagaa

SEQ ID NO: 2339864 - RNA, 19 nt, Artificial Sequence
  Description of Artificial Sequence: Synthetic oligonucleotide
  Sense strand starting at position 357 of SEQ ID NO: 1885407
uccagaauaugauuagucu

SEQ ID NO: 2339865 - RNA, 19 nt, Artificial Sequence
  Description of Artificial Sequence: Synthetic oligonucleotide
  Antisense strand to SEQ ID NO: 2339864
agacuaaucauauucugga

SEQ ID NO: 2339866 - RNA, 19 nt, Artificial Sequence
  Description of Artificial Sequence: Synthetic oligonucleotide
  Sense strand starting at position 360 of SEQ ID NO: 1885407
agaauaugauuagucucau

SEQ ID NO: 2339867 - RNA, 19 nt, Artificial Sequence
  Description of Artificial Sequence: Synthetic oligonucleotide
  Antisense strand to SEQ ID NO: 2339866
augagacuaaucauauucu

SEQ ID NO: 2339868 - RNA, 19 nt, Artificial Sequence
  Description of Artificial Sequence: Synthetic oligonucleotide
  Sense strand starting at position 366 of SEQ ID NO: 1885407
ugauuagucucauccuuua

SEQ ID NO: 2339869 - RNA, 19 nt, Artificial Sequence
  Description of Artificial Sequence: Synthetic oligonucleotide
  Antisense strand to SEQ ID NO: 2339868
uaaaggaugagacuaauca

SEQ ID NO: 2339870 - RNA, 19 nt, Artificial Sequence
  Description of Artificial Sequence: Synthetic oligonucleotide
  Sense strand starting at position 730 of SEQ ID NO: 1885407
cucagauaugucugaccuc

SEQ ID NO: 2339871 - RNA, 19 nt, Artificial Sequence
  Description of Artificial Sequence: Synthetic oligonucleotide
  Antisense strand to SEQ ID NO: 2339870
gaggucagacauaucugag

SEQ ID NO: 2339872 - RNA, 19 nt, Artificial Sequence
  Description of Artificial Sequence: Synthetic oligonucleotide
  Sense strand starting at position 733 of SEQ ID NO: 1885407
agauaugucugaccucaaa

SEQ ID NO: 2339873 - RNA, 19 nt, Artificial Sequence
  Description of Artificial Sequence: Synthetic oligonucleotide
  Antisense strand to SEQ ID NO: 2339872
uuugaggucagacauaucu

SEQ ID NO: 2339874 - RNA, 19 nt, Artificial Sequence
  Description of Artificial Sequence: Synthetic oligonucleotide
  Sense strand starting at position 778 of SEQ ID NO: 1885407
uuacuaauggacuguaacu

SEQ ID NO: 2339875 - RNA, 19 nt, Artificial Sequence
  Description of Artificial Sequence: Synthetic oligonucleotide
  Antisense strand to SEQ ID NO: 2339874
aguuacaguccauuaguaa

SEQ ID NO: 2339876 - RNA, 19 nt, Artificial Sequence
  Description of Artificial Sequence: Synthetic oligonucleotide
  Sense strand starting at position 799 of SEQ ID NO: 1885407
auccauggccuuuauaaug

SEQ ID NO: 2339877 - RNA, 19 nt, Artificial Sequence
  Description of Artificial Sequence: Synthetic oligonucleotide
  Antisense strand to SEQ ID NO: 2339876
cauuauaaaggccauggau

SEQ ID NO: 2339878 - RNA, 19 nt, Artificial Sequence
  Description of Artificial Sequence: Synthetic oligonucleotide
  Sense strand starting at position 986 of SEQ ID NO: 1885407
gggagugacuucuuuaagu

SEQ ID NO: 2339879 - RNA, 19 nt, Artificial Sequence
  Description of Artificial Sequence: Synthetic oligonucleotide
  Antisense strand to SEQ ID NO: 2339878
acuuaaagaagucacuccc

SEQ ID NO: 2339880 - RNA, 19 nt, Artificial Sequence
  Description of Artificial Sequence: Synthetic oligonucleotide
  Sense strand starting at position 988 of SEQ ID NO: 1885407
gagugacuucuuuaaguuu

SEQ ID NO: 2339881 - RNA, 19 nt, Artificial Sequence
  Description of Artificial Sequence: Synthetic oligonucleotide
  Antisense strand to SEQ ID NO: 2339880
aaacuuaaagaagucacuc

SEQ ID NO: 2339882 - RNA, 19 nt, Artificial Sequence
  Description of Artificial Sequence: Synthetic oligonucleotide
  Sense strand starting at position 1112 of SEQ ID NO: 1885407
uugaaauauuuaggaaguc

SEQ ID NO: 2339883 - RNA, 19 nt, Artificial Sequence
  Description of Artificial Sequence: Synthetic oligonucleotide
  Antisense strand to SEQ ID NO: 2339882
gacuuccuaaauauuucaa

SEQ ID NO: 2339884 - RNA, 19 nt, Artificial Sequence
  Description of Artificial Sequence: Synthetic oligonucleotide
  Sense strand starting at position 1121 of SEQ ID NO: 1885407
uuaggaagucuuuagguuu

SEQ ID NO: 2339885 - RNA, 19 nt, Artificial Sequence
  Description of Artificial Sequence: Synthetic oligonucleotide
  Antisense strand to SEQ ID NO: 2339884
aaaccuaaagacuuccuaa

SEQ ID NO: 2339886 - RNA, 19 nt, Artificial Sequence
  Description of Artificial Sequence: Synthetic oligonucleotide
  Sense strand starting at position 1228 of SEQ ID NO: 1885407
aaugauugcgaucaauaug

SEQ ID NO: 2339887 - RNA, 19 nt, Artificial Sequence
  Description of Artificial Sequence: Synthetic oligonucleotide
  Antisense strand to SEQ ID NO: 2339886
cauauugaucgcaaucauu

SEQ ID NO: 2339888 - RNA, 19 nt, Artificial Sequence
  Description of Artificial Sequence: Synthetic oligonucleotide
  Sense strand starting at position 1231 of SEQ ID NO: 1885407
gauugcgaucaauaugcaa

SEQ ID NO: 2339889 - RNA, 19 nt, Artificial Sequence
  Description of Artificial Sequence: Synthetic oligonucleotide
  Antisense strand to SEQ ID NO: 2339888
uugcauauugaucgcaauc

SEQ ID NO: 2339890 - RNA, 19 nt, Artificial Sequence
  Description of Artificial Sequence: Synthetic oligonucleotide
  Sense strand starting at position 1306 of SEQ ID NO: 1885407
uguaguuugugaguuauuu

SEQ ID NO: 2339891 - RNA, 19 nt, Artificial Sequence
  Description of Artificial Sequence: Synthetic oligonucleotide
  Antisense strand to SEQ ID NO: 2339890
aaauaacucacaaacuaca

SEQ ID NO: 2339892 - RNA, 19 nt, Artificial Sequence
  Description of Artificial Sequence: Synthetic oligonucleotide
  Sense strand starting at position 1315 of SEQ ID NO: 1885407
ugaguuauuucggcaccau

SEQ ID NO: 2339893 - RNA, 19 nt, Artificial Sequence
  Description of Artificial Sequence: Synthetic oligonucleotide
  Antisense strand to SEQ ID NO: 2339892
auggugccgaaauaacuca

SEQ ID NO: 2339894 - RNA, 19 nt, Artificial Sequence
  Description of Artificial Sequence: Synthetic oligonucleotide
  Sense strand starting at position 1346 of SEQ ID NO: 1885407
gcuguuugucuaucagcca

SEQ ID NO: 2339895 - RNA, 19 nt, Artificial Sequence
  Description of Artificial Sequence: Synthetic oligonucleotide
  Antisense strand to SEQ ID NO: 2339894
uggcugauagacaaacagc

SEQ ID NO: 2339896 - RNA, 19 nt, Artificial Sequence
  Description of Artificial Sequence: Synthetic oligonucleotide
  Sense strand starting at position 1353 of SEQ ID NO: 1885407
gucuaucagccauauucuu

SEQ ID NO: 2339897 - RNA, 19 nt, Artificial Sequence
  Description of Artificial Sequence: Synthetic oligonucleotide
  Antisense strand to SEQ ID NO: 2339896
aagaauauggcugauagac

SEQ ID NO: 2339898 - RNA, 19 nt, Artificial Sequence
  Description of Artificial Sequence: Synthetic oligonucleotide
  Sense strand starting at position 1926 of SEQ ID NO: 1885407
aaacauaccuguucgagag

SEQ ID NO: 2339899 - RNA, 19 nt, Artificial Sequence
  Description of Artificial Sequence: Synthetic oligonucleotide
  Antisense strand to SEQ ID NO: 2339898
cucucgaacagguauguuu

SEQ ID NO: 2339900 - RNA, 19 nt, Artificial Sequence
  Description of Artificial Sequence: Synthetic oligonucleotide
  Sense strand starting at position 1927 of SEQ ID NO: 1885407
aacauaccuguucgagaga

SEQ ID NO: 2339901 - RNA, 19 nt, Artificial Sequence
  Description of Artificial Sequence: Synthetic oligonucleotide
  Antisense strand to SEQ ID NO: 2339900
ucucucgaacagguauguu

SEQ ID NO: 2339902 - RNA, 19 nt, Artificial Sequence
  Description of Artificial Sequence: Synthetic oligonucleotide
  Sense strand starting at position 2165 of SEQ ID NO: 1885407
ugcauaguuuaacccugau

SEQ ID NO: 2339903 - RNA, 19 nt, Artificial Sequence
  Description of Artificial Sequence: Synthetic oligonucleotide
  Antisense strand to SEQ ID NO: 2339902
aucaggguuaaacuaugca

SEQ ID NO: 2339904 - RNA, 19 nt, Artificial Sequence
  Description of Artificial Sequence: Synthetic oligonucleotide
  Sense strand starting at position 2209 of SEQ ID NO: 1885407
agagaaauacccugcagcu

SEQ ID NO: 2339905 - RNA, 19 nt, Artificial Sequence
  Description of Artificial Sequence: Synthetic oligonucleotide
  Antisense strand to SEQ ID NO: 2339904
agcugcaggguauuucucu

SEQ ID NO: 2339906 - RNA, 19 nt, Artificial Sequence
  Description of Artificial Sequence: Synthetic oligonucleotide
  Sense strand starting at position 2317 of SEQ ID NO: 1885407
uagggacauuucuggaaua

SEQ ID NO: 2339907 - RNA, 19 nt, Artificial Sequence
  Description of Artificial Sequence: Synthetic oligonucleotide
  Antisense strand to SEQ ID NO: 2339906
uauuccagaaaugucccua

SEQ ID NO: 2339908 - RNA, 19 nt, Artificial Sequence
  Description of Artificial Sequence: Synthetic oligonucleotide
  Sense strand starting at position 2318 of SEQ ID NO: 1885407
agggacauuucuggaauac

SEQ ID NO: 2339909 - RNA, 19 nt, Artificial Sequence
  Description of Artificial Sequence: Synthetic oligonucleotide
  Antisense strand to SEQ ID NO: 2339908
guauuccagaaaugucccu

SEQ ID NO: 2339910 - RNA, 19 nt, Artificial Sequence
  Description of Artificial Sequence: Synthetic oligonucleotide
  Sense strand starting at position 2339 of SEQ ID NO: 1885407
uccauugucucaccuugau

SEQ ID NO: 2339911 - RNA, 19 nt, Artificial Sequence
  Description of Artificial Sequence: Synthetic oligonucleotide
  Antisense strand to SEQ ID NO: 2339910
aucaaggugagacaaugga

SEQ ID NO: 2339912 - RNA, 19 nt, Artificial Sequence
  Description of Artificial Sequence: Synthetic oligonucleotide
  Sense strand starting at position 2342 of SEQ ID NO: 1885407
auugucucaccuugaucau

SEQ ID NO: 2339913 - RNA, 19 nt, Artificial Sequence
  Description of Artificial Sequence: Synthetic oligonucleotide
  Antisense strand to SEQ ID NO: 2339912
augaucaaggugagacaau

SEQ ID NO: 2339914 - RNA, 19 nt, Artificial Sequence
  Description of Artificial Sequence: Synthetic oligonucleotide
  Sense strand starting at position 2343 of SEQ ID NO: 1885407
uugucucaccuugaucauu

SEQ ID NO: 2339915 - RNA, 19 nt, Artificial Sequence
  Description of Artificial Sequence: Synthetic oligonucleotide
  Antisense strand to SEQ ID NO: 2339914
aaugaucaaggugagacaa

SEQ ID NO: 2339916 - RNA, 19 nt, Artificial Sequence
  Description of Artificial Sequence: Synthetic oligonucleotide
  Sense strand starting at position 2406 of SEQ ID NO: 1885407
uggacuuauauguaugugu

SEQ ID NO: 2339917 - RNA, 19 nt, Artificial Sequence
  Description of Artificial Sequence: Synthetic oligonucleotide
  Antisense strand to SEQ ID NO: 2339916
acacauacauauaagucca

SEQ ID NO: 2339918 - RNA, 19 nt, Artificial Sequence
  Description of Artificial Sequence: Synthetic oligonucleotide
  Sense strand starting at position 2785 of SEQ ID NO: 1885407
ccgcgcugggccuuaauau

SEQ ID NO: 2339919 - RNA, 19 nt, Artificial Sequence
  Description of Artificial Sequence: Synthetic oligonucleotide
  Antisense strand to SEQ ID NO: 2339918
auauuaaggcccagcgcgg

SEQ ID NO: 2339920 - RNA, 19 nt, Artificial Sequence
  Description of Artificial Sequence: Synthetic oligonucleotide
  Sense strand starting at position 3088 of SEQ ID NO: 1885407
uugacuguacaguaaguua

SEQ ID NO: 2339921 - RNA, 19 nt, Artificial Sequence
  Description of Artificial Sequence: Synthetic oligonucleotide
  Antisense strand to SEQ ID NO: 2339920
uaacuuacuguacagucaa

SEQ ID NO: 2339922 - RNA, 19 nt, Artificial Sequence
  Description of Artificial Sequence: Synthetic oligonucleotide
  Sense strand starting at position 3185 of SEQ ID NO: 1885407
guacuuuccuaaguagacu

SEQ ID NO: 2339923 - RNA, 19 nt, Artificial Sequence
  Description of Artificial Sequence: Synthetic oligonucleotide
  Antisense strand to SEQ ID NO: 2339922
agucuacuuaggaaaguac

SEQ ID NO: 2339924 - RNA, 19 nt, Artificial Sequence
  Description of Artificial Sequence: Synthetic oligonucleotide
  Sense strand starting at position 3191 of SEQ ID NO: 1885407
uccuaaguagacugcuuua

SEQ ID NO: 2339925 - RNA, 19 nt, Artificial Sequence
  Description of Artificial Sequence: Synthetic oligonucleotide
  Antisense strand to SEQ ID NO: 2339924
uaaagcagucuacuuagga

SEQ ID NO: 2339926 - RNA, 19 nt, Artificial Sequence
  Description of Artificial Sequence: Synthetic oligonucleotide
  Sense strand starting at position 3196 of SEQ ID NO: 1885407
aguagacugcuuuauaaau

SEQ ID NO: 2339927 - RNA, 19 nt, Artificial Sequence
  Description of Artificial Sequence: Synthetic oligonucleotide
  Antisense strand to SEQ ID NO: 2339926
auuuauaaagcagucuacu

SEQ ID NO: 2339928 - RNA, 19 nt, Artificial Sequence
  Description of Artificial Sequence: Synthetic oligonucleotide
  Sense strand starting at position 3391 of SEQ ID NO: 1885407
uggacaauuguaugaguuc

SEQ ID NO: 2339929 - RNA, 19 nt, Artificial Sequence
  Description of Artificial Sequence: Synthetic oligonucleotide
  Antisense strand to SEQ ID NO: 2339928
gaacucauacaauugucca

SEQ ID NO: 2339930 - RNA, 19 nt, Artificial Sequence
  Description of Artificial Sequence: Synthetic oligonucleotide
  Sense strand starting at position 3394 of SEQ ID NO: 1885407
acaauuguaugaguucuau

SEQ ID NO: 2339931 - RNA, 19 nt, Artificial Sequence
  Description of Artificial Sequence: Synthetic oligonucleotide
  Antisense strand to SEQ ID NO: 2339930
auagaacucauacaauugu

SEQ ID NO: 2339932 - RNA, 19 nt, Artificial Sequence
  Description of Artificial Sequence: Synthetic oligonucleotide
  Sense strand starting at position 3400 of SEQ ID NO: 1885407
guaugaguucuauauugaa

SEQ ID NO: 2339933 - RNA, 19 nt, Artificial Sequence
  Description of Artificial Sequence: Synthetic oligonucleotide
  Antisense strand to SEQ ID NO: 2339932
uucaauauagaacucauac

SEQ ID NO: 2339934 - RNA, 19 nt, Artificial Sequence
  Description of Artificial Sequence: Synthetic oligonucleotide
  Sense strand starting at position 3833 of SEQ ID NO: 1885407
agaugcugccuuuauuaga

SEQ ID NO: 2339935 - RNA, 19 nt, Artificial Sequence
  Description of Artificial Sequence: Synthetic oligonucleotide
  Antisense strand to SEQ ID NO: 2339934
ucuaauaaaggcagcaucu

SEQ ID NO: 2339936 - RNA, 19 nt, Artificial Sequence
  Description of Artificial Sequence: Synthetic oligonucleotide
  Sense strand starting at position 65 of SEQ ID NO: 1885408
ugaaaugugaugcaagguu

SEQ ID NO: 2339937 - RNA, 19 nt, Artificial Sequence
  Description of Artificial Sequence: Synthetic oligonucleotide
  Antisense strand to SEQ ID NO: 2339936
aaccuugcaucacauuuca

SEQ ID NO: 2339938 - RNA, 19 nt, Artificial Sequence
  Description of Artificial Sequence: Synthetic oligonucleotide
  Sense strand starting at position 283 of SEQ ID NO: 1885408
acuuauaacuugucgaaac

SEQ ID NO: 2339939 - RNA, 19 nt, Artificial Sequence
  Description of Artificial Sequence: Synthetic oligonucleotide
  Antisense strand to SEQ ID NO: 2339938
guuucgacaaguuauaagu

SEQ ID NO: 2339940 - RNA, 19 nt, Artificial Sequence
  Description of Artificial Sequence: Synthetic oligonucleotide
  Sense strand starting at position 858 of SEQ ID NO: 1885408
auaugugaaugucucauaa

SEQ ID NO: 2339941 - RNA, 19 nt, Artificial Sequence
  Description of Artificial Sequence: Synthetic oligonucleotide
  Antisense strand to SEQ ID NO: 2339940
uuaugagacauucacauau

SEQ ID NO: 2339942 - RNA, 19 nt, Artificial Sequence
  Description of Artificial Sequence: Synthetic oligonucleotide
  Sense strand starting at position 1054 of SEQ ID NO: 1885408
uguauuugguuugcagagu

SEQ ID NO: 2339943 - RNA, 19 nt, Artificial Sequence
  Description of Artificial Sequence: Synthetic oligonucleotide
  Antisense strand to SEQ ID NO: 2339942
acucugcaaaccaaauaca

SEQ ID NO: 2339944 - RNA, 19 nt, Artificial Sequence
  Description of Artificial Sequence: Synthetic oligonucleotide
  Sense strand starting at position 1164 of SEQ ID NO: 1885408
uucuuauggucagugacag

SEQ ID NO: 2339945 - RNA, 19 nt, Artificial Sequence
  Description of Artificial Sequence: Synthetic oligonucleotide
  Antisense strand to SEQ ID NO: 2339944
cugucacugaccauaagaa

SEQ ID NO: 2339946 - RNA, 19 nt, Artificial Sequence
  Description of Artificial Sequence: Synthetic oligonucleotide
  Sense strand starting at position 1527 of SEQ ID NO: 1885408
gcgaaaucuggugggauag

SEQ ID NO: 2339947 - RNA, 19 nt, Artificial Sequence
  Description of Artificial Sequence: Synthetic oligonucleotide
  Antisense strand to SEQ ID NO: 2339946
cuaucccaccagauuucgc

SEQ ID NO: 2339948 - RNA, 19 nt, Artificial Sequence
  Description of Artificial Sequence: Synthetic oligonucleotide
  Sense strand starting at position 1528 of SEQ ID NO: 1885408
cgaaaucuggugggauaga

SEQ ID NO: 2339949 - RNA, 19 nt, Artificial Sequence
  Description of Artificial Sequence: Synthetic oligonucleotide
  Antisense strand to SEQ ID NO: 2339948
ucuaucccaccagauuucg

SEQ ID NO: 2339950 - RNA, 19 nt, Artificial Sequence
  Description of Artificial Sequence: Synthetic oligonucleotide
  Sense strand starting at position 1652 of SEQ ID NO: 1885408
ucugaaguacucuggagag

SEQ ID NO: 2339951 - RNA, 19 nt, Artificial Sequence
  Description of Artificial Sequence: Synthetic oligonucleotide
  Antisense strand to SEQ ID NO: 2339950
cucuccagaguacuucaga

SEQ ID NO: 2339952 - RNA, 19 nt, Artificial Sequence
  Description of Artificial Sequence: Synthetic oligonucleotide
  Sense strand starting at position 1708 of SEQ ID NO: 1885408
cuaugacaguugucaacag

SEQ ID NO: 2339953 - RNA, 19 nt, Artificial Sequence
  Description of Artificial Sequence: Synthetic oligonucleotide
  Antisense strand to SEQ ID NO: 2339952
cuguugacaacugucauag

SEQ ID NO: 2339954 - RNA, 19 nt, Artificial Sequence
  Description of Artificial Sequence: Synthetic oligonucleotide
  Sense strand starting at position 1742 of SEQ ID NO: 1885408
cgcccaguuguguuccauu

SEQ ID NO: 2339955 - RNA, 19 nt, Artificial Sequence
  Description of Artificial Sequence: Synthetic oligonucleotide
  Antisense strand to SEQ ID NO: 2339954
aauggaacacaacugggcg

SEQ ID NO: 2339956 - RNA, 19 nt, Artificial Sequence
  Description of Artificial Sequence: Synthetic oligonucleotide
  Sense strand starting at position 1777 of SEQ ID NO: 1885408
agagacaccugcucggaaa

SEQ ID NO: 2339957 - RNA, 19 nt, Artificial Sequence
  Description of Artificial Sequence: Synthetic oligonucleotide
  Antisense strand to SEQ ID NO: 2339956
uuuccgagcaggugucucu

SEQ ID NO: 2339958 - RNA, 19 nt, Artificial Sequence
  Description of Artificial Sequence: Synthetic oligonucleotide
  Sense strand starting at position 1804 of SEQ ID NO: 1885408
agagaagcugcaugauucu

SEQ ID NO: 2339959 - RNA, 19 nt, Artificial Sequence
  Description of Artificial Sequence: Synthetic oligonucleotide
  Antisense strand to SEQ ID NO: 2339958
agaaucaugcagcuucucu

SEQ ID NO: 2339960 - RNA, 19 nt, Artificial Sequence
  Description of Artificial Sequence: Synthetic oligonucleotide
  Sense strand starting at position 1997 of SEQ ID NO: 1885408
ccacguuauccugcugcua

SEQ ID NO: 2339961 - RNA, 19 nt, Artificial Sequence
  Description of Artificial Sequence: Synthetic oligonucleotide
  Antisense strand to SEQ ID NO: 2339960
uagcagcaggauaacgugg

SEQ ID NO: 2339962 - RNA, 19 nt, Artificial Sequence
  Description of Artificial Sequence: Synthetic oligonucleotide
  Sense strand starting at position 1998 of SEQ ID NO: 1885408
cacguuauccugcugcuau

SEQ ID NO: 2339963 - RNA, 19 nt, Artificial Sequence
  Description of Artificial Sequence: Synthetic oligonucleotide
  Antisense strand to SEQ ID NO: 2339962
auagcagcaggauaacgug

SEQ ID NO: 2339964 - RNA, 19 nt, Artificial Sequence
  Description of Artificial Sequence: Synthetic oligonucleotide
  Sense strand starting at position 2000 of SEQ ID NO: 1885408
cguuauccugcugcuauga

SEQ ID NO: 2339965 - RNA, 19 nt, Artificial Sequence
  Description of Artificial Sequence: Synthetic oligonucleotide
  Antisense strand to SEQ ID NO: 2339964
ucauagcagcaggauaacg

SEQ ID NO: 2339966 - RNA, 19 nt, Artificial Sequence
  Description of Artificial Sequence: Synthetic oligonucleotide
  Sense strand starting at position 2025 of SEQ ID NO: 1885408
agccauaugcugccguuua

SEQ ID NO: 2339967 - RNA, 19 nt, Artificial Sequence
  Description of Artificial Sequence: Synthetic oligonucleotide
  Antisense strand to SEQ ID NO: 2339966
uaaacggcagcauauggcu

SEQ ID NO: 2339968 - RNA, 19 nt, Artificial Sequence
  Description of Artificial Sequence: Synthetic oligonucleotide
  Sense strand starting at position 2029 of SEQ ID NO: 1885408
auaugcugccguuuauagu

SEQ ID NO: 2339969 - RNA, 19 nt, Artificial Sequence
  Description of Artificial Sequence: Synthetic oligonucleotide
  Antisense strand to SEQ ID NO: 2339968
acuauaaacggcagcauau

SEQ ID NO: 2339970 - RNA, 19 nt, Artificial Sequence
  Description of Artificial Sequence: Synthetic oligonucleotide
  Sense strand starting at position 2175 of SEQ ID NO: 1885408
aagcauauagaugguauau

SEQ ID NO: 2339971 - RNA, 19 nt, Artificial Sequence
  Description of Artificial Sequence: Synthetic oligonucleotide
  Antisense strand to SEQ ID NO: 2339970
auauaccaucuauaugcuu

SEQ ID NO: 2339972 - RNA, 19 nt, Artificial Sequence
  Description of Artificial Sequence: Synthetic oligonucleotide
  Sense strand starting at position 2318 of SEQ ID NO: 1885408
uauuaaaggucucugguaa

SEQ ID NO: 2339973 - RNA, 19 nt, Artificial Sequence
  Description of Artificial Sequence: Synthetic oligonucleotide
  Antisense strand to SEQ ID NO: 2339972
uuaccagagaccuuuaaua

SEQ ID NO: 2339974 - RNA, 19 nt, Artificial Sequence
  Description of Artificial Sequence: Synthetic oligonucleotide
  Sense strand starting at position 2319 of SEQ ID NO: 1885408
auuaaaggucucugguaag

SEQ ID NO: 2339975 - RNA, 19 nt, Artificial Sequence
  Description of Artificial Sequence: Synthetic oligonucleotide
  Antisense strand to SEQ ID NO: 2339974
cuuaccagagaccuuuaau

SEQ ID NO: 2339976 - RNA, 19 nt, Artificial Sequence
  Description of Artificial Sequence: Synthetic oligonucleotide
  Sense strand starting at position 2326 of SEQ ID NO: 1885408
gucucugguaaguaaggaa

SEQ ID NO: 2339977 - RNA, 19 nt, Artificial Sequence
  Description of Artificial Sequence: Synthetic oligonucleotide
  Antisense strand to SEQ ID NO: 2339976
uuccuuacuuaccagagac

SEQ ID NO: 2339978 - RNA, 19 nt, Artificial Sequence
  Description of Artificial Sequence: Synthetic oligonucleotide
  Sense strand starting at position 2361 of SEQ ID NO: 1885408
cagacuaagucuuuggauc

SEQ ID NO: 2339979 - RNA, 19 nt, Artificial Sequence
  Description of Artificial Sequence: Synthetic oligonucleotide
  Antisense strand to SEQ ID NO: 2339978
gauccaaagacuuagucug

SEQ ID NO: 2339980 - RNA, 19 nt, Artificial Sequence
  Description of Artificial Sequence: Synthetic oligonucleotide
  Sense strand starting at position 2362 of SEQ ID NO: 1885408
agacuaagucuuuggauca

SEQ ID NO: 2339981 - RNA, 19 nt, Artificial Sequence
  Description of Artificial Sequence: Synthetic oligonucleotide
  Antisense strand to SEQ ID NO: 2339980
ugauccaaagacuuagucu

SEQ ID NO: 2339982 - RNA, 19 nt, Artificial Sequence
  Description of Artificial Sequence: Synthetic oligonucleotide
  Sense strand starting at position 2517 of SEQ ID NO: 1885408
gauaauaaaggugguccua

SEQ ID NO: 2339983 - RNA, 19 nt, Artificial Sequence
  Description of Artificial Sequence: Synthetic oligonucleotide
  Antisense strand to SEQ ID NO: 2339982
uaggaccaccuuuauuauc

SEQ ID NO: 2339984 - RNA, 19 nt, Artificial Sequence
  Description of Artificial Sequence: Synthetic oligonucleotide
  Sense strand starting at position 2622 of SEQ ID NO: 1885408
guguaauauccuggacuag

SEQ ID NO: 2339985 - RNA, 19 nt, Artificial Sequence
  Description of Artificial Sequence: Synthetic oligonucleotide
  Antisense strand to SEQ ID NO: 2339984
cuaguccaggauauuacac

SEQ ID NO: 2339986 - RNA, 19 nt, Artificial Sequence
  Description of Artificial Sequence: Synthetic oligonucleotide
  Sense strand starting at position 2783 of SEQ ID NO: 1885408
ccuuguuggguuuauggaa

SEQ ID NO: 2339987 - RNA, 19 nt, Artificial Sequence
  Description of Artificial Sequence: Synthetic oligonucleotide
  Antisense strand to SEQ ID NO: 2339986
uuccauaaacccaacaagg

SEQ ID NO: 2339988 - RNA, 19 nt, Artificial Sequence
  Description of Artificial Sequence: Synthetic oligonucleotide
  Sense strand starting at position 2846 of SEQ ID NO: 1885408
ugucuuauggagggugauc

SEQ ID NO: 2339989 - RNA, 19 nt, Artificial Sequence
  Description of Artificial Sequence: Synthetic oligonucleotide
  Antisense strand to SEQ ID NO: 2339988
gaucacccuccauaagaca

SEQ ID NO: 2339990 - RNA, 19 nt, Artificial Sequence
  Description of Artificial Sequence: Synthetic oligonucleotide
  Sense strand starting at position 2848 of SEQ ID NO: 1885408
ucuuauggagggugaucua

SEQ ID NO: 2339991 - RNA, 19 nt, Artificial Sequence
  Description of Artificial Sequence: Synthetic oligonucleotide
  Antisense strand to SEQ ID NO: 2339990
uagaucacccuccauaaga

SEQ ID NO: 2339992 - RNA, 19 nt, Artificial Sequence
  Description of Artificial Sequence: Synthetic oligonucleotide
  Sense strand starting at position 2855 of SEQ ID NO: 1885408
gagggugaucuacaguuua

SEQ ID NO: 2339993 - RNA, 19 nt, Artificial Sequence
  Description of Artificial Sequence: Synthetic oligonucleotide
  Antisense strand to SEQ ID NO: 2339992
uaaacuguagaucacccuc

SEQ ID NO: 2339994 - RNA, 19 nt, Artificial Sequence
  Description of Artificial Sequence: Synthetic oligonucleotide
  Sense strand starting at position 2997 of SEQ ID NO: 1885408
augaaaguugcccaguaua

SEQ ID NO: 2339995 - RNA, 19 nt, Artificial Sequence
  Description of Artificial Sequence: Synthetic oligonucleotide
  Antisense strand to SEQ ID NO: 2339994
uauacugggcaacuuucau

SEQ ID NO: 2339996 - RNA, 19 nt, Artificial Sequence
  Description of Artificial Sequence: Synthetic oligonucleotide
  Sense strand starting at position 3036 of SEQ ID NO: 1885408
uuauguguucuuuagauug

SEQ ID NO: 2339997 - RNA, 19 nt, Artificial Sequence
  Description of Artificial Sequence: Synthetic oligonucleotide
  Antisense strand to SEQ ID NO: 2339996
caaucuaaagaacacauaa

SEQ ID NO: 2339998 - RNA, 19 nt, Artificial Sequence
  Description of Artificial Sequence: Synthetic oligonucleotide
  Sense strand starting at position 3215 of SEQ ID NO: 1885408
auaucaguuagauggauug

SEQ ID NO: 2339999 - RNA, 19 nt, Artificial Sequence
  Description of Artificial Sequence: Synthetic oligonucleotide
  Antisense strand to SEQ ID NO: 2339998
caauccaucuaacugauau

SEQ ID NO: 2340000 - RNA, 19 nt, Artificial Sequence
  Description of Artificial Sequence: Synthetic oligonucleotide
  Sense strand starting at position 3430 of SEQ ID NO: 1885408
ugugauuaacuguaucuca

SEQ ID NO: 2340001 - RNA, 19 nt, Artificial Sequence
  Description of Artificial Sequence: Synthetic oligonucleotide
  Antisense strand to SEQ ID NO: 2340000
ugagauacaguuaaucaca

SEQ ID NO: 2340002 - RNA, 19 nt, Artificial Sequence
  Description of Artificial Sequence: Synthetic oligonucleotide
  Sense strand starting at position 3438 of SEQ ID NO: 1885408
acuguaucucacugauuac

SEQ ID NO: 2340003 - RNA, 19 nt, Artificial Sequence
  Description of Artificial Sequence: Synthetic oligonucleotide
  Antisense strand to SEQ ID NO: 2340002
guaaucagugagauacagu

SEQ ID NO: 2340004 - RNA, 19 nt, Artificial Sequence
  Description of Artificial Sequence: Synthetic oligonucleotide
  Sense strand starting at position 3441 of SEQ ID NO: 1885408
guaucucacugauuacuga

SEQ ID NO: 2340005 - RNA, 19 nt, Artificial Sequence
  Description of Artificial Sequence: Synthetic oligonucleotide
  Antisense strand to SEQ ID NO: 2340004
ucaguaaucagugagauac

SEQ ID NO: 2340006 - RNA, 19 nt, Artificial Sequence
  Description of Artificial Sequence: Synthetic oligonucleotide
  Sense strand starting at position 3539 of SEQ ID NO: 1885408
uagcacuugguguauaaau

SEQ ID NO: 2340007 - RNA, 19 nt, Artificial Sequence
  Description of Artificial Sequence: Synthetic oligonucleotide
  Antisense strand to SEQ ID NO: 2340006
auuuauacaccaagugcua

SEQ ID NO: 2340008 - RNA, 19 nt, Artificial Sequence
  Description of Artificial Sequence: Synthetic oligonucleotide
  Sense strand starting at position 3541 of SEQ ID NO: 1885408
gcacuugguguauaaauau

SEQ ID NO: 2340009 - RNA, 19 nt, Artificial Sequence
  Description of Artificial Sequence: Synthetic oligonucleotide
  Antisense strand to SEQ ID NO: 2340008
auauuuauacaccaagugc

SEQ ID NO: 2340010 - RNA, 19 nt, Artificial Sequence
  Description of Artificial Sequence: Synthetic oligonucleotide
  Sense strand starting at position 3703 of SEQ ID NO: 1885408
gcugaaugagagcauuaau

SEQ ID NO: 2340011 - RNA, 19 nt, Artificial Sequence
  Description of Artificial Sequence: Synthetic oligonucleotide
  Antisense strand to SEQ ID NO: 2340010
auuaaugcucucauucagc

SEQ ID NO: 2340012 - RNA, 19 nt, Artificial Sequence
  Description of Artificial Sequence: Synthetic oligonucleotide
  Sense strand starting at position 3724 of SEQ ID NO: 1885408
uacaguaaugacuguugaa

SEQ ID NO: 2340013 - RNA, 19 nt, Artificial Sequence
  Description of Artificial Sequence: Synthetic oligonucleotide
  Antisense strand to SEQ ID NO: 2340012
uucaacagucauuacugua

SEQ ID NO: 2340014 - RNA, 19 nt, Artificial Sequence
  Description of Artificial Sequence: Synthetic oligonucleotide
  Sense strand starting at position 3826 of SEQ ID NO: 1885408
uugaauuucucagaaauga

SEQ ID NO: 2340015 - RNA, 19 nt, Artificial Sequence
  Description of Artificial Sequence: Synthetic oligonucleotide
  Antisense strand to SEQ ID NO: 2340014
ucauuucugagaaauucaa

SEQ ID NO: 2340016 - RNA, 19 nt, Artificial Sequence
  Description of Artificial Sequence: Synthetic oligonucleotide
  Sense strand starting at position 68 of SEQ ID NO: 1885409
gauauacuuuggcccuaga

SEQ ID NO: 2340017 - RNA, 19 nt, Artificial Sequence
  Description of Artificial Sequence: Synthetic oligonucleotide
  Antisense strand to SEQ ID NO: 2340016
ucuagggccaaaguauauc

SEQ ID NO: 2340018 - RNA, 19 nt, Artificial Sequence
  Description of Artificial Sequence: Synthetic oligonucleotide
  Sense strand starting at position 204 of SEQ ID NO: 1885409
ggcuuuaugccugaaauaa

SEQ ID NO: 2340019 - RNA, 19 nt, Artificial Sequence
  Description of Artificial Sequence: Synthetic oligonucleotide
  Antisense strand to SEQ ID NO: 2340018
uuauuucaggcauaaagcc

SEQ ID NO: 2340020 - RNA, 19 nt, Artificial Sequence
  Description of Artificial Sequence: Synthetic oligonucleotide
  Sense strand starting at position 274 of SEQ ID NO: 1885409
uaagaaugucagggaguug

SEQ ID NO: 2340021 - RNA, 19 nt, Artificial Sequence
  Description of Artificial Sequence: Synthetic oligonucleotide
  Antisense strand to SEQ ID NO: 2340020
caacucccugacauucuua

SEQ ID NO: 2340022 - RNA, 19 nt, Artificial Sequence
  Description of Artificial Sequence: Synthetic oligonucleotide
  Sense strand starting at position 286 of SEQ ID NO: 1885409
ggaguugugaaguggaaac

SEQ ID NO: 2340023 - RNA, 19 nt, Artificial Sequence
  Description of Artificial Sequence: Synthetic oligonucleotide
  Antisense strand to SEQ ID NO: 2340022
guuuccacuucacaacucc

SEQ ID NO: 2340024 - RNA, 19 nt, Artificial Sequence
  Description of Artificial Sequence: Synthetic oligonucleotide
  Sense strand starting at position 413 of SEQ ID NO: 1885409
agaagaccauuguuuagau

SEQ ID NO: 2340025 - RNA, 19 nt, Artificial Sequence
  Description of Artificial Sequence: Synthetic oligonucleotide
  Antisense strand to SEQ ID NO: 2340024
aucuaaacaauggucuucu

SEQ ID NO: 2340026 - RNA, 19 nt, Artificial Sequence
  Description of Artificial Sequence: Synthetic oligonucleotide
  Sense strand starting at position 473 of SEQ ID NO: 1885409
ucugaaggcuugguaugaa

SEQ ID NO: 2340027 - RNA, 19 nt, Artificial Sequence
  Description of Artificial Sequence: Synthetic oligonucleotide
  Antisense strand to SEQ ID NO: 2340026
uucauaccaagccuucaga

SEQ ID NO: 2340028 - RNA, 19 nt, Artificial Sequence
  Description of Artificial Sequence: Synthetic oligonucleotide
  Sense strand starting at position 538 of SEQ ID NO: 1885409
auguuagauccauagcuug

SEQ ID NO: 2340029 - RNA, 19 nt, Artificial Sequence
  Description of Artificial Sequence: Synthetic oligonucleotide
  Antisense strand to SEQ ID NO: 2340028
caagcuauggaucuaacau

SEQ ID NO: 2340030 - RNA, 19 nt, Artificial Sequence
  Description of Artificial Sequence: Synthetic oligonucleotide
  Sense strand starting at position 550 of SEQ ID NO: 1885409
uagcuuguucuugacagag

SEQ ID NO: 2340031 - RNA, 19 nt, Artificial Sequence
  Description of Artificial Sequence: Synthetic oligonucleotide
  Antisense strand to SEQ ID NO: 2340030
cucugucaagaacaagcua

SEQ ID NO: 2340032 - RNA, 19 nt, Artificial Sequence
  Description of Artificial Sequence: Synthetic oligonucleotide
  Sense strand starting at position 640 of SEQ ID NO: 1885409
acuugaagagugcaguuau

SEQ ID NO: 2340033 - RNA, 19 nt, Artificial Sequence
  Description of Artificial Sequence: Synthetic oligonucleotide
  Antisense strand to SEQ ID NO: 2340032
auaacugcacucuucaagu

SEQ ID NO: 2340034 - RNA, 19 nt, Artificial Sequence
  Description of Artificial Sequence: Synthetic oligonucleotide
  Sense strand starting at position 650 of SEQ ID NO: 1885409
ugcaguuaucaguagagau

SEQ ID NO: 2340035 - RNA, 19 nt, Artificial Sequence
  Description of Artificial Sequence: Synthetic oligonucleotide
  Antisense strand to SEQ ID NO: 2340034
aucucuacugauaacugca

SEQ ID NO: 2340036 - RNA, 19 nt, Artificial Sequence
  Description of Artificial Sequence: Synthetic oligonucleotide
  Sense strand starting at position 717 of SEQ ID NO: 1885409
agaauccucugguuauaau

SEQ ID NO: 2340037 - RNA, 19 nt, Artificial Sequence
  Description of Artificial Sequence: Synthetic oligonucleotide
  Antisense strand to SEQ ID NO: 2340036
auuauaaccagaggauucu

SEQ ID NO: 2340038 - RNA, 19 nt, Artificial Sequence
  Description of Artificial Sequence: Synthetic oligonucleotide
  Sense strand starting at position 774 of SEQ ID NO: 1885409
agagguuacuggucauuau

SEQ ID NO: 2340039 - RNA, 19 nt, Artificial Sequence
  Description of Artificial Sequence: Synthetic oligonucleotide
  Antisense strand to SEQ ID NO: 2340038
auaaugaccaguaaccucu

SEQ ID NO: 2340040 - RNA, 19 nt, Artificial Sequence
  Description of Artificial Sequence: Synthetic oligonucleotide
  Sense strand starting at position 775 of SEQ ID NO: 1885409
gagguuacuggucauuauc

SEQ ID NO: 2340041 - RNA, 19 nt, Artificial Sequence
  Description of Artificial Sequence: Synthetic oligonucleotide
  Antisense strand to SEQ ID NO: 2340040
gauaaugaccaguaaccuc

SEQ ID NO: 2340042 - RNA, 19 nt, Artificial Sequence
  Description of Artificial Sequence: Synthetic oligonucleotide
  Sense strand starting at position 778 of SEQ ID NO: 1885409
guuacuggucauuauccua

SEQ ID NO: 2340043 - RNA, 19 nt, Artificial Sequence
  Description of Artificial Sequence: Synthetic oligonucleotide
  Antisense strand to SEQ ID NO: 2340042
uaggauaaugaccaguaac

SEQ ID NO: 2340044 - RNA, 19 nt, Artificial Sequence
  Description of Artificial Sequence: Synthetic oligonucleotide
  Sense strand starting at position 1639 of SEQ ID NO: 1885409
auaguaauggauugaucuu

SEQ ID NO: 2340045 - RNA, 19 nt, Artificial Sequence
  Description of Artificial Sequence: Synthetic oligonucleotide
  Antisense strand to SEQ ID NO: 2340044
aagaucaauccauuacuau

SEQ ID NO: 2340046 - RNA, 19 nt, Artificial Sequence
  Description of Artificial Sequence: Synthetic oligonucleotide
  Sense strand starting at position 1726 of SEQ ID NO: 1885409
uuaugcacuguugacagau

SEQ ID NO: 2340047 - RNA, 19 nt, Artificial Sequence
  Description of Artificial Sequence: Synthetic oligonucleotide
  Antisense strand to SEQ ID NO: 2340046
aucugucaacagugcauaa

SEQ ID NO: 2340048 - RNA, 19 nt, Artificial Sequence
  Description of Artificial Sequence: Synthetic oligonucleotide
  Sense strand starting at position 2032 of SEQ ID NO: 1885409
uuugucaaaguuuggauaa

SEQ ID NO: 2340049 - RNA, 19 nt, Artificial Sequence
  Description of Artificial Sequence: Synthetic oligonucleotide
  Antisense strand to SEQ ID NO: 2340048
uuauccaaacuuugacaaa

SEQ ID NO: 2340050 - RNA, 19 nt, Artificial Sequence
  Description of Artificial Sequence: Synthetic oligonucleotide
  Sense strand starting at position 2048 of SEQ ID NO: 1885409
uaaguaggaguuggaagau

SEQ ID NO: 2340051 - RNA, 19 nt, Artificial Sequence
  Description of Artificial Sequence: Synthetic oligonucleotide
  Antisense strand to SEQ ID NO: 2340050
aucuuccaacuccuacuua

SEQ ID NO: 2340052 - RNA, 19 nt, Artificial Sequence
  Description of Artificial Sequence: Synthetic oligonucleotide
  Sense strand starting at position 2077 of SEQ ID NO: 1885409
ugauuaucugcuggaugau

SEQ ID NO: 2340053 - RNA, 19 nt, Artificial Sequence
  Description of Artificial Sequence: Synthetic oligonucleotide
  Antisense strand to SEQ ID NO: 2340052
aucauccagcagauaauca

SEQ ID NO: 2340054 - RNA, 19 nt, Artificial Sequence
  Description of Artificial Sequence: Synthetic oligonucleotide
  Sense strand starting at position 2078 of SEQ ID NO: 1885409
gauuaucugcuggaugaug

SEQ ID NO: 2340055 - RNA, 19 nt, Artificial Sequence
  Description of Artificial Sequence: Synthetic oligonucleotide
  Antisense strand to SEQ ID NO: 2340054
caucauccagcagauaauc

SEQ ID NO: 2340056 - RNA, 19 nt, Artificial Sequence
  Description of Artificial Sequence: Synthetic oligonucleotide
  Sense strand starting at position 2086 of SEQ ID NO: 1885409
gcuggaugaugauuacauc

SEQ ID NO: 2340057 - RNA, 19 nt, Artificial Sequence
  Description of Artificial Sequence: Synthetic oligonucleotide
  Antisense strand to SEQ ID NO: 2340056
gauguaaucaucauccagc

SEQ ID NO: 2340058 - RNA, 19 nt, Artificial Sequence
  Description of Artificial Sequence: Synthetic oligonucleotide
  Sense strand starting at position 2927 of SEQ ID NO: 1885409
guuacagagugcuuauuug

SEQ ID NO: 2340059 - RNA, 19 nt, Artificial Sequence
  Description of Artificial Sequence: Synthetic oligonucleotide
  Antisense strand to SEQ ID NO: 2340058
caaauaagcacucuguaac

SEQ ID NO: 2340060 - RNA, 19 nt, Artificial Sequence
  Description of Artificial Sequence: Synthetic oligonucleotide
  Sense strand starting at position 2933 of SEQ ID NO: 1885409
gagugcuuauuuguuucuu

SEQ ID NO: 2340061 - RNA, 19 nt, Artificial Sequence
  Description of Artificial Sequence: Synthetic oligonucleotide
  Antisense strand to SEQ ID NO: 2340060
aagaaacaaauaagcacuc

SEQ ID NO: 2340062 - RNA, 19 nt, Artificial Sequence
  Description of Artificial Sequence: Synthetic oligonucleotide
  Sense strand starting at position 2967 of SEQ ID NO: 1885409
aggcacuuagcagaauagu

SEQ ID NO: 2340063 - RNA, 19 nt, Artificial Sequence
  Description of Artificial Sequence: Synthetic oligonucleotide
  Antisense strand to SEQ ID NO: 2340062
acuauucugcuaagugccu

SEQ ID NO: 2340064 - RNA, 19 nt, Artificial Sequence
  Description of Artificial Sequence: Synthetic oligonucleotide
  Sense strand starting at position 2976 of SEQ ID NO: 1885409
gcagaauaguaauucuuaa

SEQ ID NO: 2340065 - RNA, 19 nt, Artificial Sequence
  Description of Artificial Sequence: Synthetic oligonucleotide
  Antisense strand to SEQ ID NO: 2340064
uuaagaauuacuauucugc

SEQ ID NO: 2340066 - RNA, 19 nt, Artificial Sequence
  Description of Artificial Sequence: Synthetic oligonucleotide
  Sense strand starting at position 3092 of SEQ ID NO: 1885409
cuuuaauauucucugagag

SEQ ID NO: 2340067 - RNA, 19 nt, Artificial Sequence
  Description of Artificial Sequence: Synthetic oligonucleotide
  Antisense strand to SEQ ID NO: 2340066
cucucagagaauauuaaag

SEQ ID NO: 2340068 - RNA, 19 nt, Artificial Sequence
  Description of Artificial Sequence: Synthetic oligonucleotide
  Sense strand starting at position 3093 of SEQ ID NO: 1885409
uuuaauauucucugagagu

SEQ ID NO: 2340069 - RNA, 19 nt, Artificial Sequence
  Description of Artificial Sequence: Synthetic oligonucleotide
  Antisense strand to SEQ ID NO: 2340068
acucucagagaauauuaaa

SEQ ID NO: 2340070 - RNA, 19 nt, Artificial Sequence
  Description of Artificial Sequence: Synthetic oligonucleotide
  Sense strand starting at position 3147 of SEQ ID NO: 1885409
auuagacauucugucacau

SEQ ID NO: 2340071 - RNA, 19 nt, Artificial Sequence
  Description of Artificial Sequence: Synthetic oligonucleotide
  Antisense strand to SEQ ID NO: 2340070
augugacagaaugucuaau

SEQ ID NO: 2340072 - RNA, 19 nt, Artificial Sequence
  Description of Artificial Sequence: Synthetic oligonucleotide
  Sense strand starting at position 3275 of SEQ ID NO: 1885409
agaugaaagucuuccuggu

SEQ ID NO: 2340073 - RNA, 19 nt, Artificial Sequence
  Description of Artificial Sequence: Synthetic oligonucleotide
  Antisense strand to SEQ ID NO: 2340072
accaggaagacuuucaucu

SEQ ID NO: 2340074 - RNA, 19 nt, Artificial Sequence
  Description of Artificial Sequence: Synthetic oligonucleotide
  Sense strand starting at position 3277 of SEQ ID NO: 1885409
augaaagucuuccugguaa

SEQ ID NO: 2340075 - RNA, 19 nt, Artificial Sequence
  Description of Artificial Sequence: Synthetic oligonucleotide
  Antisense strand to SEQ ID NO: 2340074
uuaccaggaagacuuucau

SEQ ID NO: 2340076 - RNA, 19 nt, Artificial Sequence
  Description of Artificial Sequence: Synthetic oligonucleotide
  Sense strand starting at position 3279 of SEQ ID NO: 1885409
gaaagucuuccugguaaag

SEQ ID NO: 2340077 - RNA, 19 nt, Artificial Sequence
  Description of Artificial Sequence: Synthetic oligonucleotide
  Antisense strand to SEQ ID NO: 2340076
cuuuaccaggaagacuuuc

SEQ ID NO: 2340078 - RNA, 19 nt, Artificial Sequence
  Description of Artificial Sequence: Synthetic oligonucleotide
  Sense strand starting at position 3290 of SEQ ID NO: 1885409
ugguaaagagguugaguga

SEQ ID NO: 2340079 - RNA, 19 nt, Artificial Sequence
  Description of Artificial Sequence: Synthetic oligonucleotide
  Antisense strand to SEQ ID NO: 2340078
ucacucaaccucuuuacca

SEQ ID NO: 2340080 - RNA, 19 nt, Artificial Sequence
  Description of Artificial Sequence: Synthetic oligonucleotide
  Sense strand starting at position 3426 of SEQ ID NO: 1885409
auuguauuuguaugagcau

SEQ ID NO: 2340081 - RNA, 19 nt, Artificial Sequence
  Description of Artificial Sequence: Synthetic oligonucleotide
  Antisense strand to SEQ ID NO: 2340080
augcucauacaaauacaau

SEQ ID NO: 2340082 - RNA, 19 nt, Artificial Sequence
  Description of Artificial Sequence: Synthetic oligonucleotide
  Sense strand starting at position 3446 of SEQ ID NO: 1885409
ggaagcaaaucguuggaaa

SEQ ID NO: 2340083 - RNA, 19 nt, Artificial Sequence
  Description of Artificial Sequence: Synthetic oligonucleotide
  Antisense strand to SEQ ID NO: 2340082
uuuccaacgauuugcuucc

SEQ ID NO: 2340084 - RNA, 19 nt, Artificial Sequence
  Description of Artificial Sequence: Synthetic oligonucleotide
  Sense strand starting at position 3447 of SEQ ID NO: 1885409
gaagcaaaucguuggaaag

SEQ ID NO: 2340085 - RNA, 19 nt, Artificial Sequence
  Description of Artificial Sequence: Synthetic oligonucleotide
  Antisense strand to SEQ ID NO: 2340084
cuuuccaacgauuugcuuc

SEQ ID NO: 2340086 - RNA, 19 nt, Artificial Sequence
  Description of Artificial Sequence: Synthetic oligonucleotide
  Sense strand starting at position 3448 of SEQ ID NO: 1885409
aagcaaaucguuggaaaga

SEQ ID NO: 2340087 - RNA, 19 nt, Artificial Sequence
  Description of Artificial Sequence: Synthetic oligonucleotide
  Antisense strand to SEQ ID NO: 2340086
ucuuuccaacgauuugcuu

SEQ ID NO: 2340088 - RNA, 19 nt, Artificial Sequence
  Description of Artificial Sequence: Synthetic oligonucleotide
  Sense strand starting at position 3497 of SEQ ID NO: 1885409
acaaucucugugugaagga

SEQ ID NO: 2340089 - RNA, 19 nt, Artificial Sequence
  Description of Artificial Sequence: Synthetic oligonucleotide
  Antisense strand to SEQ ID NO: 2340088
uccuucacacagagauugu

SEQ ID NO: 2340090 - RNA, 19 nt, Artificial Sequence
  Description of Artificial Sequence: Synthetic oligonucleotide
  Sense strand starting at position 3502 of SEQ ID NO: 1885409
cucugugugaaggaacuuu

SEQ ID NO: 2340091 - RNA, 19 nt, Artificial Sequence
  Description of Artificial Sequence: Synthetic oligonucleotide
  Antisense strand to SEQ ID NO: 2340090
aaaguuccuucacacagag

SEQ ID NO: 2340092 - RNA, 19 nt, Artificial Sequence
  Description of Artificial Sequence: Synthetic oligonucleotide
  Sense strand starting at position 3756 of SEQ ID NO: 1885409
uugggaauggaguguaaau

SEQ ID NO: 2340093 - RNA, 19 nt, Artificial Sequence
  Description of Artificial Sequence: Synthetic oligonucleotide
  Antisense strand to SEQ ID NO: 2340092
auuuacacuccauucccaa

SEQ ID NO: 2340094 - RNA, 19 nt, Artificial Sequence
  Description of Artificial Sequence: Synthetic oligonucleotide
  Sense strand starting at position 3807 of SEQ ID NO: 1885409
agacucaccuauucuguua

SEQ ID NO: 2340095 - RNA, 19 nt, Artificial Sequence
  Description of Artificial Sequence: Synthetic oligonucleotide
  Antisense strand to SEQ ID NO: 2340094
uaacagaauaggugagucu

SEQ ID NO: 2340096 - RNA, 19 nt, Artificial Sequence
  Description of Artificial Sequence: Synthetic oligonucleotide
  Sense strand starting at position 16 of SEQ ID NO: 1885410
gcagcacauccacaaguaa

SEQ ID NO: 2340097 - RNA, 19 nt, Artificial Sequence
  Description of Artificial Sequence: Synthetic oligonucleotide
  Antisense strand to SEQ ID NO: 2340096
uuacuuguggaugugcugc

SEQ ID NO: 2340098 - RNA, 19 nt, Artificial Sequence
  Description of Artificial Sequence: Synthetic oligonucleotide
  Sense strand starting at position 42 of SEQ ID NO: 1885410
caacgaaugccagaguuuc

SEQ ID NO: 2340099 - RNA, 19 nt, Artificial Sequence
  Description of Artificial Sequence: Synthetic oligonucleotide
  Antisense strand to SEQ ID NO: 2340098
gaaacucuggcauucguug

SEQ ID NO: 2340100 - RNA, 19 nt, Artificial Sequence
  Description of Artificial Sequence: Synthetic oligonucleotide
  Sense strand starting at position 50 of SEQ ID NO: 1885410
gccagaguuucguguguuu

SEQ ID NO: 2340101 - RNA, 19 nt, Artificial Sequence
  Description of Artificial Sequence: Synthetic oligonucleotide
  Antisense strand to SEQ ID NO: 2340100
aaacacacgaaacucuggc

SEQ ID NO: 2340102 - RNA, 19 nt, Artificial Sequence
  Description of Artificial Sequence: Synthetic oligonucleotide
  Sense strand starting at position 77 of SEQ ID NO: 1885410
acaucuuuguggcugugaa

SEQ ID NO: 2340103 - RNA, 19 nt, Artificial Sequence
  Description of Artificial Sequence: Synthetic oligonucleotide
  Antisense strand to SEQ ID NO: 2340102
uucacagccacaaagaugu

SEQ ID NO: 2340104 - RNA, 19 nt, Artificial Sequence
  Description of Artificial Sequence: Synthetic oligonucleotide
  Sense strand starting at position 78 of SEQ ID NO: 1885410
caucuuuguggcugugaac

SEQ ID NO: 2340105 - RNA, 19 nt, Artificial Sequence
  Description of Artificial Sequence: Synthetic oligonucleotide
  Antisense strand to SEQ ID NO: 2340104
guucacagccacaaagaug

SEQ ID NO: 2340106 - RNA, 19 nt, Artificial Sequence
  Description of Artificial Sequence: Synthetic oligonucleotide
  Sense strand starting at position 81 of SEQ ID NO: 1885410
cuuuguggcugugaacaaa

SEQ ID NO: 2340107 - RNA, 19 nt, Artificial Sequence
  Description of Artificial Sequence: Synthetic oligonucleotide
  Antisense strand to SEQ ID NO: 2340106
uuuguucacagccacaaag

SEQ ID NO: 2340108 - RNA, 19 nt, Artificial Sequence
  Description of Artificial Sequence: Synthetic oligonucleotide
  Sense strand starting at position 164 of SEQ ID NO: 1885410
uaucguauuccgcaacagu

SEQ ID NO: 2340109 - RNA, 19 nt, Artificial Sequence
  Description of Artificial Sequence: Synthetic oligonucleotide
  Antisense strand to SEQ ID NO: 2340108
acuguugcggaauacgaua

SEQ ID NO: 2340110 - RNA, 19 nt, Artificial Sequence
  Description of Artificial Sequence: Synthetic oligonucleotide
  Sense strand starting at position 167 of SEQ ID NO: 1885410
cguauuccgcaacaguuaa

SEQ ID NO: 2340111 - RNA, 19 nt, Artificial Sequence
  Description of Artificial Sequence: Synthetic oligonucleotide
  Antisense strand to SEQ ID NO: 2340110
uuaacuguugcggaauacg

SEQ ID NO: 2340112 - RNA, 19 nt, Artificial Sequence
  Description of Artificial Sequence: Synthetic oligonucleotide
  Sense strand starting at position 201 of SEQ ID NO: 1885410
cucaacaugucuccuugua

SEQ ID NO: 2340113 - RNA, 19 nt, Artificial Sequence
  Description of Artificial Sequence: Synthetic oligonucleotide
  Antisense strand to SEQ ID NO: 2340112
uacaaggagacauguugag

SEQ ID NO: 2340114 - RNA, 19 nt, Artificial Sequence
  Description of Artificial Sequence: Synthetic oligonucleotide
  Sense strand starting at position 339 of SEQ ID NO: 1885410
ucuauaaaugagugguucu

SEQ ID NO: 2340115 - RNA, 19 nt, Artificial Sequence
  Description of Artificial Sequence: Synthetic oligonucleotide
  Antisense strand to SEQ ID NO: 2340114
agaaccacucauuuauaga

SEQ ID NO: 2340116 - RNA, 19 nt, Artificial Sequence
  Description of Artificial Sequence: Synthetic oligonucleotide
  Sense strand starting at position 342 of SEQ ID NO: 1885410
auaaaugagugguucuaau

SEQ ID NO: 2340117 - RNA, 19 nt, Artificial Sequence
  Description of Artificial Sequence: Synthetic oligonucleotide
  Antisense strand to SEQ ID NO: 2340116
auuagaaccacucauuuau

SEQ ID NO: 2340118 - RNA, 19 nt, Artificial Sequence
  Description of Artificial Sequence: Synthetic oligonucleotide
  Sense strand starting at position 417 of SEQ ID NO: 1885410
agcaaacucagcugagaga

SEQ ID NO: 2340119 - RNA, 19 nt, Artificial Sequence
  Description of Artificial Sequence: Synthetic oligonucleotide
  Antisense strand to SEQ ID NO: 2340118
ucucucagcugaguuugcu

SEQ ID NO: 2340120 - RNA, 19 nt, Artificial Sequence
  Description of Artificial Sequence: Synthetic oligonucleotide
  Sense strand starting at position 583 of SEQ ID NO: 1885410
guggguucccucugagauc

SEQ ID NO: 2340121 - RNA, 19 nt, Artificial Sequence
  Description of Artificial Sequence: Synthetic oligonucleotide
  Antisense strand to SEQ ID NO: 2340120
gaucucagagggaacccac

SEQ ID NO: 2340122 - RNA, 19 nt, Artificial Sequence
  Description of Artificial Sequence: Synthetic oligonucleotide
  Sense strand starting at position 584 of SEQ ID NO: 1885410
uggguucccucugagauca

SEQ ID NO: 2340123 - RNA, 19 nt, Artificial Sequence
  Description of Artificial Sequence: Synthetic oligonucleotide
  Antisense strand to SEQ ID NO: 2340122
ugaucucagagggaaccca

SEQ ID NO: 2340124 - RNA, 19 nt, Artificial Sequence
  Description of Artificial Sequence: Synthetic oligonucleotide
  Sense strand starting at position 586 of SEQ ID NO: 1885410
gguucccucugagaucagu

SEQ ID NO: 2340125 - RNA, 19 nt, Artificial Sequence
  Description of Artificial Sequence: Synthetic oligonucleotide
  Antisense strand to SEQ ID NO: 2340124
acugaucucagagggaacc

SEQ ID NO: 2340126 - RNA, 19 nt, Artificial Sequence
  Description of Artificial Sequence: Synthetic oligonucleotide
  Sense strand starting at position 1238 of SEQ ID NO: 1885410
uggauuaucccgggucgga

SEQ ID NO: 2340127 - RNA, 19 nt, Artificial Sequence
  Description of Artificial Sequence: Synthetic oligonucleotide
  Antisense strand to SEQ ID NO: 2340126
uccgacccgggauaaucca

SEQ ID NO: 2340128 - RNA, 19 nt, Artificial Sequence
  Description of Artificial Sequence: Synthetic oligonucleotide
  Sense strand starting at position 1299 of SEQ ID NO: 1885410
gugcuucucuaguccaguu

SEQ ID NO: 2340129 - RNA, 19 nt, Artificial Sequence
  Description of Artificial Sequence: Synthetic oligonucleotide
  Antisense strand to SEQ ID NO: 2340128
aacuggacuagagaagcac

SEQ ID NO: 2340130 - RNA, 19 nt, Artificial Sequence
  Description of Artificial Sequence: Synthetic oligonucleotide
  Sense strand starting at position 1807 of SEQ ID NO: 1885410
agagcaaucugagaagcga

SEQ ID NO: 2340131 - RNA, 19 nt, Artificial Sequence
  Description of Artificial Sequence: Synthetic oligonucleotide
  Antisense strand to SEQ ID NO: 2340130
ucgcuucucagauugcucu

SEQ ID NO: 2340132 - RNA, 19 nt, Artificial Sequence
  Description of Artificial Sequence: Synthetic oligonucleotide
  Sense strand starting at position 1870 of SEQ ID NO: 1885410
accgcuucccaggaaguaa

SEQ ID NO: 2340133 - RNA, 19 nt, Artificial Sequence
  Description of Artificial Sequence: Synthetic oligonucleotide
  Antisense strand to SEQ ID NO: 2340132
uuacuuccugggaagcggu

SEQ ID NO: 2340134 - RNA, 19 nt, Artificial Sequence
  Description of Artificial Sequence: Synthetic oligonucleotide
  Sense strand starting at position 2505 of SEQ ID NO: 1885410
ccuugaagucuccggaaau

SEQ ID NO: 2340135 - RNA, 19 nt, Artificial Sequence
  Description of Artificial Sequence: Synthetic oligonucleotide
  Antisense strand to SEQ ID NO: 2340134
auuuccggagacuucaagg

SEQ ID NO: 2340136 - RNA, 19 nt, Artificial Sequence
  Description of Artificial Sequence: Synthetic oligonucleotide
  Sense strand starting at position 2506 of SEQ ID NO: 1885410
cuugaagucuccggaaaug

SEQ ID NO: 2340137 - RNA, 19 nt, Artificial Sequence
  Description of Artificial Sequence: Synthetic oligonucleotide
  Antisense strand to SEQ ID NO: 2340136
cauuuccggagacuucaag

SEQ ID NO: 2340138 - RNA, 19 nt, Artificial Sequence
  Description of Artificial Sequence: Synthetic oligonucleotide
  Sense strand starting at position 2545 of SEQ ID NO: 1885410
aggacagucccucgaacaa

SEQ ID NO: 2340139 - RNA, 19 nt, Artificial Sequence
  Description of Artificial Sequence: Synthetic oligonucleotide
  Antisense strand to SEQ ID NO: 2340138
uuguucgagggacuguccu

SEQ ID NO: 2340140 - RNA, 19 nt, Artificial Sequence
  Description of Artificial Sequence: Synthetic oligonucleotide
  Sense strand starting at position 2667 of SEQ ID NO: 1885410
cugggccuuccucaggaaa

SEQ ID NO: 2340141 - RNA, 19 nt, Artificial Sequence
  Description of Artificial Sequence: Synthetic oligonucleotide
  Antisense strand to SEQ ID NO: 2340140
uuuccugaggaaggcccag

SEQ ID NO: 2340142 - RNA, 19 nt, Artificial Sequence
  Description of Artificial Sequence: Synthetic oligonucleotide
  Sense strand starting at position 2669 of SEQ ID NO: 1885410
gggccuuccucaggaaaug

SEQ ID NO: 2340143 - RNA, 19 nt, Artificial Sequence
  Description of Artificial Sequence: Synthetic oligonucleotide
  Antisense strand to SEQ ID NO: 2340142
cauuuccugaggaaggccc

SEQ ID NO: 2340144 - RNA, 19 nt, Artificial Sequence
  Description of Artificial Sequence: Synthetic oligonucleotide
  Sense strand starting at position 2709 of SEQ ID NO: 1885410
gaggauuugugagguggag

SEQ ID NO: 2340145 - RNA, 19 nt, Artificial Sequence
  Description of Artificial Sequence: Synthetic oligonucleotide
  Antisense strand to SEQ ID NO: 2340144
cuccaccucacaaauccuc

SEQ ID NO: 2340146 - RNA, 19 nt, Artificial Sequence
  Description of Artificial Sequence: Synthetic oligonucleotide
  Sense strand starting at position 2751 of SEQ ID NO: 1885410
gggugauaccucugcucug

SEQ ID NO: 2340147 - RNA, 19 nt, Artificial Sequence
  Description of Artificial Sequence: Synthetic oligonucleotide
  Antisense strand to SEQ ID NO: 2340146
cagagcagagguaucaccc

SEQ ID NO: 2340148 - RNA, 19 nt, Artificial Sequence
  Description of Artificial Sequence: Synthetic oligonucleotide
  Sense strand starting at position 3016 of SEQ ID NO: 1885410
cuucgauggagccgaaauu

SEQ ID NO: 2340149 - RNA, 19 nt, Artificial Sequence
  Description of Artificial Sequence: Synthetic oligonucleotide
  Antisense strand to SEQ ID NO: 2340148
aauuucggcuccaucgaag

SEQ ID NO: 2340150 - RNA, 19 nt, Artificial Sequence
  Description of Artificial Sequence: Synthetic oligonucleotide
  Sense strand starting at position 3309 of SEQ ID NO: 1885410
ggaagucucucccugagca

SEQ ID NO: 2340151 - RNA, 19 nt, Artificial Sequence
  Description of Artificial Sequence: Synthetic oligonucleotide
  Antisense strand to SEQ ID NO: 2340150
ugcucagggagagacuucc

SEQ ID NO: 2340152 - RNA, 19 nt, Artificial Sequence
  Description of Artificial Sequence: Synthetic oligonucleotide
  Sense strand starting at position 3398 of SEQ ID NO: 1885410
cagagacaugucgguuuaa

SEQ ID NO: 2340153 - RNA, 19 nt, Artificial Sequence
  Description of Artificial Sequence: Synthetic oligonucleotide
  Antisense strand to SEQ ID NO: 2340152
uuaaaccgacaugucucug

SEQ ID NO: 2340154 - RNA, 19 nt, Artificial Sequence
  Description of Artificial Sequence: Synthetic oligonucleotide
  Sense strand starting at position 3399 of SEQ ID NO: 1885410
agagacaugucgguuuaau

SEQ ID NO: 2340155 - RNA, 19 nt, Artificial Sequence
  Description of Artificial Sequence: Synthetic oligonucleotide
  Antisense strand to SEQ ID NO: 2340154
auuaaaccgacaugucucu

SEQ ID NO: 2340156 - RNA, 19 nt, Artificial Sequence
  Description of Artificial Sequence: Synthetic oligonucleotide
  Sense strand starting at position 3480 of SEQ ID NO: 1885410
cgugggaugccagguagau

SEQ ID NO: 2340157 - RNA, 19 nt, Artificial Sequence
  Description of Artificial Sequence: Synthetic oligonucleotide
  Antisense strand to SEQ ID NO: 2340156
aucuaccuggcaucccacg

SEQ ID NO: 2340158 - RNA, 19 nt, Artificial Sequence
  Description of Artificial Sequence: Synthetic oligonucleotide
  Sense strand starting at position 3518 of SEQ ID NO: 1885410
guagaacucucccuggacu

SEQ ID NO: 2340159 - RNA, 19 nt, Artificial Sequence
  Description of Artificial Sequence: Synthetic oligonucleotide
  Antisense strand to SEQ ID NO: 2340158
aguccagggagaguucuac

SEQ ID NO: 2340160 - RNA, 19 nt, Artificial Sequence
  Description of Artificial Sequence: Synthetic oligonucleotide
  Sense strand starting at position 3598 of SEQ ID NO: 1885410
ggguuccaucgcgaaauua

SEQ ID NO: 2340161 - RNA, 19 nt, Artificial Sequence
  Description of Artificial Sequence: Synthetic oligonucleotide
  Antisense strand to SEQ ID NO: 2340160
uaauuucgcgauggaaccc

SEQ ID NO: 2340162 - RNA, 19 nt, Artificial Sequence
  Description of Artificial Sequence: Synthetic oligonucleotide
  Sense strand starting at position 3652 of SEQ ID NO: 1885410
uuccuuaaggcuuagccaa

SEQ ID NO: 2340163 - RNA, 19 nt, Artificial Sequence
  Description of Artificial Sequence: Synthetic oligonucleotide
  Antisense strand to SEQ ID NO: 2340162
uuggcuaagccuuaaggaa

SEQ ID NO: 2340164 - RNA, 19 nt, Artificial Sequence
  Description of Artificial Sequence: Synthetic oligonucleotide
  Sense strand starting at position 3690 of SEQ ID NO: 1885410
cccugccuuugcucuaaga

SEQ ID NO: 2340165 - RNA, 19 nt, Artificial Sequence
  Description of Artificial Sequence: Synthetic oligonucleotide
  Antisense strand to SEQ ID NO: 2340164
ucuuagagcaaaggcaggg

SEQ ID NO: 2340166 - RNA, 19 nt, Artificial Sequence
  Description of Artificial Sequence: Synthetic oligonucleotide
  Sense strand starting at position 3692 of SEQ ID NO: 1885410
cugccuuugcucuaagaca

SEQ ID NO: 2340167 - RNA, 19 nt, Artificial Sequence
  Description of Artificial Sequence: Synthetic oligonucleotide
  Antisense strand to SEQ ID NO: 2340166
ugucuuagagcaaaggcag

SEQ ID NO: 2340168 - RNA, 19 nt, Artificial Sequence
  Description of Artificial Sequence: Synthetic oligonucleotide
  Sense strand starting at position 3720 of SEQ ID NO: 1885410
ccggaacuuugguggaacu

SEQ ID NO: 2340169 - RNA, 19 nt, Artificial Sequence
  Description of Artificial Sequence: Synthetic oligonucleotide
  Antisense strand to SEQ ID NO: 2340168
aguuccaccaaaguuccgg

SEQ ID NO: 2340170 - RNA, 19 nt, Artificial Sequence
  Description of Artificial Sequence: Synthetic oligonucleotide
  Sense strand starting at position 3880 of SEQ ID NO: 1885410
acacgagaggcuuguuucu

SEQ ID NO: 2340171 - RNA, 19 nt, Artificial Sequence
  Description of Artificial Sequence: Synthetic oligonucleotide
  Antisense strand to SEQ ID NO: 2340170
agaaacaagccucucgugu

SEQ ID NO: 2340172 - RNA, 19 nt, Artificial Sequence
  Description of Artificial Sequence: Synthetic oligonucleotide
  Sense strand starting at position 3886 of SEQ ID NO: 1885410
gaggcuuguuucugcacca

SEQ ID NO: 2340173 - RNA, 19 nt, Artificial Sequence
  Description of Artificial Sequence: Synthetic oligonucleotide
  Antisense strand to SEQ ID NO: 2340172
uggugcagaaacaagccuc

SEQ ID NO: 2340174 - RNA, 19 nt, Artificial Sequence
  Description of Artificial Sequence: Synthetic oligonucleotide
  Sense strand starting at position 144 of SEQ ID NO: 1885411
aggcguaaaccuuagcaau

SEQ ID NO: 2340175 - RNA, 19 nt, Artificial Sequence
  Description of Artificial Sequence: Synthetic oligonucleotide
  Antisense strand to SEQ ID NO: 2340174
auugcuaagguuuacgccu

SEQ ID NO: 2340176 - RNA, 19 nt, Artificial Sequence
  Description of Artificial Sequence: Synthetic oligonucleotide
  Sense strand starting at position 146 of SEQ ID NO: 1885411
gcguaaaccuuagcaauuu

SEQ ID NO: 2340177 - RNA, 19 nt, Artificial Sequence
  Description of Artificial Sequence: Synthetic oligonucleotide
  Antisense strand to SEQ ID NO: 2340176
aaauugcuaagguuuacgc

SEQ ID NO: 2340178 - RNA, 19 nt, Artificial Sequence
  Description of Artificial Sequence: Synthetic oligonucleotide
  Sense strand starting at position 427 of SEQ ID NO: 1885411
gagaguaagcuauauuacu

SEQ ID NO: 2340179 - RNA, 19 nt, Artificial Sequence
  Description of Artificial Sequence: Synthetic oligonucleotide
  Antisense strand to SEQ ID NO: 2340178
aguaauauagcuuacucuc

SEQ ID NO: 2340180 - RNA, 19 nt, Artificial Sequence
  Description of Artificial Sequence: Synthetic oligonucleotide
  Sense strand starting at position 464 of SEQ ID NO: 1885411
ucaguaauuuaugaaguag

SEQ ID NO: 2340181 - RNA, 19 nt, Artificial Sequence
  Description of Artificial Sequence: Synthetic oligonucleotide
  Antisense strand to SEQ ID NO: 2340180
cuacuucauaaauuacuga

SEQ ID NO: 2340182 - RNA, 19 nt, Artificial Sequence
  Description of Artificial Sequence: Synthetic oligonucleotide
  Sense strand starting at position 478 of SEQ ID NO: 1885411
aguaguacuguguaucaac

SEQ ID NO: 2340183 - RNA, 19 nt, Artificial Sequence
  Description of Artificial Sequence: Synthetic oligonucleotide
  Antisense strand to SEQ ID NO: 2340182
guugauacacaguacuacu

SEQ ID NO: 2340184 - RNA, 19 nt, Artificial Sequence
  Description of Artificial Sequence: Synthetic oligonucleotide
  Sense strand starting at position 516 of SEQ ID NO: 1885411
acgugaaacucuccaggau

SEQ ID NO: 2340185 - RNA, 19 nt, Artificial Sequence
  Description of Artificial Sequence: Synthetic oligonucleotide
  Antisense strand to SEQ ID NO: 2340184
auccuggagaguuucacgu

SEQ ID NO: 2340186 - RNA, 19 nt, Artificial Sequence
  Description of Artificial Sequence: Synthetic oligonucleotide
  Sense strand starting at position 517 of SEQ ID NO: 1885411
cgugaaacucuccaggaug

SEQ ID NO: 2340187 - RNA, 19 nt, Artificial Sequence
  Description of Artificial Sequence: Synthetic oligonucleotide
  Antisense strand to SEQ ID NO: 2340186
cauccuggagaguuucacg

SEQ ID NO: 2340188 - RNA, 19 nt, Artificial Sequence
  Description of Artificial Sequence: Synthetic oligonucleotide
  Sense strand starting at position 519 of SEQ ID NO: 1885411
ugaaacucuccaggauguu

SEQ ID NO: 2340189 - RNA, 19 nt, Artificial Sequence
  Description of Artificial Sequence: Synthetic oligonucleotide
  Antisense strand to SEQ ID NO: 2340188
aacauccuggagaguuuca

SEQ ID NO: 2340190 - RNA, 19 nt, Artificial Sequence
  Description of Artificial Sequence: Synthetic oligonucleotide
  Sense strand starting at position 528 of SEQ ID NO: 1885411
ccaggauguuugguagaaa

SEQ ID NO: 2340191 - RNA, 19 nt, Artificial Sequence
  Description of Artificial Sequence: Synthetic oligonucleotide
  Antisense strand to SEQ ID NO: 2340190
uuucuaccaaacauccugg

SEQ ID NO: 2340192 - RNA, 19 nt, Artificial Sequence
  Description of Artificial Sequence: Synthetic oligonucleotide
  Sense strand starting at position 579 of SEQ ID NO: 1885411
gucucauuacugcagauua

SEQ ID NO: 2340193 - RNA, 19 nt, Artificial Sequence
  Description of Artificial Sequence: Synthetic oligonucleotide
  Antisense strand to SEQ ID NO: 2340192
uaaucugcaguaaugagac

SEQ ID NO: 2340194 - RNA, 19 nt, Artificial Sequence
  Description of Artificial Sequence: Synthetic oligonucleotide
  Sense strand starting at position 601 of SEQ ID NO: 1885411
gguguuacuugaguacaga

SEQ ID NO: 2340195 - RNA, 19 nt, Artificial Sequence
  Description of Artificial Sequence: Synthetic oligonucleotide
  Antisense strand to SEQ ID NO: 2340194
ucuguacucaaguaacacc

SEQ ID NO: 2340196 - RNA, 19 nt, Artificial Sequence
  Description of Artificial Sequence: Synthetic oligonucleotide
  Sense strand starting at position 602 of SEQ ID NO: 1885411
guguuacuugaguacagag

SEQ ID NO: 2340197 - RNA, 19 nt, Artificial Sequence
  Description of Artificial Sequence: Synthetic oligonucleotide
  Antisense strand to SEQ ID NO: 2340196
cucuguacucaaguaacac

SEQ ID NO: 2340198 - RNA, 19 nt, Artificial Sequence
  Description of Artificial Sequence: Synthetic oligonucleotide
  Sense strand starting at position 604 of SEQ ID NO: 1885411
guuacuugaguacagaguu

SEQ ID NO: 2340199 - RNA, 19 nt, Artificial Sequence
  Description of Artificial Sequence: Synthetic oligonucleotide
  Antisense strand to SEQ ID NO: 2340198
aacucuguacucaaguaac

SEQ ID NO: 2340200 - RNA, 19 nt, Artificial Sequence
  Description of Artificial Sequence: Synthetic oligonucleotide
  Sense strand starting at position 614 of SEQ ID NO: 1885411
uacagaguuugggcaccua

SEQ ID NO: 2340201 - RNA, 19 nt, Artificial Sequence
  Description of Artificial Sequence: Synthetic oligonucleotide
  Antisense strand to SEQ ID NO: 2340200
uaggugcccaaacucugua

SEQ ID NO: 2340202 - RNA, 19 nt, Artificial Sequence
  Description of Artificial Sequence: Synthetic oligonucleotide
  Sense strand starting at position 633 of SEQ ID NO: 1885411
agcaguuugagguaaauag

SEQ ID NO: 2340203 - RNA, 19 nt, Artificial Sequence
  Description of Artificial Sequence: Synthetic oligonucleotide
  Antisense strand to SEQ ID NO: 2340202
cuauuuaccucaaacugcu

SEQ ID NO: 2340204 - RNA, 19 nt, Artificial Sequence
  Description of Artificial Sequence: Synthetic oligonucleotide
  Sense strand starting at position 655 of SEQ ID NO: 1885411
gcugcacugaggugagaaa

SEQ ID NO: 2340205 - RNA, 19 nt, Artificial Sequence
  Description of Artificial Sequence: Synthetic oligonucleotide
  Antisense strand to SEQ ID NO: 2340204
uuucucaccucagugcagc

SEQ ID NO: 2340206 - RNA, 19 nt, Artificial Sequence
  Description of Artificial Sequence: Synthetic oligonucleotide
  Sense strand starting at position 1419 of SEQ ID NO: 1885411
ucgccauagcguucgaaga

SEQ ID NO: 2340207 - RNA, 19 nt, Artificial Sequence
  Description of Artificial Sequence: Synthetic oligonucleotide
  Antisense strand to SEQ ID NO: 2340206
ucuucgaacgcuauggcga

SEQ ID NO: 2340208 - RNA, 19 nt, Artificial Sequence
  Description of Artificial Sequence: Synthetic oligonucleotide
  Sense strand starting at position 1534 of SEQ ID NO: 1885411
ucuugaugucgauagugaa

SEQ ID NO: 2340209 - RNA, 19 nt, Artificial Sequence
  Description of Artificial Sequence: Synthetic oligonucleotide
  Antisense strand to SEQ ID NO: 2340208
uucacuaucgacaucaaga

SEQ ID NO: 2340210 - RNA, 19 nt, Artificial Sequence
  Description of Artificial Sequence: Synthetic oligonucleotide
  Sense strand starting at position 1770 of SEQ ID NO: 1885411
ggccuagauuuauagacag

SEQ ID NO: 2340211 - RNA, 19 nt, Artificial Sequence
  Description of Artificial Sequence: Synthetic oligonucleotide
  Antisense strand to SEQ ID NO: 2340210
cugucuauaaaucuaggcc

SEQ ID NO: 2340212 - RNA, 19 nt, Artificial Sequence
  Description of Artificial Sequence: Synthetic oligonucleotide
  Sense strand starting at position 1780 of SEQ ID NO: 1885411
uauagacagugugucuaua

SEQ ID NO: 2340213 - RNA, 19 nt, Artificial Sequence
  Description of Artificial Sequence: Synthetic oligonucleotide
  Antisense strand to SEQ ID NO: 2340212
uauagacacacugucuaua

SEQ ID NO: 2340214 - RNA, 19 nt, Artificial Sequence
  Description of Artificial Sequence: Synthetic oligonucleotide
  Sense strand starting at position 1782 of SEQ ID NO: 1885411
uagacagugugucuauaua

SEQ ID NO: 2340215 - RNA, 19 nt, Artificial Sequence
  Description of Artificial Sequence: Synthetic oligonucleotide
  Antisense strand to SEQ ID NO: 2340214
uauauagacacacugucua

SEQ ID NO: 2340216 - RNA, 19 nt, Artificial Sequence
  Description of Artificial Sequence: Synthetic oligonucleotide
  Sense strand starting at position 1803 of SEQ ID NO: 1885411
uguauacgucucuacauaa

SEQ ID NO: 2340217 - RNA, 19 nt, Artificial Sequence
  Description of Artificial Sequence: Synthetic oligonucleotide
  Antisense strand to SEQ ID NO: 2340216
uuauguagagacguauaca

SEQ ID NO: 2340218 - RNA, 19 nt, Artificial Sequence
  Description of Artificial Sequence: Synthetic oligonucleotide
  Sense strand starting at position 2139 of SEQ ID NO: 1885411
ggcuguacucuugggacaa

SEQ ID NO: 2340219 - RNA, 19 nt, Artificial Sequence
  Description of Artificial Sequence: Synthetic oligonucleotide
  Antisense strand to SEQ ID NO: 2340218
uugucccaagaguacagcc

SEQ ID NO: 2340220 - RNA, 19 nt, Artificial Sequence
  Description of Artificial Sequence: Synthetic oligonucleotide
  Sense strand starting at position 2151 of SEQ ID NO: 1885411
gggacaaauuaugugaugu

SEQ ID NO: 2340221 - RNA, 19 nt, Artificial Sequence
  Description of Artificial Sequence: Synthetic oligonucleotide
  Antisense strand to SEQ ID NO: 2340220
acaucacauaauuuguccc

SEQ ID NO: 2340222 - RNA, 19 nt, Artificial Sequence
  Description of Artificial Sequence: Synthetic oligonucleotide
  Sense strand starting at position 2152 of SEQ ID NO: 1885411
ggacaaauuaugugaugug

SEQ ID NO: 2340223 - RNA, 19 nt, Artificial Sequence
  Description of Artificial Sequence: Synthetic oligonucleotide
  Antisense strand to SEQ ID NO: 2340222
cacaucacauaauuugucc

SEQ ID NO: 2340224 - RNA, 19 nt, Artificial Sequence
  Description of Artificial Sequence: Synthetic oligonucleotide
  Sense strand starting at position 2749 of SEQ ID NO: 1885411
cucagaggacuccgugaaa

SEQ ID NO: 2340225 - RNA, 19 nt, Artificial Sequence
  Description of Artificial Sequence: Synthetic oligonucleotide
  Antisense strand to SEQ ID NO: 2340224
uuucacggaguccucugag

SEQ ID NO: 2340226 - RNA, 19 nt, Artificial Sequence
  Description of Artificial Sequence: Synthetic oligonucleotide
  Sense strand starting at position 2816 of SEQ ID NO: 1885411
gucuuaugacaagggucaa

SEQ ID NO: 2340227 - RNA, 19 nt, Artificial Sequence
  Description of Artificial Sequence: Synthetic oligonucleotide
  Antisense strand to SEQ ID NO: 2340226
uugacccuugucauaagac

SEQ ID NO: 2340228 - RNA, 19 nt, Artificial Sequence
  Description of Artificial Sequence: Synthetic oligonucleotide
  Sense strand starting at position 2852 of SEQ ID NO: 1885411
gggccagauagccaguauu

SEQ ID NO: 2340229 - RNA, 19 nt, Artificial Sequence
  Description of Artificial Sequence: Synthetic oligonucleotide
  Antisense strand to SEQ ID NO: 2340228
aauacuggcuaucuggccc

SEQ ID NO: 2340230 - RNA, 19 nt, Artificial Sequence
  Description of Artificial Sequence: Synthetic oligonucleotide
  Sense strand starting at position 2924 of SEQ ID NO: 1885411
cauggugacuccuuaauga

SEQ ID NO: 2340231 - RNA, 19 nt, Artificial Sequence
  Description of Artificial Sequence: Synthetic oligonucleotide
  Antisense strand to SEQ ID NO: 2340230
ucauuaaggagucaccaug

SEQ ID NO: 2340232 - RNA, 19 nt, Artificial Sequence
  Description of Artificial Sequence: Synthetic oligonucleotide
  Sense strand starting at position 2932 of SEQ ID NO: 1885411
cuccuuaaugaauguugaa

SEQ ID NO: 2340233 - RNA, 19 nt, Artificial Sequence
  Description of Artificial Sequence: Synthetic oligonucleotide
  Antisense strand to SEQ ID NO: 2340232
uucaacauucauuaaggag

SEQ ID NO: 2340234 - RNA, 19 nt, Artificial Sequence
  Description of Artificial Sequence: Synthetic oligonucleotide
  Sense strand starting at position 3001 of SEQ ID NO: 1885411
gcuugacauuugcuuacuu

SEQ ID NO: 2340235 - RNA, 19 nt, Artificial Sequence
  Description of Artificial Sequence: Synthetic oligonucleotide
  Antisense strand to SEQ ID NO: 2340234
aaguaagcaaaugucaagc

SEQ ID NO: 2340236 - RNA, 19 nt, Artificial Sequence
  Description of Artificial Sequence: Synthetic oligonucleotide
  Sense strand starting at position 3106 of SEQ ID NO: 1885411
gggcuuuauuuguccucaa

SEQ ID NO: 2340237 - RNA, 19 nt, Artificial Sequence
  Description of Artificial Sequence: Synthetic oligonucleotide
  Antisense strand to SEQ ID NO: 2340236
uugaggacaaauaaagccc

SEQ ID NO: 2340238 - RNA, 19 nt, Artificial Sequence
  Description of Artificial Sequence: Synthetic oligonucleotide
  Sense strand starting at position 3107 of SEQ ID NO: 1885411
ggcuuuauuuguccucaaa

SEQ ID NO: 2340239 - RNA, 19 nt, Artificial Sequence
  Description of Artificial Sequence: Synthetic oligonucleotide
  Antisense strand to SEQ ID NO: 2340238
uuugaggacaaauaaagcc

SEQ ID NO: 2340240 - RNA, 19 nt, Artificial Sequence
  Description of Artificial Sequence: Synthetic oligonucleotide
  Sense strand starting at position 3179 of SEQ ID NO: 1885411
gugguacguccacauaaca

SEQ ID NO: 2340241 - RNA, 19 nt, Artificial Sequence
  Description of Artificial Sequence: Synthetic oligonucleotide
  Antisense strand to SEQ ID NO: 2340240
uguuauguggacguaccac

SEQ ID NO: 2340242 - RNA, 19 nt, Artificial Sequence
  Description of Artificial Sequence: Synthetic oligonucleotide
  Sense strand starting at position 3282 of SEQ ID NO: 1885411
guuacaaacuguguauaua

SEQ ID NO: 2340243 - RNA, 19 nt, Artificial Sequence
  Description of Artificial Sequence: Synthetic oligonucleotide
  Antisense strand to SEQ ID NO: 2340242
uauauacacaguuuguaac

SEQ ID NO: 2340244 - RNA, 19 nt, Artificial Sequence
  Description of Artificial Sequence: Synthetic oligonucleotide
  Sense strand starting at position 3320 of SEQ ID NO: 1885411
acuauugcugcagaacaca

SEQ ID NO: 2340245 - RNA, 19 nt, Artificial Sequence
  Description of Artificial Sequence: Synthetic oligonucleotide
  Antisense strand to SEQ ID NO: 2340244
uguguucugcagcaauagu

SEQ ID NO: 2340246 - RNA, 19 nt, Artificial Sequence
  Description of Artificial Sequence: Synthetic oligonucleotide
  Sense strand starting at position 3371 of SEQ ID NO: 1885411
ggcaguuaaccacauggua

SEQ ID NO: 2340247 - RNA, 19 nt, Artificial Sequence
  Description of Artificial Sequence: Synthetic oligonucleotide
  Antisense strand to SEQ ID NO: 2340246
uaccaugugguuaacugcc

SEQ ID NO: 2340248 - RNA, 19 nt, Artificial Sequence
  Description of Artificial Sequence: Synthetic oligonucleotide
  Sense strand starting at position 3417 of SEQ ID NO: 1885411
acuaaaucuugauuguggu

SEQ ID NO: 2340249 - RNA, 19 nt, Artificial Sequence
  Description of Artificial Sequence: Synthetic oligonucleotide
  Antisense strand to SEQ ID NO: 2340248
accacaaucaagauuuagu

SEQ ID NO: 2340250 - RNA, 19 nt, Artificial Sequence
  Description of Artificial Sequence: Synthetic oligonucleotide
  Sense strand starting at position 3427 of SEQ ID NO: 1885411
gauuguggugaugacuaca

SEQ ID NO: 2340251 - RNA, 19 nt, Artificial Sequence
  Description of Artificial Sequence: Synthetic oligonucleotide
  Antisense strand to SEQ ID NO: 2340250
uguagucaucaccacaauc

SEQ ID NO: 2340252 - RNA, 19 nt, Artificial Sequence
  Description of Artificial Sequence: Synthetic oligonucleotide
  Sense strand starting at position 3471 of SEQ ID NO: 1885411
agucuaacugugcacuaaa

SEQ ID NO: 2340253 - RNA, 19 nt, Artificial Sequence
  Description of Artificial Sequence: Synthetic oligonucleotide
  Antisense strand to SEQ ID NO: 2340252
uuuagugcacaguuagacu

SEQ ID NO: 2340254 - RNA, 19 nt, Artificial Sequence
  Description of Artificial Sequence: Synthetic oligonucleotide
  Sense strand starting at position 159 of SEQ ID NO: 1885412
cccuuuauaggauguuaaa

SEQ ID NO: 2340255 - RNA, 19 nt, Artificial Sequence
  Description of Artificial Sequence: Synthetic oligonucleotide
  Antisense strand to SEQ ID NO: 2340254
uuuaacauccuauaaaggg

SEQ ID NO: 2340256 - RNA, 19 nt, Artificial Sequence
  Description of Artificial Sequence: Synthetic oligonucleotide
  Sense strand starting at position 349 of SEQ ID NO: 1885412
ugcuauuauuuaggaagaa

SEQ ID NO: 2340257 - RNA, 19 nt, Artificial Sequence
  Description of Artificial Sequence: Synthetic oligonucleotide
  Antisense strand to SEQ ID NO: 2340256
uucuuccuaaauaauagca

SEQ ID NO: 2340258 - RNA, 19 nt, Artificial Sequence
  Description of Artificial Sequence: Synthetic oligonucleotide
  Sense strand starting at position 350 of SEQ ID NO: 1885412
gcuauuauuuaggaagaau

SEQ ID NO: 2340259 - RNA, 19 nt, Artificial Sequence
  Description of Artificial Sequence: Synthetic oligonucleotide
  Antisense strand to SEQ ID NO: 2340258
auucuuccuaaauaauagc

SEQ ID NO: 2340260 - RNA, 19 nt, Artificial Sequence
  Description of Artificial Sequence: Synthetic oligonucleotide
  Sense strand starting at position 378 of SEQ ID NO: 1885412
uaaauaagacagugacagu

SEQ ID NO: 2340261 - RNA, 19 nt, Artificial Sequence
  Description of Artificial Sequence: Synthetic oligonucleotide
  Antisense strand to SEQ ID NO: 2340260
acugucacugucuuauuua

SEQ ID NO: 2340262 - RNA, 19 nt, Artificial Sequence
  Description of Artificial Sequence: Synthetic oligonucleotide
  Sense strand starting at position 385 of SEQ ID NO: 1885412
gacagugacagugguauga

SEQ ID NO: 2340263 - RNA, 19 nt, Artificial Sequence
  Description of Artificial Sequence: Synthetic oligonucleotide
  Antisense strand to SEQ ID NO: 2340262
ucauaccacugucacuguc

SEQ ID NO: 2340264 - RNA, 19 nt, Artificial Sequence
  Description of Artificial Sequence: Synthetic oligonucleotide
  Sense strand starting at position 389 of SEQ ID NO: 1885412
gugacagugguaugagaga

SEQ ID NO: 2340265 - RNA, 19 nt, Artificial Sequence
  Description of Artificial Sequence: Synthetic oligonucleotide
  Antisense strand to SEQ ID NO: 2340264
ucucucauaccacugucac

SEQ ID NO: 2340266 - RNA, 19 nt, Artificial Sequence
  Description of Artificial Sequence: Synthetic oligonucleotide
  Sense strand starting at position 414 of SEQ ID NO: 1885412
ggcaaaguuugagcaguca

SEQ ID NO: 2340267 - RNA, 19 nt, Artificial Sequence
  Description of Artificial Sequence: Synthetic oligonucleotide
  Antisense strand to SEQ ID NO: 2340266
ugacugcucaaacuuugcc

SEQ ID NO: 2340268 - RNA, 19 nt, Artificial Sequence
  Description of Artificial Sequence: Synthetic oligonucleotide
  Sense strand starting at position 422 of SEQ ID NO: 1885412
uugagcagucagggaaaga

SEQ ID NO: 2340269 - RNA, 19 nt, Artificial Sequence
  Description of Artificial Sequence: Synthetic oligonucleotide
  Antisense strand to SEQ ID NO: 2340268
ucuuucccugacugcucaa

SEQ ID NO: 2340270 - RNA, 19 nt, Artificial Sequence
  Description of Artificial Sequence: Synthetic oligonucleotide
  Sense strand starting at position 472 of SEQ ID NO: 1885412
aacaaauguuuggagaaag

SEQ ID NO: 2340271 - RNA, 19 nt, Artificial Sequence
  Description of Artificial Sequence: Synthetic oligonucleotide
  Antisense strand to SEQ ID NO: 2340270
cuuucuccaaacauuuguu

SEQ ID NO: 2340272 - RNA, 19 nt, Artificial Sequence
  Description of Artificial Sequence: Synthetic oligonucleotide
  Sense strand starting at position 494 of SEQ ID NO: 1885412
gggugagcaaaucaguuua

SEQ ID NO: 2340273 - RNA, 19 nt, Artificial Sequence
  Description of Artificial Sequence: Synthetic oligonucleotide
  Antisense strand to SEQ ID NO: 2340272
uaaacugauuugcucaccc

SEQ ID NO: 2340274 - RNA, 19 nt, Artificial Sequence
  Description of Artificial Sequence: Synthetic oligonucleotide
  Sense strand starting at position 554 of SEQ ID NO: 1885412
aguggagagccagaguaau

SEQ ID NO: 2340275 - RNA, 19 nt, Artificial Sequence
  Description of Artificial Sequence: Synthetic oligonucleotide
  Antisense strand to SEQ ID NO: 2340274
auuacucuggcucuccacu

SEQ ID NO: 2340276 - RNA, 19 nt, Artificial Sequence
  Description of Artificial Sequence: Synthetic oligonucleotide
  Sense strand starting at position 570 of SEQ ID NO: 1885412
aauggaguagcuggugaua

SEQ ID NO: 2340277 - RNA, 19 nt, Artificial Sequence
  Description of Artificial Sequence: Synthetic oligonucleotide
  Antisense strand to SEQ ID NO: 2340276
uaucaccagcuacuccauu

SEQ ID NO: 2340278 - RNA, 19 nt, Artificial Sequence
  Description of Artificial Sequence: Synthetic oligonucleotide
  Sense strand starting at position 655 of SEQ ID NO: 1885412
uuuaacuuucggcaguauu

SEQ ID NO: 2340279 - RNA, 19 nt, Artificial Sequence
  Description of Artificial Sequence: Synthetic oligonucleotide
  Antisense strand to SEQ ID NO: 2340278
aauacugccgaaaguuaaa

SEQ ID NO: 2340280 - RNA, 19 nt, Artificial Sequence
  Description of Artificial Sequence: Synthetic oligonucleotide
  Sense strand starting at position 658 of SEQ ID NO: 1885412
aacuuucggcaguauuaaa

SEQ ID NO: 2340281 - RNA, 19 nt, Artificial Sequence
  Description of Artificial Sequence: Synthetic oligonucleotide
  Antisense strand to SEQ ID NO: 2340280
uuuaauacugccgaaaguu

SEQ ID NO: 2340282 - RNA, 19 nt, Artificial Sequence
  Description of Artificial Sequence: Synthetic oligonucleotide
  Sense strand starting at position 899 of SEQ ID NO: 1885412
accuucugucucuaggagu

SEQ ID NO: 2340283 - RNA, 19 nt, Artificial Sequence
  Description of Artificial Sequence: Synthetic oligonucleotide
  Antisense strand to SEQ ID NO: 2340282
acuccuagagacagaaggu

SEQ ID NO: 2340284 - RNA, 19 nt, Artificial Sequence
  Description of Artificial Sequence: Synthetic oligonucleotide
  Sense strand starting at position 933 of SEQ ID NO: 1885412
uacuuaauguaaguggaau

SEQ ID NO: 2340285 - RNA, 19 nt, Artificial Sequence
  Description of Artificial Sequence: Synthetic oligonucleotide
  Antisense strand to SEQ ID NO: 2340284
auuccacuuacauuaagua

SEQ ID NO: 2340286 - RNA, 19 nt, Artificial Sequence
  Description of Artificial Sequence: Synthetic oligonucleotide
  Sense strand starting at position 1220 of SEQ ID NO: 1885412
augucuuuagauugugaau

SEQ ID NO: 2340287 - RNA, 19 nt, Artificial Sequence
  Description of Artificial Sequence: Synthetic oligonucleotide
  Antisense strand to SEQ ID NO: 2340286
auucacaaucuaaagacau

SEQ ID NO: 2340288 - RNA, 19 nt, Artificial Sequence
  Description of Artificial Sequence: Synthetic oligonucleotide
  Sense strand starting at position 1611 of SEQ ID NO: 1885412
cucauugggcuccauuaga

SEQ ID NO: 2340289 - RNA, 19 nt, Artificial Sequence
  Description of Artificial Sequence: Synthetic oligonucleotide
  Antisense strand to SEQ ID NO: 2340288
ucuaauggagcccaaugag

SEQ ID NO: 2340290 - RNA, 19 nt, Artificial Sequence
  Description of Artificial Sequence: Synthetic oligonucleotide
  Sense strand starting at position 1629 of SEQ ID NO: 1885412
accagccuguguuuacaaa

SEQ ID NO: 2340291 - RNA, 19 nt, Artificial Sequence
  Description of Artificial Sequence: Synthetic oligonucleotide
  Antisense strand to SEQ ID NO: 2340290
uuuguaaacacaggcuggu

SEQ ID NO: 2340292 - RNA, 19 nt, Artificial Sequence
  Description of Artificial Sequence: Synthetic oligonucleotide
  Sense strand starting at position 2115 of SEQ ID NO: 1885412
ccugaaucguucccauuga

SEQ ID NO: 2340293 - RNA, 19 nt, Artificial Sequence
  Description of Artificial Sequence: Synthetic oligonucleotide
  Antisense strand to SEQ ID NO: 2340292
ucaaugggaacgauucagg

SEQ ID NO: 2340294 - RNA, 19 nt, Artificial Sequence
  Description of Artificial Sequence: Synthetic oligonucleotide
  Sense strand starting at position 2205 of SEQ ID NO: 1885412
gagagaaggcucgggucua

SEQ ID NO: 2340295 - RNA, 19 nt, Artificial Sequence
  Description of Artificial Sequence: Synthetic oligonucleotide
  Antisense strand to SEQ ID NO: 2340294
uagacccgagccuucucuc

SEQ ID NO: 2340296 - RNA, 19 nt, Artificial Sequence
  Description of Artificial Sequence: Synthetic oligonucleotide
  Sense strand starting at position 2620 of SEQ ID NO: 1885412
ggauaucucuuugcaggga

SEQ ID NO: 2340297 - RNA, 19 nt, Artificial Sequence
  Description of Artificial Sequence: Synthetic oligonucleotide
  Antisense strand to SEQ ID NO: 2340296
ucccugcaaagagauaucc

SEQ ID NO: 2340298 - RNA, 19 nt, Artificial Sequence
  Description of Artificial Sequence: Synthetic oligonucleotide
  Sense strand starting at position 2660 of SEQ ID NO: 1885412
cccagagaucugugcaguu

SEQ ID NO: 2340299 - RNA, 19 nt, Artificial Sequence
  Description of Artificial Sequence: Synthetic oligonucleotide
  Antisense strand to SEQ ID NO: 2340298
aacugcacagaucucuggg

SEQ ID NO: 2340300 - RNA, 19 nt, Artificial Sequence
  Description of Artificial Sequence: Synthetic oligonucleotide
  Sense strand starting at position 2662 of SEQ ID NO: 1885412
cagagaucugugcaguuuc

SEQ ID NO: 2340301 - RNA, 19 nt, Artificial Sequence
  Description of Artificial Sequence: Synthetic oligonucleotide
  Antisense strand to SEQ ID NO: 2340300
gaaacugcacagaucucug

SEQ ID NO: 2340302 - RNA, 19 nt, Artificial Sequence
  Description of Artificial Sequence: Synthetic oligonucleotide
  Sense strand starting at position 2896 of SEQ ID NO: 1885412
uuuagugaaaccgacugua

SEQ ID NO: 2340303 - RNA, 19 nt, Artificial Sequence
  Description of Artificial Sequence: Synthetic oligonucleotide
  Antisense strand to SEQ ID NO: 2340302
uacagucgguuucacuaaa

SEQ ID NO: 2340304 - RNA, 19 nt, Artificial Sequence
  Description of Artificial Sequence: Synthetic oligonucleotide
  Sense strand starting at position 2984 of SEQ ID NO: 1885412
gcaguucuagcuuaaauca

SEQ ID NO: 2340305 - RNA, 19 nt, Artificial Sequence
  Description of Artificial Sequence: Synthetic oligonucleotide
  Antisense strand to SEQ ID NO: 2340304
ugauuuaagcuagaacugc

SEQ ID NO: 2340306 - RNA, 19 nt, Artificial Sequence
  Description of Artificial Sequence: Synthetic oligonucleotide
  Sense strand starting at position 3104 of SEQ ID NO: 1885412
ugcugagguggccaguaaa

SEQ ID NO: 2340307 - RNA, 19 nt, Artificial Sequence
  Description of Artificial Sequence: Synthetic oligonucleotide
  Antisense strand to SEQ ID NO: 2340306
uuuacuggccaccucagca

SEQ ID NO: 2340308 - RNA, 19 nt, Artificial Sequence
  Description of Artificial Sequence: Synthetic oligonucleotide
  Sense strand starting at position 3142 of SEQ ID NO: 1885412
gcguucguuagcuuggaga

SEQ ID NO: 2340309 - RNA, 19 nt, Artificial Sequence
  Description of Artificial Sequence: Synthetic oligonucleotide
  Antisense strand to SEQ ID NO: 2340308
ucuccaagcuaacgaacgc

SEQ ID NO: 2340310 - RNA, 19 nt, Artificial Sequence
  Description of Artificial Sequence: Synthetic oligonucleotide
  Sense strand starting at position 3325 of SEQ ID NO: 1885412
ggaccaaagugcuuaauca

SEQ ID NO: 2340311 - RNA, 19 nt, Artificial Sequence
  Description of Artificial Sequence: Synthetic oligonucleotide
  Antisense strand to SEQ ID NO: 2340310
ugauuaagcacuuuggucc

SEQ ID NO: 2340312 - RNA, 19 nt, Artificial Sequence
  Description of Artificial Sequence: Synthetic oligonucleotide
  Sense strand starting at position 3326 of SEQ ID NO: 1885412
gaccaaagugcuuaaucag

SEQ ID NO: 2340313 - RNA, 19 nt, Artificial Sequence
  Description of Artificial Sequence: Synthetic oligonucleotide
  Antisense strand to SEQ ID NO: 2340312
cugauuaagcacuuugguc

SEQ ID NO: 2340314 - RNA, 19 nt, Artificial Sequence
  Description of Artificial Sequence: Synthetic oligonucleotide
  Sense strand starting at position 3338 of SEQ ID NO: 1885412
uaaucagaauugguugauu

SEQ ID NO: 2340315 - RNA, 19 nt, Artificial Sequence
  Description of Artificial Sequence: Synthetic oligonucleotide
  Antisense strand to SEQ ID NO: 2340314
aaucaaccaauucugauua

SEQ ID NO: 2340316 - RNA, 19 nt, Artificial Sequence
  Description of Artificial Sequence: Synthetic oligonucleotide
  Sense strand starting at position 3489 of SEQ ID NO: 1885412
uagaguugugacuauugua

SEQ ID NO: 2340317 - RNA, 19 nt, Artificial Sequence
  Description of Artificial Sequence: Synthetic oligonucleotide
  Antisense strand to SEQ ID NO: 2340316
uacaauagucacaacucua

SEQ ID NO: 2340318 - RNA, 19 nt, Artificial Sequence
  Description of Artificial Sequence: Synthetic oligonucleotide
  Sense strand starting at position 3578 of SEQ ID NO: 1885412
gaaggugacauuggaguaa

SEQ ID NO: 2340319 - RNA, 19 nt, Artificial Sequence
  Description of Artificial Sequence: Synthetic oligonucleotide
  Antisense strand to SEQ ID NO: 2340318
uuacuccaaugucaccuuc

SEQ ID NO: 2340320 - RNA, 19 nt, Artificial Sequence
  Description of Artificial Sequence: Synthetic oligonucleotide
  Sense strand starting at position 3609 of SEQ ID NO: 1885412
agggaccaugugugucaaa

SEQ ID NO: 2340321 - RNA, 19 nt, Artificial Sequence
  Description of Artificial Sequence: Synthetic oligonucleotide
  Antisense strand to SEQ ID NO: 2340320
uuugacacacauggucccu

SEQ ID NO: 2340322 - RNA, 19 nt, Artificial Sequence
  Description of Artificial Sequence: Synthetic oligonucleotide
  Sense strand starting at position 3728 of SEQ ID NO: 1885412
uggaaagagccuugugaug

SEQ ID NO: 2340323 - RNA, 19 nt, Artificial Sequence
  Description of Artificial Sequence: Synthetic oligonucleotide
  Antisense strand to SEQ ID NO: 2340322
caucacaaggcucuuucca

SEQ ID NO: 2340324 - RNA, 19 nt, Artificial Sequence
  Description of Artificial Sequence: Synthetic oligonucleotide
  Sense strand starting at position 3789 of SEQ ID NO: 1885412
ggccacaucauguauggga

SEQ ID NO: 2340325 - RNA, 19 nt, Artificial Sequence
  Description of Artificial Sequence: Synthetic oligonucleotide
  Antisense strand to SEQ ID NO: 2340324
ucccauacaugauguggcc

SEQ ID NO: 2340326 - RNA, 19 nt, Artificial Sequence
  Description of Artificial Sequence: Synthetic oligonucleotide
  Sense strand starting at position 3917 of SEQ ID NO: 1885412
guguguuguaggcagagau

SEQ ID NO: 2340327 - RNA, 19 nt, Artificial Sequence
  Description of Artificial Sequence: Synthetic oligonucleotide
  Antisense strand to SEQ ID NO: 2340326
aucucugccuacaacacac

SEQ ID NO: 2340328 - RNA, 19 nt, Artificial Sequence
  Description of Artificial Sequence: Synthetic oligonucleotide
  Sense strand starting at position 3939 of SEQ ID NO: 1885412
gcuaguuugcauuagagug

SEQ ID NO: 2340329 - RNA, 19 nt, Artificial Sequence
  Description of Artificial Sequence: Synthetic oligonucleotide
  Antisense strand to SEQ ID NO: 2340328
cacucuaaugcaaacuagc

SEQ ID NO: 2340330 - RNA, 19 nt, Artificial Sequence
  Description of Artificial Sequence: Synthetic oligonucleotide
  Sense strand starting at position 3944 of SEQ ID NO: 1885412
uuugcauuagagugauggu

SEQ ID NO: 2340331 - RNA, 19 nt, Artificial Sequence
  Description of Artificial Sequence: Synthetic oligonucleotide
  Antisense strand to SEQ ID NO: 2340330
accaucacucuaaugcaaa

SEQ ID NO: 2340332 - RNA, 19 nt, Artificial Sequence
  Description of Artificial Sequence: Synthetic oligonucleotide
  Sense strand starting at position 3951 of SEQ ID NO: 1885412
uagagugaugguggagaca

SEQ ID NO: 2340333 - RNA, 19 nt, Artificial Sequence
  Description of Artificial Sequence: Synthetic oligonucleotide
  Antisense strand to SEQ ID NO: 2340332
ugucuccaccaucacucua

SEQ ID NO: 2340334 - RNA, 19 nt, Artificial Sequence
  Description of Artificial Sequence: Synthetic oligonucleotide
  Sense strand starting at position 724 of SEQ ID NO: 1885413
gaggacaucccuuguagcu

SEQ ID NO: 2340335 - RNA, 19 nt, Artificial Sequence
  Description of Artificial Sequence: Synthetic oligonucleotide
  Antisense strand to SEQ ID NO: 2340334
agcuacaagggauguccuc

SEQ ID NO: 2340336 - RNA, 19 nt, Artificial Sequence
  Description of Artificial Sequence: Synthetic oligonucleotide
  Sense strand starting at position 877 of SEQ ID NO: 1885413
ggacuagcuccaggugagu

SEQ ID NO: 2340337 - RNA, 19 nt, Artificial Sequence
  Description of Artificial Sequence: Synthetic oligonucleotide
  Antisense strand to SEQ ID NO: 2340336
acucaccuggagcuagucc

SEQ ID NO: 2340338 - RNA, 19 nt, Artificial Sequence
  Description of Artificial Sequence: Synthetic oligonucleotide
  Sense strand starting at position 1941 of SEQ ID NO: 1885413
agcgauucagcaggaugau

SEQ ID NO: 2340339 - RNA, 19 nt, Artificial Sequence
  Description of Artificial Sequence: Synthetic oligonucleotide
  Antisense strand to SEQ ID NO: 2340338
aucauccugcugaaucgcu

SEQ ID NO: 2340340 - RNA, 19 nt, Artificial Sequence
  Description of Artificial Sequence: Synthetic oligonucleotide
  Sense strand starting at position 2117 of SEQ ID NO: 1885413
gccagaaagguuuggucuu

SEQ ID NO: 2340341 - RNA, 19 nt, Artificial Sequence
  Description of Artificial Sequence: Synthetic oligonucleotide
  Antisense strand to SEQ ID NO: 2340340
aagaccaaaccuuucuggc

SEQ ID NO: 2340342 - RNA, 19 nt, Artificial Sequence
  Description of Artificial Sequence: Synthetic oligonucleotide
  Sense strand starting at position 2169 of SEQ ID NO: 1885413
uccuguucccuguauuaag

SEQ ID NO: 2340343 - RNA, 19 nt, Artificial Sequence
  Description of Artificial Sequence: Synthetic oligonucleotide
  Antisense strand to SEQ ID NO: 2340342
cuuaauacagggaacagga

SEQ ID NO: 2340344 - RNA, 19 nt, Artificial Sequence
  Description of Artificial Sequence: Synthetic oligonucleotide
  Sense strand starting at position 2300 of SEQ ID NO: 1885413
acaggcugucaauaauauu

SEQ ID NO: 2340345 - RNA, 19 nt, Artificial Sequence
  Description of Artificial Sequence: Synthetic oligonucleotide
  Antisense strand to SEQ ID NO: 2340344
aauauuauugacagccugu

SEQ ID NO: 2340346 - RNA, 19 nt, Artificial Sequence
  Description of Artificial Sequence: Synthetic oligonucleotide
  Sense strand starting at position 2426 of SEQ ID NO: 1885413
gauguagacuguuuccaau

SEQ ID NO: 2340347 - RNA, 19 nt, Artificial Sequence
  Description of Artificial Sequence: Synthetic oligonucleotide
  Antisense strand to SEQ ID NO: 2340346
auuggaaacagucuacauc

SEQ ID NO: 2340348 - RNA, 19 nt, Artificial Sequence
  Description of Artificial Sequence: Synthetic oligonucleotide
  Sense strand starting at position 2428 of SEQ ID NO: 1885413
uguagacuguuuccaauaa

SEQ ID NO: 2340349 - RNA, 19 nt, Artificial Sequence
  Description of Artificial Sequence: Synthetic oligonucleotide
  Antisense strand to SEQ ID NO: 2340348
uuauuggaaacagucuaca

SEQ ID NO: 2340350 - RNA, 19 nt, Artificial Sequence
  Description of Artificial Sequence: Synthetic oligonucleotide
  Sense strand starting at position 2449 of SEQ ID NO: 1885413
ccucaugccuguuccuaga

SEQ ID NO: 2340351 - RNA, 19 nt, Artificial Sequence
  Description of Artificial Sequence: Synthetic oligonucleotide
  Antisense strand to SEQ ID NO: 2340350
ucuaggaacaggcaugagg

SEQ ID NO: 2340352 - RNA, 19 nt, Artificial Sequence
  Description of Artificial Sequence: Synthetic oligonucleotide
  Sense strand starting at position 2451 of SEQ ID NO: 1885413
ucaugccuguuccuagaua

SEQ ID NO: 2340353 - RNA, 19 nt, Artificial Sequence
  Description of Artificial Sequence: Synthetic oligonucleotide
  Antisense strand to SEQ ID NO: 2340352
uaucuaggaacaggcauga

SEQ ID NO: 2340354 - RNA, 19 nt, Artificial Sequence
  Description of Artificial Sequence: Synthetic oligonucleotide
  Sense strand starting at position 2489 of SEQ ID NO: 1885413
ugaccucugucaccagaga

SEQ ID NO: 2340355 - RNA, 19 nt, Artificial Sequence
  Description of Artificial Sequence: Synthetic oligonucleotide
  Antisense strand to SEQ ID NO: 2340354
ucucuggugacagagguca

SEQ ID NO: 2340356 - RNA, 19 nt, Artificial Sequence
  Description of Artificial Sequence: Synthetic oligonucleotide
  Sense strand starting at position 2523 of SEQ ID NO: 1885413
ugaauaagaguguacccuu

SEQ ID NO: 2340357 - RNA, 19 nt, Artificial Sequence
  Description of Artificial Sequence: Synthetic oligonucleotide
  Antisense strand to SEQ ID NO: 2340356
aaggguacacucuuauuca

SEQ ID NO: 2340358 - RNA, 19 nt, Artificial Sequence
  Description of Artificial Sequence: Synthetic oligonucleotide
  Sense strand starting at position 2648 of SEQ ID NO: 1885413
uuaauuguaugaguaucca

SEQ ID NO: 2340359 - RNA, 19 nt, Artificial Sequence
  Description of Artificial Sequence: Synthetic oligonucleotide
  Antisense strand to SEQ ID NO: 2340358
uggauacucauacaauuaa

SEQ ID NO: 2340360 - RNA, 19 nt, Artificial Sequence
  Description of Artificial Sequence: Synthetic oligonucleotide
  Sense strand starting at position 2652 of SEQ ID NO: 1885413
uuguaugaguauccauacu

SEQ ID NO: 2340361 - RNA, 19 nt, Artificial Sequence
  Description of Artificial Sequence: Synthetic oligonucleotide
  Antisense strand to SEQ ID NO: 2340360
aguauggauacucauacaa

SEQ ID NO: 2340362 - RNA, 19 nt, Artificial Sequence
  Description of Artificial Sequence: Synthetic oligonucleotide
  Sense strand starting at position 2774 of SEQ ID NO: 1885413
gcacucauaucucuagggu

SEQ ID NO: 2340363 - RNA, 19 nt, Artificial Sequence
  Description of Artificial Sequence: Synthetic oligonucleotide
  Antisense strand to SEQ ID NO: 2340362
acccuagagauaugagugc

SEQ ID NO: 2340364 - RNA, 19 nt, Artificial Sequence
  Description of Artificial Sequence: Synthetic oligonucleotide
  Sense strand starting at position 2777 of SEQ ID NO: 1885413
cucauaucucuagggugua

SEQ ID NO: 2340365 - RNA, 19 nt, Artificial Sequence
  Description of Artificial Sequence: Synthetic oligonucleotide
  Antisense strand to SEQ ID NO: 2340364
uacacccuagagauaugag

SEQ ID NO: 2340366 - RNA, 19 nt, Artificial Sequence
  Description of Artificial Sequence: Synthetic oligonucleotide
  Sense strand starting at position 2791 of SEQ ID NO: 1885413
guguauacccuggagugga

SEQ ID NO: 2340367 - RNA, 19 nt, Artificial Sequence
  Description of Artificial Sequence: Synthetic oligonucleotide
  Antisense strand to SEQ ID NO: 2340366
uccacuccaggguauacac

SEQ ID NO: 2340368 - RNA, 19 nt, Artificial Sequence
  Description of Artificial Sequence: Synthetic oligonucleotide
  Sense strand starting at position 2804 of SEQ ID NO: 1885413
aguggaauggcugguucua

SEQ ID NO: 2340369 - RNA, 19 nt, Artificial Sequence
  Description of Artificial Sequence: Synthetic oligonucleotide
  Antisense strand to SEQ ID NO: 2340368
uagaaccagccauuccacu

SEQ ID NO: 2340370 - RNA, 19 nt, Artificial Sequence
  Description of Artificial Sequence: Synthetic oligonucleotide
  Sense strand starting at position 2830 of SEQ ID NO: 1885413
uguguagagcuguaguuga

SEQ ID NO: 2340371 - RNA, 19 nt, Artificial Sequence
  Description of Artificial Sequence: Synthetic oligonucleotide
  Antisense strand to SEQ ID NO: 2340370
ucaacuacagcucuacaca

SEQ ID NO: 2340372 - RNA, 19 nt, Artificial Sequence
  Description of Artificial Sequence: Synthetic oligonucleotide
  Sense strand starting at position 2840 of SEQ ID NO: 1885413
uguaguugacaauguuaaa

SEQ ID NO: 2340373 - RNA, 19 nt, Artificial Sequence
  Description of Artificial Sequence: Synthetic oligonucleotide
  Antisense strand to SEQ ID NO: 2340372
uuuaacauugucaacuaca

SEQ ID NO: 2340374 - RNA, 19 nt, Artificial Sequence
  Description of Artificial Sequence: Synthetic oligonucleotide
  Sense strand starting at position 2997 of SEQ ID NO: 1885413
aagggcuacccguauacau

SEQ ID NO: 2340375 - RNA, 19 nt, Artificial Sequence
  Description of Artificial Sequence: Synthetic oligonucleotide
  Antisense strand to SEQ ID NO: 2340374
auguauacggguagcccuu

SEQ ID NO: 2340376 - RNA, 19 nt, Artificial Sequence
  Description of Artificial Sequence: Synthetic oligonucleotide
  Sense strand starting at position 3051 of SEQ ID NO: 1885413
ucgucacaucaagacaauu

SEQ ID NO: 2340377 - RNA, 19 nt, Artificial Sequence
  Description of Artificial Sequence: Synthetic oligonucleotide
  Antisense strand to SEQ ID NO: 2340376
aauugucuugaugugacga

SEQ ID NO: 2340378 - RNA, 19 nt, Artificial Sequence
  Description of Artificial Sequence: Synthetic oligonucleotide
  Sense strand starting at position 3108 of SEQ ID NO: 1885413
ucaagugcauuauuguuau

SEQ ID NO: 2340379 - RNA, 19 nt, Artificial Sequence
  Description of Artificial Sequence: Synthetic oligonucleotide
  Antisense strand to SEQ ID NO: 2340378
auaacaauaaugcacuuga

SEQ ID NO: 2340380 - RNA, 19 nt, Artificial Sequence
  Description of Artificial Sequence: Synthetic oligonucleotide
  Sense strand starting at position 3171 of SEQ ID NO: 1885413
uguuguucuguuuaaucag

SEQ ID NO: 2340381 - RNA, 19 nt, Artificial Sequence
  Description of Artificial Sequence: Synthetic oligonucleotide
  Antisense strand to SEQ ID NO: 2340380
cugauuaaacagaacaaca

SEQ ID NO: 2340382 - RNA, 19 nt, Artificial Sequence
  Description of Artificial Sequence: Synthetic oligonucleotide
  Sense strand starting at position 3177 of SEQ ID NO: 1885413
ucuguuuaaucaguauuga

SEQ ID NO: 2340383 - RNA, 19 nt, Artificial Sequence
  Description of Artificial Sequence: Synthetic oligonucleotide
  Antisense strand to SEQ ID NO: 2340382
ucaauacugauuaaacaga

SEQ ID NO: 2340384 - RNA, 19 nt, Artificial Sequence
  Description of Artificial Sequence: Synthetic oligonucleotide
  Sense strand starting at position 3178 of SEQ ID NO: 1885413
cuguuuaaucaguauugac

SEQ ID NO: 2340385 - RNA, 19 nt, Artificial Sequence
  Description of Artificial Sequence: Synthetic oligonucleotide
  Antisense strand to SEQ ID NO: 2340384
gucaauacugauuaaacag

SEQ ID NO: 2340386 - RNA, 19 nt, Artificial Sequence
  Description of Artificial Sequence: Synthetic oligonucleotide
  Sense strand starting at position 3187 of SEQ ID NO: 1885413
caguauugacaucgucauu

SEQ ID NO: 2340387 - RNA, 19 nt, Artificial Sequence
  Description of Artificial Sequence: Synthetic oligonucleotide
  Antisense strand to SEQ ID NO: 2340386
aaugacgaugucaauacug

SEQ ID NO: 2340388 - RNA, 19 nt, Artificial Sequence
  Description of Artificial Sequence: Synthetic oligonucleotide
  Sense strand starting at position 3213 of SEQ ID NO: 1885413
uguguuuguguccuuguau

SEQ ID NO: 2340389 - RNA, 19 nt, Artificial Sequence
  Description of Artificial Sequence: Synthetic oligonucleotide
  Antisense strand to SEQ ID NO: 2340388
auacaaggacacaaacaca

SEQ ID NO: 2340390 - RNA, 19 nt, Artificial Sequence
  Description of Artificial Sequence: Synthetic oligonucleotide
  Sense strand starting at position 3315 of SEQ ID NO: 1885413
ggaagaguuucaguugagu

SEQ ID NO: 2340391 - RNA, 19 nt, Artificial Sequence
  Description of Artificial Sequence: Synthetic oligonucleotide
  Antisense strand to SEQ ID NO: 2340390
acucaacugaaacucuucc

SEQ ID NO: 2340392 - RNA, 19 nt, Artificial Sequence
  Description of Artificial Sequence: Synthetic oligonucleotide
  Sense strand starting at position 3347 of SEQ ID NO: 1885413
ugagaucuacugugaccuu

SEQ ID NO: 2340393 - RNA, 19 nt, Artificial Sequence
  Description of Artificial Sequence: Synthetic oligonucleotide
  Antisense strand to SEQ ID NO: 2340392
aaggucacaguagaucuca

SEQ ID NO: 2340394 - RNA, 19 nt, Artificial Sequence
  Description of Artificial Sequence: Synthetic oligonucleotide
  Sense strand starting at position 3390 of SEQ ID NO: 1885413
agcuguuggaacugcuaga

SEQ ID NO: 2340395 - RNA, 19 nt, Artificial Sequence
  Description of Artificial Sequence: Synthetic oligonucleotide
  Antisense strand to SEQ ID NO: 2340394
ucuagcaguuccaacagcu

SEQ ID NO: 2340396 - RNA, 19 nt, Artificial Sequence
  Description of Artificial Sequence: Synthetic oligonucleotide
  Sense strand starting at position 3544 of SEQ ID NO: 1885413
gugcaacacuaguucucaa

SEQ ID NO: 2340397 - RNA, 19 nt, Artificial Sequence
  Description of Artificial Sequence: Synthetic oligonucleotide
  Antisense strand to SEQ ID NO: 2340396
uugagaacuaguguugcac

SEQ ID NO: 2340398 - RNA, 19 nt, Artificial Sequence
  Description of Artificial Sequence: Synthetic oligonucleotide
  Sense strand starting at position 3642 of SEQ ID NO: 1885413
gagaaugugcauugguaac

SEQ ID NO: 2340399 - RNA, 19 nt, Artificial Sequence
  Description of Artificial Sequence: Synthetic oligonucleotide
  Antisense strand to SEQ ID NO: 2340398
guuaccaaugcacauucuc

SEQ ID NO: 2340400 - RNA, 19 nt, Artificial Sequence
  Description of Artificial Sequence: Synthetic oligonucleotide
  Sense strand starting at position 3644 of SEQ ID NO: 1885413
gaaugugcauugguaacaa

SEQ ID NO: 2340401 - RNA, 19 nt, Artificial Sequence
  Description of Artificial Sequence: Synthetic oligonucleotide
  Antisense strand to SEQ ID NO: 2340400
uuguuaccaaugcacauuc

SEQ ID NO: 2340402 - RNA, 19 nt, Artificial Sequence
  Description of Artificial Sequence: Synthetic oligonucleotide
  Sense strand starting at position 3740 of SEQ ID NO: 1885413
gaacuagauugggauauaa

SEQ ID NO: 2340403 - RNA, 19 nt, Artificial Sequence
  Description of Artificial Sequence: Synthetic oligonucleotide
  Antisense strand to SEQ ID NO: 2340402
uuauaucccaaucuaguuc

SEQ ID NO: 2340404 - RNA, 19 nt, Artificial Sequence
  Description of Artificial Sequence: Synthetic oligonucleotide
  Sense strand starting at position 3798 of SEQ ID NO: 1885413
cagaauuuauauggucaag

SEQ ID NO: 2340405 - RNA, 19 nt, Artificial Sequence
  Description of Artificial Sequence: Synthetic oligonucleotide
  Antisense strand to SEQ ID NO: 2340404
cuugaccauauaaauucug

SEQ ID NO: 2340406 - RNA, 19 nt, Artificial Sequence
  Description of Artificial Sequence: Synthetic oligonucleotide
  Sense strand starting at position 3813 of SEQ ID NO: 1885413
caaggaagugcauguaagu

SEQ ID NO: 2340407 - RNA, 19 nt, Artificial Sequence
  Description of Artificial Sequence: Synthetic oligonucleotide
  Antisense strand to SEQ ID NO: 2340406
acuuacaugcacuuccuug

SEQ ID NO: 2340408 - RNA, 19 nt, Artificial Sequence
  Description of Artificial Sequence: Synthetic oligonucleotide
  Sense strand starting at position 3875 of SEQ ID NO: 1885413
uccagaagaugagaaauca

SEQ ID NO: 2340409 - RNA, 19 nt, Artificial Sequence
  Description of Artificial Sequence: Synthetic oligonucleotide
  Antisense strand to SEQ ID NO: 2340408
ugauuucucaucuucugga

SEQ ID NO: 2340410 - RNA, 19 nt, Artificial Sequence
  Description of Artificial Sequence: Synthetic oligonucleotide
  Sense strand starting at position 3885 of SEQ ID NO: 1885413
gagaaaucagccugcuuag

SEQ ID NO: 2340411 - RNA, 19 nt, Artificial Sequence
  Description of Artificial Sequence: Synthetic oligonucleotide
  Antisense strand to SEQ ID NO: 2340410
cuaagcaggcugauuucuc

SEQ ID NO: 2340412 - RNA, 19 nt, Artificial Sequence
  Description of Artificial Sequence: Synthetic oligonucleotide
  Sense strand starting at position 3914 of SEQ ID NO: 1885413
gggaguuggaaacgauaug

SEQ ID NO: 2340413 - RNA, 19 nt, Artificial Sequence
  Description of Artificial Sequence: Synthetic oligonucleotide
  Antisense strand to SEQ ID NO: 2340412
cauaucguuuccaacuccc

SEQ ID NO: 2340414 - RNA, 19 nt, Artificial Sequence
  Description of Artificial Sequence: Synthetic oligonucleotide
  Sense strand starting at position 372 of SEQ ID NO: 1885414
uugcucuaaucuguggaaa

SEQ ID NO: 2340415 - RNA, 19 nt, Artificial Sequence
  Description of Artificial Sequence: Synthetic oligonucleotide
  Antisense strand to SEQ ID NO: 2340414
uuuccacagauuagagcaa

SEQ ID NO: 2340416 - RNA, 19 nt, Artificial Sequence
  Description of Artificial Sequence: Synthetic oligonucleotide
  Sense strand starting at position 373 of SEQ ID NO: 1885414
ugcucuaaucuguggaaau

SEQ ID NO: 2340417 - RNA, 19 nt, Artificial Sequence
  Description of Artificial Sequence: Synthetic oligonucleotide
  Antisense strand to SEQ ID NO: 2340416
auuuccacagauuagagca

SEQ ID NO: 2340418 - RNA, 19 nt, Artificial Sequence
  Description of Artificial Sequence: Synthetic oligonucleotide
  Sense strand starting at position 383 of SEQ ID NO: 1885414
uguggaaauuguccaaaug

SEQ ID NO: 2340419 - RNA, 19 nt, Artificial Sequence
  Description of Artificial Sequence: Synthetic oligonucleotide
  Antisense strand to SEQ ID NO: 2340418
cauuuggacaauuuccaca

SEQ ID NO: 2340420 - RNA, 19 nt, Artificial Sequence
  Description of Artificial Sequence: Synthetic oligonucleotide
  Sense strand starting at position 455 of SEQ ID NO: 1885414
caaugagagucuguaacau

SEQ ID NO: 2340421 - RNA, 19 nt, Artificial Sequence
  Description of Artificial Sequence: Synthetic oligonucleotide
  Antisense strand to SEQ ID NO: 2340420
auguuacagacucucauug

SEQ ID NO: 2340422 - RNA, 19 nt, Artificial Sequence
  Description of Artificial Sequence: Synthetic oligonucleotide
  Sense strand starting at position 550 of SEQ ID NO: 1885414
augaguuccuucucuuuac

SEQ ID NO: 2340423 - RNA, 19 nt, Artificial Sequence
  Description of Artificial Sequence: Synthetic oligonucleotide
  Antisense strand to SEQ ID NO: 2340422
guaaagagaaggaacucau

SEQ ID NO: 2340424 - RNA, 19 nt, Artificial Sequence
  Description of Artificial Sequence: Synthetic oligonucleotide
  Sense strand starting at position 551 of SEQ ID NO: 1885414
ugaguuccuucucuuuaca

SEQ ID NO: 2340425 - RNA, 19 nt, Artificial Sequence
  Description of Artificial Sequence: Synthetic oligonucleotide
  Antisense strand to SEQ ID NO: 2340424
uguaaagagaaggaacuca

SEQ ID NO: 2340426 - RNA, 19 nt, Artificial Sequence
  Description of Artificial Sequence: Synthetic oligonucleotide
  Sense strand starting at position 576 of SEQ ID NO: 1885414
gaucaagaguugccauauu

SEQ ID NO: 2340427 - RNA, 19 nt, Artificial Sequence
  Description of Artificial Sequence: Synthetic oligonucleotide
  Antisense strand to SEQ ID NO: 2340426
aauauggcaacucuugauc

SEQ ID NO: 2340428 - RNA, 19 nt, Artificial Sequence
  Description of Artificial Sequence: Synthetic oligonucleotide
  Sense strand starting at position 649 of SEQ ID NO: 1885414
ggauauauuccaggugcau

SEQ ID NO: 2340429 - RNA, 19 nt, Artificial Sequence
  Description of Artificial Sequence: Synthetic oligonucleotide
  Antisense strand to SEQ ID NO: 2340428
augcaccuggaauauaucc

SEQ ID NO: 2340430 - RNA, 19 nt, Artificial Sequence
  Description of Artificial Sequence: Synthetic oligonucleotide
  Sense strand starting at position 736 of SEQ ID NO: 1885414
cauggcuggcaagaagauu

SEQ ID NO: 2340431 - RNA, 19 nt, Artificial Sequence
  Description of Artificial Sequence: Synthetic oligonucleotide
  Antisense strand to SEQ ID NO: 2340430
aaucuucuugccagccaug

SEQ ID NO: 2340432 - RNA, 19 nt, Artificial Sequence
  Description of Artificial Sequence: Synthetic oligonucleotide
  Sense strand starting at position 865 of SEQ ID NO: 1885414
ggaguaggguugagacauc

SEQ ID NO: 2340433 - RNA, 19 nt, Artificial Sequence
  Description of Artificial Sequence: Synthetic oligonucleotide
  Antisense strand to SEQ ID NO: 2340432
gaugucucaacccuacucc

SEQ ID NO: 2340434 - RNA, 19 nt, Artificial Sequence
  Description of Artificial Sequence: Synthetic oligonucleotide
  Sense strand starting at position 1607 of SEQ ID NO: 1885414
agagcaauuuaugaacaac

SEQ ID NO: 2340435 - RNA, 19 nt, Artificial Sequence
  Description of Artificial Sequence: Synthetic oligonucleotide
  Antisense strand to SEQ ID NO: 2340434
guuguucauaaauugcucu

SEQ ID NO: 2340436 - RNA, 19 nt, Artificial Sequence
  Description of Artificial Sequence: Synthetic oligonucleotide
  Sense strand starting at position 1993 of SEQ ID NO: 1885414
aguaacuaugaauguccaa

SEQ ID NO: 2340437 - RNA, 19 nt, Artificial Sequence
  Description of Artificial Sequence: Synthetic oligonucleotide
  Antisense strand to SEQ ID NO: 2340436
uuggacauucauaguuacu

SEQ ID NO: 2340438 - RNA, 19 nt, Artificial Sequence
  Description of Artificial Sequence: Synthetic oligonucleotide
  Sense strand starting at position 2068 of SEQ ID NO: 1885414
uggccaugucaccaaucaa

SEQ ID NO: 2340439 - RNA, 19 nt, Artificial Sequence
  Description of Artificial Sequence: Synthetic oligonucleotide
  Antisense strand to SEQ ID NO: 2340438
uugauuggugacauggcca

SEQ ID NO: 2340440 - RNA, 19 nt, Artificial Sequence
  Description of Artificial Sequence: Synthetic oligonucleotide
  Sense strand starting at position 2236 of SEQ ID NO: 1885414
auuacacaagucuguaaau

SEQ ID NO: 2340441 - RNA, 19 nt, Artificial Sequence
  Description of Artificial Sequence: Synthetic oligonucleotide
  Antisense strand to SEQ ID NO: 2340440
auuuacagacuuguguaau

SEQ ID NO: 2340442 - RNA, 19 nt, Artificial Sequence
  Description of Artificial Sequence: Synthetic oligonucleotide
  Sense strand starting at position 2361 of SEQ ID NO: 1885414
ccucaaacgcucugaaaug

SEQ ID NO: 2340443 - RNA, 19 nt, Artificial Sequence
  Description of Artificial Sequence: Synthetic oligonucleotide
  Antisense strand to SEQ ID NO: 2340442
cauuucagagcguuugagg

SEQ ID NO: 2340444 - RNA, 19 nt, Artificial Sequence
  Description of Artificial Sequence: Synthetic oligonucleotide
  Sense strand starting at position 2389 of SEQ ID NO: 1885414
ugccaagugaaagaaguuu

SEQ ID NO: 2340445 - RNA, 19 nt, Artificial Sequence
  Description of Artificial Sequence: Synthetic oligonucleotide
  Antisense strand to SEQ ID NO: 2340444
aaacuucuuucacuuggca

SEQ ID NO: 2340446 - RNA, 19 nt, Artificial Sequence
  Description of Artificial Sequence: Synthetic oligonucleotide
  Sense strand starting at position 2426 of SEQ ID NO: 1885414
uguaaacuugccuagguuu

SEQ ID NO: 2340447 - RNA, 19 nt, Artificial Sequence
  Description of Artificial Sequence: Synthetic oligonucleotide
  Antisense strand to SEQ ID NO: 2340446
aaaccuaggcaaguuuaca

SEQ ID NO: 2340448 - RNA, 19 nt, Artificial Sequence
  Description of Artificial Sequence: Synthetic oligonucleotide
  Sense strand starting at position 2475 of SEQ ID NO: 1885414
aauugagcucugggcugau

SEQ ID NO: 2340449 - RNA, 19 nt, Artificial Sequence
  Description of Artificial Sequence: Synthetic oligonucleotide
  Antisense strand to SEQ ID NO: 2340448
aucagcccagagcucaauu

SEQ ID NO: 2340450 - RNA, 19 nt, Artificial Sequence
  Description of Artificial Sequence: Synthetic oligonucleotide
  Sense strand starting at position 2642 of SEQ ID NO: 1885414
agaccuacguauguuauca

SEQ ID NO: 2340451 - RNA, 19 nt, Artificial Sequence
  Description of Artificial Sequence: Synthetic oligonucleotide
  Antisense strand to SEQ ID NO: 2340450
ugauaacauacguaggucu

SEQ ID NO: 2340452 - RNA, 19 nt, Artificial Sequence
  Description of Artificial Sequence: Synthetic oligonucleotide
  Sense strand starting at position 2679 of SEQ ID NO: 1885414
uaugucugugagcaucaga

SEQ ID NO: 2340453 - RNA, 19 nt, Artificial Sequence
  Description of Artificial Sequence: Synthetic oligonucleotide
  Antisense strand to SEQ ID NO: 2340452
ucugaugcucacagacaua

SEQ ID NO: 2340454 - RNA, 19 nt, Artificial Sequence
  Description of Artificial Sequence: Synthetic oligonucleotide
  Sense strand starting at position 2682 of SEQ ID NO: 1885414
gucugugagcaucagacua

SEQ ID NO: 2340455 - RNA, 19 nt, Artificial Sequence
  Description of Artificial Sequence: Synthetic oligonucleotide
  Antisense strand to SEQ ID NO: 2340454
uagucugaugcucacagac

SEQ ID NO: 2340456 - RNA, 19 nt, Artificial Sequence
  Description of Artificial Sequence: Synthetic oligonucleotide
  Sense strand starting at position 2829 of SEQ ID NO: 1885414
guguguuaacaagaauguu

SEQ ID NO: 2340457 - RNA, 19 nt, Artificial Sequence
  Description of Artificial Sequence: Synthetic oligonucleotide
  Antisense strand to SEQ ID NO: 2340456
aacauucuuguuaacacac

SEQ ID NO: 2340458 - RNA, 19 nt, Artificial Sequence
  Description of Artificial Sequence: Synthetic oligonucleotide
  Sense strand starting at position 2882 of SEQ ID NO: 1885414
ggaaaccucuugucugaac

SEQ ID NO: 2340459 - RNA, 19 nt, Artificial Sequence
  Description of Artificial Sequence: Synthetic oligonucleotide
  Antisense strand to SEQ ID NO: 2340458
guucagacaagagguuucc

SEQ ID NO: 2340460 - RNA, 19 nt, Artificial Sequence
  Description of Artificial Sequence: Synthetic oligonucleotide
  Sense strand starting at position 2947 of SEQ ID NO: 1885414
agguguucgcugucaauuc

SEQ ID NO: 2340461 - RNA, 19 nt, Artificial Sequence
  Description of Artificial Sequence: Synthetic oligonucleotide
  Antisense strand to SEQ ID NO: 2340460
gaauugacagcgaacaccu

SEQ ID NO: 2340462 - RNA, 19 nt, Artificial Sequence
  Description of Artificial Sequence: Synthetic oligonucleotide
  Sense strand starting at position 2957 of SEQ ID NO: 1885414
ugucaauuccuguaacuua

SEQ ID NO: 2340463 - RNA, 19 nt, Artificial Sequence
  Description of Artificial Sequence: Synthetic oligonucleotide
  Antisense strand to SEQ ID NO: 2340462
uaaguuacaggaauugaca

SEQ ID NO: 2340464 - RNA, 19 nt, Artificial Sequence
  Description of Artificial Sequence: Synthetic oligonucleotide
  Sense strand starting at position 2976 of SEQ ID NO: 1885414
uuuagccuugacugaggaa

SEQ ID NO: 2340465 - RNA, 19 nt, Artificial Sequence
  Description of Artificial Sequence: Synthetic oligonucleotide
  Antisense strand to SEQ ID NO: 2340464
uuccucagucaaggcuaaa

SEQ ID NO: 2340466 - RNA, 19 nt, Artificial Sequence
  Description of Artificial Sequence: Synthetic oligonucleotide
  Sense strand starting at position 2989 of SEQ ID NO: 1885414
gaggaaagcuauucuucug

SEQ ID NO: 2340467 - RNA, 19 nt, Artificial Sequence
  Description of Artificial Sequence: Synthetic oligonucleotide
  Antisense strand to SEQ ID NO: 2340466
cagaagaauagcuuuccuc

SEQ ID NO: 2340468 - RNA, 19 nt, Artificial Sequence
  Description of Artificial Sequence: Synthetic oligonucleotide
  Sense strand starting at position 3008 of SEQ ID NO: 1885414
caauaaugauguucuguga

SEQ ID NO: 2340469 - RNA, 19 nt, Artificial Sequence
  Description of Artificial Sequence: Synthetic oligonucleotide
  Antisense strand to SEQ ID NO: 2340468
ucacagaacaucauuauug

SEQ ID NO: 2340470 - RNA, 19 nt, Artificial Sequence
  Description of Artificial Sequence: Synthetic oligonucleotide
  Sense strand starting at position 3011 of SEQ ID NO: 1885414
uaaugauguucugugacuu

SEQ ID NO: 2340471 - RNA, 19 nt, Artificial Sequence
  Description of Artificial Sequence: Synthetic oligonucleotide
  Antisense strand to SEQ ID NO: 2340470
aagucacagaacaucauua

SEQ ID NO: 2340472 - RNA, 19 nt, Artificial Sequence
  Description of Artificial Sequence: Synthetic oligonucleotide
  Sense strand starting at position 3012 of SEQ ID NO: 1885414
aaugauguucugugacuuu

SEQ ID NO: 2340473 - RNA, 19 nt, Artificial Sequence
  Description of Artificial Sequence: Synthetic oligonucleotide
  Antisense strand to SEQ ID NO: 2340472
aaagucacagaacaucauu

SEQ ID NO: 2340474 - RNA, 19 nt, Artificial Sequence
  Description of Artificial Sequence: Synthetic oligonucleotide
  Sense strand starting at position 3080 of SEQ ID NO: 1885414
uagucaaaucaguggcaau

SEQ ID NO: 2340475 - RNA, 19 nt, Artificial Sequence
  Description of Artificial Sequence: Synthetic oligonucleotide
  Antisense strand to SEQ ID NO: 2340474
auugccacugauuugacua

SEQ ID NO: 2340476 - RNA, 19 nt, Artificial Sequence
  Description of Artificial Sequence: Synthetic oligonucleotide
  Sense strand starting at position 3163 of SEQ ID NO: 1885414
aggucuugaggcuguagaa

SEQ ID NO: 2340477 - RNA, 19 nt, Artificial Sequence
  Description of Artificial Sequence: Synthetic oligonucleotide
  Antisense strand to SEQ ID NO: 2340476
uucuacagccucaagaccu

SEQ ID NO: 2340478 - RNA, 19 nt, Artificial Sequence
  Description of Artificial Sequence: Synthetic oligonucleotide
  Sense strand starting at position 3215 of SEQ ID NO: 1885414
aagggucuugccugacacu

SEQ ID NO: 2340479 - RNA, 19 nt, Artificial Sequence
  Description of Artificial Sequence: Synthetic oligonucleotide
  Antisense strand to SEQ ID NO: 2340478
agugucaggcaagacccuu

SEQ ID NO: 2340480 - RNA, 19 nt, Artificial Sequence
  Description of Artificial Sequence: Synthetic oligonucleotide
  Sense strand starting at position 3378 of SEQ ID NO: 1885414
gcuguauagaaauacgauu

SEQ ID NO: 2340481 - RNA, 19 nt, Artificial Sequence
  Description of Artificial Sequence: Synthetic oligonucleotide
  Antisense strand to SEQ ID NO: 2340480
aaucguauuucuauacagc

SEQ ID NO: 2340482 - RNA, 19 nt, Artificial Sequence
  Description of Artificial Sequence: Synthetic oligonucleotide
  Sense strand starting at position 3411 of SEQ ID NO: 1885414
uguuguaauggugauaaac

SEQ ID NO: 2340483 - RNA, 19 nt, Artificial Sequence
  Description of Artificial Sequence: Synthetic oligonucleotide
  Antisense strand to SEQ ID NO: 2340482
guuuaucaccauuacaaca

SEQ ID NO: 2340484 - RNA, 19 nt, Artificial Sequence
  Description of Artificial Sequence: Synthetic oligonucleotide
  Sense strand starting at position 3505 of SEQ ID NO: 1885414
ggguaugacaccugucaca

SEQ ID NO: 2340485 - RNA, 19 nt, Artificial Sequence
  Description of Artificial Sequence: Synthetic oligonucleotide
  Antisense strand to SEQ ID NO: 2340484
ugugacaggugucauaccc

SEQ ID NO: 2340486 - RNA, 19 nt, Artificial Sequence
  Description of Artificial Sequence: Synthetic oligonucleotide
  Sense strand starting at position 3556 of SEQ ID NO: 1885414
gagaguaaaguuuauaggu

SEQ ID NO: 2340487 - RNA, 19 nt, Artificial Sequence
  Description of Artificial Sequence: Synthetic oligonucleotide
  Antisense strand to SEQ ID NO: 2340486
accuauaaacuuuacucuc

SEQ ID NO: 2340488 - RNA, 19 nt, Artificial Sequence
  Description of Artificial Sequence: Synthetic oligonucleotide
  Sense strand starting at position 3666 of SEQ ID NO: 1885414
agaaauucuugcuucugag

SEQ ID NO: 2340489 - RNA, 19 nt, Artificial Sequence
  Description of Artificial Sequence: Synthetic oligonucleotide
  Antisense strand to SEQ ID NO: 2340488
cucagaagcaagaauuucu

SEQ ID NO: 2340490 - RNA, 19 nt, Artificial Sequence
  Description of Artificial Sequence: Synthetic oligonucleotide
  Sense strand starting at position 3771 of SEQ ID NO: 1885414
cauggcagugccuaagaua

SEQ ID NO: 2340491 - RNA, 19 nt, Artificial Sequence
  Description of Artificial Sequence: Synthetic oligonucleotide
  Antisense strand to SEQ ID NO: 2340490
uaucuuaggcacugccaug

SEQ ID NO: 2340492 - RNA, 19 nt, Artificial Sequence
  Description of Artificial Sequence: Synthetic oligonucleotide
  Sense strand starting at position 3859 of SEQ ID NO: 1885414
aagggaugucugugaugca

SEQ ID NO: 2340493 - RNA, 19 nt, Artificial Sequence
  Description of Artificial Sequence: Synthetic oligonucleotide
  Antisense strand to SEQ ID NO: 2340492
ugcaucacagacaucccuu

SEQ ID NO: 2340494 - RNA, 19 nt, Artificial Sequence
  Description of Artificial Sequence: Synthetic oligonucleotide
  Sense strand starting at position 185 of SEQ ID NO: 1885415
cagagaaauucugugauuc

SEQ ID NO: 2340495 - RNA, 19 nt, Artificial Sequence
  Description of Artificial Sequence: Synthetic oligonucleotide
  Antisense strand to SEQ ID NO: 2340494
gaaucacagaauuucucug

SEQ ID NO: 2340496 - RNA, 19 nt, Artificial Sequence
  Description of Artificial Sequence: Synthetic oligonucleotide
  Sense strand starting at position 212 of SEQ ID NO: 1885415
gaggucauuugauauuaau

SEQ ID NO: 2340497 - RNA, 19 nt, Artificial Sequence
  Description of Artificial Sequence: Synthetic oligonucleotide
  Antisense strand to SEQ ID NO: 2340496
auuaauaucaaaugaccuc

SEQ ID NO: 2340498 - RNA, 19 nt, Artificial Sequence
  Description of Artificial Sequence: Synthetic oligonucleotide
  Sense strand starting at position 235 of SEQ ID NO: 1885415
guugaaguuagugaagcau

SEQ ID NO: 2340499 - RNA, 19 nt, Artificial Sequence
  Description of Artificial Sequence: Synthetic oligonucleotide
  Antisense strand to SEQ ID NO: 2340498
augcuucacuaacuucaac

SEQ ID NO: 2340500 - RNA, 19 nt, Artificial Sequence
  Description of Artificial Sequence: Synthetic oligonucleotide
  Sense strand starting at position 241 of SEQ ID NO: 1885415
guuagugaagcaugauaau

SEQ ID NO: 2340501 - RNA, 19 nt, Artificial Sequence
  Description of Artificial Sequence: Synthetic oligonucleotide
  Antisense strand to SEQ ID NO: 2340500
auuaucaugcuucacuaac

SEQ ID NO: 2340502 - RNA, 19 nt, Artificial Sequence
  Description of Artificial Sequence: Synthetic oligonucleotide
  Sense strand starting at position 330 of SEQ ID NO: 1885415
cacuguguggcccaggaua

SEQ ID NO: 2340503 - RNA, 19 nt, Artificial Sequence
  Description of Artificial Sequence: Synthetic oligonucleotide
  Antisense strand to SEQ ID NO: 2340502
uauccugggccacacagug

SEQ ID NO: 2340504 - RNA, 19 nt, Artificial Sequence
  Description of Artificial Sequence: Synthetic oligonucleotide
  Sense strand starting at position 332 of SEQ ID NO: 1885415
cuguguggcccaggauaga

SEQ ID NO: 2340505 - RNA, 19 nt, Artificial Sequence
  Description of Artificial Sequence: Synthetic oligonucleotide
  Antisense strand to SEQ ID NO: 2340504
ucuauccugggccacacag

SEQ ID NO: 2340506 - RNA, 19 nt, Artificial Sequence
  Description of Artificial Sequence: Synthetic oligonucleotide
  Sense strand starting at position 501 of SEQ ID NO: 1885415
ugugcagacuggccuaaau

SEQ ID NO: 2340507 - RNA, 19 nt, Artificial Sequence
  Description of Artificial Sequence: Synthetic oligonucleotide
  Antisense strand to SEQ ID NO: 2340506
auuuaggccagucugcaca

SEQ ID NO: 2340508 - RNA, 19 nt, Artificial Sequence
  Description of Artificial Sequence: Synthetic oligonucleotide
  Sense strand starting at position 560 of SEQ ID NO: 1885415
auuccacgcuuaguuaaua

SEQ ID NO: 2340509 - RNA, 19 nt, Artificial Sequence
  Description of Artificial Sequence: Synthetic oligonucleotide
  Antisense strand to SEQ ID NO: 2340508
uauuaacuaagcguggaau

SEQ ID NO: 2340510 - RNA, 19 nt, Artificial Sequence
  Description of Artificial Sequence: Synthetic oligonucleotide
  Sense strand starting at position 561 of SEQ ID NO: 1885415
uuccacgcuuaguuaauaa

SEQ ID NO: 2340511 - RNA, 19 nt, Artificial Sequence
  Description of Artificial Sequence: Synthetic oligonucleotide
  Antisense strand to SEQ ID NO: 2340510
uuauuaacuaagcguggaa

SEQ ID NO: 2340512 - RNA, 19 nt, Artificial Sequence
  Description of Artificial Sequence: Synthetic oligonucleotide
  Sense strand starting at position 622 of SEQ ID NO: 1885415
cugugaccuuagucauuuc

SEQ ID NO: 2340513 - RNA, 19 nt, Artificial Sequence
  Description of Artificial Sequence: Synthetic oligonucleotide
  Antisense strand to SEQ ID NO: 2340512
gaaaugacuaaggucacag

SEQ ID NO: 2340514 - RNA, 19 nt, Artificial Sequence
  Description of Artificial Sequence: Synthetic oligonucleotide
  Sense strand starting at position 642 of SEQ ID NO: 1885415
auccauuagucuucccuga

SEQ ID NO: 2340515 - RNA, 19 nt, Artificial Sequence
  Description of Artificial Sequence: Synthetic oligonucleotide
  Antisense strand to SEQ ID NO: 2340514
ucagggaagacuaauggau

SEQ ID NO: 2340516 - RNA, 19 nt, Artificial Sequence
  Description of Artificial Sequence: Synthetic oligonucleotide
  Sense strand starting at position 644 of SEQ ID NO: 1885415
ccauuagucuucccugagu

SEQ ID NO: 2340517 - RNA, 19 nt, Artificial Sequence
  Description of Artificial Sequence: Synthetic oligonucleotide
  Antisense strand to SEQ ID NO: 2340516
acucagggaagacuaaugg

SEQ ID NO: 2340518 - RNA, 19 nt, Artificial Sequence
  Description of Artificial Sequence: Synthetic oligonucleotide
  Sense strand starting at position 646 of SEQ ID NO: 1885415
auuagucuucccugagucu

SEQ ID NO: 2340519 - RNA, 19 nt, Artificial Sequence
  Description of Artificial Sequence: Synthetic oligonucleotide
  Antisense strand to SEQ ID NO: 2340518
agacucagggaagacuaau

SEQ ID NO: 2340520 - RNA, 19 nt, Artificial Sequence
  Description of Artificial Sequence: Synthetic oligonucleotide
  Sense strand starting at position 647 of SEQ ID NO: 1885415
uuagucuucccugagucuu

SEQ ID NO: 2340521 - RNA, 19 nt, Artificial Sequence
  Description of Artificial Sequence: Synthetic oligonucleotide
  Antisense strand to SEQ ID NO: 2340520
aagacucagggaagacuaa

SEQ ID NO: 2340522 - RNA, 19 nt, Artificial Sequence
  Description of Artificial Sequence: Synthetic oligonucleotide
  Sense strand starting at position 689 of SEQ ID NO: 1885415
agauuaaacucagcugauu

SEQ ID NO: 2340523 - RNA, 19 nt, Artificial Sequence
  Description of Artificial Sequence: Synthetic oligonucleotide
  Antisense strand to SEQ ID NO: 2340522
aaucagcugaguuuaaucu

SEQ ID NO: 2340524 - RNA, 19 nt, Artificial Sequence
  Description of Artificial Sequence: Synthetic oligonucleotide
  Sense strand starting at position 702 of SEQ ID NO: 1885415
cugauuguuguaugaaaga

SEQ ID NO: 2340525 - RNA, 19 nt, Artificial Sequence
  Description of Artificial Sequence: Synthetic oligonucleotide
  Antisense strand to SEQ ID NO: 2340524
ucuuucauacaacaaucag

SEQ ID NO: 2340526 - RNA, 19 nt, Artificial Sequence
  Description of Artificial Sequence: Synthetic oligonucleotide
  Sense strand starting at position 742 of SEQ ID NO: 1885415
auggcauuccaaggaguuu

SEQ ID NO: 2340527 - RNA, 19 nt, Artificial Sequence
  Description of Artificial Sequence: Synthetic oligonucleotide
  Antisense strand to SEQ ID NO: 2340526
aaacuccuuggaaugccau

SEQ ID NO: 2340528 - RNA, 19 nt, Artificial Sequence
  Description of Artificial Sequence: Synthetic oligonucleotide
  Sense strand starting at position 1448 of SEQ ID NO: 1885415
uauagugacccgugaucau

SEQ ID NO: 2340529 - RNA, 19 nt, Artificial Sequence
  Description of Artificial Sequence: Synthetic oligonucleotide
  Antisense strand to SEQ ID NO: 2340528
augaucacgggucacuaua

SEQ ID NO: 2340530 - RNA, 19 nt, Artificial Sequence
  Description of Artificial Sequence: Synthetic oligonucleotide
  Sense strand starting at position 1526 of SEQ ID NO: 1885415
caaucauaggcugggcauu

SEQ ID NO: 2340531 - RNA, 19 nt, Artificial Sequence
  Description of Artificial Sequence: Synthetic oligonucleotide
  Antisense strand to SEQ ID NO: 2340530
aaugcccagccuaugauug

SEQ ID NO: 2340532 - RNA, 19 nt, Artificial Sequence
  Description of Artificial Sequence: Synthetic oligonucleotide
  Sense strand starting at position 2015 of SEQ ID NO: 1885415
uaaguaucggagugaaauc

SEQ ID NO: 2340533 - RNA, 19 nt, Artificial Sequence
  Description of Artificial Sequence: Synthetic oligonucleotide
  Antisense strand to SEQ ID NO: 2340532
gauuucacuccgauacuua

SEQ ID NO: 2340534 - RNA, 19 nt, Artificial Sequence
  Description of Artificial Sequence: Synthetic oligonucleotide
  Sense strand starting at position 2147 of SEQ ID NO: 1885415
gcgguagaaguccauuaau

SEQ ID NO: 2340535 - RNA, 19 nt, Artificial Sequence
  Description of Artificial Sequence: Synthetic oligonucleotide
  Antisense strand to SEQ ID NO: 2340534
auuaauggacuucuaccgc

SEQ ID NO: 2340536 - RNA, 19 nt, Artificial Sequence
  Description of Artificial Sequence: Synthetic oligonucleotide
  Sense strand starting at position 2150 of SEQ ID NO: 1885415
guagaaguccauuaaucau

SEQ ID NO: 2340537 - RNA, 19 nt, Artificial Sequence
  Description of Artificial Sequence: Synthetic oligonucleotide
  Antisense strand to SEQ ID NO: 2340536
augauuaauggacuucuac

SEQ ID NO: 2340538 - RNA, 19 nt, Artificial Sequence
  Description of Artificial Sequence: Synthetic oligonucleotide
  Sense strand starting at position 2224 of SEQ ID NO: 1885415
acaagaggucucuggcuaa

SEQ ID NO: 2340539 - RNA, 19 nt, Artificial Sequence
  Description of Artificial Sequence: Synthetic oligonucleotide
  Antisense strand to SEQ ID NO: 2340538
uuagccagagaccucuugu

SEQ ID NO: 2340540 - RNA, 19 nt, Artificial Sequence
  Description of Artificial Sequence: Synthetic oligonucleotide
  Sense strand starting at position 2236 of SEQ ID NO: 1885415
uggcuaaggccuuauaauu

SEQ ID NO: 2340541 - RNA, 19 nt, Artificial Sequence
  Description of Artificial Sequence: Synthetic oligonucleotide
  Antisense strand to SEQ ID NO: 2340540
aauuauaaggccuuagcca

SEQ ID NO: 2340542 - RNA, 19 nt, Artificial Sequence
  Description of Artificial Sequence: Synthetic oligonucleotide
  Sense strand starting at position 2396 of SEQ ID NO: 1885415
agagaaagaucuguucuuc

SEQ ID NO: 2340543 - RNA, 19 nt, Artificial Sequence
  Description of Artificial Sequence: Synthetic oligonucleotide
  Antisense strand to SEQ ID NO: 2340542
gaagaacagaucuuucucu

SEQ ID NO: 2340544 - RNA, 19 nt, Artificial Sequence
  Description of Artificial Sequence: Synthetic oligonucleotide
  Sense strand starting at position 2500 of SEQ ID NO: 1885415
gcugcaguggccuccauau

SEQ ID NO: 2340545 - RNA, 19 nt, Artificial Sequence
  Description of Artificial Sequence: Synthetic oligonucleotide
  Antisense strand to SEQ ID NO: 2340544
auauggaggccacugcagc

SEQ ID NO: 2340546 - RNA, 19 nt, Artificial Sequence
  Description of Artificial Sequence: Synthetic oligonucleotide
  Sense strand starting at position 2502 of SEQ ID NO: 1885415
ugcaguggccuccauauua

SEQ ID NO: 2340547 - RNA, 19 nt, Artificial Sequence
  Description of Artificial Sequence: Synthetic oligonucleotide
  Antisense strand to SEQ ID NO: 2340546
uaauauggaggccacugca

SEQ ID NO: 2340548 - RNA, 19 nt, Artificial Sequence
  Description of Artificial Sequence: Synthetic oligonucleotide
  Sense strand starting at position 2531 of SEQ ID NO: 1885415
auacaucuuucggucugaa

SEQ ID NO: 2340549 - RNA, 19 nt, Artificial Sequence
  Description of Artificial Sequence: Synthetic oligonucleotide
  Antisense strand to SEQ ID NO: 2340548
uucagaccgaaagauguau

SEQ ID NO: 2340550 - RNA, 19 nt, Artificial Sequence
  Description of Artificial Sequence: Synthetic oligonucleotide
  Sense strand starting at position 3007 of SEQ ID NO: 1885415
gucaauagguaaccaaaua

SEQ ID NO: 2340551 - RNA, 19 nt, Artificial Sequence
  Description of Artificial Sequence: Synthetic oligonucleotide
  Antisense strand to SEQ ID NO: 2340550
uauuugguuaccuauugac

SEQ ID NO: 2340552 - RNA, 19 nt, Artificial Sequence
  Description of Artificial Sequence: Synthetic oligonucleotide
  Sense strand starting at position 3197 of SEQ ID NO: 1885415
gugcaauccuagcuuacca

SEQ ID NO: 2340553 - RNA, 19 nt, Artificial Sequence
  Description of Artificial Sequence: Synthetic oligonucleotide
  Antisense strand to SEQ ID NO: 2340552
ugguaagcuaggauugcac

SEQ ID NO: 2340554 - RNA, 19 nt, Artificial Sequence
  Description of Artificial Sequence: Synthetic oligonucleotide
  Sense strand starting at position 3221 of SEQ ID NO: 1885415
ggacuccuggacugaagua

SEQ ID NO: 2340555 - RNA, 19 nt, Artificial Sequence
  Description of Artificial Sequence: Synthetic oligonucleotide
  Antisense strand to SEQ ID NO: 2340554
uacuucaguccaggagucc

SEQ ID NO: 2340556 - RNA, 19 nt, Artificial Sequence
  Description of Artificial Sequence: Synthetic oligonucleotide
  Sense strand starting at position 3250 of SEQ ID NO: 1885415
cuuagcaucuggcuaauuu

SEQ ID NO: 2340557 - RNA, 19 nt, Artificial Sequence
  Description of Artificial Sequence: Synthetic oligonucleotide
  Antisense strand to SEQ ID NO: 2340556
aaauuagccagaugcuaag

SEQ ID NO: 2340558 - RNA, 19 nt, Artificial Sequence
  Description of Artificial Sequence: Synthetic oligonucleotide
  Sense strand starting at position 3293 of SEQ ID NO: 1885415
aggguuucccuuugucacu

SEQ ID NO: 2340559 - RNA, 19 nt, Artificial Sequence
  Description of Artificial Sequence: Synthetic oligonucleotide
  Antisense strand to SEQ ID NO: 2340558
agugacaaagggaaacccu

SEQ ID NO: 2340560 - RNA, 19 nt, Artificial Sequence
  Description of Artificial Sequence: Synthetic oligonucleotide
  Sense strand starting at position 3295 of SEQ ID NO: 1885415
gguuucccuuugucacuua

SEQ ID NO: 2340561 - RNA, 19 nt, Artificial Sequence
  Description of Artificial Sequence: Synthetic oligonucleotide
  Antisense strand to SEQ ID NO: 2340560
uaagugacaaagggaaacc

SEQ ID NO: 2340562 - RNA, 19 nt, Artificial Sequence
  Description of Artificial Sequence: Synthetic oligonucleotide
  Sense strand starting at position 3750 of SEQ ID NO: 1885415
gagagacagccaugugguu

SEQ ID NO: 2340563 - RNA, 19 nt, Artificial Sequence
  Description of Artificial Sequence: Synthetic oligonucleotide
  Antisense strand to SEQ ID NO: 2340562
aaccacauggcugucucuc

SEQ ID NO: 2340564 - RNA, 19 nt, Artificial Sequence
  Description of Artificial Sequence: Synthetic oligonucleotide
  Sense strand starting at position 3752 of SEQ ID NO: 1885415
gagacagccaugugguuau

SEQ ID NO: 2340565 - RNA, 19 nt, Artificial Sequence
  Description of Artificial Sequence: Synthetic oligonucleotide
  Antisense strand to SEQ ID NO: 2340564
auaaccacauggcugucuc

SEQ ID NO: 2340566 - RNA, 19 nt, Artificial Sequence
  Description of Artificial Sequence: Synthetic oligonucleotide
  Sense strand starting at position 3755 of SEQ ID NO: 1885415
acagccaugugguuaucua

SEQ ID NO: 2340567 - RNA, 19 nt, Artificial Sequence
  Description of Artificial Sequence: Synthetic oligonucleotide
  Antisense strand to SEQ ID NO: 2340566
uagauaaccacauggcugu

SEQ ID NO: 2340568 - RNA, 19 nt, Artificial Sequence
  Description of Artificial Sequence: Synthetic oligonucleotide
  Sense strand starting at position 3759 of SEQ ID NO: 1885415
ccaugugguuaucuacagu

SEQ ID NO: 2340569 - RNA, 19 nt, Artificial Sequence
  Description of Artificial Sequence: Synthetic oligonucleotide
  Antisense strand to SEQ ID NO: 2340568
acuguagauaaccacaugg

SEQ ID NO: 2340570 - RNA, 19 nt, Artificial Sequence
  Description of Artificial Sequence: Synthetic oligonucleotide
  Sense strand starting at position 3762 of SEQ ID NO: 1885415
ugugguuaucuacagucca

SEQ ID NO: 2340571 - RNA, 19 nt, Artificial Sequence
  Description of Artificial Sequence: Synthetic oligonucleotide
  Antisense strand to SEQ ID NO: 2340570
uggacuguagauaaccaca

SEQ ID NO: 2340572 - RNA, 19 nt, Artificial Sequence
  Description of Artificial Sequence: Synthetic oligonucleotide
  Sense strand starting at position 3849 of SEQ ID NO: 1885415
ggcuaaguggcaugaacaa

SEQ ID NO: 2340573 - RNA, 19 nt, Artificial Sequence
  Description of Artificial Sequence: Synthetic oligonucleotide
  Antisense strand to SEQ ID NO: 2340572
uuguucaugccacuuagcc

SEQ ID NO: 2340574 - RNA, 19 nt, Artificial Sequence
  Description of Artificial Sequence: Synthetic oligonucleotide
  Sense strand starting at position 16 of SEQ ID NO: 1885416
cucuguguaguccacauaa

SEQ ID NO: 2340575 - RNA, 19 nt, Artificial Sequence
  Description of Artificial Sequence: Synthetic oligonucleotide
  Antisense strand to SEQ ID NO: 2340574
uuauguggacuacacagag

SEQ ID NO: 2340576 - RNA, 19 nt, Artificial Sequence
  Description of Artificial Sequence: Synthetic oligonucleotide
  Sense strand starting at position 18 of SEQ ID NO: 1885416
cuguguaguccacauaaac

SEQ ID NO: 2340577 - RNA, 19 nt, Artificial Sequence
  Description of Artificial Sequence: Synthetic oligonucleotide
  Antisense strand to SEQ ID NO: 2340576
guuuauguggacuacacag

SEQ ID NO: 2340578 - RNA, 19 nt, Artificial Sequence
  Description of Artificial Sequence: Synthetic oligonucleotide
  Sense strand starting at position 88 of SEQ ID NO: 1885416
agcucagaagcuuggacau

SEQ ID NO: 2340579 - RNA, 19 nt, Artificial Sequence
  Description of Artificial Sequence: Synthetic oligonucleotide
  Antisense strand to SEQ ID NO: 2340578
auguccaagcuucugagcu

SEQ ID NO: 2340580 - RNA, 19 nt, Artificial Sequence
  Description of Artificial Sequence: Synthetic oligonucleotide
  Sense strand starting at position 483 of SEQ ID NO: 1885416
cuuguuaguuaagucauuu

SEQ ID NO: 2340581 - RNA, 19 nt, Artificial Sequence
  Description of Artificial Sequence: Synthetic oligonucleotide
  Antisense strand to SEQ ID NO: 2340580
aaaugacuuaacuaacaag

SEQ ID NO: 2340582 - RNA, 19 nt, Artificial Sequence
  Description of Artificial Sequence: Synthetic oligonucleotide
  Sense strand starting at position 503 of SEQ ID NO: 1885416
ucaugaaauggcuguacca

SEQ ID NO: 2340583 - RNA, 19 nt, Artificial Sequence
  Description of Artificial Sequence: Synthetic oligonucleotide
  Antisense strand to SEQ ID NO: 2340582
ugguacagccauuucauga

SEQ ID NO: 2340584 - RNA, 19 nt, Artificial Sequence
  Description of Artificial Sequence: Synthetic oligonucleotide
  Sense strand starting at position 505 of SEQ ID NO: 1885416
augaaauggcuguaccauc

SEQ ID NO: 2340585 - RNA, 19 nt, Artificial Sequence
  Description of Artificial Sequence: Synthetic oligonucleotide
  Antisense strand to SEQ ID NO: 2340584
gaugguacagccauuucau

SEQ ID NO: 2340586 - RNA, 19 nt, Artificial Sequence
  Description of Artificial Sequence: Synthetic oligonucleotide
  Sense strand starting at position 513 of SEQ ID NO: 1885416
gcuguaccaucauuuacuu

SEQ ID NO: 2340587 - RNA, 19 nt, Artificial Sequence
  Description of Artificial Sequence: Synthetic oligonucleotide
  Antisense strand to SEQ ID NO: 2340586
aaguaaaugaugguacagc

SEQ ID NO: 2340588 - RNA, 19 nt, Artificial Sequence
  Description of Artificial Sequence: Synthetic oligonucleotide
  Sense strand starting at position 549 of SEQ ID NO: 1885416
uggacaguuuggucacuua

SEQ ID NO: 2340589 - RNA, 19 nt, Artificial Sequence
  Description of Artificial Sequence: Synthetic oligonucleotide
  Antisense strand to SEQ ID NO: 2340588
uaagugaccaaacugucca

SEQ ID NO: 2340590 - RNA, 19 nt, Artificial Sequence
  Description of Artificial Sequence: Synthetic oligonucleotide
  Sense strand starting at position 716 of SEQ ID NO: 1885416
uaugauacagcugaauagu

SEQ ID NO: 2340591 - RNA, 19 nt, Artificial Sequence
  Description of Artificial Sequence: Synthetic oligonucleotide
  Antisense strand to SEQ ID NO: 2340590
acuauucagcuguaucaua

SEQ ID NO: 2340592 - RNA, 19 nt, Artificial Sequence
  Description of Artificial Sequence: Synthetic oligonucleotide
  Sense strand starting at position 753 of SEQ ID NO: 1885416
uaagaucaguugucucaug

SEQ ID NO: 2340593 - RNA, 19 nt, Artificial Sequence
  Description of Artificial Sequence: Synthetic oligonucleotide
  Antisense strand to SEQ ID NO: 2340592
caugagacaacugaucuua

SEQ ID NO: 2340594 - RNA, 19 nt, Artificial Sequence
  Description of Artificial Sequence: Synthetic oligonucleotide
  Sense strand starting at position 784 of SEQ ID NO: 1885416
cagcauguauugguaauuu

SEQ ID NO: 2340595 - RNA, 19 nt, Artificial Sequence
  Description of Artificial Sequence: Synthetic oligonucleotide
  Antisense strand to SEQ ID NO: 2340594
aaauuaccaauacaugcug

SEQ ID NO: 2340596 - RNA, 19 nt, Artificial Sequence
  Description of Artificial Sequence: Synthetic oligonucleotide
  Sense strand starting at position 802 of SEQ ID NO: 1885416
uuguuaauucgauagguga

SEQ ID NO: 2340597 - RNA, 19 nt, Artificial Sequence
  Description of Artificial Sequence: Synthetic oligonucleotide
  Antisense strand to SEQ ID NO: 2340596
ucaccuaucgaauuaacaa

SEQ ID NO: 2340598 - RNA, 19 nt, Artificial Sequence
  Description of Artificial Sequence: Synthetic oligonucleotide
  Sense strand starting at position 805 of SEQ ID NO: 1885416
uuaauucgauaggugaaua

SEQ ID NO: 2340599 - RNA, 19 nt, Artificial Sequence
  Description of Artificial Sequence: Synthetic oligonucleotide
  Antisense strand to SEQ ID NO: 2340598
uauucaccuaucgaauuaa

SEQ ID NO: 2340600 - RNA, 19 nt, Artificial Sequence
  Description of Artificial Sequence: Synthetic oligonucleotide
  Sense strand starting at position 813 of SEQ ID NO: 1885416
auaggugaauagucucuuu

SEQ ID NO: 2340601 - RNA, 19 nt, Artificial Sequence
  Description of Artificial Sequence: Synthetic oligonucleotide
  Antisense strand to SEQ ID NO: 2340600
aaagagacuauucaccuau

SEQ ID NO: 2340602 - RNA, 19 nt, Artificial Sequence
  Description of Artificial Sequence: Synthetic oligonucleotide
  Sense strand starting at position 901 of SEQ ID NO: 1885416
gacacagaucuagguauca

SEQ ID NO: 2340603 - RNA, 19 nt, Artificial Sequence
  Description of Artificial Sequence: Synthetic oligonucleotide
  Antisense strand to SEQ ID NO: 2340602
ugauaccuagaucuguguc

SEQ ID NO: 2340604 - RNA, 19 nt, Artificial Sequence
  Description of Artificial Sequence: Synthetic oligonucleotide
  Sense strand starting at position 1129 of SEQ ID NO: 1885416
ugcuaucagccacaugaaa

SEQ ID NO: 2340605 - RNA, 19 nt, Artificial Sequence
  Description of Artificial Sequence: Synthetic oligonucleotide
  Antisense strand to SEQ ID NO: 2340604
uuucauguggcugauagca

SEQ ID NO: 2340606 - RNA, 19 nt, Artificial Sequence
  Description of Artificial Sequence: Synthetic oligonucleotide
  Sense strand starting at position 1199 of SEQ ID NO: 1885416
auaaauuugcuuggacguu

SEQ ID NO: 2340607 - RNA, 19 nt, Artificial Sequence
  Description of Artificial Sequence: Synthetic oligonucleotide
  Antisense strand to SEQ ID NO: 2340606
aacguccaagcaaauuuau

SEQ ID NO: 2340608 - RNA, 19 nt, Artificial Sequence
  Description of Artificial Sequence: Synthetic oligonucleotide
  Sense strand starting at position 1306 of SEQ ID NO: 1885416
ugaucuauccauuauaugu

SEQ ID NO: 2340609 - RNA, 19 nt, Artificial Sequence
  Description of Artificial Sequence: Synthetic oligonucleotide
  Antisense strand to SEQ ID NO: 2340608
acauauaauggauagauca

SEQ ID NO: 2340610 - RNA, 19 nt, Artificial Sequence
  Description of Artificial Sequence: Synthetic oligonucleotide
  Sense strand starting at position 1346 of SEQ ID NO: 1885416
gugcuucuuuaauuugaau

SEQ ID NO: 2340611 - RNA, 19 nt, Artificial Sequence
  Description of Artificial Sequence: Synthetic oligonucleotide
  Antisense strand to SEQ ID NO: 2340610
auucaaauuaaagaagcac

SEQ ID NO: 2340612 - RNA, 19 nt, Artificial Sequence
  Description of Artificial Sequence: Synthetic oligonucleotide
  Sense strand starting at position 1545 of SEQ ID NO: 1885416
gggauauuguacucuggga

SEQ ID NO: 2340613 - RNA, 19 nt, Artificial Sequence
  Description of Artificial Sequence: Synthetic oligonucleotide
  Antisense strand to SEQ ID NO: 2340612
ucccagaguacaauauccc

SEQ ID NO: 2340614 - RNA, 19 nt, Artificial Sequence
  Description of Artificial Sequence: Synthetic oligonucleotide
  Sense strand starting at position 1547 of SEQ ID NO: 1885416
gauauuguacucugggaaa

SEQ ID NO: 2340615 - RNA, 19 nt, Artificial Sequence
  Description of Artificial Sequence: Synthetic oligonucleotide
  Antisense strand to SEQ ID NO: 2340614
uuucccagaguacaauauc

SEQ ID NO: 2340616 - RNA, 19 nt, Artificial Sequence
  Description of Artificial Sequence: Synthetic oligonucleotide
  Sense strand starting at position 1549 of SEQ ID NO: 1885416
uauuguacucugggaaauc

SEQ ID NO: 2340617 - RNA, 19 nt, Artificial Sequence
  Description of Artificial Sequence: Synthetic oligonucleotide
  Antisense strand to SEQ ID NO: 2340616
gauuucccagaguacaaua

SEQ ID NO: 2340618 - RNA, 19 nt, Artificial Sequence
  Description of Artificial Sequence: Synthetic oligonucleotide
  Sense strand starting at position 1570 of SEQ ID NO: 1885416
aguuuaaagguauacaucu

SEQ ID NO: 2340619 - RNA, 19 nt, Artificial Sequence
  Description of Artificial Sequence: Synthetic oligonucleotide
  Antisense strand to SEQ ID NO: 2340618
agauguauaccuuuaaacu

SEQ ID NO: 2340620 - RNA, 19 nt, Artificial Sequence
  Description of Artificial Sequence: Synthetic oligonucleotide
  Sense strand starting at position 2202 of SEQ ID NO: 1885416
gcaacaguggcugaguaaa

SEQ ID NO: 2340621 - RNA, 19 nt, Artificial Sequence
  Description of Artificial Sequence: Synthetic oligonucleotide
  Antisense strand to SEQ ID NO: 2340620
uuuacucagccacuguugc

SEQ ID NO: 2340622 - RNA, 19 nt, Artificial Sequence
  Description of Artificial Sequence: Synthetic oligonucleotide
  Sense strand starting at position 2204 of SEQ ID NO: 1885416
aacaguggcugaguaaauu

SEQ ID NO: 2340623 - RNA, 19 nt, Artificial Sequence
  Description of Artificial Sequence: Synthetic oligonucleotide
  Antisense strand to SEQ ID NO: 2340622
aauuuacucagccacuguu

SEQ ID NO: 2340624 - RNA, 19 nt, Artificial Sequence
  Description of Artificial Sequence: Synthetic oligonucleotide
  Sense strand starting at position 2251 of SEQ ID NO: 1885416
cuccaaguguuucuaagaa

SEQ ID NO: 2340625 - RNA, 19 nt, Artificial Sequence
  Description of Artificial Sequence: Synthetic oligonucleotide
  Antisense strand to SEQ ID NO: 2340624
uucuuagaaacacuuggag

SEQ ID NO: 2340626 - RNA, 19 nt, Artificial Sequence
  Description of Artificial Sequence: Synthetic oligonucleotide
  Sense strand starting at position 2291 of SEQ ID NO: 1885416
accuguuuggaguagggau

SEQ ID NO: 2340627 - RNA, 19 nt, Artificial Sequence
  Description of Artificial Sequence: Synthetic oligonucleotide
  Antisense strand to SEQ ID NO: 2340626
aucccuacuccaaacaggu

SEQ ID NO: 2340628 - RNA, 19 nt, Artificial Sequence
  Description of Artificial Sequence: Synthetic oligonucleotide
  Sense strand starting at position 2434 of SEQ ID NO: 1885416
cccucaaagucccugagaa

SEQ ID NO: 2340629 - RNA, 19 nt, Artificial Sequence
  Description of Artificial Sequence: Synthetic oligonucleotide
  Antisense strand to SEQ ID NO: 2340628
uucucagggacuuugaggg

SEQ ID NO: 2340630 - RNA, 19 nt, Artificial Sequence
  Description of Artificial Sequence: Synthetic oligonucleotide
  Sense strand starting at position 2435 of SEQ ID NO: 1885416
ccucaaagucccugagaag

SEQ ID NO: 2340631 - RNA, 19 nt, Artificial Sequence
  Description of Artificial Sequence: Synthetic oligonucleotide
  Antisense strand to SEQ ID NO: 2340630
cuucucagggacuuugagg

SEQ ID NO: 2340632 - RNA, 19 nt, Artificial Sequence
  Description of Artificial Sequence: Synthetic oligonucleotide
  Sense strand starting at position 2436 of SEQ ID NO: 1885416
cucaaagucccugagaagu

SEQ ID NO: 2340633 - RNA, 19 nt, Artificial Sequence
  Description of Artificial Sequence: Synthetic oligonucleotide
  Antisense strand to SEQ ID NO: 2340632
acuucucagggacuuugag

SEQ ID NO: 2340634 - RNA, 19 nt, Artificial Sequence
  Description of Artificial Sequence: Synthetic oligonucleotide
  Sense strand starting at position 2486 of SEQ ID NO: 1885416
gggaaagguucuccuugga

SEQ ID NO: 2340635 - RNA, 19 nt, Artificial Sequence
  Description of Artificial Sequence: Synthetic oligonucleotide
  Antisense strand to SEQ ID NO: 2340634
uccaaggagaaccuuuccc

SEQ ID NO: 2340636 - RNA, 19 nt, Artificial Sequence
  Description of Artificial Sequence: Synthetic oligonucleotide
  Sense strand starting at position 2489 of SEQ ID NO: 1885416
aaagguucuccuuggacuu

SEQ ID NO: 2340637 - RNA, 19 nt, Artificial Sequence
  Description of Artificial Sequence: Synthetic oligonucleotide
  Antisense strand to SEQ ID NO: 2340636
aaguccaaggagaaccuuu

SEQ ID NO: 2340638 - RNA, 19 nt, Artificial Sequence
  Description of Artificial Sequence: Synthetic oligonucleotide
  Sense strand starting at position 2500 of SEQ ID NO: 1885416
uuggacuugaugugagaga

SEQ ID NO: 2340639 - RNA, 19 nt, Artificial Sequence
  Description of Artificial Sequence: Synthetic oligonucleotide
  Antisense strand to SEQ ID NO: 2340638
ucucucacaucaaguccaa

SEQ ID NO: 2340640 - RNA, 19 nt, Artificial Sequence
  Description of Artificial Sequence: Synthetic oligonucleotide
  Sense strand starting at position 2507 of SEQ ID NO: 1885416
ugaugugagagauguugga

SEQ ID NO: 2340641 - RNA, 19 nt, Artificial Sequence
  Description of Artificial Sequence: Synthetic oligonucleotide
  Antisense strand to SEQ ID NO: 2340640
uccaacaucucucacauca

SEQ ID NO: 2340642 - RNA, 19 nt, Artificial Sequence
  Description of Artificial Sequence: Synthetic oligonucleotide
  Sense strand starting at position 2511 of SEQ ID NO: 1885416
gugagagauguuggaaacu

SEQ ID NO: 2340643 - RNA, 19 nt, Artificial Sequence
  Description of Artificial Sequence: Synthetic oligonucleotide
  Antisense strand to SEQ ID NO: 2340642
aguuuccaacaucucucac

SEQ ID NO: 2340644 - RNA, 19 nt, Artificial Sequence
  Description of Artificial Sequence: Synthetic oligonucleotide
  Sense strand starting at position 2939 of SEQ ID NO: 1885416
agguuuaugccacaguuua

SEQ ID NO: 2340645 - RNA, 19 nt, Artificial Sequence
  Description of Artificial Sequence: Synthetic oligonucleotide
  Antisense strand to SEQ ID NO: 2340644
uaaacuguggcauaaaccu

SEQ ID NO: 2340646 - RNA, 19 nt, Artificial Sequence
  Description of Artificial Sequence: Synthetic oligonucleotide
  Sense strand starting at position 3515 of SEQ ID NO: 1885416
aagcuugaggguuaucuuu

SEQ ID NO: 2340647 - RNA, 19 nt, Artificial Sequence
  Description of Artificial Sequence: Synthetic oligonucleotide
  Antisense strand to SEQ ID NO: 2340646
aaagauaacccucaagcuu

SEQ ID NO: 2340648 - RNA, 19 nt, Artificial Sequence
  Description of Artificial Sequence: Synthetic oligonucleotide
  Sense strand starting at position 3954 of SEQ ID NO: 1885416
gucaguuuaauuggaagga

SEQ ID NO: 2340649 - RNA, 19 nt, Artificial Sequence
  Description of Artificial Sequence: Synthetic oligonucleotide
  Antisense strand to SEQ ID NO: 2340648
uccuuccaauuaaacugac

SEQ ID NO: 2340650 - RNA, 19 nt, Artificial Sequence
  Description of Artificial Sequence: Synthetic oligonucleotide
  Sense strand starting at position 3958 of SEQ ID NO: 1885416
guuuaauuggaaggauguu

SEQ ID NO: 2340651 - RNA, 19 nt, Artificial Sequence
  Description of Artificial Sequence: Synthetic oligonucleotide
  Antisense strand to SEQ ID NO: 2340650
aacauccuuccaauuaaac

SEQ ID NO: 2340652 - RNA, 19 nt, Artificial Sequence
  Description of Artificial Sequence: Synthetic oligonucleotide
  Sense strand starting at position 3964 of SEQ ID NO: 1885416
uuggaaggauguucuucua

SEQ ID NO: 2340653 - RNA, 19 nt, Artificial Sequence
  Description of Artificial Sequence: Synthetic oligonucleotide
  Antisense strand to SEQ ID NO: 2340652
uagaagaacauccuuccaa

SEQ ID NO: 2340654 - RNA, 19 nt, Artificial Sequence
  Description of Artificial Sequence: Synthetic oligonucleotide
  Sense strand starting at position 194 of SEQ ID NO: 1885417
ccaccaacuguuuauguua

SEQ ID NO: 2340655 - RNA, 19 nt, Artificial Sequence
  Description of Artificial Sequence: Synthetic oligonucleotide
  Antisense strand to SEQ ID NO: 2340654
uaacauaaacaguuggugg

SEQ ID NO: 2340656 - RNA, 19 nt, Artificial Sequence
  Description of Artificial Sequence: Synthetic oligonucleotide
  Sense strand starting at position 535 of SEQ ID NO: 1885417
agacaaucauguuugagau

SEQ ID NO: 2340657 - RNA, 19 nt, Artificial Sequence
  Description of Artificial Sequence: Synthetic oligonucleotide
  Antisense strand to SEQ ID NO: 2340656
aucucaaacaugauugucu

SEQ ID NO: 2340658 - RNA, 19 nt, Artificial Sequence
  Description of Artificial Sequence: Synthetic oligonucleotide
  Sense strand starting at position 536 of SEQ ID NO: 1885417
gacaaucauguuugagauu

SEQ ID NO: 2340659 - RNA, 19 nt, Artificial Sequence
  Description of Artificial Sequence: Synthetic oligonucleotide
  Antisense strand to SEQ ID NO: 2340658
aaucucaaacaugauuguc

SEQ ID NO: 2340660 - RNA, 19 nt, Artificial Sequence
  Description of Artificial Sequence: Synthetic oligonucleotide
  Sense strand starting at position 542 of SEQ ID NO: 1885417
cauguuugagauuauaagu

SEQ ID NO: 2340661 - RNA, 19 nt, Artificial Sequence
  Description of Artificial Sequence: Synthetic oligonucleotide
  Antisense strand to SEQ ID NO: 2340660
acuuauaaucucaaacaug

SEQ ID NO: 2340662 - RNA, 19 nt, Artificial Sequence
  Description of Artificial Sequence: Synthetic oligonucleotide
  Sense strand starting at position 1170 of SEQ ID NO: 1885417
gcucccugguuucuucuaa

SEQ ID NO: 2340663 - RNA, 19 nt, Artificial Sequence
  Description of Artificial Sequence: Synthetic oligonucleotide
  Antisense strand to SEQ ID NO: 2340662
uuagaagaaaccagggagc

SEQ ID NO: 2340664 - RNA, 19 nt, Artificial Sequence
  Description of Artificial Sequence: Synthetic oligonucleotide
  Sense strand starting at position 1382 of SEQ ID NO: 1885417
ugguuauuaaguuguauuc

SEQ ID NO: 2340665 - RNA, 19 nt, Artificial Sequence
  Description of Artificial Sequence: Synthetic oligonucleotide
  Antisense strand to SEQ ID NO: 2340664
gaauacaacuuaauaacca

SEQ ID NO: 2340666 - RNA, 19 nt, Artificial Sequence
  Description of Artificial Sequence: Synthetic oligonucleotide
  Sense strand starting at position 2017 of SEQ ID NO: 1885417
aauggauacucaugaguua

SEQ ID NO: 2340667 - RNA, 19 nt, Artificial Sequence
  Description of Artificial Sequence: Synthetic oligonucleotide
  Antisense strand to SEQ ID NO: 2340666
uaacucaugaguauccauu

SEQ ID NO: 2340668 - RNA, 19 nt, Artificial Sequence
  Description of Artificial Sequence: Synthetic oligonucleotide
  Sense strand starting at position 2505 of SEQ ID NO: 1885417
ggaucaacuugcucgacau

SEQ ID NO: 2340669 - RNA, 19 nt, Artificial Sequence
  Description of Artificial Sequence: Synthetic oligonucleotide
  Antisense strand to SEQ ID NO: 2340668
augucgagcaaguugaucc

SEQ ID NO: 2340670 - RNA, 19 nt, Artificial Sequence
  Description of Artificial Sequence: Synthetic oligonucleotide
  Sense strand starting at position 2516 of SEQ ID NO: 1885417
cucgacauuugugugggua

SEQ ID NO: 2340671 - RNA, 19 nt, Artificial Sequence
  Description of Artificial Sequence: Synthetic oligonucleotide
  Antisense strand to SEQ ID NO: 2340670
uacccacacaaaugucgag

SEQ ID NO: 2340672 - RNA, 19 nt, Artificial Sequence
  Description of Artificial Sequence: Synthetic oligonucleotide
  Sense strand starting at position 2517 of SEQ ID NO: 1885417
ucgacauuuguguggguaa

SEQ ID NO: 2340673 - RNA, 19 nt, Artificial Sequence
  Description of Artificial Sequence: Synthetic oligonucleotide
  Antisense strand to SEQ ID NO: 2340672
uuacccacacaaaugucga

SEQ ID NO: 2340674 - RNA, 19 nt, Artificial Sequence
  Description of Artificial Sequence: Synthetic oligonucleotide
  Sense strand starting at position 2518 of SEQ ID NO: 1885417
cgacauuuguguggguaaa

SEQ ID NO: 2340675 - RNA, 19 nt, Artificial Sequence
  Description of Artificial Sequence: Synthetic oligonucleotide
  Antisense strand to SEQ ID NO: 2340674
uuuacccacacaaaugucg

SEQ ID NO: 2340676 - RNA, 19 nt, Artificial Sequence
  Description of Artificial Sequence: Synthetic oligonucleotide
  Sense strand starting at position 2615 of SEQ ID NO: 1885417
cuuugaacucuauguguga

SEQ ID NO: 2340677 - RNA, 19 nt, Artificial Sequence
  Description of Artificial Sequence: Synthetic oligonucleotide
  Antisense strand to SEQ ID NO: 2340676
ucacacauagaguucaaag

SEQ ID NO: 2340678 - RNA, 19 nt, Artificial Sequence
  Description of Artificial Sequence: Synthetic oligonucleotide
  Sense strand starting at position 2616 of SEQ ID NO: 1885417
uuugaacucuaugugugaa

SEQ ID NO: 2340679 - RNA, 19 nt, Artificial Sequence
  Description of Artificial Sequence: Synthetic oligonucleotide
  Antisense strand to SEQ ID NO: 2340678
uucacacauagaguucaaa

SEQ ID NO: 2340680 - RNA, 19 nt, Artificial Sequence
  Description of Artificial Sequence: Synthetic oligonucleotide
  Sense strand starting at position 2618 of SEQ ID NO: 1885417
ugaacucuaugugugaauc

SEQ ID NO: 2340681 - RNA, 19 nt, Artificial Sequence
  Description of Artificial Sequence: Synthetic oligonucleotide
  Antisense strand to SEQ ID NO: 2340680
gauucacacauagaguuca

SEQ ID NO: 2340682 - RNA, 19 nt, Artificial Sequence
  Description of Artificial Sequence: Synthetic oligonucleotide
  Sense strand starting at position 2619 of SEQ ID NO: 1885417
gaacucuaugugugaauca

SEQ ID NO: 2340683 - RNA, 19 nt, Artificial Sequence
  Description of Artificial Sequence: Synthetic oligonucleotide
  Antisense strand to SEQ ID NO: 2340682
ugauucacacauagaguuc

SEQ ID NO: 2340684 - RNA, 19 nt, Artificial Sequence
  Description of Artificial Sequence: Synthetic oligonucleotide
  Sense strand starting at position 2626 of SEQ ID NO: 1885417
augugugaaucaccacaaa

SEQ ID NO: 2340685 - RNA, 19 nt, Artificial Sequence
  Description of Artificial Sequence: Synthetic oligonucleotide
  Antisense strand to SEQ ID NO: 2340684
uuuguggugauucacacau

SEQ ID NO: 2340686 - RNA, 19 nt, Artificial Sequence
  Description of Artificial Sequence: Synthetic oligonucleotide
  Sense strand starting at position 3375 of SEQ ID NO: 1885417
uuugucaaacagcgagaaa

SEQ ID NO: 2340687 - RNA, 19 nt, Artificial Sequence
  Description of Artificial Sequence: Synthetic oligonucleotide
  Antisense strand to SEQ ID NO: 2340686
uuucucgcuguuugacaaa

SEQ ID NO: 2340688 - RNA, 19 nt, Artificial Sequence
  Description of Artificial Sequence: Synthetic oligonucleotide
  Sense strand starting at position 3376 of SEQ ID NO: 1885417
uugucaaacagcgagaaau

SEQ ID NO: 2340689 - RNA, 19 nt, Artificial Sequence
  Description of Artificial Sequence: Synthetic oligonucleotide
  Antisense strand to SEQ ID NO: 2340688
auuucucgcuguuugacaa

SEQ ID NO: 2340690 - RNA, 19 nt, Artificial Sequence
  Description of Artificial Sequence: Synthetic oligonucleotide
  Sense strand starting at position 3387 of SEQ ID NO: 1885417
cgagaaauagcguaaucuu

SEQ ID NO: 2340691 - RNA, 19 nt, Artificial Sequence
  Description of Artificial Sequence: Synthetic oligonucleotide
  Antisense strand to SEQ ID NO: 2340690
aagauuacgcuauuucucg

SEQ ID NO: 2340692 - RNA, 19 nt, Artificial Sequence
  Description of Artificial Sequence: Synthetic oligonucleotide
  Sense strand starting at position 3415 of SEQ ID NO: 1885417
guccacacgucuugaguaa

SEQ ID NO: 2340693 - RNA, 19 nt, Artificial Sequence
  Description of Artificial Sequence: Synthetic oligonucleotide
  Antisense strand to SEQ ID NO: 2340692
uuacucaagacguguggac

SEQ ID NO: 2340694 - RNA, 19 nt, Artificial Sequence
  Description of Artificial Sequence: Synthetic oligonucleotide
  Sense strand starting at position 3416 of SEQ ID NO: 1885417
uccacacgucuugaguaaa

SEQ ID NO: 2340695 - RNA, 19 nt, Artificial Sequence
  Description of Artificial Sequence: Synthetic oligonucleotide
  Antisense strand to SEQ ID NO: 2340694
uuuacucaagacgugugga

SEQ ID NO: 2340696 - RNA, 19 nt, Artificial Sequence
  Description of Artificial Sequence: Synthetic oligonucleotide
  Sense strand starting at position 3419 of SEQ ID NO: 1885417
acacgucuugaguaaagac

SEQ ID NO: 2340697 - RNA, 19 nt, Artificial Sequence
  Description of Artificial Sequence: Synthetic oligonucleotide
  Antisense strand to SEQ ID NO: 2340696
gucuuuacucaagacgugu

SEQ ID NO: 2340698 - RNA, 19 nt, Artificial Sequence
  Description of Artificial Sequence: Synthetic oligonucleotide
  Sense strand starting at position 3446 of SEQ ID NO: 1885417
uuuguuuaagaaggauguu

SEQ ID NO: 2340699 - RNA, 19 nt, Artificial Sequence
  Description of Artificial Sequence: Synthetic oligonucleotide
  Antisense strand to SEQ ID NO: 2340698
aacauccuucuuaaacaaa

SEQ ID NO: 2340700 - RNA, 19 nt, Artificial Sequence
  Description of Artificial Sequence: Synthetic oligonucleotide
  Sense strand starting at position 3495 of SEQ ID NO: 1885417
aagcauaagggcuguucua

SEQ ID NO: 2340701 - RNA, 19 nt, Artificial Sequence
  Description of Artificial Sequence: Synthetic oligonucleotide
  Antisense strand to SEQ ID NO: 2340700
uagaacagcccuuaugcuu

SEQ ID NO: 2340702 - RNA, 19 nt, Artificial Sequence
  Description of Artificial Sequence: Synthetic oligonucleotide
  Sense strand starting at position 3683 of SEQ ID NO: 1885417
auaaauugucaccaagucu

SEQ ID NO: 2340703 - RNA, 19 nt, Artificial Sequence
  Description of Artificial Sequence: Synthetic oligonucleotide
  Antisense strand to SEQ ID NO: 2340702
agacuuggugacaauuuau

SEQ ID NO: 2340704 - RNA, 19 nt, Artificial Sequence
  Description of Artificial Sequence: Synthetic oligonucleotide
  Sense strand starting at position 3941 of SEQ ID NO: 1885417
ugaugauaauacuaguagu

SEQ ID NO: 2340705 - RNA, 19 nt, Artificial Sequence
  Description of Artificial Sequence: Synthetic oligonucleotide
  Antisense strand to SEQ ID NO: 2340704
acuacuaguauuaucauca

SEQ ID NO: 2340706 - RNA, 19 nt, Artificial Sequence
  Description of Artificial Sequence: Synthetic oligonucleotide
  Sense strand starting at position 3944 of SEQ ID NO: 1885417
ugauaauacuaguagucau

SEQ ID NO: 2340707 - RNA, 19 nt, Artificial Sequence
  Description of Artificial Sequence: Synthetic oligonucleotide
  Antisense strand to SEQ ID NO: 2340706
augacuacuaguauuauca

SEQ ID NO: 2340708 - RNA, 19 nt, Artificial Sequence
  Description of Artificial Sequence: Synthetic oligonucleotide
  Sense strand starting at position 114 of SEQ ID NO: 1885418
cugagauuggaagguagua

SEQ ID NO: 2340709 - RNA, 19 nt, Artificial Sequence
  Description of Artificial Sequence: Synthetic oligonucleotide
  Antisense strand to SEQ ID NO: 2340708
uacuaccuuccaaucucag

SEQ ID NO: 2340710 - RNA, 19 nt, Artificial Sequence
  Description of Artificial Sequence: Synthetic oligonucleotide
  Sense strand starting at position 579 of SEQ ID NO: 1885418
ggaagcucuaguggauuaa

SEQ ID NO: 2340711 - RNA, 19 nt, Artificial Sequence
  Description of Artificial Sequence: Synthetic oligonucleotide
  Antisense strand to SEQ ID NO: 2340710
uuaauccacuagagcuucc

SEQ ID NO: 2340712 - RNA, 19 nt, Artificial Sequence
  Description of Artificial Sequence: Synthetic oligonucleotide
  Sense strand starting at position 609 of SEQ ID NO: 1885418
guauccuaugguuagaggu

SEQ ID NO: 2340713 - RNA, 19 nt, Artificial Sequence
  Description of Artificial Sequence: Synthetic oligonucleotide
  Antisense strand to SEQ ID NO: 2340712
accucuaaccauaggauac

SEQ ID NO: 2340714 - RNA, 19 nt, Artificial Sequence
  Description of Artificial Sequence: Synthetic oligonucleotide
  Sense strand starting at position 617 of SEQ ID NO: 1885418
ugguuagaggugcauauau

SEQ ID NO: 2340715 - RNA, 19 nt, Artificial Sequence
  Description of Artificial Sequence: Synthetic oligonucleotide
  Antisense strand to SEQ ID NO: 2340714
auauaugcaccucuaacca

SEQ ID NO: 2340716 - RNA, 19 nt, Artificial Sequence
  Description of Artificial Sequence: Synthetic oligonucleotide
  Sense strand starting at position 753 of SEQ ID NO: 1885418
guagguugugcugcagagu

SEQ ID NO: 2340717 - RNA, 19 nt, Artificial Sequence
  Description of Artificial Sequence: Synthetic oligonucleotide
  Antisense strand to SEQ ID NO: 2340716
acucugcagcacaaccuac

SEQ ID NO: 2340718 - RNA, 19 nt, Artificial Sequence
  Description of Artificial Sequence: Synthetic oligonucleotide
  Sense strand starting at position 758 of SEQ ID NO: 1885418
uugugcugcagaguuguau

SEQ ID NO: 2340719 - RNA, 19 nt, Artificial Sequence
  Description of Artificial Sequence: Synthetic oligonucleotide
  Antisense strand to SEQ ID NO: 2340718
auacaacucugcagcacaa

SEQ ID NO: 2340720 - RNA, 19 nt, Artificial Sequence
  Description of Artificial Sequence: Synthetic oligonucleotide
  Sense strand starting at position 759 of SEQ ID NO: 1885418
ugugcugcagaguuguauu

SEQ ID NO: 2340721 - RNA, 19 nt, Artificial Sequence
  Description of Artificial Sequence: Synthetic oligonucleotide
  Antisense strand to SEQ ID NO: 2340720
aauacaacucugcagcaca

SEQ ID NO: 2340722 - RNA, 19 nt, Artificial Sequence
  Description of Artificial Sequence: Synthetic oligonucleotide
  Sense strand starting at position 832 of SEQ ID NO: 1885418
auuagaaggcuuuggagau

SEQ ID NO: 2340723 - RNA, 19 nt, Artificial Sequence
  Description of Artificial Sequence: Synthetic oligonucleotide
  Antisense strand to SEQ ID NO: 2340722
aucuccaaagccuucuaau

SEQ ID NO: 2340724 - RNA, 19 nt, Artificial Sequence
  Description of Artificial Sequence: Synthetic oligonucleotide
  Sense strand starting at position 858 of SEQ ID NO: 1885418
agguuuccauaaucugaca

SEQ ID NO: 2340725 - RNA, 19 nt, Artificial Sequence
  Description of Artificial Sequence: Synthetic oligonucleotide
  Antisense strand to SEQ ID NO: 2340724
ugucagauuauggaaaccu

SEQ ID NO: 2340726 - RNA, 19 nt, Artificial Sequence
  Description of Artificial Sequence: Synthetic oligonucleotide
  Sense strand starting at position 894 of SEQ ID NO: 1885418
uugugacugcuguaagaua

SEQ ID NO: 2340727 - RNA, 19 nt, Artificial Sequence
  Description of Artificial Sequence: Synthetic oligonucleotide
  Antisense strand to SEQ ID NO: 2340726
uaucuuacagcagucacaa

SEQ ID NO: 2340728 - RNA, 19 nt, Artificial Sequence
  Description of Artificial Sequence: Synthetic oligonucleotide
  Sense strand starting at position 923 of SEQ ID NO: 1885418
aggucuaagaguugaagua

SEQ ID NO: 2340729 - RNA, 19 nt, Artificial Sequence
  Description of Artificial Sequence: Synthetic oligonucleotide
  Antisense strand to SEQ ID NO: 2340728
uacuucaacucuuagaccu

SEQ ID NO: 2340730 - RNA, 19 nt, Artificial Sequence
  Description of Artificial Sequence: Synthetic oligonucleotide
  Sense strand starting at position 924 of SEQ ID NO: 1885418
ggucuaagaguugaaguaa

SEQ ID NO: 2340731 - RNA, 19 nt, Artificial Sequence
  Description of Artificial Sequence: Synthetic oligonucleotide
  Antisense strand to SEQ ID NO: 2340730
uuacuucaacucuuagacc

SEQ ID NO: 2340732 - RNA, 19 nt, Artificial Sequence
  Description of Artificial Sequence: Synthetic oligonucleotide
  Sense strand starting at position 973 of SEQ ID NO: 1885418
caggcaagcgaucauagaa

SEQ ID NO: 2340733 - RNA, 19 nt, Artificial Sequence
  Description of Artificial Sequence: Synthetic oligonucleotide
  Antisense strand to SEQ ID NO: 2340732
uucuaugaucgcuugccug

SEQ ID NO: 2340734 - RNA, 19 nt, Artificial Sequence
  Description of Artificial Sequence: Synthetic oligonucleotide
  Sense strand starting at position 1153 of SEQ ID NO: 1885418
augaaauugcuagguauac

SEQ ID NO: 2340735 - RNA, 19 nt, Artificial Sequence
  Description of Artificial Sequence: Synthetic oligonucleotide
  Antisense strand to SEQ ID NO: 2340734
guauaccuagcaauuucau

SEQ ID NO: 2340736 - RNA, 19 nt, Artificial Sequence
  Description of Artificial Sequence: Synthetic oligonucleotide
  Sense strand starting at position 1154 of SEQ ID NO: 1885418
ugaaauugcuagguauaca

SEQ ID NO: 2340737 - RNA, 19 nt, Artificial Sequence
  Description of Artificial Sequence: Synthetic oligonucleotide
  Antisense strand to SEQ ID NO: 2340736
uguauaccuagcaauuuca

SEQ ID NO: 2340738 - RNA, 19 nt, Artificial Sequence
  Description of Artificial Sequence: Synthetic oligonucleotide
  Sense strand starting at position 1163 of SEQ ID NO: 1885418
uagguauacaggugaggaa

SEQ ID NO: 2340739 - RNA, 19 nt, Artificial Sequence
  Description of Artificial Sequence: Synthetic oligonucleotide
  Antisense strand to SEQ ID NO: 2340738
uuccucaccuguauaccua

SEQ ID NO: 2340740 - RNA, 19 nt, Artificial Sequence
  Description of Artificial Sequence: Synthetic oligonucleotide
  Sense strand starting at position 1296 of SEQ ID NO: 1885418
uagaaucauggaugucagu

SEQ ID NO: 2340741 - RNA, 19 nt, Artificial Sequence
  Description of Artificial Sequence: Synthetic oligonucleotide
  Antisense strand to SEQ ID NO: 2340740
acugacauccaugauucua

SEQ ID NO: 2340742 - RNA, 19 nt, Artificial Sequence
  Description of Artificial Sequence: Synthetic oligonucleotide
  Sense strand starting at position 1302 of SEQ ID NO: 1885418
cauggaugucaguggagag

SEQ ID NO: 2340743 - RNA, 19 nt, Artificial Sequence
  Description of Artificial Sequence: Synthetic oligonucleotide
  Antisense strand to SEQ ID NO: 2340742
cucuccacugacauccaug

SEQ ID NO: 2340744 - RNA, 19 nt, Artificial Sequence
  Description of Artificial Sequence: Synthetic oligonucleotide
  Sense strand starting at position 1595 of SEQ ID NO: 1885418
caugucacaugagugaaga

SEQ ID NO: 2340745 - RNA, 19 nt, Artificial Sequence
  Description of Artificial Sequence: Synthetic oligonucleotide
  Antisense strand to SEQ ID NO: 2340744
ucuucacucaugugacaug

SEQ ID NO: 2340746 - RNA, 19 nt, Artificial Sequence
  Description of Artificial Sequence: Synthetic oligonucleotide
  Sense strand starting at position 1596 of SEQ ID NO: 1885418
augucacaugagugaagaa

SEQ ID NO: 2340747 - RNA, 19 nt, Artificial Sequence
  Description of Artificial Sequence: Synthetic oligonucleotide
  Antisense strand to SEQ ID NO: 2340746
uucuucacucaugugacau

SEQ ID NO: 2340748 - RNA, 19 nt, Artificial Sequence
  Description of Artificial Sequence: Synthetic oligonucleotide
  Sense strand starting at position 1620 of SEQ ID NO: 1885418
aggugaucaucagauuuag

SEQ ID NO: 2340749 - RNA, 19 nt, Artificial Sequence
  Description of Artificial Sequence: Synthetic oligonucleotide
  Antisense strand to SEQ ID NO: 2340748
cuaaaucugaugaucaccu

SEQ ID NO: 2340750 - RNA, 19 nt, Artificial Sequence
  Description of Artificial Sequence: Synthetic oligonucleotide
  Sense strand starting at position 1685 of SEQ ID NO: 1885418
agugaaguagagggugaau

SEQ ID NO: 2340751 - RNA, 19 nt, Artificial Sequence
  Description of Artificial Sequence: Synthetic oligonucleotide
  Antisense strand to SEQ ID NO: 2340750
auucacccucuacuucacu

SEQ ID NO: 2340752 - RNA, 19 nt, Artificial Sequence
  Description of Artificial Sequence: Synthetic oligonucleotide
  Sense strand starting at position 1698 of SEQ ID NO: 1885418
gugaauaaagccugaauaa

SEQ ID NO: 2340753 - RNA, 19 nt, Artificial Sequence
  Description of Artificial Sequence: Synthetic oligonucleotide
  Antisense strand to SEQ ID NO: 2340752
uuauucaggcuuuauucac

SEQ ID NO: 2340754 - RNA, 19 nt, Artificial Sequence
  Description of Artificial Sequence: Synthetic oligonucleotide
  Sense strand starting at position 1708 of SEQ ID NO: 1885418
ccugaauaaguagguuuaa

SEQ ID NO: 2340755 - RNA, 19 nt, Artificial Sequence
  Description of Artificial Sequence: Synthetic oligonucleotide
  Antisense strand to SEQ ID NO: 2340754
uuaaaccuacuuauucagg

SEQ ID NO: 2340756 - RNA, 19 nt, Artificial Sequence
  Description of Artificial Sequence: Synthetic oligonucleotide
  Sense strand starting at position 2571 of SEQ ID NO: 1885418
guggcauuaguaugaaaua

SEQ ID NO: 2340757 - RNA, 19 nt, Artificial Sequence
  Description of Artificial Sequence: Synthetic oligonucleotide
  Antisense strand to SEQ ID NO: 2340756
uauuucauacuaaugccac

SEQ ID NO: 2340758 - RNA, 19 nt, Artificial Sequence
  Description of Artificial Sequence: Synthetic oligonucleotide
  Sense strand starting at position 2652 of SEQ ID NO: 1885418
acagguuugcuacauagau

SEQ ID NO: 2340759 - RNA, 19 nt, Artificial Sequence
  Description of Artificial Sequence: Synthetic oligonucleotide
  Antisense strand to SEQ ID NO: 2340758
aucuauguagcaaaccugu

SEQ ID NO: 2340760 - RNA, 19 nt, Artificial Sequence
  Description of Artificial Sequence: Synthetic oligonucleotide
  Sense strand starting at position 2825 of SEQ ID NO: 1885418
auucucauccuuuaggguu

SEQ ID NO: 2340761 - RNA, 19 nt, Artificial Sequence
  Description of Artificial Sequence: Synthetic oligonucleotide
  Antisense strand to SEQ ID NO: 2340760
aacccuaaaggaugagaau

SEQ ID NO: 2340762 - RNA, 19 nt, Artificial Sequence
  Description of Artificial Sequence: Synthetic oligonucleotide
  Sense strand starting at position 2859 of SEQ ID NO: 1885418
guuuguguucguccuguau

SEQ ID NO: 2340763 - RNA, 19 nt, Artificial Sequence
  Description of Artificial Sequence: Synthetic oligonucleotide
  Antisense strand to SEQ ID NO: 2340762
auacaggacgaacacaaac

SEQ ID NO: 2340764 - RNA, 19 nt, Artificial Sequence
  Description of Artificial Sequence: Synthetic oligonucleotide
  Sense strand starting at position 2862 of SEQ ID NO: 1885418
uguguucguccuguauuau

SEQ ID NO: 2340765 - RNA, 19 nt, Artificial Sequence
  Description of Artificial Sequence: Synthetic oligonucleotide
  Antisense strand to SEQ ID NO: 2340764
auaauacaggacgaacaca

SEQ ID NO: 2340766 - RNA, 19 nt, Artificial Sequence
  Description of Artificial Sequence: Synthetic oligonucleotide
  Sense strand starting at position 2871 of SEQ ID NO: 1885418
ccuguauuauauguugaag

SEQ ID NO: 2340767 - RNA, 19 nt, Artificial Sequence
  Description of Artificial Sequence: Synthetic oligonucleotide
  Antisense strand to SEQ ID NO: 2340766
cuucaacauauaauacagg

SEQ ID NO: 2340768 - RNA, 19 nt, Artificial Sequence
  Description of Artificial Sequence: Synthetic oligonucleotide
  Sense strand starting at position 3048 of SEQ ID NO: 1885418
uuugaagacucagagagaa

SEQ ID NO: 2340769 - RNA, 19 nt, Artificial Sequence
  Description of Artificial Sequence: Synthetic oligonucleotide
  Antisense strand to SEQ ID NO: 2340768
uucucucugagucuucaaa

SEQ ID NO: 2340770 - RNA, 19 nt, Artificial Sequence
  Description of Artificial Sequence: Synthetic oligonucleotide
  Sense strand starting at position 3224 of SEQ ID NO: 1885418
cuaagacaggguugauuau

SEQ ID NO: 2340771 - RNA, 19 nt, Artificial Sequence
  Description of Artificial Sequence: Synthetic oligonucleotide
  Antisense strand to SEQ ID NO: 2340770
auaaucaacccugucuuag

SEQ ID NO: 2340772 - RNA, 19 nt, Artificial Sequence
  Description of Artificial Sequence: Synthetic oligonucleotide
  Sense strand starting at position 3304 of SEQ ID NO: 1885418
ucagaagugguccauguau

SEQ ID NO: 2340773 - RNA, 19 nt, Artificial Sequence
  Description of Artificial Sequence: Synthetic oligonucleotide
  Antisense strand to SEQ ID NO: 2340772
auacauggaccacuucuga

SEQ ID NO: 2340774 - RNA, 19 nt, Artificial Sequence
  Description of Artificial Sequence: Synthetic oligonucleotide
  Sense strand starting at position 3382 of SEQ ID NO: 1885418
cuuccuaggccuuaugaca

SEQ ID NO: 2340775 - RNA, 19 nt, Artificial Sequence
  Description of Artificial Sequence: Synthetic oligonucleotide
  Antisense strand to SEQ ID NO: 2340774
ugucauaaggccuaggaag

SEQ ID NO: 2340776 - RNA, 19 nt, Artificial Sequence
  Description of Artificial Sequence: Synthetic oligonucleotide
  Sense strand starting at position 3558 of SEQ ID NO: 1885418
aggucuucuguugaccuaa

SEQ ID NO: 2340777 - RNA, 19 nt, Artificial Sequence
  Description of Artificial Sequence: Synthetic oligonucleotide
  Antisense strand to SEQ ID NO: 2340776
uuaggucaacagaagaccu

SEQ ID NO: 2340778 - RNA, 19 nt, Artificial Sequence
  Description of Artificial Sequence: Synthetic oligonucleotide
  Sense strand starting at position 3589 of SEQ ID NO: 1885418
auauguaggcugugggaaa

SEQ ID NO: 2340779 - RNA, 19 nt, Artificial Sequence
  Description of Artificial Sequence: Synthetic oligonucleotide
  Antisense strand to SEQ ID NO: 2340778
uuucccacagccuacauau

SEQ ID NO: 2340780 - RNA, 19 nt, Artificial Sequence
  Description of Artificial Sequence: Synthetic oligonucleotide
  Sense strand starting at position 3869 of SEQ ID NO: 1885418
ugcaacaaccuuugaggua

SEQ ID NO: 2340781 - RNA, 19 nt, Artificial Sequence
  Description of Artificial Sequence: Synthetic oligonucleotide
  Antisense strand to SEQ ID NO: 2340780
uaccucaaagguuguugca

SEQ ID NO: 2340782 - RNA, 19 nt, Artificial Sequence
  Description of Artificial Sequence: Synthetic oligonucleotide
  Sense strand starting at position 3902 of SEQ ID NO: 1885418
ucacuuuaccucugaggca

SEQ ID NO: 2340783 - RNA, 19 nt, Artificial Sequence
  Description of Artificial Sequence: Synthetic oligonucleotide
  Antisense strand to SEQ ID NO: 2340782
ugccucagagguaaaguga

SEQ ID NO: 2340784 - RNA, 19 nt, Artificial Sequence
  Description of Artificial Sequence: Synthetic oligonucleotide
  Sense strand starting at position 3931 of SEQ ID NO: 1885418
aagugagcagcugaaaguu

SEQ ID NO: 2340785 - RNA, 19 nt, Artificial Sequence
  Description of Artificial Sequence: Synthetic oligonucleotide
  Antisense strand to SEQ ID NO: 2340784
aacuuucagcugcucacuu

SEQ ID NO: 2340786 - RNA, 19 nt, Artificial Sequence
  Description of Artificial Sequence: Synthetic oligonucleotide
  Sense strand starting at position 3982 of SEQ ID NO: 1885418
ccagaaacuccaugucaga

SEQ ID NO: 2340787 - RNA, 19 nt, Artificial Sequence
  Description of Artificial Sequence: Synthetic oligonucleotide
  Antisense strand to SEQ ID NO: 2340786
ucugacauggaguuucugg

SEQ ID NO: 2340788 - RNA, 19 nt, Artificial Sequence
  Description of Artificial Sequence: Synthetic oligonucleotide
  Sense strand starting at position 201 of SEQ ID NO: 1885419
gaaggauuauauguaacuu

SEQ ID NO: 2340789 - RNA, 19 nt, Artificial Sequence
  Description of Artificial Sequence: Synthetic oligonucleotide
  Antisense strand to SEQ ID NO: 2340788
aaguuacauauaauccuuc

SEQ ID NO: 2340790 - RNA, 19 nt, Artificial Sequence
  Description of Artificial Sequence: Synthetic oligonucleotide
  Sense strand starting at position 492 of SEQ ID NO: 1885419
ccuagagaugcauaaacgu

SEQ ID NO: 2340791 - RNA, 19 nt, Artificial Sequence
  Description of Artificial Sequence: Synthetic oligonucleotide
  Antisense strand to SEQ ID NO: 2340790
acguuuaugcaucucuagg

SEQ ID NO: 2340792 - RNA, 19 nt, Artificial Sequence
  Description of Artificial Sequence: Synthetic oligonucleotide
  Sense strand starting at position 601 of SEQ ID NO: 1885419
guuuaacaacuugaguacu

SEQ ID NO: 2340793 - RNA, 19 nt, Artificial Sequence
  Description of Artificial Sequence: Synthetic oligonucleotide
  Antisense strand to SEQ ID NO: 2340792
aguacucaaguuguuaaac

SEQ ID NO: 2340794 - RNA, 19 nt, Artificial Sequence
  Description of Artificial Sequence: Synthetic oligonucleotide
  Sense strand starting at position 655 of SEQ ID NO: 1885419
cagauauucuaggugagau

SEQ ID NO: 2340795 - RNA, 19 nt, Artificial Sequence
  Description of Artificial Sequence: Synthetic oligonucleotide
  Antisense strand to SEQ ID NO: 2340794
aucucaccuagaauaucug

SEQ ID NO: 2340796 - RNA, 19 nt, Artificial Sequence
  Description of Artificial Sequence: Synthetic oligonucleotide
  Sense strand starting at position 656 of SEQ ID NO: 1885419
agauauucuaggugagauu

SEQ ID NO: 2340797 - RNA, 19 nt, Artificial Sequence
  Description of Artificial Sequence: Synthetic oligonucleotide
  Antisense strand to SEQ ID NO: 2340796
aaucucaccuagaauaucu

SEQ ID NO: 2340798 - RNA, 19 nt, Artificial Sequence
  Description of Artificial Sequence: Synthetic oligonucleotide
  Sense strand starting at position 667 of SEQ ID NO: 1885419
gugagauugguggagaggu

SEQ ID NO: 2340799 - RNA, 19 nt, Artificial Sequence
  Description of Artificial Sequence: Synthetic oligonucleotide
  Antisense strand to SEQ ID NO: 2340798
accucuccaccaaucucac

SEQ ID NO: 2340800 - RNA, 19 nt, Artificial Sequence
  Description of Artificial Sequence: Synthetic oligonucleotide
  Sense strand starting at position 668 of SEQ ID NO: 1885419
ugagauugguggagagguu

SEQ ID NO: 2340801 - RNA, 19 nt, Artificial Sequence
  Description of Artificial Sequence: Synthetic oligonucleotide
  Antisense strand to SEQ ID NO: 2340800
aaccucuccaccaaucuca

SEQ ID NO: 2340802 - RNA, 19 nt, Artificial Sequence
  Description of Artificial Sequence: Synthetic oligonucleotide
  Sense strand starting at position 680 of SEQ ID NO: 1885419
agagguuaugguggauuaa

SEQ ID NO: 2340803 - RNA, 19 nt, Artificial Sequence
  Description of Artificial Sequence: Synthetic oligonucleotide
  Antisense strand to SEQ ID NO: 2340802
uuaauccaccauaaccucu

SEQ ID NO: 2340804 - RNA, 19 nt, Artificial Sequence
  Description of Artificial Sequence: Synthetic oligonucleotide
  Sense strand starting at position 766 of SEQ ID NO: 1885419
ucaaacucuuaauugugua

SEQ ID NO: 2340805 - RNA, 19 nt, Artificial Sequence
  Description of Artificial Sequence: Synthetic oligonucleotide
  Antisense strand to SEQ ID NO: 2340804
uacacaauuaagaguuuga

SEQ ID NO: 2340806 - RNA, 19 nt, Artificial Sequence
  Description of Artificial Sequence: Synthetic oligonucleotide
  Sense strand starting at position 771 of SEQ ID NO: 1885419
cucuuaauuguguaucaga

SEQ ID NO: 2340807 - RNA, 19 nt, Artificial Sequence
  Description of Artificial Sequence: Synthetic oligonucleotide
  Antisense strand to SEQ ID NO: 2340806
ucugauacacaauuaagag

SEQ ID NO: 2340808 - RNA, 19 nt, Artificial Sequence
  Description of Artificial Sequence: Synthetic oligonucleotide
  Sense strand starting at position 915 of SEQ ID NO: 1885419
aggcaauguagugagacuu

SEQ ID NO: 2340809 - RNA, 19 nt, Artificial Sequence
  Description of Artificial Sequence: Synthetic oligonucleotide
  Antisense strand to SEQ ID NO: 2340808
aagucucacuacauugccu

SEQ ID NO: 2340810 - RNA, 19 nt, Artificial Sequence
  Description of Artificial Sequence: Synthetic oligonucleotide
  Sense strand starting at position 958 of SEQ ID NO: 1885419
auuaucagggcaugguaau

SEQ ID NO: 2340811 - RNA, 19 nt, Artificial Sequence
  Description of Artificial Sequence: Synthetic oligonucleotide
  Antisense strand to SEQ ID NO: 2340810
auuaccaugcccugauaau

SEQ ID NO: 2340812 - RNA, 19 nt, Artificial Sequence
  Description of Artificial Sequence: Synthetic oligonucleotide
  Sense strand starting at position 959 of SEQ ID NO: 1885419
uuaucagggcaugguaaua

SEQ ID NO: 2340813 - RNA, 19 nt, Artificial Sequence
  Description of Artificial Sequence: Synthetic oligonucleotide
  Antisense strand to SEQ ID NO: 2340812
uauuaccaugcccugauaa

SEQ ID NO: 2340814 - RNA, 19 nt, Artificial Sequence
  Description of Artificial Sequence: Synthetic oligonucleotide
  Sense strand starting at position 1376 of SEQ ID NO: 1885419
gaagucauaguauguguaa

SEQ ID NO: 2340815 - RNA, 19 nt, Artificial Sequence
  Description of Artificial Sequence: Synthetic oligonucleotide
  Antisense strand to SEQ ID NO: 2340814
uuacacauacuaugacuuc

SEQ ID NO: 2340816 - RNA, 19 nt, Artificial Sequence
  Description of Artificial Sequence: Synthetic oligonucleotide
  Sense strand starting at position 1377 of SEQ ID NO: 1885419
aagucauaguauguguaaa

SEQ ID NO: 2340817 - RNA, 19 nt, Artificial Sequence
  Description of Artificial Sequence: Synthetic oligonucleotide
  Antisense strand to SEQ ID NO: 2340816
uuuacacauacuaugacuu

SEQ ID NO: 2340818 - RNA, 19 nt, Artificial Sequence
  Description of Artificial Sequence: Synthetic oligonucleotide
  Sense strand starting at position 1427 of SEQ ID NO: 1885419
acacauguuccuuacuguu

SEQ ID NO: 2340819 - RNA, 19 nt, Artificial Sequence
  Description of Artificial Sequence: Synthetic oligonucleotide
  Antisense strand to SEQ ID NO: 2340818
aacaguaaggaacaugugu

SEQ ID NO: 2340820 - RNA, 19 nt, Artificial Sequence
  Description of Artificial Sequence: Synthetic oligonucleotide
  Sense strand starting at position 1429 of SEQ ID NO: 1885419
acauguuccuuacuguuaa

SEQ ID NO: 2340821 - RNA, 19 nt, Artificial Sequence
  Description of Artificial Sequence: Synthetic oligonucleotide
  Antisense strand to SEQ ID NO: 2340820
uuaacaguaaggaacaugu

SEQ ID NO: 2340822 - RNA, 19 nt, Artificial Sequence
  Description of Artificial Sequence: Synthetic oligonucleotide
  Sense strand starting at position 1510 of SEQ ID NO: 1885419
ugcagcaucaugugagaaa

SEQ ID NO: 2340823 - RNA, 19 nt, Artificial Sequence
  Description of Artificial Sequence: Synthetic oligonucleotide
  Antisense strand to SEQ ID NO: 2340822
uuucucacaugaugcugca

SEQ ID NO: 2340824 - RNA, 19 nt, Artificial Sequence
  Description of Artificial Sequence: Synthetic oligonucleotide
  Sense strand starting at position 1572 of SEQ ID NO: 1885419
uuugacuagugucuaggau

SEQ ID NO: 2340825 - RNA, 19 nt, Artificial Sequence
  Description of Artificial Sequence: Synthetic oligonucleotide
  Antisense strand to SEQ ID NO: 2340824
auccuagacacuagucaaa

SEQ ID NO: 2340826 - RNA, 19 nt, Artificial Sequence
  Description of Artificial Sequence: Synthetic oligonucleotide
  Sense strand starting at position 1584 of SEQ ID NO: 1885419
cuaggaugaucagugguuu

SEQ ID NO: 2340827 - RNA, 19 nt, Artificial Sequence
  Description of Artificial Sequence: Synthetic oligonucleotide
  Antisense strand to SEQ ID NO: 2340826
aaaccacugaucauccuag

SEQ ID NO: 2340828 - RNA, 19 nt, Artificial Sequence
  Description of Artificial Sequence: Synthetic oligonucleotide
  Sense strand starting at position 1632 of SEQ ID NO: 1885419
ugaggaguaauccggauuc

SEQ ID NO: 2340829 - RNA, 19 nt, Artificial Sequence
  Description of Artificial Sequence: Synthetic oligonucleotide
  Antisense strand to SEQ ID NO: 2340828
gaauccggauuacuccuca

SEQ ID NO: 2340830 - RNA, 19 nt, Artificial Sequence
  Description of Artificial Sequence: Synthetic oligonucleotide
  Sense strand starting at position 1787 of SEQ ID NO: 1885419
uuugguuaguuuguaaaga

SEQ ID NO: 2340831 - RNA, 19 nt, Artificial Sequence
  Description of Artificial Sequence: Synthetic oligonucleotide
  Antisense strand to SEQ ID NO: 2340830
ucuuuacaaacuaaccaaa

SEQ ID NO: 2340832 - RNA, 19 nt, Artificial Sequence
  Description of Artificial Sequence: Synthetic oligonucleotide
  Sense strand starting at position 1943 of SEQ ID NO: 1885419
gcgccaugccaaucucuua

SEQ ID NO: 2340833 - RNA, 19 nt, Artificial Sequence
  Description of Artificial Sequence: Synthetic oligonucleotide
  Antisense strand to SEQ ID NO: 2340832
uaagagauuggcauggcgc

SEQ ID NO: 2340834 - RNA, 19 nt, Artificial Sequence
  Description of Artificial Sequence: Synthetic oligonucleotide
  Sense strand starting at position 2014 of SEQ ID NO: 1885419
guaguagguagauaaguaa

SEQ ID NO: 2340835 - RNA, 19 nt, Artificial Sequence
  Description of Artificial Sequence: Synthetic oligonucleotide
  Antisense strand to SEQ ID NO: 2340834
uuacuuaucuaccuacuac

SEQ ID NO: 2340836 - RNA, 19 nt, Artificial Sequence
  Description of Artificial Sequence: Synthetic oligonucleotide
  Sense strand starting at position 2017 of SEQ ID NO: 1885419
guagguagauaaguaaauu

SEQ ID NO: 2340837 - RNA, 19 nt, Artificial Sequence
  Description of Artificial Sequence: Synthetic oligonucleotide
  Antisense strand to SEQ ID NO: 2340836
aauuuacuuaucuaccuac

SEQ ID NO: 2340838 - RNA, 19 nt, Artificial Sequence
  Description of Artificial Sequence: Synthetic oligonucleotide
  Sense strand starting at position 2081 of SEQ ID NO: 1885419
auuguaggauugcuaacaa

SEQ ID NO: 2340839 - RNA, 19 nt, Artificial Sequence
  Description of Artificial Sequence: Synthetic oligonucleotide
  Antisense strand to SEQ ID NO: 2340838
uuguuagcaauccuacaau

SEQ ID NO: 2340840 - RNA, 19 nt, Artificial Sequence
  Description of Artificial Sequence: Synthetic oligonucleotide
  Sense strand starting at position 2201 of SEQ ID NO: 1885419
uaaugugucccuuauagga

SEQ ID NO: 2340841 - RNA, 19 nt, Artificial Sequence
  Description of Artificial Sequence: Synthetic oligonucleotide
  Antisense strand to SEQ ID NO: 2340840
uccuauaagggacacauua

SEQ ID NO: 2340842 - RNA, 19 nt, Artificial Sequence
  Description of Artificial Sequence: Synthetic oligonucleotide
  Sense strand starting at position 2209 of SEQ ID NO: 1885419
cccuuauaggaguggucca

SEQ ID NO: 2340843 - RNA, 19 nt, Artificial Sequence
  Description of Artificial Sequence: Synthetic oligonucleotide
  Antisense strand to SEQ ID NO: 2340842
uggaccacuccuauaaggg

SEQ ID NO: 2340844 - RNA, 19 nt, Artificial Sequence
  Description of Artificial Sequence: Synthetic oligonucleotide
  Sense strand starting at position 2210 of SEQ ID NO: 1885419
ccuuauaggagugguccau

SEQ ID NO: 2340845 - RNA, 19 nt, Artificial Sequence
  Description of Artificial Sequence: Synthetic oligonucleotide
  Antisense strand to SEQ ID NO: 2340844
auggaccacuccuauaagg

SEQ ID NO: 2340846 - RNA, 19 nt, Artificial Sequence
  Description of Artificial Sequence: Synthetic oligonucleotide
  Sense strand starting at position 2250 of SEQ ID NO: 1885419
uugugagugguccauauau

SEQ ID NO: 2340847 - RNA, 19 nt, Artificial Sequence
  Description of Artificial Sequence: Synthetic oligonucleotide
  Antisense strand to SEQ ID NO: 2340846
auauauggaccacucacaa

SEQ ID NO: 2340848 - RNA, 19 nt, Artificial Sequence
  Description of Artificial Sequence: Synthetic oligonucleotide
  Sense strand starting at position 2550 of SEQ ID NO: 1885419
cccauaugguaaguuuaaa

SEQ ID NO: 2340849 - RNA, 19 nt, Artificial Sequence
  Description of Artificial Sequence: Synthetic oligonucleotide
  Antisense strand to SEQ ID NO: 2340848
uuuaaacuuaccauauggg

SEQ ID NO: 2340850 - RNA, 19 nt, Artificial Sequence
  Description of Artificial Sequence: Synthetic oligonucleotide
  Sense strand starting at position 2726 of SEQ ID NO: 1885419
uccauaauccuaugagaug

SEQ ID NO: 2340851 - RNA, 19 nt, Artificial Sequence
  Description of Artificial Sequence: Synthetic oligonucleotide
  Antisense strand to SEQ ID NO: 2340850
caucucauaggauuaugga

SEQ ID NO: 2340852 - RNA, 19 nt, Artificial Sequence
  Description of Artificial Sequence: Synthetic oligonucleotide
  Sense strand starting at position 2733 of SEQ ID NO: 1885419
uccuaugagaugggaguua

SEQ ID NO: 2340853 - RNA, 19 nt, Artificial Sequence
  Description of Artificial Sequence: Synthetic oligonucleotide
  Antisense strand to SEQ ID NO: 2340852
uaacucccaucucauagga

SEQ ID NO: 2340854 - RNA, 19 nt, Artificial Sequence
  Description of Artificial Sequence: Synthetic oligonucleotide
  Sense strand starting at position 3123 of SEQ ID NO: 1885419
agaccauguaguuaguuua

SEQ ID NO: 2340855 - RNA, 19 nt, Artificial Sequence
  Description of Artificial Sequence: Synthetic oligonucleotide
  Antisense strand to SEQ ID NO: 2340854
uaaacuaacuacauggucu

SEQ ID NO: 2340856 - RNA, 19 nt, Artificial Sequence
  Description of Artificial Sequence: Synthetic oligonucleotide
  Sense strand starting at position 3337 of SEQ ID NO: 1885419
acaugucauuacucugagu

SEQ ID NO: 2340857 - RNA, 19 nt, Artificial Sequence
  Description of Artificial Sequence: Synthetic oligonucleotide
  Antisense strand to SEQ ID NO: 2340856
acucagaguaaugacaugu

SEQ ID NO: 2340858 - RNA, 19 nt, Artificial Sequence
  Description of Artificial Sequence: Synthetic oligonucleotide
  Sense strand starting at position 3339 of SEQ ID NO: 1885419
augucauuacucugaguau

SEQ ID NO: 2340859 - RNA, 19 nt, Artificial Sequence
  Description of Artificial Sequence: Synthetic oligonucleotide
  Antisense strand to SEQ ID NO: 2340858
auacucagaguaaugacau

SEQ ID NO: 2340860 - RNA, 19 nt, Artificial Sequence
  Description of Artificial Sequence: Synthetic oligonucleotide
  Sense strand starting at position 3542 of SEQ ID NO: 1885419
gagguuucuagagguggga

SEQ ID NO: 2340861 - RNA, 19 nt, Artificial Sequence
  Description of Artificial Sequence: Synthetic oligonucleotide
  Antisense strand to SEQ ID NO: 2340860
ucccaccucuagaaaccuc

SEQ ID NO: 2340862 - RNA, 19 nt, Artificial Sequence
  Description of Artificial Sequence: Synthetic oligonucleotide
  Sense strand starting at position 3544 of SEQ ID NO: 1885419
gguuucuagaggugggauu

SEQ ID NO: 2340863 - RNA, 19 nt, Artificial Sequence
  Description of Artificial Sequence: Synthetic oligonucleotide
  Antisense strand to SEQ ID NO: 2340862
aaucccaccucuagaaacc

SEQ ID NO: 2340864 - RNA, 19 nt, Artificial Sequence
  Description of Artificial Sequence: Synthetic oligonucleotide
  Sense strand starting at position 3934 of SEQ ID NO: 1885419
aaagaagucuuuguguuug

SEQ ID NO: 2340865 - RNA, 19 nt, Artificial Sequence
  Description of Artificial Sequence: Synthetic oligonucleotide
  Antisense strand to SEQ ID NO: 2340864
caaacacaaagacuucuuu

SEQ ID NO: 2340866 - RNA, 19 nt, Artificial Sequence
  Description of Artificial Sequence: Synthetic oligonucleotide
  Sense strand starting at position 3946 of SEQ ID NO: 1885419
guguuugguuuauuugagu

SEQ ID NO: 2340867 - RNA, 19 nt, Artificial Sequence
  Description of Artificial Sequence: Synthetic oligonucleotide
  Antisense strand to SEQ ID NO: 2340866
acucaaauaaaccaaacac

SEQ ID NO: 2340868 - RNA, 19 nt, Artificial Sequence
  Description of Artificial Sequence: Synthetic oligonucleotide
  Sense strand starting at position 64 of SEQ ID NO: 1885420
ugaaauccuuuggcgaaag

SEQ ID NO: 2340869 - RNA, 19 nt, Artificial Sequence
  Description of Artificial Sequence: Synthetic oligonucleotide
  Antisense strand to SEQ ID NO: 2340868
cuuucgccaaaggauuuca

SEQ ID NO: 2340870 - RNA, 19 nt, Artificial Sequence
  Description of Artificial Sequence: Synthetic oligonucleotide
  Sense strand starting at position 66 of SEQ ID NO: 1885420
aaauccuuuggcgaaaguu

SEQ ID NO: 2340871 - RNA, 19 nt, Artificial Sequence
  Description of Artificial Sequence: Synthetic oligonucleotide
  Antisense strand to SEQ ID NO: 2340870
aacuuucgccaaaggauuu

SEQ ID NO: 2340872 - RNA, 19 nt, Artificial Sequence
  Description of Artificial Sequence: Synthetic oligonucleotide
  Sense strand starting at position 323 of SEQ ID NO: 1885420
agcaauaagauguaggcua

SEQ ID NO: 2340873 - RNA, 19 nt, Artificial Sequence
  Description of Artificial Sequence: Synthetic oligonucleotide
  Antisense strand to SEQ ID NO: 2340872
uagccuacaucuuauugcu

SEQ ID NO: 2340874 - RNA, 19 nt, Artificial Sequence
  Description of Artificial Sequence: Synthetic oligonucleotide
  Sense strand starting at position 325 of SEQ ID NO: 1885420
caauaagauguaggcuaua

SEQ ID NO: 2340875 - RNA, 19 nt, Artificial Sequence
  Description of Artificial Sequence: Synthetic oligonucleotide
  Antisense strand to SEQ ID NO: 2340874
uauagccuacaucuuauug

SEQ ID NO: 2340876 - RNA, 19 nt, Artificial Sequence
  Description of Artificial Sequence: Synthetic oligonucleotide
  Sense strand starting at position 328 of SEQ ID NO: 1885420
uaagauguaggcuauacau

SEQ ID NO: 2340877 - RNA, 19 nt, Artificial Sequence
  Description of Artificial Sequence: Synthetic oligonucleotide
  Antisense strand to SEQ ID NO: 2340876
auguauagccuacaucuua

SEQ ID NO: 2340878 - RNA, 19 nt, Artificial Sequence
  Description of Artificial Sequence: Synthetic oligonucleotide
  Sense strand starting at position 390 of SEQ ID NO: 1885420
acaagacuaugugcacaaa

SEQ ID NO: 2340879 - RNA, 19 nt, Artificial Sequence
  Description of Artificial Sequence: Synthetic oligonucleotide
  Antisense strand to SEQ ID NO: 2340878
uuugugcacauagucuugu

SEQ ID NO: 2340880 - RNA, 19 nt, Artificial Sequence
  Description of Artificial Sequence: Synthetic oligonucleotide
  Sense strand starting at position 527 of SEQ ID NO: 1885420
agaguaaucucuccaugac

SEQ ID NO: 2340881 - RNA, 19 nt, Artificial Sequence
  Description of Artificial Sequence: Synthetic oligonucleotide
  Antisense strand to SEQ ID NO: 2340880
gucauggagagauuacucu

SEQ ID NO: 2340882 - RNA, 19 nt, Artificial Sequence
  Description of Artificial Sequence: Synthetic oligonucleotide
  Sense strand starting at position 530 of SEQ ID NO: 1885420
guaaucucuccaugacaga

SEQ ID NO: 2340883 - RNA, 19 nt, Artificial Sequence
  Description of Artificial Sequence: Synthetic oligonucleotide
  Antisense strand to SEQ ID NO: 2340882
ucugucauggagagauuac

SEQ ID NO: 2340884 - RNA, 19 nt, Artificial Sequence
  Description of Artificial Sequence: Synthetic oligonucleotide
  Sense strand starting at position 635 of SEQ ID NO: 1885420
agaggcauucuccaaauuc

SEQ ID NO: 2340885 - RNA, 19 nt, Artificial Sequence
  Description of Artificial Sequence: Synthetic oligonucleotide
  Antisense strand to SEQ ID NO: 2340884
gaauuuggagaaugccucu

SEQ ID NO: 2340886 - RNA, 19 nt, Artificial Sequence
  Description of Artificial Sequence: Synthetic oligonucleotide
  Sense strand starting at position 701 of SEQ ID NO: 1885420
auacuacggguguaucuau

SEQ ID NO: 2340887 - RNA, 19 nt, Artificial Sequence
  Description of Artificial Sequence: Synthetic oligonucleotide
  Antisense strand to SEQ ID NO: 2340886
auagauacacccguaguau

SEQ ID NO: 2340888 - RNA, 19 nt, Artificial Sequence
  Description of Artificial Sequence: Synthetic oligonucleotide
  Sense strand starting at position 708 of SEQ ID NO: 1885420
ggguguaucuauuuauguc

SEQ ID NO: 2340889 - RNA, 19 nt, Artificial Sequence
  Description of Artificial Sequence: Synthetic oligonucleotide
  Antisense strand to SEQ ID NO: 2340888
gacauaaauagauacaccc

SEQ ID NO: 2340890 - RNA, 19 nt, Artificial Sequence
  Description of Artificial Sequence: Synthetic oligonucleotide
  Sense strand starting at position 714 of SEQ ID NO: 1885420
aucuauuuaugucagagga

SEQ ID NO: 2340891 - RNA, 19 nt, Artificial Sequence
  Description of Artificial Sequence: Synthetic oligonucleotide
  Antisense strand to SEQ ID NO: 2340890
uccucugacauaaauagau

SEQ ID NO: 2340892 - RNA, 19 nt, Artificial Sequence
  Description of Artificial Sequence: Synthetic oligonucleotide
  Sense strand starting at position 716 of SEQ ID NO: 1885420
cuauuuaugucagaggaau

SEQ ID NO: 2340893 - RNA, 19 nt, Artificial Sequence
  Description of Artificial Sequence: Synthetic oligonucleotide
  Antisense strand to SEQ ID NO: 2340892
auuccucugacauaaauag

SEQ ID NO: 2340894 - RNA, 19 nt, Artificial Sequence
  Description of Artificial Sequence: Synthetic oligonucleotide
  Sense strand starting at position 863 of SEQ ID NO: 1885420
gguguauguguauaugaag

SEQ ID NO: 2340895 - RNA, 19 nt, Artificial Sequence
  Description of Artificial Sequence: Synthetic oligonucleotide
  Antisense strand to SEQ ID NO: 2340894
cuucauauacacauacacc

SEQ ID NO: 2340896 - RNA, 19 nt, Artificial Sequence
  Description of Artificial Sequence: Synthetic oligonucleotide
  Sense strand starting at position 877 of SEQ ID NO: 1885420
ugaaguuagcaaugaccaa

SEQ ID NO: 2340897 - RNA, 19 nt, Artificial Sequence
  Description of Artificial Sequence: Synthetic oligonucleotide
  Antisense strand to SEQ ID NO: 2340896
uuggucauugcuaacuuca

SEQ ID NO: 2340898 - RNA, 19 nt, Artificial Sequence
  Description of Artificial Sequence: Synthetic oligonucleotide
  Sense strand starting at position 1024 of SEQ ID NO: 1885420
uuuaauggaccaugauauu

SEQ ID NO: 2340899 - RNA, 19 nt, Artificial Sequence
  Description of Artificial Sequence: Synthetic oligonucleotide
  Antisense strand to SEQ ID NO: 2340898
aauaucaugguccauuaaa

SEQ ID NO: 2340900 - RNA, 19 nt, Artificial Sequence
  Description of Artificial Sequence: Synthetic oligonucleotide
  Sense strand starting at position 1068 of SEQ ID NO: 1885420
gcaaaugcacuugaguaaa

SEQ ID NO: 2340901 - RNA, 19 nt, Artificial Sequence
  Description of Artificial Sequence: Synthetic oligonucleotide
  Antisense strand to SEQ ID NO: 2340900
uuuacucaagugcauuugc

SEQ ID NO: 2340902 - RNA, 19 nt, Artificial Sequence
  Description of Artificial Sequence: Synthetic oligonucleotide
  Sense strand starting at position 1276 of SEQ ID NO: 1885420
ggacuaauugauugauugu

SEQ ID NO: 2340903 - RNA, 19 nt, Artificial Sequence
  Description of Artificial Sequence: Synthetic oligonucleotide
  Antisense strand to SEQ ID NO: 2340902
acaaucaaucaauuagucc

SEQ ID NO: 2340904 - RNA, 19 nt, Artificial Sequence
  Description of Artificial Sequence: Synthetic oligonucleotide
  Sense strand starting at position 1279 of SEQ ID NO: 1885420
cuaauugauugauuguaca

SEQ ID NO: 2340905 - RNA, 19 nt, Artificial Sequence
  Description of Artificial Sequence: Synthetic oligonucleotide
  Antisense strand to SEQ ID NO: 2340904
uguacaaucaaucaauuag

SEQ ID NO: 2340906 - RNA, 19 nt, Artificial Sequence
  Description of Artificial Sequence: Synthetic oligonucleotide
  Sense strand starting at position 1426 of SEQ ID NO: 1885420
uuaauuccuggguagucau

SEQ ID NO: 2340907 - RNA, 19 nt, Artificial Sequence
  Description of Artificial Sequence: Synthetic oligonucleotide
  Antisense strand to SEQ ID NO: 2340906
augacuacccaggaauuaa

SEQ ID NO: 2340908 - RNA, 19 nt, Artificial Sequence
  Description of Artificial Sequence: Synthetic oligonucleotide
  Sense strand starting at position 1429 of SEQ ID NO: 1885420
auuccuggguagucauaaa

SEQ ID NO: 2340909 - RNA, 19 nt, Artificial Sequence
  Description of Artificial Sequence: Synthetic oligonucleotide
  Antisense strand to SEQ ID NO: 2340908
uuuaugacuacccaggaau

SEQ ID NO: 2340910 - RNA, 19 nt, Artificial Sequence
  Description of Artificial Sequence: Synthetic oligonucleotide
  Sense strand starting at position 1454 of SEQ ID NO: 1885420
uuauaaugaugagcaugau

SEQ ID NO: 2340911 - RNA, 19 nt, Artificial Sequence
  Description of Artificial Sequence: Synthetic oligonucleotide
  Antisense strand to SEQ ID NO: 2340910
aucaugcucaucauuauaa

SEQ ID NO: 2340912 - RNA, 19 nt, Artificial Sequence
  Description of Artificial Sequence: Synthetic oligonucleotide
  Sense strand starting at position 1457 of SEQ ID NO: 1885420
uaaugaugagcaugaugau

SEQ ID NO: 2340913 - RNA, 19 nt, Artificial Sequence
  Description of Artificial Sequence: Synthetic oligonucleotide
  Antisense strand to SEQ ID NO: 2340912
aucaucaugcucaucauua

SEQ ID NO: 2340914 - RNA, 19 nt, Artificial Sequence
  Description of Artificial Sequence: Synthetic oligonucleotide
  Sense strand starting at position 1523 of SEQ ID NO: 1885420
caccacuccggguauauaa

SEQ ID NO: 2340915 - RNA, 19 nt, Artificial Sequence
  Description of Artificial Sequence: Synthetic oligonucleotide
  Antisense strand to SEQ ID NO: 2340914
uuauauacccggaguggug

SEQ ID NO: 2340916 - RNA, 19 nt, Artificial Sequence
  Description of Artificial Sequence: Synthetic oligonucleotide
  Sense strand starting at position 1525 of SEQ ID NO: 1885420
ccacuccggguauauaaau

SEQ ID NO: 2340917 - RNA, 19 nt, Artificial Sequence
  Description of Artificial Sequence: Synthetic oligonucleotide
  Antisense strand to SEQ ID NO: 2340916
auuuauauacccggagugg

SEQ ID NO: 2340918 - RNA, 19 nt, Artificial Sequence
  Description of Artificial Sequence: Synthetic oligonucleotide
  Sense strand starting at position 1574 of SEQ ID NO: 1885420
agagacuacuguuccaaau

SEQ ID NO: 2340919 - RNA, 19 nt, Artificial Sequence
  Description of Artificial Sequence: Synthetic oligonucleotide
  Antisense strand to SEQ ID NO: 2340918
auuuggaacaguagucucu

SEQ ID NO: 2340920 - RNA, 19 nt, Artificial Sequence
  Description of Artificial Sequence: Synthetic oligonucleotide
  Sense strand starting at position 2006 of SEQ ID NO: 1885420
cugagaauuccugagucuu

SEQ ID NO: 2340921 - RNA, 19 nt, Artificial Sequence
  Description of Artificial Sequence: Synthetic oligonucleotide
  Antisense strand to SEQ ID NO: 2340920
aagacucaggaauucucag

SEQ ID NO: 2340922 - RNA, 19 nt, Artificial Sequence
  Description of Artificial Sequence: Synthetic oligonucleotide
  Sense strand starting at position 2119 of SEQ ID NO: 1885420
aaaguaggcuugucuauuu

SEQ ID NO: 2340923 - RNA, 19 nt, Artificial Sequence
  Description of Artificial Sequence: Synthetic oligonucleotide
  Antisense strand to SEQ ID NO: 2340922
aaauagacaagccuacuuu

SEQ ID NO: 2340924 - RNA, 19 nt, Artificial Sequence
  Description of Artificial Sequence: Synthetic oligonucleotide
  Sense strand starting at position 2308 of SEQ ID NO: 1885420
acucaauggcccuauauga

SEQ ID NO: 2340925 - RNA, 19 nt, Artificial Sequence
  Description of Artificial Sequence: Synthetic oligonucleotide
  Antisense strand to SEQ ID NO: 2340924
ucauauagggccauugagu

SEQ ID NO: 2340926 - RNA, 19 nt, Artificial Sequence
  Description of Artificial Sequence: Synthetic oligonucleotide
  Sense strand starting at position 2348 of SEQ ID NO: 1885420
gagaauaaguagcugauga

SEQ ID NO: 2340927 - RNA, 19 nt, Artificial Sequence
  Description of Artificial Sequence: Synthetic oligonucleotide
  Antisense strand to SEQ ID NO: 2340926
ucaucagcuacuuauucuc

SEQ ID NO: 2340928 - RNA, 19 nt, Artificial Sequence
  Description of Artificial Sequence: Synthetic oligonucleotide
  Sense strand starting at position 2350 of SEQ ID NO: 1885420
gaauaaguagcugaugagu

SEQ ID NO: 2340929 - RNA, 19 nt, Artificial Sequence
  Description of Artificial Sequence: Synthetic oligonucleotide
  Antisense strand to SEQ ID NO: 2340928
acucaucagcuacuuauuc

SEQ ID NO: 2340930 - RNA, 19 nt, Artificial Sequence
  Description of Artificial Sequence: Synthetic oligonucleotide
  Sense strand starting at position 2353 of SEQ ID NO: 1885420
uaaguagcugaugaguaua

SEQ ID NO: 2340931 - RNA, 19 nt, Artificial Sequence
  Description of Artificial Sequence: Synthetic oligonucleotide
  Antisense strand to SEQ ID NO: 2340930
uauacucaucagcuacuua

SEQ ID NO: 2340932 - RNA, 19 nt, Artificial Sequence
  Description of Artificial Sequence: Synthetic oligonucleotide
  Sense strand starting at position 2361 of SEQ ID NO: 1885420
ugaugaguauacuucccua

SEQ ID NO: 2340933 - RNA, 19 nt, Artificial Sequence
  Description of Artificial Sequence: Synthetic oligonucleotide
  Antisense strand to SEQ ID NO: 2340932
uagggaaguauacucauca

SEQ ID NO: 2340934 - RNA, 19 nt, Artificial Sequence
  Description of Artificial Sequence: Synthetic oligonucleotide
  Sense strand starting at position 2716 of SEQ ID NO: 1885420
ggucucaacuagcuagaaa

SEQ ID NO: 2340935 - RNA, 19 nt, Artificial Sequence
  Description of Artificial Sequence: Synthetic oligonucleotide
  Antisense strand to SEQ ID NO: 2340934
uuucuagcuaguugagacc

SEQ ID NO: 2340936 - RNA, 19 nt, Artificial Sequence
  Description of Artificial Sequence: Synthetic oligonucleotide
  Sense strand starting at position 2764 of SEQ ID NO: 1885420
cuggaagauauauguaagu

SEQ ID NO: 2340937 - RNA, 19 nt, Artificial Sequence
  Description of Artificial Sequence: Synthetic oligonucleotide
  Antisense strand to SEQ ID NO: 2340936
acuuacauauaucuuccag

SEQ ID NO: 2340938 - RNA, 19 nt, Artificial Sequence
  Description of Artificial Sequence: Synthetic oligonucleotide
  Sense strand starting at position 3143 of SEQ ID NO: 1885420
agagauuggacaugccaua

SEQ ID NO: 2340939 - RNA, 19 nt, Artificial Sequence
  Description of Artificial Sequence: Synthetic oligonucleotide
  Antisense strand to SEQ ID NO: 2340938
uauggcauguccaaucucu

SEQ ID NO: 2340940 - RNA, 19 nt, Artificial Sequence
  Description of Artificial Sequence: Synthetic oligonucleotide
  Sense strand starting at position 3236 of SEQ ID NO: 1885420
uuugaaugaugguugauag

SEQ ID NO: 2340941 - RNA, 19 nt, Artificial Sequence
  Description of Artificial Sequence: Synthetic oligonucleotide
  Antisense strand to SEQ ID NO: 2340940
cuaucaaccaucauucaaa

SEQ ID NO: 2340942 - RNA, 19 nt, Artificial Sequence
  Description of Artificial Sequence: Synthetic oligonucleotide
  Sense strand starting at position 3254 of SEQ ID NO: 1885420
gggacaaccuuacuuuguu

SEQ ID NO: 2340943 - RNA, 19 nt, Artificial Sequence
  Description of Artificial Sequence: Synthetic oligonucleotide
  Antisense strand to SEQ ID NO: 2340942
aacaaaguaagguuguccc

SEQ ID NO: 2340944 - RNA, 19 nt, Artificial Sequence
  Description of Artificial Sequence: Synthetic oligonucleotide
  Sense strand starting at position 3848 of SEQ ID NO: 1885420
ugggaucauuucuagaauu

SEQ ID NO: 2340945 - RNA, 19 nt, Artificial Sequence
  Description of Artificial Sequence: Synthetic oligonucleotide
  Antisense strand to SEQ ID NO: 2340944
aauucuagaaaugauccca

SEQ ID NO: 2340946 - RNA, 19 nt, Artificial Sequence
  Description of Artificial Sequence: Synthetic oligonucleotide
  Sense strand starting at position 3949 of SEQ ID NO: 1885420
uuuauagcugcgguaguau

SEQ ID NO: 2340947 - RNA, 19 nt, Artificial Sequence
  Description of Artificial Sequence: Synthetic oligonucleotide
  Antisense strand to SEQ ID NO: 2340946
auacuaccgcagcuauaaa

SEQ ID NO: 2340948 - RNA, 19 nt, Artificial Sequence
  Description of Artificial Sequence: Synthetic oligonucleotide
  Sense strand starting at position 84 of SEQ ID NO: 1885421
uggcacgugcaccauaaua

SEQ ID NO: 2340949 - RNA, 19 nt, Artificial Sequence
  Description of Artificial Sequence: Synthetic oligonucleotide
  Antisense strand to SEQ ID NO: 2340948
uauuauggugcacgugcca

SEQ ID NO: 2340950 - RNA, 19 nt, Artificial Sequence
  Description of Artificial Sequence: Synthetic oligonucleotide
  Sense strand starting at position 86 of SEQ ID NO: 1885421
gcacgugcaccauaauaaa

SEQ ID NO: 2340951 - RNA, 19 nt, Artificial Sequence
  Description of Artificial Sequence: Synthetic oligonucleotide
  Antisense strand to SEQ ID NO: 2340950
uuuauuauggugcacgugc

SEQ ID NO: 2340952 - RNA, 19 nt, Artificial Sequence
  Description of Artificial Sequence: Synthetic oligonucleotide
  Sense strand starting at position 138 of SEQ ID NO: 1885421
guaaucaacugguuaaucu

SEQ ID NO: 2340953 - RNA, 19 nt, Artificial Sequence
  Description of Artificial Sequence: Synthetic oligonucleotide
  Antisense strand to SEQ ID NO: 2340952
agauuaaccaguugauuac

SEQ ID NO: 2340954 - RNA, 19 nt, Artificial Sequence
  Description of Artificial Sequence: Synthetic oligonucleotide
  Sense strand starting at position 142 of SEQ ID NO: 1885421
ucaacugguuaaucugaau

SEQ ID NO: 2340955 - RNA, 19 nt, Artificial Sequence
  Description of Artificial Sequence: Synthetic oligonucleotide
  Antisense strand to SEQ ID NO: 2340954
auucagauuaaccaguuga

SEQ ID NO: 2340956 - RNA, 19 nt, Artificial Sequence
  Description of Artificial Sequence: Synthetic oligonucleotide
  Sense strand starting at position 145 of SEQ ID NO: 1885421
acugguuaaucugaauuug

SEQ ID NO: 2340957 - RNA, 19 nt, Artificial Sequence
  Description of Artificial Sequence: Synthetic oligonucleotide
  Antisense strand to SEQ ID NO: 2340956
caaauucagauuaaccagu

SEQ ID NO: 2340958 - RNA, 19 nt, Artificial Sequence
  Description of Artificial Sequence: Synthetic oligonucleotide
  Sense strand starting at position 434 of SEQ ID NO: 1885421
ggacuuuaauaguggcauc

SEQ ID NO: 2340959 - RNA, 19 nt, Artificial Sequence
  Description of Artificial Sequence: Synthetic oligonucleotide
  Antisense strand to SEQ ID NO: 2340958
gaugccacuauuaaagucc

SEQ ID NO: 2340960 - RNA, 19 nt, Artificial Sequence
  Description of Artificial Sequence: Synthetic oligonucleotide
  Sense strand starting at position 444 of SEQ ID NO: 1885421
aguggcaucuguucuguga

SEQ ID NO: 2340961 - RNA, 19 nt, Artificial Sequence
  Description of Artificial Sequence: Synthetic oligonucleotide
  Antisense strand to SEQ ID NO: 2340960
ucacagaacagaugccacu

SEQ ID NO: 2340962 - RNA, 19 nt, Artificial Sequence
  Description of Artificial Sequence: Synthetic oligonucleotide
  Sense strand starting at position 448 of SEQ ID NO: 1885421
gcaucuguucugugaccca

SEQ ID NO: 2340963 - RNA, 19 nt, Artificial Sequence
  Description of Artificial Sequence: Synthetic oligonucleotide
  Antisense strand to SEQ ID NO: 2340962
ugggucacagaacagaugc

SEQ ID NO: 2340964 - RNA, 19 nt, Artificial Sequence
  Description of Artificial Sequence: Synthetic oligonucleotide
  Sense strand starting at position 451 of SEQ ID NO: 1885421
ucuguucugugacccauuu

SEQ ID NO: 2340965 - RNA, 19 nt, Artificial Sequence
  Description of Artificial Sequence: Synthetic oligonucleotide
  Antisense strand to SEQ ID NO: 2340964
aaaugggucacagaacaga

SEQ ID NO: 2340966 - RNA, 19 nt, Artificial Sequence
  Description of Artificial Sequence: Synthetic oligonucleotide
  Sense strand starting at position 471 of SEQ ID NO: 1885421
ugcuuacaguuggcuaauu

SEQ ID NO: 2340967 - RNA, 19 nt, Artificial Sequence
  Description of Artificial Sequence: Synthetic oligonucleotide
  Antisense strand to SEQ ID NO: 2340966
aauuagccaacuguaagca

SEQ ID NO: 2340968 - RNA, 19 nt, Artificial Sequence
  Description of Artificial Sequence: Synthetic oligonucleotide
  Sense strand starting at position 472 of SEQ ID NO: 1885421
gcuuacaguuggcuaauua

SEQ ID NO: 2340969 - RNA, 19 nt, Artificial Sequence
  Description of Artificial Sequence: Synthetic oligonucleotide
  Antisense strand to SEQ ID NO: 2340968
uaauuagccaacuguaagc

SEQ ID NO: 2340970 - RNA, 19 nt, Artificial Sequence
  Description of Artificial Sequence: Synthetic oligonucleotide
  Sense strand starting at position 473 of SEQ ID NO: 1885421
cuuacaguuggcuaauuau

SEQ ID NO: 2340971 - RNA, 19 nt, Artificial Sequence
  Description of Artificial Sequence: Synthetic oligonucleotide
  Antisense strand to SEQ ID NO: 2340970
auaauuagccaacuguaag

SEQ ID NO: 2340972 - RNA, 19 nt, Artificial Sequence
  Description of Artificial Sequence: Synthetic oligonucleotide
  Sense strand starting at position 479 of SEQ ID NO: 1885421
guuggcuaauuauuaagaa

SEQ ID NO: 2340973 - RNA, 19 nt, Artificial Sequence
  Description of Artificial Sequence: Synthetic oligonucleotide
  Antisense strand to SEQ ID NO: 2340972
uucuuaauaauuagccaac

SEQ ID NO: 2340974 - RNA, 19 nt, Artificial Sequence
  Description of Artificial Sequence: Synthetic oligonucleotide
  Sense strand starting at position 480 of SEQ ID NO: 1885421
uuggcuaauuauuaagaag

SEQ ID NO: 2340975 - RNA, 19 nt, Artificial Sequence
  Description of Artificial Sequence: Synthetic oligonucleotide
  Antisense strand to SEQ ID NO: 2340974
cuucuuaauaauuagccaa

SEQ ID NO: 2340976 - RNA, 19 nt, Artificial Sequence
  Description of Artificial Sequence: Synthetic oligonucleotide
  Sense strand starting at position 507 of SEQ ID NO: 1885421
gguuuaagcugugaccuca

SEQ ID NO: 2340977 - RNA, 19 nt, Artificial Sequence
  Description of Artificial Sequence: Synthetic oligonucleotide
  Antisense strand to SEQ ID NO: 2340976
ugaggucacagcuuaaacc

SEQ ID NO: 2340978 - RNA, 19 nt, Artificial Sequence
  Description of Artificial Sequence: Synthetic oligonucleotide
  Sense strand starting at position 575 of SEQ ID NO: 1885421
uggucuaacaggugguaga

SEQ ID NO: 2340979 - RNA, 19 nt, Artificial Sequence
  Description of Artificial Sequence: Synthetic oligonucleotide
  Antisense strand to SEQ ID NO: 2340978
ucuaccaccuguuagacca

SEQ ID NO: 2340980 - RNA, 19 nt, Artificial Sequence
  Description of Artificial Sequence: Synthetic oligonucleotide
  Sense strand starting at position 576 of SEQ ID NO: 1885421
ggucuaacaggugguagaa

SEQ ID NO: 2340981 - RNA, 19 nt, Artificial Sequence
  Description of Artificial Sequence: Synthetic oligonucleotide
  Antisense strand to SEQ ID NO: 2340980
uucuaccaccuguuagacc

SEQ ID NO: 2340982 - RNA, 19 nt, Artificial Sequence
  Description of Artificial Sequence: Synthetic oligonucleotide
  Sense strand starting at position 578 of SEQ ID NO: 1885421
ucuaacaggugguagaaua

SEQ ID NO: 2340983 - RNA, 19 nt, Artificial Sequence
  Description of Artificial Sequence: Synthetic oligonucleotide
  Antisense strand to SEQ ID NO: 2340982
uauucuaccaccuguuaga

SEQ ID NO: 2340984 - RNA, 19 nt, Artificial Sequence
  Description of Artificial Sequence: Synthetic oligonucleotide
  Sense strand starting at position 656 of SEQ ID NO: 1885421
caaugauuguaaggucuag

SEQ ID NO: 2340985 - RNA, 19 nt, Artificial Sequence
  Description of Artificial Sequence: Synthetic oligonucleotide
  Antisense strand to SEQ ID NO: 2340984
cuagaccuuacaaucauug

SEQ ID NO: 2340986 - RNA, 19 nt, Artificial Sequence
  Description of Artificial Sequence: Synthetic oligonucleotide
  Sense strand starting at position 1016 of SEQ ID NO: 1885421
uacuucggagacugagaua

SEQ ID NO: 2340987 - RNA, 19 nt, Artificial Sequence
  Description of Artificial Sequence: Synthetic oligonucleotide
  Antisense strand to SEQ ID NO: 2340986
uaucucagucuccgaagua

SEQ ID NO: 2340988 - RNA, 19 nt, Artificial Sequence
  Description of Artificial Sequence: Synthetic oligonucleotide
  Sense strand starting at position 1169 of SEQ ID NO: 1885421
gucuaccaauuaugggaau

SEQ ID NO: 2340989 - RNA, 19 nt, Artificial Sequence
  Description of Artificial Sequence: Synthetic oligonucleotide
  Antisense strand to SEQ ID NO: 2340988
auucccauaauugguagac

SEQ ID NO: 2340990 - RNA, 19 nt, Artificial Sequence
  Description of Artificial Sequence: Synthetic oligonucleotide
  Sense strand starting at position 1170 of SEQ ID NO: 1885421
ucuaccaauuaugggaaua

SEQ ID NO: 2340991 - RNA, 19 nt, Artificial Sequence
  Description of Artificial Sequence: Synthetic oligonucleotide
  Antisense strand to SEQ ID NO: 2340990
uauucccauaauugguaga

SEQ ID NO: 2340992 - RNA, 19 nt, Artificial Sequence
  Description of Artificial Sequence: Synthetic oligonucleotide
  Sense strand starting at position 1182 of SEQ ID NO: 1885421
gggaauaacgcucauuaua

SEQ ID NO: 2340993 - RNA, 19 nt, Artificial Sequence
  Description of Artificial Sequence: Synthetic oligonucleotide
  Antisense strand to SEQ ID NO: 2340992
uauaaugagcguuauuccc

SEQ ID NO: 2340994 - RNA, 19 nt, Artificial Sequence
  Description of Artificial Sequence: Synthetic oligonucleotide
  Sense strand starting at position 1299 of SEQ ID NO: 1885421
cuuaguaagagugacaguu

SEQ ID NO: 2340995 - RNA, 19 nt, Artificial Sequence
  Description of Artificial Sequence: Synthetic oligonucleotide
  Antisense strand to SEQ ID NO: 2340994
aacugucacucuuacuaag

SEQ ID NO: 2340996 - RNA, 19 nt, Artificial Sequence
  Description of Artificial Sequence: Synthetic oligonucleotide
  Sense strand starting at position 1346 of SEQ ID NO: 1885421
gcucuuuacuuguauuauu

SEQ ID NO: 2340997 - RNA, 19 nt, Artificial Sequence
  Description of Artificial Sequence: Synthetic oligonucleotide
  Antisense strand to SEQ ID NO: 2340996
aauaauacaaguaaagagc

SEQ ID NO: 2340998 - RNA, 19 nt, Artificial Sequence
  Description of Artificial Sequence: Synthetic oligonucleotide
  Sense strand starting at position 1373 of SEQ ID NO: 1885421
acaacaacgcuuugacgua

SEQ ID NO: 2340999 - RNA, 19 nt, Artificial Sequence
  Description of Artificial Sequence: Synthetic oligonucleotide
  Antisense strand to SEQ ID NO: 2340998
uacgucaaagcguuguugu

SEQ ID NO: 2341000 - RNA, 19 nt, Artificial Sequence
  Description of Artificial Sequence: Synthetic oligonucleotide
  Sense strand starting at position 1380 of SEQ ID NO: 1885421
cgcuuugacguagguacua

SEQ ID NO: 2341001 - RNA, 19 nt, Artificial Sequence
  Description of Artificial Sequence: Synthetic oligonucleotide
  Antisense strand to SEQ ID NO: 2341000
uaguaccuacgucaaagcg

SEQ ID NO: 2341002 - RNA, 19 nt, Artificial Sequence
  Description of Artificial Sequence: Synthetic oligonucleotide
  Sense strand starting at position 1382 of SEQ ID NO: 1885421
cuuugacguagguacuauu

SEQ ID NO: 2341003 - RNA, 19 nt, Artificial Sequence
  Description of Artificial Sequence: Synthetic oligonucleotide
  Antisense strand to SEQ ID NO: 2341002
aauaguaccuacgucaaag

SEQ ID NO: 2341004 - RNA, 19 nt, Artificial Sequence
  Description of Artificial Sequence: Synthetic oligonucleotide
  Sense strand starting at position 1572 of SEQ ID NO: 1885421
guguguggacuccaacuau

SEQ ID NO: 2341005 - RNA, 19 nt, Artificial Sequence
  Description of Artificial Sequence: Synthetic oligonucleotide
  Antisense strand to SEQ ID NO: 2341004
auaguuggaguccacacac

SEQ ID NO: 2341006 - RNA, 19 nt, Artificial Sequence
  Description of Artificial Sequence: Synthetic oligonucleotide
  Sense strand starting at position 1751 of SEQ ID NO: 1885421
gucauaugcucuuggcuaa

SEQ ID NO: 2341007 - RNA, 19 nt, Artificial Sequence
  Description of Artificial Sequence: Synthetic oligonucleotide
  Antisense strand to SEQ ID NO: 2341006
uuagccaagagcauaugac

SEQ ID NO: 2341008 - RNA, 19 nt, Artificial Sequence
  Description of Artificial Sequence: Synthetic oligonucleotide
  Sense strand starting at position 1752 of SEQ ID NO: 1885421
ucauaugcucuuggcuaau

SEQ ID NO: 2341009 - RNA, 19 nt, Artificial Sequence
  Description of Artificial Sequence: Synthetic oligonucleotide
  Antisense strand to SEQ ID NO: 2341008
auuagccaagagcauauga

SEQ ID NO: 2341010 - RNA, 19 nt, Artificial Sequence
  Description of Artificial Sequence: Synthetic oligonucleotide
  Sense strand starting at position 1920 of SEQ ID NO: 1885421
acgugucauccuugcauag

SEQ ID NO: 2341011 - RNA, 19 nt, Artificial Sequence
  Description of Artificial Sequence: Synthetic oligonucleotide
  Antisense strand to SEQ ID NO: 2341010
cuaugcaaggaugacacgu

SEQ ID NO: 2341012 - RNA, 19 nt, Artificial Sequence
  Description of Artificial Sequence: Synthetic oligonucleotide
  Sense strand starting at position 2412 of SEQ ID NO: 1885421
uaauccagucuuuguugga

SEQ ID NO: 2341013 - RNA, 19 nt, Artificial Sequence
  Description of Artificial Sequence: Synthetic oligonucleotide
  Antisense strand to SEQ ID NO: 2341012
uccaacaaagacuggauua

SEQ ID NO: 2341014 - RNA, 19 nt, Artificial Sequence
  Description of Artificial Sequence: Synthetic oligonucleotide
  Sense strand starting at position 2415 of SEQ ID NO: 1885421
uccagucuuuguuggacau

SEQ ID NO: 2341015 - RNA, 19 nt, Artificial Sequence
  Description of Artificial Sequence: Synthetic oligonucleotide
  Antisense strand to SEQ ID NO: 2341014
auguccaacaaagacugga

SEQ ID NO: 2341016 - RNA, 19 nt, Artificial Sequence
  Description of Artificial Sequence: Synthetic oligonucleotide
  Sense strand starting at position 2416 of SEQ ID NO: 1885421
ccagucuuuguuggacauu

SEQ ID NO: 2341017 - RNA, 19 nt, Artificial Sequence
  Description of Artificial Sequence: Synthetic oligonucleotide
  Antisense strand to SEQ ID NO: 2341016
aauguccaacaaagacugg

SEQ ID NO: 2341018 - RNA, 19 nt, Artificial Sequence
  Description of Artificial Sequence: Synthetic oligonucleotide
  Sense strand starting at position 2417 of SEQ ID NO: 1885421
cagucuuuguuggacauuu

SEQ ID NO: 2341019 - RNA, 19 nt, Artificial Sequence
  Description of Artificial Sequence: Synthetic oligonucleotide
  Antisense strand to SEQ ID NO: 2341018
aaauguccaacaaagacug

SEQ ID NO: 2341020 - RNA, 19 nt, Artificial Sequence
  Description of Artificial Sequence: Synthetic oligonucleotide
  Sense strand starting at position 224 of SEQ ID NO: 1885422
gggacuaacucuccuuugu

SEQ ID NO: 2341021 - RNA, 19 nt, Artificial Sequence
  Description of Artificial Sequence: Synthetic oligonucleotide
  Antisense strand to SEQ ID NO: 2341020
acaaaggagaguuaguccc

SEQ ID NO: 2341022 - RNA, 19 nt, Artificial Sequence
  Description of Artificial Sequence: Synthetic oligonucleotide
  Sense strand starting at position 328 of SEQ ID NO: 1885422
uacugaacgcuuuagaaga

SEQ ID NO: 2341023 - RNA, 19 nt, Artificial Sequence
  Description of Artificial Sequence: Synthetic oligonucleotide
  Antisense strand to SEQ ID NO: 2341022
ucuucuaaagcguucagua

SEQ ID NO: 2341024 - RNA, 19 nt, Artificial Sequence
  Description of Artificial Sequence: Synthetic oligonucleotide
  Sense strand starting at position 338 of SEQ ID NO: 1885422
uuuagaagauuuggauaag

SEQ ID NO: 2341025 - RNA, 19 nt, Artificial Sequence
  Description of Artificial Sequence: Synthetic oligonucleotide
  Antisense strand to SEQ ID NO: 2341024
cuuauccaaaucuucuaaa

SEQ ID NO: 2341026 - RNA, 19 nt, Artificial Sequence
  Description of Artificial Sequence: Synthetic oligonucleotide
  Sense strand starting at position 403 of SEQ ID NO: 1885422
gguaauuaucugggcucau

SEQ ID NO: 2341027 - RNA, 19 nt, Artificial Sequence
  Description of Artificial Sequence: Synthetic oligonucleotide
  Antisense strand to SEQ ID NO: 2341026
augagcccagauaauuacc

SEQ ID NO: 2341028 - RNA, 19 nt, Artificial Sequence
  Description of Artificial Sequence: Synthetic oligonucleotide
  Sense strand starting at position 404 of SEQ ID NO: 1885422
guaauuaucugggcucauc

SEQ ID NO: 2341029 - RNA, 19 nt, Artificial Sequence
  Description of Artificial Sequence: Synthetic oligonucleotide
  Antisense strand to SEQ ID NO: 2341028
gaugagcccagauaauuac

SEQ ID NO: 2341030 - RNA, 19 nt, Artificial Sequence
  Description of Artificial Sequence: Synthetic oligonucleotide
  Sense strand starting at position 485 of SEQ ID NO: 1885422
ccugcugugcauuagauaa

SEQ ID NO: 2341031 - RNA, 19 nt, Artificial Sequence
  Description of Artificial Sequence: Synthetic oligonucleotide
  Antisense strand to SEQ ID NO: 2341030
uuaucuaaugcacagcagg

SEQ ID NO: 2341032 - RNA, 19 nt, Artificial Sequence
  Description of Artificial Sequence: Synthetic oligonucleotide
  Sense strand starting at position 518 of SEQ ID NO: 1885422
guuucugauccaggagucu

SEQ ID NO: 2341033 - RNA, 19 nt, Artificial Sequence
  Description of Artificial Sequence: Synthetic oligonucleotide
  Antisense strand to SEQ ID NO: 2341032
agacuccuggaucagaaac

SEQ ID NO: 2341034 - RNA, 19 nt, Artificial Sequence
  Description of Artificial Sequence: Synthetic oligonucleotide
  Sense strand starting at position 628 of SEQ ID NO: 1885422
ggauacuuguuaggaauuu

SEQ ID NO: 2341035 - RNA, 19 nt, Artificial Sequence
  Description of Artificial Sequence: Synthetic oligonucleotide
  Antisense strand to SEQ ID NO: 2341034
aaauuccuaacaaguaucc

SEQ ID NO: 2341036 - RNA, 19 nt, Artificial Sequence
  Description of Artificial Sequence: Synthetic oligonucleotide
  Sense strand starting at position 730 of SEQ ID NO: 1885422
uaaagagauuaaguaacgu

SEQ ID NO: 2341037 - RNA, 19 nt, Artificial Sequence
  Description of Artificial Sequence: Synthetic oligonucleotide
  Antisense strand to SEQ ID NO: 2341036
acguuacuuaaucucuuua

SEQ ID NO: 2341038 - RNA, 19 nt, Artificial Sequence
  Description of Artificial Sequence: Synthetic oligonucleotide
  Sense strand starting at position 785 of SEQ ID NO: 1885422
auucgaguucaggacugua

SEQ ID NO: 2341039 - RNA, 19 nt, Artificial Sequence
  Description of Artificial Sequence: Synthetic oligonucleotide
  Antisense strand to SEQ ID NO: 2341038
uacaguccugaacucgaau

SEQ ID NO: 2341040 - RNA, 19 nt, Artificial Sequence
  Description of Artificial Sequence: Synthetic oligonucleotide
  Sense strand starting at position 803 of SEQ ID NO: 1885422
aucgguguuguacaaauua

SEQ ID NO: 2341041 - RNA, 19 nt, Artificial Sequence
  Description of Artificial Sequence: Synthetic oligonucleotide
  Antisense strand to SEQ ID NO: 2341040
uaauuuguacaacaccgau

SEQ ID NO: 2341042 - RNA, 19 nt, Artificial Sequence
  Description of Artificial Sequence: Synthetic oligonucleotide
  Sense strand starting at position 917 of SEQ ID NO: 1885422
aguaaauaugcauaucuga

SEQ ID NO: 2341043 - RNA, 19 nt, Artificial Sequence
  Description of Artificial Sequence: Synthetic oligonucleotide
  Antisense strand to SEQ ID NO: 2341042
ucagauaugcauauuuacu

SEQ ID NO: 2341044 - RNA, 19 nt, Artificial Sequence
  Description of Artificial Sequence: Synthetic oligonucleotide
  Sense strand starting at position 1056 of SEQ ID NO: 1885422
gaaauaggauaaggaauua

SEQ ID NO: 2341045 - RNA, 19 nt, Artificial Sequence
  Description of Artificial Sequence: Synthetic oligonucleotide
  Antisense strand to SEQ ID NO: 2341044
uaauuccuuauccuauuuc

SEQ ID NO: 2341046 - RNA, 19 nt, Artificial Sequence
  Description of Artificial Sequence: Synthetic oligonucleotide
  Sense strand starting at position 1489 of SEQ ID NO: 1885422
ugcaguauugcugcaguua

SEQ ID NO: 2341047 - RNA, 19 nt, Artificial Sequence
  Description of Artificial Sequence: Synthetic oligonucleotide
  Antisense strand to SEQ ID NO: 2341046
uaacugcagcaauacugca

SEQ ID NO: 2341048 - RNA, 19 nt, Artificial Sequence
  Description of Artificial Sequence: Synthetic oligonucleotide
  Sense strand starting at position 1514 of SEQ ID NO: 1885422
aaugguuauugugcacuau

SEQ ID NO: 2341049 - RNA, 19 nt, Artificial Sequence
  Description of Artificial Sequence: Synthetic oligonucleotide
  Antisense strand to SEQ ID NO: 2341048
auagugcacaauaaccauu

SEQ ID NO: 2341050 - RNA, 19 nt, Artificial Sequence
  Description of Artificial Sequence: Synthetic oligonucleotide
  Sense strand starting at position 1515 of SEQ ID NO: 1885422
augguuauugugcacuauu

SEQ ID NO: 2341051 - RNA, 19 nt, Artificial Sequence
  Description of Artificial Sequence: Synthetic oligonucleotide
  Antisense strand to SEQ ID NO: 2341050
aauagugcacaauaaccau

SEQ ID NO: 2341052 - RNA, 19 nt, Artificial Sequence
  Description of Artificial Sequence: Synthetic oligonucleotide
  Sense strand starting at position 1518 of SEQ ID NO: 1885422
guuauugugcacuauugau

SEQ ID NO: 2341053 - RNA, 19 nt, Artificial Sequence
  Description of Artificial Sequence: Synthetic oligonucleotide
  Antisense strand to SEQ ID NO: 2341052
aucaauagugcacaauaac

SEQ ID NO: 2341054 - RNA, 19 nt, Artificial Sequence
  Description of Artificial Sequence: Synthetic oligonucleotide
  Sense strand starting at position 1567 of SEQ ID NO: 1885422
cagggaucccuguaccagu

SEQ ID NO: 2341055 - RNA, 19 nt, Artificial Sequence
  Description of Artificial Sequence: Synthetic oligonucleotide
  Antisense strand to SEQ ID NO: 2341054
acugguacagggaucccug

SEQ ID NO: 2341056 - RNA, 19 nt, Artificial Sequence
  Description of Artificial Sequence: Synthetic oligonucleotide
  Sense strand starting at position 1701 of SEQ ID NO: 1885422
gcacaaacuuuacugugaa

SEQ ID NO: 2341057 - RNA, 19 nt, Artificial Sequence
  Description of Artificial Sequence: Synthetic oligonucleotide
  Antisense strand to SEQ ID NO: 2341056
uucacaguaaaguuugugc

SEQ ID NO: 2341058 - RNA, 19 nt, Artificial Sequence
  Description of Artificial Sequence: Synthetic oligonucleotide
  Sense strand starting at position 1720 of SEQ ID NO: 1885422
cugcacacuccuuguaaga

SEQ ID NO: 2341059 - RNA, 19 nt, Artificial Sequence
  Description of Artificial Sequence: Synthetic oligonucleotide
  Antisense strand to SEQ ID NO: 2341058
ucuuacaaggagugugcag

SEQ ID NO: 2341060 - RNA, 19 nt, Artificial Sequence
  Description of Artificial Sequence: Synthetic oligonucleotide
  Sense strand starting at position 1742 of SEQ ID NO: 1885422
uaaugaaucccauguggug

SEQ ID NO: 2341061 - RNA, 19 nt, Artificial Sequence
  Description of Artificial Sequence: Synthetic oligonucleotide
  Antisense strand to SEQ ID NO: 2341060
caccacaugggauucauua

SEQ ID NO: 2341062 - RNA, 19 nt, Artificial Sequence
  Description of Artificial Sequence: Synthetic oligonucleotide
  Sense strand starting at position 2172 of SEQ ID NO: 1885422
gcugaaaucguccagaugu

SEQ ID NO: 2341063 - RNA, 19 nt, Artificial Sequence
  Description of Artificial Sequence: Synthetic oligonucleotide
  Antisense strand to SEQ ID NO: 2341062
acaucuggacgauuucagc

SEQ ID NO: 2341064 - RNA, 19 nt, Artificial Sequence
  Description of Artificial Sequence: Synthetic oligonucleotide
  Sense strand starting at position 2174 of SEQ ID NO: 1885422
ugaaaucguccagauguuu

SEQ ID NO: 2341065 - RNA, 19 nt, Artificial Sequence
  Description of Artificial Sequence: Synthetic oligonucleotide
  Antisense strand to SEQ ID NO: 2341064
aaacaucuggacgauuuca

SEQ ID NO: 2341066 - RNA, 19 nt, Artificial Sequence
  Description of Artificial Sequence: Synthetic oligonucleotide
  Sense strand starting at position 2185 of SEQ ID NO: 1885422
agauguuuagauugauguu

SEQ ID NO: 2341067 - RNA, 19 nt, Artificial Sequence
  Description of Artificial Sequence: Synthetic oligonucleotide
  Antisense strand to SEQ ID NO: 2341066
aacaucaaucuaaacaucu

SEQ ID NO: 2341068 - RNA, 19 nt, Artificial Sequence
  Description of Artificial Sequence: Synthetic oligonucleotide
  Sense strand starting at position 2581 of SEQ ID NO: 1885422
ccguguuaccaacaauuac

SEQ ID NO: 2341069 - RNA, 19 nt, Artificial Sequence
  Description of Artificial Sequence: Synthetic oligonucleotide
  Antisense strand to SEQ ID NO: 2341068
guaauuguugguaacacgg

SEQ ID NO: 2341070 - RNA, 19 nt, Artificial Sequence
  Description of Artificial Sequence: Synthetic oligonucleotide
  Sense strand starting at position 2611 of SEQ ID NO: 1885422
aggucuuauuguuuauuac

SEQ ID NO: 2341071 - RNA, 19 nt, Artificial Sequence
  Description of Artificial Sequence: Synthetic oligonucleotide
  Antisense strand to SEQ ID NO: 2341070
guaauaaacaauaagaccu

SEQ ID NO: 2341072 - RNA, 19 nt, Artificial Sequence
  Description of Artificial Sequence: Synthetic oligonucleotide
  Sense strand starting at position 2612 of SEQ ID NO: 1885422
ggucuuauuguuuauuacu

SEQ ID NO: 2341073 - RNA, 19 nt, Artificial Sequence
  Description of Artificial Sequence: Synthetic oligonucleotide
  Antisense strand to SEQ ID NO: 2341072
aguaauaaacaauaagacc

SEQ ID NO: 2341074 - RNA, 19 nt, Artificial Sequence
  Description of Artificial Sequence: Synthetic oligonucleotide
  Sense strand starting at position 3388 of SEQ ID NO: 1885422
uagauaaguugagugggua

SEQ ID NO: 2341075 - RNA, 19 nt, Artificial Sequence
  Description of Artificial Sequence: Synthetic oligonucleotide
  Antisense strand to SEQ ID NO: 2341074
uacccacucaacuuaucua

SEQ ID NO: 2341076 - RNA, 19 nt, Artificial Sequence
  Description of Artificial Sequence: Synthetic oligonucleotide
  Sense strand starting at position 3389 of SEQ ID NO: 1885422
agauaaguugaguggguau

SEQ ID NO: 2341077 - RNA, 19 nt, Artificial Sequence
  Description of Artificial Sequence: Synthetic oligonucleotide
  Antisense strand to SEQ ID NO: 2341076
auacccacucaacuuaucu

SEQ ID NO: 2341078 - RNA, 19 nt, Artificial Sequence
  Description of Artificial Sequence: Synthetic oligonucleotide
  Sense strand starting at position 3466 of SEQ ID NO: 1885422
ucuagcauuugguuuguaa

SEQ ID NO: 2341079 - RNA, 19 nt, Artificial Sequence
  Description of Artificial Sequence: Synthetic oligonucleotide
  Antisense strand to SEQ ID NO: 2341078
uuacaaaccaaaugcuaga

SEQ ID NO: 2341080 - RNA, 19 nt, Artificial Sequence
  Description of Artificial Sequence: Synthetic oligonucleotide
  Sense strand starting at position 3468 of SEQ ID NO: 1885422
uagcauuugguuuguaagu

SEQ ID NO: 2341081 - RNA, 19 nt, Artificial Sequence
  Description of Artificial Sequence: Synthetic oligonucleotide
  Antisense strand to SEQ ID NO: 2341080
acuuacaaaccaaaugcua

SEQ ID NO: 2341082 - RNA, 19 nt, Artificial Sequence
  Description of Artificial Sequence: Synthetic oligonucleotide
  Sense strand starting at position 3469 of SEQ ID NO: 1885422
agcauuugguuuguaaguu

SEQ ID NO: 2341083 - RNA, 19 nt, Artificial Sequence
  Description of Artificial Sequence: Synthetic oligonucleotide
  Antisense strand to SEQ ID NO: 2341082
aacuuacaaaccaaaugcu

SEQ ID NO: 2341084 - RNA, 19 nt, Artificial Sequence
  Description of Artificial Sequence: Synthetic oligonucleotide
  Sense strand starting at position 3529 of SEQ ID NO: 1885422
ugucaugaagcuuauaaau

SEQ ID NO: 2341085 - RNA, 19 nt, Artificial Sequence
  Description of Artificial Sequence: Synthetic oligonucleotide
  Antisense strand to SEQ ID NO: 2341084
auuuauaagcuucaugaca

SEQ ID NO: 2341086 - RNA, 19 nt, Artificial Sequence
  Description of Artificial Sequence: Synthetic oligonucleotide
  Sense strand starting at position 3580 of SEQ ID NO: 1885422
aucagacuauguuuaggua

SEQ ID NO: 2341087 - RNA, 19 nt, Artificial Sequence
  Description of Artificial Sequence: Synthetic oligonucleotide
  Antisense strand to SEQ ID NO: 2341086
uaccuaaacauagucugau

SEQ ID NO: 2341088 - RNA, 19 nt, Artificial Sequence
  Description of Artificial Sequence: Synthetic oligonucleotide
  Sense strand starting at position 3584 of SEQ ID NO: 1885422
gacuauguuuagguaguuu

SEQ ID NO: 2341089 - RNA, 19 nt, Artificial Sequence
  Description of Artificial Sequence: Synthetic oligonucleotide
  Antisense strand to SEQ ID NO: 2341088
aaacuaccuaaacauaguc

SEQ ID NO: 2341090 - RNA, 19 nt, Artificial Sequence
  Description of Artificial Sequence: Synthetic oligonucleotide
  Sense strand starting at position 3670 of SEQ ID NO: 1885422
uugugcacuauugacgaaa

SEQ ID NO: 2341091 - RNA, 19 nt, Artificial Sequence
  Description of Artificial Sequence: Synthetic oligonucleotide
  Antisense strand to SEQ ID NO: 2341090
uuucgucaauagugcacaa

SEQ ID NO: 2341092 - RNA, 19 nt, Artificial Sequence
  Description of Artificial Sequence: Synthetic oligonucleotide
  Sense strand starting at position 3673 of SEQ ID NO: 1885422
ugcacuauugacgaaagca

SEQ ID NO: 2341093 - RNA, 19 nt, Artificial Sequence
  Description of Artificial Sequence: Synthetic oligonucleotide
  Antisense strand to SEQ ID NO: 2341092
ugcuuucgucaauagugca

SEQ ID NO: 2341094 - RNA, 19 nt, Artificial Sequence
  Description of Artificial Sequence: Synthetic oligonucleotide
  Sense strand starting at position 3746 of SEQ ID NO: 1885422
gggcuuauccugggcucaa

SEQ ID NO: 2341095 - RNA, 19 nt, Artificial Sequence
  Description of Artificial Sequence: Synthetic oligonucleotide
  Antisense strand to SEQ ID NO: 2341094
uugagcccaggauaagccc

SEQ ID NO: 2341096 - RNA, 19 nt, Artificial Sequence
  Description of Artificial Sequence: Synthetic oligonucleotide
  Sense strand starting at position 3747 of SEQ ID NO: 1885422
ggcuuauccugggcucaag

SEQ ID NO: 2341097 - RNA, 19 nt, Artificial Sequence
  Description of Artificial Sequence: Synthetic oligonucleotide
  Antisense strand to SEQ ID NO: 2341096
cuugagcccaggauaagcc

SEQ ID NO: 2341098 - RNA, 19 nt, Artificial Sequence
  Description of Artificial Sequence: Synthetic oligonucleotide
  Sense strand starting at position 3885 of SEQ ID NO: 1885422
uucugagaauuccuacuug

SEQ ID NO: 2341099 - RNA, 19 nt, Artificial Sequence
  Description of Artificial Sequence: Synthetic oligonucleotide
  Antisense strand to SEQ ID NO: 2341098
caaguaggaauucucagaa

SEQ ID NO: 2341100 - RNA, 19 nt, Artificial Sequence
  Description of Artificial Sequence: Synthetic oligonucleotide
  Sense strand starting at position 53 of SEQ ID NO: 1885423
acgacucaucaaugguaua

SEQ ID NO: 2341101 - RNA, 19 nt, Artificial Sequence
  Description of Artificial Sequence: Synthetic oligonucleotide
  Antisense strand to SEQ ID NO: 2341100
uauaccauugaugagucgu

SEQ ID NO: 2341102 - RNA, 19 nt, Artificial Sequence
  Description of Artificial Sequence: Synthetic oligonucleotide
  Sense strand starting at position 105 of SEQ ID NO: 1885423
uugccagucagucagagau

SEQ ID NO: 2341103 - RNA, 19 nt, Artificial Sequence
  Description of Artificial Sequence: Synthetic oligonucleotide
  Antisense strand to SEQ ID NO: 2341102
aucucugacugacuggcaa

SEQ ID NO: 2341104 - RNA, 19 nt, Artificial Sequence
  Description of Artificial Sequence: Synthetic oligonucleotide
  Sense strand starting at position 166 of SEQ ID NO: 1885423
aguauuagaugaguuagga

SEQ ID NO: 2341105 - RNA, 19 nt, Artificial Sequence
  Description of Artificial Sequence: Synthetic oligonucleotide
  Antisense strand to SEQ ID NO: 2341104
uccuaacucaucuaauacu

SEQ ID NO: 2341106 - RNA, 19 nt, Artificial Sequence
  Description of Artificial Sequence: Synthetic oligonucleotide
  Sense strand starting at position 174 of SEQ ID NO: 1885423
augaguuaggauggcagua

SEQ ID NO: 2341107 - RNA, 19 nt, Artificial Sequence
  Description of Artificial Sequence: Synthetic oligonucleotide
  Antisense strand to SEQ ID NO: 2341106
uacugccauccuaacucau

SEQ ID NO: 2341108 - RNA, 19 nt, Artificial Sequence
  Description of Artificial Sequence: Synthetic oligonucleotide
  Sense strand starting at position 184 of SEQ ID NO: 1885423
auggcaguacccuauuaua

SEQ ID NO: 2341109 - RNA, 19 nt, Artificial Sequence
  Description of Artificial Sequence: Synthetic oligonucleotide
  Antisense strand to SEQ ID NO: 2341108
uauaauaggguacugccau

SEQ ID NO: 2341110 - RNA, 19 nt, Artificial Sequence
  Description of Artificial Sequence: Synthetic oligonucleotide
  Sense strand starting at position 310 of SEQ ID NO: 1885423
aguaucuuaccugguuaau

SEQ ID NO: 2341111 - RNA, 19 nt, Artificial Sequence
  Description of Artificial Sequence: Synthetic oligonucleotide
  Antisense strand to SEQ ID NO: 2341110
auuaaccagguaagauacu

SEQ ID NO: 2341112 - RNA, 19 nt, Artificial Sequence
  Description of Artificial Sequence: Synthetic oligonucleotide
  Sense strand starting at position 313 of SEQ ID NO: 1885423
aucuuaccugguuaauguu

SEQ ID NO: 2341113 - RNA, 19 nt, Artificial Sequence
  Description of Artificial Sequence: Synthetic oligonucleotide
  Antisense strand to SEQ ID NO: 2341112
aacauuaaccagguaagau

SEQ ID NO: 2341114 - RNA, 19 nt, Artificial Sequence
  Description of Artificial Sequence: Synthetic oligonucleotide
  Sense strand starting at position 1289 of SEQ ID NO: 1885423
uuuguaaggacugagucuu

SEQ ID NO: 2341115 - RNA, 19 nt, Artificial Sequence
  Description of Artificial Sequence: Synthetic oligonucleotide
  Antisense strand to SEQ ID NO: 2341114
aagacucaguccuuacaaa

SEQ ID NO: 2341116 - RNA, 19 nt, Artificial Sequence
  Description of Artificial Sequence: Synthetic oligonucleotide
  Sense strand starting at position 1399 of SEQ ID NO: 1885423
cugugcuggaccugaaaua

SEQ ID NO: 2341117 - RNA, 19 nt, Artificial Sequence
  Description of Artificial Sequence: Synthetic oligonucleotide
  Antisense strand to SEQ ID NO: 2341116
uauuucagguccagcacag

SEQ ID NO: 2341118 - RNA, 19 nt, Artificial Sequence
  Description of Artificial Sequence: Synthetic oligonucleotide
  Sense strand starting at position 1400 of SEQ ID NO: 1885423
ugugcuggaccugaaauaa

SEQ ID NO: 2341119 - RNA, 19 nt, Artificial Sequence
  Description of Artificial Sequence: Synthetic oligonucleotide
  Antisense strand to SEQ ID NO: 2341118
uuauuucagguccagcaca

SEQ ID NO: 2341120 - RNA, 19 nt, Artificial Sequence
  Description of Artificial Sequence: Synthetic oligonucleotide
  Sense strand starting at position 1506 of SEQ ID NO: 1885423
acaaaugagucaguaaucu

SEQ ID NO: 2341121 - RNA, 19 nt, Artificial Sequence
  Description of Artificial Sequence: Synthetic oligonucleotide
  Antisense strand to SEQ ID NO: 2341120
agauuacugacucauuugu

SEQ ID NO: 2341122 - RNA, 19 nt, Artificial Sequence
  Description of Artificial Sequence: Synthetic oligonucleotide
  Sense strand starting at position 1510 of SEQ ID NO: 1885423
augagucaguaaucuaaua

SEQ ID NO: 2341123 - RNA, 19 nt, Artificial Sequence
  Description of Artificial Sequence: Synthetic oligonucleotide
  Antisense strand to SEQ ID NO: 2341122
uauuagauuacugacucau

SEQ ID NO: 2341124 - RNA, 19 nt, Artificial Sequence
  Description of Artificial Sequence: Synthetic oligonucleotide
  Sense strand starting at position 1748 of SEQ ID NO: 1885423
agcaauauaucuuuaagga

SEQ ID NO: 2341125 - RNA, 19 nt, Artificial Sequence
  Description of Artificial Sequence: Synthetic oligonucleotide
  Antisense strand to SEQ ID NO: 2341124
uccuuaaagauauauugcu

SEQ ID NO: 2341126 - RNA, 19 nt, Artificial Sequence
  Description of Artificial Sequence: Synthetic oligonucleotide
  Sense strand starting at position 1824 of SEQ ID NO: 1885423
auuauuuaagcucguguuu

SEQ ID NO: 2341127 - RNA, 19 nt, Artificial Sequence
  Description of Artificial Sequence: Synthetic oligonucleotide
  Antisense strand to SEQ ID NO: 2341126
aaacacgagcuuaaauaau

SEQ ID NO: 2341128 - RNA, 19 nt, Artificial Sequence
  Description of Artificial Sequence: Synthetic oligonucleotide
  Sense strand starting at position 2152 of SEQ ID NO: 1885423
gaggguaaauuugacuuau

SEQ ID NO: 2341129 - RNA, 19 nt, Artificial Sequence
  Description of Artificial Sequence: Synthetic oligonucleotide
  Antisense strand to SEQ ID NO: 2341128
auaagucaaauuuacccuc

SEQ ID NO: 2341130 - RNA, 19 nt, Artificial Sequence
  Description of Artificial Sequence: Synthetic oligonucleotide
  Sense strand starting at position 2177 of SEQ ID NO: 1885423
acuuaaauguuaccaaguu

SEQ ID NO: 2341131 - RNA, 19 nt, Artificial Sequence
  Description of Artificial Sequence: Synthetic oligonucleotide
  Antisense strand to SEQ ID NO: 2341130
aacuugguaacauuuaagu

SEQ ID NO: 2341132 - RNA, 19 nt, Artificial Sequence
  Description of Artificial Sequence: Synthetic oligonucleotide
  Sense strand starting at position 2192 of SEQ ID NO: 1885423
aguuauauugauugagaac

SEQ ID NO: 2341133 - RNA, 19 nt, Artificial Sequence
  Description of Artificial Sequence: Synthetic oligonucleotide
  Antisense strand to SEQ ID NO: 2341132
guucucaaucaauauaacu

SEQ ID NO: 2341134 - RNA, 19 nt, Artificial Sequence
  Description of Artificial Sequence: Synthetic oligonucleotide
  Sense strand starting at position 2334 of SEQ ID NO: 1885423
guguuaaauagugaccauu

SEQ ID NO: 2341135 - RNA, 19 nt, Artificial Sequence
  Description of Artificial Sequence: Synthetic oligonucleotide
  Antisense strand to SEQ ID NO: 2341134
aauggucacuauuuaacac

SEQ ID NO: 2341136 - RNA, 19 nt, Artificial Sequence
  Description of Artificial Sequence: Synthetic oligonucleotide
  Sense strand starting at position 2415 of SEQ ID NO: 1885423
auagcauauucuguaauug

SEQ ID NO: 2341137 - RNA, 19 nt, Artificial Sequence
  Description of Artificial Sequence: Synthetic oligonucleotide
  Antisense strand to SEQ ID NO: 2341136
caauuacagaauaugcuau

SEQ ID NO: 2341138 - RNA, 19 nt, Artificial Sequence
  Description of Artificial Sequence: Synthetic oligonucleotide
  Sense strand starting at position 2750 of SEQ ID NO: 1885423
ggacuauagacucgcacua

SEQ ID NO: 2341139 - RNA, 19 nt, Artificial Sequence
  Description of Artificial Sequence: Synthetic oligonucleotide
  Antisense strand to SEQ ID NO: 2341138
uagugcgagucuauagucc

SEQ ID NO: 2341140 - RNA, 19 nt, Artificial Sequence
  Description of Artificial Sequence: Synthetic oligonucleotide
  Sense strand starting at position 2785 of SEQ ID NO: 1885423
cugucaugccuggacuaau

SEQ ID NO: 2341141 - RNA, 19 nt, Artificial Sequence
  Description of Artificial Sequence: Synthetic oligonucleotide
  Antisense strand to SEQ ID NO: 2341140
auuaguccaggcaugacag

SEQ ID NO: 2341142 - RNA, 19 nt, Artificial Sequence
  Description of Artificial Sequence: Synthetic oligonucleotide
  Sense strand starting at position 2865 of SEQ ID NO: 1885423
aaauuaguuugggcucaaa

SEQ ID NO: 2341143 - RNA, 19 nt, Artificial Sequence
  Description of Artificial Sequence: Synthetic oligonucleotide
  Antisense strand to SEQ ID NO: 2341142
uuugagcccaaacuaauuu

SEQ ID NO: 2341144 - RNA, 19 nt, Artificial Sequence
  Description of Artificial Sequence: Synthetic oligonucleotide
  Sense strand starting at position 2868 of SEQ ID NO: 1885423
uuaguuugggcucaaaguu

SEQ ID NO: 2341145 - RNA, 19 nt, Artificial Sequence
  Description of Artificial Sequence: Synthetic oligonucleotide
  Antisense strand to SEQ ID NO: 2341144
aacuuugagcccaaacuaa

SEQ ID NO: 2341146 - RNA, 19 nt, Artificial Sequence
  Description of Artificial Sequence: Synthetic oligonucleotide
  Sense strand starting at position 2876 of SEQ ID NO: 1885423
ggcucaaaguuugcaaaca

SEQ ID NO: 2341147 - RNA, 19 nt, Artificial Sequence
  Description of Artificial Sequence: Synthetic oligonucleotide
  Antisense strand to SEQ ID NO: 2341146
uguuugcaaacuuugagcc

SEQ ID NO: 2341148 - RNA, 19 nt, Artificial Sequence
  Description of Artificial Sequence: Synthetic oligonucleotide
  Sense strand starting at position 2897 of SEQ ID NO: 1885423
agaauuuccucauaguaug

SEQ ID NO: 2341149 - RNA, 19 nt, Artificial Sequence
  Description of Artificial Sequence: Synthetic oligonucleotide
  Antisense strand to SEQ ID NO: 2341148
cauacuaugaggaaauucu

SEQ ID NO: 2341150 - RNA, 19 nt, Artificial Sequence
  Description of Artificial Sequence: Synthetic oligonucleotide
  Sense strand starting at position 3117 of SEQ ID NO: 1885423
uuuagugauauugggaaua

SEQ ID NO: 2341151 - RNA, 19 nt, Artificial Sequence
  Description of Artificial Sequence: Synthetic oligonucleotide
  Antisense strand to SEQ ID NO: 2341150
uauucccaauaucacuaaa

SEQ ID NO: 2341152 - RNA, 19 nt, Artificial Sequence
  Description of Artificial Sequence: Synthetic oligonucleotide
  Sense strand starting at position 3223 of SEQ ID NO: 1885423
uggaauguuuaacuuguua

SEQ ID NO: 2341153 - RNA, 19 nt, Artificial Sequence
  Description of Artificial Sequence: Synthetic oligonucleotide
  Antisense strand to SEQ ID NO: 2341152
uaacaaguuaaacauucca

SEQ ID NO: 2341154 - RNA, 19 nt, Artificial Sequence
  Description of Artificial Sequence: Synthetic oligonucleotide
  Sense strand starting at position 3227 of SEQ ID NO: 1885423
auguuuaacuuguuaccua

SEQ ID NO: 2341155 - RNA, 19 nt, Artificial Sequence
  Description of Artificial Sequence: Synthetic oligonucleotide
  Antisense strand to SEQ ID NO: 2341154
uagguaacaaguuaaacau

SEQ ID NO: 2341156 - RNA, 19 nt, Artificial Sequence
  Description of Artificial Sequence: Synthetic oligonucleotide
  Sense strand starting at position 3456 of SEQ ID NO: 1885423
aaacgugcacucuauagua

SEQ ID NO: 2341157 - RNA, 19 nt, Artificial Sequence
  Description of Artificial Sequence: Synthetic oligonucleotide
  Antisense strand to SEQ ID NO: 2341156
uacuauagagugcacguuu

SEQ ID NO: 2341158 - RNA, 19 nt, Artificial Sequence
  Description of Artificial Sequence: Synthetic oligonucleotide
  Sense strand starting at position 3539 of SEQ ID NO: 1885423
uaagguucggcaggaauua

SEQ ID NO: 2341159 - RNA, 19 nt, Artificial Sequence
  Description of Artificial Sequence: Synthetic oligonucleotide
  Antisense strand to SEQ ID NO: 2341158
uaauuccugccgaaccuua

SEQ ID NO: 2341160 - RNA, 19 nt, Artificial Sequence
  Description of Artificial Sequence: Synthetic oligonucleotide
  Sense strand starting at position 3540 of SEQ ID NO: 1885423
aagguucggcaggaauuau

SEQ ID NO: 2341161 - RNA, 19 nt, Artificial Sequence
  Description of Artificial Sequence: Synthetic oligonucleotide
  Antisense strand to SEQ ID NO: 2341160
auaauuccugccgaaccuu

SEQ ID NO: 2341162 - RNA, 19 nt, Artificial Sequence
  Description of Artificial Sequence: Synthetic oligonucleotide
  Sense strand starting at position 3586 of SEQ ID NO: 1885423
uugucagcacuuuagaaag

SEQ ID NO: 2341163 - RNA, 19 nt, Artificial Sequence
  Description of Artificial Sequence: Synthetic oligonucleotide
  Antisense strand to SEQ ID NO: 2341162
cuuucuaaagugcugacaa

SEQ ID NO: 2341164 - RNA, 19 nt, Artificial Sequence
  Description of Artificial Sequence: Synthetic oligonucleotide
  Sense strand starting at position 3636 of SEQ ID NO: 1885423
guguccugucaagaugaac

SEQ ID NO: 2341165 - RNA, 19 nt, Artificial Sequence
  Description of Artificial Sequence: Synthetic oligonucleotide
  Antisense strand to SEQ ID NO: 2341164
guucaucuugacaggacac

SEQ ID NO: 2341166 - RNA, 19 nt, Artificial Sequence
  Description of Artificial Sequence: Synthetic oligonucleotide
  Sense strand starting at position 3715 of SEQ ID NO: 1885423
uuuauauucucuuuaggug

SEQ ID NO: 2341167 - RNA, 19 nt, Artificial Sequence
  Description of Artificial Sequence: Synthetic oligonucleotide
  Antisense strand to SEQ ID NO: 2341166
caccuaaagagaauauaaa

SEQ ID NO: 2341168 - RNA, 19 nt, Artificial Sequence
  Description of Artificial Sequence: Synthetic oligonucleotide
  Sense strand starting at position 3730 of SEQ ID NO: 1885423
ggugcuucuaguuaauuga

SEQ ID NO: 2341169 - RNA, 19 nt, Artificial Sequence
  Description of Artificial Sequence: Synthetic oligonucleotide
  Antisense strand to SEQ ID NO: 2341168
ucaauuaacuagaagcacc

SEQ ID NO: 2341170 - RNA, 19 nt, Artificial Sequence
  Description of Artificial Sequence: Synthetic oligonucleotide
  Sense strand starting at position 3870 of SEQ ID NO: 1885423
agaaguaaaugacuuguua

SEQ ID NO: 2341171 - RNA, 19 nt, Artificial Sequence
  Description of Artificial Sequence: Synthetic oligonucleotide
  Antisense strand to SEQ ID NO: 2341170
uaacaagucauuuacuucu

SEQ ID NO: 2341172 - RNA, 19 nt, Artificial Sequence
  Description of Artificial Sequence: Synthetic oligonucleotide
  Sense strand starting at position 3874 of SEQ ID NO: 1885423
guaaaugacuuguuacaua

SEQ ID NO: 2341173 - RNA, 19 nt, Artificial Sequence
  Description of Artificial Sequence: Synthetic oligonucleotide
  Antisense strand to SEQ ID NO: 2341172
uauguaacaagucauuuac

SEQ ID NO: 2341174 - RNA, 19 nt, Artificial Sequence
  Description of Artificial Sequence: Synthetic oligonucleotide
  Sense strand starting at position 3908 of SEQ ID NO: 1885423
gcuuuauuacgcuaauaac

SEQ ID NO: 2341175 - RNA, 19 nt, Artificial Sequence
  Description of Artificial Sequence: Synthetic oligonucleotide
  Antisense strand to SEQ ID NO: 2341174
guuauuagcguaauaaagc

SEQ ID NO: 2341176 - RNA, 19 nt, Artificial Sequence
  Description of Artificial Sequence: Synthetic oligonucleotide
  Sense strand starting at position 3925 of SEQ ID NO: 1885423
acaauagaugccuauugcu

SEQ ID NO: 2341177 - RNA, 19 nt, Artificial Sequence
  Description of Artificial Sequence: Synthetic oligonucleotide
  Antisense strand to SEQ ID NO: 2341176
agcaauaggcaucuauugu

SEQ ID NO: 2341178 - RNA, 19 nt, Artificial Sequence
  Description of Artificial Sequence: Synthetic oligonucleotide
  Sense strand starting at position 3983 of SEQ ID NO: 1885423
ucguaauggcagcaucaaa

SEQ ID NO: 2341179 - RNA, 19 nt, Artificial Sequence
  Description of Artificial Sequence: Synthetic oligonucleotide
  Antisense strand to SEQ ID NO: 2341178
uuugaugcugccauuacga

SEQ ID NO: 2341180 - RNA, 19 nt, Artificial Sequence
  Description of Artificial Sequence: Synthetic oligonucleotide
  Sense strand starting at position 65 of SEQ ID NO: 1885424
gggauuaacagagguuagu

SEQ ID NO: 2341181 - RNA, 19 nt, Artificial Sequence
  Description of Artificial Sequence: Synthetic oligonucleotide
  Antisense strand to SEQ ID NO: 2341180
acuaaccucuguuaauccc

SEQ ID NO: 2341182 - RNA, 19 nt, Artificial Sequence
  Description of Artificial Sequence: Synthetic oligonucleotide
  Sense strand starting at position 119 of SEQ ID NO: 1885424
gguuguagcgggagugguu

SEQ ID NO: 2341183 - RNA, 19 nt, Artificial Sequence
  Description of Artificial Sequence: Synthetic oligonucleotide
  Antisense strand to SEQ ID NO: 2341182
aaccacucccgcuacaacc

SEQ ID NO: 2341184 - RNA, 19 nt, Artificial Sequence
  Description of Artificial Sequence: Synthetic oligonucleotide
  Sense strand starting at position 126 of SEQ ID NO: 1885424
gcgggagugguuugauuug

SEQ ID NO: 2341185 - RNA, 19 nt, Artificial Sequence
  Description of Artificial Sequence: Synthetic oligonucleotide
  Antisense strand to SEQ ID NO: 2341184
caaaucaaaccacucccgc

SEQ ID NO: 2341186 - RNA, 19 nt, Artificial Sequence
  Description of Artificial Sequence: Synthetic oligonucleotide
  Sense strand starting at position 157 of SEQ ID NO: 1885424
gaggcccagaguugugaaa

SEQ ID NO: 2341187 - RNA, 19 nt, Artificial Sequence
  Description of Artificial Sequence: Synthetic oligonucleotide
  Antisense strand to SEQ ID NO: 2341186
uuucacaacucugggccuc

SEQ ID NO: 2341188 - RNA, 19 nt, Artificial Sequence
  Description of Artificial Sequence: Synthetic oligonucleotide
  Sense strand starting at position 235 of SEQ ID NO: 1885424
ggaagaggauucuugcuga

SEQ ID NO: 2341189 - RNA, 19 nt, Artificial Sequence
  Description of Artificial Sequence: Synthetic oligonucleotide
  Antisense strand to SEQ ID NO: 2341188
ucagcaagaauccucuucc

SEQ ID NO: 2341190 - RNA, 19 nt, Artificial Sequence
  Description of Artificial Sequence: Synthetic oligonucleotide
  Sense strand starting at position 238 of SEQ ID NO: 1885424
agaggauucuugcugaaau

SEQ ID NO: 2341191 - RNA, 19 nt, Artificial Sequence
  Description of Artificial Sequence: Synthetic oligonucleotide
  Antisense strand to SEQ ID NO: 2341190
auuucagcaagaauccucu

SEQ ID NO: 2341192 - RNA, 19 nt, Artificial Sequence
  Description of Artificial Sequence: Synthetic oligonucleotide
  Sense strand starting at position 240 of SEQ ID NO: 1885424
aggauucuugcugaaaucu

SEQ ID NO: 2341193 - RNA, 19 nt, Artificial Sequence
  Description of Artificial Sequence: Synthetic oligonucleotide
  Antisense strand to SEQ ID NO: 2341192
agauuucagcaagaauccu

SEQ ID NO: 2341194 - RNA, 19 nt, Artificial Sequence
  Description of Artificial Sequence: Synthetic oligonucleotide
  Sense strand starting at position 356 of SEQ ID NO: 1885424
ugauuagagcauuagccau

SEQ ID NO: 2341195 - RNA, 19 nt, Artificial Sequence
  Description of Artificial Sequence: Synthetic oligonucleotide
  Antisense strand to SEQ ID NO: 2341194
auggcuaaugcucuaauca

SEQ ID NO: 2341196 - RNA, 19 nt, Artificial Sequence
  Description of Artificial Sequence: Synthetic oligonucleotide
  Sense strand starting at position 720 of SEQ ID NO: 1885424
guuaucuccucugugaaca

SEQ ID NO: 2341197 - RNA, 19 nt, Artificial Sequence
  Description of Artificial Sequence: Synthetic oligonucleotide
  Antisense strand to SEQ ID NO: 2341196
uguucacagaggagauaac

SEQ ID NO: 2341198 - RNA, 19 nt, Artificial Sequence
  Description of Artificial Sequence: Synthetic oligonucleotide
  Sense strand starting at position 839 of SEQ ID NO: 1885424
auguguauuucugacauuu

SEQ ID NO: 2341199 - RNA, 19 nt, Artificial Sequence
  Description of Artificial Sequence: Synthetic oligonucleotide
  Antisense strand to SEQ ID NO: 2341198
aaaugucagaaauacacau

SEQ ID NO: 2341200 - RNA, 19 nt, Artificial Sequence
  Description of Artificial Sequence: Synthetic oligonucleotide
  Sense strand starting at position 841 of SEQ ID NO: 1885424
guguauuucugacauuugu

SEQ ID NO: 2341201 - RNA, 19 nt, Artificial Sequence
  Description of Artificial Sequence: Synthetic oligonucleotide
  Antisense strand to SEQ ID NO: 2341200
acaaaugucagaaauacac

SEQ ID NO: 2341202 - RNA, 19 nt, Artificial Sequence
  Description of Artificial Sequence: Synthetic oligonucleotide
  Sense strand starting at position 886 of SEQ ID NO: 1885424
gagcgugucacauaaagua

SEQ ID NO: 2341203 - RNA, 19 nt, Artificial Sequence
  Description of Artificial Sequence: Synthetic oligonucleotide
  Antisense strand to SEQ ID NO: 2341202
uacuuuaugugacacgcuc

SEQ ID NO: 2341204 - RNA, 19 nt, Artificial Sequence
  Description of Artificial Sequence: Synthetic oligonucleotide
  Sense strand starting at position 1012 of SEQ ID NO: 1885424
aguagaggcuccuuguaag

SEQ ID NO: 2341205 - RNA, 19 nt, Artificial Sequence
  Description of Artificial Sequence: Synthetic oligonucleotide
  Antisense strand to SEQ ID NO: 2341204
cuuacaaggagccucuacu

SEQ ID NO: 2341206 - RNA, 19 nt, Artificial Sequence
  Description of Artificial Sequence: Synthetic oligonucleotide
  Sense strand starting at position 1022 of SEQ ID NO: 1885424
ccuuguaagcuggaauucu

SEQ ID NO: 2341207 - RNA, 19 nt, Artificial Sequence
  Description of Artificial Sequence: Synthetic oligonucleotide
  Antisense strand to SEQ ID NO: 2341206
agaauuccagcuuacaagg

SEQ ID NO: 2341208 - RNA, 19 nt, Artificial Sequence
  Description of Artificial Sequence: Synthetic oligonucleotide
  Sense strand starting at position 1185 of SEQ ID NO: 1885424
agucgacuucccuacgacu

SEQ ID NO: 2341209 - RNA, 19 nt, Artificial Sequence
  Description of Artificial Sequence: Synthetic oligonucleotide
  Antisense strand to SEQ ID NO: 2341208
agucguagggaagucgacu

SEQ ID NO: 2341210 - RNA, 19 nt, Artificial Sequence
  Description of Artificial Sequence: Synthetic oligonucleotide
  Sense strand starting at position 1696 of SEQ ID NO: 1885424
aguagaagcuccuuauaag

SEQ ID NO: 2341211 - RNA, 19 nt, Artificial Sequence
  Description of Artificial Sequence: Synthetic oligonucleotide
  Antisense strand to SEQ ID NO: 2341210
cuuauaaggagcuucuacu

SEQ ID NO: 2341212 - RNA, 19 nt, Artificial Sequence
  Description of Artificial Sequence: Synthetic oligonucleotide
  Sense strand starting at position 1697 of SEQ ID NO: 1885424
guagaagcuccuuauaagu

SEQ ID NO: 2341213 - RNA, 19 nt, Artificial Sequence
  Description of Artificial Sequence: Synthetic oligonucleotide
  Antisense strand to SEQ ID NO: 2341212
acuuauaaggagcuucuac

SEQ ID NO: 2341214 - RNA, 19 nt, Artificial Sequence
  Description of Artificial Sequence: Synthetic oligonucleotide
  Sense strand starting at position 1758 of SEQ ID NO: 1885424
aacauuaugcuuugaguga

SEQ ID NO: 2341215 - RNA, 19 nt, Artificial Sequence
  Description of Artificial Sequence: Synthetic oligonucleotide
  Antisense strand to SEQ ID NO: 2341214
ucacucaaagcauaauguu

SEQ ID NO: 2341216 - RNA, 19 nt, Artificial Sequence
  Description of Artificial Sequence: Synthetic oligonucleotide
  Sense strand starting at position 1762 of SEQ ID NO: 1885424
uuaugcuuugagugaugau

SEQ ID NO: 2341217 - RNA, 19 nt, Artificial Sequence
  Description of Artificial Sequence: Synthetic oligonucleotide
  Antisense strand to SEQ ID NO: 2341216
aucaucacucaaagcauaa

SEQ ID NO: 2341218 - RNA, 19 nt, Artificial Sequence
  Description of Artificial Sequence: Synthetic oligonucleotide
  Sense strand starting at position 2021 of SEQ ID NO: 1885424
ugcagucaaguauagcaaa

SEQ ID NO: 2341219 - RNA, 19 nt, Artificial Sequence
  Description of Artificial Sequence: Synthetic oligonucleotide
  Antisense strand to SEQ ID NO: 2341218
uuugcuauacuugacugca

SEQ ID NO: 2341220 - RNA, 19 nt, Artificial Sequence
  Description of Artificial Sequence: Synthetic oligonucleotide
  Sense strand starting at position 2069 of SEQ ID NO: 1885424
gucagaagacauggguuga

SEQ ID NO: 2341221 - RNA, 19 nt, Artificial Sequence
  Description of Artificial Sequence: Synthetic oligonucleotide
  Antisense strand to SEQ ID NO: 2341220
ucaacccaugucuucugac

SEQ ID NO: 2341222 - RNA, 19 nt, Artificial Sequence
  Description of Artificial Sequence: Synthetic oligonucleotide
  Sense strand starting at position 2101 of SEQ ID NO: 1885424
aaauuuacuguucguuuga

SEQ ID NO: 2341223 - RNA, 19 nt, Artificial Sequence
  Description of Artificial Sequence: Synthetic oligonucleotide
  Antisense strand to SEQ ID NO: 2341222
ucaaacgaacaguaaauuu

SEQ ID NO: 2341224 - RNA, 19 nt, Artificial Sequence
  Description of Artificial Sequence: Synthetic oligonucleotide
  Sense strand starting at position 2111 of SEQ ID NO: 1885424
uucguuugaccugggaaag

SEQ ID NO: 2341225 - RNA, 19 nt, Artificial Sequence
  Description of Artificial Sequence: Synthetic oligonucleotide
  Antisense strand to SEQ ID NO: 2341224
cuuucccaggucaaacgaa

SEQ ID NO: 2341226 - RNA, 19 nt, Artificial Sequence
  Description of Artificial Sequence: Synthetic oligonucleotide
  Sense strand starting at position 2112 of SEQ ID NO: 1885424
ucguuugaccugggaaagu

SEQ ID NO: 2341227 - RNA, 19 nt, Artificial Sequence
  Description of Artificial Sequence: Synthetic oligonucleotide
  Antisense strand to SEQ ID NO: 2341226
acuuucccaggucaaacga

SEQ ID NO: 2341228 - RNA, 19 nt, Artificial Sequence
  Description of Artificial Sequence: Synthetic oligonucleotide
  Sense strand starting at position 2215 of SEQ ID NO: 1885424
augcaauagagugggcauu

SEQ ID NO: 2341229 - RNA, 19 nt, Artificial Sequence
  Description of Artificial Sequence: Synthetic oligonucleotide
  Antisense strand to SEQ ID NO: 2341228
aaugcccacucuauugcau

SEQ ID NO: 2341230 - RNA, 19 nt, Artificial Sequence
  Description of Artificial Sequence: Synthetic oligonucleotide
  Sense strand starting at position 2436 of SEQ ID NO: 1885424
ggaaauguuguaugagaag

SEQ ID NO: 2341231 - RNA, 19 nt, Artificial Sequence
  Description of Artificial Sequence: Synthetic oligonucleotide
  Antisense strand to SEQ ID NO: 2341230
cuucucauacaacauuucc

SEQ ID NO: 2341232 - RNA, 19 nt, Artificial Sequence
  Description of Artificial Sequence: Synthetic oligonucleotide
  Sense strand starting at position 2476 of SEQ ID NO: 1885424
gcuggagaacucuguuaaa

SEQ ID NO: 2341233 - RNA, 19 nt, Artificial Sequence
  Description of Artificial Sequence: Synthetic oligonucleotide
  Antisense strand to SEQ ID NO: 2341232
uuuaacagaguucuccagc

SEQ ID NO: 2341234 - RNA, 19 nt, Artificial Sequence
  Description of Artificial Sequence: Synthetic oligonucleotide
  Sense strand starting at position 2489 of SEQ ID NO: 1885424
guuaaagauucuuugaaac

SEQ ID NO: 2341235 - RNA, 19 nt, Artificial Sequence
  Description of Artificial Sequence: Synthetic oligonucleotide
  Antisense strand to SEQ ID NO: 2341234
guuucaaagaaucuuuaac

SEQ ID NO: 2341236 - RNA, 19 nt, Artificial Sequence
  Description of Artificial Sequence: Synthetic oligonucleotide
  Sense strand starting at position 2877 of SEQ ID NO: 1885424
cgagaauaauguucuaccu

SEQ ID NO: 2341237 - RNA, 19 nt, Artificial Sequence
  Description of Artificial Sequence: Synthetic oligonucleotide
  Antisense strand to SEQ ID NO: 2341236
agguagaacauuauucucg

SEQ ID NO: 2341238 - RNA, 19 nt, Artificial Sequence
  Description of Artificial Sequence: Synthetic oligonucleotide
  Sense strand starting at position 3624 of SEQ ID NO: 1885424
guuccuguacuguaaauuc

SEQ ID NO: 2341239 - RNA, 19 nt, Artificial Sequence
  Description of Artificial Sequence: Synthetic oligonucleotide
  Antisense strand to SEQ ID NO: 2341238
gaauuuacaguacaggaac

SEQ ID NO: 2341240 - RNA, 19 nt, Artificial Sequence
  Description of Artificial Sequence: Synthetic oligonucleotide
  Sense strand starting at position 3641 of SEQ ID NO: 1885424
ucuuccuuucuguguauuu

SEQ ID NO: 2341241 - RNA, 19 nt, Artificial Sequence
  Description of Artificial Sequence: Synthetic oligonucleotide
  Antisense strand to SEQ ID NO: 2341240
aaauacacagaaaggaaga

SEQ ID NO: 2341242 - RNA, 19 nt, Artificial Sequence
  Description of Artificial Sequence: Synthetic oligonucleotide
  Sense strand starting at position 3642 of SEQ ID NO: 1885424
cuuccuuucuguguauuua

SEQ ID NO: 2341243 - RNA, 19 nt, Artificial Sequence
  Description of Artificial Sequence: Synthetic oligonucleotide
  Antisense strand to SEQ ID NO: 2341242
uaaauacacagaaaggaag

SEQ ID NO: 2341244 - RNA, 19 nt, Artificial Sequence
  Description of Artificial Sequence: Synthetic oligonucleotide
  Sense strand starting at position 3676 of SEQ ID NO: 1885424
gagggauguugguuaccuc

SEQ ID NO: 2341245 - RNA, 19 nt, Artificial Sequence
  Description of Artificial Sequence: Synthetic oligonucleotide
  Antisense strand to SEQ ID NO: 2341244
gagguaaccaacaucccuc

SEQ ID NO: 2341246 - RNA, 19 nt, Artificial Sequence
  Description of Artificial Sequence: Synthetic oligonucleotide
  Sense strand starting at position 3726 of SEQ ID NO: 1885424
gucaaagggaauuguuuga

SEQ ID NO: 2341247 - RNA, 19 nt, Artificial Sequence
  Description of Artificial Sequence: Synthetic oligonucleotide
  Antisense strand to SEQ ID NO: 2341246
ucaaacaauucccuuugac

SEQ ID NO: 2341248 - RNA, 19 nt, Artificial Sequence
  Description of Artificial Sequence: Synthetic oligonucleotide
  Sense strand starting at position 3732 of SEQ ID NO: 1885424
gggaauuguuugaaagggu

SEQ ID NO: 2341249 - RNA, 19 nt, Artificial Sequence
  Description of Artificial Sequence: Synthetic oligonucleotide
  Antisense strand to SEQ ID NO: 2341248
acccuuucaaacaauuccc

SEQ ID NO: 2341250 - RNA, 19 nt, Artificial Sequence
  Description of Artificial Sequence: Synthetic oligonucleotide
  Sense strand starting at position 3769 of SEQ ID NO: 1885424
ggcaauaucaagugggaug

SEQ ID NO: 2341251 - RNA, 19 nt, Artificial Sequence
  Description of Artificial Sequence: Synthetic oligonucleotide
  Antisense strand to SEQ ID NO: 2341250
caucccacuugauauugcc

SEQ ID NO: 2341252 - RNA, 19 nt, Artificial Sequence
  Description of Artificial Sequence: Synthetic oligonucleotide
  Sense strand starting at position 3770 of SEQ ID NO: 1885424
gcaauaucaagugggaugu

SEQ ID NO: 2341253 - RNA, 19 nt, Artificial Sequence
  Description of Artificial Sequence: Synthetic oligonucleotide
  Antisense strand to SEQ ID NO: 2341252
acaucccacuugauauugc

SEQ ID NO: 2341254 - RNA, 19 nt, Artificial Sequence
  Description of Artificial Sequence: Synthetic oligonucleotide
  Sense strand starting at position 3806 of SEQ ID NO: 1885424
ugugauccuccagggcuaa

SEQ ID NO: 2341255 - RNA, 19 nt, Artificial Sequence
  Description of Artificial Sequence: Synthetic oligonucleotide
  Antisense strand to SEQ ID NO: 2341254
uuagcccuggaggaucaca

SEQ ID NO: 2341256 - RNA, 19 nt, Artificial Sequence
  Description of Artificial Sequence: Synthetic oligonucleotide
  Sense strand starting at position 3807 of SEQ ID NO: 1885424
gugauccuccagggcuaaa

SEQ ID NO: 2341257 - RNA, 19 nt, Artificial Sequence
  Description of Artificial Sequence: Synthetic oligonucleotide
  Antisense strand to SEQ ID NO: 2341256
uuuagcccuggaggaucac

SEQ ID NO: 2341258 - RNA, 19 nt, Artificial Sequence
  Description of Artificial Sequence: Synthetic oligonucleotide
  Sense strand starting at position 3857 of SEQ ID NO: 1885424
aggccuagacacuguagua

SEQ ID NO: 2341259 - RNA, 19 nt, Artificial Sequence
  Description of Artificial Sequence: Synthetic oligonucleotide
  Antisense strand to SEQ ID NO: 2341258
uacuacagugucuaggccu

SEQ ID NO: 2341260 - RNA, 19 nt, Artificial Sequence
  Description of Artificial Sequence: Synthetic oligonucleotide
  Sense strand starting at position 30 of SEQ ID NO: 1885425
cagagauacuugccuguaa

SEQ ID NO: 2341261 - RNA, 19 nt, Artificial Sequence
  Description of Artificial Sequence: Synthetic oligonucleotide
  Antisense strand to SEQ ID NO: 2341260
uuacaggcaaguaucucug

SEQ ID NO: 2341262 - RNA, 19 nt, Artificial Sequence
  Description of Artificial Sequence: Synthetic oligonucleotide
  Sense strand starting at position 31 of SEQ ID NO: 1885425
agagauacuugccuguaau

SEQ ID NO: 2341263 - RNA, 19 nt, Artificial Sequence
  Description of Artificial Sequence: Synthetic oligonucleotide
  Antisense strand to SEQ ID NO: 2341262
auuacaggcaaguaucucu

SEQ ID NO: 2341264 - RNA, 19 nt, Artificial Sequence
  Description of Artificial Sequence: Synthetic oligonucleotide
  Sense strand starting at position 32 of SEQ ID NO: 1885425
gagauacuugccuguaauu

SEQ ID NO: 2341265 - RNA, 19 nt, Artificial Sequence
  Description of Artificial Sequence: Synthetic oligonucleotide
  Antisense strand to SEQ ID NO: 2341264
aauuacaggcaaguaucuc

SEQ ID NO: 2341266 - RNA, 19 nt, Artificial Sequence
  Description of Artificial Sequence: Synthetic oligonucleotide
  Sense strand starting at position 96 of SEQ ID NO: 1885425
gcuugcuuucuagaaugaa

SEQ ID NO: 2341267 - RNA, 19 nt, Artificial Sequence
  Description of Artificial Sequence: Synthetic oligonucleotide
  Antisense strand to SEQ ID NO: 2341266
uucauucuagaaagcaagc

SEQ ID NO: 2341268 - RNA, 19 nt, Artificial Sequence
  Description of Artificial Sequence: Synthetic oligonucleotide
  Sense strand starting at position 169 of SEQ ID NO: 1885425
gccagaucuucuuuguaaa

SEQ ID NO: 2341269 - RNA, 19 nt, Artificial Sequence
  Description of Artificial Sequence: Synthetic oligonucleotide
  Antisense strand to SEQ ID NO: 2341268
uuuacaaagaagaucuggc

SEQ ID NO: 2341270 - RNA, 19 nt, Artificial Sequence
  Description of Artificial Sequence: Synthetic oligonucleotide
  Sense strand starting at position 179 of SEQ ID NO: 1885425
cuuuguaaaucuguuagaa

SEQ ID NO: 2341271 - RNA, 19 nt, Artificial Sequence
  Description of Artificial Sequence: Synthetic oligonucleotide
  Antisense strand to SEQ ID NO: 2341270
uucuaacagauuuacaaag

SEQ ID NO: 2341272 - RNA, 19 nt, Artificial Sequence
  Description of Artificial Sequence: Synthetic oligonucleotide
  Sense strand starting at position 192 of SEQ ID NO: 1885425
uuagaauaugacggugaau

SEQ ID NO: 2341273 - RNA, 19 nt, Artificial Sequence
  Description of Artificial Sequence: Synthetic oligonucleotide
  Antisense strand to SEQ ID NO: 2341272
auucaccgucauauucuaa

SEQ ID NO: 2341274 - RNA, 19 nt, Artificial Sequence
  Description of Artificial Sequence: Synthetic oligonucleotide
  Sense strand starting at position 453 of SEQ ID NO: 1885425
guuguuucugauuauccuu

SEQ ID NO: 2341275 - RNA, 19 nt, Artificial Sequence
  Description of Artificial Sequence: Synthetic oligonucleotide
  Antisense strand to SEQ ID NO: 2341274
aaggauaaucagaaacaac

SEQ ID NO: 2341276 - RNA, 19 nt, Artificial Sequence
  Description of Artificial Sequence: Synthetic oligonucleotide
  Sense strand starting at position 624 of SEQ ID NO: 1885425
uagcauuggcgauaguuua

SEQ ID NO: 2341277 - RNA, 19 nt, Artificial Sequence
  Description of Artificial Sequence: Synthetic oligonucleotide
  Antisense strand to SEQ ID NO: 2341276
uaaacuaucgccaaugcua

SEQ ID NO: 2341278 - RNA, 19 nt, Artificial Sequence
  Description of Artificial Sequence: Synthetic oligonucleotide
  Sense strand starting at position 760 of SEQ ID NO: 1885425
auguguugugucucucuuu

SEQ ID NO: 2341279 - RNA, 19 nt, Artificial Sequence
  Description of Artificial Sequence: Synthetic oligonucleotide
  Antisense strand to SEQ ID NO: 2341278
aaagagagacacaacacau

SEQ ID NO: 2341280 - RNA, 19 nt, Artificial Sequence
  Description of Artificial Sequence: Synthetic oligonucleotide
  Sense strand starting at position 923 of SEQ ID NO: 1885425
guugucugagacuaugguu

SEQ ID NO: 2341281 - RNA, 19 nt, Artificial Sequence
  Description of Artificial Sequence: Synthetic oligonucleotide
  Antisense strand to SEQ ID NO: 2341280
aaccauagucucagacaac

SEQ ID NO: 2341282 - RNA, 19 nt, Artificial Sequence
  Description of Artificial Sequence: Synthetic oligonucleotide
  Sense strand starting at position 931 of SEQ ID NO: 1885425
agacuaugguugguaugau

SEQ ID NO: 2341283 - RNA, 19 nt, Artificial Sequence
  Description of Artificial Sequence: Synthetic oligonucleotide
  Antisense strand to SEQ ID NO: 2341282
aucauaccaaccauagucu

SEQ ID NO: 2341284 - RNA, 19 nt, Artificial Sequence
  Description of Artificial Sequence: Synthetic oligonucleotide
  Sense strand starting at position 989 of SEQ ID NO: 1885425
aaguaaugcggucaaucuu

SEQ ID NO: 2341285 - RNA, 19 nt, Artificial Sequence
  Description of Artificial Sequence: Synthetic oligonucleotide
  Antisense strand to SEQ ID NO: 2341284
aagauugaccgcauuacuu

SEQ ID NO: 2341286 - RNA, 19 nt, Artificial Sequence
  Description of Artificial Sequence: Synthetic oligonucleotide
  Sense strand starting at position 996 of SEQ ID NO: 1885425
gcggucaaucuugaaguau

SEQ ID NO: 2341287 - RNA, 19 nt, Artificial Sequence
  Description of Artificial Sequence: Synthetic oligonucleotide
  Antisense strand to SEQ ID NO: 2341286
auacuucaagauugaccgc

SEQ ID NO: 2341288 - RNA, 19 nt, Artificial Sequence
  Description of Artificial Sequence: Synthetic oligonucleotide
  Sense strand starting at position 1011 of SEQ ID NO: 1885425
guaugcucuguguauaaua

SEQ ID NO: 2341289 - RNA, 19 nt, Artificial Sequence
  Description of Artificial Sequence: Synthetic oligonucleotide
  Antisense strand to SEQ ID NO: 2341288
uauuauacacagagcauac

SEQ ID NO: 2341290 - RNA, 19 nt, Artificial Sequence
  Description of Artificial Sequence: Synthetic oligonucleotide
  Sense strand starting at position 1013 of SEQ ID NO: 1885425
augcucuguguauaauaga

SEQ ID NO: 2341291 - RNA, 19 nt, Artificial Sequence
  Description of Artificial Sequence: Synthetic oligonucleotide
  Antisense strand to SEQ ID NO: 2341290
ucuauuauacacagagcau

SEQ ID NO: 2341292 - RNA, 19 nt, Artificial Sequence
  Description of Artificial Sequence: Synthetic oligonucleotide
  Sense strand starting at position 1037 of SEQ ID NO: 1885425
acauacauucugugguuaa

SEQ ID NO: 2341293 - RNA, 19 nt, Artificial Sequence
  Description of Artificial Sequence: Synthetic oligonucleotide
  Antisense strand to SEQ ID NO: 2341292
uuaaccacagaauguaugu

SEQ ID NO: 2341294 - RNA, 19 nt, Artificial Sequence
  Description of Artificial Sequence: Synthetic oligonucleotide
  Sense strand starting at position 1048 of SEQ ID NO: 1885425
gugguuaacaggugaagua

SEQ ID NO: 2341295 - RNA, 19 nt, Artificial Sequence
  Description of Artificial Sequence: Synthetic oligonucleotide
  Antisense strand to SEQ ID NO: 2341294
uacuucaccuguuaaccac

SEQ ID NO: 2341296 - RNA, 19 nt, Artificial Sequence
  Description of Artificial Sequence: Synthetic oligonucleotide
  Sense strand starting at position 1049 of SEQ ID NO: 1885425
ugguuaacaggugaaguau

SEQ ID NO: 2341297 - RNA, 19 nt, Artificial Sequence
  Description of Artificial Sequence: Synthetic oligonucleotide
  Antisense strand to SEQ ID NO: 2341296
auacuucaccuguuaacca

SEQ ID NO: 2341298 - RNA, 19 nt, Artificial Sequence
  Description of Artificial Sequence: Synthetic oligonucleotide
  Sense strand starting at position 1093 of SEQ ID NO: 1885425
uugucaaguguuggauuua

SEQ ID NO: 2341299 - RNA, 19 nt, Artificial Sequence
  Description of Artificial Sequence: Synthetic oligonucleotide
  Antisense strand to SEQ ID NO: 2341298
uaaauccaacacuugacaa

SEQ ID NO: 2341300 - RNA, 19 nt, Artificial Sequence
  Description of Artificial Sequence: Synthetic oligonucleotide
  Sense strand starting at position 1178 of SEQ ID NO: 1885425
gcuugugugguugucaagu

SEQ ID NO: 2341301 - RNA, 19 nt, Artificial Sequence
  Description of Artificial Sequence: Synthetic oligonucleotide
  Antisense strand to SEQ ID NO: 2341300
acuugacaaccacacaagc

SEQ ID NO: 2341302 - RNA, 19 nt, Artificial Sequence
  Description of Artificial Sequence: Synthetic oligonucleotide
  Sense strand starting at position 1227 of SEQ ID NO: 1885425
aaaucugggugcuccagua

SEQ ID NO: 2341303 - RNA, 19 nt, Artificial Sequence
  Description of Artificial Sequence: Synthetic oligonucleotide
  Antisense strand to SEQ ID NO: 2341302
uacuggagcacccagauuu

SEQ ID NO: 2341304 - RNA, 19 nt, Artificial Sequence
  Description of Artificial Sequence: Synthetic oligonucleotide
  Sense strand starting at position 1445 of SEQ ID NO: 1885425
gggugucacuacuugugaa

SEQ ID NO: 2341305 - RNA, 19 nt, Artificial Sequence
  Description of Artificial Sequence: Synthetic oligonucleotide
  Antisense strand to SEQ ID NO: 2341304
uucacaaguagugacaccc

SEQ ID NO: 2341306 - RNA, 19 nt, Artificial Sequence
  Description of Artificial Sequence: Synthetic oligonucleotide
  Sense strand starting at position 1446 of SEQ ID NO: 1885425
ggugucacuacuugugaaa

SEQ ID NO: 2341307 - RNA, 19 nt, Artificial Sequence
  Description of Artificial Sequence: Synthetic oligonucleotide
  Antisense strand to SEQ ID NO: 2341306
uuucacaaguagugacacc

SEQ ID NO: 2341308 - RNA, 19 nt, Artificial Sequence
  Description of Artificial Sequence: Synthetic oligonucleotide
  Sense strand starting at position 1571 of SEQ ID NO: 1885425
cucuguuacccagacaagu

SEQ ID NO: 2341309 - RNA, 19 nt, Artificial Sequence
  Description of Artificial Sequence: Synthetic oligonucleotide
  Antisense strand to SEQ ID NO: 2341308
acuugucuggguaacagag

SEQ ID NO: 2341310 - RNA, 19 nt, Artificial Sequence
  Description of Artificial Sequence: Synthetic oligonucleotide
  Sense strand starting at position 1912 of SEQ ID NO: 1885425
ggaacuaauuugugaauca

SEQ ID NO: 2341311 - RNA, 19 nt, Artificial Sequence
  Description of Artificial Sequence: Synthetic oligonucleotide
  Antisense strand to SEQ ID NO: 2341310
ugauucacaaauuaguucc

SEQ ID NO: 2341312 - RNA, 19 nt, Artificial Sequence
  Description of Artificial Sequence: Synthetic oligonucleotide
  Sense strand starting at position 1923 of SEQ ID NO: 1885425
gugaaucauccuugcucag

SEQ ID NO: 2341313 - RNA, 19 nt, Artificial Sequence
  Description of Artificial Sequence: Synthetic oligonucleotide
  Antisense strand to SEQ ID NO: 2341312
cugagcaaggaugauucac

SEQ ID NO: 2341314 - RNA, 19 nt, Artificial Sequence
  Description of Artificial Sequence: Synthetic oligonucleotide
  Sense strand starting at position 1942 of SEQ ID NO: 1885425
gggucauacuaaucuaugu

SEQ ID NO: 2341315 - RNA, 19 nt, Artificial Sequence
  Description of Artificial Sequence: Synthetic oligonucleotide
  Antisense strand to SEQ ID NO: 2341314
acauagauuaguaugaccc

SEQ ID NO: 2341316 - RNA, 19 nt, Artificial Sequence
  Description of Artificial Sequence: Synthetic oligonucleotide
  Sense strand starting at position 1986 of SEQ ID NO: 1885425
ugccgaaaugagcaugauu

SEQ ID NO: 2341317 - RNA, 19 nt, Artificial Sequence
  Description of Artificial Sequence: Synthetic oligonucleotide
  Antisense strand to SEQ ID NO: 2341316
aaucaugcucauuucggca

SEQ ID NO: 2341318 - RNA, 19 nt, Artificial Sequence
  Description of Artificial Sequence: Synthetic oligonucleotide
  Sense strand starting at position 2042 of SEQ ID NO: 1885425
guaaauaagcauuggauuc

SEQ ID NO: 2341319 - RNA, 19 nt, Artificial Sequence
  Description of Artificial Sequence: Synthetic oligonucleotide
  Antisense strand to SEQ ID NO: 2341318
gaauccaaugcuuauuuac

SEQ ID NO: 2341320 - RNA, 19 nt, Artificial Sequence
  Description of Artificial Sequence: Synthetic oligonucleotide
  Sense strand starting at position 2548 of SEQ ID NO: 1885425
ccauaucagcgauaaggca

SEQ ID NO: 2341321 - RNA, 19 nt, Artificial Sequence
  Description of Artificial Sequence: Synthetic oligonucleotide
  Antisense strand to SEQ ID NO: 2341320
ugccuuaucgcugauaugg

SEQ ID NO: 2341322 - RNA, 19 nt, Artificial Sequence
  Description of Artificial Sequence: Synthetic oligonucleotide
  Sense strand starting at position 2646 of SEQ ID NO: 1885425
ugacuaacuguuuagcaca

SEQ ID NO: 2341323 - RNA, 19 nt, Artificial Sequence
  Description of Artificial Sequence: Synthetic oligonucleotide
  Antisense strand to SEQ ID NO: 2341322
ugugcuaaacaguuaguca

SEQ ID NO: 2341324 - RNA, 19 nt, Artificial Sequence
  Description of Artificial Sequence: Synthetic oligonucleotide
  Sense strand starting at position 2886 of SEQ ID NO: 1885425
auuugagaaugagauguaa

SEQ ID NO: 2341325 - RNA, 19 nt, Artificial Sequence
  Description of Artificial Sequence: Synthetic oligonucleotide
  Antisense strand to SEQ ID NO: 2341324
uuacaucucauucucaaau

SEQ ID NO: 2341326 - RNA, 19 nt, Artificial Sequence
  Description of Artificial Sequence: Synthetic oligonucleotide
  Sense strand starting at position 2950 of SEQ ID NO: 1885425
ggcuuaauggcauaugcaa

SEQ ID NO: 2341327 - RNA, 19 nt, Artificial Sequence
  Description of Artificial Sequence: Synthetic oligonucleotide
  Antisense strand to SEQ ID NO: 2341326
uugcauaugccauuaagcc

SEQ ID NO: 2341328 - RNA, 19 nt, Artificial Sequence
  Description of Artificial Sequence: Synthetic oligonucleotide
  Sense strand starting at position 3139 of SEQ ID NO: 1885425
gggaauuugugagggacag

SEQ ID NO: 2341329 - RNA, 19 nt, Artificial Sequence
  Description of Artificial Sequence: Synthetic oligonucleotide
  Antisense strand to SEQ ID NO: 2341328
cugucccucacaaauuccc

SEQ ID NO: 2341330 - RNA, 19 nt, Artificial Sequence
  Description of Artificial Sequence: Synthetic oligonucleotide
  Sense strand starting at position 3281 of SEQ ID NO: 1885425
aguggugaagcuugagauu

SEQ ID NO: 2341331 - RNA, 19 nt, Artificial Sequence
  Description of Artificial Sequence: Synthetic oligonucleotide
  Antisense strand to SEQ ID NO: 2341330
aaucucaagcuucaccacu

SEQ ID NO: 2341332 - RNA, 19 nt, Artificial Sequence
  Description of Artificial Sequence: Synthetic oligonucleotide
  Sense strand starting at position 3612 of SEQ ID NO: 1885425
acauuuagugguugcucua

SEQ ID NO: 2341333 - RNA, 19 nt, Artificial Sequence
  Description of Artificial Sequence: Synthetic oligonucleotide
  Antisense strand to SEQ ID NO: 2341332
uagagcaaccacuaaaugu

SEQ ID NO: 2341334 - RNA, 19 nt, Artificial Sequence
  Description of Artificial Sequence: Synthetic oligonucleotide
  Sense strand starting at position 3619 of SEQ ID NO: 1885425
gugguugcucuagaacaua

SEQ ID NO: 2341335 - RNA, 19 nt, Artificial Sequence
  Description of Artificial Sequence: Synthetic oligonucleotide
  Antisense strand to SEQ ID NO: 2341334
uauguucuagagcaaccac

SEQ ID NO: 2341336 - RNA, 19 nt, Artificial Sequence
  Description of Artificial Sequence: Synthetic oligonucleotide
  Sense strand starting at position 3622 of SEQ ID NO: 1885425
guugcucuagaacauaaau

SEQ ID NO: 2341337 - RNA, 19 nt, Artificial Sequence
  Description of Artificial Sequence: Synthetic oligonucleotide
  Antisense strand to SEQ ID NO: 2341336
auuuauguucuagagcaac

SEQ ID NO: 2341338 - RNA, 19 nt, Artificial Sequence
  Description of Artificial Sequence: Synthetic oligonucleotide
  Sense strand starting at position 3814 of SEQ ID NO: 1885425
ugauuaguggcccagcgaa

SEQ ID NO: 2341339 - RNA, 19 nt, Artificial Sequence
  Description of Artificial Sequence: Synthetic oligonucleotide
  Antisense strand to SEQ ID NO: 2341338
uucgcugggccacuaauca

SEQ ID NO: 2341340 - RNA, 19 nt, Artificial Sequence
  Description of Artificial Sequence: Synthetic oligonucleotide
  Sense strand starting at position 100 of SEQ ID NO: 1885426
gugauauuagguuauuaug

SEQ ID NO: 2341341 - RNA, 19 nt, Artificial Sequence
  Description of Artificial Sequence: Synthetic oligonucleotide
  Antisense strand to SEQ ID NO: 2341340
cauaauaaccuaauaucac

SEQ ID NO: 2341342 - RNA, 19 nt, Artificial Sequence
  Description of Artificial Sequence: Synthetic oligonucleotide
  Sense strand starting at position 102 of SEQ ID NO: 1885426
gauauuagguuauuaugac

SEQ ID NO: 2341343 - RNA, 19 nt, Artificial Sequence
  Description of Artificial Sequence: Synthetic oligonucleotide
  Antisense strand to SEQ ID NO: 2341342
gucauaauaaccuaauauc

SEQ ID NO: 2341344 - RNA, 19 nt, Artificial Sequence
  Description of Artificial Sequence: Synthetic oligonucleotide
  Sense strand starting at position 444 of SEQ ID NO: 1885426
agaguaaguguauauggca

SEQ ID NO: 2341345 - RNA, 19 nt, Artificial Sequence
  Description of Artificial Sequence: Synthetic oligonucleotide
  Antisense strand to SEQ ID NO: 2341344
ugccauauacacuuacucu

SEQ ID NO: 2341346 - RNA, 19 nt, Artificial Sequence
  Description of Artificial Sequence: Synthetic oligonucleotide
  Sense strand starting at position 452 of SEQ ID NO: 1885426
uguauauggcaaugagaag

SEQ ID NO: 2341347 - RNA, 19 nt, Artificial Sequence
  Description of Artificial Sequence: Synthetic oligonucleotide
  Antisense strand to SEQ ID NO: 2341346
cuucucauugccauauaca

SEQ ID NO: 2341348 - RNA, 19 nt, Artificial Sequence
  Description of Artificial Sequence: Synthetic oligonucleotide
  Sense strand starting at position 477 of SEQ ID NO: 1885426
uauccuguuguuugcaaga

SEQ ID NO: 2341349 - RNA, 19 nt, Artificial Sequence
  Description of Artificial Sequence: Synthetic oligonucleotide
  Antisense strand to SEQ ID NO: 2341348
ucuugcaaacaacaggaua

SEQ ID NO: 2341350 - RNA, 19 nt, Artificial Sequence
  Description of Artificial Sequence: Synthetic oligonucleotide
  Sense strand starting at position 479 of SEQ ID NO: 1885426
uccuguuguuugcaagaug

SEQ ID NO: 2341351 - RNA, 19 nt, Artificial Sequence
  Description of Artificial Sequence: Synthetic oligonucleotide
  Antisense strand to SEQ ID NO: 2341350
caucuugcaaacaacagga

SEQ ID NO: 2341352 - RNA, 19 nt, Artificial Sequence
  Description of Artificial Sequence: Synthetic oligonucleotide
  Sense strand starting at position 498 of SEQ ID NO: 1885426
aggaguucuguauauauug

SEQ ID NO: 2341353 - RNA, 19 nt, Artificial Sequence
  Description of Artificial Sequence: Synthetic oligonucleotide
  Antisense strand to SEQ ID NO: 2341352
caauauauacagaacuccu

SEQ ID NO: 2341354 - RNA, 19 nt, Artificial Sequence
  Description of Artificial Sequence: Synthetic oligonucleotide
  Sense strand starting at position 506 of SEQ ID NO: 1885426
uguauauauugaucagguc

SEQ ID NO: 2341355 - RNA, 19 nt, Artificial Sequence
  Description of Artificial Sequence: Synthetic oligonucleotide
  Antisense strand to SEQ ID NO: 2341354
gaccugaucaauauauaca

SEQ ID NO: 2341356 - RNA, 19 nt, Artificial Sequence
  Description of Artificial Sequence: Synthetic oligonucleotide
  Sense strand starting at position 507 of SEQ ID NO: 1885426
guauauauugaucaggucu

SEQ ID NO: 2341357 - RNA, 19 nt, Artificial Sequence
  Description of Artificial Sequence: Synthetic oligonucleotide
  Antisense strand to SEQ ID NO: 2341356
agaccugaucaauauauac

SEQ ID NO: 2341358 - RNA, 19 nt, Artificial Sequence
  Description of Artificial Sequence: Synthetic oligonucleotide
  Sense strand starting at position 514 of SEQ ID NO: 1885426
uugaucaggucugcuugau

SEQ ID NO: 2341359 - RNA, 19 nt, Artificial Sequence
  Description of Artificial Sequence: Synthetic oligonucleotide
  Antisense strand to SEQ ID NO: 2341358
aucaagcagaccugaucaa

SEQ ID NO: 2341360 - RNA, 19 nt, Artificial Sequence
  Description of Artificial Sequence: Synthetic oligonucleotide
  Sense strand starting at position 585 of SEQ ID NO: 1885426
uccaucuaacauugucagu

SEQ ID NO: 2341361 - RNA, 19 nt, Artificial Sequence
  Description of Artificial Sequence: Synthetic oligonucleotide
  Antisense strand to SEQ ID NO: 2341360
acugacaauguuagaugga

SEQ ID NO: 2341362 - RNA, 19 nt, Artificial Sequence
  Description of Artificial Sequence: Synthetic oligonucleotide
  Sense strand starting at position 780 of SEQ ID NO: 1885426
uucugauccuuguugguuu

SEQ ID NO: 2341363 - RNA, 19 nt, Artificial Sequence
  Description of Artificial Sequence: Synthetic oligonucleotide
  Antisense strand to SEQ ID NO: 2341362
aaaccaacaaggaucagaa

SEQ ID NO: 2341364 - RNA, 19 nt, Artificial Sequence
  Description of Artificial Sequence: Synthetic oligonucleotide
  Sense strand starting at position 781 of SEQ ID NO: 1885426
ucugauccuuguugguuua

SEQ ID NO: 2341365 - RNA, 19 nt, Artificial Sequence
  Description of Artificial Sequence: Synthetic oligonucleotide
  Antisense strand to SEQ ID NO: 2341364
uaaaccaacaaggaucaga

SEQ ID NO: 2341366 - RNA, 19 nt, Artificial Sequence
  Description of Artificial Sequence: Synthetic oligonucleotide
  Sense strand starting at position 782 of SEQ ID NO: 1885426
cugauccuuguugguuuaa

SEQ ID NO: 2341367 - RNA, 19 nt, Artificial Sequence
  Description of Artificial Sequence: Synthetic oligonucleotide
  Antisense strand to SEQ ID NO: 2341366
uuaaaccaacaaggaucag

SEQ ID NO: 2341368 - RNA, 19 nt, Artificial Sequence
  Description of Artificial Sequence: Synthetic oligonucleotide
  Sense strand starting at position 877 of SEQ ID NO: 1885426
ucccuuuauggugaaccua

SEQ ID NO: 2341369 - RNA, 19 nt, Artificial Sequence
  Description of Artificial Sequence: Synthetic oligonucleotide
  Antisense strand to SEQ ID NO: 2341368
uagguucaccauaaaggga

SEQ ID NO: 2341370 - RNA, 19 nt, Artificial Sequence
  Description of Artificial Sequence: Synthetic oligonucleotide
  Sense strand starting at position 1218 of SEQ ID NO: 1885426
ucauccuuugcuugucuga

SEQ ID NO: 2341371 - RNA, 19 nt, Artificial Sequence
  Description of Artificial Sequence: Synthetic oligonucleotide
  Antisense strand to SEQ ID NO: 2341370
ucagacaagcaaaggauga

SEQ ID NO: 2341372 - RNA, 19 nt, Artificial Sequence
  Description of Artificial Sequence: Synthetic oligonucleotide
  Sense strand starting at position 1220 of SEQ ID NO: 1885426
auccuuugcuugucugaaa

SEQ ID NO: 2341373 - RNA, 19 nt, Artificial Sequence
  Description of Artificial Sequence: Synthetic oligonucleotide
  Antisense strand to SEQ ID NO: 2341372
uuucagacaagcaaaggau

SEQ ID NO: 2341374 - RNA, 19 nt, Artificial Sequence
  Description of Artificial Sequence: Synthetic oligonucleotide
  Sense strand starting at position 1249 of SEQ ID NO: 1885426
uucucccucgcuuaugaaa

SEQ ID NO: 2341375 - RNA, 19 nt, Artificial Sequence
  Description of Artificial Sequence: Synthetic oligonucleotide
  Antisense strand to SEQ ID NO: 2341374
uuucauaagcgagggagaa

SEQ ID NO: 2341376 - RNA, 19 nt, Artificial Sequence
  Description of Artificial Sequence: Synthetic oligonucleotide
  Sense strand starting at position 1387 of SEQ ID NO: 1885426
gacggauuucccuguguag

SEQ ID NO: 2341377 - RNA, 19 nt, Artificial Sequence
  Description of Artificial Sequence: Synthetic oligonucleotide
  Antisense strand to SEQ ID NO: 2341376
cuacacagggaaauccguc

SEQ ID NO: 2341378 - RNA, 19 nt, Artificial Sequence
  Description of Artificial Sequence: Synthetic oligonucleotide
  Sense strand starting at position 1389 of SEQ ID NO: 1885426
cggauuucccuguguaggu

SEQ ID NO: 2341379 - RNA, 19 nt, Artificial Sequence
  Description of Artificial Sequence: Synthetic oligonucleotide
  Antisense strand to SEQ ID NO: 2341378
accuacacagggaaauccg

SEQ ID NO: 2341380 - RNA, 19 nt, Artificial Sequence
  Description of Artificial Sequence: Synthetic oligonucleotide
  Sense strand starting at position 1489 of SEQ ID NO: 1885426
cguugaucuucuugugaag

SEQ ID NO: 2341381 - RNA, 19 nt, Artificial Sequence
  Description of Artificial Sequence: Synthetic oligonucleotide
  Antisense strand to SEQ ID NO: 2341380
cuucacaagaagaucaacg

SEQ ID NO: 2341382 - RNA, 19 nt, Artificial Sequence
  Description of Artificial Sequence: Synthetic oligonucleotide
  Sense strand starting at position 1808 of SEQ ID NO: 1885426
gauacaugucauugcacug

SEQ ID NO: 2341383 - RNA, 19 nt, Artificial Sequence
  Description of Artificial Sequence: Synthetic oligonucleotide
  Antisense strand to SEQ ID NO: 2341382
cagugcaaugacauguauc

SEQ ID NO: 2341384 - RNA, 19 nt, Artificial Sequence
  Description of Artificial Sequence: Synthetic oligonucleotide
  Sense strand starting at position 1813 of SEQ ID NO: 1885426
augucauugcacugugaau

SEQ ID NO: 2341385 - RNA, 19 nt, Artificial Sequence
  Description of Artificial Sequence: Synthetic oligonucleotide
  Antisense strand to SEQ ID NO: 2341384
auucacagugcaaugacau

SEQ ID NO: 2341386 - RNA, 19 nt, Artificial Sequence
  Description of Artificial Sequence: Synthetic oligonucleotide
  Sense strand starting at position 1815 of SEQ ID NO: 1885426
gucauugcacugugaauuu

SEQ ID NO: 2341387 - RNA, 19 nt, Artificial Sequence
  Description of Artificial Sequence: Synthetic oligonucleotide
  Antisense strand to SEQ ID NO: 2341386
aaauucacagugcaaugac

SEQ ID NO: 2341388 - RNA, 19 nt, Artificial Sequence
  Description of Artificial Sequence: Synthetic oligonucleotide
  Sense strand starting at position 1824 of SEQ ID NO: 1885426
cugugaauuucccauguug

SEQ ID NO: 2341389 - RNA, 19 nt, Artificial Sequence
  Description of Artificial Sequence: Synthetic oligonucleotide
  Antisense strand to SEQ ID NO: 2341388
caacaugggaaauucacag

SEQ ID NO: 2341390 - RNA, 19 nt, Artificial Sequence
  Description of Artificial Sequence: Synthetic oligonucleotide
  Sense strand starting at position 2241 of SEQ ID NO: 1885426
auuaauuugugguauagca

SEQ ID NO: 2341391 - RNA, 19 nt, Artificial Sequence
  Description of Artificial Sequence: Synthetic oligonucleotide
  Antisense strand to SEQ ID NO: 2341390
ugcuauaccacaaauuaau

SEQ ID NO: 2341392 - RNA, 19 nt, Artificial Sequence
  Description of Artificial Sequence: Synthetic oligonucleotide
  Sense strand starting at position 2352 of SEQ ID NO: 1885426
ugagguuuaauugauguac

SEQ ID NO: 2341393 - RNA, 19 nt, Artificial Sequence
  Description of Artificial Sequence: Synthetic oligonucleotide
  Antisense strand to SEQ ID NO: 2341392
guacaucaauuaaaccuca

SEQ ID NO: 2341394 - RNA, 19 nt, Artificial Sequence
  Description of Artificial Sequence: Synthetic oligonucleotide
  Sense strand starting at position 2354 of SEQ ID NO: 1885426
agguuuaauugauguacaa

SEQ ID NO: 2341395 - RNA, 19 nt, Artificial Sequence
  Description of Artificial Sequence: Synthetic oligonucleotide
  Antisense strand to SEQ ID NO: 2341394
uuguacaucaauuaaaccu

SEQ ID NO: 2341396 - RNA, 19 nt, Artificial Sequence
  Description of Artificial Sequence: Synthetic oligonucleotide
  Sense strand starting at position 2695 of SEQ ID NO: 1885426
aguauucugcuuuauggau

SEQ ID NO: 2341397 - RNA, 19 nt, Artificial Sequence
  Description of Artificial Sequence: Synthetic oligonucleotide
  Antisense strand to SEQ ID NO: 2341396
auccauaaagcagaauacu

SEQ ID NO: 2341398 - RNA, 19 nt, Artificial Sequence
  Description of Artificial Sequence: Synthetic oligonucleotide
  Sense strand starting at position 2701 of SEQ ID NO: 1885426
cugcuuuauggauauacaa

SEQ ID NO: 2341399 - RNA, 19 nt, Artificial Sequence
  Description of Artificial Sequence: Synthetic oligonucleotide
  Antisense strand to SEQ ID NO: 2341398
uuguauauccauaaagcag

SEQ ID NO: 2341400 - RNA, 19 nt, Artificial Sequence
  Description of Artificial Sequence: Synthetic oligonucleotide
  Sense strand starting at position 2751 of SEQ ID NO: 1885426
uuagaauguuuccaguuug

SEQ ID NO: 2341401 - RNA, 19 nt, Artificial Sequence
  Description of Artificial Sequence: Synthetic oligonucleotide
  Antisense strand to SEQ ID NO: 2341400
caaacuggaaacauucuaa

SEQ ID NO: 2341402 - RNA, 19 nt, Artificial Sequence
  Description of Artificial Sequence: Synthetic oligonucleotide
  Sense strand starting at position 2843 of SEQ ID NO: 1885426
ucuagaauauaugcaaguu

SEQ ID NO: 2341403 - RNA, 19 nt, Artificial Sequence
  Description of Artificial Sequence: Synthetic oligonucleotide
  Antisense strand to SEQ ID NO: 2341402
aacuugcauauauucuaga

SEQ ID NO: 2341404 - RNA, 19 nt, Artificial Sequence
  Description of Artificial Sequence: Synthetic oligonucleotide
  Sense strand starting at position 2898 of SEQ ID NO: 1885426
agagguugcuagcaagaug

SEQ ID NO: 2341405 - RNA, 19 nt, Artificial Sequence
  Description of Artificial Sequence: Synthetic oligonucleotide
  Antisense strand to SEQ ID NO: 2341404
caucuugcuagcaaccucu

SEQ ID NO: 2341406 - RNA, 19 nt, Artificial Sequence
  Description of Artificial Sequence: Synthetic oligonucleotide
  Sense strand starting at position 3160 of SEQ ID NO: 1885426
cacuguggccuagauacua

SEQ ID NO: 2341407 - RNA, 19 nt, Artificial Sequence
  Description of Artificial Sequence: Synthetic oligonucleotide
  Antisense strand to SEQ ID NO: 2341406
uaguaucuaggccacagug

SEQ ID NO: 2341408 - RNA, 19 nt, Artificial Sequence
  Description of Artificial Sequence: Synthetic oligonucleotide
  Sense strand starting at position 3201 of SEQ ID NO: 1885426
accuguaguccaggagauu

SEQ ID NO: 2341409 - RNA, 19 nt, Artificial Sequence
  Description of Artificial Sequence: Synthetic oligonucleotide
  Antisense strand to SEQ ID NO: 2341408
aaucuccuggacuacaggu

SEQ ID NO: 2341410 - RNA, 19 nt, Artificial Sequence
  Description of Artificial Sequence: Synthetic oligonucleotide
  Sense strand starting at position 3202 of SEQ ID NO: 1885426
ccuguaguccaggagauuc

SEQ ID NO: 2341411 - RNA, 19 nt, Artificial Sequence
  Description of Artificial Sequence: Synthetic oligonucleotide
  Antisense strand to SEQ ID NO: 2341410
gaaucuccuggacuacagg

SEQ ID NO: 2341412 - RNA, 19 nt, Artificial Sequence
  Description of Artificial Sequence: Synthetic oligonucleotide
  Sense strand starting at position 3333 of SEQ ID NO: 1885426
gaacaccagugagaugaaa

SEQ ID NO: 2341413 - RNA, 19 nt, Artificial Sequence
  Description of Artificial Sequence: Synthetic oligonucleotide
  Antisense strand to SEQ ID NO: 2341412
uuucaucucacugguguuc

SEQ ID NO: 2341414 - RNA, 19 nt, Artificial Sequence
  Description of Artificial Sequence: Synthetic oligonucleotide
  Sense strand starting at position 3489 of SEQ ID NO: 1885426
aucugagacacucgagcuu

SEQ ID NO: 2341415 - RNA, 19 nt, Artificial Sequence
  Description of Artificial Sequence: Synthetic oligonucleotide
  Antisense strand to SEQ ID NO: 2341414
aagcucgagugucucagau

SEQ ID NO: 2341416 - RNA, 19 nt, Artificial Sequence
  Description of Artificial Sequence: Synthetic oligonucleotide
  Sense strand starting at position 61 of SEQ ID NO: 1885427
uaguguauugguuaagaac

SEQ ID NO: 2341417 - RNA, 19 nt, Artificial Sequence
  Description of Artificial Sequence: Synthetic oligonucleotide
  Antisense strand to SEQ ID NO: 2341416
guucuuaaccaauacacua

SEQ ID NO: 2341418 - RNA, 19 nt, Artificial Sequence
  Description of Artificial Sequence: Synthetic oligonucleotide
  Sense strand starting at position 133 of SEQ ID NO: 1885427
auuguauaaccuugaguaa

SEQ ID NO: 2341419 - RNA, 19 nt, Artificial Sequence
  Description of Artificial Sequence: Synthetic oligonucleotide
  Antisense strand to SEQ ID NO: 2341418
uuacucaagguuauacaau

SEQ ID NO: 2341420 - RNA, 19 nt, Artificial Sequence
  Description of Artificial Sequence: Synthetic oligonucleotide
  Sense strand starting at position 134 of SEQ ID NO: 1885427
uuguauaaccuugaguaaa

SEQ ID NO: 2341421 - RNA, 19 nt, Artificial Sequence
  Description of Artificial Sequence: Synthetic oligonucleotide
  Antisense strand to SEQ ID NO: 2341420
uuuacucaagguuauacaa

SEQ ID NO: 2341422 - RNA, 19 nt, Artificial Sequence
  Description of Artificial Sequence: Synthetic oligonucleotide
  Sense strand starting at position 136 of SEQ ID NO: 1885427
guauaaccuugaguaaauu

SEQ ID NO: 2341423 - RNA, 19 nt, Artificial Sequence
  Description of Artificial Sequence: Synthetic oligonucleotide
  Antisense strand to SEQ ID NO: 2341422
aauuuacucaagguuauac

SEQ ID NO: 2341424 - RNA, 19 nt, Artificial Sequence
  Description of Artificial Sequence: Synthetic oligonucleotide
  Sense strand starting at position 205 of SEQ ID NO: 1885427
guaccuguuccauagagau

SEQ ID NO: 2341425 - RNA, 19 nt, Artificial Sequence
  Description of Artificial Sequence: Synthetic oligonucleotide
  Antisense strand to SEQ ID NO: 2341424
aucucuauggaacagguac

SEQ ID NO: 2341426 - RNA, 19 nt, Artificial Sequence
  Description of Artificial Sequence: Synthetic oligonucleotide
  Sense strand starting at position 209 of SEQ ID NO: 1885427
cuguuccauagagauguga

SEQ ID NO: 2341427 - RNA, 19 nt, Artificial Sequence
  Description of Artificial Sequence: Synthetic oligonucleotide
  Antisense strand to SEQ ID NO: 2341426
ucacaucucuauggaacag

SEQ ID NO: 2341428 - RNA, 19 nt, Artificial Sequence
  Description of Artificial Sequence: Synthetic oligonucleotide
  Sense strand starting at position 227 of SEQ ID NO: 1885427
aggauuaaaugugucaauc

SEQ ID NO: 2341429 - RNA, 19 nt, Artificial Sequence
  Description of Artificial Sequence: Synthetic oligonucleotide
  Antisense strand to SEQ ID NO: 2341428
gauugacacauuuaauccu

SEQ ID NO: 2341430 - RNA, 19 nt, Artificial Sequence
  Description of Artificial Sequence: Synthetic oligonucleotide
  Sense strand starting at position 236 of SEQ ID NO: 1885427
ugugucaaucuauauaaag

SEQ ID NO: 2341431 - RNA, 19 nt, Artificial Sequence
  Description of Artificial Sequence: Synthetic oligonucleotide
  Antisense strand to SEQ ID NO: 2341430
cuuuauauagauugacaca

SEQ ID NO: 2341432 - RNA, 19 nt, Artificial Sequence
  Description of Artificial Sequence: Synthetic oligonucleotide
  Sense strand starting at position 498 of SEQ ID NO: 1885427
ggacuuauuugggaagaua

SEQ ID NO: 2341433 - RNA, 19 nt, Artificial Sequence
  Description of Artificial Sequence: Synthetic oligonucleotide
  Antisense strand to SEQ ID NO: 2341432
uaucuucccaaauaagucc

SEQ ID NO: 2341434 - RNA, 19 nt, Artificial Sequence
  Description of Artificial Sequence: Synthetic oligonucleotide
  Sense strand starting at position 561 of SEQ ID NO: 1885427
uuguguugccaccucgauu

SEQ ID NO: 2341435 - RNA, 19 nt, Artificial Sequence
  Description of Artificial Sequence: Synthetic oligonucleotide
  Antisense strand to SEQ ID NO: 2341434
aaucgagguggcaacacaa

SEQ ID NO: 2341436 - RNA, 19 nt, Artificial Sequence
  Description of Artificial Sequence: Synthetic oligonucleotide
  Sense strand starting at position 926 of SEQ ID NO: 1885427
aucagaguuuacuuggaaa

SEQ ID NO: 2341437 - RNA, 19 nt, Artificial Sequence
  Description of Artificial Sequence: Synthetic oligonucleotide
  Antisense strand to SEQ ID NO: 2341436
uuuccaaguaaacucugau

SEQ ID NO: 2341438 - RNA, 19 nt, Artificial Sequence
  Description of Artificial Sequence: Synthetic oligonucleotide
  Sense strand starting at position 948 of SEQ ID NO: 1885427
acaaguaaugagcauguca

SEQ ID NO: 2341439 - RNA, 19 nt, Artificial Sequence
  Description of Artificial Sequence: Synthetic oligonucleotide
  Antisense strand to SEQ ID NO: 2341438
ugacaugcucauuacuugu

SEQ ID NO: 2341440 - RNA, 19 nt, Artificial Sequence
  Description of Artificial Sequence: Synthetic oligonucleotide
  Sense strand starting at position 999 of SEQ ID NO: 1885427
aggagacauccuugcacau

SEQ ID NO: 2341441 - RNA, 19 nt, Artificial Sequence
  Description of Artificial Sequence: Synthetic oligonucleotide
  Antisense strand to SEQ ID NO: 2341440
augugcaaggaugucuccu

SEQ ID NO: 2341442 - RNA, 19 nt, Artificial Sequence
  Description of Artificial Sequence: Synthetic oligonucleotide
  Sense strand starting at position 1305 of SEQ ID NO: 1885427
aggaaauggccuuguuaga

SEQ ID NO: 2341443 - RNA, 19 nt, Artificial Sequence
  Description of Artificial Sequence: Synthetic oligonucleotide
  Antisense strand to SEQ ID NO: 2341442
ucuaacaaggccauuuccu

SEQ ID NO: 2341444 - RNA, 19 nt, Artificial Sequence
  Description of Artificial Sequence: Synthetic oligonucleotide
  Sense strand starting at position 1544 of SEQ ID NO: 1885427
cugauaauucuauggauca

SEQ ID NO: 2341445 - RNA, 19 nt, Artificial Sequence
  Description of Artificial Sequence: Synthetic oligonucleotide
  Antisense strand to SEQ ID NO: 2341444
ugauccauagaauuaucag

SEQ ID NO: 2341446 - RNA, 19 nt, Artificial Sequence
  Description of Artificial Sequence: Synthetic oligonucleotide
  Sense strand starting at position 1598 of SEQ ID NO: 1885427
caaggauguccucacuugu

SEQ ID NO: 2341447 - RNA, 19 nt, Artificial Sequence
  Description of Artificial Sequence: Synthetic oligonucleotide
  Antisense strand to SEQ ID NO: 2341446
acaagugaggacauccuug

SEQ ID NO: 2341448 - RNA, 19 nt, Artificial Sequence
  Description of Artificial Sequence: Synthetic oligonucleotide
  Sense strand starting at position 1621 of SEQ ID NO: 1885427
ggugguugaguugacauua

SEQ ID NO: 2341449 - RNA, 19 nt, Artificial Sequence
  Description of Artificial Sequence: Synthetic oligonucleotide
  Antisense strand to SEQ ID NO: 2341448
uaaugucaacucaaccacc

SEQ ID NO: 2341450 - RNA, 19 nt, Artificial Sequence
  Description of Artificial Sequence: Synthetic oligonucleotide
  Sense strand starting at position 1755 of SEQ ID NO: 1885427
gugucacauuugcuaaagu

SEQ ID NO: 2341451 - RNA, 19 nt, Artificial Sequence
  Description of Artificial Sequence: Synthetic oligonucleotide
  Antisense strand to SEQ ID NO: 2341450
acuuuagcaaaugugacac

SEQ ID NO: 2341452 - RNA, 19 nt, Artificial Sequence
  Description of Artificial Sequence: Synthetic oligonucleotide
  Sense strand starting at position 2086 of SEQ ID NO: 1885427
ugacauaguugaucacuuu

SEQ ID NO: 2341453 - RNA, 19 nt, Artificial Sequence
  Description of Artificial Sequence: Synthetic oligonucleotide
  Antisense strand to SEQ ID NO: 2341452
aaagugaucaacuauguca

SEQ ID NO: 2341454 - RNA, 19 nt, Artificial Sequence
  Description of Artificial Sequence: Synthetic oligonucleotide
  Sense strand starting at position 2412 of SEQ ID NO: 1885427
ugugacuuucuccacacua

SEQ ID NO: 2341455 - RNA, 19 nt, Artificial Sequence
  Description of Artificial Sequence: Synthetic oligonucleotide
  Antisense strand to SEQ ID NO: 2341454
uaguguggagaaagucaca

SEQ ID NO: 2341456 - RNA, 19 nt, Artificial Sequence
  Description of Artificial Sequence: Synthetic oligonucleotide
  Sense strand starting at position 2612 of SEQ ID NO: 1885427
gaggccacagcugauuaua

SEQ ID NO: 2341457 - RNA, 19 nt, Artificial Sequence
  Description of Artificial Sequence: Synthetic oligonucleotide
  Antisense strand to SEQ ID NO: 2341456
uauaaucagcuguggccuc

SEQ ID NO: 2341458 - RNA, 19 nt, Artificial Sequence
  Description of Artificial Sequence: Synthetic oligonucleotide
  Sense strand starting at position 2615 of SEQ ID NO: 1885427
gccacagcugauuauaauc

SEQ ID NO: 2341459 - RNA, 19 nt, Artificial Sequence
  Description of Artificial Sequence: Synthetic oligonucleotide
  Antisense strand to SEQ ID NO: 2341458
gauuauaaucagcuguggc

SEQ ID NO: 2341460 - RNA, 19 nt, Artificial Sequence
  Description of Artificial Sequence: Synthetic oligonucleotide
  Sense strand starting at position 2641 of SEQ ID NO: 1885427
gagaacuugugagugacga

SEQ ID NO: 2341461 - RNA, 19 nt, Artificial Sequence
  Description of Artificial Sequence: Synthetic oligonucleotide
  Antisense strand to SEQ ID NO: 2341460
ucgucacucacaaguucuc

SEQ ID NO: 2341462 - RNA, 19 nt, Artificial Sequence
  Description of Artificial Sequence: Synthetic oligonucleotide
  Sense strand starting at position 2643 of SEQ ID NO: 1885427
gaacuugugagugacgauu

SEQ ID NO: 2341463 - RNA, 19 nt, Artificial Sequence
  Description of Artificial Sequence: Synthetic oligonucleotide
  Antisense strand to SEQ ID NO: 2341462
aaucgucacucacaaguuc

SEQ ID NO: 2341464 - RNA, 19 nt, Artificial Sequence
  Description of Artificial Sequence: Synthetic oligonucleotide
  Sense strand starting at position 2649 of SEQ ID NO: 1885427
gugagugacgauuaugaug

SEQ ID NO: 2341465 - RNA, 19 nt, Artificial Sequence
  Description of Artificial Sequence: Synthetic oligonucleotide
  Antisense strand to SEQ ID NO: 2341464
caucauaaucgucacucac

SEQ ID NO: 2341466 - RNA, 19 nt, Artificial Sequence
  Description of Artificial Sequence: Synthetic oligonucleotide
  Sense strand starting at position 2660 of SEQ ID NO: 1885427
uuaugaugugagugaagau

SEQ ID NO: 2341467 - RNA, 19 nt, Artificial Sequence
  Description of Artificial Sequence: Synthetic oligonucleotide
  Antisense strand to SEQ ID NO: 2341466
aucuucacucacaucauaa

SEQ ID NO: 2341468 - RNA, 19 nt, Artificial Sequence
  Description of Artificial Sequence: Synthetic oligonucleotide
  Sense strand starting at position 2667 of SEQ ID NO: 1885427
gugagugaagaucaguauu

SEQ ID NO: 2341469 - RNA, 19 nt, Artificial Sequence
  Description of Artificial Sequence: Synthetic oligonucleotide
  Antisense strand to SEQ ID NO: 2341468
aauacugaucuucacucac

SEQ ID NO: 2341470 - RNA, 19 nt, Artificial Sequence
  Description of Artificial Sequence: Synthetic oligonucleotide
  Sense strand starting at position 2669 of SEQ ID NO: 1885427
gagugaagaucaguauuau

SEQ ID NO: 2341471 - RNA, 19 nt, Artificial Sequence
  Description of Artificial Sequence: Synthetic oligonucleotide
  Antisense strand to SEQ ID NO: 2341470
auaauacugaucuucacuc

SEQ ID NO: 2341472 - RNA, 19 nt, Artificial Sequence
  Description of Artificial Sequence: Synthetic oligonucleotide
  Sense strand starting at position 2981 of SEQ ID NO: 1885427
gcgagugaagauuauuaug

SEQ ID NO: 2341473 - RNA, 19 nt, Artificial Sequence
  Description of Artificial Sequence: Synthetic oligonucleotide
  Antisense strand to SEQ ID NO: 2341472
cauaauaaucuucacucgc

SEQ ID NO: 2341474 - RNA, 19 nt, Artificial Sequence
  Description of Artificial Sequence: Synthetic oligonucleotide
  Sense strand starting at position 3022 of SEQ ID NO: 1885427
ccaucauuagagugacaga

SEQ ID NO: 2341475 - RNA, 19 nt, Artificial Sequence
  Description of Artificial Sequence: Synthetic oligonucleotide
  Antisense strand to SEQ ID NO: 2341474
ucugucacucuaaugaugg

SEQ ID NO: 2341476 - RNA, 19 nt, Artificial Sequence
  Description of Artificial Sequence: Synthetic oligonucleotide
  Sense strand starting at position 3141 of SEQ ID NO: 1885427
agaagauucugagcuuuaa

SEQ ID NO: 2341477 - RNA, 19 nt, Artificial Sequence
  Description of Artificial Sequence: Synthetic oligonucleotide
  Antisense strand to SEQ ID NO: 2341476
uuaaagcucagaaucuucu

SEQ ID NO: 2341478 - RNA, 19 nt, Artificial Sequence
  Description of Artificial Sequence: Synthetic oligonucleotide
  Sense strand starting at position 3167 of SEQ ID NO: 1885427
cuguuacuccacuauagga

SEQ ID NO: 2341479 - RNA, 19 nt, Artificial Sequence
  Description of Artificial Sequence: Synthetic oligonucleotide
  Antisense strand to SEQ ID NO: 2341478
uccuauaguggaguaacag

SEQ ID NO: 2341480 - RNA, 19 nt, Artificial Sequence
  Description of Artificial Sequence: Synthetic oligonucleotide
  Sense strand starting at position 3177 of SEQ ID NO: 1885427
acuauaggagauugcauaa

SEQ ID NO: 2341481 - RNA, 19 nt, Artificial Sequence
  Description of Artificial Sequence: Synthetic oligonucleotide
  Antisense strand to SEQ ID NO: 2341480
uuaugcaaucuccuauagu

SEQ ID NO: 2341482 - RNA, 19 nt, Artificial Sequence
  Description of Artificial Sequence: Synthetic oligonucleotide
  Sense strand starting at position 3207 of SEQ ID NO: 1885427
uagugaaauguaggaugua

SEQ ID NO: 2341483 - RNA, 19 nt, Artificial Sequence
  Description of Artificial Sequence: Synthetic oligonucleotide
  Antisense strand to SEQ ID NO: 2341482
uacauccuacauuucacua

SEQ ID NO: 2341484 - RNA, 19 nt, Artificial Sequence
  Description of Artificial Sequence: Synthetic oligonucleotide
  Sense strand starting at position 3270 of SEQ ID NO: 1885427
augugaauugugcauggau

SEQ ID NO: 2341485 - RNA, 19 nt, Artificial Sequence
  Description of Artificial Sequence: Synthetic oligonucleotide
  Antisense strand to SEQ ID NO: 2341484
auccaugcacaauucacau

SEQ ID NO: 2341486 - RNA, 19 nt, Artificial Sequence
  Description of Artificial Sequence: Synthetic oligonucleotide
  Sense strand starting at position 3307 of SEQ ID NO: 1885427
agcugugucucauuuaaua

SEQ ID NO: 2341487 - RNA, 19 nt, Artificial Sequence
  Description of Artificial Sequence: Synthetic oligonucleotide
  Antisense strand to SEQ ID NO: 2341486
uauuaaaugagacacagcu

SEQ ID NO: 2341488 - RNA, 19 nt, Artificial Sequence
  Description of Artificial Sequence: Synthetic oligonucleotide
  Sense strand starting at position 3395 of SEQ ID NO: 1885427
cucuguccacgcucguaau

SEQ ID NO: 2341489 - RNA, 19 nt, Artificial Sequence
  Description of Artificial Sequence: Synthetic oligonucleotide
  Antisense strand to SEQ ID NO: 2341488
auuacgagcguggacagag

SEQ ID NO: 2341490 - RNA, 19 nt, Artificial Sequence
  Description of Artificial Sequence: Synthetic oligonucleotide
  Sense strand starting at position 3679 of SEQ ID NO: 1885427
guuguuauuuauucuccuu

SEQ ID NO: 2341491 - RNA, 19 nt, Artificial Sequence
  Description of Artificial Sequence: Synthetic oligonucleotide
  Antisense strand to SEQ ID NO: 2341490
aaggagaauaaauaacaac

SEQ ID NO: 2341492 - RNA, 19 nt, Artificial Sequence
  Description of Artificial Sequence: Synthetic oligonucleotide
  Sense strand starting at position 3786 of SEQ ID NO: 1885427
ugucuugaugauuacuaua

SEQ ID NO: 2341493 - RNA, 19 nt, Artificial Sequence
  Description of Artificial Sequence: Synthetic oligonucleotide
  Antisense strand to SEQ ID NO: 2341492
uauaguaaucaucaagaca

SEQ ID NO: 2341494 - RNA, 19 nt, Artificial Sequence
  Description of Artificial Sequence: Synthetic oligonucleotide
  Sense strand starting at position 3836 of SEQ ID NO: 1885427
uagacacuguguucuaaag

SEQ ID NO: 2341495 - RNA, 19 nt, Artificial Sequence
  Description of Artificial Sequence: Synthetic oligonucleotide
  Antisense strand to SEQ ID NO: 2341494
cuuuagaacacagugucua

SEQ ID NO: 2341496 - RNA, 19 nt, Artificial Sequence
  Description of Artificial Sequence: Synthetic oligonucleotide
  Sense strand starting at position 7 of SEQ ID NO: 1885428
cuaguuucugcacauaaag

SEQ ID NO: 2341497 - RNA, 19 nt, Artificial Sequence
  Description of Artificial Sequence: Synthetic oligonucleotide
  Antisense strand to SEQ ID NO: 2341496
cuuuaugugcagaaacuag

SEQ ID NO: 2341498 - RNA, 19 nt, Artificial Sequence
  Description of Artificial Sequence: Synthetic oligonucleotide
  Sense strand starting at position 358 of SEQ ID NO: 1885428
uuguuauuucugugguguu

SEQ ID NO: 2341499 - RNA, 19 nt, Artificial Sequence
  Description of Artificial Sequence: Synthetic oligonucleotide
  Antisense strand to SEQ ID NO: 2341498
aacaccacagaaauaacaa

SEQ ID NO: 2341500 - RNA, 19 nt, Artificial Sequence
  Description of Artificial Sequence: Synthetic oligonucleotide
  Sense strand starting at position 439 of SEQ ID NO: 1885428
ugguuaaucuaacuaaugu

SEQ ID NO: 2341501 - RNA, 19 nt, Artificial Sequence
  Description of Artificial Sequence: Synthetic oligonucleotide
  Antisense strand to SEQ ID NO: 2341500
acauuaguuagauuaacca

SEQ ID NO: 2341502 - RNA, 19 nt, Artificial Sequence
  Description of Artificial Sequence: Synthetic oligonucleotide
  Sense strand starting at position 612 of SEQ ID NO: 1885428
gagguaugacguuagguug

SEQ ID NO: 2341503 - RNA, 19 nt, Artificial Sequence
  Description of Artificial Sequence: Synthetic oligonucleotide
  Antisense strand to SEQ ID NO: 2341502
caaccuaacgucauaccuc

SEQ ID NO: 2341504 - RNA, 19 nt, Artificial Sequence
  Description of Artificial Sequence: Synthetic oligonucleotide
  Sense strand starting at position 619 of SEQ ID NO: 1885428
gacguuagguugucaauuu

SEQ ID NO: 2341505 - RNA, 19 nt, Artificial Sequence
  Description of Artificial Sequence: Synthetic oligonucleotide
  Antisense strand to SEQ ID NO: 2341504
aaauugacaaccuaacguc

SEQ ID NO: 2341506 - RNA, 19 nt, Artificial Sequence
  Description of Artificial Sequence: Synthetic oligonucleotide
  Sense strand starting at position 979 of SEQ ID NO: 1885428
ccaugcgcucaugagaaga

SEQ ID NO: 2341507 - RNA, 19 nt, Artificial Sequence
  Description of Artificial Sequence: Synthetic oligonucleotide
  Antisense strand to SEQ ID NO: 2341506
ucuucucaugagcgcaugg

SEQ ID NO: 2341508 - RNA, 19 nt, Artificial Sequence
  Description of Artificial Sequence: Synthetic oligonucleotide
  Sense strand starting at position 984 of SEQ ID NO: 1885428
cgcucaugagaagaaugua

SEQ ID NO: 2341509 - RNA, 19 nt, Artificial Sequence
  Description of Artificial Sequence: Synthetic oligonucleotide
  Antisense strand to SEQ ID NO: 2341508
uacauucuucucaugagcg

SEQ ID NO: 2341510 - RNA, 19 nt, Artificial Sequence
  Description of Artificial Sequence: Synthetic oligonucleotide
  Sense strand starting at position 1049 of SEQ ID NO: 1885428
gcauuuguucuggaguguc

SEQ ID NO: 2341511 - RNA, 19 nt, Artificial Sequence
  Description of Artificial Sequence: Synthetic oligonucleotide
  Antisense strand to SEQ ID NO: 2341510
gacacuccagaacaaaugc

SEQ ID NO: 2341512 - RNA, 19 nt, Artificial Sequence
  Description of Artificial Sequence: Synthetic oligonucleotide
  Sense strand starting at position 1086 of SEQ ID NO: 1885428
uugacuuucugucugaaag

SEQ ID NO: 2341513 - RNA, 19 nt, Artificial Sequence
  Description of Artificial Sequence: Synthetic oligonucleotide
  Antisense strand to SEQ ID NO: 2341512
cuuucagacagaaagucaa

SEQ ID NO: 2341514 - RNA, 19 nt, Artificial Sequence
  Description of Artificial Sequence: Synthetic oligonucleotide
  Sense strand starting at position 1087 of SEQ ID NO: 1885428
ugacuuucugucugaaaga

SEQ ID NO: 2341515 - RNA, 19 nt, Artificial Sequence
  Description of Artificial Sequence: Synthetic oligonucleotide
  Antisense strand to SEQ ID NO: 2341514
ucuuucagacagaaaguca

SEQ ID NO: 2341516 - RNA, 19 nt, Artificial Sequence
  Description of Artificial Sequence: Synthetic oligonucleotide
  Sense strand starting at position 1157 of SEQ ID NO: 1885428
gcugucucauuucuuagau

SEQ ID NO: 2341517 - RNA, 19 nt, Artificial Sequence
  Description of Artificial Sequence: Synthetic oligonucleotide
  Antisense strand to SEQ ID NO: 2341516
aucuaagaaaugagacagc

SEQ ID NO: 2341518 - RNA, 19 nt, Artificial Sequence
  Description of Artificial Sequence: Synthetic oligonucleotide
  Sense strand starting at position 1839 of SEQ ID NO: 1885428
gagaguuauucuguuuaag

SEQ ID NO: 2341519 - RNA, 19 nt, Artificial Sequence
  Description of Artificial Sequence: Synthetic oligonucleotide
  Antisense strand to SEQ ID NO: 2341518
cuuaaacagaauaacucuc

SEQ ID NO: 2341520 - RNA, 19 nt, Artificial Sequence
  Description of Artificial Sequence: Synthetic oligonucleotide
  Sense strand starting at position 1841 of SEQ ID NO: 1885428
gaguuauucuguuuaagga

SEQ ID NO: 2341521 - RNA, 19 nt, Artificial Sequence
  Description of Artificial Sequence: Synthetic oligonucleotide
  Antisense strand to SEQ ID NO: 2341520
uccuuaaacagaauaacuc

SEQ ID NO: 2341522 - RNA, 19 nt, Artificial Sequence
  Description of Artificial Sequence: Synthetic oligonucleotide
  Sense strand starting at position 1987 of SEQ ID NO: 1885428
ugcagaagugaguacucuu

SEQ ID NO: 2341523 - RNA, 19 nt, Artificial Sequence
  Description of Artificial Sequence: Synthetic oligonucleotide
  Antisense strand to SEQ ID NO: 2341522
aagaguacucacuucugca

SEQ ID NO: 2341524 - RNA, 19 nt, Artificial Sequence
  Description of Artificial Sequence: Synthetic oligonucleotide
  Sense strand starting at position 1990 of SEQ ID NO: 1885428
agaagugaguacucuuggu

SEQ ID NO: 2341525 - RNA, 19 nt, Artificial Sequence
  Description of Artificial Sequence: Synthetic oligonucleotide
  Antisense strand to SEQ ID NO: 2341524
accaagaguacucacuucu

SEQ ID NO: 2341526 - RNA, 19 nt, Artificial Sequence
  Description of Artificial Sequence: Synthetic oligonucleotide
  Sense strand starting at position 2085 of SEQ ID NO: 1885428
cuuuacuagggcuaagacu

SEQ ID NO: 2341527 - RNA, 19 nt, Artificial Sequence
  Description of Artificial Sequence: Synthetic oligonucleotide
  Antisense strand to SEQ ID NO: 2341526
agucuuagcccuaguaaag

SEQ ID NO: 2341528 - RNA, 19 nt, Artificial Sequence
  Description of Artificial Sequence: Synthetic oligonucleotide
  Sense strand starting at position 2092 of SEQ ID NO: 1885428
agggcuaagacuugcauua

SEQ ID NO: 2341529 - RNA, 19 nt, Artificial Sequence
  Description of Artificial Sequence: Synthetic oligonucleotide
  Antisense strand to SEQ ID NO: 2341528
uaaugcaagucuuagcccu

SEQ ID NO: 2341530 - RNA, 19 nt, Artificial Sequence
  Description of Artificial Sequence: Synthetic oligonucleotide
  Sense strand starting at position 2318 of SEQ ID NO: 1885428
cugauugguaggugugaca

SEQ ID NO: 2341531 - RNA, 19 nt, Artificial Sequence
  Description of Artificial Sequence: Synthetic oligonucleotide
  Antisense strand to SEQ ID NO: 2341530
ugucacaccuaccaaucag

SEQ ID NO: 2341532 - RNA, 19 nt, Artificial Sequence
  Description of Artificial Sequence: Synthetic oligonucleotide
  Sense strand starting at position 2337 of SEQ ID NO: 1885428
gcaauagauccuggcccaa

SEQ ID NO: 2341533 - RNA, 19 nt, Artificial Sequence
  Description of Artificial Sequence: Synthetic oligonucleotide
  Antisense strand to SEQ ID NO: 2341532
uugggccaggaucuauugc

SEQ ID NO: 2341534 - RNA, 19 nt, Artificial Sequence
  Description of Artificial Sequence: Synthetic oligonucleotide
  Sense strand starting at position 2504 of SEQ ID NO: 1885428
uguuaacaaguaugugaaa

SEQ ID NO: 2341535 - RNA, 19 nt, Artificial Sequence
  Description of Artificial Sequence: Synthetic oligonucleotide
  Antisense strand to SEQ ID NO: 2341534
uuucacauacuuguuaaca

SEQ ID NO: 2341536 - RNA, 19 nt, Artificial Sequence
  Description of Artificial Sequence: Synthetic oligonucleotide
  Sense strand starting at position 2556 of SEQ ID NO: 1885428
ccucuauaccaguagugga

SEQ ID NO: 2341537 - RNA, 19 nt, Artificial Sequence
  Description of Artificial Sequence: Synthetic oligonucleotide
  Antisense strand to SEQ ID NO: 2341536
uccacuacugguauagagg

SEQ ID NO: 2341538 - RNA, 19 nt, Artificial Sequence
  Description of Artificial Sequence: Synthetic oligonucleotide
  Sense strand starting at position 2660 of SEQ ID NO: 1885428
aggucuguuaugugaagga

SEQ ID NO: 2341539 - RNA, 19 nt, Artificial Sequence
  Description of Artificial Sequence: Synthetic oligonucleotide
  Antisense strand to SEQ ID NO: 2341538
uccuucacauaacagaccu

SEQ ID NO: 2341540 - RNA, 19 nt, Artificial Sequence
  Description of Artificial Sequence: Synthetic oligonucleotide
  Sense strand starting at position 2747 of SEQ ID NO: 1885428
ggaucuggagucuacaagu

SEQ ID NO: 2341541 - RNA, 19 nt, Artificial Sequence
  Description of Artificial Sequence: Synthetic oligonucleotide
  Antisense strand to SEQ ID NO: 2341540
acuuguagacuccagaucc

SEQ ID NO: 2341542 - RNA, 19 nt, Artificial Sequence
  Description of Artificial Sequence: Synthetic oligonucleotide
  Sense strand starting at position 2828 of SEQ ID NO: 1885428
acccacuguccuggaagau

SEQ ID NO: 2341543 - RNA, 19 nt, Artificial Sequence
  Description of Artificial Sequence: Synthetic oligonucleotide
  Antisense strand to SEQ ID NO: 2341542
aucuuccaggacagugggu

SEQ ID NO: 2341544 - RNA, 19 nt, Artificial Sequence
  Description of Artificial Sequence: Synthetic oligonucleotide
  Sense strand starting at position 3086 of SEQ ID NO: 1885428
guggcuggauuccuaagaa

SEQ ID NO: 2341545 - RNA, 19 nt, Artificial Sequence
  Description of Artificial Sequence: Synthetic oligonucleotide
  Antisense strand to SEQ ID NO: 2341544
uucuuaggaauccagccac

SEQ ID NO: 2341546 - RNA, 19 nt, Artificial Sequence
  Description of Artificial Sequence: Synthetic oligonucleotide
  Sense strand starting at position 3099 of SEQ ID NO: 1885428
uaagaagggcccugcaaua

SEQ ID NO: 2341547 - RNA, 19 nt, Artificial Sequence
  Description of Artificial Sequence: Synthetic oligonucleotide
  Antisense strand to SEQ ID NO: 2341546
uauugcagggcccuucuua

SEQ ID NO: 2341548 - RNA, 19 nt, Artificial Sequence
  Description of Artificial Sequence: Synthetic oligonucleotide
  Sense strand starting at position 3186 of SEQ ID NO: 1885428
gugacuguacacugaggaa

SEQ ID NO: 2341549 - RNA, 19 nt, Artificial Sequence
  Description of Artificial Sequence: Synthetic oligonucleotide
  Antisense strand to SEQ ID NO: 2341548
uuccucaguguacagucac

SEQ ID NO: 2341550 - RNA, 19 nt, Artificial Sequence
  Description of Artificial Sequence: Synthetic oligonucleotide
  Sense strand starting at position 3236 of SEQ ID NO: 1885428
gagcacagggucugaguua

SEQ ID NO: 2341551 - RNA, 19 nt, Artificial Sequence
  Description of Artificial Sequence: Synthetic oligonucleotide
  Antisense strand to SEQ ID NO: 2341550
uaacucagacccugugcuc

SEQ ID NO: 2341552 - RNA, 19 nt, Artificial Sequence
  Description of Artificial Sequence: Synthetic oligonucleotide
  Sense strand starting at position 3241 of SEQ ID NO: 1885428
cagggucugaguuaacguu

SEQ ID NO: 2341553 - RNA, 19 nt, Artificial Sequence
  Description of Artificial Sequence: Synthetic oligonucleotide
  Antisense strand to SEQ ID NO: 2341552
aacguuaacucagacccug

SEQ ID NO: 2341554 - RNA, 19 nt, Artificial Sequence
  Description of Artificial Sequence: Synthetic oligonucleotide
  Sense strand starting at position 3256 of SEQ ID NO: 1885428
cguugauuccuagagugga

SEQ ID NO: 2341555 - RNA, 19 nt, Artificial Sequence
  Description of Artificial Sequence: Synthetic oligonucleotide
  Antisense strand to SEQ ID NO: 2341554
uccacucuaggaaucaacg

SEQ ID NO: 2341556 - RNA, 19 nt, Artificial Sequence
  Description of Artificial Sequence: Synthetic oligonucleotide
  Sense strand starting at position 3259 of SEQ ID NO: 1885428
ugauuccuagaguggaaau

SEQ ID NO: 2341557 - RNA, 19 nt, Artificial Sequence
  Description of Artificial Sequence: Synthetic oligonucleotide
  Antisense strand to SEQ ID NO: 2341556
auuuccacucuaggaauca

SEQ ID NO: 2341558 - RNA, 19 nt, Artificial Sequence
  Description of Artificial Sequence: Synthetic oligonucleotide
  Sense strand starting at position 3515 of SEQ ID NO: 1885428
ucucuuaucccagggaaga

SEQ ID NO: 2341559 - RNA, 19 nt, Artificial Sequence
  Description of Artificial Sequence: Synthetic oligonucleotide
  Antisense strand to SEQ ID NO: 2341558
ucuucccugggauaagaga

SEQ ID NO: 2341560 - RNA, 19 nt, Artificial Sequence
  Description of Artificial Sequence: Synthetic oligonucleotide
  Sense strand starting at position 3516 of SEQ ID NO: 1885428
cucuuaucccagggaagac

SEQ ID NO: 2341561 - RNA, 19 nt, Artificial Sequence
  Description of Artificial Sequence: Synthetic oligonucleotide
  Antisense strand to SEQ ID NO: 2341560
gucuucccugggauaagag

SEQ ID NO: 2341562 - RNA, 19 nt, Artificial Sequence
  Description of Artificial Sequence: Synthetic oligonucleotide
  Sense strand starting at position 3529 of SEQ ID NO: 1885428
gaagacaguagcgauuagu

SEQ ID NO: 2341563 - RNA, 19 nt, Artificial Sequence
  Description of Artificial Sequence: Synthetic oligonucleotide
  Antisense strand to SEQ ID NO: 2341562
acuaaucgcuacugucuuc

SEQ ID NO: 2341564 - RNA, 19 nt, Artificial Sequence
  Description of Artificial Sequence: Synthetic oligonucleotide
  Sense strand starting at position 3540 of SEQ ID NO: 1885428
cgauuagugccauaauuaa

SEQ ID NO: 2341565 - RNA, 19 nt, Artificial Sequence
  Description of Artificial Sequence: Synthetic oligonucleotide
  Antisense strand to SEQ ID NO: 2341564
uuaauuauggcacuaaucg

SEQ ID NO: 2341566 - RNA, 19 nt, Artificial Sequence
  Description of Artificial Sequence: Synthetic oligonucleotide
  Sense strand starting at position 3711 of SEQ ID NO: 1885428
augugauaucacugccaga

SEQ ID NO: 2341567 - RNA, 19 nt, Artificial Sequence
  Description of Artificial Sequence: Synthetic oligonucleotide
  Antisense strand to SEQ ID NO: 2341566
ucuggcagugauaucacau

SEQ ID NO: 2341568 - RNA, 19 nt, Artificial Sequence
  Description of Artificial Sequence: Synthetic oligonucleotide
  Sense strand starting at position 3716 of SEQ ID NO: 1885428
auaucacugccagaguaga

SEQ ID NO: 2341569 - RNA, 19 nt, Artificial Sequence
  Description of Artificial Sequence: Synthetic oligonucleotide
  Antisense strand to SEQ ID NO: 2341568
ucuacucuggcagugauau

SEQ ID NO: 2341570 - RNA, 19 nt, Artificial Sequence
  Description of Artificial Sequence: Synthetic oligonucleotide
  Sense strand starting at position 3764 of SEQ ID NO: 1885428
gccauugauuuggagaaua

SEQ ID NO: 2341571 - RNA, 19 nt, Artificial Sequence
  Description of Artificial Sequence: Synthetic oligonucleotide
  Antisense strand to SEQ ID NO: 2341570
uauucuccaaaucaauggc

SEQ ID NO: 2341572 - RNA, 19 nt, Artificial Sequence
  Description of Artificial Sequence: Synthetic oligonucleotide
  Sense strand starting at position 3842 of SEQ ID NO: 1885428
acguguauauaucuugaaa

SEQ ID NO: 2341573 - RNA, 19 nt, Artificial Sequence
  Description of Artificial Sequence: Synthetic oligonucleotide
  Antisense strand to SEQ ID NO: 2341572
uuucaagauauauacacgu

SEQ ID NO: 2341574 - RNA, 19 nt, Artificial Sequence
  Description of Artificial Sequence: Synthetic oligonucleotide
  Sense strand starting at position 3853 of SEQ ID NO: 1885428
ucuugaaaguugucaaucu

SEQ ID NO: 2341575 - RNA, 19 nt, Artificial Sequence
  Description of Artificial Sequence: Synthetic oligonucleotide
  Antisense strand to SEQ ID NO: 2341574
agauugacaacuuucaaga

SEQ ID NO: 2341576 - RNA, 19 nt, Artificial Sequence
  Description of Artificial Sequence: Synthetic oligonucleotide
  Sense strand starting at position 6 of SEQ ID NO: 1885429
uuagguugaauccguauuu

SEQ ID NO: 2341577 - RNA, 19 nt, Artificial Sequence
  Description of Artificial Sequence: Synthetic oligonucleotide
  Antisense strand to SEQ ID NO: 2341576
aaauacggauucaaccuaa

SEQ ID NO: 2341578 - RNA, 19 nt, Artificial Sequence
  Description of Artificial Sequence: Synthetic oligonucleotide
  Sense strand starting at position 101 of SEQ ID NO: 1885429
auauguacccagcagugau

SEQ ID NO: 2341579 - RNA, 19 nt, Artificial Sequence
  Description of Artificial Sequence: Synthetic oligonucleotide
  Antisense strand to SEQ ID NO: 2341578
aucacugcuggguacauau

SEQ ID NO: 2341580 - RNA, 19 nt, Artificial Sequence
  Description of Artificial Sequence: Synthetic oligonucleotide
  Sense strand starting at position 308 of SEQ ID NO: 1885429
gagggagcaccuugaucaa

SEQ ID NO: 2341581 - RNA, 19 nt, Artificial Sequence
  Description of Artificial Sequence: Synthetic oligonucleotide
  Antisense strand to SEQ ID NO: 2341580
uugaucaaggugcucccuc

SEQ ID NO: 2341582 - RNA, 19 nt, Artificial Sequence
  Description of Artificial Sequence: Synthetic oligonucleotide
  Sense strand starting at position 342 of SEQ ID NO: 1885429
agcagaagccuguacauua

SEQ ID NO: 2341583 - RNA, 19 nt, Artificial Sequence
  Description of Artificial Sequence: Synthetic oligonucleotide
  Antisense strand to SEQ ID NO: 2341582
uaauguacaggcuucugcu

SEQ ID NO: 2341584 - RNA, 19 nt, Artificial Sequence
  Description of Artificial Sequence: Synthetic oligonucleotide
  Sense strand starting at position 778 of SEQ ID NO: 1885429
uucuuaauacuuuguagag

SEQ ID NO: 2341585 - RNA, 19 nt, Artificial Sequence
  Description of Artificial Sequence: Synthetic oligonucleotide
  Antisense strand to SEQ ID NO: 2341584
cucuacaaaguauuaagaa

SEQ ID NO: 2341586 - RNA, 19 nt, Artificial Sequence
  Description of Artificial Sequence: Synthetic oligonucleotide
  Sense strand starting at position 779 of SEQ ID NO: 1885429
ucuuaauacuuuguagaga

SEQ ID NO: 2341587 - RNA, 19 nt, Artificial Sequence
  Description of Artificial Sequence: Synthetic oligonucleotide
  Antisense strand to SEQ ID NO: 2341586
ucucuacaaaguauuaaga

SEQ ID NO: 2341588 - RNA, 19 nt, Artificial Sequence
  Description of Artificial Sequence: Synthetic oligonucleotide
  Sense strand starting at position 1182 of SEQ ID NO: 1885429
gugacuguuggauaccgaa

SEQ ID NO: 2341589 - RNA, 19 nt, Artificial Sequence
  Description of Artificial Sequence: Synthetic oligonucleotide
  Antisense strand to SEQ ID NO: 2341588
uucgguauccaacagucac

SEQ ID NO: 2341590 - RNA, 19 nt, Artificial Sequence
  Description of Artificial Sequence: Synthetic oligonucleotide
  Sense strand starting at position 1234 of SEQ ID NO: 1885429
ggauuacuuucccuuuaga

SEQ ID NO: 2341591 - RNA, 19 nt, Artificial Sequence
  Description of Artificial Sequence: Synthetic oligonucleotide
  Antisense strand to SEQ ID NO: 2341590
ucuaaagggaaaguaaucc

SEQ ID NO: 2341592 - RNA, 19 nt, Artificial Sequence
  Description of Artificial Sequence: Synthetic oligonucleotide
  Sense strand starting at position 1267 of SEQ ID NO: 1885429
agaauagaacuuggcacuu

SEQ ID NO: 2341593 - RNA, 19 nt, Artificial Sequence
  Description of Artificial Sequence: Synthetic oligonucleotide
  Antisense strand to SEQ ID NO: 2341592
aagugccaaguucuauucu

SEQ ID NO: 2341594 - RNA, 19 nt, Artificial Sequence
  Description of Artificial Sequence: Synthetic oligonucleotide
  Sense strand starting at position 1556 of SEQ ID NO: 1885429
uuguaauguguuccugugu

SEQ ID NO: 2341595 - RNA, 19 nt, Artificial Sequence
  Description of Artificial Sequence: Synthetic oligonucleotide
  Antisense strand to SEQ ID NO: 2341594
acacaggaacacauuacaa

SEQ ID NO: 2341596 - RNA, 19 nt, Artificial Sequence
  Description of Artificial Sequence: Synthetic oligonucleotide
  Sense strand starting at position 1617 of SEQ ID NO: 1885429
auauaauuagccugaguaa

SEQ ID NO: 2341597 - RNA, 19 nt, Artificial Sequence
  Description of Artificial Sequence: Synthetic oligonucleotide
  Antisense strand to SEQ ID NO: 2341596
uuacucaggcuaauuauau

SEQ ID NO: 2341598 - RNA, 19 nt, Artificial Sequence
  Description of Artificial Sequence: Synthetic oligonucleotide
  Sense strand starting at position 1648 of SEQ ID NO: 1885429
gccuaacaagagcauauua

SEQ ID NO: 2341599 - RNA, 19 nt, Artificial Sequence
  Description of Artificial Sequence: Synthetic oligonucleotide
  Antisense strand to SEQ ID NO: 2341598
uaauaugcucuuguuaggc

SEQ ID NO: 2341600 - RNA, 19 nt, Artificial Sequence
  Description of Artificial Sequence: Synthetic oligonucleotide
  Sense strand starting at position 2000 of SEQ ID NO: 1885429
ccauaaaucuuguuaaagu

SEQ ID NO: 2341601 - RNA, 19 nt, Artificial Sequence
  Description of Artificial Sequence: Synthetic oligonucleotide
  Antisense strand to SEQ ID NO: 2341600
acuuuaacaagauuuaugg

SEQ ID NO: 2341602 - RNA, 19 nt, Artificial Sequence
  Description of Artificial Sequence: Synthetic oligonucleotide
  Sense strand starting at position 2025 of SEQ ID NO: 1885429
ugcucaucuguggaauuga

SEQ ID NO: 2341603 - RNA, 19 nt, Artificial Sequence
  Description of Artificial Sequence: Synthetic oligonucleotide
  Antisense strand to SEQ ID NO: 2341602
ucaauuccacagaugagca

SEQ ID NO: 2341604 - RNA, 19 nt, Artificial Sequence
  Description of Artificial Sequence: Synthetic oligonucleotide
  Sense strand starting at position 2085 of SEQ ID NO: 1885429
guuuaaugcguucaggaac

SEQ ID NO: 2341605 - RNA, 19 nt, Artificial Sequence
  Description of Artificial Sequence: Synthetic oligonucleotide
  Antisense strand to SEQ ID NO: 2341604
guuccugaacgcauuaaac

SEQ ID NO: 2341606 - RNA, 19 nt, Artificial Sequence
  Description of Artificial Sequence: Synthetic oligonucleotide
  Sense strand starting at position 2103 of SEQ ID NO: 1885429
cauagcacuguugagaaca

SEQ ID NO: 2341607 - RNA, 19 nt, Artificial Sequence
  Description of Artificial Sequence: Synthetic oligonucleotide
  Antisense strand to SEQ ID NO: 2341606
uguucucaacagugcuaug

SEQ ID NO: 2341608 - RNA, 19 nt, Artificial Sequence
  Description of Artificial Sequence: Synthetic oligonucleotide
  Sense strand starting at position 2111 of SEQ ID NO: 1885429
uguugagaacaucguauac

SEQ ID NO: 2341609 - RNA, 19 nt, Artificial Sequence
  Description of Artificial Sequence: Synthetic oligonucleotide
  Antisense strand to SEQ ID NO: 2341608
guauacgauguucucaaca

SEQ ID NO: 2341610 - RNA, 19 nt, Artificial Sequence
  Description of Artificial Sequence: Synthetic oligonucleotide
  Sense strand starting at position 2307 of SEQ ID NO: 1885429
acaauaugagcucagcuau

SEQ ID NO: 2341611 - RNA, 19 nt, Artificial Sequence
  Description of Artificial Sequence: Synthetic oligonucleotide
  Antisense strand to SEQ ID NO: 2341610
auagcugagcucauauugu

SEQ ID NO: 2341612 - RNA, 19 nt, Artificial Sequence
  Description of Artificial Sequence: Synthetic oligonucleotide
  Sense strand starting at position 2403 of SEQ ID NO: 1885429
ggcagcaucugccucauuu

SEQ ID NO: 2341613 - RNA, 19 nt, Artificial Sequence
  Description of Artificial Sequence: Synthetic oligonucleotide
  Antisense strand to SEQ ID NO: 2341612
aaaugaggcagaugcugcc

SEQ ID NO: 2341614 - RNA, 19 nt, Artificial Sequence
  Description of Artificial Sequence: Synthetic oligonucleotide
  Sense strand starting at position 2456 of SEQ ID NO: 1885429
uuccguuauuugcuuaaag

SEQ ID NO: 2341615 - RNA, 19 nt, Artificial Sequence
  Description of Artificial Sequence: Synthetic oligonucleotide
  Antisense strand to SEQ ID NO: 2341614
cuuuaagcaaauaacggaa

SEQ ID NO: 2341616 - RNA, 19 nt, Artificial Sequence
  Description of Artificial Sequence: Synthetic oligonucleotide
  Sense strand starting at position 2458 of SEQ ID NO: 1885429
ccguuauuugcuuaaagcu

SEQ ID NO: 2341617 - RNA, 19 nt, Artificial Sequence
  Description of Artificial Sequence: Synthetic oligonucleotide
  Antisense strand to SEQ ID NO: 2341616
agcuuuaagcaaauaacgg

SEQ ID NO: 2341618 - RNA, 19 nt, Artificial Sequence
  Description of Artificial Sequence: Synthetic oligonucleotide
  Sense strand starting at position 2540 of SEQ ID NO: 1885429
aggccaucagcuuauaagu

SEQ ID NO: 2341619 - RNA, 19 nt, Artificial Sequence
  Description of Artificial Sequence: Synthetic oligonucleotide
  Antisense strand to SEQ ID NO: 2341618
acuuauaagcugauggccu

SEQ ID NO: 2341620 - RNA, 19 nt, Artificial Sequence
  Description of Artificial Sequence: Synthetic oligonucleotide
  Sense strand starting at position 2659 of SEQ ID NO: 1885429
uggagcagagccugagaau

SEQ ID NO: 2341621 - RNA, 19 nt, Artificial Sequence
  Description of Artificial Sequence: Synthetic oligonucleotide
  Antisense strand to SEQ ID NO: 2341620
auucucaggcucugcucca

SEQ ID NO: 2341622 - RNA, 19 nt, Artificial Sequence
  Description of Artificial Sequence: Synthetic oligonucleotide
  Sense strand starting at position 2672 of SEQ ID NO: 1885429
gagaauguguguucuacca

SEQ ID NO: 2341623 - RNA, 19 nt, Artificial Sequence
  Description of Artificial Sequence: Synthetic oligonucleotide
  Antisense strand to SEQ ID NO: 2341622
ugguagaacacacauucuc

SEQ ID NO: 2341624 - RNA, 19 nt, Artificial Sequence
  Description of Artificial Sequence: Synthetic oligonucleotide
  Sense strand starting at position 2680 of SEQ ID NO: 1885429
guguucuaccaauauccca

SEQ ID NO: 2341625 - RNA, 19 nt, Artificial Sequence
  Description of Artificial Sequence: Synthetic oligonucleotide
  Antisense strand to SEQ ID NO: 2341624
ugggauauugguagaacac

SEQ ID NO: 2341626 - RNA, 19 nt, Artificial Sequence
  Description of Artificial Sequence: Synthetic oligonucleotide
  Sense strand starting at position 2722 of SEQ ID NO: 1885429
augagcucccuggagguau

SEQ ID NO: 2341627 - RNA, 19 nt, Artificial Sequence
  Description of Artificial Sequence: Synthetic oligonucleotide
  Antisense strand to SEQ ID NO: 2341626
auaccuccagggagcucau

SEQ ID NO: 2341628 - RNA, 19 nt, Artificial Sequence
  Description of Artificial Sequence: Synthetic oligonucleotide
  Sense strand starting at position 2903 of SEQ ID NO: 1885429
uuaucugauucccugggua

SEQ ID NO: 2341629 - RNA, 19 nt, Artificial Sequence
  Description of Artificial Sequence: Synthetic oligonucleotide
  Antisense strand to SEQ ID NO: 2341628
uacccagggaaucagauaa

SEQ ID NO: 2341630 - RNA, 19 nt, Artificial Sequence
  Description of Artificial Sequence: Synthetic oligonucleotide
  Sense strand starting at position 2905 of SEQ ID NO: 1885429
aucugauucccuggguaug

SEQ ID NO: 2341631 - RNA, 19 nt, Artificial Sequence
  Description of Artificial Sequence: Synthetic oligonucleotide
  Antisense strand to SEQ ID NO: 2341630
cauacccagggaaucagau

SEQ ID NO: 2341632 - RNA, 19 nt, Artificial Sequence
  Description of Artificial Sequence: Synthetic oligonucleotide
  Sense strand starting at position 2980 of SEQ ID NO: 1885429
ugcaaauuauuccuaguga

SEQ ID NO: 2341633 - RNA, 19 nt, Artificial Sequence
  Description of Artificial Sequence: Synthetic oligonucleotide
  Antisense strand to SEQ ID NO: 2341632
ucacuaggaauaauuugca

SEQ ID NO: 2341634 - RNA, 19 nt, Artificial Sequence
  Description of Artificial Sequence: Synthetic oligonucleotide
  Sense strand starting at position 3000 of SEQ ID NO: 1885429
gggaaugaacuuugucuaa

SEQ ID NO: 2341635 - RNA, 19 nt, Artificial Sequence
  Description of Artificial Sequence: Synthetic oligonucleotide
  Antisense strand to SEQ ID NO: 2341634
uuagacaaaguucauuccc

SEQ ID NO: 2341636 - RNA, 19 nt, Artificial Sequence
  Description of Artificial Sequence: Synthetic oligonucleotide
  Sense strand starting at position 3147 of SEQ ID NO: 1885429
gagauuggaguuugauuau

SEQ ID NO: 2341637 - RNA, 19 nt, Artificial Sequence
  Description of Artificial Sequence: Synthetic oligonucleotide
  Antisense strand to SEQ ID NO: 2341636
auaaucaaacuccaaucuc

SEQ ID NO: 2341638 - RNA, 19 nt, Artificial Sequence
  Description of Artificial Sequence: Synthetic oligonucleotide
  Sense strand starting at position 3150 of SEQ ID NO: 1885429
auuggaguuugauuauuac

SEQ ID NO: 2341639 - RNA, 19 nt, Artificial Sequence
  Description of Artificial Sequence: Synthetic oligonucleotide
  Antisense strand to SEQ ID NO: 2341638
guaauaaucaaacuccaau

SEQ ID NO: 2341640 - RNA, 19 nt, Artificial Sequence
  Description of Artificial Sequence: Synthetic oligonucleotide
  Sense strand starting at position 3153 of SEQ ID NO: 1885429
ggaguuugauuauuacuca

SEQ ID NO: 2341641 - RNA, 19 nt, Artificial Sequence
  Description of Artificial Sequence: Synthetic oligonucleotide
  Antisense strand to SEQ ID NO: 2341640
ugaguaauaaucaaacucc

SEQ ID NO: 2341642 - RNA, 19 nt, Artificial Sequence
  Description of Artificial Sequence: Synthetic oligonucleotide
  Sense strand starting at position 3173 of SEQ ID NO: 1885429
aucagccucccggagaauu

SEQ ID NO: 2341643 - RNA, 19 nt, Artificial Sequence
  Description of Artificial Sequence: Synthetic oligonucleotide
  Antisense strand to SEQ ID NO: 2341642
aauucuccgggaggcugau

SEQ ID NO: 2341644 - RNA, 19 nt, Artificial Sequence
  Description of Artificial Sequence: Synthetic oligonucleotide
  Sense strand starting at position 3529 of SEQ ID NO: 1885429
aagauaauuuagugaguag

SEQ ID NO: 2341645 - RNA, 19 nt, Artificial Sequence
  Description of Artificial Sequence: Synthetic oligonucleotide
  Antisense strand to SEQ ID NO: 2341644
cuacucacuaaauuaucuu

SEQ ID NO: 2341646 - RNA, 19 nt, Artificial Sequence
  Description of Artificial Sequence: Synthetic oligonucleotide
  Sense strand starting at position 3555 of SEQ ID NO: 1885429
ggaaguagagaaugcugau

SEQ ID NO: 2341647 - RNA, 19 nt, Artificial Sequence
  Description of Artificial Sequence: Synthetic oligonucleotide
  Antisense strand to SEQ ID NO: 2341646
aucagcauucucuacuucc

SEQ ID NO: 2341648 - RNA, 19 nt, Artificial Sequence
  Description of Artificial Sequence: Synthetic oligonucleotide
  Sense strand starting at position 3561 of SEQ ID NO: 1885429
agagaaugcugauugguca

SEQ ID NO: 2341649 - RNA, 19 nt, Artificial Sequence
  Description of Artificial Sequence: Synthetic oligonucleotide
  Antisense strand to SEQ ID NO: 2341648
ugaccaaucagcauucucu

SEQ ID NO: 2341650 - RNA, 19 nt, Artificial Sequence
  Description of Artificial Sequence: Synthetic oligonucleotide
  Sense strand starting at position 3602 of SEQ ID NO: 1885429
aguggaagcugaccucuua

SEQ ID NO: 2341651 - RNA, 19 nt, Artificial Sequence
  Description of Artificial Sequence: Synthetic oligonucleotide
  Antisense strand to SEQ ID NO: 2341650
uaagaggucagcuuccacu

SEQ ID NO: 2341652 - RNA, 19 nt, Artificial Sequence
  Description of Artificial Sequence: Synthetic oligonucleotide
  Sense strand starting at position 3777 of SEQ ID NO: 1885429
uuuggagagguuuggaauc

SEQ ID NO: 2341653 - RNA, 19 nt, Artificial Sequence
  Description of Artificial Sequence: Synthetic oligonucleotide
  Antisense strand to SEQ ID NO: 2341652
gauuccaaaccucuccaaa

SEQ ID NO: 2341654 - RNA, 19 nt, Artificial Sequence
  Description of Artificial Sequence: Synthetic oligonucleotide
  Sense strand starting at position 3893 of SEQ ID NO: 1885429
ggguuuguuuagagaaagg

SEQ ID NO: 2341655 - RNA, 19 nt, Artificial Sequence
  Description of Artificial Sequence: Synthetic oligonucleotide
  Antisense strand to SEQ ID NO: 2341654
ccuuucucuaaacaaaccc

SEQ ID NO: 2341656 - RNA, 19 nt, Artificial Sequence
  Description of Artificial Sequence: Synthetic oligonucleotide
  Sense strand starting at position 149 of SEQ ID NO: 1885430
ugaacaguuucuguuauaa

SEQ ID NO: 2341657 - RNA, 19 nt, Artificial Sequence
  Description of Artificial Sequence: Synthetic oligonucleotide
  Antisense strand to SEQ ID NO: 2341656
uuauaacagaaacuguuca

SEQ ID NO: 2341658 - RNA, 19 nt, Artificial Sequence
  Description of Artificial Sequence: Synthetic oligonucleotide
  Sense strand starting at position 249 of SEQ ID NO: 1885430
ugagguguaaauggaguua

SEQ ID NO: 2341659 - RNA, 19 nt, Artificial Sequence
  Description of Artificial Sequence: Synthetic oligonucleotide
  Antisense strand to SEQ ID NO: 2341658
uaacuccauuuacaccuca

SEQ ID NO: 2341660 - RNA, 19 nt, Artificial Sequence
  Description of Artificial Sequence: Synthetic oligonucleotide
  Sense strand starting at position 427 of SEQ ID NO: 1885430
acaaucaugcagugcuuaa

SEQ ID NO: 2341661 - RNA, 19 nt, Artificial Sequence
  Description of Artificial Sequence: Synthetic oligonucleotide
  Antisense strand to SEQ ID NO: 2341660
uuaagcacugcaugauugu

SEQ ID NO: 2341662 - RNA, 19 nt, Artificial Sequence
  Description of Artificial Sequence: Synthetic oligonucleotide
  Sense strand starting at position 431 of SEQ ID NO: 1885430
ucaugcagugcuuaacaau

SEQ ID NO: 2341663 - RNA, 19 nt, Artificial Sequence
  Description of Artificial Sequence: Synthetic oligonucleotide
  Antisense strand to SEQ ID NO: 2341662
auuguuaagcacugcauga

SEQ ID NO: 2341664 - RNA, 19 nt, Artificial Sequence
  Description of Artificial Sequence: Synthetic oligonucleotide
  Sense strand starting at position 462 of SEQ ID NO: 1885430
caagaaauguguucuuaga

SEQ ID NO: 2341665 - RNA, 19 nt, Artificial Sequence
  Description of Artificial Sequence: Synthetic oligonucleotide
  Antisense strand to SEQ ID NO: 2341664
ucuaagaacacauuucuug

SEQ ID NO: 2341666 - RNA, 19 nt, Artificial Sequence
  Description of Artificial Sequence: Synthetic oligonucleotide
  Sense strand starting at position 464 of SEQ ID NO: 1885430
agaaauguguucuuagaua

SEQ ID NO: 2341667 - RNA, 19 nt, Artificial Sequence
  Description of Artificial Sequence: Synthetic oligonucleotide
  Antisense strand to SEQ ID NO: 2341666
uaucuaagaacacauuucu

SEQ ID NO: 2341668 - RNA, 19 nt, Artificial Sequence
  Description of Artificial Sequence: Synthetic oligonucleotide
  Sense strand starting at position 566 of SEQ ID NO: 1885430
agucuauuguuccuaggac

SEQ ID NO: 2341669 - RNA, 19 nt, Artificial Sequence
  Description of Artificial Sequence: Synthetic oligonucleotide
  Antisense strand to SEQ ID NO: 2341668
guccuaggaacaauagacu

SEQ ID NO: 2341670 - RNA, 19 nt, Artificial Sequence
  Description of Artificial Sequence: Synthetic oligonucleotide
  Sense strand starting at position 715 of SEQ ID NO: 1885430
augcucugucauugauuga

SEQ ID NO: 2341671 - RNA, 19 nt, Artificial Sequence
  Description of Artificial Sequence: Synthetic oligonucleotide
  Antisense strand to SEQ ID NO: 2341670
ucaaucaaugacagagcau

SEQ ID NO: 2341672 - RNA, 19 nt, Artificial Sequence
  Description of Artificial Sequence: Synthetic oligonucleotide
  Sense strand starting at position 750 of SEQ ID NO: 1885430
gcacgucuauaauccauau

SEQ ID NO: 2341673 - RNA, 19 nt, Artificial Sequence
  Description of Artificial Sequence: Synthetic oligonucleotide
  Antisense strand to SEQ ID NO: 2341672
auauggauuauagacgugc

SEQ ID NO: 2341674 - RNA, 19 nt, Artificial Sequence
  Description of Artificial Sequence: Synthetic oligonucleotide
  Sense strand starting at position 754 of SEQ ID NO: 1885430
gucuauaauccauauguac

SEQ ID NO: 2341675 - RNA, 19 nt, Artificial Sequence
  Description of Artificial Sequence: Synthetic oligonucleotide
  Antisense strand to SEQ ID NO: 2341674
guacauauggauuauagac

SEQ ID NO: 2341676 - RNA, 19 nt, Artificial Sequence
  Description of Artificial Sequence: Synthetic oligonucleotide
  Sense strand starting at position 790 of SEQ ID NO: 1885430
cagagcauauugucaagga

SEQ ID NO: 2341677 - RNA, 19 nt, Artificial Sequence
  Description of Artificial Sequence: Synthetic oligonucleotide
  Antisense strand to SEQ ID NO: 2341676
uccuugacaauaugcucug

SEQ ID NO: 2341678 - RNA, 19 nt, Artificial Sequence
  Description of Artificial Sequence: Synthetic oligonucleotide
  Sense strand starting at position 856 of SEQ ID NO: 1885430
ugcagaucacuccaauaug

SEQ ID NO: 2341679 - RNA, 19 nt, Artificial Sequence
  Description of Artificial Sequence: Synthetic oligonucleotide
  Antisense strand to SEQ ID NO: 2341678
cauauuggagugaucugca

SEQ ID NO: 2341680 - RNA, 19 nt, Artificial Sequence
  Description of Artificial Sequence: Synthetic oligonucleotide
  Sense strand starting at position 911 of SEQ ID NO: 1885430
cuuuauuucuucuaggaug

SEQ ID NO: 2341681 - RNA, 19 nt, Artificial Sequence
  Description of Artificial Sequence: Synthetic oligonucleotide
  Antisense strand to SEQ ID NO: 2341680
cauccuagaagaaauaaag

SEQ ID NO: 2341682 - RNA, 19 nt, Artificial Sequence
  Description of Artificial Sequence: Synthetic oligonucleotide
  Sense strand starting at position 1004 of SEQ ID NO: 1885430
uuuauaugauaguucucca

SEQ ID NO: 2341683 - RNA, 19 nt, Artificial Sequence
  Description of Artificial Sequence: Synthetic oligonucleotide
  Antisense strand to SEQ ID NO: 2341682
uggagaacuaucauauaaa

SEQ ID NO: 2341684 - RNA, 19 nt, Artificial Sequence
  Description of Artificial Sequence: Synthetic oligonucleotide
  Sense strand starting at position 1014 of SEQ ID NO: 1885430
aguucuccauuugaugaga

SEQ ID NO: 2341685 - RNA, 19 nt, Artificial Sequence
  Description of Artificial Sequence: Synthetic oligonucleotide
  Antisense strand to SEQ ID NO: 2341684
ucucaucaaauggagaacu

SEQ ID NO: 2341686 - RNA, 19 nt, Artificial Sequence
  Description of Artificial Sequence: Synthetic oligonucleotide
  Sense strand starting at position 1016 of SEQ ID NO: 1885430
uucuccauuugaugagaac

SEQ ID NO: 2341687 - RNA, 19 nt, Artificial Sequence
  Description of Artificial Sequence: Synthetic oligonucleotide
  Antisense strand to SEQ ID NO: 2341686
guucucaucaaauggagaa

SEQ ID NO: 2341688 - RNA, 19 nt, Artificial Sequence
  Description of Artificial Sequence: Synthetic oligonucleotide
  Sense strand starting at position 1019 of SEQ ID NO: 1885430
uccauuugaugagaacaaa

SEQ ID NO: 2341689 - RNA, 19 nt, Artificial Sequence
  Description of Artificial Sequence: Synthetic oligonucleotide
  Antisense strand to SEQ ID NO: 2341688
uuuguucucaucaaaugga

SEQ ID NO: 2341690 - RNA, 19 nt, Artificial Sequence
  Description of Artificial Sequence: Synthetic oligonucleotide
  Sense strand starting at position 1296 of SEQ ID NO: 1885430
cuauaaagguaggaaagau

SEQ ID NO: 2341691 - RNA, 19 nt, Artificial Sequence
  Description of Artificial Sequence: Synthetic oligonucleotide
  Antisense strand to SEQ ID NO: 2341690
aucuuuccuaccuuuauag

SEQ ID NO: 2341692 - RNA, 19 nt, Artificial Sequence
  Description of Artificial Sequence: Synthetic oligonucleotide
  Sense strand starting at position 1491 of SEQ ID NO: 1885430
augguacuucugcaauauu

SEQ ID NO: 2341693 - RNA, 19 nt, Artificial Sequence
  Description of Artificial Sequence: Synthetic oligonucleotide
  Antisense strand to SEQ ID NO: 2341692
aauauugcagaaguaccau

SEQ ID NO: 2341694 - RNA, 19 nt, Artificial Sequence
  Description of Artificial Sequence: Synthetic oligonucleotide
  Sense strand starting at position 1494 of SEQ ID NO: 1885430
guacuucugcaauauuagu

SEQ ID NO: 2341695 - RNA, 19 nt, Artificial Sequence
  Description of Artificial Sequence: Synthetic oligonucleotide
  Antisense strand to SEQ ID NO: 2341694
acuaauauugcagaaguac

SEQ ID NO: 2341696 - RNA, 19 nt, Artificial Sequence
  Description of Artificial Sequence: Synthetic oligonucleotide
  Sense strand starting at position 1797 of SEQ ID NO: 1885430
accuacuuccaguaaaggu

SEQ ID NO: 2341697 - RNA, 19 nt, Artificial Sequence
  Description of Artificial Sequence: Synthetic oligonucleotide
  Antisense strand to SEQ ID NO: 2341696
accuuuacuggaaguaggu

SEQ ID NO: 2341698 - RNA, 19 nt, Artificial Sequence
  Description of Artificial Sequence: Synthetic oligonucleotide
  Sense strand starting at position 1814 of SEQ ID NO: 1885430
guaguuacccaccauugaa

SEQ ID NO: 2341699 - RNA, 19 nt, Artificial Sequence
  Description of Artificial Sequence: Synthetic oligonucleotide
  Antisense strand to SEQ ID NO: 2341698
uucaaugguggguaacuac

SEQ ID NO: 2341700 - RNA, 19 nt, Artificial Sequence
  Description of Artificial Sequence: Synthetic oligonucleotide
  Sense strand starting at position 1817 of SEQ ID NO: 1885430
guuacccaccauugaaagu

SEQ ID NO: 2341701 - RNA, 19 nt, Artificial Sequence
  Description of Artificial Sequence: Synthetic oligonucleotide
  Antisense strand to SEQ ID NO: 2341700
acuuucaaugguggguaac

SEQ ID NO: 2341702 - RNA, 19 nt, Artificial Sequence
  Description of Artificial Sequence: Synthetic oligonucleotide
  Sense strand starting at position 1925 of SEQ ID NO: 1885430
augucauccuuugcaagga

SEQ ID NO: 2341703 - RNA, 19 nt, Artificial Sequence
  Description of Artificial Sequence: Synthetic oligonucleotide
  Antisense strand to SEQ ID NO: 2341702
uccuugcaaaggaugacau

SEQ ID NO: 2341704 - RNA, 19 nt, Artificial Sequence
  Description of Artificial Sequence: Synthetic oligonucleotide
  Sense strand starting at position 1935 of SEQ ID NO: 1885430
uugcaaggacacugauaau

SEQ ID NO: 2341705 - RNA, 19 nt, Artificial Sequence
  Description of Artificial Sequence: Synthetic oligonucleotide
  Antisense strand to SEQ ID NO: 2341704
auuaucaguguccuugcaa

SEQ ID NO: 2341706 - RNA, 19 nt, Artificial Sequence
  Description of Artificial Sequence: Synthetic oligonucleotide
  Sense strand starting at position 2027 of SEQ ID NO: 1885430
uggucauauuagucucaau

SEQ ID NO: 2341707 - RNA, 19 nt, Artificial Sequence
  Description of Artificial Sequence: Synthetic oligonucleotide
  Antisense strand to SEQ ID NO: 2341706
auugagacuaauaugacca

SEQ ID NO: 2341708 - RNA, 19 nt, Artificial Sequence
  Description of Artificial Sequence: Synthetic oligonucleotide
  Sense strand starting at position 2253 of SEQ ID NO: 1885430
uggacaauacacuguaauu

SEQ ID NO: 2341709 - RNA, 19 nt, Artificial Sequence
  Description of Artificial Sequence: Synthetic oligonucleotide
  Antisense strand to SEQ ID NO: 2341708
aauuacaguguauugucca

SEQ ID NO: 2341710 - RNA, 19 nt, Artificial Sequence
  Description of Artificial Sequence: Synthetic oligonucleotide
  Sense strand starting at position 2291 of SEQ ID NO: 1885430
ugaaauugaucugaagaaa

SEQ ID NO: 2341711 - RNA, 19 nt, Artificial Sequence
  Description of Artificial Sequence: Synthetic oligonucleotide
  Antisense strand to SEQ ID NO: 2341710
uuucuucagaucaauuuca

SEQ ID NO: 2341712 - RNA, 19 nt, Artificial Sequence
  Description of Artificial Sequence: Synthetic oligonucleotide
  Sense strand starting at position 2428 of SEQ ID NO: 1885430
uagauuccacauuguggua

SEQ ID NO: 2341713 - RNA, 19 nt, Artificial Sequence
  Description of Artificial Sequence: Synthetic oligonucleotide
  Antisense strand to SEQ ID NO: 2341712
uaccacaauguggaaucua

SEQ ID NO: 2341714 - RNA, 19 nt, Artificial Sequence
  Description of Artificial Sequence: Synthetic oligonucleotide
  Sense strand starting at position 2539 of SEQ ID NO: 1885430
gcugaagaguauucuauua

SEQ ID NO: 2341715 - RNA, 19 nt, Artificial Sequence
  Description of Artificial Sequence: Synthetic oligonucleotide
  Antisense strand to SEQ ID NO: 2341714
uaauagaauacucuucagc

SEQ ID NO: 2341716 - RNA, 19 nt, Artificial Sequence
  Description of Artificial Sequence: Synthetic oligonucleotide
  Sense strand starting at position 2702 of SEQ ID NO: 1885430
ugggauugcuaagucacau

SEQ ID NO: 2341717 - RNA, 19 nt, Artificial Sequence
  Description of Artificial Sequence: Synthetic oligonucleotide
  Antisense strand to SEQ ID NO: 2341716
augugacuuagcaauccca

SEQ ID NO: 2341718 - RNA, 19 nt, Artificial Sequence
  Description of Artificial Sequence: Synthetic oligonucleotide
  Sense strand starting at position 2743 of SEQ ID NO: 1885430
ugaggagccucuguauagu

SEQ ID NO: 2341719 - RNA, 19 nt, Artificial Sequence
  Description of Artificial Sequence: Synthetic oligonucleotide
  Antisense strand to SEQ ID NO: 2341718
acuauacagaggcuccuca

SEQ ID NO: 2341720 - RNA, 19 nt, Artificial Sequence
  Description of Artificial Sequence: Synthetic oligonucleotide
  Sense strand starting at position 2829 of SEQ ID NO: 1885430
cuccaacacuaguuaaguu

SEQ ID NO: 2341721 - RNA, 19 nt, Artificial Sequence
  Description of Artificial Sequence: Synthetic oligonucleotide
  Antisense strand to SEQ ID NO: 2341720
aacuuaacuaguguuggag

SEQ ID NO: 2341722 - RNA, 19 nt, Artificial Sequence
  Description of Artificial Sequence: Synthetic oligonucleotide
  Sense strand starting at position 3332 of SEQ ID NO: 1885430
acauguaaguccuuauuaa

SEQ ID NO: 2341723 - RNA, 19 nt, Artificial Sequence
  Description of Artificial Sequence: Synthetic oligonucleotide
  Antisense strand to SEQ ID NO: 2341722
uuaauaaggacuuacaugu

SEQ ID NO: 2341724 - RNA, 19 nt, Artificial Sequence
  Description of Artificial Sequence: Synthetic oligonucleotide
  Sense strand starting at position 3514 of SEQ ID NO: 1885430
gcugguuuaugugucauuu

SEQ ID NO: 2341725 - RNA, 19 nt, Artificial Sequence
  Description of Artificial Sequence: Synthetic oligonucleotide
  Antisense strand to SEQ ID NO: 2341724
aaaugacacauaaaccagc

SEQ ID NO: 2341726 - RNA, 19 nt, Artificial Sequence
  Description of Artificial Sequence: Synthetic oligonucleotide
  Sense strand starting at position 3667 of SEQ ID NO: 1885430
guuucugagugccuauaaa

SEQ ID NO: 2341727 - RNA, 19 nt, Artificial Sequence
  Description of Artificial Sequence: Synthetic oligonucleotide
  Antisense strand to SEQ ID NO: 2341726
uuuauaggcacucagaaac

SEQ ID NO: 2341728 - RNA, 19 nt, Artificial Sequence
  Description of Artificial Sequence: Synthetic oligonucleotide
  Sense strand starting at position 3828 of SEQ ID NO: 1885430
agacuugaucaaugcaaug

SEQ ID NO: 2341729 - RNA, 19 nt, Artificial Sequence
  Description of Artificial Sequence: Synthetic oligonucleotide
  Antisense strand to SEQ ID NO: 2341728
cauugcauugaucaagucu

SEQ ID NO: 2341730 - RNA, 19 nt, Artificial Sequence
  Description of Artificial Sequence: Synthetic oligonucleotide
  Sense strand starting at position 3924 of SEQ ID NO: 1885430
aaguuaugucuguagcuug

SEQ ID NO: 2341731 - RNA, 19 nt, Artificial Sequence
  Description of Artificial Sequence: Synthetic oligonucleotide
  Antisense strand to SEQ ID NO: 2341730
caagcuacagacauaacuu

SEQ ID NO: 2341732 - RNA, 19 nt, Artificial Sequence
  Description of Artificial Sequence: Synthetic oligonucleotide
  Sense strand starting at position 3927 of SEQ ID NO: 1885430
uuaugucuguagcuugaaa

SEQ ID NO: 2341733 - RNA, 19 nt, Artificial Sequence
  Description of Artificial Sequence: Synthetic oligonucleotide
  Antisense strand to SEQ ID NO: 2341732
uuucaagcuacagacauaa

SEQ ID NO: 2341734 - RNA, 19 nt, Artificial Sequence
  Description of Artificial Sequence: Synthetic oligonucleotide
  Sense strand starting at position 3953 of SEQ ID NO: 1885430
gugugacaucuuuagcuuu

SEQ ID NO: 2341735 - RNA, 19 nt, Artificial Sequence
  Description of Artificial Sequence: Synthetic oligonucleotide
  Antisense strand to SEQ ID NO: 2341734
aaagcuaaagaugucacac

SEQ ID NO: 2341736 - RNA, 19 nt, Artificial Sequence
  Description of Artificial Sequence: Synthetic oligonucleotide
  Sense strand starting at position 458 of SEQ ID NO: 1885431
caguuauaugaacgaauag

SEQ ID NO: 2341737 - RNA, 19 nt, Artificial Sequence
  Description of Artificial Sequence: Synthetic oligonucleotide
  Antisense strand to SEQ ID NO: 2341736
cuauucguucauauaacug

SEQ ID NO: 2341738 - RNA, 19 nt, Artificial Sequence
  Description of Artificial Sequence: Synthetic oligonucleotide
  Sense strand starting at position 459 of SEQ ID NO: 1885431
aguuauaugaacgaauagu

SEQ ID NO: 2341739 - RNA, 19 nt, Artificial Sequence
  Description of Artificial Sequence: Synthetic oligonucleotide
  Antisense strand to SEQ ID NO: 2341738
acuauucguucauauaacu

SEQ ID NO: 2341740 - RNA, 19 nt, Artificial Sequence
  Description of Artificial Sequence: Synthetic oligonucleotide
  Sense strand starting at position 467 of SEQ ID NO: 1885431
gaacgaauaguacacaguu

SEQ ID NO: 2341741 - RNA, 19 nt, Artificial Sequence
  Description of Artificial Sequence: Synthetic oligonucleotide
  Antisense strand to SEQ ID NO: 2341740
aacuguguacuauucguuc

SEQ ID NO: 2341742 - RNA, 19 nt, Artificial Sequence
  Description of Artificial Sequence: Synthetic oligonucleotide
  Sense strand starting at position 485 of SEQ ID NO: 1885431
uuuaguccuuuauugauag

SEQ ID NO: 2341743 - RNA, 19 nt, Artificial Sequence
  Description of Artificial Sequence: Synthetic oligonucleotide
  Antisense strand to SEQ ID NO: 2341742
cuaucaauaaaggacuaaa

SEQ ID NO: 2341744 - RNA, 19 nt, Artificial Sequence
  Description of Artificial Sequence: Synthetic oligonucleotide
  Sense strand starting at position 1083 of SEQ ID NO: 1885431
acccaauguuuagcuuaga

SEQ ID NO: 2341745 - RNA, 19 nt, Artificial Sequence
  Description of Artificial Sequence: Synthetic oligonucleotide
  Antisense strand to SEQ ID NO: 2341744
ucuaagcuaaacauugggu

SEQ ID NO: 2341746 - RNA, 19 nt, Artificial Sequence
  Description of Artificial Sequence: Synthetic oligonucleotide
  Sense strand starting at position 1084 of SEQ ID NO: 1885431
cccaauguuuagcuuagaa

SEQ ID NO: 2341747 - RNA, 19 nt, Artificial Sequence
  Description of Artificial Sequence: Synthetic oligonucleotide
  Antisense strand to SEQ ID NO: 2341746
uucuaagcuaaacauuggg

SEQ ID NO: 2341748 - RNA, 19 nt, Artificial Sequence
  Description of Artificial Sequence: Synthetic oligonucleotide
  Sense strand starting at position 1086 of SEQ ID NO: 1885431
caauguuuagcuuagaaug

SEQ ID NO: 2341749 - RNA, 19 nt, Artificial Sequence
  Description of Artificial Sequence: Synthetic oligonucleotide
  Antisense strand to SEQ ID NO: 2341748
cauucuaagcuaaacauug

SEQ ID NO: 2341750 - RNA, 19 nt, Artificial Sequence
  Description of Artificial Sequence: Synthetic oligonucleotide
  Sense strand starting at position 1260 of SEQ ID NO: 1885431
auaagugagucacugauga

SEQ ID NO: 2341751 - RNA, 19 nt, Artificial Sequence
  Description of Artificial Sequence: Synthetic oligonucleotide
  Antisense strand to SEQ ID NO: 2341750
ucaucagugacucacuuau

SEQ ID NO: 2341752 - RNA, 19 nt, Artificial Sequence
  Description of Artificial Sequence: Synthetic oligonucleotide
  Sense strand starting at position 1486 of SEQ ID NO: 1885431
aggaaacacucauauuugu

SEQ ID NO: 2341753 - RNA, 19 nt, Artificial Sequence
  Description of Artificial Sequence: Synthetic oligonucleotide
  Antisense strand to SEQ ID NO: 2341752
acaaauaugaguguuuccu

SEQ ID NO: 2341754 - RNA, 19 nt, Artificial Sequence
  Description of Artificial Sequence: Synthetic oligonucleotide
  Sense strand starting at position 1532 of SEQ ID NO: 1885431
aguccuauucuuuggaaau

SEQ ID NO: 2341755 - RNA, 19 nt, Artificial Sequence
  Description of Artificial Sequence: Synthetic oligonucleotide
  Antisense strand to SEQ ID NO: 2341754
auuuccaaagaauaggacu

SEQ ID NO: 2341756 - RNA, 19 nt, Artificial Sequence
  Description of Artificial Sequence: Synthetic oligonucleotide
  Sense strand starting at position 2069 of SEQ ID NO: 1885431
aagugagaacaguggcauu

SEQ ID NO: 2341757 - RNA, 19 nt, Artificial Sequence
  Description of Artificial Sequence: Synthetic oligonucleotide
  Antisense strand to SEQ ID NO: 2341756
aaugccacuguucucacuu

SEQ ID NO: 2341758 - RNA, 19 nt, Artificial Sequence
  Description of Artificial Sequence: Synthetic oligonucleotide
  Sense strand starting at position 2181 of SEQ ID NO: 1885431
ggcugacauauauguagaa

SEQ ID NO: 2341759 - RNA, 19 nt, Artificial Sequence
  Description of Artificial Sequence: Synthetic oligonucleotide
  Antisense strand to SEQ ID NO: 2341758
uucuacauauaugucagcc

SEQ ID NO: 2341760 - RNA, 19 nt, Artificial Sequence
  Description of Artificial Sequence: Synthetic oligonucleotide
  Sense strand starting at position 2182 of SEQ ID NO: 1885431
gcugacauauauguagaaa

SEQ ID NO: 2341761 - RNA, 19 nt, Artificial Sequence
  Description of Artificial Sequence: Synthetic oligonucleotide
  Antisense strand to SEQ ID NO: 2341760
uuucuacauauaugucagc

SEQ ID NO: 2341762 - RNA, 19 nt, Artificial Sequence
  Description of Artificial Sequence: Synthetic oligonucleotide
  Sense strand starting at position 2231 of SEQ ID NO: 1885431
agggaagaauacuauaaua

SEQ ID NO: 2341763 - RNA, 19 nt, Artificial Sequence
  Description of Artificial Sequence: Synthetic oligonucleotide
  Antisense strand to SEQ ID NO: 2341762
uauuauaguauucuucccu

SEQ ID NO: 2341764 - RNA, 19 nt, Artificial Sequence
  Description of Artificial Sequence: Synthetic oligonucleotide
  Sense strand starting at position 2317 of SEQ ID NO: 1885431
acaguugugauagggaauc

SEQ ID NO: 2341765 - RNA, 19 nt, Artificial Sequence
  Description of Artificial Sequence: Synthetic oligonucleotide
  Antisense strand to SEQ ID NO: 2341764
gauucccuaucacaacugu

SEQ ID NO: 2341766 - RNA, 19 nt, Artificial Sequence
  Description of Artificial Sequence: Synthetic oligonucleotide
  Sense strand starting at position 2383 of SEQ ID NO: 1885431
cuggucuaucacgaaacuu

SEQ ID NO: 2341767 - RNA, 19 nt, Artificial Sequence
  Description of Artificial Sequence: Synthetic oligonucleotide
  Antisense strand to SEQ ID NO: 2341766
aaguuucgugauagaccag

SEQ ID NO: 2341768 - RNA, 19 nt, Artificial Sequence
  Description of Artificial Sequence: Synthetic oligonucleotide
  Sense strand starting at position 2452 of SEQ ID NO: 1885431
auauuagcucacugaguua

SEQ ID NO: 2341769 - RNA, 19 nt, Artificial Sequence
  Description of Artificial Sequence: Synthetic oligonucleotide
  Antisense strand to SEQ ID NO: 2341768
uaacucagugagcuaauau

SEQ ID NO: 2341770 - RNA, 19 nt, Artificial Sequence
  Description of Artificial Sequence: Synthetic oligonucleotide
  Sense strand starting at position 2566 of SEQ ID NO: 1885431
uacugagaagugggucaaa

SEQ ID NO: 2341771 - RNA, 19 nt, Artificial Sequence
  Description of Artificial Sequence: Synthetic oligonucleotide
  Antisense strand to SEQ ID NO: 2341770
uuugacccacuucucagua

SEQ ID NO: 2341772 - RNA, 19 nt, Artificial Sequence
  Description of Artificial Sequence: Synthetic oligonucleotide
  Sense strand starting at position 2589 of SEQ ID NO: 1885431
agguguaacauagaaguuu

SEQ ID NO: 2341773 - RNA, 19 nt, Artificial Sequence
  Description of Artificial Sequence: Synthetic oligonucleotide
  Antisense strand to SEQ ID NO: 2341772
aaacuucuauguuacaccu

SEQ ID NO: 2341774 - RNA, 19 nt, Artificial Sequence
  Description of Artificial Sequence: Synthetic oligonucleotide
  Sense strand starting at position 2600 of SEQ ID NO: 1885431
agaaguuugccacaguucu

SEQ ID NO: 2341775 - RNA, 19 nt, Artificial Sequence
  Description of Artificial Sequence: Synthetic oligonucleotide
  Antisense strand to SEQ ID NO: 2341774
agaacuguggcaaacuucu

SEQ ID NO: 2341776 - RNA, 19 nt, Artificial Sequence
  Description of Artificial Sequence: Synthetic oligonucleotide
  Sense strand starting at position 2943 of SEQ ID NO: 1885431
acauguucccaaggaucaa

SEQ ID NO: 2341777 - RNA, 19 nt, Artificial Sequence
  Description of Artificial Sequence: Synthetic oligonucleotide
  Antisense strand to SEQ ID NO: 2341776
uugauccuugggaacaugu

SEQ ID NO: 2341778 - RNA, 19 nt, Artificial Sequence
  Description of Artificial Sequence: Synthetic oligonucleotide
  Sense strand starting at position 3031 of SEQ ID NO: 1885431
ggcagugaggaauauuagu

SEQ ID NO: 2341779 - RNA, 19 nt, Artificial Sequence
  Description of Artificial Sequence: Synthetic oligonucleotide
  Antisense strand to SEQ ID NO: 2341778
acuaauauuccucacugcc

SEQ ID NO: 2341780 - RNA, 19 nt, Artificial Sequence
  Description of Artificial Sequence: Synthetic oligonucleotide
  Sense strand starting at position 3036 of SEQ ID NO: 1885431
ugaggaauauuagugcagu

SEQ ID NO: 2341781 - RNA, 19 nt, Artificial Sequence
  Description of Artificial Sequence: Synthetic oligonucleotide
  Antisense strand to SEQ ID NO: 2341780
acugcacuaauauuccuca

SEQ ID NO: 2341782 - RNA, 19 nt, Artificial Sequence
  Description of Artificial Sequence: Synthetic oligonucleotide
  Sense strand starting at position 3078 of SEQ ID NO: 1885431
uugcuaaggcaccagaaau

SEQ ID NO: 2341783 - RNA, 19 nt, Artificial Sequence
  Description of Artificial Sequence: Synthetic oligonucleotide
  Antisense strand to SEQ ID NO: 2341782
auuucuggugccuuagcaa

SEQ ID NO: 2341784 - RNA, 19 nt, Artificial Sequence
  Description of Artificial Sequence: Synthetic oligonucleotide
  Sense strand starting at position 3113 of SEQ ID NO: 1885431
uugcuacucucaguggaaa

SEQ ID NO: 2341785 - RNA, 19 nt, Artificial Sequence
  Description of Artificial Sequence: Synthetic oligonucleotide
  Antisense strand to SEQ ID NO: 2341784
uuuccacugagaguagcaa

SEQ ID NO: 2341786 - RNA, 19 nt, Artificial Sequence
  Description of Artificial Sequence: Synthetic oligonucleotide
  Sense strand starting at position 3115 of SEQ ID NO: 1885431
gcuacucucaguggaaaug

SEQ ID NO: 2341787 - RNA, 19 nt, Artificial Sequence
  Description of Artificial Sequence: Synthetic oligonucleotide
  Antisense strand to SEQ ID NO: 2341786
cauuuccacugagaguagc

SEQ ID NO: 2341788 - RNA, 19 nt, Artificial Sequence
  Description of Artificial Sequence: Synthetic oligonucleotide
  Sense strand starting at position 3116 of SEQ ID NO: 1885431
cuacucucaguggaaaugu

SEQ ID NO: 2341789 - RNA, 19 nt, Artificial Sequence
  Description of Artificial Sequence: Synthetic oligonucleotide
  Antisense strand to SEQ ID NO: 2341788
acauuuccacugagaguag

SEQ ID NO: 2341790 - RNA, 19 nt, Artificial Sequence
  Description of Artificial Sequence: Synthetic oligonucleotide
  Sense strand starting at position 3186 of SEQ ID NO: 1885431
uguggacucccagaaaggu

SEQ ID NO: 2341791 - RNA, 19 nt, Artificial Sequence
  Description of Artificial Sequence: Synthetic oligonucleotide
  Antisense strand to SEQ ID NO: 2341790
accuuucugggaguccaca

SEQ ID NO: 2341792 - RNA, 19 nt, Artificial Sequence
  Description of Artificial Sequence: Synthetic oligonucleotide
  Sense strand starting at position 3194 of SEQ ID NO: 1885431
cccagaaagguuuguaaga

SEQ ID NO: 2341793 - RNA, 19 nt, Artificial Sequence
  Description of Artificial Sequence: Synthetic oligonucleotide
  Antisense strand to SEQ ID NO: 2341792
ucuuacaaaccuuucuggg

SEQ ID NO: 2341794 - RNA, 19 nt, Artificial Sequence
  Description of Artificial Sequence: Synthetic oligonucleotide
  Sense strand starting at position 3195 of SEQ ID NO: 1885431
ccagaaagguuuguaagac

SEQ ID NO: 2341795 - RNA, 19 nt, Artificial Sequence
  Description of Artificial Sequence: Synthetic oligonucleotide
  Antisense strand to SEQ ID NO: 2341794
gucuuacaaaccuuucugg

SEQ ID NO: 2341796 - RNA, 19 nt, Artificial Sequence
  Description of Artificial Sequence: Synthetic oligonucleotide
  Sense strand starting at position 3244 of SEQ ID NO: 1885431
gcuacugauguggaagcau

SEQ ID NO: 2341797 - RNA, 19 nt, Artificial Sequence
  Description of Artificial Sequence: Synthetic oligonucleotide
  Antisense strand to SEQ ID NO: 2341796
augcuuccacaucaguagc

SEQ ID NO: 2341798 - RNA, 19 nt, Artificial Sequence
  Description of Artificial Sequence: Synthetic oligonucleotide
  Sense strand starting at position 3517 of SEQ ID NO: 1885431
ucagauaucucccucugag

SEQ ID NO: 2341799 - RNA, 19 nt, Artificial Sequence
  Description of Artificial Sequence: Synthetic oligonucleotide
  Antisense strand to SEQ ID NO: 2341798
cucagagggagauaucuga

SEQ ID NO: 2341800 - RNA, 19 nt, Artificial Sequence
  Description of Artificial Sequence: Synthetic oligonucleotide
  Sense strand starting at position 3558 of SEQ ID NO: 1885431
gaagacuugcaauggcuau

SEQ ID NO: 2341801 - RNA, 19 nt, Artificial Sequence
  Description of Artificial Sequence: Synthetic oligonucleotide
  Antisense strand to SEQ ID NO: 2341800
auagccauugcaagucuuc

SEQ ID NO: 2341802 - RNA, 19 nt, Artificial Sequence
  Description of Artificial Sequence: Synthetic oligonucleotide
  Sense strand starting at position 3562 of SEQ ID NO: 1885431
acuugcaauggcuauuaau

SEQ ID NO: 2341803 - RNA, 19 nt, Artificial Sequence
  Description of Artificial Sequence: Synthetic oligonucleotide
  Antisense strand to SEQ ID NO: 2341802
auuaauagccauugcaagu

SEQ ID NO: 2341804 - RNA, 19 nt, Artificial Sequence
  Description of Artificial Sequence: Synthetic oligonucleotide
  Sense strand starting at position 3662 of SEQ ID NO: 1885431
agguaagagucucuuuaaa

SEQ ID NO: 2341805 - RNA, 19 nt, Artificial Sequence
  Description of Artificial Sequence: Synthetic oligonucleotide
  Antisense strand to SEQ ID NO: 2341804
uuuaaagagacucuuaccu

SEQ ID NO: 2341806 - RNA, 19 nt, Artificial Sequence
  Description of Artificial Sequence: Synthetic oligonucleotide
  Sense strand starting at position 3664 of SEQ ID NO: 1885431
guaagagucucuuuaaaga

SEQ ID NO: 2341807 - RNA, 19 nt, Artificial Sequence
  Description of Artificial Sequence: Synthetic oligonucleotide
  Antisense strand to SEQ ID NO: 2341806
ucuuuaaagagacucuuac

SEQ ID NO: 2341808 - RNA, 19 nt, Artificial Sequence
  Description of Artificial Sequence: Synthetic oligonucleotide
  Sense strand starting at position 3837 of SEQ ID NO: 1885431
uguagaacuucuguagaau

SEQ ID NO: 2341809 - RNA, 19 nt, Artificial Sequence
  Description of Artificial Sequence: Synthetic oligonucleotide
  Antisense strand to SEQ ID NO: 2341808
auucuacagaaguucuaca

SEQ ID NO: 2341810 - RNA, 19 nt, Artificial Sequence
  Description of Artificial Sequence: Synthetic oligonucleotide
  Sense strand starting at position 3840 of SEQ ID NO: 1885431
agaacuucuguagaaugca

SEQ ID NO: 2341811 - RNA, 19 nt, Artificial Sequence
  Description of Artificial Sequence: Synthetic oligonucleotide
  Antisense strand to SEQ ID NO: 2341810
ugcauucuacagaaguucu

SEQ ID NO: 2341812 - RNA, 19 nt, Artificial Sequence
  Description of Artificial Sequence: Synthetic oligonucleotide
  Sense strand starting at position 3843 of SEQ ID NO: 1885431
acuucuguagaaugcauau

SEQ ID NO: 2341813 - RNA, 19 nt, Artificial Sequence
  Description of Artificial Sequence: Synthetic oligonucleotide
  Antisense strand to SEQ ID NO: 2341812
auaugcauucuacagaagu

SEQ ID NO: 2341814 - RNA, 19 nt, Artificial Sequence
  Description of Artificial Sequence: Synthetic oligonucleotide
  Sense strand starting at position 3952 of SEQ ID NO: 1885431
ucaguaaagcgauacugaa

SEQ ID NO: 2341815 - RNA, 19 nt, Artificial Sequence
  Description of Artificial Sequence: Synthetic oligonucleotide
  Antisense strand to SEQ ID NO: 2341814
uucaguaucgcuuuacuga

SEQ ID NO: 2341816 - RNA, 19 nt, Artificial Sequence
  Description of Artificial Sequence: Synthetic oligonucleotide
  Sense strand starting at position 84 of SEQ ID NO: 1885432
cugaaaugaacguggcaaa

SEQ ID NO: 2341817 - RNA, 19 nt, Artificial Sequence
  Description of Artificial Sequence: Synthetic oligonucleotide
  Antisense strand to SEQ ID NO: 2341816
uuugccacguucauuucag

SEQ ID NO: 2341818 - RNA, 19 nt, Artificial Sequence
  Description of Artificial Sequence: Synthetic oligonucleotide
  Sense strand starting at position 259 of SEQ ID NO: 1885432
uuguuacauguauguugga

SEQ ID NO: 2341819 - RNA, 19 nt, Artificial Sequence
  Description of Artificial Sequence: Synthetic oligonucleotide
  Antisense strand to SEQ ID NO: 2341818
uccaacauacauguaacaa

SEQ ID NO: 2341820 - RNA, 19 nt, Artificial Sequence
  Description of Artificial Sequence: Synthetic oligonucleotide
  Sense strand starting at position 484 of SEQ ID NO: 1885432
gacagcuguucuccagaga

SEQ ID NO: 2341821 - RNA, 19 nt, Artificial Sequence
  Description of Artificial Sequence: Synthetic oligonucleotide
  Antisense strand to SEQ ID NO: 2341820
ucucuggagaacagcuguc

SEQ ID NO: 2341822 - RNA, 19 nt, Artificial Sequence
  Description of Artificial Sequence: Synthetic oligonucleotide
  Sense strand starting at position 615 of SEQ ID NO: 1885432
acaguaaauccauguuaag

SEQ ID NO: 2341823 - RNA, 19 nt, Artificial Sequence
  Description of Artificial Sequence: Synthetic oligonucleotide
  Antisense strand to SEQ ID NO: 2341822
cuuaacauggauuuacugu

SEQ ID NO: 2341824 - RNA, 19 nt, Artificial Sequence
  Description of Artificial Sequence: Synthetic oligonucleotide
  Sense strand starting at position 625 of SEQ ID NO: 1885432
cauguuaagguguaaagac

SEQ ID NO: 2341825 - RNA, 19 nt, Artificial Sequence
  Description of Artificial Sequence: Synthetic oligonucleotide
  Antisense strand to SEQ ID NO: 2341824
gucuuuacaccuuaacaug

SEQ ID NO: 2341826 - RNA, 19 nt, Artificial Sequence
  Description of Artificial Sequence: Synthetic oligonucleotide
  Sense strand starting at position 769 of SEQ ID NO: 1885432
gaagcugacuuugugaaca

SEQ ID NO: 2341827 - RNA, 19 nt, Artificial Sequence
  Description of Artificial Sequence: Synthetic oligonucleotide
  Antisense strand to SEQ ID NO: 2341826
uguucacaaagucagcuuc

SEQ ID NO: 2341828 - RNA, 19 nt, Artificial Sequence
  Description of Artificial Sequence: Synthetic oligonucleotide
  Sense strand starting at position 831 of SEQ ID NO: 1885432
gcaggcucccgauaggaua

SEQ ID NO: 2341829 - RNA, 19 nt, Artificial Sequence
  Description of Artificial Sequence: Synthetic oligonucleotide
  Antisense strand to SEQ ID NO: 2341828
uauccuaucgggagccugc

SEQ ID NO: 2341830 - RNA, 19 nt, Artificial Sequence
  Description of Artificial Sequence: Synthetic oligonucleotide
  Sense strand starting at position 890 of SEQ ID NO: 1885432
guucuagaugauuggaagu

SEQ ID NO: 2341831 - RNA, 19 nt, Artificial Sequence
  Description of Artificial Sequence: Synthetic oligonucleotide
  Antisense strand to SEQ ID NO: 2341830
acuuccaaucaucuagaac

SEQ ID NO: 2341832 - RNA, 19 nt, Artificial Sequence
  Description of Artificial Sequence: Synthetic oligonucleotide
  Sense strand starting at position 1130 of SEQ ID NO: 1885432
gcaucaauuccuuaggcuu

SEQ ID NO: 2341833 - RNA, 19 nt, Artificial Sequence
  Description of Artificial Sequence: Synthetic oligonucleotide
  Antisense strand to SEQ ID NO: 2341832
aagccuaaggaauugaugc

SEQ ID NO: 2341834 - RNA, 19 nt, Artificial Sequence
  Description of Artificial Sequence: Synthetic oligonucleotide
  Sense strand starting at position 1162 of SEQ ID NO: 1885432
cccaaauuguauucuggaa

SEQ ID NO: 2341835 - RNA, 19 nt, Artificial Sequence
  Description of Artificial Sequence: Synthetic oligonucleotide
  Antisense strand to SEQ ID NO: 2341834
uuccagaauacaauuuggg

SEQ ID NO: 2341836 - RNA, 19 nt, Artificial Sequence
  Description of Artificial Sequence: Synthetic oligonucleotide
  Sense strand starting at position 1209 of SEQ ID NO: 1885432
auaaauagagccugucaau

SEQ ID NO: 2341837 - RNA, 19 nt, Artificial Sequence
  Description of Artificial Sequence: Synthetic oligonucleotide
  Antisense strand to SEQ ID NO: 2341836
auugacaggcucuauuuau

SEQ ID NO: 2341838 - RNA, 19 nt, Artificial Sequence
  Description of Artificial Sequence: Synthetic oligonucleotide
  Sense strand starting at position 1229 of SEQ ID NO: 1885432
guaacauaugagcaccuua

SEQ ID NO: 2341839 - RNA, 19 nt, Artificial Sequence
  Description of Artificial Sequence: Synthetic oligonucleotide
  Antisense strand to SEQ ID NO: 2341838
uaaggugcucauauguuac

SEQ ID NO: 2341840 - RNA, 19 nt, Artificial Sequence
  Description of Artificial Sequence: Synthetic oligonucleotide
  Sense strand starting at position 1368 of SEQ ID NO: 1885432
cuuagucuacagcaggaaa

SEQ ID NO: 2341841 - RNA, 19 nt, Artificial Sequence
  Description of Artificial Sequence: Synthetic oligonucleotide
  Antisense strand to SEQ ID NO: 2341840
uuuccugcuguagacuaag

SEQ ID NO: 2341842 - RNA, 19 nt, Artificial Sequence
  Description of Artificial Sequence: Synthetic oligonucleotide
  Sense strand starting at position 1394 of SEQ ID NO: 1885432
gucagauacugcuuuaucu

SEQ ID NO: 2341843 - RNA, 19 nt, Artificial Sequence
  Description of Artificial Sequence: Synthetic oligonucleotide
  Antisense strand to SEQ ID NO: 2341842
agauaaagcaguaucugac

SEQ ID NO: 2341844 - RNA, 19 nt, Artificial Sequence
  Description of Artificial Sequence: Synthetic oligonucleotide
  Sense strand starting at position 1533 of SEQ ID NO: 1885432
acaauacaccuuugaaggu

SEQ ID NO: 2341845 - RNA, 19 nt, Artificial Sequence
  Description of Artificial Sequence: Synthetic oligonucleotide
  Antisense strand to SEQ ID NO: 2341844
accuucaaagguguauugu

SEQ ID NO: 2341846 - RNA, 19 nt, Artificial Sequence
  Description of Artificial Sequence: Synthetic oligonucleotide
  Sense strand starting at position 1584 of SEQ ID NO: 1885432
uauuaaauagugugacugu

SEQ ID NO: 2341847 - RNA, 19 nt, Artificial Sequence
  Description of Artificial Sequence: Synthetic oligonucleotide
  Antisense strand to SEQ ID NO: 2341846
acagucacacuauuuaaua

SEQ ID NO: 2341848 - RNA, 19 nt, Artificial Sequence
  Description of Artificial Sequence: Synthetic oligonucleotide
  Sense strand starting at position 1747 of SEQ ID NO: 1885432
ccaggaagaucuucuagug

SEQ ID NO: 2341849 - RNA, 19 nt, Artificial Sequence
  Description of Artificial Sequence: Synthetic oligonucleotide
  Antisense strand to SEQ ID NO: 2341848
cacuagaagaucuuccugg

SEQ ID NO: 2341850 - RNA, 19 nt, Artificial Sequence
  Description of Artificial Sequence: Synthetic oligonucleotide
  Sense strand starting at position 2000 of SEQ ID NO: 1885432
augaccaggugcuuuauau

SEQ ID NO: 2341851 - RNA, 19 nt, Artificial Sequence
  Description of Artificial Sequence: Synthetic oligonucleotide
  Antisense strand to SEQ ID NO: 2341850
auauaaagcaccuggucau

SEQ ID NO: 2341852 - RNA, 19 nt, Artificial Sequence
  Description of Artificial Sequence: Synthetic oligonucleotide
  Sense strand starting at position 2704 of SEQ ID NO: 1885432
auuuaaggcuguccuaagu

SEQ ID NO: 2341853 - RNA, 19 nt, Artificial Sequence
  Description of Artificial Sequence: Synthetic oligonucleotide
  Antisense strand to SEQ ID NO: 2341852
acuuaggacagccuuaaau

SEQ ID NO: 2341854 - RNA, 19 nt, Artificial Sequence
  Description of Artificial Sequence: Synthetic oligonucleotide
  Sense strand starting at position 2757 of SEQ ID NO: 1885432
ccacucugagaucgaguua

SEQ ID NO: 2341855 - RNA, 19 nt, Artificial Sequence
  Description of Artificial Sequence: Synthetic oligonucleotide
  Antisense strand to SEQ ID NO: 2341854
uaacucgaucucagagugg

SEQ ID NO: 2341856 - RNA, 19 nt, Artificial Sequence
  Description of Artificial Sequence: Synthetic oligonucleotide
  Sense strand starting at position 2762 of SEQ ID NO: 1885432
cugagaucgaguuauccaa

SEQ ID NO: 2341857 - RNA, 19 nt, Artificial Sequence
  Description of Artificial Sequence: Synthetic oligonucleotide
  Antisense strand to SEQ ID NO: 2341856
uuggauaacucgaucucag

SEQ ID NO: 2341858 - RNA, 19 nt, Artificial Sequence
  Description of Artificial Sequence: Synthetic oligonucleotide
  Sense strand starting at position 2764 of SEQ ID NO: 1885432
gagaucgaguuauccaaag

SEQ ID NO: 2341859 - RNA, 19 nt, Artificial Sequence
  Description of Artificial Sequence: Synthetic oligonucleotide
  Antisense strand to SEQ ID NO: 2341858
cuuuggauaacucgaucuc

SEQ ID NO: 2341860 - RNA, 19 nt, Artificial Sequence
  Description of Artificial Sequence: Synthetic oligonucleotide
  Sense strand starting at position 2856 of SEQ ID NO: 1885432
gaggacauaccuugucaga

SEQ ID NO: 2341861 - RNA, 19 nt, Artificial Sequence
  Description of Artificial Sequence: Synthetic oligonucleotide
  Antisense strand to SEQ ID NO: 2341860
ucugacaagguauguccuc

SEQ ID NO: 2341862 - RNA, 19 nt, Artificial Sequence
  Description of Artificial Sequence: Synthetic oligonucleotide
  Sense strand starting at position 2858 of SEQ ID NO: 1885432
ggacauaccuugucagaaa

SEQ ID NO: 2341863 - RNA, 19 nt, Artificial Sequence
  Description of Artificial Sequence: Synthetic oligonucleotide
  Antisense strand to SEQ ID NO: 2341862
uuucugacaagguaugucc

SEQ ID NO: 2341864 - RNA, 19 nt, Artificial Sequence
  Description of Artificial Sequence: Synthetic oligonucleotide
  Sense strand starting at position 2974 of SEQ ID NO: 1885432
agcugagaugauugguaca

SEQ ID NO: 2341865 - RNA, 19 nt, Artificial Sequence
  Description of Artificial Sequence: Synthetic oligonucleotide
  Antisense strand to SEQ ID NO: 2341864
uguaccaaucaucucagcu

SEQ ID NO: 2341866 - RNA, 19 nt, Artificial Sequence
  Description of Artificial Sequence: Synthetic oligonucleotide
  Sense strand starting at position 2991 of SEQ ID NO: 1885432
cacagagauuucuaguaug

SEQ ID NO: 2341867 - RNA, 19 nt, Artificial Sequence
  Description of Artificial Sequence: Synthetic oligonucleotide
  Antisense strand to SEQ ID NO: 2341866
cauacuagaaaucucugug

SEQ ID NO: 2341868 - RNA, 19 nt, Artificial Sequence
  Description of Artificial Sequence: Synthetic oligonucleotide
  Sense strand starting at position 2994 of SEQ ID NO: 1885432
agagauuucuaguauggaa

SEQ ID NO: 2341869 - RNA, 19 nt, Artificial Sequence
  Description of Artificial Sequence: Synthetic oligonucleotide
  Antisense strand to SEQ ID NO: 2341868
uuccauacuagaaaucucu

SEQ ID NO: 2341870 - RNA, 19 nt, Artificial Sequence
  Description of Artificial Sequence: Synthetic oligonucleotide
  Sense strand starting at position 3038 of SEQ ID NO: 1885432
gguagaaagccauaucuau

SEQ ID NO: 2341871 - RNA, 19 nt, Artificial Sequence
  Description of Artificial Sequence: Synthetic oligonucleotide
  Antisense strand to SEQ ID NO: 2341870
auagauauggcuuucuacc

SEQ ID NO: 2341872 - RNA, 19 nt, Artificial Sequence
  Description of Artificial Sequence: Synthetic oligonucleotide
  Sense strand starting at position 3062 of SEQ ID NO: 1885432
ccucauguuguagaguuaa

SEQ ID NO: 2341873 - RNA, 19 nt, Artificial Sequence
  Description of Artificial Sequence: Synthetic oligonucleotide
  Antisense strand to SEQ ID NO: 2341872
uuaacucuacaacaugagg

SEQ ID NO: 2341874 - RNA, 19 nt, Artificial Sequence
  Description of Artificial Sequence: Synthetic oligonucleotide
  Sense strand starting at position 3175 of SEQ ID NO: 1885432
guuuaucaugcguauauag

SEQ ID NO: 2341875 - RNA, 19 nt, Artificial Sequence
  Description of Artificial Sequence: Synthetic oligonucleotide
  Antisense strand to SEQ ID NO: 2341874
cuauauacgcaugauaaac

SEQ ID NO: 2341876 - RNA, 19 nt, Artificial Sequence
  Description of Artificial Sequence: Synthetic oligonucleotide
  Sense strand starting at position 3284 of SEQ ID NO: 1885432
gcaggugucuaacugaaau

SEQ ID NO: 2341877 - RNA, 19 nt, Artificial Sequence
  Description of Artificial Sequence: Synthetic oligonucleotide
  Antisense strand to SEQ ID NO: 2341876
auuucaguuagacaccugc

SEQ ID NO: 2341878 - RNA, 19 nt, Artificial Sequence
  Description of Artificial Sequence: Synthetic oligonucleotide
  Sense strand starting at position 3320 of SEQ ID NO: 1885432
guuaaauaggucuguuaug

SEQ ID NO: 2341879 - RNA, 19 nt, Artificial Sequence
  Description of Artificial Sequence: Synthetic oligonucleotide
  Antisense strand to SEQ ID NO: 2341878
cauaacagaccuauuuaac

SEQ ID NO: 2341880 - RNA, 19 nt, Artificial Sequence
  Description of Artificial Sequence: Synthetic oligonucleotide
  Sense strand starting at position 3321 of SEQ ID NO: 1885432
uuaaauaggucuguuaugu

SEQ ID NO: 2341881 - RNA, 19 nt, Artificial Sequence
  Description of Artificial Sequence: Synthetic oligonucleotide
  Antisense strand to SEQ ID NO: 2341880
acauaacagaccuauuuaa

SEQ ID NO: 2341882 - RNA, 19 nt, Artificial Sequence
  Description of Artificial Sequence: Synthetic oligonucleotide
  Sense strand starting at position 3332 of SEQ ID NO: 1885432
uguuaugugcaggauucua

SEQ ID NO: 2341883 - RNA, 19 nt, Artificial Sequence
  Description of Artificial Sequence: Synthetic oligonucleotide
  Antisense strand to SEQ ID NO: 2341882
uagaauccugcacauaaca

SEQ ID NO: 2341884 - RNA, 19 nt, Artificial Sequence
  Description of Artificial Sequence: Synthetic oligonucleotide
  Sense strand starting at position 3354 of SEQ ID NO: 1885432
gcaguaaagacccgaucua

SEQ ID NO: 2341885 - RNA, 19 nt, Artificial Sequence
  Description of Artificial Sequence: Synthetic oligonucleotide
  Antisense strand to SEQ ID NO: 2341884
uagaucgggucuuuacugc

SEQ ID NO: 2341886 - RNA, 19 nt, Artificial Sequence
  Description of Artificial Sequence: Synthetic oligonucleotide
  Sense strand starting at position 3510 of SEQ ID NO: 1885432
uggaaucauuagcuaagau

SEQ ID NO: 2341887 - RNA, 19 nt, Artificial Sequence
  Description of Artificial Sequence: Synthetic oligonucleotide
  Antisense strand to SEQ ID NO: 2341886
aucuuagcuaaugauucca

SEQ ID NO: 2341888 - RNA, 19 nt, Artificial Sequence
  Description of Artificial Sequence: Synthetic oligonucleotide
  Sense strand starting at position 3713 of SEQ ID NO: 1885432
cucagaagauaugucaauc

SEQ ID NO: 2341889 - RNA, 19 nt, Artificial Sequence
  Description of Artificial Sequence: Synthetic oligonucleotide
  Antisense strand to SEQ ID NO: 2341888
gauugacauaucuucugag

SEQ ID NO: 2341890 - RNA, 19 nt, Artificial Sequence
  Description of Artificial Sequence: Synthetic oligonucleotide
  Sense strand starting at position 3754 of SEQ ID NO: 1885432
uuguaauaagagugucauu

SEQ ID NO: 2341891 - RNA, 19 nt, Artificial Sequence
  Description of Artificial Sequence: Synthetic oligonucleotide
  Antisense strand to SEQ ID NO: 2341890
aaugacacucuuauuacaa

SEQ ID NO: 2341892 - RNA, 19 nt, Artificial Sequence
  Description of Artificial Sequence: Synthetic oligonucleotide
  Sense strand starting at position 3763 of SEQ ID NO: 1885432
gagugucauugugucaaag

SEQ ID NO: 2341893 - RNA, 19 nt, Artificial Sequence
  Description of Artificial Sequence: Synthetic oligonucleotide
  Antisense strand to SEQ ID NO: 2341892
cuuugacacaaugacacuc

SEQ ID NO: 2341894 - RNA, 19 nt, Artificial Sequence
  Description of Artificial Sequence: Synthetic oligonucleotide
  Sense strand starting at position 3836 of SEQ ID NO: 1885432
aacuauggagucuggcaaa

SEQ ID NO: 2341895 - RNA, 19 nt, Artificial Sequence
  Description of Artificial Sequence: Synthetic oligonucleotide
  Antisense strand to SEQ ID NO: 2341894
uuugccagacuccauaguu

SEQ ID NO: 2341896 - RNA, 19 nt, Artificial Sequence
  Description of Artificial Sequence: Synthetic oligonucleotide
  Sense strand starting at position 52 of SEQ ID NO: 1885433
aaaggaaaguuugcaaaug

SEQ ID NO: 2341897 - RNA, 19 nt, Artificial Sequence
  Description of Artificial Sequence: Synthetic oligonucleotide
  Antisense strand to SEQ ID NO: 2341896
cauuugcaaacuuuccuuu

SEQ ID NO: 2341898 - RNA, 19 nt, Artificial Sequence
  Description of Artificial Sequence: Synthetic oligonucleotide
  Sense strand starting at position 68 of SEQ ID NO: 1885433
auguaagcuaaaugugaga

SEQ ID NO: 2341899 - RNA, 19 nt, Artificial Sequence
  Description of Artificial Sequence: Synthetic oligonucleotide
  Antisense strand to SEQ ID NO: 2341898
ucucacauuuagcuuacau

SEQ ID NO: 2341900 - RNA, 19 nt, Artificial Sequence
  Description of Artificial Sequence: Synthetic oligonucleotide
  Sense strand starting at position 70 of SEQ ID NO: 1885433
guaagcuaaaugugagauu

SEQ ID NO: 2341901 - RNA, 19 nt, Artificial Sequence
  Description of Artificial Sequence: Synthetic oligonucleotide
  Antisense strand to SEQ ID NO: 2341900
aaucucacauuuagcuuac

SEQ ID NO: 2341902 - RNA, 19 nt, Artificial Sequence
  Description of Artificial Sequence: Synthetic oligonucleotide
  Sense strand starting at position 157 of SEQ ID NO: 1885433
aauguucugaguuaggagu

SEQ ID NO: 2341903 - RNA, 19 nt, Artificial Sequence
  Description of Artificial Sequence: Synthetic oligonucleotide
  Antisense strand to SEQ ID NO: 2341902
acuccuaacucagaacauu

SEQ ID NO: 2341904 - RNA, 19 nt, Artificial Sequence
  Description of Artificial Sequence: Synthetic oligonucleotide
  Sense strand starting at position 233 of SEQ ID NO: 1885433
gaaauaaacccuuguugga

SEQ ID NO: 2341905 - RNA, 19 nt, Artificial Sequence
  Description of Artificial Sequence: Synthetic oligonucleotide
  Antisense strand to SEQ ID NO: 2341904
uccaacaaggguuuauuuc

SEQ ID NO: 2341906 - RNA, 19 nt, Artificial Sequence
  Description of Artificial Sequence: Synthetic oligonucleotide
  Sense strand starting at position 240 of SEQ ID NO: 1885433
acccuuguuggauagaucu

SEQ ID NO: 2341907 - RNA, 19 nt, Artificial Sequence
  Description of Artificial Sequence: Synthetic oligonucleotide
  Antisense strand to SEQ ID NO: 2341906
agaucuauccaacaagggu

SEQ ID NO: 2341908 - RNA, 19 nt, Artificial Sequence
  Description of Artificial Sequence: Synthetic oligonucleotide
  Sense strand starting at position 250 of SEQ ID NO: 1885433
gauagaucuugaccuuagu

SEQ ID NO: 2341909 - RNA, 19 nt, Artificial Sequence
  Description of Artificial Sequence: Synthetic oligonucleotide
  Antisense strand to SEQ ID NO: 2341908
acuaaggucaagaucuauc

SEQ ID NO: 2341910 - RNA, 19 nt, Artificial Sequence
  Description of Artificial Sequence: Synthetic oligonucleotide
  Sense strand starting at position 370 of SEQ ID NO: 1885433
auguaauaccuugggaaua

SEQ ID NO: 2341911 - RNA, 19 nt, Artificial Sequence
  Description of Artificial Sequence: Synthetic oligonucleotide
  Antisense strand to SEQ ID NO: 2341910
uauucccaagguauuacau

SEQ ID NO: 2341912 - RNA, 19 nt, Artificial Sequence
  Description of Artificial Sequence: Synthetic oligonucleotide
  Sense strand starting at position 403 of SEQ ID NO: 1885433
agcaauaagagcuagguca

SEQ ID NO: 2341913 - RNA, 19 nt, Artificial Sequence
  Description of Artificial Sequence: Synthetic oligonucleotide
  Antisense strand to SEQ ID NO: 2341912
ugaccuagcucuuauugcu

SEQ ID NO: 2341914 - RNA, 19 nt, Artificial Sequence
  Description of Artificial Sequence: Synthetic oligonucleotide
  Sense strand starting at position 405 of SEQ ID NO: 1885433
caauaagagcuaggucaug

SEQ ID NO: 2341915 - RNA, 19 nt, Artificial Sequence
  Description of Artificial Sequence: Synthetic oligonucleotide
  Antisense strand to SEQ ID NO: 2341914
caugaccuagcucuuauug

SEQ ID NO: 2341916 - RNA, 19 nt, Artificial Sequence
  Description of Artificial Sequence: Synthetic oligonucleotide
  Sense strand starting at position 423 of SEQ ID NO: 1885433
ggacuuggucaguauggca

SEQ ID NO: 2341917 - RNA, 19 nt, Artificial Sequence
  Description of Artificial Sequence: Synthetic oligonucleotide
  Antisense strand to SEQ ID NO: 2341916
ugccauacugaccaagucc

SEQ ID NO: 2341918 - RNA, 19 nt, Artificial Sequence
  Description of Artificial Sequence: Synthetic oligonucleotide
  Sense strand starting at position 471 of SEQ ID NO: 1885433
caagucagaggucgacaaa

SEQ ID NO: 2341919 - RNA, 19 nt, Artificial Sequence
  Description of Artificial Sequence: Synthetic oligonucleotide
  Antisense strand to SEQ ID NO: 2341918
uuugucgaccucugacuug

SEQ ID NO: 2341920 - RNA, 19 nt, Artificial Sequence
  Description of Artificial Sequence: Synthetic oligonucleotide
  Sense strand starting at position 627 of SEQ ID NO: 1885433
augaaauguagauguuagu

SEQ ID NO: 2341921 - RNA, 19 nt, Artificial Sequence
  Description of Artificial Sequence: Synthetic oligonucleotide
  Antisense strand to SEQ ID NO: 2341920
acuaacaucuacauuucau

SEQ ID NO: 2341922 - RNA, 19 nt, Artificial Sequence
  Description of Artificial Sequence: Synthetic oligonucleotide
  Sense strand starting at position 637 of SEQ ID NO: 1885433
gauguuaguguauauaaag

SEQ ID NO: 2341923 - RNA, 19 nt, Artificial Sequence
  Description of Artificial Sequence: Synthetic oligonucleotide
  Antisense strand to SEQ ID NO: 2341922
cuuuauauacacuaacauc

SEQ ID NO: 2341924 - RNA, 19 nt, Artificial Sequence
  Description of Artificial Sequence: Synthetic oligonucleotide
  Sense strand starting at position 718 of SEQ ID NO: 1885433
gcacauuugaguuguugca

SEQ ID NO: 2341925 - RNA, 19 nt, Artificial Sequence
  Description of Artificial Sequence: Synthetic oligonucleotide
  Antisense strand to SEQ ID NO: 2341924
ugcaacaacucaaaugugc

SEQ ID NO: 2341926 - RNA, 19 nt, Artificial Sequence
  Description of Artificial Sequence: Synthetic oligonucleotide
  Sense strand starting at position 720 of SEQ ID NO: 1885433
acauuugaguuguugcaac

SEQ ID NO: 2341927 - RNA, 19 nt, Artificial Sequence
  Description of Artificial Sequence: Synthetic oligonucleotide
  Antisense strand to SEQ ID NO: 2341926
guugcaacaacucaaaugu

SEQ ID NO: 2341928 - RNA, 19 nt, Artificial Sequence
  Description of Artificial Sequence: Synthetic oligonucleotide
  Sense strand starting at position 851 of SEQ ID NO: 1885433
cuguuucuuggagaucauu

SEQ ID NO: 2341929 - RNA, 19 nt, Artificial Sequence
  Description of Artificial Sequence: Synthetic oligonucleotide
  Antisense strand to SEQ ID NO: 2341928
aaugaucuccaagaaacag

SEQ ID NO: 2341930 - RNA, 19 nt, Artificial Sequence
  Description of Artificial Sequence: Synthetic oligonucleotide
  Sense strand starting at position 909 of SEQ ID NO: 1885433
ucgagauaucagcaugcau

SEQ ID NO: 2341931 - RNA, 19 nt, Artificial Sequence
  Description of Artificial Sequence: Synthetic oligonucleotide
  Antisense strand to SEQ ID NO: 2341930
augcaugcugauaucucga

SEQ ID NO: 2341932 - RNA, 19 nt, Artificial Sequence
  Description of Artificial Sequence: Synthetic oligonucleotide
  Sense strand starting at position 911 of SEQ ID NO: 1885433
gagauaucagcaugcauau

SEQ ID NO: 2341933 - RNA, 19 nt, Artificial Sequence
  Description of Artificial Sequence: Synthetic oligonucleotide
  Antisense strand to SEQ ID NO: 2341932
auaugcaugcugauaucuc

SEQ ID NO: 2341934 - RNA, 19 nt, Artificial Sequence
  Description of Artificial Sequence: Synthetic oligonucleotide
  Sense strand starting at position 965 of SEQ ID NO: 1885433
uaugacuuugaacggguaa

SEQ ID NO: 2341935 - RNA, 19 nt, Artificial Sequence
  Description of Artificial Sequence: Synthetic oligonucleotide
  Antisense strand to SEQ ID NO: 2341934
uuacccguucaaagucaua

SEQ ID NO: 2341936 - RNA, 19 nt, Artificial Sequence
  Description of Artificial Sequence: Synthetic oligonucleotide
  Sense strand starting at position 967 of SEQ ID NO: 1885433
ugacuuugaacggguaacu

SEQ ID NO: 2341937 - RNA, 19 nt, Artificial Sequence
  Description of Artificial Sequence: Synthetic oligonucleotide
  Antisense strand to SEQ ID NO: 2341936
aguuacccguucaaaguca

SEQ ID NO: 2341938 - RNA, 19 nt, Artificial Sequence
  Description of Artificial Sequence: Synthetic oligonucleotide
  Sense strand starting at position 1077 of SEQ ID NO: 1885433
agaacaucucaugguuuau

SEQ ID NO: 2341939 - RNA, 19 nt, Artificial Sequence
  Description of Artificial Sequence: Synthetic oligonucleotide
  Antisense strand to SEQ ID NO: 2341938
auaaaccaugagauguucu

SEQ ID NO: 2341940 - RNA, 19 nt, Artificial Sequence
  Description of Artificial Sequence: Synthetic oligonucleotide
  Sense strand starting at position 1114 of SEQ ID NO: 1885433
acaagacaucuuggccaga

SEQ ID NO: 2341941 - RNA, 19 nt, Artificial Sequence
  Description of Artificial Sequence: Synthetic oligonucleotide
  Antisense strand to SEQ ID NO: 2341940
ucuggccaagaugucuugu

SEQ ID NO: 2341942 - RNA, 19 nt, Artificial Sequence
  Description of Artificial Sequence: Synthetic oligonucleotide
  Sense strand starting at position 1216 of SEQ ID NO: 1885433
ggcaaacuugaauguuuaa

SEQ ID NO: 2341943 - RNA, 19 nt, Artificial Sequence
  Description of Artificial Sequence: Synthetic oligonucleotide
  Antisense strand to SEQ ID NO: 2341942
uuaaacauucaaguuugcc

SEQ ID NO: 2341944 - RNA, 19 nt, Artificial Sequence
  Description of Artificial Sequence: Synthetic oligonucleotide
  Sense strand starting at position 1234 of SEQ ID NO: 1885433
acacauagugcuuacugua

SEQ ID NO: 2341945 - RNA, 19 nt, Artificial Sequence
  Description of Artificial Sequence: Synthetic oligonucleotide
  Antisense strand to SEQ ID NO: 2341944
uacaguaagcacuaugugu

SEQ ID NO: 2341946 - RNA, 19 nt, Artificial Sequence
  Description of Artificial Sequence: Synthetic oligonucleotide
  Sense strand starting at position 1311 of SEQ ID NO: 1885433
augagauuaucacuguuau

SEQ ID NO: 2341947 - RNA, 19 nt, Artificial Sequence
  Description of Artificial Sequence: Synthetic oligonucleotide
  Antisense strand to SEQ ID NO: 2341946
auaacagugauaaucucau

SEQ ID NO: 2341948 - RNA, 19 nt, Artificial Sequence
  Description of Artificial Sequence: Synthetic oligonucleotide
  Sense strand starting at position 1312 of SEQ ID NO: 1885433
ugagauuaucacuguuaug

SEQ ID NO: 2341949 - RNA, 19 nt, Artificial Sequence
  Description of Artificial Sequence: Synthetic oligonucleotide
  Antisense strand to SEQ ID NO: 2341948
cauaacagugauaaucuca

SEQ ID NO: 2341950 - RNA, 19 nt, Artificial Sequence
  Description of Artificial Sequence: Synthetic oligonucleotide
  Sense strand starting at position 1367 of SEQ ID NO: 1885433
uaaagagugguauggaguu

SEQ ID NO: 2341951 - RNA, 19 nt, Artificial Sequence
  Description of Artificial Sequence: Synthetic oligonucleotide
  Antisense strand to SEQ ID NO: 2341950
aacuccauaccacucuuua

SEQ ID NO: 2341952 - RNA, 19 nt, Artificial Sequence
  Description of Artificial Sequence: Synthetic oligonucleotide
  Sense strand starting at position 1379 of SEQ ID NO: 1885433
uggaguuugaacugaugca

SEQ ID NO: 2341953 - RNA, 19 nt, Artificial Sequence
  Description of Artificial Sequence: Synthetic oligonucleotide
  Antisense strand to SEQ ID NO: 2341952
ugcaucaguucaaacucca

SEQ ID NO: 2341954 - RNA, 19 nt, Artificial Sequence
  Description of Artificial Sequence: Synthetic oligonucleotide
  Sense strand starting at position 1534 of SEQ ID NO: 1885433
ucaagauuauuugagaccu

SEQ ID NO: 2341955 - RNA, 19 nt, Artificial Sequence
  Description of Artificial Sequence: Synthetic oligonucleotide
  Antisense strand to SEQ ID NO: 2341954
aggucucaaauaaucuuga

SEQ ID NO: 2341956 - RNA, 19 nt, Artificial Sequence
  Description of Artificial Sequence: Synthetic oligonucleotide
  Sense strand starting at position 1624 of SEQ ID NO: 1885433
uguuacuuagcccagaaau

SEQ ID NO: 2341957 - RNA, 19 nt, Artificial Sequence
  Description of Artificial Sequence: Synthetic oligonucleotide
  Antisense strand to SEQ ID NO: 2341956
auuucugggcuaaguaaca

SEQ ID NO: 2341958 - RNA, 19 nt, Artificial Sequence
  Description of Artificial Sequence: Synthetic oligonucleotide
  Sense strand starting at position 1647 of SEQ ID NO: 1885433
ggcagacuugaaugcagau

SEQ ID NO: 2341959 - RNA, 19 nt, Artificial Sequence
  Description of Artificial Sequence: Synthetic oligonucleotide
  Antisense strand to SEQ ID NO: 2341958
aucugcauucaagucugcc

SEQ ID NO: 2341960 - RNA, 19 nt, Artificial Sequence
  Description of Artificial Sequence: Synthetic oligonucleotide
  Sense strand starting at position 1835 of SEQ ID NO: 1885433
uuguuaagggaguagucaa

SEQ ID NO: 2341961 - RNA, 19 nt, Artificial Sequence
  Description of Artificial Sequence: Synthetic oligonucleotide
  Antisense strand to SEQ ID NO: 2341960
uugacuacucccuuaacaa

SEQ ID NO: 2341962 - RNA, 19 nt, Artificial Sequence
  Description of Artificial Sequence: Synthetic oligonucleotide
  Sense strand starting at position 2052 of SEQ ID NO: 1885433
uagaauugaugggcaaauu

SEQ ID NO: 2341963 - RNA, 19 nt, Artificial Sequence
  Description of Artificial Sequence: Synthetic oligonucleotide
  Antisense strand to SEQ ID NO: 2341962
aauuugcccaucaauucua

SEQ ID NO: 2341964 - RNA, 19 nt, Artificial Sequence
  Description of Artificial Sequence: Synthetic oligonucleotide
  Sense strand starting at position 2979 of SEQ ID NO: 1885433
aggacagucucuucuauag

SEQ ID NO: 2341965 - RNA, 19 nt, Artificial Sequence
  Description of Artificial Sequence: Synthetic oligonucleotide
  Antisense strand to SEQ ID NO: 2341964
cuauagaagagacuguccu

SEQ ID NO: 2341966 - RNA, 19 nt, Artificial Sequence
  Description of Artificial Sequence: Synthetic oligonucleotide
  Sense strand starting at position 3056 of SEQ ID NO: 1885433
ugccauauacaaggguaaa

SEQ ID NO: 2341967 - RNA, 19 nt, Artificial Sequence
  Description of Artificial Sequence: Synthetic oligonucleotide
  Antisense strand to SEQ ID NO: 2341966
uuuacccuuguauauggca

SEQ ID NO: 2341968 - RNA, 19 nt, Artificial Sequence
  Description of Artificial Sequence: Synthetic oligonucleotide
  Sense strand starting at position 3151 of SEQ ID NO: 1885433
cauuguucugagcaaagau

SEQ ID NO: 2341969 - RNA, 19 nt, Artificial Sequence
  Description of Artificial Sequence: Synthetic oligonucleotide
  Antisense strand to SEQ ID NO: 2341968
aucuuugcucagaacaaug

SEQ ID NO: 2341970 - RNA, 19 nt, Artificial Sequence
  Description of Artificial Sequence: Synthetic oligonucleotide
  Sense strand starting at position 3712 of SEQ ID NO: 1885433
agcuuuaugcuugaucaau

SEQ ID NO: 2341971 - RNA, 19 nt, Artificial Sequence
  Description of Artificial Sequence: Synthetic oligonucleotide
  Antisense strand to SEQ ID NO: 2341970
auugaucaagcauaaagcu

SEQ ID NO: 2341972 - RNA, 19 nt, Artificial Sequence
  Description of Artificial Sequence: Synthetic oligonucleotide
  Sense strand starting at position 3714 of SEQ ID NO: 1885433
cuuuaugcuugaucaauga

SEQ ID NO: 2341973 - RNA, 19 nt, Artificial Sequence
  Description of Artificial Sequence: Synthetic oligonucleotide
  Antisense strand to SEQ ID NO: 2341972
ucauugaucaagcauaaag

SEQ ID NO: 2341974 - RNA, 19 nt, Artificial Sequence
  Description of Artificial Sequence: Synthetic oligonucleotide
  Sense strand starting at position 3724 of SEQ ID NO: 1885433
gaucaaugauugcuggauc

SEQ ID NO: 2341975 - RNA, 19 nt, Artificial Sequence
  Description of Artificial Sequence: Synthetic oligonucleotide
  Antisense strand to SEQ ID NO: 2341974
gauccagcaaucauugauc

SEQ ID NO: 2341976 - RNA, 19 nt, Artificial Sequence
  Description of Artificial Sequence: Synthetic oligonucleotide
  Sense strand starting at position 185 of SEQ ID NO: 1885434
gguuauuaauaugacaucu

SEQ ID NO: 2341977 - RNA, 19 nt, Artificial Sequence
  Description of Artificial Sequence: Synthetic oligonucleotide
  Antisense strand to SEQ ID NO: 2341976
agaugucauauuaauaacc

SEQ ID NO: 2341978 - RNA, 19 nt, Artificial Sequence
  Description of Artificial Sequence: Synthetic oligonucleotide
  Sense strand starting at position 523 of SEQ ID NO: 1885434
agaguaaguguauauagca

SEQ ID NO: 2341979 - RNA, 19 nt, Artificial Sequence
  Description of Artificial Sequence: Synthetic oligonucleotide
  Antisense strand to SEQ ID NO: 2341978
ugcuauauacacuuacucu

SEQ ID NO: 2341980 - RNA, 19 nt, Artificial Sequence
  Description of Artificial Sequence: Synthetic oligonucleotide
  Sense strand starting at position 531 of SEQ ID NO: 1885434
uguauauagcaaugagaag

SEQ ID NO: 2341981 - RNA, 19 nt, Artificial Sequence
  Description of Artificial Sequence: Synthetic oligonucleotide
  Antisense strand to SEQ ID NO: 2341980
cuucucauugcuauauaca

SEQ ID NO: 2341982 - RNA, 19 nt, Artificial Sequence
  Description of Artificial Sequence: Synthetic oligonucleotide
  Sense strand starting at position 552 of SEQ ID NO: 1885434
uguauauccuguuugcaag

SEQ ID NO: 2341983 - RNA, 19 nt, Artificial Sequence
  Description of Artificial Sequence: Synthetic oligonucleotide
  Antisense strand to SEQ ID NO: 2341982
cuugcaaacaggauauaca

SEQ ID NO: 2341984 - RNA, 19 nt, Artificial Sequence
  Description of Artificial Sequence: Synthetic oligonucleotide
  Sense strand starting at position 553 of SEQ ID NO: 1885434
guauauccuguuugcaaga

SEQ ID NO: 2341985 - RNA, 19 nt, Artificial Sequence
  Description of Artificial Sequence: Synthetic oligonucleotide
  Antisense strand to SEQ ID NO: 2341984
ucuugcaaacaggauauac

SEQ ID NO: 2341986 - RNA, 19 nt, Artificial Sequence
  Description of Artificial Sequence: Synthetic oligonucleotide
  Sense strand starting at position 583 of SEQ ID NO: 1885434
guauauaucgaucaggucu

SEQ ID NO: 2341987 - RNA, 19 nt, Artificial Sequence
  Description of Artificial Sequence: Synthetic oligonucleotide
  Antisense strand to SEQ ID NO: 2341986
agaccugaucgauauauac

SEQ ID NO: 2341988 - RNA, 19 nt, Artificial Sequence
  Description of Artificial Sequence: Synthetic oligonucleotide
  Sense strand starting at position 590 of SEQ ID NO: 1885434
ucgaucaggucugcuugau

SEQ ID NO: 2341989 - RNA, 19 nt, Artificial Sequence
  Description of Artificial Sequence: Synthetic oligonucleotide
  Antisense strand to SEQ ID NO: 2341988
aucaagcagaccugaucga

SEQ ID NO: 2341990 - RNA, 19 nt, Artificial Sequence
  Description of Artificial Sequence: Synthetic oligonucleotide
  Sense strand starting at position 647 of SEQ ID NO: 1885434
uucugucuugaugaugcau

SEQ ID NO: 2341991 - RNA, 19 nt, Artificial Sequence
  Description of Artificial Sequence: Synthetic oligonucleotide
  Antisense strand to SEQ ID NO: 2341990
augcaucaucaagacagaa

SEQ ID NO: 2341992 - RNA, 19 nt, Artificial Sequence
  Description of Artificial Sequence: Synthetic oligonucleotide
  Sense strand starting at position 661 of SEQ ID NO: 1885434
ugcaucuaacauugucagu

SEQ ID NO: 2341993 - RNA, 19 nt, Artificial Sequence
  Description of Artificial Sequence: Synthetic oligonucleotide
  Antisense strand to SEQ ID NO: 2341992
acugacaauguuagaugca

SEQ ID NO: 2341994 - RNA, 19 nt, Artificial Sequence
  Description of Artificial Sequence: Synthetic oligonucleotide
  Sense strand starting at position 1275 of SEQ ID NO: 1885434
ggaggugacuuauucccuu

SEQ ID NO: 2341995 - RNA, 19 nt, Artificial Sequence
  Description of Artificial Sequence: Synthetic oligonucleotide
  Antisense strand to SEQ ID NO: 2341994
aagggaauaagucaccucc

SEQ ID NO: 2341996 - RNA, 19 nt, Artificial Sequence
  Description of Artificial Sequence: Synthetic oligonucleotide
  Sense strand starting at position 1279 of SEQ ID NO: 1885434
gugacuuauucccuugggu

SEQ ID NO: 2341997 - RNA, 19 nt, Artificial Sequence
  Description of Artificial Sequence: Synthetic oligonucleotide
  Antisense strand to SEQ ID NO: 2341996
acccaagggaauaagucac

SEQ ID NO: 2341998 - RNA, 19 nt, Artificial Sequence
  Description of Artificial Sequence: Synthetic oligonucleotide
  Sense strand starting at position 1281 of SEQ ID NO: 1885434
gacuuauucccuuggguug

SEQ ID NO: 2341999 - RNA, 19 nt, Artificial Sequence
  Description of Artificial Sequence: Synthetic oligonucleotide
  Antisense strand to SEQ ID NO: 2341998
caacccaagggaauaaguc

SEQ ID NO: 2342000 - RNA, 19 nt, Artificial Sequence
  Description of Artificial Sequence: Synthetic oligonucleotide
  Sense strand starting at position 1286 of SEQ ID NO: 1885434
auucccuuggguuggaaau

SEQ ID NO: 2342001 - RNA, 19 nt, Artificial Sequence
  Description of Artificial Sequence: Synthetic oligonucleotide
  Antisense strand to SEQ ID NO: 2342000
auuuccaacccaagggaau

SEQ ID NO: 2342002 - RNA, 19 nt, Artificial Sequence
  Description of Artificial Sequence: Synthetic oligonucleotide
  Sense strand starting at position 1287 of SEQ ID NO: 1885434
uucccuuggguuggaaauu

SEQ ID NO: 2342003 - RNA, 19 nt, Artificial Sequence
  Description of Artificial Sequence: Synthetic oligonucleotide
  Antisense strand to SEQ ID NO: 2342002
aauuuccaacccaagggaa

SEQ ID NO: 2342004 - RNA, 19 nt, Artificial Sequence
  Description of Artificial Sequence: Synthetic oligonucleotide
  Sense strand starting at position 1389 of SEQ ID NO: 1885434
cggauuucccuuuguaggu

SEQ ID NO: 2342005 - RNA, 19 nt, Artificial Sequence
  Description of Artificial Sequence: Synthetic oligonucleotide
  Antisense strand to SEQ ID NO: 2342004
accuacaaagggaaauccg

SEQ ID NO: 2342006 - RNA, 19 nt, Artificial Sequence
  Description of Artificial Sequence: Synthetic oligonucleotide
  Sense strand starting at position 1472 of SEQ ID NO: 1885434
acgauuaugugccuuggca

SEQ ID NO: 2342007 - RNA, 19 nt, Artificial Sequence
  Description of Artificial Sequence: Synthetic oligonucleotide
  Antisense strand to SEQ ID NO: 2342006
ugccaaggcacauaaucgu

SEQ ID NO: 2342008 - RNA, 19 nt, Artificial Sequence
  Description of Artificial Sequence: Synthetic oligonucleotide
  Sense strand starting at position 1474 of SEQ ID NO: 1885434
gauuaugugccuuggcauu

SEQ ID NO: 2342009 - RNA, 19 nt, Artificial Sequence
  Description of Artificial Sequence: Synthetic oligonucleotide
  Antisense strand to SEQ ID NO: 2342008
aaugccaaggcacauaauc

SEQ ID NO: 2342010 - RNA, 19 nt, Artificial Sequence
  Description of Artificial Sequence: Synthetic oligonucleotide
  Sense strand starting at position 1480 of SEQ ID NO: 1885434
gugccuuggcauugaucuu

SEQ ID NO: 2342011 - RNA, 19 nt, Artificial Sequence
  Description of Artificial Sequence: Synthetic oligonucleotide
  Antisense strand to SEQ ID NO: 2342010
aagaucaaugccaaggcac

SEQ ID NO: 2342012 - RNA, 19 nt, Artificial Sequence
  Description of Artificial Sequence: Synthetic oligonucleotide
  Sense strand starting at position 1489 of SEQ ID NO: 1885434
cauugaucuucuugugaag

SEQ ID NO: 2342013 - RNA, 19 nt, Artificial Sequence
  Description of Artificial Sequence: Synthetic oligonucleotide
  Antisense strand to SEQ ID NO: 2342012
cuucacaagaagaucaaug

SEQ ID NO: 2342014 - RNA, 19 nt, Artificial Sequence
  Description of Artificial Sequence: Synthetic oligonucleotide
  Sense strand starting at position 1813 of SEQ ID NO: 1885434
augucauugcacuaugaau

SEQ ID NO: 2342015 - RNA, 19 nt, Artificial Sequence
  Description of Artificial Sequence: Synthetic oligonucleotide
  Antisense strand to SEQ ID NO: 2342014
auucauagugcaaugacau

SEQ ID NO: 2342016 - RNA, 19 nt, Artificial Sequence
  Description of Artificial Sequence: Synthetic oligonucleotide
  Sense strand starting at position 2356 of SEQ ID NO: 1885434
agguuuaauugacguacaa

SEQ ID NO: 2342017 - RNA, 19 nt, Artificial Sequence
  Description of Artificial Sequence: Synthetic oligonucleotide
  Antisense strand to SEQ ID NO: 2342016
uuguacgucaauuaaaccu

SEQ ID NO: 2342018 - RNA, 19 nt, Artificial Sequence
  Description of Artificial Sequence: Synthetic oligonucleotide
  Sense strand starting at position 2702 of SEQ ID NO: 1885434
ucugcuuuauggguauaca

SEQ ID NO: 2342019 - RNA, 19 nt, Artificial Sequence
  Description of Artificial Sequence: Synthetic oligonucleotide
  Antisense strand to SEQ ID NO: 2342018
uguauacccauaaagcaga

SEQ ID NO: 2342020 - RNA, 19 nt, Artificial Sequence
  Description of Artificial Sequence: Synthetic oligonucleotide
  Sense strand starting at position 2703 of SEQ ID NO: 1885434
cugcuuuauggguauacaa

SEQ ID NO: 2342021 - RNA, 19 nt, Artificial Sequence
  Description of Artificial Sequence: Synthetic oligonucleotide
  Antisense strand to SEQ ID NO: 2342020
uuguauacccauaaagcag

SEQ ID NO: 2342022 - RNA, 19 nt, Artificial Sequence
  Description of Artificial Sequence: Synthetic oligonucleotide
  Sense strand starting at position 2705 of SEQ ID NO: 1885434
gcuuuauggguauacaauu

SEQ ID NO: 2342023 - RNA, 19 nt, Artificial Sequence
  Description of Artificial Sequence: Synthetic oligonucleotide
  Antisense strand to SEQ ID NO: 2342022
aauuguauacccauaaagc

SEQ ID NO: 2342024 - RNA, 19 nt, Artificial Sequence
  Description of Artificial Sequence: Synthetic oligonucleotide
  Sense strand starting at position 2899 of SEQ ID NO: 1885434
agagcuugcuagcaagaug

SEQ ID NO: 2342025 - RNA, 19 nt, Artificial Sequence
  Description of Artificial Sequence: Synthetic oligonucleotide
  Antisense strand to SEQ ID NO: 2342024
caucuugcuagcaagcucu

SEQ ID NO: 2342026 - RNA, 19 nt, Artificial Sequence
  Description of Artificial Sequence: Synthetic oligonucleotide
  Sense strand starting at position 3200 of SEQ ID NO: 1885434
caaccuguuguccaggaga

SEQ ID NO: 2342027 - RNA, 19 nt, Artificial Sequence
  Description of Artificial Sequence: Synthetic oligonucleotide
  Antisense strand to SEQ ID NO: 2342026
ucuccuggacaacagguug

SEQ ID NO: 2342028 - RNA, 19 nt, Artificial Sequence
  Description of Artificial Sequence: Synthetic oligonucleotide
  Sense strand starting at position 3202 of SEQ ID NO: 1885434
accuguuguccaggagauu

SEQ ID NO: 2342029 - RNA, 19 nt, Artificial Sequence
  Description of Artificial Sequence: Synthetic oligonucleotide
  Antisense strand to SEQ ID NO: 2342028
aaucuccuggacaacaggu

SEQ ID NO: 2342030 - RNA, 19 nt, Artificial Sequence
  Description of Artificial Sequence: Synthetic oligonucleotide
  Sense strand starting at position 3203 of SEQ ID NO: 1885434
ccuguuguccaggagauuc

SEQ ID NO: 2342031 - RNA, 19 nt, Artificial Sequence
  Description of Artificial Sequence: Synthetic oligonucleotide
  Antisense strand to SEQ ID NO: 2342030
gaaucuccuggacaacagg

SEQ ID NO: 2342032 - RNA, 19 nt, Artificial Sequence
  Description of Artificial Sequence: Synthetic oligonucleotide
  Sense strand starting at position 3723 of SEQ ID NO: 1885434
cucccaucuucgugggaca

SEQ ID NO: 2342033 - RNA, 19 nt, Artificial Sequence
  Description of Artificial Sequence: Synthetic oligonucleotide
  Antisense strand to SEQ ID NO: 2342032
ugucccacgaagaugggag

SEQ ID NO: 2342034 - RNA, 19 nt, Artificial Sequence
  Description of Artificial Sequence: Synthetic oligonucleotide
  Sense strand starting at position 3725 of SEQ ID NO: 1885434
cccaucuucgugggacaga

SEQ ID NO: 2342035 - RNA, 19 nt, Artificial Sequence
  Description of Artificial Sequence: Synthetic oligonucleotide
  Antisense strand to SEQ ID NO: 2342034
ucugucccacgaagauggg

SEQ ID NO: 2342036 - RNA, 19 nt, Artificial Sequence
  Description of Artificial Sequence: Synthetic oligonucleotide
  Sense strand starting at position 343 of SEQ ID NO: 1885435
ccuguucucccugacugua

SEQ ID NO: 2342037 - RNA, 19 nt, Artificial Sequence
  Description of Artificial Sequence: Synthetic oligonucleotide
  Antisense strand to SEQ ID NO: 2342036
uacagucagggagaacagg

SEQ ID NO: 2342038 - RNA, 19 nt, Artificial Sequence
  Description of Artificial Sequence: Synthetic oligonucleotide
  Sense strand starting at position 403 of SEQ ID NO: 1885435
aggcacugguucuuaaaua

SEQ ID NO: 2342039 - RNA, 19 nt, Artificial Sequence
  Description of Artificial Sequence: Synthetic oligonucleotide
  Antisense strand to SEQ ID NO: 2342038
uauuuaagaaccagugccu

SEQ ID NO: 2342040 - RNA, 19 nt, Artificial Sequence
  Description of Artificial Sequence: Synthetic oligonucleotide
  Sense strand starting at position 410 of SEQ ID NO: 1885435
gguucuuaaauaggauuga

SEQ ID NO: 2342041 - RNA, 19 nt, Artificial Sequence
  Description of Artificial Sequence: Synthetic oligonucleotide
  Antisense strand to SEQ ID NO: 2342040
ucaauccuauuuaagaacc

SEQ ID NO: 2342042 - RNA, 19 nt, Artificial Sequence
  Description of Artificial Sequence: Synthetic oligonucleotide
  Sense strand starting at position 529 of SEQ ID NO: 1885435
gguccuggccagcaaugua

SEQ ID NO: 2342043 - RNA, 19 nt, Artificial Sequence
  Description of Artificial Sequence: Synthetic oligonucleotide
  Antisense strand to SEQ ID NO: 2342042
uacauugcuggccaggacc

SEQ ID NO: 2342044 - RNA, 19 nt, Artificial Sequence
  Description of Artificial Sequence: Synthetic oligonucleotide
  Sense strand starting at position 574 of SEQ ID NO: 1885435
ugauacacaucuuugguua

SEQ ID NO: 2342045 - RNA, 19 nt, Artificial Sequence
  Description of Artificial Sequence: Synthetic oligonucleotide
  Antisense strand to SEQ ID NO: 2342044
uaaccaaagauguguauca

SEQ ID NO: 2342046 - RNA, 19 nt, Artificial Sequence
  Description of Artificial Sequence: Synthetic oligonucleotide
  Sense strand starting at position 801 of SEQ ID NO: 1885435
ucuaaagcuuccucaagga

SEQ ID NO: 2342047 - RNA, 19 nt, Artificial Sequence
  Description of Artificial Sequence: Synthetic oligonucleotide
  Antisense strand to SEQ ID NO: 2342046
uccuugaggaagcuuuaga

SEQ ID NO: 2342048 - RNA, 19 nt, Artificial Sequence
  Description of Artificial Sequence: Synthetic oligonucleotide
  Sense strand starting at position 1360 of SEQ ID NO: 1885435
ugaaguuacuacccaugau

SEQ ID NO: 2342049 - RNA, 19 nt, Artificial Sequence
  Description of Artificial Sequence: Synthetic oligonucleotide
  Antisense strand to SEQ ID NO: 2342048
aucauggguaguaacuuca

SEQ ID NO: 2342050 - RNA, 19 nt, Artificial Sequence
  Description of Artificial Sequence: Synthetic oligonucleotide
  Sense strand starting at position 1432 of SEQ ID NO: 1885435
cguauucuaguuuaacaau

SEQ ID NO: 2342051 - RNA, 19 nt, Artificial Sequence
  Description of Artificial Sequence: Synthetic oligonucleotide
  Antisense strand to SEQ ID NO: 2342050
auuguuaaacuagaauacg

SEQ ID NO: 2342052 - RNA, 19 nt, Artificial Sequence
  Description of Artificial Sequence: Synthetic oligonucleotide
  Sense strand starting at position 1451 of SEQ ID NO: 1885435
cugcaugcuggauaucuau

SEQ ID NO: 2342053 - RNA, 19 nt, Artificial Sequence
  Description of Artificial Sequence: Synthetic oligonucleotide
  Antisense strand to SEQ ID NO: 2342052
auagauauccagcaugcag

SEQ ID NO: 2342054 - RNA, 19 nt, Artificial Sequence
  Description of Artificial Sequence: Synthetic oligonucleotide
  Sense strand starting at position 1643 of SEQ ID NO: 1885435
cugucaacagguuacaauu

SEQ ID NO: 2342055 - RNA, 19 nt, Artificial Sequence
  Description of Artificial Sequence: Synthetic oligonucleotide
  Antisense strand to SEQ ID NO: 2342054
aauuguaaccuguugacag

SEQ ID NO: 2342056 - RNA, 19 nt, Artificial Sequence
  Description of Artificial Sequence: Synthetic oligonucleotide
  Sense strand starting at position 1782 of SEQ ID NO: 1885435
auauguaauucugugcaua

SEQ ID NO: 2342057 - RNA, 19 nt, Artificial Sequence
  Description of Artificial Sequence: Synthetic oligonucleotide
  Antisense strand to SEQ ID NO: 2342056
uaugcacagaauuacauau

SEQ ID NO: 2342058 - RNA, 19 nt, Artificial Sequence
  Description of Artificial Sequence: Synthetic oligonucleotide
  Sense strand starting at position 1785 of SEQ ID NO: 1885435
uguaauucugugcauauca

SEQ ID NO: 2342059 - RNA, 19 nt, Artificial Sequence
  Description of Artificial Sequence: Synthetic oligonucleotide
  Antisense strand to SEQ ID NO: 2342058
ugauaugcacagaauuaca

SEQ ID NO: 2342060 - RNA, 19 nt, Artificial Sequence
  Description of Artificial Sequence: Synthetic oligonucleotide
  Sense strand starting at position 1794 of SEQ ID NO: 1885435
gugcauaucauuuguguuu

SEQ ID NO: 2342061 - RNA, 19 nt, Artificial Sequence
  Description of Artificial Sequence: Synthetic oligonucleotide
  Antisense strand to SEQ ID NO: 2342060
aaacacaaaugauaugcac

SEQ ID NO: 2342062 - RNA, 19 nt, Artificial Sequence
  Description of Artificial Sequence: Synthetic oligonucleotide
  Sense strand starting at position 1795 of SEQ ID NO: 1885435
ugcauaucauuuguguuua

SEQ ID NO: 2342063 - RNA, 19 nt, Artificial Sequence
  Description of Artificial Sequence: Synthetic oligonucleotide
  Antisense strand to SEQ ID NO: 2342062
uaaacacaaaugauaugca

SEQ ID NO: 2342064 - RNA, 19 nt, Artificial Sequence
  Description of Artificial Sequence: Synthetic oligonucleotide
  Sense strand starting at position 1808 of SEQ ID NO: 1885435
uguuuaugccaauggaaau

SEQ ID NO: 2342065 - RNA, 19 nt, Artificial Sequence
  Description of Artificial Sequence: Synthetic oligonucleotide
  Antisense strand to SEQ ID NO: 2342064
auuuccauuggcauaaaca

SEQ ID NO: 2342066 - RNA, 19 nt, Artificial Sequence
  Description of Artificial Sequence: Synthetic oligonucleotide
  Sense strand starting at position 1987 of SEQ ID NO: 1885435
ugccaaagugagcauacau

SEQ ID NO: 2342067 - RNA, 19 nt, Artificial Sequence
  Description of Artificial Sequence: Synthetic oligonucleotide
  Antisense strand to SEQ ID NO: 2342066
auguaugcucacuuuggca

SEQ ID NO: 2342068 - RNA, 19 nt, Artificial Sequence
  Description of Artificial Sequence: Synthetic oligonucleotide
  Sense strand starting at position 2269 of SEQ ID NO: 1885435
agucacuucuuggaaauuu

SEQ ID NO: 2342069 - RNA, 19 nt, Artificial Sequence
  Description of Artificial Sequence: Synthetic oligonucleotide
  Antisense strand to SEQ ID NO: 2342068
aaauuuccaagaagugacu

SEQ ID NO: 2342070 - RNA, 19 nt, Artificial Sequence
  Description of Artificial Sequence: Synthetic oligonucleotide
  Sense strand starting at position 2332 of SEQ ID NO: 1885435
uuaggaauucugugaauga

SEQ ID NO: 2342071 - RNA, 19 nt, Artificial Sequence
  Description of Artificial Sequence: Synthetic oligonucleotide
  Antisense strand to SEQ ID NO: 2342070
ucauucacagaauuccuaa

SEQ ID NO: 2342072 - RNA, 19 nt, Artificial Sequence
  Description of Artificial Sequence: Synthetic oligonucleotide
  Sense strand starting at position 2445 of SEQ ID NO: 1885435
gugcuaaauguuuaccuua

SEQ ID NO: 2342073 - RNA, 19 nt, Artificial Sequence
  Description of Artificial Sequence: Synthetic oligonucleotide
  Antisense strand to SEQ ID NO: 2342072
uaagguaaacauuuagcac

SEQ ID NO: 2342074 - RNA, 19 nt, Artificial Sequence
  Description of Artificial Sequence: Synthetic oligonucleotide
  Sense strand starting at position 2447 of SEQ ID NO: 1885435
gcuaaauguuuaccuuaug

SEQ ID NO: 2342075 - RNA, 19 nt, Artificial Sequence
  Description of Artificial Sequence: Synthetic oligonucleotide
  Antisense strand to SEQ ID NO: 2342074
cauaagguaaacauuuagc

SEQ ID NO: 2342076 - RNA, 19 nt, Artificial Sequence
  Description of Artificial Sequence: Synthetic oligonucleotide
  Sense strand starting at position 2458 of SEQ ID NO: 1885435
accuuaugacugcguaaca

SEQ ID NO: 2342077 - RNA, 19 nt, Artificial Sequence
  Description of Artificial Sequence: Synthetic oligonucleotide
  Antisense strand to SEQ ID NO: 2342076
uguuacgcagucauaaggu

SEQ ID NO: 2342078 - RNA, 19 nt, Artificial Sequence
  Description of Artificial Sequence: Synthetic oligonucleotide
  Sense strand starting at position 2632 of SEQ ID NO: 1885435
gagaucaauugugugauca

SEQ ID NO: 2342079 - RNA, 19 nt, Artificial Sequence
  Description of Artificial Sequence: Synthetic oligonucleotide
  Antisense strand to SEQ ID NO: 2342078
ugaucacacaauugaucuc

SEQ ID NO: 2342080 - RNA, 19 nt, Artificial Sequence
  Description of Artificial Sequence: Synthetic oligonucleotide
  Sense strand starting at position 2633 of SEQ ID NO: 1885435
agaucaauugugugaucau

SEQ ID NO: 2342081 - RNA, 19 nt, Artificial Sequence
  Description of Artificial Sequence: Synthetic oligonucleotide
  Antisense strand to SEQ ID NO: 2342080
augaucacacaauugaucu

SEQ ID NO: 2342082 - RNA, 19 nt, Artificial Sequence
  Description of Artificial Sequence: Synthetic oligonucleotide
  Sense strand starting at position 2636 of SEQ ID NO: 1885435
ucaauugugugaucauagc

SEQ ID NO: 2342083 - RNA, 19 nt, Artificial Sequence
  Description of Artificial Sequence: Synthetic oligonucleotide
  Antisense strand to SEQ ID NO: 2342082
gcuaugaucacacaauuga

SEQ ID NO: 2342084 - RNA, 19 nt, Artificial Sequence
  Description of Artificial Sequence: Synthetic oligonucleotide
  Sense strand starting at position 2784 of SEQ ID NO: 1885435
cuguguugccuagacuuau

SEQ ID NO: 2342085 - RNA, 19 nt, Artificial Sequence
  Description of Artificial Sequence: Synthetic oligonucleotide
  Antisense strand to SEQ ID NO: 2342084
auaagucuaggcaacacag

SEQ ID NO: 2342086 - RNA, 19 nt, Artificial Sequence
  Description of Artificial Sequence: Synthetic oligonucleotide
  Sense strand starting at position 2963 of SEQ ID NO: 1885435
acuuaagacuaucugguau

SEQ ID NO: 2342087 - RNA, 19 nt, Artificial Sequence
  Description of Artificial Sequence: Synthetic oligonucleotide
  Antisense strand to SEQ ID NO: 2342086
auaccagauagucuuaagu

SEQ ID NO: 2342088 - RNA, 19 nt, Artificial Sequence
  Description of Artificial Sequence: Synthetic oligonucleotide
  Sense strand starting at position 2981 of SEQ ID NO: 1885435
uuagaaauacuguaagcau

SEQ ID NO: 2342089 - RNA, 19 nt, Artificial Sequence
  Description of Artificial Sequence: Synthetic oligonucleotide
  Antisense strand to SEQ ID NO: 2342088
augcuuacaguauuucuaa

SEQ ID NO: 2342090 - RNA, 19 nt, Artificial Sequence
  Description of Artificial Sequence: Synthetic oligonucleotide
  Sense strand starting at position 3066 of SEQ ID NO: 1885435
ggcacauaaugucaauuua

SEQ ID NO: 2342091 - RNA, 19 nt, Artificial Sequence
  Description of Artificial Sequence: Synthetic oligonucleotide
  Antisense strand to SEQ ID NO: 2342090
uaaauugacauuaugugcc

SEQ ID NO: 2342092 - RNA, 19 nt, Artificial Sequence
  Description of Artificial Sequence: Synthetic oligonucleotide
  Sense strand starting at position 3124 of SEQ ID NO: 1885435
cucaauauuugauagagau

SEQ ID NO: 2342093 - RNA, 19 nt, Artificial Sequence
  Description of Artificial Sequence: Synthetic oligonucleotide
  Antisense strand to SEQ ID NO: 2342092
aucucuaucaaauauugag

SEQ ID NO: 2342094 - RNA, 19 nt, Artificial Sequence
  Description of Artificial Sequence: Synthetic oligonucleotide
  Sense strand starting at position 3226 of SEQ ID NO: 1885435
uggugucauuucuagauga

SEQ ID NO: 2342095 - RNA, 19 nt, Artificial Sequence
  Description of Artificial Sequence: Synthetic oligonucleotide
  Antisense strand to SEQ ID NO: 2342094
ucaucuagaaaugacacca

SEQ ID NO: 2342096 - RNA, 19 nt, Artificial Sequence
  Description of Artificial Sequence: Synthetic oligonucleotide
  Sense strand starting at position 3384 of SEQ ID NO: 1885435
cccacuggccuauaauagu

SEQ ID NO: 2342097 - RNA, 19 nt, Artificial Sequence
  Description of Artificial Sequence: Synthetic oligonucleotide
  Antisense strand to SEQ ID NO: 2342096
acuauuauaggccaguggg

SEQ ID NO: 2342098 - RNA, 19 nt, Artificial Sequence
  Description of Artificial Sequence: Synthetic oligonucleotide
  Sense strand starting at position 3416 of SEQ ID NO: 1885435
cggucucuauguuugaaga

SEQ ID NO: 2342099 - RNA, 19 nt, Artificial Sequence
  Description of Artificial Sequence: Synthetic oligonucleotide
  Antisense strand to SEQ ID NO: 2342098
ucuucaaacauagagaccg

SEQ ID NO: 2342100 - RNA, 19 nt, Artificial Sequence
  Description of Artificial Sequence: Synthetic oligonucleotide
  Sense strand starting at position 3417 of SEQ ID NO: 1885435
ggucucuauguuugaagaa

SEQ ID NO: 2342101 - RNA, 19 nt, Artificial Sequence
  Description of Artificial Sequence: Synthetic oligonucleotide
  Antisense strand to SEQ ID NO: 2342100
uucuucaaacauagagacc

SEQ ID NO: 2342102 - RNA, 19 nt, Artificial Sequence
  Description of Artificial Sequence: Synthetic oligonucleotide
  Sense strand starting at position 3636 of SEQ ID NO: 1885435
gguagugacuguuugagua

SEQ ID NO: 2342103 - RNA, 19 nt, Artificial Sequence
  Description of Artificial Sequence: Synthetic oligonucleotide
  Antisense strand to SEQ ID NO: 2342102
uacucaaacagucacuacc

SEQ ID NO: 2342104 - RNA, 19 nt, Artificial Sequence
  Description of Artificial Sequence: Synthetic oligonucleotide
  Sense strand starting at position 3640 of SEQ ID NO: 1885435
gugacuguuugaguaaaug

SEQ ID NO: 2342105 - RNA, 19 nt, Artificial Sequence
  Description of Artificial Sequence: Synthetic oligonucleotide
  Antisense strand to SEQ ID NO: 2342104
cauuuacucaaacagucac

SEQ ID NO: 2342106 - RNA, 19 nt, Artificial Sequence
  Description of Artificial Sequence: Synthetic oligonucleotide
  Sense strand starting at position 3686 of SEQ ID NO: 1885435
uguuguguuguuuacaaac

SEQ ID NO: 2342107 - RNA, 19 nt, Artificial Sequence
  Description of Artificial Sequence: Synthetic oligonucleotide
  Antisense strand to SEQ ID NO: 2342106
guuuguaaacaacacaaca

SEQ ID NO: 2342108 - RNA, 19 nt, Artificial Sequence
  Description of Artificial Sequence: Synthetic oligonucleotide
  Sense strand starting at position 3713 of SEQ ID NO: 1885435
uaaagacaagagugucuua

SEQ ID NO: 2342109 - RNA, 19 nt, Artificial Sequence
  Description of Artificial Sequence: Synthetic oligonucleotide
  Antisense strand to SEQ ID NO: 2342108
uaagacacucuugucuuua

SEQ ID NO: 2342110 - RNA, 19 nt, Artificial Sequence
  Description of Artificial Sequence: Synthetic oligonucleotide
  Sense strand starting at position 3716 of SEQ ID NO: 1885435
agacaagagugucuuauga

SEQ ID NO: 2342111 - RNA, 19 nt, Artificial Sequence
  Description of Artificial Sequence: Synthetic oligonucleotide
  Antisense strand to SEQ ID NO: 2342110
ucauaagacacucuugucu

SEQ ID NO: 2342112 - RNA, 19 nt, Artificial Sequence
  Description of Artificial Sequence: Synthetic oligonucleotide
  Sense strand starting at position 3796 of SEQ ID NO: 1885435
uggauuucuuuccaaugaa

SEQ ID NO: 2342113 - RNA, 19 nt, Artificial Sequence
  Description of Artificial Sequence: Synthetic oligonucleotide
  Antisense strand to SEQ ID NO: 2342112
uucauuggaaagaaaucca

SEQ ID NO: 2342114 - RNA, 19 nt, Artificial Sequence
  Description of Artificial Sequence: Synthetic oligonucleotide
  Sense strand starting at position 3882 of SEQ ID NO: 1885435
agugccucuuauuuaucua

SEQ ID NO: 2342115 - RNA, 19 nt, Artificial Sequence
  Description of Artificial Sequence: Synthetic oligonucleotide
  Antisense strand to SEQ ID NO: 2342114
uagauaaauaagaggcacu

SEQ ID NO: 2342116 - RNA, 19 nt, Artificial Sequence
  Description of Artificial Sequence: Synthetic oligonucleotide
  Sense strand starting at position 252 of SEQ ID NO: 1885436
ugugcucaguauuuggaau

SEQ ID NO: 2342117 - RNA, 19 nt, Artificial Sequence
  Description of Artificial Sequence: Synthetic oligonucleotide
  Antisense strand to SEQ ID NO: 2342116
auuccaaauacugagcaca

SEQ ID NO: 2342118 - RNA, 19 nt, Artificial Sequence
  Description of Artificial Sequence: Synthetic oligonucleotide
  Sense strand starting at position 342 of SEQ ID NO: 1885436
ugcacugugcucuuuaugu

SEQ ID NO: 2342119 - RNA, 19 nt, Artificial Sequence
  Description of Artificial Sequence: Synthetic oligonucleotide
  Antisense strand to SEQ ID NO: 2342118
acauaaagagcacagugca

SEQ ID NO: 2342120 - RNA, 19 nt, Artificial Sequence
  Description of Artificial Sequence: Synthetic oligonucleotide
  Sense strand starting at position 415 of SEQ ID NO: 1885436
ugacuagacuggccucaau

SEQ ID NO: 2342121 - RNA, 19 nt, Artificial Sequence
  Description of Artificial Sequence: Synthetic oligonucleotide
  Antisense strand to SEQ ID NO: 2342120
auugaggccagucuaguca

SEQ ID NO: 2342122 - RNA, 19 nt, Artificial Sequence
  Description of Artificial Sequence: Synthetic oligonucleotide
  Sense strand starting at position 539 of SEQ ID NO: 1885436
gaacuuugugguuaaagca

SEQ ID NO: 2342123 - RNA, 19 nt, Artificial Sequence
  Description of Artificial Sequence: Synthetic oligonucleotide
  Antisense strand to SEQ ID NO: 2342122
ugcuuuaaccacaaaguuc

SEQ ID NO: 2342124 - RNA, 19 nt, Artificial Sequence
  Description of Artificial Sequence: Synthetic oligonucleotide
  Sense strand starting at position 546 of SEQ ID NO: 1885436
gugguuaaagcagagauga

SEQ ID NO: 2342125 - RNA, 19 nt, Artificial Sequence
  Description of Artificial Sequence: Synthetic oligonucleotide
  Antisense strand to SEQ ID NO: 2342124
ucaucucugcuuuaaccac

SEQ ID NO: 2342126 - RNA, 19 nt, Artificial Sequence
  Description of Artificial Sequence: Synthetic oligonucleotide
  Sense strand starting at position 663 of SEQ ID NO: 1885436
accaguuauugaccagaca

SEQ ID NO: 2342127 - RNA, 19 nt, Artificial Sequence
  Description of Artificial Sequence: Synthetic oligonucleotide
  Antisense strand to SEQ ID NO: 2342126
ugucuggucaauaacuggu

SEQ ID NO: 2342128 - RNA, 19 nt, Artificial Sequence
  Description of Artificial Sequence: Synthetic oligonucleotide
  Sense strand starting at position 851 of SEQ ID NO: 1885436
cgguauugaaauuagggua

SEQ ID NO: 2342129 - RNA, 19 nt, Artificial Sequence
  Description of Artificial Sequence: Synthetic oligonucleotide
  Antisense strand to SEQ ID NO: 2342128
uacccuaauuucaauaccg

SEQ ID NO: 2342130 - RNA, 19 nt, Artificial Sequence
  Description of Artificial Sequence: Synthetic oligonucleotide
  Sense strand starting at position 884 of SEQ ID NO: 1885436
ucaacuuuggauugaugua

SEQ ID NO: 2342131 - RNA, 19 nt, Artificial Sequence
  Description of Artificial Sequence: Synthetic oligonucleotide
  Antisense strand to SEQ ID NO: 2342130
uacaucaauccaaaguuga

SEQ ID NO: 2342132 - RNA, 19 nt, Artificial Sequence
  Description of Artificial Sequence: Synthetic oligonucleotide
  Sense strand starting at position 896 of SEQ ID NO: 1885436
ugauguacccucugauaug

SEQ ID NO: 2342133 - RNA, 19 nt, Artificial Sequence
  Description of Artificial Sequence: Synthetic oligonucleotide
  Antisense strand to SEQ ID NO: 2342132
cauaucagaggguacauca

SEQ ID NO: 2342134 - RNA, 19 nt, Artificial Sequence
  Description of Artificial Sequence: Synthetic oligonucleotide
  Sense strand starting at position 1241 of SEQ ID NO: 1885436
cuagauauuugccuguucu

SEQ ID NO: 2342135 - RNA, 19 nt, Artificial Sequence
  Description of Artificial Sequence: Synthetic oligonucleotide
  Antisense strand to SEQ ID NO: 2342134
agaacaggcaaauaucuag

SEQ ID NO: 2342136 - RNA, 19 nt, Artificial Sequence
  Description of Artificial Sequence: Synthetic oligonucleotide
  Sense strand starting at position 1242 of SEQ ID NO: 1885436
uagauauuugccuguucug

SEQ ID NO: 2342137 - RNA, 19 nt, Artificial Sequence
  Description of Artificial Sequence: Synthetic oligonucleotide
  Antisense strand to SEQ ID NO: 2342136
cagaacaggcaaauaucua

SEQ ID NO: 2342138 - RNA, 19 nt, Artificial Sequence
  Description of Artificial Sequence: Synthetic oligonucleotide
  Sense strand starting at position 1406 of SEQ ID NO: 1885436
guaguuguuuauccauuua

SEQ ID NO: 2342139 - RNA, 19 nt, Artificial Sequence
  Description of Artificial Sequence: Synthetic oligonucleotide
  Antisense strand to SEQ ID NO: 2342138
uaaauggauaaacaacuac

SEQ ID NO: 2342140 - RNA, 19 nt, Artificial Sequence
  Description of Artificial Sequence: Synthetic oligonucleotide
  Sense strand starting at position 1531 of SEQ ID NO: 1885436
ggcaucuaggaguggaauu

SEQ ID NO: 2342141 - RNA, 19 nt, Artificial Sequence
  Description of Artificial Sequence: Synthetic oligonucleotide
  Antisense strand to SEQ ID NO: 2342140
aauuccacuccuagaugcc

SEQ ID NO: 2342142 - RNA, 19 nt, Artificial Sequence
  Description of Artificial Sequence: Synthetic oligonucleotide
  Sense strand starting at position 1705 of SEQ ID NO: 1885436
aucgaauugguauaccaau

SEQ ID NO: 2342143 - RNA, 19 nt, Artificial Sequence
  Description of Artificial Sequence: Synthetic oligonucleotide
  Antisense strand to SEQ ID NO: 2342142
auugguauaccaauucgau

SEQ ID NO: 2342144 - RNA, 19 nt, Artificial Sequence
  Description of Artificial Sequence: Synthetic oligonucleotide
  Sense strand starting at position 2011 of SEQ ID NO: 1885436
uuuaauugaccgggaggga

SEQ ID NO: 2342145 - RNA, 19 nt, Artificial Sequence
  Description of Artificial Sequence: Synthetic oligonucleotide
  Antisense strand to SEQ ID NO: 2342144
ucccucccggucaauuaaa

SEQ ID NO: 2342146 - RNA, 19 nt, Artificial Sequence
  Description of Artificial Sequence: Synthetic oligonucleotide
  Sense strand starting at position 2050 of SEQ ID NO: 1885436
ccaguucuuauguggagga

SEQ ID NO: 2342147 - RNA, 19 nt, Artificial Sequence
  Description of Artificial Sequence: Synthetic oligonucleotide
  Antisense strand to SEQ ID NO: 2342146
uccuccacauaagaacugg

SEQ ID NO: 2342148 - RNA, 19 nt, Artificial Sequence
  Description of Artificial Sequence: Synthetic oligonucleotide
  Sense strand starting at position 2052 of SEQ ID NO: 1885436
aguucuuauguggaggaua

SEQ ID NO: 2342149 - RNA, 19 nt, Artificial Sequence
  Description of Artificial Sequence: Synthetic oligonucleotide
  Antisense strand to SEQ ID NO: 2342148
uauccuccacauaagaacu

SEQ ID NO: 2342150 - RNA, 19 nt, Artificial Sequence
  Description of Artificial Sequence: Synthetic oligonucleotide
  Sense strand starting at position 2054 of SEQ ID NO: 1885436
uucuuauguggaggauagu

SEQ ID NO: 2342151 - RNA, 19 nt, Artificial Sequence
  Description of Artificial Sequence: Synthetic oligonucleotide
  Antisense strand to SEQ ID NO: 2342150
acuauccuccacauaagaa

SEQ ID NO: 2342152 - RNA, 19 nt, Artificial Sequence
  Description of Artificial Sequence: Synthetic oligonucleotide
  Sense strand starting at position 2055 of SEQ ID NO: 1885436
ucuuauguggaggauaguu

SEQ ID NO: 2342153 - RNA, 19 nt, Artificial Sequence
  Description of Artificial Sequence: Synthetic oligonucleotide
  Antisense strand to SEQ ID NO: 2342152
aacuauccuccacauaaga

SEQ ID NO: 2342154 - RNA, 19 nt, Artificial Sequence
  Description of Artificial Sequence: Synthetic oligonucleotide
  Sense strand starting at position 2063 of SEQ ID NO: 1885436
ggaggauaguuucuccuac

SEQ ID NO: 2342155 - RNA, 19 nt, Artificial Sequence
  Description of Artificial Sequence: Synthetic oligonucleotide
  Antisense strand to SEQ ID NO: 2342154
guaggagaaacuauccucc

SEQ ID NO: 2342156 - RNA, 19 nt, Artificial Sequence
  Description of Artificial Sequence: Synthetic oligonucleotide
  Sense strand starting at position 2064 of SEQ ID NO: 1885436
gaggauaguuucuccuaca

SEQ ID NO: 2342157 - RNA, 19 nt, Artificial Sequence
  Description of Artificial Sequence: Synthetic oligonucleotide
  Antisense strand to SEQ ID NO: 2342156
uguaggagaaacuauccuc

SEQ ID NO: 2342158 - RNA, 19 nt, Artificial Sequence
  Description of Artificial Sequence: Synthetic oligonucleotide
  Sense strand starting at position 2065 of SEQ ID NO: 1885436
aggauaguuucuccuacau

SEQ ID NO: 2342159 - RNA, 19 nt, Artificial Sequence
  Description of Artificial Sequence: Synthetic oligonucleotide
  Antisense strand to SEQ ID NO: 2342158
auguaggagaaacuauccu

SEQ ID NO: 2342160 - RNA, 19 nt, Artificial Sequence
  Description of Artificial Sequence: Synthetic oligonucleotide
  Sense strand starting at position 2121 of SEQ ID NO: 1885436
aggaauguuugauugaagu

SEQ ID NO: 2342161 - RNA, 19 nt, Artificial Sequence
  Description of Artificial Sequence: Synthetic oligonucleotide
  Antisense strand to SEQ ID NO: 2342160
acuucaaucaaacauuccu

SEQ ID NO: 2342162 - RNA, 19 nt, Artificial Sequence
  Description of Artificial Sequence: Synthetic oligonucleotide
  Sense strand starting at position 2158 of SEQ ID NO: 1885436
aguuacaguuaagucauaa

SEQ ID NO: 2342163 - RNA, 19 nt, Artificial Sequence
  Description of Artificial Sequence: Synthetic oligonucleotide
  Antisense strand to SEQ ID NO: 2342162
uuaugacuuaacuguaacu

SEQ ID NO: 2342164 - RNA, 19 nt, Artificial Sequence
  Description of Artificial Sequence: Synthetic oligonucleotide
  Sense strand starting at position 2177 of SEQ ID NO: 1885436
cccaacuggcuguauauaa

SEQ ID NO: 2342165 - RNA, 19 nt, Artificial Sequence
  Description of Artificial Sequence: Synthetic oligonucleotide
  Antisense strand to SEQ ID NO: 2342164
uuauauacagccaguuggg

SEQ ID NO: 2342166 - RNA, 19 nt, Artificial Sequence
  Description of Artificial Sequence: Synthetic oligonucleotide
  Sense strand starting at position 2251 of SEQ ID NO: 1885436
cuuguaaggagucagcuaa

SEQ ID NO: 2342167 - RNA, 19 nt, Artificial Sequence
  Description of Artificial Sequence: Synthetic oligonucleotide
  Antisense strand to SEQ ID NO: 2342166
uuagcugacuccuuacaag

SEQ ID NO: 2342168 - RNA, 19 nt, Artificial Sequence
  Description of Artificial Sequence: Synthetic oligonucleotide
  Sense strand starting at position 2262 of SEQ ID NO: 1885436
ucagcuaaagaauguaaau

SEQ ID NO: 2342169 - RNA, 19 nt, Artificial Sequence
  Description of Artificial Sequence: Synthetic oligonucleotide
  Antisense strand to SEQ ID NO: 2342168
auuuacauucuuuagcuga

SEQ ID NO: 2342170 - RNA, 19 nt, Artificial Sequence
  Description of Artificial Sequence: Synthetic oligonucleotide
  Sense strand starting at position 2666 of SEQ ID NO: 1885436
guaacugauguauguagaa

SEQ ID NO: 2342171 - RNA, 19 nt, Artificial Sequence
  Description of Artificial Sequence: Synthetic oligonucleotide
  Antisense strand to SEQ ID NO: 2342170
uucuacauacaucaguuac

SEQ ID NO: 2342172 - RNA, 19 nt, Artificial Sequence
  Description of Artificial Sequence: Synthetic oligonucleotide
  Sense strand starting at position 2896 of SEQ ID NO: 1885436
agaagagguccuugaguuc

SEQ ID NO: 2342173 - RNA, 19 nt, Artificial Sequence
  Description of Artificial Sequence: Synthetic oligonucleotide
  Antisense strand to SEQ ID NO: 2342172
gaacucaaggaccucuucu

SEQ ID NO: 2342174 - RNA, 19 nt, Artificial Sequence
  Description of Artificial Sequence: Synthetic oligonucleotide
  Sense strand starting at position 2899 of SEQ ID NO: 1885436
agagguccuugaguucuga

SEQ ID NO: 2342175 - RNA, 19 nt, Artificial Sequence
  Description of Artificial Sequence: Synthetic oligonucleotide
  Antisense strand to SEQ ID NO: 2342174
ucagaacucaaggaccucu

SEQ ID NO: 2342176 - RNA, 19 nt, Artificial Sequence
  Description of Artificial Sequence: Synthetic oligonucleotide
  Sense strand starting at position 3107 of SEQ ID NO: 1885436
aucagcauuuauggauuua

SEQ ID NO: 2342177 - RNA, 19 nt, Artificial Sequence
  Description of Artificial Sequence: Synthetic oligonucleotide
  Antisense strand to SEQ ID NO: 2342176
uaaauccauaaaugcugau

SEQ ID NO: 2342178 - RNA, 19 nt, Artificial Sequence
  Description of Artificial Sequence: Synthetic oligonucleotide
  Sense strand starting at position 3244 of SEQ ID NO: 1885436
accuguguacauuguauuu

SEQ ID NO: 2342179 - RNA, 19 nt, Artificial Sequence
  Description of Artificial Sequence: Synthetic oligonucleotide
  Antisense strand to SEQ ID NO: 2342178
aaauacaauguacacaggu

SEQ ID NO: 2342180 - RNA, 19 nt, Artificial Sequence
  Description of Artificial Sequence: Synthetic oligonucleotide
  Sense strand starting at position 3276 of SEQ ID NO: 1885436
auggcugucaaugaaagua

SEQ ID NO: 2342181 - RNA, 19 nt, Artificial Sequence
  Description of Artificial Sequence: Synthetic oligonucleotide
  Antisense strand to SEQ ID NO: 2342180
uacuuucauugacagccau

SEQ ID NO: 2342182 - RNA, 19 nt, Artificial Sequence
  Description of Artificial Sequence: Synthetic oligonucleotide
  Sense strand starting at position 3285 of SEQ ID NO: 1885436
aaugaaaguaguggaaguu

SEQ ID NO: 2342183 - RNA, 19 nt, Artificial Sequence
  Description of Artificial Sequence: Synthetic oligonucleotide
  Antisense strand to SEQ ID NO: 2342182
aacuuccacuacuuucauu

SEQ ID NO: 2342184 - RNA, 19 nt, Artificial Sequence
  Description of Artificial Sequence: Synthetic oligonucleotide
  Sense strand starting at position 3294 of SEQ ID NO: 1885436
aguggaaguugucuaugaa

SEQ ID NO: 2342185 - RNA, 19 nt, Artificial Sequence
  Description of Artificial Sequence: Synthetic oligonucleotide
  Antisense strand to SEQ ID NO: 2342184
uucauagacaacuuccacu

SEQ ID NO: 2342186 - RNA, 19 nt, Artificial Sequence
  Description of Artificial Sequence: Synthetic oligonucleotide
  Sense strand starting at position 3295 of SEQ ID NO: 1885436
guggaaguugucuaugaau

SEQ ID NO: 2342187 - RNA, 19 nt, Artificial Sequence
  Description of Artificial Sequence: Synthetic oligonucleotide
  Antisense strand to SEQ ID NO: 2342186
auucauagacaacuuccac

SEQ ID NO: 2342188 - RNA, 19 nt, Artificial Sequence
  Description of Artificial Sequence: Synthetic oligonucleotide
  Sense strand starting at position 3297 of SEQ ID NO: 1885436
ggaaguugucuaugaauca

SEQ ID NO: 2342189 - RNA, 19 nt, Artificial Sequence
  Description of Artificial Sequence: Synthetic oligonucleotide
  Antisense strand to SEQ ID NO: 2342188
ugauucauagacaacuucc

SEQ ID NO: 2342190 - RNA, 19 nt, Artificial Sequence
  Description of Artificial Sequence: Synthetic oligonucleotide
  Sense strand starting at position 3304 of SEQ ID NO: 1885436
gucuaugaaucagaaauuu

SEQ ID NO: 2342191 - RNA, 19 nt, Artificial Sequence
  Description of Artificial Sequence: Synthetic oligonucleotide
  Antisense strand to SEQ ID NO: 2342190
aaauuucugauucauagac

SEQ ID NO: 2342192 - RNA, 19 nt, Artificial Sequence
  Description of Artificial Sequence: Synthetic oligonucleotide
  Sense strand starting at position 3627 of SEQ ID NO: 1885436
aaguguacacaucagugau

SEQ ID NO: 2342193 - RNA, 19 nt, Artificial Sequence
  Description of Artificial Sequence: Synthetic oligonucleotide
  Antisense strand to SEQ ID NO: 2342192
aucacugauguguacacuu

SEQ ID NO: 2342194 - RNA, 19 nt, Artificial Sequence
  Description of Artificial Sequence: Synthetic oligonucleotide
  Sense strand starting at position 3640 of SEQ ID NO: 1885436
agugauacucgguacauuc

SEQ ID NO: 2342195 - RNA, 19 nt, Artificial Sequence
  Description of Artificial Sequence: Synthetic oligonucleotide
  Antisense strand to SEQ ID NO: 2342194
gaauguaccgaguaucacu

SEQ ID NO: 2342196 - RNA, 19 nt, Artificial Sequence
  Description of Artificial Sequence: Synthetic oligonucleotide
  Sense strand starting at position 147 of SEQ ID NO: 1885437
uccaaaugucuugggugga

SEQ ID NO: 2342197 - RNA, 19 nt, Artificial Sequence
  Description of Artificial Sequence: Synthetic oligonucleotide
  Antisense strand to SEQ ID NO: 2342196
uccacccaagacauuugga

SEQ ID NO: 2342198 - RNA, 19 nt, Artificial Sequence
  Description of Artificial Sequence: Synthetic oligonucleotide
  Sense strand starting at position 363 of SEQ ID NO: 1885437
gaaaucaagcccuggguga

SEQ ID NO: 2342199 - RNA, 19 nt, Artificial Sequence
  Description of Artificial Sequence: Synthetic oligonucleotide
  Antisense strand to SEQ ID NO: 2342198
ucacccagggcuugauuuc

SEQ ID NO: 2342200 - RNA, 19 nt, Artificial Sequence
  Description of Artificial Sequence: Synthetic oligonucleotide
  Sense strand starting at position 365 of SEQ ID NO: 1885437
aaucaagcccugggugaau

SEQ ID NO: 2342201 - RNA, 19 nt, Artificial Sequence
  Description of Artificial Sequence: Synthetic oligonucleotide
  Antisense strand to SEQ ID NO: 2342200
auucacccagggcuugauu

SEQ ID NO: 2342202 - RNA, 19 nt, Artificial Sequence
  Description of Artificial Sequence: Synthetic oligonucleotide
  Sense strand starting at position 543 of SEQ ID NO: 1885437
agacuuuagugcccagauu

SEQ ID NO: 2342203 - RNA, 19 nt, Artificial Sequence
  Description of Artificial Sequence: Synthetic oligonucleotide
  Antisense strand to SEQ ID NO: 2342202
aaucugggcacuaaagucu

SEQ ID NO: 2342204 - RNA, 19 nt, Artificial Sequence
  Description of Artificial Sequence: Synthetic oligonucleotide
  Sense strand starting at position 601 of SEQ ID NO: 1885437
acuggauucuagguagacu

SEQ ID NO: 2342205 - RNA, 19 nt, Artificial Sequence
  Description of Artificial Sequence: Synthetic oligonucleotide
  Antisense strand to SEQ ID NO: 2342204
agucuaccuagaauccagu

SEQ ID NO: 2342206 - RNA, 19 nt, Artificial Sequence
  Description of Artificial Sequence: Synthetic oligonucleotide
  Sense strand starting at position 785 of SEQ ID NO: 1885437
ggguaucuaauccauaggu

SEQ ID NO: 2342207 - RNA, 19 nt, Artificial Sequence
  Description of Artificial Sequence: Synthetic oligonucleotide
  Antisense strand to SEQ ID NO: 2342206
accuauggauuagauaccc

SEQ ID NO: 2342208 - RNA, 19 nt, Artificial Sequence
  Description of Artificial Sequence: Synthetic oligonucleotide
  Sense strand starting at position 1098 of SEQ ID NO: 1885437
gugaccgaauggucacaua

SEQ ID NO: 2342209 - RNA, 19 nt, Artificial Sequence
  Description of Artificial Sequence: Synthetic oligonucleotide
  Antisense strand to SEQ ID NO: 2342208
uaugugaccauucggucac

SEQ ID NO: 2342210 - RNA, 19 nt, Artificial Sequence
  Description of Artificial Sequence: Synthetic oligonucleotide
  Sense strand starting at position 1281 of SEQ ID NO: 1885437
caacuaguccgagagcaag

SEQ ID NO: 2342211 - RNA, 19 nt, Artificial Sequence
  Description of Artificial Sequence: Synthetic oligonucleotide
  Antisense strand to SEQ ID NO: 2342210
cuugcucucggacuaguug

SEQ ID NO: 2342212 - RNA, 19 nt, Artificial Sequence
  Description of Artificial Sequence: Synthetic oligonucleotide
  Sense strand starting at position 1307 of SEQ ID NO: 1885437
acaggcuuugcauagaaga

SEQ ID NO: 2342213 - RNA, 19 nt, Artificial Sequence
  Description of Artificial Sequence: Synthetic oligonucleotide
  Antisense strand to SEQ ID NO: 2342212
ucuucuaugcaaagccugu

SEQ ID NO: 2342214 - RNA, 19 nt, Artificial Sequence
  Description of Artificial Sequence: Synthetic oligonucleotide
  Sense strand starting at position 1447 of SEQ ID NO: 1885437
ccgguuucccaagaaacau

SEQ ID NO: 2342215 - RNA, 19 nt, Artificial Sequence
  Description of Artificial Sequence: Synthetic oligonucleotide
  Antisense strand to SEQ ID NO: 2342214
auguuucuugggaaaccgg

SEQ ID NO: 2342216 - RNA, 19 nt, Artificial Sequence
  Description of Artificial Sequence: Synthetic oligonucleotide
  Sense strand starting at position 1544 of SEQ ID NO: 1885437
ggccucuaggccuacaaau

SEQ ID NO: 2342217 - RNA, 19 nt, Artificial Sequence
  Description of Artificial Sequence: Synthetic oligonucleotide
  Antisense strand to SEQ ID NO: 2342216
auuuguaggccuagaggcc

SEQ ID NO: 2342218 - RNA, 19 nt, Artificial Sequence
  Description of Artificial Sequence: Synthetic oligonucleotide
  Sense strand starting at position 2120 of SEQ ID NO: 1885437
gcaccuugauagucacaaa

SEQ ID NO: 2342219 - RNA, 19 nt, Artificial Sequence
  Description of Artificial Sequence: Synthetic oligonucleotide
  Antisense strand to SEQ ID NO: 2342218
uuugugacuaucaaggugc

SEQ ID NO: 2342220 - RNA, 19 nt, Artificial Sequence
  Description of Artificial Sequence: Synthetic oligonucleotide
  Sense strand starting at position 2132 of SEQ ID NO: 1885437
ucacaaaugcaaugcuaga

SEQ ID NO: 2342221 - RNA, 19 nt, Artificial Sequence
  Description of Artificial Sequence: Synthetic oligonucleotide
  Antisense strand to SEQ ID NO: 2342220
ucuagcauugcauuuguga

SEQ ID NO: 2342222 - RNA, 19 nt, Artificial Sequence
  Description of Artificial Sequence: Synthetic oligonucleotide
  Sense strand starting at position 2158 of SEQ ID NO: 1885437
augauauucuggucaggca

SEQ ID NO: 2342223 - RNA, 19 nt, Artificial Sequence
  Description of Artificial Sequence: Synthetic oligonucleotide
  Antisense strand to SEQ ID NO: 2342222
ugccugaccagaauaucau

SEQ ID NO: 2342224 - RNA, 19 nt, Artificial Sequence
  Description of Artificial Sequence: Synthetic oligonucleotide
  Sense strand starting at position 2490 of SEQ ID NO: 1885437
guggaaacaucagaugaga

SEQ ID NO: 2342225 - RNA, 19 nt, Artificial Sequence
  Description of Artificial Sequence: Synthetic oligonucleotide
  Antisense strand to SEQ ID NO: 2342224
ucucaucugauguuuccac

SEQ ID NO: 2342226 - RNA, 19 nt, Artificial Sequence
  Description of Artificial Sequence: Synthetic oligonucleotide
  Sense strand starting at position 2655 of SEQ ID NO: 1885437
cagagauagucuuuguauu

SEQ ID NO: 2342227 - RNA, 19 nt, Artificial Sequence
  Description of Artificial Sequence: Synthetic oligonucleotide
  Antisense strand to SEQ ID NO: 2342226
aauacaaagacuaucucug

SEQ ID NO: 2342228 - RNA, 19 nt, Artificial Sequence
  Description of Artificial Sequence: Synthetic oligonucleotide
  Sense strand starting at position 2656 of SEQ ID NO: 1885437
agagauagucuuuguauua

SEQ ID NO: 2342229 - RNA, 19 nt, Artificial Sequence
  Description of Artificial Sequence: Synthetic oligonucleotide
  Antisense strand to SEQ ID NO: 2342228
uaauacaaagacuaucucu

SEQ ID NO: 2342230 - RNA, 19 nt, Artificial Sequence
  Description of Artificial Sequence: Synthetic oligonucleotide
  Sense strand starting at position 2657 of SEQ ID NO: 1885437
gagauagucuuuguauuau

SEQ ID NO: 2342231 - RNA, 19 nt, Artificial Sequence
  Description of Artificial Sequence: Synthetic oligonucleotide
  Antisense strand to SEQ ID NO: 2342230
auaauacaaagacuaucuc

SEQ ID NO: 2342232 - RNA, 19 nt, Artificial Sequence
  Description of Artificial Sequence: Synthetic oligonucleotide
  Sense strand starting at position 2843 of SEQ ID NO: 1885437
uauagcuugccuuagguga

SEQ ID NO: 2342233 - RNA, 19 nt, Artificial Sequence
  Description of Artificial Sequence: Synthetic oligonucleotide
  Antisense strand to SEQ ID NO: 2342232
ucaccuaaggcaagcuaua

SEQ ID NO: 2342234 - RNA, 19 nt, Artificial Sequence
  Description of Artificial Sequence: Synthetic oligonucleotide
  Sense strand starting at position 2850 of SEQ ID NO: 1885437
ugccuuaggugagcagaaa

SEQ ID NO: 2342235 - RNA, 19 nt, Artificial Sequence
  Description of Artificial Sequence: Synthetic oligonucleotide
  Antisense strand to SEQ ID NO: 2342234
uuucugcucaccuaaggca

SEQ ID NO: 2342236 - RNA, 19 nt, Artificial Sequence
  Description of Artificial Sequence: Synthetic oligonucleotide
  Sense strand starting at position 2851 of SEQ ID NO: 1885437
gccuuaggugagcagaaau

SEQ ID NO: 2342237 - RNA, 19 nt, Artificial Sequence
  Description of Artificial Sequence: Synthetic oligonucleotide
  Antisense strand to SEQ ID NO: 2342236
auuucugcucaccuaaggc

SEQ ID NO: 2342238 - RNA, 19 nt, Artificial Sequence
  Description of Artificial Sequence: Synthetic oligonucleotide
  Sense strand starting at position 2938 of SEQ ID NO: 1885437
agugcaaugaugcagucua

SEQ ID NO: 2342239 - RNA, 19 nt, Artificial Sequence
  Description of Artificial Sequence: Synthetic oligonucleotide
  Antisense strand to SEQ ID NO: 2342238
uagacugcaucauugcacu

SEQ ID NO: 2342240 - RNA, 19 nt, Artificial Sequence
  Description of Artificial Sequence: Synthetic oligonucleotide
  Sense strand starting at position 2946 of SEQ ID NO: 1885437
gaugcagucuaagcucauu

SEQ ID NO: 2342241 - RNA, 19 nt, Artificial Sequence
  Description of Artificial Sequence: Synthetic oligonucleotide
  Antisense strand to SEQ ID NO: 2342240
aaugagcuuagacugcauc

SEQ ID NO: 2342242 - RNA, 19 nt, Artificial Sequence
  Description of Artificial Sequence: Synthetic oligonucleotide
  Sense strand starting at position 2951 of SEQ ID NO: 1885437
agucuaagcucauugcaga

SEQ ID NO: 2342243 - RNA, 19 nt, Artificial Sequence
  Description of Artificial Sequence: Synthetic oligonucleotide
  Antisense strand to SEQ ID NO: 2342242
ucugcaaugagcuuagacu

SEQ ID NO: 2342244 - RNA, 19 nt, Artificial Sequence
  Description of Artificial Sequence: Synthetic oligonucleotide
  Sense strand starting at position 3203 of SEQ ID NO: 1885437
caauccuuuccuugagggu

SEQ ID NO: 2342245 - RNA, 19 nt, Artificial Sequence
  Description of Artificial Sequence: Synthetic oligonucleotide
  Antisense strand to SEQ ID NO: 2342244
acccucaaggaaaggauug

SEQ ID NO: 2342246 - RNA, 19 nt, Artificial Sequence
  Description of Artificial Sequence: Synthetic oligonucleotide
  Sense strand starting at position 3204 of SEQ ID NO: 1885437
aauccuuuccuugaggguu

SEQ ID NO: 2342247 - RNA, 19 nt, Artificial Sequence
  Description of Artificial Sequence: Synthetic oligonucleotide
  Antisense strand to SEQ ID NO: 2342246
aacccucaaggaaaggauu

SEQ ID NO: 2342248 - RNA, 19 nt, Artificial Sequence
  Description of Artificial Sequence: Synthetic oligonucleotide
  Sense strand starting at position 3216 of SEQ ID NO: 1885437
gaggguuacugcuuucuau

SEQ ID NO: 2342249 - RNA, 19 nt, Artificial Sequence
  Description of Artificial Sequence: Synthetic oligonucleotide
  Antisense strand to SEQ ID NO: 2342248
auagaaagcaguaacccuc

SEQ ID NO: 2342250 - RNA, 19 nt, Artificial Sequence
  Description of Artificial Sequence: Synthetic oligonucleotide
  Sense strand starting at position 3281 of SEQ ID NO: 1885437
guguuccacuuccuucuaa

SEQ ID NO: 2342251 - RNA, 19 nt, Artificial Sequence
  Description of Artificial Sequence: Synthetic oligonucleotide
  Antisense strand to SEQ ID NO: 2342250
uuagaaggaaguggaacac

SEQ ID NO: 2342252 - RNA, 19 nt, Artificial Sequence
  Description of Artificial Sequence: Synthetic oligonucleotide
  Sense strand starting at position 3328 of SEQ ID NO: 1885437
ugugcuuaaucaucuagaa

SEQ ID NO: 2342253 - RNA, 19 nt, Artificial Sequence
  Description of Artificial Sequence: Synthetic oligonucleotide
  Antisense strand to SEQ ID NO: 2342252
uucuagaugauuaagcaca

SEQ ID NO: 2342254 - RNA, 19 nt, Artificial Sequence
  Description of Artificial Sequence: Synthetic oligonucleotide
  Sense strand starting at position 3342 of SEQ ID NO: 1885437
uagaauugauacuugugca

SEQ ID NO: 2342255 - RNA, 19 nt, Artificial Sequence
  Description of Artificial Sequence: Synthetic oligonucleotide
  Antisense strand to SEQ ID NO: 2342254
ugcacaaguaucaauucua

SEQ ID NO: 2342256 - RNA, 19 nt, Artificial Sequence
  Description of Artificial Sequence: Synthetic oligonucleotide
  Sense strand starting at position 3347 of SEQ ID NO: 1885437
uugauacuugugcacagua

SEQ ID NO: 2342257 - RNA, 19 nt, Artificial Sequence
  Description of Artificial Sequence: Synthetic oligonucleotide
  Antisense strand to SEQ ID NO: 2342256
uacugugcacaaguaucaa

SEQ ID NO: 2342258 - RNA, 19 nt, Artificial Sequence
  Description of Artificial Sequence: Synthetic oligonucleotide
  Sense strand starting at position 3392 of SEQ ID NO: 1885437
guuuccauauaguuaacca

SEQ ID NO: 2342259 - RNA, 19 nt, Artificial Sequence
  Description of Artificial Sequence: Synthetic oligonucleotide
  Antisense strand to SEQ ID NO: 2342258
ugguuaacuauauggaaac

SEQ ID NO: 2342260 - RNA, 19 nt, Artificial Sequence
  Description of Artificial Sequence: Synthetic oligonucleotide
  Sense strand starting at position 3462 of SEQ ID NO: 1885437
gcugauaccucucucaugu

SEQ ID NO: 2342261 - RNA, 19 nt, Artificial Sequence
  Description of Artificial Sequence: Synthetic oligonucleotide
  Antisense strand to SEQ ID NO: 2342260
acaugagagagguaucagc

SEQ ID NO: 2342262 - RNA, 19 nt, Artificial Sequence
  Description of Artificial Sequence: Synthetic oligonucleotide
  Sense strand starting at position 3478 of SEQ ID NO: 1885437
uguaucagguucucauuaa

SEQ ID NO: 2342263 - RNA, 19 nt, Artificial Sequence
  Description of Artificial Sequence: Synthetic oligonucleotide
  Antisense strand to SEQ ID NO: 2342262
uuaaugagaaccugauaca

SEQ ID NO: 2342264 - RNA, 19 nt, Artificial Sequence
  Description of Artificial Sequence: Synthetic oligonucleotide
  Sense strand starting at position 3542 of SEQ ID NO: 1885437
augcgaaugccacauaauu

SEQ ID NO: 2342265 - RNA, 19 nt, Artificial Sequence
  Description of Artificial Sequence: Synthetic oligonucleotide
  Antisense strand to SEQ ID NO: 2342264
aauuauguggcauucgcau

SEQ ID NO: 2342266 - RNA, 19 nt, Artificial Sequence
  Description of Artificial Sequence: Synthetic oligonucleotide
  Sense strand starting at position 3579 of SEQ ID NO: 1885437
agcuuaauaucuucuagag

SEQ ID NO: 2342267 - RNA, 19 nt, Artificial Sequence
  Description of Artificial Sequence: Synthetic oligonucleotide
  Antisense strand to SEQ ID NO: 2342266
cucuagaagauauuaagcu

SEQ ID NO: 2342268 - RNA, 19 nt, Artificial Sequence
  Description of Artificial Sequence: Synthetic oligonucleotide
  Sense strand starting at position 3908 of SEQ ID NO: 1885437
cuuaaacucuugcugguau

SEQ ID NO: 2342269 - RNA, 19 nt, Artificial Sequence
  Description of Artificial Sequence: Synthetic oligonucleotide
  Antisense strand to SEQ ID NO: 2342268
auaccagcaagaguuuaag

SEQ ID NO: 2342270 - RNA, 19 nt, Artificial Sequence
  Description of Artificial Sequence: Synthetic oligonucleotide
  Sense strand starting at position 3916 of SEQ ID NO: 1885437
cuugcugguauguagaaau

SEQ ID NO: 2342271 - RNA, 19 nt, Artificial Sequence
  Description of Artificial Sequence: Synthetic oligonucleotide
  Antisense strand to SEQ ID NO: 2342270
auuucuacauaccagcaag

SEQ ID NO: 2342272 - RNA, 19 nt, Artificial Sequence
  Description of Artificial Sequence: Synthetic oligonucleotide
  Sense strand starting at position 3975 of SEQ ID NO: 1885437
uuaacauugucaguuugua

SEQ ID NO: 2342273 - RNA, 19 nt, Artificial Sequence
  Description of Artificial Sequence: Synthetic oligonucleotide
  Antisense strand to SEQ ID NO: 2342272
uacaaacugacaauguuaa

SEQ ID NO: 2342274 - RNA, 19 nt, Artificial Sequence
  Description of Artificial Sequence: Synthetic oligonucleotide
  Sense strand starting at position 3979 of SEQ ID NO: 1885437
cauugucaguuuguaugaa

SEQ ID NO: 2342275 - RNA, 19 nt, Artificial Sequence
  Description of Artificial Sequence: Synthetic oligonucleotide
  Antisense strand to SEQ ID NO: 2342274
uucauacaaacugacaaug

SEQ ID NO: 2342276 - RNA, 19 nt, Artificial Sequence
  Description of Artificial Sequence: Synthetic oligonucleotide
  Sense strand starting at position 6 of SEQ ID NO: 1885438
aguaauucugugcaaguga

SEQ ID NO: 2342277 - RNA, 19 nt, Artificial Sequence
  Description of Artificial Sequence: Synthetic oligonucleotide
  Antisense strand to SEQ ID NO: 2342276
ucacuugcacagaauuacu

SEQ ID NO: 2342278 - RNA, 19 nt, Artificial Sequence
  Description of Artificial Sequence: Synthetic oligonucleotide
  Sense strand starting at position 45 of SEQ ID NO: 1885438
uuuauucuugggcaaaguu

SEQ ID NO: 2342279 - RNA, 19 nt, Artificial Sequence
  Description of Artificial Sequence: Synthetic oligonucleotide
  Antisense strand to SEQ ID NO: 2342278
aacuuugcccaagaauaaa

SEQ ID NO: 2342280 - RNA, 19 nt, Artificial Sequence
  Description of Artificial Sequence: Synthetic oligonucleotide
  Sense strand starting at position 102 of SEQ ID NO: 1885438
ggcugaccuucucuacuga

SEQ ID NO: 2342281 - RNA, 19 nt, Artificial Sequence
  Description of Artificial Sequence: Synthetic oligonucleotide
  Antisense strand to SEQ ID NO: 2342280
ucaguagagaaggucagcc

SEQ ID NO: 2342282 - RNA, 19 nt, Artificial Sequence
  Description of Artificial Sequence: Synthetic oligonucleotide
  Sense strand starting at position 239 of SEQ ID NO: 1885438
uguagauguaaguagugua

SEQ ID NO: 2342283 - RNA, 19 nt, Artificial Sequence
  Description of Artificial Sequence: Synthetic oligonucleotide
  Antisense strand to SEQ ID NO: 2342282
uacacuacuuacaucuaca

SEQ ID NO: 2342284 - RNA, 19 nt, Artificial Sequence
  Description of Artificial Sequence: Synthetic oligonucleotide
  Sense strand starting at position 289 of SEQ ID NO: 1885438
uguggauuuaagugcaugu

SEQ ID NO: 2342285 - RNA, 19 nt, Artificial Sequence
  Description of Artificial Sequence: Synthetic oligonucleotide
  Antisense strand to SEQ ID NO: 2342284
acaugcacuuaaauccaca

SEQ ID NO: 2342286 - RNA, 19 nt, Artificial Sequence
  Description of Artificial Sequence: Synthetic oligonucleotide
  Sense strand starting at position 293 of SEQ ID NO: 1885438
gauuuaagugcaugugugu

SEQ ID NO: 2342287 - RNA, 19 nt, Artificial Sequence
  Description of Artificial Sequence: Synthetic oligonucleotide
  Antisense strand to SEQ ID NO: 2342286
acacacaugcacuuaaauc

SEQ ID NO: 2342288 - RNA, 19 nt, Artificial Sequence
  Description of Artificial Sequence: Synthetic oligonucleotide
  Sense strand starting at position 362 of SEQ ID NO: 1885438
ggauguguauauguaugau

SEQ ID NO: 2342289 - RNA, 19 nt, Artificial Sequence
  Description of Artificial Sequence: Synthetic oligonucleotide
  Antisense strand to SEQ ID NO: 2342288
aucauacauauacacaucc

SEQ ID NO: 2342290 - RNA, 19 nt, Artificial Sequence
  Description of Artificial Sequence: Synthetic oligonucleotide
  Sense strand starting at position 368 of SEQ ID NO: 1885438
guauauguaugaucuacau

SEQ ID NO: 2342291 - RNA, 19 nt, Artificial Sequence
  Description of Artificial Sequence: Synthetic oligonucleotide
  Antisense strand to SEQ ID NO: 2342290
auguagaucauacauauac

SEQ ID NO: 2342292 - RNA, 19 nt, Artificial Sequence
  Description of Artificial Sequence: Synthetic oligonucleotide
  Sense strand starting at position 396 of SEQ ID NO: 1885438
ugggauauuuguguguagu

SEQ ID NO: 2342293 - RNA, 19 nt, Artificial Sequence
  Description of Artificial Sequence: Synthetic oligonucleotide
  Antisense strand to SEQ ID NO: 2342292
acuacacacaaauauccca

SEQ ID NO: 2342294 - RNA, 19 nt, Artificial Sequence
  Description of Artificial Sequence: Synthetic oligonucleotide
  Sense strand starting at position 397 of SEQ ID NO: 1885438
gggauauuuguguguagug

SEQ ID NO: 2342295 - RNA, 19 nt, Artificial Sequence
  Description of Artificial Sequence: Synthetic oligonucleotide
  Antisense strand to SEQ ID NO: 2342294
cacuacacacaaauauccc

SEQ ID NO: 2342296 - RNA, 19 nt, Artificial Sequence
  Description of Artificial Sequence: Synthetic oligonucleotide
  Sense strand starting at position 398 of SEQ ID NO: 1885438
ggauauuuguguguagugu

SEQ ID NO: 2342297 - RNA, 19 nt, Artificial Sequence
  Description of Artificial Sequence: Synthetic oligonucleotide
  Antisense strand to SEQ ID NO: 2342296
acacuacacacaaauaucc

SEQ ID NO: 2342298 - RNA, 19 nt, Artificial Sequence
  Description of Artificial Sequence: Synthetic oligonucleotide
  Sense strand starting at position 425 of SEQ ID NO: 1885438
gcauguaguguggugugua

SEQ ID NO: 2342299 - RNA, 19 nt, Artificial Sequence
  Description of Artificial Sequence: Synthetic oligonucleotide
  Antisense strand to SEQ ID NO: 2342298
uacacaccacacuacaugc

SEQ ID NO: 2342300 - RNA, 19 nt, Artificial Sequence
  Description of Artificial Sequence: Synthetic oligonucleotide
  Sense strand starting at position 430 of SEQ ID NO: 1885438
uagugugguguguauuuaa

SEQ ID NO: 2342301 - RNA, 19 nt, Artificial Sequence
  Description of Artificial Sequence: Synthetic oligonucleotide
  Antisense strand to SEQ ID NO: 2342300
uuaaauacacaccacacua

SEQ ID NO: 2342302 - RNA, 19 nt, Artificial Sequence
  Description of Artificial Sequence: Synthetic oligonucleotide
  Sense strand starting at position 433 of SEQ ID NO: 1885438
ugugguguguauuuaaaga

SEQ ID NO: 2342303 - RNA, 19 nt, Artificial Sequence
  Description of Artificial Sequence: Synthetic oligonucleotide
  Antisense strand to SEQ ID NO: 2342302
ucuuuaaauacacaccaca

SEQ ID NO: 2342304 - RNA, 19 nt, Artificial Sequence
  Description of Artificial Sequence: Synthetic oligonucleotide
  Sense strand starting at position 483 of SEQ ID NO: 1885438
acccaugaguugucaagua

SEQ ID NO: 2342305 - RNA, 19 nt, Artificial Sequence
  Description of Artificial Sequence: Synthetic oligonucleotide
  Antisense strand to SEQ ID NO: 2342304
uacuugacaacucaugggu

SEQ ID NO: 2342306 - RNA, 19 nt, Artificial Sequence
  Description of Artificial Sequence: Synthetic oligonucleotide
  Sense strand starting at position 488 of SEQ ID NO: 1885438
ugaguugucaaguaagucu

SEQ ID NO: 2342307 - RNA, 19 nt, Artificial Sequence
  Description of Artificial Sequence: Synthetic oligonucleotide
  Antisense strand to SEQ ID NO: 2342306
agacuuacuugacaacuca

SEQ ID NO: 2342308 - RNA, 19 nt, Artificial Sequence
  Description of Artificial Sequence: Synthetic oligonucleotide
  Sense strand starting at position 496 of SEQ ID NO: 1885438
caaguaagucuggagagcu

SEQ ID NO: 2342309 - RNA, 19 nt, Artificial Sequence
  Description of Artificial Sequence: Synthetic oligonucleotide
  Antisense strand to SEQ ID NO: 2342308
agcucuccagacuuacuug

SEQ ID NO: 2342310 - RNA, 19 nt, Artificial Sequence
  Description of Artificial Sequence: Synthetic oligonucleotide
  Sense strand starting at position 716 of SEQ ID NO: 1885438
aaggcucaguuaguugaaa

SEQ ID NO: 2342311 - RNA, 19 nt, Artificial Sequence
  Description of Artificial Sequence: Synthetic oligonucleotide
  Antisense strand to SEQ ID NO: 2342310
uuucaacuaacugagccuu

SEQ ID NO: 2342312 - RNA, 19 nt, Artificial Sequence
  Description of Artificial Sequence: Synthetic oligonucleotide
  Sense strand starting at position 1582 of SEQ ID NO: 1885438
ugucuauaugcauauguaa

SEQ ID NO: 2342313 - RNA, 19 nt, Artificial Sequence
  Description of Artificial Sequence: Synthetic oligonucleotide
  Antisense strand to SEQ ID NO: 2342312
uuacauaugcauauagaca

SEQ ID NO: 2342314 - RNA, 19 nt, Artificial Sequence
  Description of Artificial Sequence: Synthetic oligonucleotide
  Sense strand starting at position 1620 of SEQ ID NO: 1885438
ugugcauugcaugugugua

SEQ ID NO: 2342315 - RNA, 19 nt, Artificial Sequence
  Description of Artificial Sequence: Synthetic oligonucleotide
  Antisense strand to SEQ ID NO: 2342314
uacacacaugcaaugcaca

SEQ ID NO: 2342316 - RNA, 19 nt, Artificial Sequence
  Description of Artificial Sequence: Synthetic oligonucleotide
  Sense strand starting at position 1637 of SEQ ID NO: 1885438
uacguugugcaugugugau

SEQ ID NO: 2342317 - RNA, 19 nt, Artificial Sequence
  Description of Artificial Sequence: Synthetic oligonucleotide
  Antisense strand to SEQ ID NO: 2342316
aucacacaugcacaacgua

SEQ ID NO: 2342318 - RNA, 19 nt, Artificial Sequence
  Description of Artificial Sequence: Synthetic oligonucleotide
  Sense strand starting at position 1684 of SEQ ID NO: 1885438
ucaugagcauauguguaaa

SEQ ID NO: 2342319 - RNA, 19 nt, Artificial Sequence
  Description of Artificial Sequence: Synthetic oligonucleotide
  Antisense strand to SEQ ID NO: 2342318
uuuacacauaugcucauga

SEQ ID NO: 2342320 - RNA, 19 nt, Artificial Sequence
  Description of Artificial Sequence: Synthetic oligonucleotide
  Sense strand starting at position 1686 of SEQ ID NO: 1885438
augagcauauguguaaaua

SEQ ID NO: 2342321 - RNA, 19 nt, Artificial Sequence
  Description of Artificial Sequence: Synthetic oligonucleotide
  Antisense strand to SEQ ID NO: 2342320
uauuuacacauaugcucau

SEQ ID NO: 2342322 - RNA, 19 nt, Artificial Sequence
  Description of Artificial Sequence: Synthetic oligonucleotide
  Sense strand starting at position 1687 of SEQ ID NO: 1885438
ugagcauauguguaaauau

SEQ ID NO: 2342323 - RNA, 19 nt, Artificial Sequence
  Description of Artificial Sequence: Synthetic oligonucleotide
  Antisense strand to SEQ ID NO: 2342322
auauuuacacauaugcuca

SEQ ID NO: 2342324 - RNA, 19 nt, Artificial Sequence
  Description of Artificial Sequence: Synthetic oligonucleotide
  Sense strand starting at position 1731 of SEQ ID NO: 1885438
ggugcauauguacauggau

SEQ ID NO: 2342325 - RNA, 19 nt, Artificial Sequence
  Description of Artificial Sequence: Synthetic oligonucleotide
  Antisense strand to SEQ ID NO: 2342324
auccauguacauaugcacc

SEQ ID NO: 2342326 - RNA, 19 nt, Artificial Sequence
  Description of Artificial Sequence: Synthetic oligonucleotide
  Sense strand starting at position 1771 of SEQ ID NO: 1885438
agcguaugcguaguccuua

SEQ ID NO: 2342327 - RNA, 19 nt, Artificial Sequence
  Description of Artificial Sequence: Synthetic oligonucleotide
  Antisense strand to SEQ ID NO: 2342326
uaaggacuacgcauacgcu

SEQ ID NO: 2342328 - RNA, 19 nt, Artificial Sequence
  Description of Artificial Sequence: Synthetic oligonucleotide
  Sense strand starting at position 1794 of SEQ ID NO: 1885438
cucuaugaacuaugagauu

SEQ ID NO: 2342329 - RNA, 19 nt, Artificial Sequence
  Description of Artificial Sequence: Synthetic oligonucleotide
  Antisense strand to SEQ ID NO: 2342328
aaucucauaguucauagag

SEQ ID NO: 2342330 - RNA, 19 nt, Artificial Sequence
  Description of Artificial Sequence: Synthetic oligonucleotide
  Sense strand starting at position 2039 of SEQ ID NO: 1885438
ggaguaaucuggaguagag

SEQ ID NO: 2342331 - RNA, 19 nt, Artificial Sequence
  Description of Artificial Sequence: Synthetic oligonucleotide
  Antisense strand to SEQ ID NO: 2342330
cucuacuccagauuacucc

SEQ ID NO: 2342332 - RNA, 19 nt, Artificial Sequence
  Description of Artificial Sequence: Synthetic oligonucleotide
  Sense strand starting at position 2170 of SEQ ID NO: 1885438
agacuugaaucagcaucua

SEQ ID NO: 2342333 - RNA, 19 nt, Artificial Sequence
  Description of Artificial Sequence: Synthetic oligonucleotide
  Antisense strand to SEQ ID NO: 2342332
uagaugcugauucaagucu

SEQ ID NO: 2342334 - RNA, 19 nt, Artificial Sequence
  Description of Artificial Sequence: Synthetic oligonucleotide
  Sense strand starting at position 2211 of SEQ ID NO: 1885438
uuugauguuguauagacaa

SEQ ID NO: 2342335 - RNA, 19 nt, Artificial Sequence
  Description of Artificial Sequence: Synthetic oligonucleotide
  Antisense strand to SEQ ID NO: 2342334
uugucuauacaacaucaaa

SEQ ID NO: 2342336 - RNA, 19 nt, Artificial Sequence
  Description of Artificial Sequence: Synthetic oligonucleotide
  Sense strand starting at position 2323 of SEQ ID NO: 1885438
uggcauccucuguagauca

SEQ ID NO: 2342337 - RNA, 19 nt, Artificial Sequence
  Description of Artificial Sequence: Synthetic oligonucleotide
  Antisense strand to SEQ ID NO: 2342336
ugaucuacagaggaugcca

SEQ ID NO: 2342338 - RNA, 19 nt, Artificial Sequence
  Description of Artificial Sequence: Synthetic oligonucleotide
  Sense strand starting at position 2325 of SEQ ID NO: 1885438
gcauccucuguagaucaga

SEQ ID NO: 2342339 - RNA, 19 nt, Artificial Sequence
  Description of Artificial Sequence: Synthetic oligonucleotide
  Antisense strand to SEQ ID NO: 2342338
ucugaucuacagaggaugc

SEQ ID NO: 2342340 - RNA, 19 nt, Artificial Sequence
  Description of Artificial Sequence: Synthetic oligonucleotide
  Sense strand starting at position 2434 of SEQ ID NO: 1885438
acuaaagaguaacaagaaa

SEQ ID NO: 2342341 - RNA, 19 nt, Artificial Sequence
  Description of Artificial Sequence: Synthetic oligonucleotide
  Antisense strand to SEQ ID NO: 2342340
uuucuuguuacucuuuagu

SEQ ID NO: 2342342 - RNA, 19 nt, Artificial Sequence
  Description of Artificial Sequence: Synthetic oligonucleotide
  Sense strand starting at position 2801 of SEQ ID NO: 1885438
gaguguugcgcuuuauauu

SEQ ID NO: 2342343 - RNA, 19 nt, Artificial Sequence
  Description of Artificial Sequence: Synthetic oligonucleotide
  Antisense strand to SEQ ID NO: 2342342
aauauaaagcgcaacacuc

SEQ ID NO: 2342344 - RNA, 19 nt, Artificial Sequence
  Description of Artificial Sequence: Synthetic oligonucleotide
  Sense strand starting at position 3104 of SEQ ID NO: 1885438
cuacauguuggagguugau

SEQ ID NO: 2342345 - RNA, 19 nt, Artificial Sequence
  Description of Artificial Sequence: Synthetic oligonucleotide
  Antisense strand to SEQ ID NO: 2342344
aucaaccuccaacauguag

SEQ ID NO: 2342346 - RNA, 19 nt, Artificial Sequence
  Description of Artificial Sequence: Synthetic oligonucleotide
  Sense strand starting at position 3107 of SEQ ID NO: 1885438
cauguuggagguugauaaa

SEQ ID NO: 2342347 - RNA, 19 nt, Artificial Sequence
  Description of Artificial Sequence: Synthetic oligonucleotide
  Antisense strand to SEQ ID NO: 2342346
uuuaucaaccuccaacaug

SEQ ID NO: 2342348 - RNA, 19 nt, Artificial Sequence
  Description of Artificial Sequence: Synthetic oligonucleotide
  Sense strand starting at position 3387 of SEQ ID NO: 1885438
ugaucucaaugaguguuua

SEQ ID NO: 2342349 - RNA, 19 nt, Artificial Sequence
  Description of Artificial Sequence: Synthetic oligonucleotide
  Antisense strand to SEQ ID NO: 2342348
uaaacacucauugagauca

SEQ ID NO: 2342350 - RNA, 19 nt, Artificial Sequence
  Description of Artificial Sequence: Synthetic oligonucleotide
  Sense strand starting at position 3391 of SEQ ID NO: 1885438
cucaaugaguguuuacacu

SEQ ID NO: 2342351 - RNA, 19 nt, Artificial Sequence
  Description of Artificial Sequence: Synthetic oligonucleotide
  Antisense strand to SEQ ID NO: 2342350
aguguaaacacucauugag

SEQ ID NO: 2342352 - RNA, 19 nt, Artificial Sequence
  Description of Artificial Sequence: Synthetic oligonucleotide
  Sense strand starting at position 3563 of SEQ ID NO: 1885438
gggugaggacuaugucuua

SEQ ID NO: 2342353 - RNA, 19 nt, Artificial Sequence
  Description of Artificial Sequence: Synthetic oligonucleotide
  Antisense strand to SEQ ID NO: 2342352
uaagacauaguccucaccc

SEQ ID NO: 2342354 - RNA, 19 nt, Artificial Sequence
  Description of Artificial Sequence: Synthetic oligonucleotide
  Sense strand starting at position 3698 of SEQ ID NO: 1885438
uugaacaagucccuugaau

SEQ ID NO: 2342355 - RNA, 19 nt, Artificial Sequence
  Description of Artificial Sequence: Synthetic oligonucleotide
  Antisense strand to SEQ ID NO: 2342354
auucaagggacuuguucaa

SEQ ID NO: 2342356 - RNA, 19 nt, Artificial Sequence
  Description of Artificial Sequence: Synthetic oligonucleotide
  Sense strand starting at position 27 of SEQ ID NO: 1885439
auuucuuugucuugaauga

SEQ ID NO: 2342357 - RNA, 19 nt, Artificial Sequence
  Description of Artificial Sequence: Synthetic oligonucleotide
  Antisense strand to SEQ ID NO: 2342356
ucauucaagacaaagaaau

SEQ ID NO: 2342358 - RNA, 19 nt, Artificial Sequence
  Description of Artificial Sequence: Synthetic oligonucleotide
  Sense strand starting at position 28 of SEQ ID NO: 1885439
uuucuuugucuugaaugaa

SEQ ID NO: 2342359 - RNA, 19 nt, Artificial Sequence
  Description of Artificial Sequence: Synthetic oligonucleotide
  Antisense strand to SEQ ID NO: 2342358
uucauucaagacaaagaaa

SEQ ID NO: 2342360 - RNA, 19 nt, Artificial Sequence
  Description of Artificial Sequence: Synthetic oligonucleotide
  Sense strand starting at position 31 of SEQ ID NO: 1885439
cuuugucuugaaugaacca

SEQ ID NO: 2342361 - RNA, 19 nt, Artificial Sequence
  Description of Artificial Sequence: Synthetic oligonucleotide
  Antisense strand to SEQ ID NO: 2342360
ugguucauucaagacaaag

SEQ ID NO: 2342362 - RNA, 19 nt, Artificial Sequence
  Description of Artificial Sequence: Synthetic oligonucleotide
  Sense strand starting at position 54 of SEQ ID NO: 1885439
auguaaagauuccuggagu

SEQ ID NO: 2342363 - RNA, 19 nt, Artificial Sequence
  Description of Artificial Sequence: Synthetic oligonucleotide
  Antisense strand to SEQ ID NO: 2342362
acuccaggaaucuuuacau

SEQ ID NO: 2342364 - RNA, 19 nt, Artificial Sequence
  Description of Artificial Sequence: Synthetic oligonucleotide
  Sense strand starting at position 55 of SEQ ID NO: 1885439
uguaaagauuccuggagua

SEQ ID NO: 2342365 - RNA, 19 nt, Artificial Sequence
  Description of Artificial Sequence: Synthetic oligonucleotide
  Antisense strand to SEQ ID NO: 2342364
uacuccaggaaucuuuaca

SEQ ID NO: 2342366 - RNA, 19 nt, Artificial Sequence
  Description of Artificial Sequence: Synthetic oligonucleotide
  Sense strand starting at position 57 of SEQ ID NO: 1885439
uaaagauuccuggaguagc

SEQ ID NO: 2342367 - RNA, 19 nt, Artificial Sequence
  Description of Artificial Sequence: Synthetic oligonucleotide
  Antisense strand to SEQ ID NO: 2342366
gcuacuccaggaaucuuua

SEQ ID NO: 2342368 - RNA, 19 nt, Artificial Sequence
  Description of Artificial Sequence: Synthetic oligonucleotide
  Sense strand starting at position 68 of SEQ ID NO: 1885439
ggaguagcacuuugcauca

SEQ ID NO: 2342369 - RNA, 19 nt, Artificial Sequence
  Description of Artificial Sequence: Synthetic oligonucleotide
  Antisense strand to SEQ ID NO: 2342368
ugaugcaaagugcuacucc

SEQ ID NO: 2342370 - RNA, 19 nt, Artificial Sequence
  Description of Artificial Sequence: Synthetic oligonucleotide
  Sense strand starting at position 73 of SEQ ID NO: 1885439
agcacuuugcaucaacaga

SEQ ID NO: 2342371 - RNA, 19 nt, Artificial Sequence
  Description of Artificial Sequence: Synthetic oligonucleotide
  Antisense strand to SEQ ID NO: 2342370
ucuguugaugcaaagugcu

SEQ ID NO: 2342372 - RNA, 19 nt, Artificial Sequence
  Description of Artificial Sequence: Synthetic oligonucleotide
  Sense strand starting at position 853 of SEQ ID NO: 1885439
cuggguaugcuugaacaca

SEQ ID NO: 2342373 - RNA, 19 nt, Artificial Sequence
  Description of Artificial Sequence: Synthetic oligonucleotide
  Antisense strand to SEQ ID NO: 2342372
uguguucaagcauacccag

SEQ ID NO: 2342374 - RNA, 19 nt, Artificial Sequence
  Description of Artificial Sequence: Synthetic oligonucleotide
  Sense strand starting at position 1413 of SEQ ID NO: 1885439
gggcaaguuuacuuccauc

SEQ ID NO: 2342375 - RNA, 19 nt, Artificial Sequence
  Description of Artificial Sequence: Synthetic oligonucleotide
  Antisense strand to SEQ ID NO: 2342374
gauggaaguaaacuugccc

SEQ ID NO: 2342376 - RNA, 19 nt, Artificial Sequence
  Description of Artificial Sequence: Synthetic oligonucleotide
  Sense strand starting at position 2136 of SEQ ID NO: 1885439
auuccuguuccagggucau

SEQ ID NO: 2342377 - RNA, 19 nt, Artificial Sequence
  Description of Artificial Sequence: Synthetic oligonucleotide
  Antisense strand to SEQ ID NO: 2342376
augacccuggaacaggaau

SEQ ID NO: 2342378 - RNA, 19 nt, Artificial Sequence
  Description of Artificial Sequence: Synthetic oligonucleotide
  Sense strand starting at position 2339 of SEQ ID NO: 1885439
gaggaacuugccuggaaag

SEQ ID NO: 2342379 - RNA, 19 nt, Artificial Sequence
  Description of Artificial Sequence: Synthetic oligonucleotide
  Antisense strand to SEQ ID NO: 2342378
cuuuccaggcaaguuccuc

SEQ ID NO: 2342380 - RNA, 19 nt, Artificial Sequence
  Description of Artificial Sequence: Synthetic oligonucleotide
  Sense strand starting at position 2340 of SEQ ID NO: 1885439
aggaacuugccuggaaagu

SEQ ID NO: 2342381 - RNA, 19 nt, Artificial Sequence
  Description of Artificial Sequence: Synthetic oligonucleotide
  Antisense strand to SEQ ID NO: 2342380
acuuuccaggcaaguuccu

SEQ ID NO: 2342382 - RNA, 19 nt, Artificial Sequence
  Description of Artificial Sequence: Synthetic oligonucleotide
  Sense strand starting at position 2341 of SEQ ID NO: 1885439
ggaacuugccuggaaaguu

SEQ ID NO: 2342383 - RNA, 19 nt, Artificial Sequence
  Description of Artificial Sequence: Synthetic oligonucleotide
  Antisense strand to SEQ ID NO: 2342382
aacuuuccaggcaaguucc

SEQ ID NO: 2342384 - RNA, 19 nt, Artificial Sequence
  Description of Artificial Sequence: Synthetic oligonucleotide
  Sense strand starting at position 2410 of SEQ ID NO: 1885439
aguugcagugauuagcauu

SEQ ID NO: 2342385 - RNA, 19 nt, Artificial Sequence
  Description of Artificial Sequence: Synthetic oligonucleotide
  Antisense strand to SEQ ID NO: 2342384
aaugcuaaucacugcaacu

SEQ ID NO: 2342386 - RNA, 19 nt, Artificial Sequence
  Description of Artificial Sequence: Synthetic oligonucleotide
  Sense strand starting at position 2490 of SEQ ID NO: 1885439
cuacuuggguagugagaaa

SEQ ID NO: 2342387 - RNA, 19 nt, Artificial Sequence
  Description of Artificial Sequence: Synthetic oligonucleotide
  Antisense strand to SEQ ID NO: 2342386
uuucucacuacccaaguag

SEQ ID NO: 2342388 - RNA, 19 nt, Artificial Sequence
  Description of Artificial Sequence: Synthetic oligonucleotide
  Sense strand starting at position 2508 of SEQ ID NO: 1885439
aguugaaaggcaugaaucu

SEQ ID NO: 2342389 - RNA, 19 nt, Artificial Sequence
  Description of Artificial Sequence: Synthetic oligonucleotide
  Antisense strand to SEQ ID NO: 2342388
agauucaugccuuucaacu

SEQ ID NO: 2342390 - RNA, 19 nt, Artificial Sequence
  Description of Artificial Sequence: Synthetic oligonucleotide
  Sense strand starting at position 2509 of SEQ ID NO: 1885439
guugaaaggcaugaaucuu

SEQ ID NO: 2342391 - RNA, 19 nt, Artificial Sequence
  Description of Artificial Sequence: Synthetic oligonucleotide
  Antisense strand to SEQ ID NO: 2342390
aagauucaugccuuucaac

SEQ ID NO: 2342392 - RNA, 19 nt, Artificial Sequence
  Description of Artificial Sequence: Synthetic oligonucleotide
  Sense strand starting at position 2532 of SEQ ID NO: 1885439
uuggcuuugccguugcgaa

SEQ ID NO: 2342393 - RNA, 19 nt, Artificial Sequence
  Description of Artificial Sequence: Synthetic oligonucleotide
  Antisense strand to SEQ ID NO: 2342392
uucgcaacggcaaagccaa

SEQ ID NO: 2342394 - RNA, 19 nt, Artificial Sequence
  Description of Artificial Sequence: Synthetic oligonucleotide
  Sense strand starting at position 2568 of SEQ ID NO: 1885439
ucaguuaauuaacgugaaa

SEQ ID NO: 2342395 - RNA, 19 nt, Artificial Sequence
  Description of Artificial Sequence: Synthetic oligonucleotide
  Antisense strand to SEQ ID NO: 2342394
uuucacguuaauuaacuga

SEQ ID NO: 2342396 - RNA, 19 nt, Artificial Sequence
  Description of Artificial Sequence: Synthetic oligonucleotide
  Sense strand starting at position 2570 of SEQ ID NO: 1885439
aguuaauuaacgugaaacg

SEQ ID NO: 2342397 - RNA, 19 nt, Artificial Sequence
  Description of Artificial Sequence: Synthetic oligonucleotide
  Antisense strand to SEQ ID NO: 2342396
cguuucacguuaauuaacu

SEQ ID NO: 2342398 - RNA, 19 nt, Artificial Sequence
  Description of Artificial Sequence: Synthetic oligonucleotide
  Sense strand starting at position 2571 of SEQ ID NO: 1885439
guuaauuaacgugaaacga

SEQ ID NO: 2342399 - RNA, 19 nt, Artificial Sequence
  Description of Artificial Sequence: Synthetic oligonucleotide
  Antisense strand to SEQ ID NO: 2342398
ucguuucacguuaauuaac

SEQ ID NO: 2342400 - RNA, 19 nt, Artificial Sequence
  Description of Artificial Sequence: Synthetic oligonucleotide
  Sense strand starting at position 2580 of SEQ ID NO: 1885439
cgugaaacgagaugauaau

SEQ ID NO: 2342401 - RNA, 19 nt, Artificial Sequence
  Description of Artificial Sequence: Synthetic oligonucleotide
  Antisense strand to SEQ ID NO: 2342400
auuaucaucucguuucacg

SEQ ID NO: 2342402 - RNA, 19 nt, Artificial Sequence
  Description of Artificial Sequence: Synthetic oligonucleotide
  Sense strand starting at position 2589 of SEQ ID NO: 1885439
agaugauaauuucgaagau

SEQ ID NO: 2342403 - RNA, 19 nt, Artificial Sequence
  Description of Artificial Sequence: Synthetic oligonucleotide
  Antisense strand to SEQ ID NO: 2342402
aucuucgaaauuaucaucu

SEQ ID NO: 2342404 - RNA, 19 nt, Artificial Sequence
  Description of Artificial Sequence: Synthetic oligonucleotide
  Sense strand starting at position 2590 of SEQ ID NO: 1885439
gaugauaauuucgaagauu

SEQ ID NO: 2342405 - RNA, 19 nt, Artificial Sequence
  Description of Artificial Sequence: Synthetic oligonucleotide
  Antisense strand to SEQ ID NO: 2342404
aaucuucgaaauuaucauc

SEQ ID NO: 2342406 - RNA, 19 nt, Artificial Sequence
  Description of Artificial Sequence: Synthetic oligonucleotide
  Sense strand starting at position 2626 of SEQ ID NO: 1885439
uuuguaagucugugaugag

SEQ ID NO: 2342407 - RNA, 19 nt, Artificial Sequence
  Description of Artificial Sequence: Synthetic oligonucleotide
  Antisense strand to SEQ ID NO: 2342406
cucaucacagacuuacaaa

SEQ ID NO: 2342408 - RNA, 19 nt, Artificial Sequence
  Description of Artificial Sequence: Synthetic oligonucleotide
  Sense strand starting at position 2630 of SEQ ID NO: 1885439
uaagucugugaugagcuua

SEQ ID NO: 2342409 - RNA, 19 nt, Artificial Sequence
  Description of Artificial Sequence: Synthetic oligonucleotide
  Antisense strand to SEQ ID NO: 2342408
uaagcucaucacagacuua

SEQ ID NO: 2342410 - RNA, 19 nt, Artificial Sequence
  Description of Artificial Sequence: Synthetic oligonucleotide
  Sense strand starting at position 2703 of SEQ ID NO: 1885439
gcauuauugaaagggcagu

SEQ ID NO: 2342411 - RNA, 19 nt, Artificial Sequence
  Description of Artificial Sequence: Synthetic oligonucleotide
  Antisense strand to SEQ ID NO: 2342410
acugcccuuucaauaaugc

SEQ ID NO: 2342412 - RNA, 19 nt, Artificial Sequence
  Description of Artificial Sequence: Synthetic oligonucleotide
  Sense strand starting at position 2737 of SEQ ID NO: 1885439
caauaaauguaugagagca

SEQ ID NO: 2342413 - RNA, 19 nt, Artificial Sequence
  Description of Artificial Sequence: Synthetic oligonucleotide
  Antisense strand to SEQ ID NO: 2342412
ugcucucauacauuuauug

SEQ ID NO: 2342414 - RNA, 19 nt, Artificial Sequence
  Description of Artificial Sequence: Synthetic oligonucleotide
  Sense strand starting at position 2739 of SEQ ID NO: 1885439
auaaauguaugagagcaca

SEQ ID NO: 2342415 - RNA, 19 nt, Artificial Sequence
  Description of Artificial Sequence: Synthetic oligonucleotide
  Antisense strand to SEQ ID NO: 2342414
ugugcucucauacauuuau

SEQ ID NO: 2342416 - RNA, 19 nt, Artificial Sequence
  Description of Artificial Sequence: Synthetic oligonucleotide
  Sense strand starting at position 2756 of SEQ ID NO: 1885439
cauuaaaggcugugcaauu

SEQ ID NO: 2342417 - RNA, 19 nt, Artificial Sequence
  Description of Artificial Sequence: Synthetic oligonucleotide
  Antisense strand to SEQ ID NO: 2342416
aauugcacagccuuuaaug

SEQ ID NO: 2342418 - RNA, 19 nt, Artificial Sequence
  Description of Artificial Sequence: Synthetic oligonucleotide
  Sense strand starting at position 2757 of SEQ ID NO: 1885439
auuaaaggcugugcaauua

SEQ ID NO: 2342419 - RNA, 19 nt, Artificial Sequence
  Description of Artificial Sequence: Synthetic oligonucleotide
  Antisense strand to SEQ ID NO: 2342418
uaauugcacagccuuuaau

SEQ ID NO: 2342420 - RNA, 19 nt, Artificial Sequence
  Description of Artificial Sequence: Synthetic oligonucleotide
  Sense strand starting at position 2994 of SEQ ID NO: 1885439
cguggugacggaugucuaa

SEQ ID NO: 2342421 - RNA, 19 nt, Artificial Sequence
  Description of Artificial Sequence: Synthetic oligonucleotide
  Antisense strand to SEQ ID NO: 2342420
uuagacauccgucaccacg

SEQ ID NO: 2342422 - RNA, 19 nt, Artificial Sequence
  Description of Artificial Sequence: Synthetic oligonucleotide
  Sense strand starting at position 3174 of SEQ ID NO: 1885439
acgaacagcuaguauuaua

SEQ ID NO: 2342423 - RNA, 19 nt, Artificial Sequence
  Description of Artificial Sequence: Synthetic oligonucleotide
  Antisense strand to SEQ ID NO: 2342422
uauaauacuagcuguucgu

SEQ ID NO: 2342424 - RNA, 19 nt, Artificial Sequence
  Description of Artificial Sequence: Synthetic oligonucleotide
  Sense strand starting at position 3280 of SEQ ID NO: 1885439
ggauguguaacuuagcaua

SEQ ID NO: 2342425 - RNA, 19 nt, Artificial Sequence
  Description of Artificial Sequence: Synthetic oligonucleotide
  Antisense strand to SEQ ID NO: 2342424
uaugcuaaguuacacaucc

SEQ ID NO: 2342426 - RNA, 19 nt, Artificial Sequence
  Description of Artificial Sequence: Synthetic oligonucleotide
  Sense strand starting at position 3282 of SEQ ID NO: 1885439
auguguaacuuagcauaua

SEQ ID NO: 2342427 - RNA, 19 nt, Artificial Sequence
  Description of Artificial Sequence: Synthetic oligonucleotide
  Antisense strand to SEQ ID NO: 2342426
uauaugcuaaguuacacau

SEQ ID NO: 2342428 - RNA, 19 nt, Artificial Sequence
  Description of Artificial Sequence: Synthetic oligonucleotide
  Sense strand starting at position 3301 of SEQ ID NO: 1885439
uccuaaguguagggagaau

SEQ ID NO: 2342429 - RNA, 19 nt, Artificial Sequence
  Description of Artificial Sequence: Synthetic oligonucleotide
  Antisense strand to SEQ ID NO: 2342428
auucucccuacacuuagga

SEQ ID NO: 2342430 - RNA, 19 nt, Artificial Sequence
  Description of Artificial Sequence: Synthetic oligonucleotide
  Sense strand starting at position 3313 of SEQ ID NO: 1885439
ggagaauccuuugaaauuc

SEQ ID NO: 2342431 - RNA, 19 nt, Artificial Sequence
  Description of Artificial Sequence: Synthetic oligonucleotide
  Antisense strand to SEQ ID NO: 2342430
gaauuucaaaggauucucc

SEQ ID NO: 2342432 - RNA, 19 nt, Artificial Sequence
  Description of Artificial Sequence: Synthetic oligonucleotide
  Sense strand starting at position 3457 of SEQ ID NO: 1885439
cuugaaguccugggcuuau

SEQ ID NO: 2342433 - RNA, 19 nt, Artificial Sequence
  Description of Artificial Sequence: Synthetic oligonucleotide
  Antisense strand to SEQ ID NO: 2342432
auaagcccaggacuucaag

SEQ ID NO: 2342434 - RNA, 19 nt, Artificial Sequence
  Description of Artificial Sequence: Synthetic oligonucleotide
  Sense strand starting at position 3860 of SEQ ID NO: 1885439
cccgaauagcuagaauuac

SEQ ID NO: 2342435 - RNA, 19 nt, Artificial Sequence
  Description of Artificial Sequence: Synthetic oligonucleotide
  Antisense strand to SEQ ID NO: 2342434
guaauucuagcuauucggg

SEQ ID NO: 2342436 - RNA, 19 nt, Artificial Sequence
  Description of Artificial Sequence: Synthetic oligonucleotide
  Sense strand starting at position 342 of SEQ ID NO: 1885441
gucauauaacauuggucaa

SEQ ID NO: 2342437 - RNA, 19 nt, Artificial Sequence
  Description of Artificial Sequence: Synthetic oligonucleotide
  Antisense strand to SEQ ID NO: 2342436
uugaccaauguuauaugac

SEQ ID NO: 2342438 - RNA, 19 nt, Artificial Sequence
  Description of Artificial Sequence: Synthetic oligonucleotide
  Sense strand starting at position 454 of SEQ ID NO: 1885441
gcccaagaaccugaguauu

SEQ ID NO: 2342439 - RNA, 19 nt, Artificial Sequence
  Description of Artificial Sequence: Synthetic oligonucleotide
  Antisense strand to SEQ ID NO: 2342438
aauacucagguucuugggc

SEQ ID NO: 2342440 - RNA, 19 nt, Artificial Sequence
  Description of Artificial Sequence: Synthetic oligonucleotide
  Sense strand starting at position 488 of SEQ ID NO: 1885441
ucaggacugcucuggacau

SEQ ID NO: 2342441 - RNA, 19 nt, Artificial Sequence
  Description of Artificial Sequence: Synthetic oligonucleotide
  Antisense strand to SEQ ID NO: 2342440
auguccagagcaguccuga

SEQ ID NO: 2342442 - RNA, 19 nt, Artificial Sequence
  Description of Artificial Sequence: Synthetic oligonucleotide
  Sense strand starting at position 519 of SEQ ID NO: 1885441
ugugcaagugugcugugua

SEQ ID NO: 2342443 - RNA, 19 nt, Artificial Sequence
  Description of Artificial Sequence: Synthetic oligonucleotide
  Antisense strand to SEQ ID NO: 2342442
uacacagcacacuugcaca

SEQ ID NO: 2342444 - RNA, 19 nt, Artificial Sequence
  Description of Artificial Sequence: Synthetic oligonucleotide
  Sense strand starting at position 791 of SEQ ID NO: 1885441
aggguuuguagucacugua

SEQ ID NO: 2342445 - RNA, 19 nt, Artificial Sequence
  Description of Artificial Sequence: Synthetic oligonucleotide
  Antisense strand to SEQ ID NO: 2342444
uacagugacuacaaacccu

SEQ ID NO: 2342446 - RNA, 19 nt, Artificial Sequence
  Description of Artificial Sequence: Synthetic oligonucleotide
  Sense strand starting at position 924 of SEQ ID NO: 1885441
auaagaugauggcuacauu

SEQ ID NO: 2342447 - RNA, 19 nt, Artificial Sequence
  Description of Artificial Sequence: Synthetic oligonucleotide
  Antisense strand to SEQ ID NO: 2342446
aauguagccaucaucuuau

SEQ ID NO: 2342448 - RNA, 19 nt, Artificial Sequence
  Description of Artificial Sequence: Synthetic oligonucleotide
  Sense strand starting at position 983 of SEQ ID NO: 1885441
gccacugagggacgugaua

SEQ ID NO: 2342449 - RNA, 19 nt, Artificial Sequence
  Description of Artificial Sequence: Synthetic oligonucleotide
  Antisense strand to SEQ ID NO: 2342448
uaucacgucccucaguggc

SEQ ID NO: 2342450 - RNA, 19 nt, Artificial Sequence
  Description of Artificial Sequence: Synthetic oligonucleotide
  Sense strand starting at position 985 of SEQ ID NO: 1885441
cacugagggacgugauagu

SEQ ID NO: 2342451 - RNA, 19 nt, Artificial Sequence
  Description of Artificial Sequence: Synthetic oligonucleotide
  Antisense strand to SEQ ID NO: 2342450
acuaucacgucccucagug

SEQ ID NO: 2342452 - RNA, 19 nt, Artificial Sequence
  Description of Artificial Sequence: Synthetic oligonucleotide
  Sense strand starting at position 1023 of SEQ ID NO: 1885441
cggaauugcaaacauggua

SEQ ID NO: 2342453 - RNA, 19 nt, Artificial Sequence
  Description of Artificial Sequence: Synthetic oligonucleotide
  Antisense strand to SEQ ID NO: 2342452
uaccauguuugcaauuccg

SEQ ID NO: 2342454 - RNA, 19 nt, Artificial Sequence
  Description of Artificial Sequence: Synthetic oligonucleotide
  Sense strand starting at position 1050 of SEQ ID NO: 1885441
uuugguuucuuaucaucca

SEQ ID NO: 2342455 - RNA, 19 nt, Artificial Sequence
  Description of Artificial Sequence: Synthetic oligonucleotide
  Antisense strand to SEQ ID NO: 2342454
uggaugauaagaaaccaaa

SEQ ID NO: 2342456 - RNA, 19 nt, Artificial Sequence
  Description of Artificial Sequence: Synthetic oligonucleotide
  Sense strand starting at position 1068 of SEQ ID NO: 1885441
auuuguauaucugcaugua

SEQ ID NO: 2342457 - RNA, 19 nt, Artificial Sequence
  Description of Artificial Sequence: Synthetic oligonucleotide
  Antisense strand to SEQ ID NO: 2342456
uacaugcagauauacaaau

SEQ ID NO: 2342458 - RNA, 19 nt, Artificial Sequence
  Description of Artificial Sequence: Synthetic oligonucleotide
  Sense strand starting at position 1069 of SEQ ID NO: 1885441
uuuguauaucugcauguag

SEQ ID NO: 2342459 - RNA, 19 nt, Artificial Sequence
  Description of Artificial Sequence: Synthetic oligonucleotide
  Antisense strand to SEQ ID NO: 2342458
cuacaugcagauauacaaa

SEQ ID NO: 2342460 - RNA, 19 nt, Artificial Sequence
  Description of Artificial Sequence: Synthetic oligonucleotide
  Sense strand starting at position 1083 of SEQ ID NO: 1885441
uguagucugucucugauuu

SEQ ID NO: 2342461 - RNA, 19 nt, Artificial Sequence
  Description of Artificial Sequence: Synthetic oligonucleotide
  Antisense strand to SEQ ID NO: 2342460
aaaucagagacagacuaca

SEQ ID NO: 2342462 - RNA, 19 nt, Artificial Sequence
  Description of Artificial Sequence: Synthetic oligonucleotide
  Sense strand starting at position 1084 of SEQ ID NO: 1885441
guagucugucucugauuua

SEQ ID NO: 2342463 - RNA, 19 nt, Artificial Sequence
  Description of Artificial Sequence: Synthetic oligonucleotide
  Antisense strand to SEQ ID NO: 2342462
uaaaucagagacagacuac

SEQ ID NO: 2342464 - RNA, 19 nt, Artificial Sequence
  Description of Artificial Sequence: Synthetic oligonucleotide
  Sense strand starting at position 1103 of SEQ ID NO: 1885441
ggguuuagguuccucugua

SEQ ID NO: 2342465 - RNA, 19 nt, Artificial Sequence
  Description of Artificial Sequence: Synthetic oligonucleotide
  Antisense strand to SEQ ID NO: 2342464
uacagaggaaccuaaaccc

SEQ ID NO: 2342466 - RNA, 19 nt, Artificial Sequence
  Description of Artificial Sequence: Synthetic oligonucleotide
  Sense strand starting at position 1250 of SEQ ID NO: 1885441
ggcuuuaucagcuagauug

SEQ ID NO: 2342467 - RNA, 19 nt, Artificial Sequence
  Description of Artificial Sequence: Synthetic oligonucleotide
  Antisense strand to SEQ ID NO: 2342466
caaucuagcugauaaagcc

SEQ ID NO: 2342468 - RNA, 19 nt, Artificial Sequence
  Description of Artificial Sequence: Synthetic oligonucleotide
  Sense strand starting at position 1330 of SEQ ID NO: 1885441
ugggaauuauaauaggaug

SEQ ID NO: 2342469 - RNA, 19 nt, Artificial Sequence
  Description of Artificial Sequence: Synthetic oligonucleotide
  Antisense strand to SEQ ID NO: 2342468
cauccuauuauaauuccca

SEQ ID NO: 2342470 - RNA, 19 nt, Artificial Sequence
  Description of Artificial Sequence: Synthetic oligonucleotide
  Sense strand starting at position 1342 of SEQ ID NO: 1885441
uaggauguaccuuaguguu

SEQ ID NO: 2342471 - RNA, 19 nt, Artificial Sequence
  Description of Artificial Sequence: Synthetic oligonucleotide
  Antisense strand to SEQ ID NO: 2342470
aacacuaagguacauccua

SEQ ID NO: 2342472 - RNA, 19 nt, Artificial Sequence
  Description of Artificial Sequence: Synthetic oligonucleotide
  Sense strand starting at position 1364 of SEQ ID NO: 1885441
uguaaagauuaagugacuu

SEQ ID NO: 2342473 - RNA, 19 nt, Artificial Sequence
  Description of Artificial Sequence: Synthetic oligonucleotide
  Antisense strand to SEQ ID NO: 2342472
aagucacuuaaucuuuaca

SEQ ID NO: 2342474 - RNA, 19 nt, Artificial Sequence
  Description of Artificial Sequence: Synthetic oligonucleotide
  Sense strand starting at position 1406 of SEQ ID NO: 1885441
gucucuggcaaauagauga

SEQ ID NO: 2342475 - RNA, 19 nt, Artificial Sequence
  Description of Artificial Sequence: Synthetic oligonucleotide
  Antisense strand to SEQ ID NO: 2342474
ucaucuauuugccagagac

SEQ ID NO: 2342476 - RNA, 19 nt, Artificial Sequence
  Description of Artificial Sequence: Synthetic oligonucleotide
  Sense strand starting at position 1527 of SEQ ID NO: 1885441
ccuggaucucccgaagucu

SEQ ID NO: 2342477 - RNA, 19 nt, Artificial Sequence
  Description of Artificial Sequence: Synthetic oligonucleotide
  Antisense strand to SEQ ID NO: 2342476
agacuucgggagauccagg

SEQ ID NO: 2342478 - RNA, 19 nt, Artificial Sequence
  Description of Artificial Sequence: Synthetic oligonucleotide
  Sense strand starting at position 1560 of SEQ ID NO: 1885441
aucccuaguuuagcagaaa

SEQ ID NO: 2342479 - RNA, 19 nt, Artificial Sequence
  Description of Artificial Sequence: Synthetic oligonucleotide
  Antisense strand to SEQ ID NO: 2342478
uuucugcuaaacuagggau

SEQ ID NO: 2342480 - RNA, 19 nt, Artificial Sequence
  Description of Artificial Sequence: Synthetic oligonucleotide
  Sense strand starting at position 2317 of SEQ ID NO: 1885441
cggccuugugggagagcua

SEQ ID NO: 2342481 - RNA, 19 nt, Artificial Sequence
  Description of Artificial Sequence: Synthetic oligonucleotide
  Antisense strand to SEQ ID NO: 2342480
uagcucucccacaaggccg

SEQ ID NO: 2342482 - RNA, 19 nt, Artificial Sequence
  Description of Artificial Sequence: Synthetic oligonucleotide
  Sense strand starting at position 2470 of SEQ ID NO: 1885441
gcgaaaucucguuaacgag

SEQ ID NO: 2342483 - RNA, 19 nt, Artificial Sequence
  Description of Artificial Sequence: Synthetic oligonucleotide
  Antisense strand to SEQ ID NO: 2342482
cucguuaacgagauuucgc

SEQ ID NO: 2342484 - RNA, 19 nt, Artificial Sequence
  Description of Artificial Sequence: Synthetic oligonucleotide
  Sense strand starting at position 2772 of SEQ ID NO: 1885441
uucucaugucuugauggga

SEQ ID NO: 2342485 - RNA, 19 nt, Artificial Sequence
  Description of Artificial Sequence: Synthetic oligonucleotide
  Antisense strand to SEQ ID NO: 2342484
ucccaucaagacaugagaa

SEQ ID NO: 2342486 - RNA, 19 nt, Artificial Sequence
  Description of Artificial Sequence: Synthetic oligonucleotide
  Sense strand starting at position 2826 of SEQ ID NO: 1885441
cugcuuuaucgucauaauc

SEQ ID NO: 2342487 - RNA, 19 nt, Artificial Sequence
  Description of Artificial Sequence: Synthetic oligonucleotide
  Antisense strand to SEQ ID NO: 2342486
gauuaugacgauaaagcag

SEQ ID NO: 2342488 - RNA, 19 nt, Artificial Sequence
  Description of Artificial Sequence: Synthetic oligonucleotide
  Sense strand starting at position 2834 of SEQ ID NO: 1885441
ucgucauaaucuucugacu

SEQ ID NO: 2342489 - RNA, 19 nt, Artificial Sequence
  Description of Artificial Sequence: Synthetic oligonucleotide
  Antisense strand to SEQ ID NO: 2342488
agucagaagauuaugacga

SEQ ID NO: 2342490 - RNA, 19 nt, Artificial Sequence
  Description of Artificial Sequence: Synthetic oligonucleotide
  Sense strand starting at position 2839 of SEQ ID NO: 1885441
auaaucuucugacuggauu

SEQ ID NO: 2342491 - RNA, 19 nt, Artificial Sequence
  Description of Artificial Sequence: Synthetic oligonucleotide
  Antisense strand to SEQ ID NO: 2342490
aauccagucagaagauuau

SEQ ID NO: 2342492 - RNA, 19 nt, Artificial Sequence
  Description of Artificial Sequence: Synthetic oligonucleotide
  Sense strand starting at position 2921 of SEQ ID NO: 1885441
ugcugcugaucacuacauu

SEQ ID NO: 2342493 - RNA, 19 nt, Artificial Sequence
  Description of Artificial Sequence: Synthetic oligonucleotide
  Antisense strand to SEQ ID NO: 2342492
aauguagugaucagcagca

SEQ ID NO: 2342494 - RNA, 19 nt, Artificial Sequence
  Description of Artificial Sequence: Synthetic oligonucleotide
  Sense strand starting at position 2968 of SEQ ID NO: 1885441
cccguugcccucgagacaa

SEQ ID NO: 2342495 - RNA, 19 nt, Artificial Sequence
  Description of Artificial Sequence: Synthetic oligonucleotide
  Antisense strand to SEQ ID NO: 2342494
uugucucgagggcaacggg

SEQ ID NO: 2342496 - RNA, 19 nt, Artificial Sequence
  Description of Artificial Sequence: Synthetic oligonucleotide
  Sense strand starting at position 3139 of SEQ ID NO: 1885441
ucagcaauauuaucagagu

SEQ ID NO: 2342497 - RNA, 19 nt, Artificial Sequence
  Description of Artificial Sequence: Synthetic oligonucleotide
  Antisense strand to SEQ ID NO: 2342496
acucugauaauauugcuga

SEQ ID NO: 2342498 - RNA, 19 nt, Artificial Sequence
  Description of Artificial Sequence: Synthetic oligonucleotide
  Sense strand starting at position 3169 of SEQ ID NO: 1885441
uuauaaucugaaugacgau

SEQ ID NO: 2342499 - RNA, 19 nt, Artificial Sequence
  Description of Artificial Sequence: Synthetic oligonucleotide
  Antisense strand to SEQ ID NO: 2342498
aucgucauucagauuauaa

SEQ ID NO: 2342500 - RNA, 19 nt, Artificial Sequence
  Description of Artificial Sequence: Synthetic oligonucleotide
  Sense strand starting at position 3192 of SEQ ID NO: 1885441
accuauugugcucauguau

SEQ ID NO: 2342501 - RNA, 19 nt, Artificial Sequence
  Description of Artificial Sequence: Synthetic oligonucleotide
  Antisense strand to SEQ ID NO: 2342500
auacaugagcacaauaggu

SEQ ID NO: 2342502 - RNA, 19 nt, Artificial Sequence
  Description of Artificial Sequence: Synthetic oligonucleotide
  Sense strand starting at position 3226 of SEQ ID NO: 1885441
agucaacucuguccuggaa

SEQ ID NO: 2342503 - RNA, 19 nt, Artificial Sequence
  Description of Artificial Sequence: Synthetic oligonucleotide
  Antisense strand to SEQ ID NO: 2342502
uuccaggacagaguugacu

SEQ ID NO: 2342504 - RNA, 19 nt, Artificial Sequence
  Description of Artificial Sequence: Synthetic oligonucleotide
  Sense strand starting at position 3307 of SEQ ID NO: 1885441
guugcauccagucuuuguu

SEQ ID NO: 2342505 - RNA, 19 nt, Artificial Sequence
  Description of Artificial Sequence: Synthetic oligonucleotide
  Antisense strand to SEQ ID NO: 2342504
aacaaagacuggaugcaac

SEQ ID NO: 2342506 - RNA, 19 nt, Artificial Sequence
  Description of Artificial Sequence: Synthetic oligonucleotide
  Sense strand starting at position 3313 of SEQ ID NO: 1885441
uccagucuuuguuccuuaa

SEQ ID NO: 2342507 - RNA, 19 nt, Artificial Sequence
  Description of Artificial Sequence: Synthetic oligonucleotide
  Antisense strand to SEQ ID NO: 2342506
uuaaggaacaaagacugga

SEQ ID NO: 2342508 - RNA, 19 nt, Artificial Sequence
  Description of Artificial Sequence: Synthetic oligonucleotide
  Sense strand starting at position 3316 of SEQ ID NO: 1885441
agucuuuguuccuuaauuu

SEQ ID NO: 2342509 - RNA, 19 nt, Artificial Sequence
  Description of Artificial Sequence: Synthetic oligonucleotide
  Antisense strand to SEQ ID NO: 2342508
aaauuaaggaacaaagacu

SEQ ID NO: 2342510 - RNA, 19 nt, Artificial Sequence
  Description of Artificial Sequence: Synthetic oligonucleotide
  Sense strand starting at position 3343 of SEQ ID NO: 1885441
gggccagugaaggaauguu

SEQ ID NO: 2342511 - RNA, 19 nt, Artificial Sequence
  Description of Artificial Sequence: Synthetic oligonucleotide
  Antisense strand to SEQ ID NO: 2342510
aacauuccuucacuggccc

SEQ ID NO: 2342512 - RNA, 19 nt, Artificial Sequence
  Description of Artificial Sequence: Synthetic oligonucleotide
  Sense strand starting at position 3808 of SEQ ID NO: 1885441
ggcauuauauucuccuaag

SEQ ID NO: 2342513 - RNA, 19 nt, Artificial Sequence
  Description of Artificial Sequence: Synthetic oligonucleotide
  Antisense strand to SEQ ID NO: 2342512
cuuaggagaauauaaugcc

SEQ ID NO: 2342514 - RNA, 19 nt, Artificial Sequence
  Description of Artificial Sequence: Synthetic oligonucleotide
  Sense strand starting at position 3809 of SEQ ID NO: 1885441
gcauuauauucuccuaagg

SEQ ID NO: 2342515 - RNA, 19 nt, Artificial Sequence
  Description of Artificial Sequence: Synthetic oligonucleotide
  Antisense strand to SEQ ID NO: 2342514
ccuuaggagaauauaaugc

SEQ ID NO: 2342516 - RNA, 19 nt, Artificial Sequence
  Description of Artificial Sequence: Synthetic oligonucleotide
  Sense strand starting at position 284 of SEQ ID NO: 1885440
cugugaagugacugaaacu

SEQ ID NO: 2342517 - RNA, 19 nt, Artificial Sequence
  Description of Artificial Sequence: Synthetic oligonucleotide
  Antisense strand to SEQ ID NO: 2342516
aguuucagucacuucacag

SEQ ID NO: 2342518 - RNA, 19 nt, Artificial Sequence
  Description of Artificial Sequence: Synthetic oligonucleotide
  Sense strand starting at position 337 of SEQ ID NO: 1885440
gagaucuagcaauguacuc

SEQ ID NO: 2342519 - RNA, 19 nt, Artificial Sequence
  Description of Artificial Sequence: Synthetic oligonucleotide
  Antisense strand to SEQ ID NO: 2342518
gaguacauugcuagaucuc

SEQ ID NO: 2342520 - RNA, 19 nt, Artificial Sequence
  Description of Artificial Sequence: Synthetic oligonucleotide
  Sense strand starting at position 386 of SEQ ID NO: 1885440
uugagaaauucccuggagu

SEQ ID NO: 2342521 - RNA, 19 nt, Artificial Sequence
  Description of Artificial Sequence: Synthetic oligonucleotide
  Antisense strand to SEQ ID NO: 2342520
acuccagggaauuucucaa

SEQ ID NO: 2342522 - RNA, 19 nt, Artificial Sequence
  Description of Artificial Sequence: Synthetic oligonucleotide
  Sense strand starting at position 387 of SEQ ID NO: 1885440
ugagaaauucccuggagug

SEQ ID NO: 2342523 - RNA, 19 nt, Artificial Sequence
  Description of Artificial Sequence: Synthetic oligonucleotide
  Antisense strand to SEQ ID NO: 2342522
cacuccagggaauuucuca

SEQ ID NO: 2342524 - RNA, 19 nt, Artificial Sequence
  Description of Artificial Sequence: Synthetic oligonucleotide
  Sense strand starting at position 388 of SEQ ID NO: 1885440
gagaaauucccuggagugu

SEQ ID NO: 2342525 - RNA, 19 nt, Artificial Sequence
  Description of Artificial Sequence: Synthetic oligonucleotide
  Antisense strand to SEQ ID NO: 2342524
acacuccagggaauuucuc

SEQ ID NO: 2342526 - RNA, 19 nt, Artificial Sequence
  Description of Artificial Sequence: Synthetic oligonucleotide
  Sense strand starting at position 551 of SEQ ID NO: 1885440
gcccauugugaagaaauua

SEQ ID NO: 2342527 - RNA, 19 nt, Artificial Sequence
  Description of Artificial Sequence: Synthetic oligonucleotide
  Antisense strand to SEQ ID NO: 2342526
uaauuucuucacaaugggc

SEQ ID NO: 2342528 - RNA, 19 nt, Artificial Sequence
  Description of Artificial Sequence: Synthetic oligonucleotide
  Sense strand starting at position 606 of SEQ ID NO: 1885440
ucauaagaccaguaagcgu

SEQ ID NO: 2342529 - RNA, 19 nt, Artificial Sequence
  Description of Artificial Sequence: Synthetic oligonucleotide
  Antisense strand to SEQ ID NO: 2342528
acgcuuacuggucuuauga

SEQ ID NO: 2342530 - RNA, 19 nt, Artificial Sequence
  Description of Artificial Sequence: Synthetic oligonucleotide
  Sense strand starting at position 687 of SEQ ID NO: 1885440
uaccgaugucuggguauuu

SEQ ID NO: 2342531 - RNA, 19 nt, Artificial Sequence
  Description of Artificial Sequence: Synthetic oligonucleotide
  Antisense strand to SEQ ID NO: 2342530
aaauacccagacaucggua

SEQ ID NO: 2342532 - RNA, 19 nt, Artificial Sequence
  Description of Artificial Sequence: Synthetic oligonucleotide
  Sense strand starting at position 790 of SEQ ID NO: 1885440
uguguuaugugguugauuu

SEQ ID NO: 2342533 - RNA, 19 nt, Artificial Sequence
  Description of Artificial Sequence: Synthetic oligonucleotide
  Antisense strand to SEQ ID NO: 2342532
aaaucaaccacauaacaca

SEQ ID NO: 2342534 - RNA, 19 nt, Artificial Sequence
  Description of Artificial Sequence: Synthetic oligonucleotide
  Sense strand starting at position 791 of SEQ ID NO: 1885440
guguuaugugguugauuuc

SEQ ID NO: 2342535 - RNA, 19 nt, Artificial Sequence
  Description of Artificial Sequence: Synthetic oligonucleotide
  Antisense strand to SEQ ID NO: 2342534
gaaaucaaccacauaacac

SEQ ID NO: 2342536 - RNA, 19 nt, Artificial Sequence
  Description of Artificial Sequence: Synthetic oligonucleotide
  Sense strand starting at position 797 of SEQ ID NO: 1885440
ugugguugauuucuaaggu

SEQ ID NO: 2342537 - RNA, 19 nt, Artificial Sequence
  Description of Artificial Sequence: Synthetic oligonucleotide
  Antisense strand to SEQ ID NO: 2342536
accuuagaaaucaaccaca

SEQ ID NO: 2342538 - RNA, 19 nt, Artificial Sequence
  Description of Artificial Sequence: Synthetic oligonucleotide
  Sense strand starting at position 867 of SEQ ID NO: 1885440
ggguuaagacccuaugugu

SEQ ID NO: 2342539 - RNA, 19 nt, Artificial Sequence
  Description of Artificial Sequence: Synthetic oligonucleotide
  Antisense strand to SEQ ID NO: 2342538
acacauagggucuuaaccc

SEQ ID NO: 2342540 - RNA, 19 nt, Artificial Sequence
  Description of Artificial Sequence: Synthetic oligonucleotide
  Sense strand starting at position 917 of SEQ ID NO: 1885440
ugcuauuucugucucagaa

SEQ ID NO: 2342541 - RNA, 19 nt, Artificial Sequence
  Description of Artificial Sequence: Synthetic oligonucleotide
  Antisense strand to SEQ ID NO: 2342540
uucugagacagaaauagca

SEQ ID NO: 2342542 - RNA, 19 nt, Artificial Sequence
  Description of Artificial Sequence: Synthetic oligonucleotide
  Sense strand starting at position 950 of SEQ ID NO: 1885440
uccaaaguggcuuacaaau

SEQ ID NO: 2342543 - RNA, 19 nt, Artificial Sequence
  Description of Artificial Sequence: Synthetic oligonucleotide
  Antisense strand to SEQ ID NO: 2342542
auuuguaagccacuuugga

SEQ ID NO: 2342544 - RNA, 19 nt, Artificial Sequence
  Description of Artificial Sequence: Synthetic oligonucleotide
  Sense strand starting at position 973 of SEQ ID NO: 1885440
gguucuagaucaucuugaa

SEQ ID NO: 2342545 - RNA, 19 nt, Artificial Sequence
  Description of Artificial Sequence: Synthetic oligonucleotide
  Antisense strand to SEQ ID NO: 2342544
uucaagaugaucuagaacc

SEQ ID NO: 2342546 - RNA, 19 nt, Artificial Sequence
  Description of Artificial Sequence: Synthetic oligonucleotide
  Sense strand starting at position 1003 of SEQ ID NO: 1885440
ggugauuguguauaagaaa

SEQ ID NO: 2342547 - RNA, 19 nt, Artificial Sequence
  Description of Artificial Sequence: Synthetic oligonucleotide
  Antisense strand to SEQ ID NO: 2342546
uuucuuauacacaaucacc

SEQ ID NO: 2342548 - RNA, 19 nt, Artificial Sequence
  Description of Artificial Sequence: Synthetic oligonucleotide
  Sense strand starting at position 1123 of SEQ ID NO: 1885440
guaagugucauggaaacug

SEQ ID NO: 2342549 - RNA, 19 nt, Artificial Sequence
  Description of Artificial Sequence: Synthetic oligonucleotide
  Antisense strand to SEQ ID NO: 2342548
caguuuccaugacacuuac

SEQ ID NO: 2342550 - RNA, 19 nt, Artificial Sequence
  Description of Artificial Sequence: Synthetic oligonucleotide
  Sense strand starting at position 1139 of SEQ ID NO: 1885440
cugaacgaugcugggaaau

SEQ ID NO: 2342551 - RNA, 19 nt, Artificial Sequence
  Description of Artificial Sequence: Synthetic oligonucleotide
  Antisense strand to SEQ ID NO: 2342550
auuucccagcaucguucag

SEQ ID NO: 2342552 - RNA, 19 nt, Artificial Sequence
  Description of Artificial Sequence: Synthetic oligonucleotide
  Sense strand starting at position 1288 of SEQ ID NO: 1885440
guaguuaagcaugaaguag

SEQ ID NO: 2342553 - RNA, 19 nt, Artificial Sequence
  Description of Artificial Sequence: Synthetic oligonucleotide
  Antisense strand to SEQ ID NO: 2342552
cuacuucaugcuuaacuac

SEQ ID NO: 2342554 - RNA, 19 nt, Artificial Sequence
  Description of Artificial Sequence: Synthetic oligonucleotide
  Sense strand starting at position 1299 of SEQ ID NO: 1885440
ugaaguaguuaagcuugaa

SEQ ID NO: 2342555 - RNA, 19 nt, Artificial Sequence
  Description of Artificial Sequence: Synthetic oligonucleotide
  Antisense strand to SEQ ID NO: 2342554
uucaagcuuaacuacuuca

SEQ ID NO: 2342556 - RNA, 19 nt, Artificial Sequence
  Description of Artificial Sequence: Synthetic oligonucleotide
  Sense strand starting at position 1792 of SEQ ID NO: 1885440
uuaguaggucaaugaccuu

SEQ ID NO: 2342557 - RNA, 19 nt, Artificial Sequence
  Description of Artificial Sequence: Synthetic oligonucleotide
  Antisense strand to SEQ ID NO: 2342556
aaggucauugaccuacuaa

SEQ ID NO: 2342558 - RNA, 19 nt, Artificial Sequence
  Description of Artificial Sequence: Synthetic oligonucleotide
  Sense strand starting at position 2017 of SEQ ID NO: 1885440
caggacuuguggcuaacau

SEQ ID NO: 2342559 - RNA, 19 nt, Artificial Sequence
  Description of Artificial Sequence: Synthetic oligonucleotide
  Antisense strand to SEQ ID NO: 2342558
auguuagccacaaguccug

SEQ ID NO: 2342560 - RNA, 19 nt, Artificial Sequence
  Description of Artificial Sequence: Synthetic oligonucleotide
  Sense strand starting at position 2018 of SEQ ID NO: 1885440
aggacuuguggcuaacauc

SEQ ID NO: 2342561 - RNA, 19 nt, Artificial Sequence
  Description of Artificial Sequence: Synthetic oligonucleotide
  Antisense strand to SEQ ID NO: 2342560
gauguuagccacaaguccu

SEQ ID NO: 2342562 - RNA, 19 nt, Artificial Sequence
  Description of Artificial Sequence: Synthetic oligonucleotide
  Sense strand starting at position 2026 of SEQ ID NO: 1885440
uggcuaacauccuuugaua

SEQ ID NO: 2342563 - RNA, 19 nt, Artificial Sequence
  Description of Artificial Sequence: Synthetic oligonucleotide
  Antisense strand to SEQ ID NO: 2342562
uaucaaaggauguuagcca

SEQ ID NO: 2342564 - RNA, 19 nt, Artificial Sequence
  Description of Artificial Sequence: Synthetic oligonucleotide
  Sense strand starting at position 2195 of SEQ ID NO: 1885440
auuacuuagucacugauua

SEQ ID NO: 2342565 - RNA, 19 nt, Artificial Sequence
  Description of Artificial Sequence: Synthetic oligonucleotide
  Antisense strand to SEQ ID NO: 2342564
uaaucagugacuaaguaau

SEQ ID NO: 2342566 - RNA, 19 nt, Artificial Sequence
  Description of Artificial Sequence: Synthetic oligonucleotide
  Sense strand starting at position 2199 of SEQ ID NO: 1885440
cuuagucacugauuauaca

SEQ ID NO: 2342567 - RNA, 19 nt, Artificial Sequence
  Description of Artificial Sequence: Synthetic oligonucleotide
  Antisense strand to SEQ ID NO: 2342566
uguauaaucagugacuaag

SEQ ID NO: 2342568 - RNA, 19 nt, Artificial Sequence
  Description of Artificial Sequence: Synthetic oligonucleotide
  Sense strand starting at position 2371 of SEQ ID NO: 1885440
ucaauauuggaaggugauc

SEQ ID NO: 2342569 - RNA, 19 nt, Artificial Sequence
  Description of Artificial Sequence: Synthetic oligonucleotide
  Antisense strand to SEQ ID NO: 2342568
gaucaccuuccaauauuga

SEQ ID NO: 2342570 - RNA, 19 nt, Artificial Sequence
  Description of Artificial Sequence: Synthetic oligonucleotide
  Sense strand starting at position 2755 of SEQ ID NO: 1885440
gauuguggcccuuacauaa

SEQ ID NO: 2342571 - RNA, 19 nt, Artificial Sequence
  Description of Artificial Sequence: Synthetic oligonucleotide
  Antisense strand to SEQ ID NO: 2342570
uuauguaagggccacaauc

SEQ ID NO: 2342572 - RNA, 19 nt, Artificial Sequence
  Description of Artificial Sequence: Synthetic oligonucleotide
  Sense strand starting at position 2762 of SEQ ID NO: 1885440
gcccuuacauaaucuggau

SEQ ID NO: 2342573 - RNA, 19 nt, Artificial Sequence
  Description of Artificial Sequence: Synthetic oligonucleotide
  Antisense strand to SEQ ID NO: 2342572
auccagauuauguaagggc

SEQ ID NO: 2342574 - RNA, 19 nt, Artificial Sequence
  Description of Artificial Sequence: Synthetic oligonucleotide
  Sense strand starting at position 2944 of SEQ ID NO: 1885440
uuagauucugguuagguaa

SEQ ID NO: 2342575 - RNA, 19 nt, Artificial Sequence
  Description of Artificial Sequence: Synthetic oligonucleotide
  Antisense strand to SEQ ID NO: 2342574
uuaccuaaccagaaucuaa

SEQ ID NO: 2342576 - RNA, 19 nt, Artificial Sequence
  Description of Artificial Sequence: Synthetic oligonucleotide
  Sense strand starting at position 3055 of SEQ ID NO: 1885440
aguaaaguuuaagcucaaa

SEQ ID NO: 2342577 - RNA, 19 nt, Artificial Sequence
  Description of Artificial Sequence: Synthetic oligonucleotide
  Antisense strand to SEQ ID NO: 2342576
uuugagcuuaaacuuuacu

SEQ ID NO: 2342578 - RNA, 19 nt, Artificial Sequence
  Description of Artificial Sequence: Synthetic oligonucleotide
  Sense strand starting at position 3121 of SEQ ID NO: 1885440
ggaagaaugugguuccaau

SEQ ID NO: 2342579 - RNA, 19 nt, Artificial Sequence
  Description of Artificial Sequence: Synthetic oligonucleotide
  Antisense strand to SEQ ID NO: 2342578
auuggaaccacauucuucc

SEQ ID NO: 2342580 - RNA, 19 nt, Artificial Sequence
  Description of Artificial Sequence: Synthetic oligonucleotide
  Sense strand starting at position 3298 of SEQ ID NO: 1885440
aggguuucacacugggagu

SEQ ID NO: 2342581 - RNA, 19 nt, Artificial Sequence
  Description of Artificial Sequence: Synthetic oligonucleotide
  Antisense strand to SEQ ID NO: 2342580
acucccagugugaaacccu

SEQ ID NO: 2342582 - RNA, 19 nt, Artificial Sequence
  Description of Artificial Sequence: Synthetic oligonucleotide
  Sense strand starting at position 3314 of SEQ ID NO: 1885440
agugaaauggucugaccug

SEQ ID NO: 2342583 - RNA, 19 nt, Artificial Sequence
  Description of Artificial Sequence: Synthetic oligonucleotide
  Antisense strand to SEQ ID NO: 2342582
caggucagaccauuucacu

SEQ ID NO: 2342584 - RNA, 19 nt, Artificial Sequence
  Description of Artificial Sequence: Synthetic oligonucleotide
  Sense strand starting at position 3331 of SEQ ID NO: 1885440
ugaggugaggcuggaucau

SEQ ID NO: 2342585 - RNA, 19 nt, Artificial Sequence
  Description of Artificial Sequence: Synthetic oligonucleotide
  Antisense strand to SEQ ID NO: 2342584
augauccagccucaccuca

SEQ ID NO: 2342586 - RNA, 19 nt, Artificial Sequence
  Description of Artificial Sequence: Synthetic oligonucleotide
  Sense strand starting at position 3437 of SEQ ID NO: 1885440
augauucuggcccagacuu

SEQ ID NO: 2342587 - RNA, 19 nt, Artificial Sequence
  Description of Artificial Sequence: Synthetic oligonucleotide
  Antisense strand to SEQ ID NO: 2342586
aagucugggccagaaucau

SEQ ID NO: 2342588 - RNA, 19 nt, Artificial Sequence
  Description of Artificial Sequence: Synthetic oligonucleotide
  Sense strand starting at position 3458 of SEQ ID NO: 1885440
gugguuuggagguaaagag

SEQ ID NO: 2342589 - RNA, 19 nt, Artificial Sequence
  Description of Artificial Sequence: Synthetic oligonucleotide
  Antisense strand to SEQ ID NO: 2342588
cucuuuaccuccaaaccac

SEQ ID NO: 2342590 - RNA, 19 nt, Artificial Sequence
  Description of Artificial Sequence: Synthetic oligonucleotide
  Sense strand starting at position 3477 of SEQ ID NO: 1885440
guagauagauuugagaaac

SEQ ID NO: 2342591 - RNA, 19 nt, Artificial Sequence
  Description of Artificial Sequence: Synthetic oligonucleotide
  Antisense strand to SEQ ID NO: 2342590
guuucucaaaucuaucuac

SEQ ID NO: 2342592 - RNA, 19 nt, Artificial Sequence
  Description of Artificial Sequence: Synthetic oligonucleotide
  Sense strand starting at position 3624 of SEQ ID NO: 1885440
gggaccugguaucuaaagu

SEQ ID NO: 2342593 - RNA, 19 nt, Artificial Sequence
  Description of Artificial Sequence: Synthetic oligonucleotide
  Antisense strand to SEQ ID NO: 2342592
acuuuagauaccagguccc

SEQ ID NO: 2342594 - RNA, 19 nt, Artificial Sequence
  Description of Artificial Sequence: Synthetic oligonucleotide
  Sense strand starting at position 3827 of SEQ ID NO: 1885440
aacuuuaaagagugucaag

SEQ ID NO: 2342595 - RNA, 19 nt, Artificial Sequence
  Description of Artificial Sequence: Synthetic oligonucleotide
  Antisense strand to SEQ ID NO: 2342594
cuugacacucuuuaaaguu

SEQ ID NO: 2342596 - RNA, 19 nt, Artificial Sequence
  Description of Artificial Sequence: Synthetic oligonucleotide
  Sense strand starting at position 108 of SEQ ID NO: 1885442
gcuggaacuccggagaacu

SEQ ID NO: 2342597 - RNA, 19 nt, Artificial Sequence
  Description of Artificial Sequence: Synthetic oligonucleotide
  Antisense strand to SEQ ID NO: 2342596
aguucuccggaguuccagc

SEQ ID NO: 2342598 - RNA, 19 nt, Artificial Sequence
  Description of Artificial Sequence: Synthetic oligonucleotide
  Sense strand starting at position 245 of SEQ ID NO: 1885442
ccagacaugcccugugaaa

SEQ ID NO: 2342599 - RNA, 19 nt, Artificial Sequence
  Description of Artificial Sequence: Synthetic oligonucleotide
  Antisense strand to SEQ ID NO: 2342598
uuucacagggcaugucugg

SEQ ID NO: 2342600 - RNA, 19 nt, Artificial Sequence
  Description of Artificial Sequence: Synthetic oligonucleotide
  Sense strand starting at position 608 of SEQ ID NO: 1885442
uccuccuggagaugagauu

SEQ ID NO: 2342601 - RNA, 19 nt, Artificial Sequence
  Description of Artificial Sequence: Synthetic oligonucleotide
  Antisense strand to SEQ ID NO: 2342600
aaucucaucuccaggagga

SEQ ID NO: 2342602 - RNA, 19 nt, Artificial Sequence
  Description of Artificial Sequence: Synthetic oligonucleotide
  Sense strand starting at position 697 of SEQ ID NO: 1885442
ggcaaugcucaacauggaa

SEQ ID NO: 2342603 - RNA, 19 nt, Artificial Sequence
  Description of Artificial Sequence: Synthetic oligonucleotide
  Antisense strand to SEQ ID NO: 2342602
uuccauguugagcauugcc

SEQ ID NO: 2342604 - RNA, 19 nt, Artificial Sequence
  Description of Artificial Sequence: Synthetic oligonucleotide
  Sense strand starting at position 904 of SEQ ID NO: 1885442
agagguggguuagccaaua

SEQ ID NO: 2342605 - RNA, 19 nt, Artificial Sequence
  Description of Artificial Sequence: Synthetic oligonucleotide
  Antisense strand to SEQ ID NO: 2342604
uauuggcuaacccaccucu

SEQ ID NO: 2342606 - RNA, 19 nt, Artificial Sequence
  Description of Artificial Sequence: Synthetic oligonucleotide
  Sense strand starting at position 987 of SEQ ID NO: 1885442
cucaaaggcucaguggaaa

SEQ ID NO: 2342607 - RNA, 19 nt, Artificial Sequence
  Description of Artificial Sequence: Synthetic oligonucleotide
  Antisense strand to SEQ ID NO: 2342606
uuuccacugagccuuugag

SEQ ID NO: 2342608 - RNA, 19 nt, Artificial Sequence
  Description of Artificial Sequence: Synthetic oligonucleotide
  Sense strand starting at position 1179 of SEQ ID NO: 1885442
ggcagagauguggaagcuu

SEQ ID NO: 2342609 - RNA, 19 nt, Artificial Sequence
  Description of Artificial Sequence: Synthetic oligonucleotide
  Antisense strand to SEQ ID NO: 2342608
aagcuuccacaucucugcc

SEQ ID NO: 2342610 - RNA, 19 nt, Artificial Sequence
  Description of Artificial Sequence: Synthetic oligonucleotide
  Sense strand starting at position 1273 of SEQ ID NO: 1885442
ccaucaugacaguaauguc

SEQ ID NO: 2342611 - RNA, 19 nt, Artificial Sequence
  Description of Artificial Sequence: Synthetic oligonucleotide
  Antisense strand to SEQ ID NO: 2342610
gacauuacugucaugaugg

SEQ ID NO: 2342612 - RNA, 19 nt, Artificial Sequence
  Description of Artificial Sequence: Synthetic oligonucleotide
  Sense strand starting at position 1656 of SEQ ID NO: 1885442
guguccuguccgccaguaa

SEQ ID NO: 2342613 - RNA, 19 nt, Artificial Sequence
  Description of Artificial Sequence: Synthetic oligonucleotide
  Antisense strand to SEQ ID NO: 2342612
uuacuggcggacaggacac

SEQ ID NO: 2342614 - RNA, 19 nt, Artificial Sequence
  Description of Artificial Sequence: Synthetic oligonucleotide
  Sense strand starting at position 1659 of SEQ ID NO: 1885442
uccuguccgccaguaaguu

SEQ ID NO: 2342615 - RNA, 19 nt, Artificial Sequence
  Description of Artificial Sequence: Synthetic oligonucleotide
  Antisense strand to SEQ ID NO: 2342614
aacuuacuggcggacagga

SEQ ID NO: 2342616 - RNA, 19 nt, Artificial Sequence
  Description of Artificial Sequence: Synthetic oligonucleotide
  Sense strand starting at position 1820 of SEQ ID NO: 1885442
cagggauguuccuugcaaa

SEQ ID NO: 2342617 - RNA, 19 nt, Artificial Sequence
  Description of Artificial Sequence: Synthetic oligonucleotide
  Antisense strand to SEQ ID NO: 2342616
uuugcaaggaacaucccug

SEQ ID NO: 2342618 - RNA, 19 nt, Artificial Sequence
  Description of Artificial Sequence: Synthetic oligonucleotide
  Sense strand starting at position 2057 of SEQ ID NO: 1885442
aggacuccucuuggcagau

SEQ ID NO: 2342619 - RNA, 19 nt, Artificial Sequence
  Description of Artificial Sequence: Synthetic oligonucleotide
  Antisense strand to SEQ ID NO: 2342618
aucugccaagaggaguccu

SEQ ID NO: 2342620 - RNA, 19 nt, Artificial Sequence
  Description of Artificial Sequence: Synthetic oligonucleotide
  Sense strand starting at position 2265 of SEQ ID NO: 1885442
gugugaugucaacagagaa

SEQ ID NO: 2342621 - RNA, 19 nt, Artificial Sequence
  Description of Artificial Sequence: Synthetic oligonucleotide
  Antisense strand to SEQ ID NO: 2342620
uucucuguugacaucacac

SEQ ID NO: 2342622 - RNA, 19 nt, Artificial Sequence
  Description of Artificial Sequence: Synthetic oligonucleotide
  Sense strand starting at position 2330 of SEQ ID NO: 1885442
uugucagucacuuaggaag

SEQ ID NO: 2342623 - RNA, 19 nt, Artificial Sequence
  Description of Artificial Sequence: Synthetic oligonucleotide
  Antisense strand to SEQ ID NO: 2342622
cuuccuaagugacugacaa

SEQ ID NO: 2342624 - RNA, 19 nt, Artificial Sequence
  Description of Artificial Sequence: Synthetic oligonucleotide
  Sense strand starting at position 2371 of SEQ ID NO: 1885442
gguucucaaaggugggaaa

SEQ ID NO: 2342625 - RNA, 19 nt, Artificial Sequence
  Description of Artificial Sequence: Synthetic oligonucleotide
  Antisense strand to SEQ ID NO: 2342624
uuucccaccuuugagaacc

SEQ ID NO: 2342626 - RNA, 19 nt, Artificial Sequence
  Description of Artificial Sequence: Synthetic oligonucleotide
  Sense strand starting at position 2440 of SEQ ID NO: 1885442
ggaguugaugcugaagucu

SEQ ID NO: 2342627 - RNA, 19 nt, Artificial Sequence
  Description of Artificial Sequence: Synthetic oligonucleotide
  Antisense strand to SEQ ID NO: 2342626
agacuucagcaucaacucc

SEQ ID NO: 2342628 - RNA, 19 nt, Artificial Sequence
  Description of Artificial Sequence: Synthetic oligonucleotide
  Sense strand starting at position 2446 of SEQ ID NO: 1885442
gaugcugaagucuauaaca

SEQ ID NO: 2342629 - RNA, 19 nt, Artificial Sequence
  Description of Artificial Sequence: Synthetic oligonucleotide
  Antisense strand to SEQ ID NO: 2342628
uguuauagacuucagcauc

SEQ ID NO: 2342630 - RNA, 19 nt, Artificial Sequence
  Description of Artificial Sequence: Synthetic oligonucleotide
  Sense strand starting at position 2448 of SEQ ID NO: 1885442
ugcugaagucuauaacaau

SEQ ID NO: 2342631 - RNA, 19 nt, Artificial Sequence
  Description of Artificial Sequence: Synthetic oligonucleotide
  Antisense strand to SEQ ID NO: 2342630
auuguuauagacuucagca

SEQ ID NO: 2342632 - RNA, 19 nt, Artificial Sequence
  Description of Artificial Sequence: Synthetic oligonucleotide
  Sense strand starting at position 2454 of SEQ ID NO: 1885442
agucuauaacaaugguaac

SEQ ID NO: 2342633 - RNA, 19 nt, Artificial Sequence
  Description of Artificial Sequence: Synthetic oligonucleotide
  Antisense strand to SEQ ID NO: 2342632
guuaccauuguuauagacu

SEQ ID NO: 2342634 - RNA, 19 nt, Artificial Sequence
  Description of Artificial Sequence: Synthetic oligonucleotide
  Sense strand starting at position 2470 of SEQ ID NO: 1885442
aacaauacucaggguguau

SEQ ID NO: 2342635 - RNA, 19 nt, Artificial Sequence
  Description of Artificial Sequence: Synthetic oligonucleotide
  Antisense strand to SEQ ID NO: 2342634
auacacccugaguauuguu

SEQ ID NO: 2342636 - RNA, 19 nt, Artificial Sequence
  Description of Artificial Sequence: Synthetic oligonucleotide
  Sense strand starting at position 2605 of SEQ ID NO: 1885442
aaaguaacucucugggaca

SEQ ID NO: 2342637 - RNA, 19 nt, Artificial Sequence
  Description of Artificial Sequence: Synthetic oligonucleotide
  Antisense strand to SEQ ID NO: 2342636
ugucccagagaguuacuuu

SEQ ID NO: 2342638 - RNA, 19 nt, Artificial Sequence
  Description of Artificial Sequence: Synthetic oligonucleotide
  Sense strand starting at position 2607 of SEQ ID NO: 1885442
aguaacucucugggacaga

SEQ ID NO: 2342639 - RNA, 19 nt, Artificial Sequence
  Description of Artificial Sequence: Synthetic oligonucleotide
  Antisense strand to SEQ ID NO: 2342638
ucugucccagagaguuacu

SEQ ID NO: 2342640 - RNA, 19 nt, Artificial Sequence
  Description of Artificial Sequence: Synthetic oligonucleotide
  Sense strand starting at position 2660 of SEQ ID NO: 1885442
ucuaaaugguucccagaau

SEQ ID NO: 2342641 - RNA, 19 nt, Artificial Sequence
  Description of Artificial Sequence: Synthetic oligonucleotide
  Antisense strand to SEQ ID NO: 2342640
auucugggaaccauuuaga

SEQ ID NO: 2342642 - RNA, 19 nt, Artificial Sequence
  Description of Artificial Sequence: Synthetic oligonucleotide
  Sense strand starting at position 2673 of SEQ ID NO: 1885442
cagaaugaauucccacgua

SEQ ID NO: 2342643 - RNA, 19 nt, Artificial Sequence
  Description of Artificial Sequence: Synthetic oligonucleotide
  Antisense strand to SEQ ID NO: 2342642
uacgugggaauucauucug

SEQ ID NO: 2342644 - RNA, 19 nt, Artificial Sequence
  Description of Artificial Sequence: Synthetic oligonucleotide
  Sense strand starting at position 2711 of SEQ ID NO: 1885442
gagagaagccacugcucau

SEQ ID NO: 2342645 - RNA, 19 nt, Artificial Sequence
  Description of Artificial Sequence: Synthetic oligonucleotide
  Antisense strand to SEQ ID NO: 2342644
augagcaguggcuucucuc

SEQ ID NO: 2342646 - RNA, 19 nt, Artificial Sequence
  Description of Artificial Sequence: Synthetic oligonucleotide
  Sense strand starting at position 2752 of SEQ ID NO: 1885442
auccuucugccggaacaaa

SEQ ID NO: 2342647 - RNA, 19 nt, Artificial Sequence
  Description of Artificial Sequence: Synthetic oligonucleotide
  Antisense strand to SEQ ID NO: 2342646
uuuguuccggcagaaggau

SEQ ID NO: 2342648 - RNA, 19 nt, Artificial Sequence
  Description of Artificial Sequence: Synthetic oligonucleotide
  Sense strand starting at position 2780 of SEQ ID NO: 1885442
ggcacuuggaaguaaaugu

SEQ ID NO: 2342649 - RNA, 19 nt, Artificial Sequence
  Description of Artificial Sequence: Synthetic oligonucleotide
  Antisense strand to SEQ ID NO: 2342648
acauuuacuuccaagugcc

SEQ ID NO: 2342650 - RNA, 19 nt, Artificial Sequence
  Description of Artificial Sequence: Synthetic oligonucleotide
  Sense strand starting at position 3079 of SEQ ID NO: 1885442
ugcccuaauccuggaagga

SEQ ID NO: 2342651 - RNA, 19 nt, Artificial Sequence
  Description of Artificial Sequence: Synthetic oligonucleotide
  Antisense strand to SEQ ID NO: 2342650
uccuuccaggauuagggca

SEQ ID NO: 2342652 - RNA, 19 nt, Artificial Sequence
  Description of Artificial Sequence: Synthetic oligonucleotide
  Sense strand starting at position 3172 of SEQ ID NO: 1885442
aguagugaaaccugguaga

SEQ ID NO: 2342653 - RNA, 19 nt, Artificial Sequence
  Description of Artificial Sequence: Synthetic oligonucleotide
  Antisense strand to SEQ ID NO: 2342652
ucuaccagguuucacuacu

SEQ ID NO: 2342654 - RNA, 19 nt, Artificial Sequence
  Description of Artificial Sequence: Synthetic oligonucleotide
  Sense strand starting at position 3249 of SEQ ID NO: 1885442
agguuugacaaauggcaga

SEQ ID NO: 2342655 - RNA, 19 nt, Artificial Sequence
  Description of Artificial Sequence: Synthetic oligonucleotide
  Antisense strand to SEQ ID NO: 2342654
ucugccauuugucaaaccu

SEQ ID NO: 2342656 - RNA, 19 nt, Artificial Sequence
  Description of Artificial Sequence: Synthetic oligonucleotide
  Sense strand starting at position 3334 of SEQ ID NO: 1885442
uuguuuguacaaugaaacu

SEQ ID NO: 2342657 - RNA, 19 nt, Artificial Sequence
  Description of Artificial Sequence: Synthetic oligonucleotide
  Antisense strand to SEQ ID NO: 2342656
aguuucauuguacaaacaa

SEQ ID NO: 2342658 - RNA, 19 nt, Artificial Sequence
  Description of Artificial Sequence: Synthetic oligonucleotide
  Sense strand starting at position 3352 of SEQ ID NO: 1885442
ucuagauuguaggcagaaa

SEQ ID NO: 2342659 - RNA, 19 nt, Artificial Sequence
  Description of Artificial Sequence: Synthetic oligonucleotide
  Antisense strand to SEQ ID NO: 2342658
uuucugccuacaaucuaga

SEQ ID NO: 2342660 - RNA, 19 nt, Artificial Sequence
  Description of Artificial Sequence: Synthetic oligonucleotide
  Sense strand starting at position 3565 of SEQ ID NO: 1885442
uucuuuacucauggaagac

SEQ ID NO: 2342661 - RNA, 19 nt, Artificial Sequence
  Description of Artificial Sequence: Synthetic oligonucleotide
  Antisense strand to SEQ ID NO: 2342660
gucuuccaugaguaaagaa

SEQ ID NO: 2342662 - RNA, 19 nt, Artificial Sequence
  Description of Artificial Sequence: Synthetic oligonucleotide
  Sense strand starting at position 3599 of SEQ ID NO: 1885442
ccgacuauuuacgcaagca

SEQ ID NO: 2342663 - RNA, 19 nt, Artificial Sequence
  Description of Artificial Sequence: Synthetic oligonucleotide
  Antisense strand to SEQ ID NO: 2342662
ugcuugcguaaauagucgg

SEQ ID NO: 2342664 - RNA, 19 nt, Artificial Sequence
  Description of Artificial Sequence: Synthetic oligonucleotide
  Sense strand starting at position 3600 of SEQ ID NO: 1885442
cgacuauuuacgcaagcac

SEQ ID NO: 2342665 - RNA, 19 nt, Artificial Sequence
  Description of Artificial Sequence: Synthetic oligonucleotide
  Antisense strand to SEQ ID NO: 2342664
gugcuugcguaaauagucg

SEQ ID NO: 2342666 - RNA, 19 nt, Artificial Sequence
  Description of Artificial Sequence: Synthetic oligonucleotide
  Sense strand starting at position 3633 of SEQ ID NO: 1885442
ccuggagcaguuuacaaga

SEQ ID NO: 2342667 - RNA, 19 nt, Artificial Sequence
  Description of Artificial Sequence: Synthetic oligonucleotide
  Antisense strand to SEQ ID NO: 2342666
ucuuguaaacugcuccagg

SEQ ID NO: 2342668 - RNA, 19 nt, Artificial Sequence
  Description of Artificial Sequence: Synthetic oligonucleotide
  Sense strand starting at position 3830 of SEQ ID NO: 1885442
ucugaaucaugaguggacu

SEQ ID NO: 2342669 - RNA, 19 nt, Artificial Sequence
  Description of Artificial Sequence: Synthetic oligonucleotide
  Antisense strand to SEQ ID NO: 2342668
aguccacucaugauucaga

SEQ ID NO: 2342670 - RNA, 19 nt, Artificial Sequence
  Description of Artificial Sequence: Synthetic oligonucleotide
  Sense strand starting at position 3831 of SEQ ID NO: 1885442
cugaaucaugaguggacua

SEQ ID NO: 2342671 - RNA, 19 nt, Artificial Sequence
  Description of Artificial Sequence: Synthetic oligonucleotide
  Antisense strand to SEQ ID NO: 2342670
uaguccacucaugauucag

SEQ ID NO: 2342672 - RNA, 19 nt, Artificial Sequence
  Description of Artificial Sequence: Synthetic oligonucleotide
  Sense strand starting at position 3832 of SEQ ID NO: 1885442
ugaaucaugaguggacuau

SEQ ID NO: 2342673 - RNA, 19 nt, Artificial Sequence
  Description of Artificial Sequence: Synthetic oligonucleotide
  Antisense strand to SEQ ID NO: 2342672
auaguccacucaugauuca

SEQ ID NO: 2342674 - RNA, 19 nt, Artificial Sequence
  Description of Artificial Sequence: Synthetic oligonucleotide
  Sense strand starting at position 3932 of SEQ ID NO: 1885442
cgcuguauuugguuuauaa

SEQ ID NO: 2342675 - RNA, 19 nt, Artificial Sequence
  Description of Artificial Sequence: Synthetic oligonucleotide
  Antisense strand to SEQ ID NO: 2342674
uuauaaaccaaauacagcg

SEQ ID NO: 2342676 - RNA, 19 nt, Artificial Sequence
  Description of Artificial Sequence: Synthetic oligonucleotide
  Sense strand starting at position 2 of SEQ ID NO: 1885443
gcaccuuuaccuugggaca

SEQ ID NO: 2342677 - RNA, 19 nt, Artificial Sequence
  Description of Artificial Sequence: Synthetic oligonucleotide
  Antisense strand to SEQ ID NO: 2342676
ugucccaagguaaaggugc

SEQ ID NO: 2342678 - RNA, 19 nt, Artificial Sequence
  Description of Artificial Sequence: Synthetic oligonucleotide
  Sense strand starting at position 59 of SEQ ID NO: 1885443
uacccaggucugugguaua

SEQ ID NO: 2342679 - RNA, 19 nt, Artificial Sequence
  Description of Artificial Sequence: Synthetic oligonucleotide
  Antisense strand to SEQ ID NO: 2342678
uauaccacagaccugggua

SEQ ID NO: 2342680 - RNA, 19 nt, Artificial Sequence
  Description of Artificial Sequence: Synthetic oligonucleotide
  Sense strand starting at position 136 of SEQ ID NO: 1885443
uguuccaugcauggucaaa

SEQ ID NO: 2342681 - RNA, 19 nt, Artificial Sequence
  Description of Artificial Sequence: Synthetic oligonucleotide
  Antisense strand to SEQ ID NO: 2342680
uuugaccaugcauggaaca

SEQ ID NO: 2342682 - RNA, 19 nt, Artificial Sequence
  Description of Artificial Sequence: Synthetic oligonucleotide
  Sense strand starting at position 238 of SEQ ID NO: 1885443
ucuggauccugagcuuaac

SEQ ID NO: 2342683 - RNA, 19 nt, Artificial Sequence
  Description of Artificial Sequence: Synthetic oligonucleotide
  Antisense strand to SEQ ID NO: 2342682
guuaagcucaggauccaga

SEQ ID NO: 2342684 - RNA, 19 nt, Artificial Sequence
  Description of Artificial Sequence: Synthetic oligonucleotide
  Sense strand starting at position 241 of SEQ ID NO: 1885443
ggauccugagcuuaacugu

SEQ ID NO: 2342685 - RNA, 19 nt, Artificial Sequence
  Description of Artificial Sequence: Synthetic oligonucleotide
  Antisense strand to SEQ ID NO: 2342684
acaguuaagcucaggaucc

SEQ ID NO: 2342686 - RNA, 19 nt, Artificial Sequence
  Description of Artificial Sequence: Synthetic oligonucleotide
  Sense strand starting at position 255 of SEQ ID NO: 1885443
acuguuacgcaauagauga

SEQ ID NO: 2342687 - RNA, 19 nt, Artificial Sequence
  Description of Artificial Sequence: Synthetic oligonucleotide
  Antisense strand to SEQ ID NO: 2342686
ucaucuauugcguaacagu

SEQ ID NO: 2342688 - RNA, 19 nt, Artificial Sequence
  Description of Artificial Sequence: Synthetic oligonucleotide
  Sense strand starting at position 669 of SEQ ID NO: 1885443
cugaguaauuuguugcaca

SEQ ID NO: 2342689 - RNA, 19 nt, Artificial Sequence
  Description of Artificial Sequence: Synthetic oligonucleotide
  Antisense strand to SEQ ID NO: 2342688
ugugcaacaaauuacucag

SEQ ID NO: 2342690 - RNA, 19 nt, Artificial Sequence
  Description of Artificial Sequence: Synthetic oligonucleotide
  Sense strand starting at position 727 of SEQ ID NO: 1885443
uuugaauagcaaggacauu

SEQ ID NO: 2342691 - RNA, 19 nt, Artificial Sequence
  Description of Artificial Sequence: Synthetic oligonucleotide
  Antisense strand to SEQ ID NO: 2342690
aauguccuugcuauucaaa

SEQ ID NO: 2342692 - RNA, 19 nt, Artificial Sequence
  Description of Artificial Sequence: Synthetic oligonucleotide
  Sense strand starting at position 956 of SEQ ID NO: 1885443
gguggagcaggcuauuaaa

SEQ ID NO: 2342693 - RNA, 19 nt, Artificial Sequence
  Description of Artificial Sequence: Synthetic oligonucleotide
  Antisense strand to SEQ ID NO: 2342692
uuuaauagccugcuccacc

SEQ ID NO: 2342694 - RNA, 19 nt, Artificial Sequence
  Description of Artificial Sequence: Synthetic oligonucleotide
  Sense strand starting at position 1021 of SEQ ID NO: 1885443
accuuaaagugcucucaga

SEQ ID NO: 2342695 - RNA, 19 nt, Artificial Sequence
  Description of Artificial Sequence: Synthetic oligonucleotide
  Antisense strand to SEQ ID NO: 2342694
ucugagagcacuuuaaggu

SEQ ID NO: 2342696 - RNA, 19 nt, Artificial Sequence
  Description of Artificial Sequence: Synthetic oligonucleotide
  Sense strand starting at position 1346 of SEQ ID NO: 1885443
guaugccuugauuacuuaa

SEQ ID NO: 2342697 - RNA, 19 nt, Artificial Sequence
  Description of Artificial Sequence: Synthetic oligonucleotide
  Antisense strand to SEQ ID NO: 2342696
uuaaguaaucaaggcauac

SEQ ID NO: 2342698 - RNA, 19 nt, Artificial Sequence
  Description of Artificial Sequence: Synthetic oligonucleotide
  Sense strand starting at position 1418 of SEQ ID NO: 1885443
uuaacucucuuugaugaga

SEQ ID NO: 2342699 - RNA, 19 nt, Artificial Sequence
  Description of Artificial Sequence: Synthetic oligonucleotide
  Antisense strand to SEQ ID NO: 2342698
ucucaucaaagagaguuaa

SEQ ID NO: 2342700 - RNA, 19 nt, Artificial Sequence
  Description of Artificial Sequence: Synthetic oligonucleotide
  Sense strand starting at position 1423 of SEQ ID NO: 1885443
ucucuuugaugagaugaug

SEQ ID NO: 2342701 - RNA, 19 nt, Artificial Sequence
  Description of Artificial Sequence: Synthetic oligonucleotide
  Antisense strand to SEQ ID NO: 2342700
caucaucucaucaaagaga

SEQ ID NO: 2342702 - RNA, 19 nt, Artificial Sequence
  Description of Artificial Sequence: Synthetic oligonucleotide
  Sense strand starting at position 1431 of SEQ ID NO: 1885443
augagaugauggucucuua

SEQ ID NO: 2342703 - RNA, 19 nt, Artificial Sequence
  Description of Artificial Sequence: Synthetic oligonucleotide
  Antisense strand to SEQ ID NO: 2342702
uaagagaccaucaucucau

SEQ ID NO: 2342704 - RNA, 19 nt, Artificial Sequence
  Description of Artificial Sequence: Synthetic oligonucleotide
  Sense strand starting at position 1434 of SEQ ID NO: 1885443
agaugauggucucuuaaac

SEQ ID NO: 2342705 - RNA, 19 nt, Artificial Sequence
  Description of Artificial Sequence: Synthetic oligonucleotide
  Antisense strand to SEQ ID NO: 2342704
guuuaagagaccaucaucu

SEQ ID NO: 2342706 - RNA, 19 nt, Artificial Sequence
  Description of Artificial Sequence: Synthetic oligonucleotide
  Sense strand starting at position 1833 of SEQ ID NO: 1885443
cuuaguaacuaacugugua

SEQ ID NO: 2342707 - RNA, 19 nt, Artificial Sequence
  Description of Artificial Sequence: Synthetic oligonucleotide
  Antisense strand to SEQ ID NO: 2342706
uacacaguuaguuacuaag

SEQ ID NO: 2342708 - RNA, 19 nt, Artificial Sequence
  Description of Artificial Sequence: Synthetic oligonucleotide
  Sense strand starting at position 1836 of SEQ ID NO: 1885443
aguaacuaacuguguaaga

SEQ ID NO: 2342709 - RNA, 19 nt, Artificial Sequence
  Description of Artificial Sequence: Synthetic oligonucleotide
  Antisense strand to SEQ ID NO: 2342708
ucuuacacaguuaguuacu

SEQ ID NO: 2342710 - RNA, 19 nt, Artificial Sequence
  Description of Artificial Sequence: Synthetic oligonucleotide
  Sense strand starting at position 1837 of SEQ ID NO: 1885443
guaacuaacuguguaagac

SEQ ID NO: 2342711 - RNA, 19 nt, Artificial Sequence
  Description of Artificial Sequence: Synthetic oligonucleotide
  Antisense strand to SEQ ID NO: 2342710
gucuuacacaguuaguuac

SEQ ID NO: 2342712 - RNA, 19 nt, Artificial Sequence
  Description of Artificial Sequence: Synthetic oligonucleotide
  Sense strand starting at position 1847 of SEQ ID NO: 1885443
guguaagacuuuccaguaa

SEQ ID NO: 2342713 - RNA, 19 nt, Artificial Sequence
  Description of Artificial Sequence: Synthetic oligonucleotide
  Antisense strand to SEQ ID NO: 2342712
uuacuggaaagucuuacac

SEQ ID NO: 2342714 - RNA, 19 nt, Artificial Sequence
  Description of Artificial Sequence: Synthetic oligonucleotide
  Sense strand starting at position 2006 of SEQ ID NO: 1885443
agggaauacugguuagcca

SEQ ID NO: 2342715 - RNA, 19 nt, Artificial Sequence
  Description of Artificial Sequence: Synthetic oligonucleotide
  Antisense strand to SEQ ID NO: 2342714
uggcuaaccaguauucccu

SEQ ID NO: 2342716 - RNA, 19 nt, Artificial Sequence
  Description of Artificial Sequence: Synthetic oligonucleotide
  Sense strand starting at position 2227 of SEQ ID NO: 1885443
ugcaaaguauucuaagauu

SEQ ID NO: 2342717 - RNA, 19 nt, Artificial Sequence
  Description of Artificial Sequence: Synthetic oligonucleotide
  Antisense strand to SEQ ID NO: 2342716
aaucuuagaauacuuugca

SEQ ID NO: 2342718 - RNA, 19 nt, Artificial Sequence
  Description of Artificial Sequence: Synthetic oligonucleotide
  Sense strand starting at position 2640 of SEQ ID NO: 1885443
gcggaucacccgagguguu

SEQ ID NO: 2342719 - RNA, 19 nt, Artificial Sequence
  Description of Artificial Sequence: Synthetic oligonucleotide
  Antisense strand to SEQ ID NO: 2342718
aacaccucgggugauccgc

SEQ ID NO: 2342720 - RNA, 19 nt, Artificial Sequence
  Description of Artificial Sequence: Synthetic oligonucleotide
  Sense strand starting at position 3079 of SEQ ID NO: 1885443
uuucuaucuucuguagugu

SEQ ID NO: 2342721 - RNA, 19 nt, Artificial Sequence
  Description of Artificial Sequence: Synthetic oligonucleotide
  Antisense strand to SEQ ID NO: 2342720
acacuacagaagauagaaa

SEQ ID NO: 2342722 - RNA, 19 nt, Artificial Sequence
  Description of Artificial Sequence: Synthetic oligonucleotide
  Sense strand starting at position 3111 of SEQ ID NO: 1885443
uuauguuuaccuugauguc

SEQ ID NO: 2342723 - RNA, 19 nt, Artificial Sequence
  Description of Artificial Sequence: Synthetic oligonucleotide
  Antisense strand to SEQ ID NO: 2342722
gacaucaagguaaacauaa

SEQ ID NO: 2342724 - RNA, 19 nt, Artificial Sequence
  Description of Artificial Sequence: Synthetic oligonucleotide
  Sense strand starting at position 3197 of SEQ ID NO: 1885443
uugguauagugaguauuaa

SEQ ID NO: 2342725 - RNA, 19 nt, Artificial Sequence
  Description of Artificial Sequence: Synthetic oligonucleotide
  Antisense strand to SEQ ID NO: 2342724
uuaauacucacuauaccaa

SEQ ID NO: 2342726 - RNA, 19 nt, Artificial Sequence
  Description of Artificial Sequence: Synthetic oligonucleotide
  Sense strand starting at position 3198 of SEQ ID NO: 1885443
ugguauagugaguauuaag

SEQ ID NO: 2342727 - RNA, 19 nt, Artificial Sequence
  Description of Artificial Sequence: Synthetic oligonucleotide
  Antisense strand to SEQ ID NO: 2342726
cuuaauacucacuauacca

SEQ ID NO: 2342728 - RNA, 19 nt, Artificial Sequence
  Description of Artificial Sequence: Synthetic oligonucleotide
  Sense strand starting at position 3279 of SEQ ID NO: 1885443
augguuacaugcuuauuau

SEQ ID NO: 2342729 - RNA, 19 nt, Artificial Sequence
  Description of Artificial Sequence: Synthetic oligonucleotide
  Antisense strand to SEQ ID NO: 2342728
auaauaagcauguaaccau

SEQ ID NO: 2342730 - RNA, 19 nt, Artificial Sequence
  Description of Artificial Sequence: Synthetic oligonucleotide
  Sense strand starting at position 3280 of SEQ ID NO: 1885443
ugguuacaugcuuauuauc

SEQ ID NO: 2342731 - RNA, 19 nt, Artificial Sequence
  Description of Artificial Sequence: Synthetic oligonucleotide
  Antisense strand to SEQ ID NO: 2342730
gauaauaagcauguaacca

SEQ ID NO: 2342732 - RNA, 19 nt, Artificial Sequence
  Description of Artificial Sequence: Synthetic oligonucleotide
  Sense strand starting at position 3282 of SEQ ID NO: 1885443
guuacaugcuuauuaucuu

SEQ ID NO: 2342733 - RNA, 19 nt, Artificial Sequence
  Description of Artificial Sequence: Synthetic oligonucleotide
  Antisense strand to SEQ ID NO: 2342732
aagauaauaagcauguaac

SEQ ID NO: 2342734 - RNA, 19 nt, Artificial Sequence
  Description of Artificial Sequence: Synthetic oligonucleotide
  Sense strand starting at position 3429 of SEQ ID NO: 1885443
acgaaauaagcuggguaga

SEQ ID NO: 2342735 - RNA, 19 nt, Artificial Sequence
  Description of Artificial Sequence: Synthetic oligonucleotide
  Antisense strand to SEQ ID NO: 2342734
ucuacccagcuuauuucgu

SEQ ID NO: 2342736 - RNA, 19 nt, Artificial Sequence
  Description of Artificial Sequence: Synthetic oligonucleotide
  Sense strand starting at position 3439 of SEQ ID NO: 1885443
cuggguagacgcuaguuau

SEQ ID NO: 2342737 - RNA, 19 nt, Artificial Sequence
  Description of Artificial Sequence: Synthetic oligonucleotide
  Antisense strand to SEQ ID NO: 2342736
auaacuagcgucuacccag

SEQ ID NO: 2342738 - RNA, 19 nt, Artificial Sequence
  Description of Artificial Sequence: Synthetic oligonucleotide
  Sense strand starting at position 3442 of SEQ ID NO: 1885443
gguagacgcuaguuauuua

SEQ ID NO: 2342739 - RNA, 19 nt, Artificial Sequence
  Description of Artificial Sequence: Synthetic oligonucleotide
  Antisense strand to SEQ ID NO: 2342738
uaaauaacuagcgucuacc

SEQ ID NO: 2342740 - RNA, 19 nt, Artificial Sequence
  Description of Artificial Sequence: Synthetic oligonucleotide
  Sense strand starting at position 3446 of SEQ ID NO: 1885443
gacgcuaguuauuuaauuc

SEQ ID NO: 2342741 - RNA, 19 nt, Artificial Sequence
  Description of Artificial Sequence: Synthetic oligonucleotide
  Antisense strand to SEQ ID NO: 2342740
gaauuaaauaacuagcguc

SEQ ID NO: 2342742 - RNA, 19 nt, Artificial Sequence
  Description of Artificial Sequence: Synthetic oligonucleotide
  Sense strand starting at position 3522 of SEQ ID NO: 1885443
gugccaugcuucucucaag

SEQ ID NO: 2342743 - RNA, 19 nt, Artificial Sequence
  Description of Artificial Sequence: Synthetic oligonucleotide
  Antisense strand to SEQ ID NO: 2342742
cuugagagaagcauggcac

SEQ ID NO: 2342744 - RNA, 19 nt, Artificial Sequence
  Description of Artificial Sequence: Synthetic oligonucleotide
  Sense strand starting at position 3529 of SEQ ID NO: 1885443
gcuucucucaaggaaggua

SEQ ID NO: 2342745 - RNA, 19 nt, Artificial Sequence
  Description of Artificial Sequence: Synthetic oligonucleotide
  Antisense strand to SEQ ID NO: 2342744
uaccuuccuugagagaagc

SEQ ID NO: 2342746 - RNA, 19 nt, Artificial Sequence
  Description of Artificial Sequence: Synthetic oligonucleotide
  Sense strand starting at position 3764 of SEQ ID NO: 1885443
gcaguuaguucuguugaaa

SEQ ID NO: 2342747 - RNA, 19 nt, Artificial Sequence
  Description of Artificial Sequence: Synthetic oligonucleotide
  Antisense strand to SEQ ID NO: 2342746
uuucaacagaacuaacugc

SEQ ID NO: 2342748 - RNA, 19 nt, Artificial Sequence
  Description of Artificial Sequence: Synthetic oligonucleotide
  Sense strand starting at position 3767 of SEQ ID NO: 1885443
guuaguucuguugaaaggu

SEQ ID NO: 2342749 - RNA, 19 nt, Artificial Sequence
  Description of Artificial Sequence: Synthetic oligonucleotide
  Antisense strand to SEQ ID NO: 2342748
accuuucaacagaacuaac

SEQ ID NO: 2342750 - RNA, 19 nt, Artificial Sequence
  Description of Artificial Sequence: Synthetic oligonucleotide
  Sense strand starting at position 3861 of SEQ ID NO: 1885443
agcagaacuugauacgaga

SEQ ID NO: 2342751 - RNA, 19 nt, Artificial Sequence
  Description of Artificial Sequence: Synthetic oligonucleotide
  Antisense strand to SEQ ID NO: 2342750
ucucguaucaaguucugcu

SEQ ID NO: 2342752 - RNA, 19 nt, Artificial Sequence
  Description of Artificial Sequence: Synthetic oligonucleotide
  Sense strand starting at position 3890 of SEQ ID NO: 1885443
guacccuuucucuaugaga

SEQ ID NO: 2342753 - RNA, 19 nt, Artificial Sequence
  Description of Artificial Sequence: Synthetic oligonucleotide
  Antisense strand to SEQ ID NO: 2342752
ucucauagagaaaggguac

SEQ ID NO: 2342754 - RNA, 19 nt, Artificial Sequence
  Description of Artificial Sequence: Synthetic oligonucleotide
  Sense strand starting at position 3964 of SEQ ID NO: 1885443
augccaagggcauguaauu

SEQ ID NO: 2342755 - RNA, 19 nt, Artificial Sequence
  Description of Artificial Sequence: Synthetic oligonucleotide
  Antisense strand to SEQ ID NO: 2342754
aauuacaugcccuuggcau

SEQ ID NO: 2342756 - RNA, 19 nt, Artificial Sequence
  Description of Artificial Sequence: Synthetic oligonucleotide
  Sense strand starting at position 68 of SEQ ID NO: 1885444
aggccaaagcuugagauca

SEQ ID NO: 2342757 - RNA, 19 nt, Artificial Sequence
  Description of Artificial Sequence: Synthetic oligonucleotide
  Antisense strand to SEQ ID NO: 2342756
ugaucucaagcuuuggccu

SEQ ID NO: 2342758 - RNA, 19 nt, Artificial Sequence
  Description of Artificial Sequence: Synthetic oligonucleotide
  Sense strand starting at position 174 of SEQ ID NO: 1885444
uuaaguucccaauacguau

SEQ ID NO: 2342759 - RNA, 19 nt, Artificial Sequence
  Description of Artificial Sequence: Synthetic oligonucleotide
  Antisense strand to SEQ ID NO: 2342758
auacguauugggaacuuaa

SEQ ID NO: 2342760 - RNA, 19 nt, Artificial Sequence
  Description of Artificial Sequence: Synthetic oligonucleotide
  Sense strand starting at position 189 of SEQ ID NO: 1885444
guauuuagguuuguuucca

SEQ ID NO: 2342761 - RNA, 19 nt, Artificial Sequence
  Description of Artificial Sequence: Synthetic oligonucleotide
  Antisense strand to SEQ ID NO: 2342760
uggaaacaaaccuaaauac

SEQ ID NO: 2342762 - RNA, 19 nt, Artificial Sequence
  Description of Artificial Sequence: Synthetic oligonucleotide
  Sense strand starting at position 193 of SEQ ID NO: 1885444
uuagguuuguuuccaauca

SEQ ID NO: 2342763 - RNA, 19 nt, Artificial Sequence
  Description of Artificial Sequence: Synthetic oligonucleotide
  Antisense strand to SEQ ID NO: 2342762
ugauuggaaacaaaccuaa

SEQ ID NO: 2342764 - RNA, 19 nt, Artificial Sequence
  Description of Artificial Sequence: Synthetic oligonucleotide
  Sense strand starting at position 285 of SEQ ID NO: 1885444
gggcaaacuccagauugcu

SEQ ID NO: 2342765 - RNA, 19 nt, Artificial Sequence
  Description of Artificial Sequence: Synthetic oligonucleotide
  Antisense strand to SEQ ID NO: 2342764
agcaaucuggaguuugccc

SEQ ID NO: 2342766 - RNA, 19 nt, Artificial Sequence
  Description of Artificial Sequence: Synthetic oligonucleotide
  Sense strand starting at position 760 of SEQ ID NO: 1885444
aggacauguucuucuugca

SEQ ID NO: 2342767 - RNA, 19 nt, Artificial Sequence
  Description of Artificial Sequence: Synthetic oligonucleotide
  Antisense strand to SEQ ID NO: 2342766
ugcaagaagaacauguccu

SEQ ID NO: 2342768 - RNA, 19 nt, Artificial Sequence
  Description of Artificial Sequence: Synthetic oligonucleotide
  Sense strand starting at position 1180 of SEQ ID NO: 1885444
ucuaguuaccagggaguuu

SEQ ID NO: 2342769 - RNA, 19 nt, Artificial Sequence
  Description of Artificial Sequence: Synthetic oligonucleotide
  Antisense strand to SEQ ID NO: 2342768
aaacucccugguaacuaga

SEQ ID NO: 2342770 - RNA, 19 nt, Artificial Sequence
  Description of Artificial Sequence: Synthetic oligonucleotide
  Sense strand starting at position 1181 of SEQ ID NO: 1885444
cuaguuaccagggaguuua

SEQ ID NO: 2342771 - RNA, 19 nt, Artificial Sequence
  Description of Artificial Sequence: Synthetic oligonucleotide
  Antisense strand to SEQ ID NO: 2342770
uaaacucccugguaacuag

SEQ ID NO: 2342772 - RNA, 19 nt, Artificial Sequence
  Description of Artificial Sequence: Synthetic oligonucleotide
  Sense strand starting at position 1189 of SEQ ID NO: 1885444
cagggaguuuaauuaacau

SEQ ID NO: 2342773 - RNA, 19 nt, Artificial Sequence
  Description of Artificial Sequence: Synthetic oligonucleotide
  Antisense strand to SEQ ID NO: 2342772
auguuaauuaaacucccug

SEQ ID NO: 2342774 - RNA, 19 nt, Artificial Sequence
  Description of Artificial Sequence: Synthetic oligonucleotide
  Sense strand starting at position 1249 of SEQ ID NO: 1885444
agacaaaguugcuuccacu

SEQ ID NO: 2342775 - RNA, 19 nt, Artificial Sequence
  Description of Artificial Sequence: Synthetic oligonucleotide
  Antisense strand to SEQ ID NO: 2342774
aguggaagcaacuuugucu

SEQ ID NO: 2342776 - RNA, 19 nt, Artificial Sequence
  Description of Artificial Sequence: Synthetic oligonucleotide
  Sense strand starting at position 1255 of SEQ ID NO: 1885444
aguugcuuccacugaauga

SEQ ID NO: 2342777 - RNA, 19 nt, Artificial Sequence
  Description of Artificial Sequence: Synthetic oligonucleotide
  Antisense strand to SEQ ID NO: 2342776
ucauucaguggaagcaacu

SEQ ID NO: 2342778 - RNA, 19 nt, Artificial Sequence
  Description of Artificial Sequence: Synthetic oligonucleotide
  Sense strand starting at position 1316 of SEQ ID NO: 1885444
uccguuguaggugaugaaa

SEQ ID NO: 2342779 - RNA, 19 nt, Artificial Sequence
  Description of Artificial Sequence: Synthetic oligonucleotide
  Antisense strand to SEQ ID NO: 2342778
uuucaucaccuacaacgga

SEQ ID NO: 2342780 - RNA, 19 nt, Artificial Sequence
  Description of Artificial Sequence: Synthetic oligonucleotide
  Sense strand starting at position 1441 of SEQ ID NO: 1885444
agaaguagucuccacugua

SEQ ID NO: 2342781 - RNA, 19 nt, Artificial Sequence
  Description of Artificial Sequence: Synthetic oligonucleotide
  Antisense strand to SEQ ID NO: 2342780
uacaguggagacuacuucu

SEQ ID NO: 2342782 - RNA, 19 nt, Artificial Sequence
  Description of Artificial Sequence: Synthetic oligonucleotide
  Sense strand starting at position 1444 of SEQ ID NO: 1885444
aguagucuccacuguagaa

SEQ ID NO: 2342783 - RNA, 19 nt, Artificial Sequence
  Description of Artificial Sequence: Synthetic oligonucleotide
  Antisense strand to SEQ ID NO: 2342782
uucuacaguggagacuacu

SEQ ID NO: 2342784 - RNA, 19 nt, Artificial Sequence
  Description of Artificial Sequence: Synthetic oligonucleotide
  Sense strand starting at position 1448 of SEQ ID NO: 1885444
gucuccacuguagaaguua

SEQ ID NO: 2342785 - RNA, 19 nt, Artificial Sequence
  Description of Artificial Sequence: Synthetic oligonucleotide
  Antisense strand to SEQ ID NO: 2342784
uaacuucuacaguggagac

SEQ ID NO: 2342786 - RNA, 19 nt, Artificial Sequence
  Description of Artificial Sequence: Synthetic oligonucleotide
  Sense strand starting at position 1461 of SEQ ID NO: 1885444
aaguuaauugaugaguagu

SEQ ID NO: 2342787 - RNA, 19 nt, Artificial Sequence
  Description of Artificial Sequence: Synthetic oligonucleotide
  Antisense strand to SEQ ID NO: 2342786
acuacucaucaauuaacuu

SEQ ID NO: 2342788 - RNA, 19 nt, Artificial Sequence
  Description of Artificial Sequence: Synthetic oligonucleotide
  Sense strand starting at position 1472 of SEQ ID NO: 1885444
ugaguaguagccuacaauc

SEQ ID NO: 2342789 - RNA, 19 nt, Artificial Sequence
  Description of Artificial Sequence: Synthetic oligonucleotide
  Antisense strand to SEQ ID NO: 2342788
gauuguaggcuacuacuca

SEQ ID NO: 2342790 - RNA, 19 nt, Artificial Sequence
  Description of Artificial Sequence: Synthetic oligonucleotide
  Sense strand starting at position 2084 of SEQ ID NO: 1885444
cucagauacugucugaaua

SEQ ID NO: 2342791 - RNA, 19 nt, Artificial Sequence
  Description of Artificial Sequence: Synthetic oligonucleotide
  Antisense strand to SEQ ID NO: 2342790
uauucagacaguaucugag

SEQ ID NO: 2342792 - RNA, 19 nt, Artificial Sequence
  Description of Artificial Sequence: Synthetic oligonucleotide
  Sense strand starting at position 2085 of SEQ ID NO: 1885444
ucagauacugucugaauaa

SEQ ID NO: 2342793 - RNA, 19 nt, Artificial Sequence
  Description of Artificial Sequence: Synthetic oligonucleotide
  Antisense strand to SEQ ID NO: 2342792
uuauucagacaguaucuga

SEQ ID NO: 2342794 - RNA, 19 nt, Artificial Sequence
  Description of Artificial Sequence: Synthetic oligonucleotide
  Sense strand starting at position 2108 of SEQ ID NO: 1885444
uuugguaagucaucuuaua

SEQ ID NO: 2342795 - RNA, 19 nt, Artificial Sequence
  Description of Artificial Sequence: Synthetic oligonucleotide
  Antisense strand to SEQ ID NO: 2342794
uauaagaugacuuaccaaa

SEQ ID NO: 2342796 - RNA, 19 nt, Artificial Sequence
  Description of Artificial Sequence: Synthetic oligonucleotide
  Sense strand starting at position 2119 of SEQ ID NO: 1885444
aucuuauacuguucuaagu

SEQ ID NO: 2342797 - RNA, 19 nt, Artificial Sequence
  Description of Artificial Sequence: Synthetic oligonucleotide
  Antisense strand to SEQ ID NO: 2342796
acuuagaacaguauaagau

SEQ ID NO: 2342798 - RNA, 19 nt, Artificial Sequence
  Description of Artificial Sequence: Synthetic oligonucleotide
  Sense strand starting at position 2135 of SEQ ID NO: 1885444
aguaauuucugucuacugu

SEQ ID NO: 2342799 - RNA, 19 nt, Artificial Sequence
  Description of Artificial Sequence: Synthetic oligonucleotide
  Antisense strand to SEQ ID NO: 2342798
acaguagacagaaauuacu

SEQ ID NO: 2342800 - RNA, 19 nt, Artificial Sequence
  Description of Artificial Sequence: Synthetic oligonucleotide
  Sense strand starting at position 2145 of SEQ ID NO: 1885444
gucuacuguugacucuaau

SEQ ID NO: 2342801 - RNA, 19 nt, Artificial Sequence
  Description of Artificial Sequence: Synthetic oligonucleotide
  Antisense strand to SEQ ID NO: 2342800
auuagagucaacaguagac

SEQ ID NO: 2342802 - RNA, 19 nt, Artificial Sequence
  Description of Artificial Sequence: Synthetic oligonucleotide
  Sense strand starting at position 2223 of SEQ ID NO: 1885444
gauaaugaaugccuuuguu

SEQ ID NO: 2342803 - RNA, 19 nt, Artificial Sequence
  Description of Artificial Sequence: Synthetic oligonucleotide
  Antisense strand to SEQ ID NO: 2342802
aacaaaggcauucauuauc

SEQ ID NO: 2342804 - RNA, 19 nt, Artificial Sequence
  Description of Artificial Sequence: Synthetic oligonucleotide
  Sense strand starting at position 2410 of SEQ ID NO: 1885444
gauacugauccauacguau

SEQ ID NO: 2342805 - RNA, 19 nt, Artificial Sequence
  Description of Artificial Sequence: Synthetic oligonucleotide
  Antisense strand to SEQ ID NO: 2342804
auacguauggaucaguauc

SEQ ID NO: 2342806 - RNA, 19 nt, Artificial Sequence
  Description of Artificial Sequence: Synthetic oligonucleotide
  Sense strand starting at position 2413 of SEQ ID NO: 1885444
acugauccauacguauaca

SEQ ID NO: 2342807 - RNA, 19 nt, Artificial Sequence
  Description of Artificial Sequence: Synthetic oligonucleotide
  Antisense strand to SEQ ID NO: 2342806
uguauacguauggaucagu

SEQ ID NO: 2342808 - RNA, 19 nt, Artificial Sequence
  Description of Artificial Sequence: Synthetic oligonucleotide
  Sense strand starting at position 2439 of SEQ ID NO: 1885444
augauuaugaagugaaagu

SEQ ID NO: 2342809 - RNA, 19 nt, Artificial Sequence
  Description of Artificial Sequence: Synthetic oligonucleotide
  Antisense strand to SEQ ID NO: 2342808
acuuucacuucauaaucau

SEQ ID NO: 2342810 - RNA, 19 nt, Artificial Sequence
  Description of Artificial Sequence: Synthetic oligonucleotide
  Sense strand starting at position 2461 of SEQ ID NO: 1885444
gccauaucuagaggaagau

SEQ ID NO: 2342811 - RNA, 19 nt, Artificial Sequence
  Description of Artificial Sequence: Synthetic oligonucleotide
  Antisense strand to SEQ ID NO: 2342810
aucuuccucuagauauggc

SEQ ID NO: 2342812 - RNA, 19 nt, Artificial Sequence
  Description of Artificial Sequence: Synthetic oligonucleotide
  Sense strand starting at position 2471 of SEQ ID NO: 1885444
gaggaagaucaaugguguu

SEQ ID NO: 2342813 - RNA, 19 nt, Artificial Sequence
  Description of Artificial Sequence: Synthetic oligonucleotide
  Antisense strand to SEQ ID NO: 2342812
aacaccauugaucuuccuc

SEQ ID NO: 2342814 - RNA, 19 nt, Artificial Sequence
  Description of Artificial Sequence: Synthetic oligonucleotide
  Sense strand starting at position 2477 of SEQ ID NO: 1885444
gaucaaugguguucucuga

SEQ ID NO: 2342815 - RNA, 19 nt, Artificial Sequence
  Description of Artificial Sequence: Synthetic oligonucleotide
  Antisense strand to SEQ ID NO: 2342814
ucagagaacaccauugauc

SEQ ID NO: 2342816 - RNA, 19 nt, Artificial Sequence
  Description of Artificial Sequence: Synthetic oligonucleotide
  Sense strand starting at position 2962 of SEQ ID NO: 1885444
acucauucucagugucaca

SEQ ID NO: 2342817 - RNA, 19 nt, Artificial Sequence
  Description of Artificial Sequence: Synthetic oligonucleotide
  Antisense strand to SEQ ID NO: 2342816
ugugacacugagaaugagu

SEQ ID NO: 2342818 - RNA, 19 nt, Artificial Sequence
  Description of Artificial Sequence: Synthetic oligonucleotide
  Sense strand starting at position 3290 of SEQ ID NO: 1885444
agcucugaugcucacuuau

SEQ ID NO: 2342819 - RNA, 19 nt, Artificial Sequence
  Description of Artificial Sequence: Synthetic oligonucleotide
  Antisense strand to SEQ ID NO: 2342818
auaagugagcaucagagcu

SEQ ID NO: 2342820 - RNA, 19 nt, Artificial Sequence
  Description of Artificial Sequence: Synthetic oligonucleotide
  Sense strand starting at position 3468 of SEQ ID NO: 1885444
ggaacauaaggcugacagu

SEQ ID NO: 2342821 - RNA, 19 nt, Artificial Sequence
  Description of Artificial Sequence: Synthetic oligonucleotide
  Antisense strand to SEQ ID NO: 2342820
acugucagccuuauguucc

SEQ ID NO: 2342822 - RNA, 19 nt, Artificial Sequence
  Description of Artificial Sequence: Synthetic oligonucleotide
  Sense strand starting at position 3474 of SEQ ID NO: 1885444
uaaggcugacagugauaga

SEQ ID NO: 2342823 - RNA, 19 nt, Artificial Sequence
  Description of Artificial Sequence: Synthetic oligonucleotide
  Antisense strand to SEQ ID NO: 2342822
ucuaucacugucagccuua

SEQ ID NO: 2342824 - RNA, 19 nt, Artificial Sequence
  Description of Artificial Sequence: Synthetic oligonucleotide
  Sense strand starting at position 3496 of SEQ ID NO: 1885444
uaucauacagucuggaagu

SEQ ID NO: 2342825 - RNA, 19 nt, Artificial Sequence
  Description of Artificial Sequence: Synthetic oligonucleotide
  Antisense strand to SEQ ID NO: 2342824
acuuccagacuguaugaua

SEQ ID NO: 2342826 - RNA, 19 nt, Artificial Sequence
  Description of Artificial Sequence: Synthetic oligonucleotide
  Sense strand starting at position 3498 of SEQ ID NO: 1885444
ucauacagucuggaaguau

SEQ ID NO: 2342827 - RNA, 19 nt, Artificial Sequence
  Description of Artificial Sequence: Synthetic oligonucleotide
  Antisense strand to SEQ ID NO: 2342826
auacuuccagacuguauga

SEQ ID NO: 2342828 - RNA, 19 nt, Artificial Sequence
  Description of Artificial Sequence: Synthetic oligonucleotide
  Sense strand starting at position 3665 of SEQ ID NO: 1885444
agaacacuuaggugguuaa

SEQ ID NO: 2342829 - RNA, 19 nt, Artificial Sequence
  Description of Artificial Sequence: Synthetic oligonucleotide
  Antisense strand to SEQ ID NO: 2342828
uuaaccaccuaaguguucu

SEQ ID NO: 2342830 - RNA, 19 nt, Artificial Sequence
  Description of Artificial Sequence: Synthetic oligonucleotide
  Sense strand starting at position 3668 of SEQ ID NO: 1885444
acacuuaggugguuaagca

SEQ ID NO: 2342831 - RNA, 19 nt, Artificial Sequence
  Description of Artificial Sequence: Synthetic oligonucleotide
  Antisense strand to SEQ ID NO: 2342830
ugcuuaaccaccuaagugu

SEQ ID NO: 2342832 - RNA, 19 nt, Artificial Sequence
  Description of Artificial Sequence: Synthetic oligonucleotide
  Sense strand starting at position 3709 of SEQ ID NO: 1885444
aaaugucaucugggaagca

SEQ ID NO: 2342833 - RNA, 19 nt, Artificial Sequence
  Description of Artificial Sequence: Synthetic oligonucleotide
  Antisense strand to SEQ ID NO: 2342832
ugcuucccagaugacauuu

SEQ ID NO: 2342834 - RNA, 19 nt, Artificial Sequence
  Description of Artificial Sequence: Synthetic oligonucleotide
  Sense strand starting at position 3878 of SEQ ID NO: 1885444
agguauuuaccugguaguu

SEQ ID NO: 2342835 - RNA, 19 nt, Artificial Sequence
  Description of Artificial Sequence: Synthetic oligonucleotide
  Antisense strand to SEQ ID NO: 2342834
aacuaccagguaaauaccu

SEQ ID NO: 2342836 - RNA, 19 nt, Artificial Sequence
  Description of Artificial Sequence: Synthetic oligonucleotide
  Sense strand starting at position 332 of SEQ ID NO: 1885445
cugaguaauuuguugcaca

SEQ ID NO: 2342837 - RNA, 19 nt, Artificial Sequence
  Description of Artificial Sequence: Synthetic oligonucleotide
  Antisense strand to SEQ ID NO: 2342836
ugugcaacaaauuacucag

SEQ ID NO: 2342838 - RNA, 19 nt, Artificial Sequence
  Description of Artificial Sequence: Synthetic oligonucleotide
  Sense strand starting at position 390 of SEQ ID NO: 1885445
uuugaauagcaaggacauu

SEQ ID NO: 2342839 - RNA, 19 nt, Artificial Sequence
  Description of Artificial Sequence: Synthetic oligonucleotide
  Antisense strand to SEQ ID NO: 2342838
aauguccuugcuauucaaa

SEQ ID NO: 2342840 - RNA, 19 nt, Artificial Sequence
  Description of Artificial Sequence: Synthetic oligonucleotide
  Sense strand starting at position 619 of SEQ ID NO: 1885445
gguggagcaggcuauuaaa

SEQ ID NO: 2342841 - RNA, 19 nt, Artificial Sequence
  Description of Artificial Sequence: Synthetic oligonucleotide
  Antisense strand to SEQ ID NO: 2342840
uuuaauagccugcuccacc

SEQ ID NO: 2342842 - RNA, 19 nt, Artificial Sequence
  Description of Artificial Sequence: Synthetic oligonucleotide
  Sense strand starting at position 684 of SEQ ID NO: 1885445
accuuaaagugcucucaga

SEQ ID NO: 2342843 - RNA, 19 nt, Artificial Sequence
  Description of Artificial Sequence: Synthetic oligonucleotide
  Antisense strand to SEQ ID NO: 2342842
ucugagagcacuuuaaggu

SEQ ID NO: 2342844 - RNA, 19 nt, Artificial Sequence
  Description of Artificial Sequence: Synthetic oligonucleotide
  Sense strand starting at position 1009 of SEQ ID NO: 1885445
guaugccuugauuacuuaa

SEQ ID NO: 2342845 - RNA, 19 nt, Artificial Sequence
  Description of Artificial Sequence: Synthetic oligonucleotide
  Antisense strand to SEQ ID NO: 2342844
uuaaguaaucaaggcauac

SEQ ID NO: 2342846 - RNA, 19 nt, Artificial Sequence
  Description of Artificial Sequence: Synthetic oligonucleotide
  Sense strand starting at position 1081 of SEQ ID NO: 1885445
uuaacucucuuugaugaga

SEQ ID NO: 2342847 - RNA, 19 nt, Artificial Sequence
  Description of Artificial Sequence: Synthetic oligonucleotide
  Antisense strand to SEQ ID NO: 2342846
ucucaucaaagagaguuaa

SEQ ID NO: 2342848 - RNA, 19 nt, Artificial Sequence
  Description of Artificial Sequence: Synthetic oligonucleotide
  Sense strand starting at position 1086 of SEQ ID NO: 1885445
ucucuuugaugagaugaug

SEQ ID NO: 2342849 - RNA, 19 nt, Artificial Sequence
  Description of Artificial Sequence: Synthetic oligonucleotide
  Antisense strand to SEQ ID NO: 2342848
caucaucucaucaaagaga

SEQ ID NO: 2342850 - RNA, 19 nt, Artificial Sequence
  Description of Artificial Sequence: Synthetic oligonucleotide
  Sense strand starting at position 1094 of SEQ ID NO: 1885445
augagaugauggucucuua

SEQ ID NO: 2342851 - RNA, 19 nt, Artificial Sequence
  Description of Artificial Sequence: Synthetic oligonucleotide
  Antisense strand to SEQ ID NO: 2342850
uaagagaccaucaucucau

SEQ ID NO: 2342852 - RNA, 19 nt, Artificial Sequence
  Description of Artificial Sequence: Synthetic oligonucleotide
  Sense strand starting at position 1097 of SEQ ID NO: 1885445
agaugauggucucuuaaac

SEQ ID NO: 2342853 - RNA, 19 nt, Artificial Sequence
  Description of Artificial Sequence: Synthetic oligonucleotide
  Antisense strand to SEQ ID NO: 2342852
guuuaagagaccaucaucu

SEQ ID NO: 2342854 - RNA, 19 nt, Artificial Sequence
  Description of Artificial Sequence: Synthetic oligonucleotide
  Sense strand starting at position 1496 of SEQ ID NO: 1885445
cuuaguaacuaacugugua

SEQ ID NO: 2342855 - RNA, 19 nt, Artificial Sequence
  Description of Artificial Sequence: Synthetic oligonucleotide
  Antisense strand to SEQ ID NO: 2342854
uacacaguuaguuacuaag

SEQ ID NO: 2342856 - RNA, 19 nt, Artificial Sequence
  Description of Artificial Sequence: Synthetic oligonucleotide
  Sense strand starting at position 1499 of SEQ ID NO: 1885445
aguaacuaacuguguaaga

SEQ ID NO: 2342857 - RNA, 19 nt, Artificial Sequence
  Description of Artificial Sequence: Synthetic oligonucleotide
  Antisense strand to SEQ ID NO: 2342856
ucuuacacaguuaguuacu

SEQ ID NO: 2342858 - RNA, 19 nt, Artificial Sequence
  Description of Artificial Sequence: Synthetic oligonucleotide
  Sense strand starting at position 1500 of SEQ ID NO: 1885445
guaacuaacuguguaagac

SEQ ID NO: 2342859 - RNA, 19 nt, Artificial Sequence
  Description of Artificial Sequence: Synthetic oligonucleotide
  Antisense strand to SEQ ID NO: 2342858
gucuuacacaguuaguuac

SEQ ID NO: 2342860 - RNA, 19 nt, Artificial Sequence
  Description of Artificial Sequence: Synthetic oligonucleotide
  Sense strand starting at position 1510 of SEQ ID NO: 1885445
guguaagacuuuccaguaa

SEQ ID NO: 2342861 - RNA, 19 nt, Artificial Sequence
  Description of Artificial Sequence: Synthetic oligonucleotide
  Antisense strand to SEQ ID NO: 2342860
uuacuggaaagucuuacac

SEQ ID NO: 2342862 - RNA, 19 nt, Artificial Sequence
  Description of Artificial Sequence: Synthetic oligonucleotide
  Sense strand starting at position 1669 of SEQ ID NO: 1885445
agggaauacugguuagcca

SEQ ID NO: 2342863 - RNA, 19 nt, Artificial Sequence
  Description of Artificial Sequence: Synthetic oligonucleotide
  Antisense strand to SEQ ID NO: 2342862
uggcuaaccaguauucccu

SEQ ID NO: 2342864 - RNA, 19 nt, Artificial Sequence
  Description of Artificial Sequence: Synthetic oligonucleotide
  Sense strand starting at position 1890 of SEQ ID NO: 1885445
ugcaaaguauucuaagauu

SEQ ID NO: 2342865 - RNA, 19 nt, Artificial Sequence
  Description of Artificial Sequence: Synthetic oligonucleotide
  Antisense strand to SEQ ID NO: 2342864
aaucuuagaauacuuugca

SEQ ID NO: 2342866 - RNA, 19 nt, Artificial Sequence
  Description of Artificial Sequence: Synthetic oligonucleotide
  Sense strand starting at position 2303 of SEQ ID NO: 1885445
gcggaucacccgagguguu

SEQ ID NO: 2342867 - RNA, 19 nt, Artificial Sequence
  Description of Artificial Sequence: Synthetic oligonucleotide
  Antisense strand to SEQ ID NO: 2342866
aacaccucgggugauccgc

SEQ ID NO: 2342868 - RNA, 19 nt, Artificial Sequence
  Description of Artificial Sequence: Synthetic oligonucleotide
  Sense strand starting at position 2742 of SEQ ID NO: 1885445
uuucuaucuucuguagugu

SEQ ID NO: 2342869 - RNA, 19 nt, Artificial Sequence
  Description of Artificial Sequence: Synthetic oligonucleotide
  Antisense strand to SEQ ID NO: 2342868
acacuacagaagauagaaa

SEQ ID NO: 2342870 - RNA, 19 nt, Artificial Sequence
  Description of Artificial Sequence: Synthetic oligonucleotide
  Sense strand starting at position 2774 of SEQ ID NO: 1885445
uuauguuuaccuugauguc

SEQ ID NO: 2342871 - RNA, 19 nt, Artificial Sequence
  Description of Artificial Sequence: Synthetic oligonucleotide
  Antisense strand to SEQ ID NO: 2342870
gacaucaagguaaacauaa

SEQ ID NO: 2342872 - RNA, 19 nt, Artificial Sequence
  Description of Artificial Sequence: Synthetic oligonucleotide
  Sense strand starting at position 2860 of SEQ ID NO: 1885445
uugguauagugaguauuaa

SEQ ID NO: 2342873 - RNA, 19 nt, Artificial Sequence
  Description of Artificial Sequence: Synthetic oligonucleotide
  Antisense strand to SEQ ID NO: 2342872
uuaauacucacuauaccaa

SEQ ID NO: 2342874 - RNA, 19 nt, Artificial Sequence
  Description of Artificial Sequence: Synthetic oligonucleotide
  Sense strand starting at position 2861 of SEQ ID NO: 1885445
ugguauagugaguauuaag

SEQ ID NO: 2342875 - RNA, 19 nt, Artificial Sequence
  Description of Artificial Sequence: Synthetic oligonucleotide
  Antisense strand to SEQ ID NO: 2342874
cuuaauacucacuauacca

SEQ ID NO: 2342876 - RNA, 19 nt, Artificial Sequence
  Description of Artificial Sequence: Synthetic oligonucleotide
  Sense strand starting at position 2942 of SEQ ID NO: 1885445
augguuacaugcuuauuau

SEQ ID NO: 2342877 - RNA, 19 nt, Artificial Sequence
  Description of Artificial Sequence: Synthetic oligonucleotide
  Antisense strand to SEQ ID NO: 2342876
auaauaagcauguaaccau

SEQ ID NO: 2342878 - RNA, 19 nt, Artificial Sequence
  Description of Artificial Sequence: Synthetic oligonucleotide
  Sense strand starting at position 2943 of SEQ ID NO: 1885445
ugguuacaugcuuauuauc

SEQ ID NO: 2342879 - RNA, 19 nt, Artificial Sequence
  Description of Artificial Sequence: Synthetic oligonucleotide
  Antisense strand to SEQ ID NO: 2342878
gauaauaagcauguaacca

SEQ ID NO: 2342880 - RNA, 19 nt, Artificial Sequence
  Description of Artificial Sequence: Synthetic oligonucleotide
  Sense strand starting at position 2945 of SEQ ID NO: 1885445
guuacaugcuuauuaucuu

SEQ ID NO: 2342881 - RNA, 19 nt, Artificial Sequence
  Description of Artificial Sequence: Synthetic oligonucleotide
  Antisense strand to SEQ ID NO: 2342880
aagauaauaagcauguaac

SEQ ID NO: 2342882 - RNA, 19 nt, Artificial Sequence
  Description of Artificial Sequence: Synthetic oligonucleotide
  Sense strand starting at position 3092 of SEQ ID NO: 1885445
acgaaauaagcuggguaga

SEQ ID NO: 2342883 - RNA, 19 nt, Artificial Sequence
  Description of Artificial Sequence: Synthetic oligonucleotide
  Antisense strand to SEQ ID NO: 2342882
ucuacccagcuuauuucgu

SEQ ID NO: 2342884 - RNA, 19 nt, Artificial Sequence
  Description of Artificial Sequence: Synthetic oligonucleotide
  Sense strand starting at position 3102 of SEQ ID NO: 1885445
cuggguagacgcuaguuau

SEQ ID NO: 2342885 - RNA, 19 nt, Artificial Sequence
  Description of Artificial Sequence: Synthetic oligonucleotide
  Antisense strand to SEQ ID NO: 2342884
auaacuagcgucuacccag

SEQ ID NO: 2342886 - RNA, 19 nt, Artificial Sequence
  Description of Artificial Sequence: Synthetic oligonucleotide
  Sense strand starting at position 3105 of SEQ ID NO: 1885445
gguagacgcuaguuauuua

SEQ ID NO: 2342887 - RNA, 19 nt, Artificial Sequence
  Description of Artificial Sequence: Synthetic oligonucleotide
  Antisense strand to SEQ ID NO: 2342886
uaaauaacuagcgucuacc

SEQ ID NO: 2342888 - RNA, 19 nt, Artificial Sequence
  Description of Artificial Sequence: Synthetic oligonucleotide
  Sense strand starting at position 3109 of SEQ ID NO: 1885445
gacgcuaguuauuuaauuc

SEQ ID NO: 2342889 - RNA, 19 nt, Artificial Sequence
  Description of Artificial Sequence: Synthetic oligonucleotide
  Antisense strand to SEQ ID NO: 2342888
gaauuaaauaacuagcguc

SEQ ID NO: 2342890 - RNA, 19 nt, Artificial Sequence
  Description of Artificial Sequence: Synthetic oligonucleotide
  Sense strand starting at position 3185 of SEQ ID NO: 1885445
gugccaugcuucucucaag

SEQ ID NO: 2342891 - RNA, 19 nt, Artificial Sequence
  Description of Artificial Sequence: Synthetic oligonucleotide
  Antisense strand to SEQ ID NO: 2342890
cuugagagaagcauggcac

SEQ ID NO: 2342892 - RNA, 19 nt, Artificial Sequence
  Description of Artificial Sequence: Synthetic oligonucleotide
  Sense strand starting at position 3192 of SEQ ID NO: 1885445
gcuucucucaaggaaggua

SEQ ID NO: 2342893 - RNA, 19 nt, Artificial Sequence
  Description of Artificial Sequence: Synthetic oligonucleotide
  Antisense strand to SEQ ID NO: 2342892
uaccuuccuugagagaagc

SEQ ID NO: 2342894 - RNA, 19 nt, Artificial Sequence
  Description of Artificial Sequence: Synthetic oligonucleotide
  Sense strand starting at position 3427 of SEQ ID NO: 1885445
gcaguuaguucuguugaaa

SEQ ID NO: 2342895 - RNA, 19 nt, Artificial Sequence
  Description of Artificial Sequence: Synthetic oligonucleotide
  Antisense strand to SEQ ID NO: 2342894
uuucaacagaacuaacugc

SEQ ID NO: 2342896 - RNA, 19 nt, Artificial Sequence
  Description of Artificial Sequence: Synthetic oligonucleotide
  Sense strand starting at position 3430 of SEQ ID NO: 1885445
guuaguucuguugaaaggu

SEQ ID NO: 2342897 - RNA, 19 nt, Artificial Sequence
  Description of Artificial Sequence: Synthetic oligonucleotide
  Antisense strand to SEQ ID NO: 2342896
accuuucaacagaacuaac

SEQ ID NO: 2342898 - RNA, 19 nt, Artificial Sequence
  Description of Artificial Sequence: Synthetic oligonucleotide
  Sense strand starting at position 3524 of SEQ ID NO: 1885445
agcagaacuugauacgaga

SEQ ID NO: 2342899 - RNA, 19 nt, Artificial Sequence
  Description of Artificial Sequence: Synthetic oligonucleotide
  Antisense strand to SEQ ID NO: 2342898
ucucguaucaaguucugcu

SEQ ID NO: 2342900 - RNA, 19 nt, Artificial Sequence
  Description of Artificial Sequence: Synthetic oligonucleotide
  Sense strand starting at position 3553 of SEQ ID NO: 1885445
guacccuuucucuaugaga

SEQ ID NO: 2342901 - RNA, 19 nt, Artificial Sequence
  Description of Artificial Sequence: Synthetic oligonucleotide
  Antisense strand to SEQ ID NO: 2342900
ucucauagagaaaggguac

SEQ ID NO: 2342902 - RNA, 19 nt, Artificial Sequence
  Description of Artificial Sequence: Synthetic oligonucleotide
  Sense strand starting at position 3627 of SEQ ID NO: 1885445
augccaagggcauguaauu

SEQ ID NO: 2342903 - RNA, 19 nt, Artificial Sequence
  Description of Artificial Sequence: Synthetic oligonucleotide
  Antisense strand to SEQ ID NO: 2342902
aauuacaugcccuuggcau

SEQ ID NO: 2342904 - RNA, 19 nt, Artificial Sequence
  Description of Artificial Sequence: Synthetic oligonucleotide
  Sense strand starting at position 3636 of SEQ ID NO: 1885445
gcauguaauuacuaacuag

SEQ ID NO: 2342905 - RNA, 19 nt, Artificial Sequence
  Description of Artificial Sequence: Synthetic oligonucleotide
  Antisense strand to SEQ ID NO: 2342904
cuaguuaguaauuacaugc

SEQ ID NO: 2342906 - RNA, 19 nt, Artificial Sequence
  Description of Artificial Sequence: Synthetic oligonucleotide
  Sense strand starting at position 3655 of SEQ ID NO: 1885445
aagauaauuuaguggagaa

SEQ ID NO: 2342907 - RNA, 19 nt, Artificial Sequence
  Description of Artificial Sequence: Synthetic oligonucleotide
  Antisense strand to SEQ ID NO: 2342906
uucuccacuaaauuaucuu

SEQ ID NO: 2342908 - RNA, 19 nt, Artificial Sequence
  Description of Artificial Sequence: Synthetic oligonucleotide
  Sense strand starting at position 3737 of SEQ ID NO: 1885445
gaugguguaucucaaacau

SEQ ID NO: 2342909 - RNA, 19 nt, Artificial Sequence
  Description of Artificial Sequence: Synthetic oligonucleotide
  Antisense strand to SEQ ID NO: 2342908
auguuugagauacaccauc

SEQ ID NO: 2342910 - RNA, 19 nt, Artificial Sequence
  Description of Artificial Sequence: Synthetic oligonucleotide
  Sense strand starting at position 3797 of SEQ ID NO: 1885445
cugauuauuuacuacgaac

SEQ ID NO: 2342911 - RNA, 19 nt, Artificial Sequence
  Description of Artificial Sequence: Synthetic oligonucleotide
  Antisense strand to SEQ ID NO: 2342910
guucguaguaaauaaucag

SEQ ID NO: 2342912 - RNA, 19 nt, Artificial Sequence
  Description of Artificial Sequence: Synthetic oligonucleotide
  Sense strand starting at position 3800 of SEQ ID NO: 1885445
auuauuuacuacgaacgua

SEQ ID NO: 2342913 - RNA, 19 nt, Artificial Sequence
  Description of Artificial Sequence: Synthetic oligonucleotide
  Antisense strand to SEQ ID NO: 2342912
uacguucguaguaaauaau

SEQ ID NO: 2342914 - RNA, 19 nt, Artificial Sequence
  Description of Artificial Sequence: Synthetic oligonucleotide
  Sense strand starting at position 3946 of SEQ ID NO: 1885445
cacuuucguagcugaggua

SEQ ID NO: 2342915 - RNA, 19 nt, Artificial Sequence
  Description of Artificial Sequence: Synthetic oligonucleotide
  Antisense strand to SEQ ID NO: 2342914
uaccucagcuacgaaagug

SEQ ID NO: 2342916 - RNA, 19 nt, Artificial Sequence
  Description of Artificial Sequence: Synthetic oligonucleotide
  Sense strand starting at position 1072 of SEQ ID NO: 1885446
gccuaaaccugcucucaag

SEQ ID NO: 2342917 - RNA, 19 nt, Artificial Sequence
  Description of Artificial Sequence: Synthetic oligonucleotide
  Antisense strand to SEQ ID NO: 2342916
cuugagagcagguuuaggc

SEQ ID NO: 2342918 - RNA, 19 nt, Artificial Sequence
  Description of Artificial Sequence: Synthetic oligonucleotide
  Sense strand starting at position 2132 of SEQ ID NO: 1885446
aucugcuucugucaaauga

SEQ ID NO: 2342919 - RNA, 19 nt, Artificial Sequence
  Description of Artificial Sequence: Synthetic oligonucleotide
  Antisense strand to SEQ ID NO: 2342918
ucauuugacagaagcagau

SEQ ID NO: 2342920 - RNA, 19 nt, Artificial Sequence
  Description of Artificial Sequence: Synthetic oligonucleotide
  Sense strand starting at position 2234 of SEQ ID NO: 1885446
gcucaacuucgaggagucu

SEQ ID NO: 2342921 - RNA, 19 nt, Artificial Sequence
  Description of Artificial Sequence: Synthetic oligonucleotide
  Antisense strand to SEQ ID NO: 2342920
agacuccucgaaguugagc

SEQ ID NO: 2342922 - RNA, 19 nt, Artificial Sequence
  Description of Artificial Sequence: Synthetic oligonucleotide
  Sense strand starting at position 2245 of SEQ ID NO: 1885446
aggagucuccgcgacgcaa

SEQ ID NO: 2342923 - RNA, 19 nt, Artificial Sequence
  Description of Artificial Sequence: Synthetic oligonucleotide
  Antisense strand to SEQ ID NO: 2342922
uugcgucgcggagacuccu

SEQ ID NO: 2342924 - RNA, 19 nt, Artificial Sequence
  Description of Artificial Sequence: Synthetic oligonucleotide
  Sense strand starting at position 2429 of SEQ ID NO: 1885446
guuagagugucccagagac

SEQ ID NO: 2342925 - RNA, 19 nt, Artificial Sequence
  Description of Artificial Sequence: Synthetic oligonucleotide
  Antisense strand to SEQ ID NO: 2342924
gucucugggacacucuaac

SEQ ID NO: 2342926 - RNA, 19 nt, Artificial Sequence
  Description of Artificial Sequence: Synthetic oligonucleotide
  Sense strand starting at position 2801 of SEQ ID NO: 1885446
aguggaaacugcucacaga

SEQ ID NO: 2342927 - RNA, 19 nt, Artificial Sequence
  Description of Artificial Sequence: Synthetic oligonucleotide
  Antisense strand to SEQ ID NO: 2342926
ucugugagcaguuuccacu

SEQ ID NO: 2342928 - RNA, 19 nt, Artificial Sequence
  Description of Artificial Sequence: Synthetic oligonucleotide
  Sense strand starting at position 3365 of SEQ ID NO: 1885446
gcuacaugaucccgugcaa

SEQ ID NO: 2342929 - RNA, 19 nt, Artificial Sequence
  Description of Artificial Sequence: Synthetic oligonucleotide
  Antisense strand to SEQ ID NO: 2342928
uugcacgggaucauguagc

SEQ ID NO: 2342930 - RNA, 19 nt, Artificial Sequence
  Description of Artificial Sequence: Synthetic oligonucleotide
  Sense strand starting at position 3597 of SEQ ID NO: 1885446
cccgguuuguauguacaua

SEQ ID NO: 2342931 - RNA, 19 nt, Artificial Sequence
  Description of Artificial Sequence: Synthetic oligonucleotide
  Antisense strand to SEQ ID NO: 2342930
uauguacauacaaaccggg

SEQ ID NO: 2342932 - RNA, 19 nt, Artificial Sequence
  Description of Artificial Sequence: Synthetic oligonucleotide
  Sense strand starting at position 3688 of SEQ ID NO: 1885446
cgagcaggccugugaauuc

SEQ ID NO: 2342933 - RNA, 19 nt, Artificial Sequence
  Description of Artificial Sequence: Synthetic oligonucleotide
  Antisense strand to SEQ ID NO: 2342932
gaauucacaggccugcucg

SEQ ID NO: 2342934 - RNA, 19 nt, Artificial Sequence
  Description of Artificial Sequence: Synthetic oligonucleotide
  Sense strand starting at position 3695 of SEQ ID NO: 1885446
gccugugaauucgcaggau

SEQ ID NO: 2342935 - RNA, 19 nt, Artificial Sequence
  Description of Artificial Sequence: Synthetic oligonucleotide
  Antisense strand to SEQ ID NO: 2342934
auccugcgaauucacaggc

SEQ ID NO: 2342936 - RNA, 19 nt, Artificial Sequence
  Description of Artificial Sequence: Synthetic oligonucleotide
  Sense strand starting at position 3698 of SEQ ID NO: 1885446
ugugaauucgcaggaucau

SEQ ID NO: 2342937 - RNA, 19 nt, Artificial Sequence
  Description of Artificial Sequence: Synthetic oligonucleotide
  Antisense strand to SEQ ID NO: 2342936
augauccugcgaauucaca

SEQ ID NO: 2342938 - RNA, 19 nt, Artificial Sequence
  Description of Artificial Sequence: Synthetic oligonucleotide
  Sense strand starting at position 3699 of SEQ ID NO: 1885446
gugaauucgcaggaucauu

SEQ ID NO: 2342939 - RNA, 19 nt, Artificial Sequence
  Description of Artificial Sequence: Synthetic oligonucleotide
  Antisense strand to SEQ ID NO: 2342938
aaugauccugcgaauucac

SEQ ID NO: 2342940 - RNA, 19 nt, Artificial Sequence
  Description of Artificial Sequence: Synthetic oligonucleotide
  Sense strand starting at position 3967 of SEQ ID NO: 1885446
guucaaaugugaggucuga

SEQ ID NO: 2342941 - RNA, 19 nt, Artificial Sequence
  Description of Artificial Sequence: Synthetic oligonucleotide
  Antisense strand to SEQ ID NO: 2342940
ucagaccucacauuugaac

SEQ ID NO: 2342942 - RNA, 19 nt, Artificial Sequence
  Description of Artificial Sequence: Synthetic oligonucleotide
  Sense strand starting at position 3971 of SEQ ID NO: 1885446
aaaugugaggucugaaaug

SEQ ID NO: 2342943 - RNA, 19 nt, Artificial Sequence
  Description of Artificial Sequence: Synthetic oligonucleotide
  Antisense strand to SEQ ID NO: 2342942
cauuucagaccucacauuu

SEQ ID NO: 2342944 - RNA, 19 nt, Artificial Sequence
  Description of Artificial Sequence: Synthetic oligonucleotide
  Sense strand starting at position 68 of SEQ ID NO: 1885447
ggcaucucacaaugagaau

SEQ ID NO: 2342945 - RNA, 19 nt, Artificial Sequence
  Description of Artificial Sequence: Synthetic oligonucleotide
  Antisense strand to SEQ ID NO: 2342944
auucucauugugagaugcc

SEQ ID NO: 2342946 - RNA, 19 nt, Artificial Sequence
  Description of Artificial Sequence: Synthetic oligonucleotide
  Sense strand starting at position 87 of SEQ ID NO: 1885447
guaccacagugguuuacaa

SEQ ID NO: 2342947 - RNA, 19 nt, Artificial Sequence
  Description of Artificial Sequence: Synthetic oligonucleotide
  Antisense strand to SEQ ID NO: 2342946
uuguaaaccacugugguac

SEQ ID NO: 2342948 - RNA, 19 nt, Artificial Sequence
  Description of Artificial Sequence: Synthetic oligonucleotide
  Sense strand starting at position 242 of SEQ ID NO: 1885447
augaaugaguaucugagua

SEQ ID NO: 2342949 - RNA, 19 nt, Artificial Sequence
  Description of Artificial Sequence: Synthetic oligonucleotide
  Antisense strand to SEQ ID NO: 2342948
uacucagauacucauucau

SEQ ID NO: 2342950 - RNA, 19 nt, Artificial Sequence
  Description of Artificial Sequence: Synthetic oligonucleotide
  Sense strand starting at position 246 of SEQ ID NO: 1885447
augaguaucugaguaaaca

SEQ ID NO: 2342951 - RNA, 19 nt, Artificial Sequence
  Description of Artificial Sequence: Synthetic oligonucleotide
  Antisense strand to SEQ ID NO: 2342950
uguuuacucagauacucau

SEQ ID NO: 2342952 - RNA, 19 nt, Artificial Sequence
  Description of Artificial Sequence: Synthetic oligonucleotide
  Sense strand starting at position 289 of SEQ ID NO: 1885447
guacuauuguagcuacaaa

SEQ ID NO: 2342953 - RNA, 19 nt, Artificial Sequence
  Description of Artificial Sequence: Synthetic oligonucleotide
  Antisense strand to SEQ ID NO: 2342952
uuuguagcuacaauaguac

SEQ ID NO: 2342954 - RNA, 19 nt, Artificial Sequence
  Description of Artificial Sequence: Synthetic oligonucleotide
  Sense strand starting at position 409 of SEQ ID NO: 1885447
cuagcacaucuccauguau

SEQ ID NO: 2342955 - RNA, 19 nt, Artificial Sequence
  Description of Artificial Sequence: Synthetic oligonucleotide
  Antisense strand to SEQ ID NO: 2342954
auacauggagaugugcuag

SEQ ID NO: 2342956 - RNA, 19 nt, Artificial Sequence
  Description of Artificial Sequence: Synthetic oligonucleotide
  Sense strand starting at position 411 of SEQ ID NO: 1885447
agcacaucuccauguauga

SEQ ID NO: 2342957 - RNA, 19 nt, Artificial Sequence
  Description of Artificial Sequence: Synthetic oligonucleotide
  Antisense strand to SEQ ID NO: 2342956
ucauacauggagaugugcu

SEQ ID NO: 2342958 - RNA, 19 nt, Artificial Sequence
  Description of Artificial Sequence: Synthetic oligonucleotide
  Sense strand starting at position 462 of SEQ ID NO: 1885447
ucucuaguccuuugugaaa

SEQ ID NO: 2342959 - RNA, 19 nt, Artificial Sequence
  Description of Artificial Sequence: Synthetic oligonucleotide
  Antisense strand to SEQ ID NO: 2342958
uuucacaaaggacuagaga

SEQ ID NO: 2342960 - RNA, 19 nt, Artificial Sequence
  Description of Artificial Sequence: Synthetic oligonucleotide
  Sense strand starting at position 498 of SEQ ID NO: 1885447
aguagaacugucugcauuu

SEQ ID NO: 2342961 - RNA, 19 nt, Artificial Sequence
  Description of Artificial Sequence: Synthetic oligonucleotide
  Antisense strand to SEQ ID NO: 2342960
aaaugcagacaguucuacu

SEQ ID NO: 2342962 - RNA, 19 nt, Artificial Sequence
  Description of Artificial Sequence: Synthetic oligonucleotide
  Sense strand starting at position 518 of SEQ ID NO: 1885447
uagugcugggccuaauauu

SEQ ID NO: 2342963 - RNA, 19 nt, Artificial Sequence
  Description of Artificial Sequence: Synthetic oligonucleotide
  Antisense strand to SEQ ID NO: 2342962
aauauuaggcccagcacua

SEQ ID NO: 2342964 - RNA, 19 nt, Artificial Sequence
  Description of Artificial Sequence: Synthetic oligonucleotide
  Sense strand starting at position 612 of SEQ ID NO: 1885447
auucguuucguggauccaa

SEQ ID NO: 2342965 - RNA, 19 nt, Artificial Sequence
  Description of Artificial Sequence: Synthetic oligonucleotide
  Antisense strand to SEQ ID NO: 2342964
uuggauccacgaaacgaau

SEQ ID NO: 2342966 - RNA, 19 nt, Artificial Sequence
  Description of Artificial Sequence: Synthetic oligonucleotide
  Sense strand starting at position 625 of SEQ ID NO: 1885447
auccaaaucugguucugua

SEQ ID NO: 2342967 - RNA, 19 nt, Artificial Sequence
  Description of Artificial Sequence: Synthetic oligonucleotide
  Antisense strand to SEQ ID NO: 2342966
uacagaaccagauuuggau

SEQ ID NO: 2342968 - RNA, 19 nt, Artificial Sequence
  Description of Artificial Sequence: Synthetic oligonucleotide
  Sense strand starting at position 1103 of SEQ ID NO: 1885447
aaagcagagcauuaaggua

SEQ ID NO: 2342969 - RNA, 19 nt, Artificial Sequence
  Description of Artificial Sequence: Synthetic oligonucleotide
  Antisense strand to SEQ ID NO: 2342968
uaccuuaaugcucugcuuu

SEQ ID NO: 2342970 - RNA, 19 nt, Artificial Sequence
  Description of Artificial Sequence: Synthetic oligonucleotide
  Sense strand starting at position 1115 of SEQ ID NO: 1885447
uaagguauuaaguagguga

SEQ ID NO: 2342971 - RNA, 19 nt, Artificial Sequence
  Description of Artificial Sequence: Synthetic oligonucleotide
  Antisense strand to SEQ ID NO: 2342970
ucaccuacuuaauaccuua

SEQ ID NO: 2342972 - RNA, 19 nt, Artificial Sequence
  Description of Artificial Sequence: Synthetic oligonucleotide
  Sense strand starting at position 1117 of SEQ ID NO: 1885447
agguauuaaguaggugaua

SEQ ID NO: 2342973 - RNA, 19 nt, Artificial Sequence
  Description of Artificial Sequence: Synthetic oligonucleotide
  Antisense strand to SEQ ID NO: 2342972
uaucaccuacuuaauaccu

SEQ ID NO: 2342974 - RNA, 19 nt, Artificial Sequence
  Description of Artificial Sequence: Synthetic oligonucleotide
  Sense strand starting at position 1118 of SEQ ID NO: 1885447
gguauuaaguaggugauag

SEQ ID NO: 2342975 - RNA, 19 nt, Artificial Sequence
  Description of Artificial Sequence: Synthetic oligonucleotide
  Antisense strand to SEQ ID NO: 2342974
cuaucaccuacuuaauacc

SEQ ID NO: 2342976 - RNA, 19 nt, Artificial Sequence
  Description of Artificial Sequence: Synthetic oligonucleotide
  Sense strand starting at position 1119 of SEQ ID NO: 1885447
guauuaaguaggugauagu

SEQ ID NO: 2342977 - RNA, 19 nt, Artificial Sequence
  Description of Artificial Sequence: Synthetic oligonucleotide
  Antisense strand to SEQ ID NO: 2342976
acuaucaccuacuuaauac

SEQ ID NO: 2342978 - RNA, 19 nt, Artificial Sequence
  Description of Artificial Sequence: Synthetic oligonucleotide
  Sense strand starting at position 1120 of SEQ ID NO: 1885447
uauuaaguaggugauaguu

SEQ ID NO: 2342979 - RNA, 19 nt, Artificial Sequence
  Description of Artificial Sequence: Synthetic oligonucleotide
  Antisense strand to SEQ ID NO: 2342978
aacuaucaccuacuuaaua

SEQ ID NO: 2342980 - RNA, 19 nt, Artificial Sequence
  Description of Artificial Sequence: Synthetic oligonucleotide
  Sense strand starting at position 1129 of SEQ ID NO: 1885447
ggugauaguuuauucccua

SEQ ID NO: 2342981 - RNA, 19 nt, Artificial Sequence
  Description of Artificial Sequence: Synthetic oligonucleotide
  Antisense strand to SEQ ID NO: 2342980
uagggaauaaacuaucacc

SEQ ID NO: 2342982 - RNA, 19 nt, Artificial Sequence
  Description of Artificial Sequence: Synthetic oligonucleotide
  Sense strand starting at position 1130 of SEQ ID NO: 1885447
gugauaguuuauucccuaa

SEQ ID NO: 2342983 - RNA, 19 nt, Artificial Sequence
  Description of Artificial Sequence: Synthetic oligonucleotide
  Antisense strand to SEQ ID NO: 2342982
uuagggaauaaacuaucac

SEQ ID NO: 2342984 - RNA, 19 nt, Artificial Sequence
  Description of Artificial Sequence: Synthetic oligonucleotide
  Sense strand starting at position 1176 of SEQ ID NO: 1885447
guggauugacaccgacaga

SEQ ID NO: 2342985 - RNA, 19 nt, Artificial Sequence
  Description of Artificial Sequence: Synthetic oligonucleotide
  Antisense strand to SEQ ID NO: 2342984
ucugucggugucaauccac

SEQ ID NO: 2342986 - RNA, 19 nt, Artificial Sequence
  Description of Artificial Sequence: Synthetic oligonucleotide
  Sense strand starting at position 2373 of SEQ ID NO: 1885447
uccugacugaagugggaau

SEQ ID NO: 2342987 - RNA, 19 nt, Artificial Sequence
  Description of Artificial Sequence: Synthetic oligonucleotide
  Antisense strand to SEQ ID NO: 2342986
auucccacuucagucagga

SEQ ID NO: 2342988 - RNA, 19 nt, Artificial Sequence
  Description of Artificial Sequence: Synthetic oligonucleotide
  Sense strand starting at position 2402 of SEQ ID NO: 1885447
acacgugaacuuuagcaga

SEQ ID NO: 2342989 - RNA, 19 nt, Artificial Sequence
  Description of Artificial Sequence: Synthetic oligonucleotide
  Antisense strand to SEQ ID NO: 2342988
ucugcuaaaguucacgugu

SEQ ID NO: 2342990 - RNA, 19 nt, Artificial Sequence
  Description of Artificial Sequence: Synthetic oligonucleotide
  Sense strand starting at position 2404 of SEQ ID NO: 1885447
acgugaacuuuagcagaua

SEQ ID NO: 2342991 - RNA, 19 nt, Artificial Sequence
  Description of Artificial Sequence: Synthetic oligonucleotide
  Antisense strand to SEQ ID NO: 2342990
uaucugcuaaaguucacgu

SEQ ID NO: 2342992 - RNA, 19 nt, Artificial Sequence
  Description of Artificial Sequence: Synthetic oligonucleotide
  Sense strand starting at position 2457 of SEQ ID NO: 1885447
acuggaagaugauauaauu

SEQ ID NO: 2342993 - RNA, 19 nt, Artificial Sequence
  Description of Artificial Sequence: Synthetic oligonucleotide
  Antisense strand to SEQ ID NO: 2342992
aauuauaucaucuuccagu

SEQ ID NO: 2342994 - RNA, 19 nt, Artificial Sequence
  Description of Artificial Sequence: Synthetic oligonucleotide
  Sense strand starting at position 2556 of SEQ ID NO: 1885447
ggcucaguagcagaaugua

SEQ ID NO: 2342995 - RNA, 19 nt, Artificial Sequence
  Description of Artificial Sequence: Synthetic oligonucleotide
  Antisense strand to SEQ ID NO: 2342994
uacauucugcuacugagcc

SEQ ID NO: 2342996 - RNA, 19 nt, Artificial Sequence
  Description of Artificial Sequence: Synthetic oligonucleotide
  Sense strand starting at position 2565 of SEQ ID NO: 1885447
gcagaauguaggugacaga

SEQ ID NO: 2342997 - RNA, 19 nt, Artificial Sequence
  Description of Artificial Sequence: Synthetic oligonucleotide
  Antisense strand to SEQ ID NO: 2342996
ucugucaccuacauucugc

SEQ ID NO: 2342998 - RNA, 19 nt, Artificial Sequence
  Description of Artificial Sequence: Synthetic oligonucleotide
  Sense strand starting at position 2925 of SEQ ID NO: 1885447
aauagagaauguuaggaga

SEQ ID NO: 2342999 - RNA, 19 nt, Artificial Sequence
  Description of Artificial Sequence: Synthetic oligonucleotide
  Antisense strand to SEQ ID NO: 2342998
ucuccuaacauucucuauu

SEQ ID NO: 2343000 - RNA, 19 nt, Artificial Sequence
  Description of Artificial Sequence: Synthetic oligonucleotide
  Sense strand starting at position 3035 of SEQ ID NO: 1885447
cagagauuagcagguggaa

SEQ ID NO: 2343001 - RNA, 19 nt, Artificial Sequence
  Description of Artificial Sequence: Synthetic oligonucleotide
  Antisense strand to SEQ ID NO: 2343000
uuccaccugcuaaucucug

SEQ ID NO: 2343002 - RNA, 19 nt, Artificial Sequence
  Description of Artificial Sequence: Synthetic oligonucleotide
  Sense strand starting at position 3037 of SEQ ID NO: 1885447
gagauuagcagguggaaua

SEQ ID NO: 2343003 - RNA, 19 nt, Artificial Sequence
  Description of Artificial Sequence: Synthetic oligonucleotide
  Antisense strand to SEQ ID NO: 2343002
uauuccaccugcuaaucuc

SEQ ID NO: 2343004 - RNA, 19 nt, Artificial Sequence
  Description of Artificial Sequence: Synthetic oligonucleotide
  Sense strand starting at position 3038 of SEQ ID NO: 1885447
agauuagcagguggaauau

SEQ ID NO: 2343005 - RNA, 19 nt, Artificial Sequence
  Description of Artificial Sequence: Synthetic oligonucleotide
  Antisense strand to SEQ ID NO: 2343004
auauuccaccugcuaaucu

SEQ ID NO: 2343006 - RNA, 19 nt, Artificial Sequence
  Description of Artificial Sequence: Synthetic oligonucleotide
  Sense strand starting at position 3114 of SEQ ID NO: 1885447
guacaaaugagucgaaagu

SEQ ID NO: 2343007 - RNA, 19 nt, Artificial Sequence
  Description of Artificial Sequence: Synthetic oligonucleotide
  Antisense strand to SEQ ID NO: 2343006
acuuucgacucauuuguac

SEQ ID NO: 2343008 - RNA, 19 nt, Artificial Sequence
  Description of Artificial Sequence: Synthetic oligonucleotide
  Sense strand starting at position 3172 of SEQ ID NO: 1885447
gcaucagaaagcugaagua

SEQ ID NO: 2343009 - RNA, 19 nt, Artificial Sequence
  Description of Artificial Sequence: Synthetic oligonucleotide
  Antisense strand to SEQ ID NO: 2343008
uacuucagcuuucugaugc

SEQ ID NO: 2343010 - RNA, 19 nt, Artificial Sequence
  Description of Artificial Sequence: Synthetic oligonucleotide
  Sense strand starting at position 3223 of SEQ ID NO: 1885447
aguggugcuagagauaaac

SEQ ID NO: 2343011 - RNA, 19 nt, Artificial Sequence
  Description of Artificial Sequence: Synthetic oligonucleotide
  Antisense strand to SEQ ID NO: 2343010
guuuaucucuagcaccacu

SEQ ID NO: 2343012 - RNA, 19 nt, Artificial Sequence
  Description of Artificial Sequence: Synthetic oligonucleotide
  Sense strand starting at position 3388 of SEQ ID NO: 1885447
agccaaccuggucaauuaa

SEQ ID NO: 2343013 - RNA, 19 nt, Artificial Sequence
  Description of Artificial Sequence: Synthetic oligonucleotide
  Antisense strand to SEQ ID NO: 2343012
uuaauugaccagguuggcu

SEQ ID NO: 2343014 - RNA, 19 nt, Artificial Sequence
  Description of Artificial Sequence: Synthetic oligonucleotide
  Sense strand starting at position 3638 of SEQ ID NO: 1885447
aagggaugcagucagcaga

SEQ ID NO: 2343015 - RNA, 19 nt, Artificial Sequence
  Description of Artificial Sequence: Synthetic oligonucleotide
  Antisense strand to SEQ ID NO: 2343014
ucugcugacugcaucccuu

SEQ ID NO: 2343016 - RNA, 19 nt, Artificial Sequence
  Description of Artificial Sequence: Synthetic oligonucleotide
  Sense strand starting at position 3770 of SEQ ID NO: 1885447
agagaauuauugguacagu

SEQ ID NO: 2343017 - RNA, 19 nt, Artificial Sequence
  Description of Artificial Sequence: Synthetic oligonucleotide
  Antisense strand to SEQ ID NO: 2343016
acuguaccaauaauucucu

SEQ ID NO: 2343018 - RNA, 19 nt, Artificial Sequence
  Description of Artificial Sequence: Synthetic oligonucleotide
  Sense strand starting at position 3773 of SEQ ID NO: 1885447
gaauuauugguacaguucu

SEQ ID NO: 2343019 - RNA, 19 nt, Artificial Sequence
  Description of Artificial Sequence: Synthetic oligonucleotide
  Antisense strand to SEQ ID NO: 2343018
agaacuguaccaauaauuc

SEQ ID NO: 2343020 - RNA, 19 nt, Artificial Sequence
  Description of Artificial Sequence: Synthetic oligonucleotide
  Sense strand starting at position 3946 of SEQ ID NO: 1885447
cuauuacgauuccuaugaa

SEQ ID NO: 2343021 - RNA, 19 nt, Artificial Sequence
  Description of Artificial Sequence: Synthetic oligonucleotide
  Antisense strand to SEQ ID NO: 2343020
uucauaggaaucguaauag

SEQ ID NO: 2343022 - RNA, 19 nt, Artificial Sequence
  Description of Artificial Sequence: Synthetic oligonucleotide
  Sense strand starting at position 3949 of SEQ ID NO: 1885447
uuacgauuccuaugaaaca

SEQ ID NO: 2343023 - RNA, 19 nt, Artificial Sequence
  Description of Artificial Sequence: Synthetic oligonucleotide
  Antisense strand to SEQ ID NO: 2343022
uguuucauaggaaucguaa

SEQ ID NO: 2343024 - RNA, 19 nt, Artificial Sequence
  Description of Artificial Sequence: Synthetic oligonucleotide
  Sense strand starting at position 140 of SEQ ID NO: 1885448
cauuguuagggugguagga

SEQ ID NO: 2343025 - RNA, 19 nt, Artificial Sequence
  Description of Artificial Sequence: Synthetic oligonucleotide
  Antisense strand to SEQ ID NO: 2343024
uccuaccacccuaacaaug

SEQ ID NO: 2343026 - RNA, 19 nt, Artificial Sequence
  Description of Artificial Sequence: Synthetic oligonucleotide
  Sense strand starting at position 465 of SEQ ID NO: 1885448
ccaggagcuagugagguau

SEQ ID NO: 2343027 - RNA, 19 nt, Artificial Sequence
  Description of Artificial Sequence: Synthetic oligonucleotide
  Antisense strand to SEQ ID NO: 2343026
auaccucacuagcuccugg

SEQ ID NO: 2343028 - RNA, 19 nt, Artificial Sequence
  Description of Artificial Sequence: Synthetic oligonucleotide
  Sense strand starting at position 469 of SEQ ID NO: 1885448
gagcuagugagguauccag

SEQ ID NO: 2343029 - RNA, 19 nt, Artificial Sequence
  Description of Artificial Sequence: Synthetic oligonucleotide
  Antisense strand to SEQ ID NO: 2343028
cuggauaccucacuagcuc

SEQ ID NO: 2343030 - RNA, 19 nt, Artificial Sequence
  Description of Artificial Sequence: Synthetic oligonucleotide
  Sense strand starting at position 477 of SEQ ID NO: 1885448
gagguauccagugagcacu

SEQ ID NO: 2343031 - RNA, 19 nt, Artificial Sequence
  Description of Artificial Sequence: Synthetic oligonucleotide
  Antisense strand to SEQ ID NO: 2343030
agugcucacuggauaccuc

SEQ ID NO: 2343032 - RNA, 19 nt, Artificial Sequence
  Description of Artificial Sequence: Synthetic oligonucleotide
  Sense strand starting at position 480 of SEQ ID NO: 1885448
guauccagugagcacuuua

SEQ ID NO: 2343033 - RNA, 19 nt, Artificial Sequence
  Description of Artificial Sequence: Synthetic oligonucleotide
  Antisense strand to SEQ ID NO: 2343032
uaaagugcucacuggauac

SEQ ID NO: 2343034 - RNA, 19 nt, Artificial Sequence
  Description of Artificial Sequence: Synthetic oligonucleotide
  Sense strand starting at position 488 of SEQ ID NO: 1885448
ugagcacuuuaucugggua

SEQ ID NO: 2343035 - RNA, 19 nt, Artificial Sequence
  Description of Artificial Sequence: Synthetic oligonucleotide
  Antisense strand to SEQ ID NO: 2343034
uacccagauaaagugcuca

SEQ ID NO: 2343036 - RNA, 19 nt, Artificial Sequence
  Description of Artificial Sequence: Synthetic oligonucleotide
  Sense strand starting at position 548 of SEQ ID NO: 1885448
cccuaucuugaagaagugu

SEQ ID NO: 2343037 - RNA, 19 nt, Artificial Sequence
  Description of Artificial Sequence: Synthetic oligonucleotide
  Antisense strand to SEQ ID NO: 2343036
acacuucuucaagauaggg

SEQ ID NO: 2343038 - RNA, 19 nt, Artificial Sequence
  Description of Artificial Sequence: Synthetic oligonucleotide
  Sense strand starting at position 554 of SEQ ID NO: 1885448
cuugaagaaguguauacuu

SEQ ID NO: 2343039 - RNA, 19 nt, Artificial Sequence
  Description of Artificial Sequence: Synthetic oligonucleotide
  Antisense strand to SEQ ID NO: 2343038
aaguauacacuucuucaag

SEQ ID NO: 2343040 - RNA, 19 nt, Artificial Sequence
  Description of Artificial Sequence: Synthetic oligonucleotide
  Sense strand starting at position 609 of SEQ ID NO: 1885448
aggaguuagugacugucuu

SEQ ID NO: 2343041 - RNA, 19 nt, Artificial Sequence
  Description of Artificial Sequence: Synthetic oligonucleotide
  Antisense strand to SEQ ID NO: 2343040
aagacagucacuaacuccu

SEQ ID NO: 2343042 - RNA, 19 nt, Artificial Sequence
  Description of Artificial Sequence: Synthetic oligonucleotide
  Sense strand starting at position 752 of SEQ ID NO: 1885448
ccuugccuucuauauguga

SEQ ID NO: 2343043 - RNA, 19 nt, Artificial Sequence
  Description of Artificial Sequence: Synthetic oligonucleotide
  Antisense strand to SEQ ID NO: 2343042
ucacauauagaaggcaagg

SEQ ID NO: 2343044 - RNA, 19 nt, Artificial Sequence
  Description of Artificial Sequence: Synthetic oligonucleotide
  Sense strand starting at position 755 of SEQ ID NO: 1885448
ugccuucuauaugugaaga

SEQ ID NO: 2343045 - RNA, 19 nt, Artificial Sequence
  Description of Artificial Sequence: Synthetic oligonucleotide
  Antisense strand to SEQ ID NO: 2343044
ucuucacauauagaaggca

SEQ ID NO: 2343046 - RNA, 19 nt, Artificial Sequence
  Description of Artificial Sequence: Synthetic oligonucleotide
  Sense strand starting at position 883 of SEQ ID NO: 1885448
ggaugcaccuguuccauga

SEQ ID NO: 2343047 - RNA, 19 nt, Artificial Sequence
  Description of Artificial Sequence: Synthetic oligonucleotide
  Antisense strand to SEQ ID NO: 2343046
ucauggaacaggugcaucc

SEQ ID NO: 2343048 - RNA, 19 nt, Artificial Sequence
  Description of Artificial Sequence: Synthetic oligonucleotide
  Sense strand starting at position 1023 of SEQ ID NO: 1885448
ugauuaacuagaggcagau

SEQ ID NO: 2343049 - RNA, 19 nt, Artificial Sequence
  Description of Artificial Sequence: Synthetic oligonucleotide
  Antisense strand to SEQ ID NO: 2343048
aucugccucuaguuaauca

SEQ ID NO: 2343050 - RNA, 19 nt, Artificial Sequence
  Description of Artificial Sequence: Synthetic oligonucleotide
  Sense strand starting at position 1159 of SEQ ID NO: 1885448
uccauaagucaauauguag

SEQ ID NO: 2343051 - RNA, 19 nt, Artificial Sequence
  Description of Artificial Sequence: Synthetic oligonucleotide
  Antisense strand to SEQ ID NO: 2343050
cuacauauugacuuaugga

SEQ ID NO: 2343052 - RNA, 19 nt, Artificial Sequence
  Description of Artificial Sequence: Synthetic oligonucleotide
  Sense strand starting at position 1162 of SEQ ID NO: 1885448
auaagucaauauguaggau

SEQ ID NO: 2343053 - RNA, 19 nt, Artificial Sequence
  Description of Artificial Sequence: Synthetic oligonucleotide
  Antisense strand to SEQ ID NO: 2343052
auccuacauauugacuuau

SEQ ID NO: 2343054 - RNA, 19 nt, Artificial Sequence
  Description of Artificial Sequence: Synthetic oligonucleotide
  Sense strand starting at position 1165 of SEQ ID NO: 1885448
agucaauauguaggaugca

SEQ ID NO: 2343055 - RNA, 19 nt, Artificial Sequence
  Description of Artificial Sequence: Synthetic oligonucleotide
  Antisense strand to SEQ ID NO: 2343054
ugcauccuacauauugacu

SEQ ID NO: 2343056 - RNA, 19 nt, Artificial Sequence
  Description of Artificial Sequence: Synthetic oligonucleotide
  Sense strand starting at position 1211 of SEQ ID NO: 1885448
agaugacuuuggguaaugu

SEQ ID NO: 2343057 - RNA, 19 nt, Artificial Sequence
  Description of Artificial Sequence: Synthetic oligonucleotide
  Antisense strand to SEQ ID NO: 2343056
acauuacccaaagucaucu

SEQ ID NO: 2343058 - RNA, 19 nt, Artificial Sequence
  Description of Artificial Sequence: Synthetic oligonucleotide
  Sense strand starting at position 1370 of SEQ ID NO: 1885448
ggaaacaugaugugucuga

SEQ ID NO: 2343059 - RNA, 19 nt, Artificial Sequence
  Description of Artificial Sequence: Synthetic oligonucleotide
  Antisense strand to SEQ ID NO: 2343058
ucagacacaucauguuucc

SEQ ID NO: 2343060 - RNA, 19 nt, Artificial Sequence
  Description of Artificial Sequence: Synthetic oligonucleotide
  Sense strand starting at position 1557 of SEQ ID NO: 1885448
ccgguuuaugcuuagagag

SEQ ID NO: 2343061 - RNA, 19 nt, Artificial Sequence
  Description of Artificial Sequence: Synthetic oligonucleotide
  Antisense strand to SEQ ID NO: 2343060
cucucuaagcauaaaccgg

SEQ ID NO: 2343062 - RNA, 19 nt, Artificial Sequence
  Description of Artificial Sequence: Synthetic oligonucleotide
  Sense strand starting at position 1634 of SEQ ID NO: 1885448
auuaguccauuugagaaau

SEQ ID NO: 2343063 - RNA, 19 nt, Artificial Sequence
  Description of Artificial Sequence: Synthetic oligonucleotide
  Antisense strand to SEQ ID NO: 2343062
auuucucaaauggacuaau

SEQ ID NO: 2343064 - RNA, 19 nt, Artificial Sequence
  Description of Artificial Sequence: Synthetic oligonucleotide
  Sense strand starting at position 1762 of SEQ ID NO: 1885448
gacugugaacucuggagga

SEQ ID NO: 2343065 - RNA, 19 nt, Artificial Sequence
  Description of Artificial Sequence: Synthetic oligonucleotide
  Antisense strand to SEQ ID NO: 2343064
uccuccagaguucacaguc

SEQ ID NO: 2343066 - RNA, 19 nt, Artificial Sequence
  Description of Artificial Sequence: Synthetic oligonucleotide
  Sense strand starting at position 1766 of SEQ ID NO: 1885448
gugaacucuggaggaagua

SEQ ID NO: 2343067 - RNA, 19 nt, Artificial Sequence
  Description of Artificial Sequence: Synthetic oligonucleotide
  Antisense strand to SEQ ID NO: 2343066
uacuuccuccagaguucac

SEQ ID NO: 2343068 - RNA, 19 nt, Artificial Sequence
  Description of Artificial Sequence: Synthetic oligonucleotide
  Sense strand starting at position 1821 of SEQ ID NO: 1885448
cagaguuccuaggugggaa

SEQ ID NO: 2343069 - RNA, 19 nt, Artificial Sequence
  Description of Artificial Sequence: Synthetic oligonucleotide
  Antisense strand to SEQ ID NO: 2343068
uucccaccuaggaacucug

SEQ ID NO: 2343070 - RNA, 19 nt, Artificial Sequence
  Description of Artificial Sequence: Synthetic oligonucleotide
  Sense strand starting at position 2396 of SEQ ID NO: 1885448
uuaugaacccacugagcaa

SEQ ID NO: 2343071 - RNA, 19 nt, Artificial Sequence
  Description of Artificial Sequence: Synthetic oligonucleotide
  Antisense strand to SEQ ID NO: 2343070
uugcucaguggguucauaa

SEQ ID NO: 2343072 - RNA, 19 nt, Artificial Sequence
  Description of Artificial Sequence: Synthetic oligonucleotide
  Sense strand starting at position 2466 of SEQ ID NO: 1885448
gcauguccacaugaugauu

SEQ ID NO: 2343073 - RNA, 19 nt, Artificial Sequence
  Description of Artificial Sequence: Synthetic oligonucleotide
  Antisense strand to SEQ ID NO: 2343072
aaucaucauguggacaugc

SEQ ID NO: 2343074 - RNA, 19 nt, Artificial Sequence
  Description of Artificial Sequence: Synthetic oligonucleotide
  Sense strand starting at position 2491 of SEQ ID NO: 1885448
ccucucuugcaauaaggau

SEQ ID NO: 2343075 - RNA, 19 nt, Artificial Sequence
  Description of Artificial Sequence: Synthetic oligonucleotide
  Antisense strand to SEQ ID NO: 2343074
auccuuauugcaagagagg

SEQ ID NO: 2343076 - RNA, 19 nt, Artificial Sequence
  Description of Artificial Sequence: Synthetic oligonucleotide
  Sense strand starting at position 2547 of SEQ ID NO: 1885448
uucugagguagccaguuau

SEQ ID NO: 2343077 - RNA, 19 nt, Artificial Sequence
  Description of Artificial Sequence: Synthetic oligonucleotide
  Antisense strand to SEQ ID NO: 2343076
auaacuggcuaccucagaa

SEQ ID NO: 2343078 - RNA, 19 nt, Artificial Sequence
  Description of Artificial Sequence: Synthetic oligonucleotide
  Sense strand starting at position 2713 of SEQ ID NO: 1885448
ggaagaguauugcuuacau

SEQ ID NO: 2343079 - RNA, 19 nt, Artificial Sequence
  Description of Artificial Sequence: Synthetic oligonucleotide
  Antisense strand to SEQ ID NO: 2343078
auguaagcaauacucuucc

SEQ ID NO: 2343080 - RNA, 19 nt, Artificial Sequence
  Description of Artificial Sequence: Synthetic oligonucleotide
  Sense strand starting at position 2783 of SEQ ID NO: 1885448
aggaguucucuuugagaag

SEQ ID NO: 2343081 - RNA, 19 nt, Artificial Sequence
  Description of Artificial Sequence: Synthetic oligonucleotide
  Antisense strand to SEQ ID NO: 2343080
cuucucaaagagaacuccu

SEQ ID NO: 2343082 - RNA, 19 nt, Artificial Sequence
  Description of Artificial Sequence: Synthetic oligonucleotide
  Sense strand starting at position 2983 of SEQ ID NO: 1885448
uggaaucacucaucuguuu

SEQ ID NO: 2343083 - RNA, 19 nt, Artificial Sequence
  Description of Artificial Sequence: Synthetic oligonucleotide
  Antisense strand to SEQ ID NO: 2343082
aaacagaugagugauucca

SEQ ID NO: 2343084 - RNA, 19 nt, Artificial Sequence
  Description of Artificial Sequence: Synthetic oligonucleotide
  Sense strand starting at position 3183 of SEQ ID NO: 1885448
gcaucucuggccuagagag

SEQ ID NO: 2343085 - RNA, 19 nt, Artificial Sequence
  Description of Artificial Sequence: Synthetic oligonucleotide
  Antisense strand to SEQ ID NO: 2343084
cucucuaggccagagaugc

SEQ ID NO: 2343086 - RNA, 19 nt, Artificial Sequence
  Description of Artificial Sequence: Synthetic oligonucleotide
  Sense strand starting at position 3200 of SEQ ID NO: 1885448
agauuagcaguacauuaau

SEQ ID NO: 2343087 - RNA, 19 nt, Artificial Sequence
  Description of Artificial Sequence: Synthetic oligonucleotide
  Antisense strand to SEQ ID NO: 2343086
auuaauguacugcuaaucu

SEQ ID NO: 2343088 - RNA, 19 nt, Artificial Sequence
  Description of Artificial Sequence: Synthetic oligonucleotide
  Sense strand starting at position 3461 of SEQ ID NO: 1885448
cugaauauuuggcaacaug

SEQ ID NO: 2343089 - RNA, 19 nt, Artificial Sequence
  Description of Artificial Sequence: Synthetic oligonucleotide
  Antisense strand to SEQ ID NO: 2343088
cauguugccaaauauucag

SEQ ID NO: 2343090 - RNA, 19 nt, Artificial Sequence
  Description of Artificial Sequence: Synthetic oligonucleotide
  Sense strand starting at position 3558 of SEQ ID NO: 1885448
gugaaauacuuucugcaua

SEQ ID NO: 2343091 - RNA, 19 nt, Artificial Sequence
  Description of Artificial Sequence: Synthetic oligonucleotide
  Antisense strand to SEQ ID NO: 2343090
uaugcagaaaguauuucac

SEQ ID NO: 2343092 - RNA, 19 nt, Artificial Sequence
  Description of Artificial Sequence: Synthetic oligonucleotide
  Sense strand starting at position 3654 of SEQ ID NO: 1885448
acugauaaucguggguuca

SEQ ID NO: 2343093 - RNA, 19 nt, Artificial Sequence
  Description of Artificial Sequence: Synthetic oligonucleotide
  Antisense strand to SEQ ID NO: 2343092
ugaacccacgauuaucagu

SEQ ID NO: 2343094 - RNA, 19 nt, Artificial Sequence
  Description of Artificial Sequence: Synthetic oligonucleotide
  Sense strand starting at position 3656 of SEQ ID NO: 1885448
ugauaaucguggguucaug

SEQ ID NO: 2343095 - RNA, 19 nt, Artificial Sequence
  Description of Artificial Sequence: Synthetic oligonucleotide
  Antisense strand to SEQ ID NO: 2343094
caugaacccacgauuauca

SEQ ID NO: 2343096 - RNA, 19 nt, Artificial Sequence
  Description of Artificial Sequence: Synthetic oligonucleotide
  Sense strand starting at position 3754 of SEQ ID NO: 1885448
cuggucaaguauucucaaa

SEQ ID NO: 2343097 - RNA, 19 nt, Artificial Sequence
  Description of Artificial Sequence: Synthetic oligonucleotide
  Antisense strand to SEQ ID NO: 2343096
uuugagaauacuugaccag

SEQ ID NO: 2343098 - RNA, 19 nt, Artificial Sequence
  Description of Artificial Sequence: Synthetic oligonucleotide
  Sense strand starting at position 3780 of SEQ ID NO: 1885448
uaaccaaagguugguaaau

SEQ ID NO: 2343099 - RNA, 19 nt, Artificial Sequence
  Description of Artificial Sequence: Synthetic oligonucleotide
  Antisense strand to SEQ ID NO: 2343098
auuuaccaaccuuugguua

SEQ ID NO: 2343100 - RNA, 19 nt, Artificial Sequence
  Description of Artificial Sequence: Synthetic oligonucleotide
  Sense strand starting at position 3834 of SEQ ID NO: 1885448
ccuacugugccacaguuaa

SEQ ID NO: 2343101 - RNA, 19 nt, Artificial Sequence
  Description of Artificial Sequence: Synthetic oligonucleotide
  Antisense strand to SEQ ID NO: 2343100
uuaacuguggcacaguagg

SEQ ID NO: 2343102 - RNA, 19 nt, Artificial Sequence
  Description of Artificial Sequence: Synthetic oligonucleotide
  Sense strand starting at position 3932 of SEQ ID NO: 1885448
gggugaugauaugcuaauu

SEQ ID NO: 2343103 - RNA, 19 nt, Artificial Sequence
  Description of Artificial Sequence: Synthetic oligonucleotide
  Antisense strand to SEQ ID NO: 2343102
aauuagcauaucaucaccc

SEQ ID NO: 2343104 - RNA, 19 nt, Artificial Sequence
  Description of Artificial Sequence: Synthetic oligonucleotide
  Sense strand starting at position 673 of SEQ ID NO: 1885449
cuauuuaagucagaugaga

SEQ ID NO: 2343105 - RNA, 19 nt, Artificial Sequence
  Description of Artificial Sequence: Synthetic oligonucleotide
  Antisense strand to SEQ ID NO: 2343104
ucucaucugacuuaaauag

SEQ ID NO: 2343106 - RNA, 19 nt, Artificial Sequence
  Description of Artificial Sequence: Synthetic oligonucleotide
  Sense strand starting at position 689 of SEQ ID NO: 1885449
agaaauugugauggucaau

SEQ ID NO: 2343107 - RNA, 19 nt, Artificial Sequence
  Description of Artificial Sequence: Synthetic oligonucleotide
  Antisense strand to SEQ ID NO: 2343106
auugaccaucacaauuucu

SEQ ID NO: 2343108 - RNA, 19 nt, Artificial Sequence
  Description of Artificial Sequence: Synthetic oligonucleotide
  Sense strand starting at position 692 of SEQ ID NO: 1885449
aauugugauggucaaucca

SEQ ID NO: 2343109 - RNA, 19 nt, Artificial Sequence
  Description of Artificial Sequence: Synthetic oligonucleotide
  Antisense strand to SEQ ID NO: 2343108
uggauugaccaucacaauu

SEQ ID NO: 2343110 - RNA, 19 nt, Artificial Sequence
  Description of Artificial Sequence: Synthetic oligonucleotide
  Sense strand starting at position 834 of SEQ ID NO: 1885449
acugcuaccuuucugagau

SEQ ID NO: 2343111 - RNA, 19 nt, Artificial Sequence
  Description of Artificial Sequence: Synthetic oligonucleotide
  Antisense strand to SEQ ID NO: 2343110
aucucagaaagguagcagu

SEQ ID NO: 2343112 - RNA, 19 nt, Artificial Sequence
  Description of Artificial Sequence: Synthetic oligonucleotide
  Sense strand starting at position 838 of SEQ ID NO: 1885449
cuaccuuucugagauuuga

SEQ ID NO: 2343113 - RNA, 19 nt, Artificial Sequence
  Description of Artificial Sequence: Synthetic oligonucleotide
  Antisense strand to SEQ ID NO: 2343112
ucaaaucucagaaagguag

SEQ ID NO: 2343114 - RNA, 19 nt, Artificial Sequence
  Description of Artificial Sequence: Synthetic oligonucleotide
  Sense strand starting at position 862 of SEQ ID NO: 1885449
ucacuuaacugguccuaag

SEQ ID NO: 2343115 - RNA, 19 nt, Artificial Sequence
  Description of Artificial Sequence: Synthetic oligonucleotide
  Antisense strand to SEQ ID NO: 2343114
cuuaggaccaguuaaguga

SEQ ID NO: 2343116 - RNA, 19 nt, Artificial Sequence
  Description of Artificial Sequence: Synthetic oligonucleotide
  Sense strand starting at position 1299 of SEQ ID NO: 1885449
uauugaagagucugucauc

SEQ ID NO: 2343117 - RNA, 19 nt, Artificial Sequence
  Description of Artificial Sequence: Synthetic oligonucleotide
  Antisense strand to SEQ ID NO: 2343116
gaugacagacucuucaaua

SEQ ID NO: 2343118 - RNA, 19 nt, Artificial Sequence
  Description of Artificial Sequence: Synthetic oligonucleotide
  Sense strand starting at position 1300 of SEQ ID NO: 1885449
auugaagagucugucaucu

SEQ ID NO: 2343119 - RNA, 19 nt, Artificial Sequence
  Description of Artificial Sequence: Synthetic oligonucleotide
  Antisense strand to SEQ ID NO: 2343118
agaugacagacucuucaau

SEQ ID NO: 2343120 - RNA, 19 nt, Artificial Sequence
  Description of Artificial Sequence: Synthetic oligonucleotide
  Sense strand starting at position 1308 of SEQ ID NO: 1885449
gucugucaucuacaauauu

SEQ ID NO: 2343121 - RNA, 19 nt, Artificial Sequence
  Description of Artificial Sequence: Synthetic oligonucleotide
  Antisense strand to SEQ ID NO: 2343120
aauauuguagaugacagac

SEQ ID NO: 2343122 - RNA, 19 nt, Artificial Sequence
  Description of Artificial Sequence: Synthetic oligonucleotide
  Sense strand starting at position 1343 of SEQ ID NO: 1885449
acuugucaagaaggguaaa

SEQ ID NO: 2343123 - RNA, 19 nt, Artificial Sequence
  Description of Artificial Sequence: Synthetic oligonucleotide
  Antisense strand to SEQ ID NO: 2343122
uuuacccuucuugacaagu

SEQ ID NO: 2343124 - RNA, 19 nt, Artificial Sequence
  Description of Artificial Sequence: Synthetic oligonucleotide
  Sense strand starting at position 1384 of SEQ ID NO: 1885449
cuuuguaucccggaaucag

SEQ ID NO: 2343125 - RNA, 19 nt, Artificial Sequence
  Description of Artificial Sequence: Synthetic oligonucleotide
  Antisense strand to SEQ ID NO: 2343124
cugauuccgggauacaaag

SEQ ID NO: 2343126 - RNA, 19 nt, Artificial Sequence
  Description of Artificial Sequence: Synthetic oligonucleotide
  Sense strand starting at position 1484 of SEQ ID NO: 1885449
aauuaacugugcucuggau

SEQ ID NO: 2343127 - RNA, 19 nt, Artificial Sequence
  Description of Artificial Sequence: Synthetic oligonucleotide
  Antisense strand to SEQ ID NO: 2343126
auccagagcacaguuaauu

SEQ ID NO: 2343128 - RNA, 19 nt, Artificial Sequence
  Description of Artificial Sequence: Synthetic oligonucleotide
  Sense strand starting at position 1490 of SEQ ID NO: 1885449
cugugcucuggauacagaa

SEQ ID NO: 2343129 - RNA, 19 nt, Artificial Sequence
  Description of Artificial Sequence: Synthetic oligonucleotide
  Antisense strand to SEQ ID NO: 2343128
uucuguauccagagcacag

SEQ ID NO: 2343130 - RNA, 19 nt, Artificial Sequence
  Description of Artificial Sequence: Synthetic oligonucleotide
  Sense strand starting at position 2158 of SEQ ID NO: 1885449
cagggagcucucgaggcaa

SEQ ID NO: 2343131 - RNA, 19 nt, Artificial Sequence
  Description of Artificial Sequence: Synthetic oligonucleotide
  Antisense strand to SEQ ID NO: 2343130
uugccucgagagcucccug

SEQ ID NO: 2343132 - RNA, 19 nt, Artificial Sequence
  Description of Artificial Sequence: Synthetic oligonucleotide
  Sense strand starting at position 2472 of SEQ ID NO: 1885449
cuguuaggauggagggaau

SEQ ID NO: 2343133 - RNA, 19 nt, Artificial Sequence
  Description of Artificial Sequence: Synthetic oligonucleotide
  Antisense strand to SEQ ID NO: 2343132
auucccuccauccuaacag

SEQ ID NO: 2343134 - RNA, 19 nt, Artificial Sequence
  Description of Artificial Sequence: Synthetic oligonucleotide
  Sense strand starting at position 2498 of SEQ ID NO: 1885449
gcucgauuccuaucgcgga

SEQ ID NO: 2343135 - RNA, 19 nt, Artificial Sequence
  Description of Artificial Sequence: Synthetic oligonucleotide
  Antisense strand to SEQ ID NO: 2343134
uccgcgauaggaaucgagc

SEQ ID NO: 2343136 - RNA, 19 nt, Artificial Sequence
  Description of Artificial Sequence: Synthetic oligonucleotide
  Sense strand starting at position 2675 of SEQ ID NO: 1885449
guuauauugggauggauug

SEQ ID NO: 2343137 - RNA, 19 nt, Artificial Sequence
  Description of Artificial Sequence: Synthetic oligonucleotide
  Antisense strand to SEQ ID NO: 2343136
caauccaucccaauauaac

SEQ ID NO: 2343138 - RNA, 19 nt, Artificial Sequence
  Description of Artificial Sequence: Synthetic oligonucleotide
  Sense strand starting at position 2765 of SEQ ID NO: 1885449
gacuuaauucugggccuga

SEQ ID NO: 2343139 - RNA, 19 nt, Artificial Sequence
  Description of Artificial Sequence: Synthetic oligonucleotide
  Antisense strand to SEQ ID NO: 2343138
ucaggcccagaauuaaguc

SEQ ID NO: 2343140 - RNA, 19 nt, Artificial Sequence
  Description of Artificial Sequence: Synthetic oligonucleotide
  Sense strand starting at position 2769 of SEQ ID NO: 1885449
uaauucugggccugagaaa

SEQ ID NO: 2343141 - RNA, 19 nt, Artificial Sequence
  Description of Artificial Sequence: Synthetic oligonucleotide
  Antisense strand to SEQ ID NO: 2343140
uuucucaggcccagaauua

SEQ ID NO: 2343142 - RNA, 19 nt, Artificial Sequence
  Description of Artificial Sequence: Synthetic oligonucleotide
  Sense strand starting at position 2809 of SEQ ID NO: 1885449
uuucgugacgcagcauuau

SEQ ID NO: 2343143 - RNA, 19 nt, Artificial Sequence
  Description of Artificial Sequence: Synthetic oligonucleotide
  Antisense strand to SEQ ID NO: 2343142
auaaugcugcgucacgaaa

SEQ ID NO: 2343144 - RNA, 19 nt, Artificial Sequence
  Description of Artificial Sequence: Synthetic oligonucleotide
  Sense strand starting at position 2952 of SEQ ID NO: 1885449
uguuacagccuuugaaaua

SEQ ID NO: 2343145 - RNA, 19 nt, Artificial Sequence
  Description of Artificial Sequence: Synthetic oligonucleotide
  Antisense strand to SEQ ID NO: 2343144
uauuucaaaggcuguaaca

SEQ ID NO: 2343146 - RNA, 19 nt, Artificial Sequence
  Description of Artificial Sequence: Synthetic oligonucleotide
  Sense strand starting at position 2963 of SEQ ID NO: 1885449
uugaaauaauggccucaua

SEQ ID NO: 2343147 - RNA, 19 nt, Artificial Sequence
  Description of Artificial Sequence: Synthetic oligonucleotide
  Antisense strand to SEQ ID NO: 2343146
uaugaggccauuauuucaa

SEQ ID NO: 2343148 - RNA, 19 nt, Artificial Sequence
  Description of Artificial Sequence: Synthetic oligonucleotide
  Sense strand starting at position 3095 of SEQ ID NO: 1885449
uuaauuugguggcuuuauu

SEQ ID NO: 2343149 - RNA, 19 nt, Artificial Sequence
  Description of Artificial Sequence: Synthetic oligonucleotide
  Antisense strand to SEQ ID NO: 2343148
aauaaagccaccaaauuaa

SEQ ID NO: 2343150 - RNA, 19 nt, Artificial Sequence
  Description of Artificial Sequence: Synthetic oligonucleotide
  Sense strand starting at position 3111 of SEQ ID NO: 1885449
auuggaccuguuugaaaca

SEQ ID NO: 2343151 - RNA, 19 nt, Artificial Sequence
  Description of Artificial Sequence: Synthetic oligonucleotide
  Antisense strand to SEQ ID NO: 2343150
uguuucaaacagguccaau

SEQ ID NO: 2343152 - RNA, 19 nt, Artificial Sequence
  Description of Artificial Sequence: Synthetic oligonucleotide
  Sense strand starting at position 3128 of SEQ ID NO: 1885449
caggaagccuuucuguaau

SEQ ID NO: 2343153 - RNA, 19 nt, Artificial Sequence
  Description of Artificial Sequence: Synthetic oligonucleotide
  Antisense strand to SEQ ID NO: 2343152
auuacagaaaggcuuccug

SEQ ID NO: 2343154 - RNA, 19 nt, Artificial Sequence
  Description of Artificial Sequence: Synthetic oligonucleotide
  Sense strand starting at position 3131 of SEQ ID NO: 1885449
gaagccuuucuguaaugug

SEQ ID NO: 2343155 - RNA, 19 nt, Artificial Sequence
  Description of Artificial Sequence: Synthetic oligonucleotide
  Antisense strand to SEQ ID NO: 2343154
cacauuacagaaaggcuuc

SEQ ID NO: 2343156 - RNA, 19 nt, Artificial Sequence
  Description of Artificial Sequence: Synthetic oligonucleotide
  Sense strand starting at position 3178 of SEQ ID NO: 1885449
cucugaaacgucguugucu

SEQ ID NO: 2343157 - RNA, 19 nt, Artificial Sequence
  Description of Artificial Sequence: Synthetic oligonucleotide
  Antisense strand to SEQ ID NO: 2343156
agacaacgacguuucagag

SEQ ID NO: 2343158 - RNA, 19 nt, Artificial Sequence
  Description of Artificial Sequence: Synthetic oligonucleotide
  Sense strand starting at position 3215 of SEQ ID NO: 1885449
uagaaugagcgggaugcua

SEQ ID NO: 2343159 - RNA, 19 nt, Artificial Sequence
  Description of Artificial Sequence: Synthetic oligonucleotide
  Antisense strand to SEQ ID NO: 2343158
uagcaucccgcucauucua

SEQ ID NO: 2343160 - RNA, 19 nt, Artificial Sequence
  Description of Artificial Sequence: Synthetic oligonucleotide
  Sense strand starting at position 3316 of SEQ ID NO: 1885449
gcuagcucuaaggaguuaa

SEQ ID NO: 2343161 - RNA, 19 nt, Artificial Sequence
  Description of Artificial Sequence: Synthetic oligonucleotide
  Antisense strand to SEQ ID NO: 2343160
uuaacuccuuagagcuagc

SEQ ID NO: 2343162 - RNA, 19 nt, Artificial Sequence
  Description of Artificial Sequence: Synthetic oligonucleotide
  Sense strand starting at position 3345 of SEQ ID NO: 1885449
auuaaagacugcuuguaau

SEQ ID NO: 2343163 - RNA, 19 nt, Artificial Sequence
  Description of Artificial Sequence: Synthetic oligonucleotide
  Antisense strand to SEQ ID NO: 2343162
auuacaagcagucuuuaau

SEQ ID NO: 2343164 - RNA, 19 nt, Artificial Sequence
  Description of Artificial Sequence: Synthetic oligonucleotide
  Sense strand starting at position 3365 of SEQ ID NO: 1885449
uugacuguuaagugagagu

SEQ ID NO: 2343165 - RNA, 19 nt, Artificial Sequence
  Description of Artificial Sequence: Synthetic oligonucleotide
  Antisense strand to SEQ ID NO: 2343164
acucucacuuaacagucaa

SEQ ID NO: 2343166 - RNA, 19 nt, Artificial Sequence
  Description of Artificial Sequence: Synthetic oligonucleotide
  Sense strand starting at position 3398 of SEQ ID NO: 1885449
uguuuauggaaucgaacua

SEQ ID NO: 2343167 - RNA, 19 nt, Artificial Sequence
  Description of Artificial Sequence: Synthetic oligonucleotide
  Antisense strand to SEQ ID NO: 2343166
uaguucgauuccauaaaca

SEQ ID NO: 2343168 - RNA, 19 nt, Artificial Sequence
  Description of Artificial Sequence: Synthetic oligonucleotide
  Sense strand starting at position 3410 of SEQ ID NO: 1885449
cgaacuaaauugcuaggua

SEQ ID NO: 2343169 - RNA, 19 nt, Artificial Sequence
  Description of Artificial Sequence: Synthetic oligonucleotide
  Antisense strand to SEQ ID NO: 2343168
uaccuagcaauuuaguucg

SEQ ID NO: 2343170 - RNA, 19 nt, Artificial Sequence
  Description of Artificial Sequence: Synthetic oligonucleotide
  Sense strand starting at position 3484 of SEQ ID NO: 1885449
acauguaguuauguugaaa

SEQ ID NO: 2343171 - RNA, 19 nt, Artificial Sequence
  Description of Artificial Sequence: Synthetic oligonucleotide
  Antisense strand to SEQ ID NO: 2343170
uuucaacauaacuacaugu

SEQ ID NO: 2343172 - RNA, 19 nt, Artificial Sequence
  Description of Artificial Sequence: Synthetic oligonucleotide
  Sense strand starting at position 3570 of SEQ ID NO: 1885449
ugguuuguuguugaagacu

SEQ ID NO: 2343173 - RNA, 19 nt, Artificial Sequence
  Description of Artificial Sequence: Synthetic oligonucleotide
  Antisense strand to SEQ ID NO: 2343172
agucuucaacaacaaacca

SEQ ID NO: 2343174 - RNA, 19 nt, Artificial Sequence
  Description of Artificial Sequence: Synthetic oligonucleotide
  Sense strand starting at position 3573 of SEQ ID NO: 1885449
uuuguuguugaagacugua

SEQ ID NO: 2343175 - RNA, 19 nt, Artificial Sequence
  Description of Artificial Sequence: Synthetic oligonucleotide
  Antisense strand to SEQ ID NO: 2343174
uacagucuucaacaacaaa

SEQ ID NO: 2343176 - RNA, 19 nt, Artificial Sequence
  Description of Artificial Sequence: Synthetic oligonucleotide
  Sense strand starting at position 3599 of SEQ ID NO: 1885449
guagguacuguuuaauaca

SEQ ID NO: 2343177 - RNA, 19 nt, Artificial Sequence
  Description of Artificial Sequence: Synthetic oligonucleotide
  Antisense strand to SEQ ID NO: 2343176
uguauuaaacaguaccuac

SEQ ID NO: 2343178 - RNA, 19 nt, Artificial Sequence
  Description of Artificial Sequence: Synthetic oligonucleotide
  Sense strand starting at position 3719 of SEQ ID NO: 1885449
acuuaauugugcuuaggaa

SEQ ID NO: 2343179 - RNA, 19 nt, Artificial Sequence
  Description of Artificial Sequence: Synthetic oligonucleotide
  Antisense strand to SEQ ID NO: 2343178
uuccuaagcacaauuaagu

SEQ ID NO: 2343180 - RNA, 19 nt, Artificial Sequence
  Description of Artificial Sequence: Synthetic oligonucleotide
  Sense strand starting at position 3720 of SEQ ID NO: 1885449
cuuaauugugcuuaggaau

SEQ ID NO: 2343181 - RNA, 19 nt, Artificial Sequence
  Description of Artificial Sequence: Synthetic oligonucleotide
  Antisense strand to SEQ ID NO: 2343180
auuccuaagcacaauuaag

SEQ ID NO: 2343182 - RNA, 19 nt, Artificial Sequence
  Description of Artificial Sequence: Synthetic oligonucleotide
  Sense strand starting at position 3796 of SEQ ID NO: 1885449
uucugagaccgcugaggau

SEQ ID NO: 2343183 - RNA, 19 nt, Artificial Sequence
  Description of Artificial Sequence: Synthetic oligonucleotide
  Antisense strand to SEQ ID NO: 2343182
auccucagcggucucagaa

SEQ ID NO: 2343184 - RNA, 19 nt, Artificial Sequence
  Description of Artificial Sequence: Synthetic oligonucleotide
  Sense strand starting at position 173 of SEQ ID NO: 1885450
gcuggacagcuuuggagaa

SEQ ID NO: 2343185 - RNA, 19 nt, Artificial Sequence
  Description of Artificial Sequence: Synthetic oligonucleotide
  Antisense strand to SEQ ID NO: 2343184
uucuccaaagcuguccagc

SEQ ID NO: 2343186 - RNA, 19 nt, Artificial Sequence
  Description of Artificial Sequence: Synthetic oligonucleotide
  Sense strand starting at position 205 of SEQ ID NO: 1885450
gaaugaguauaucugacca

SEQ ID NO: 2343187 - RNA, 19 nt, Artificial Sequence
  Description of Artificial Sequence: Synthetic oligonucleotide
  Antisense strand to SEQ ID NO: 2343186
uggucagauauacucauuc

SEQ ID NO: 2343188 - RNA, 19 nt, Artificial Sequence
  Description of Artificial Sequence: Synthetic oligonucleotide
  Sense strand starting at position 311 of SEQ ID NO: 1885450
gaagaagugcugcaguuga

SEQ ID NO: 2343189 - RNA, 19 nt, Artificial Sequence
  Description of Artificial Sequence: Synthetic oligonucleotide
  Antisense strand to SEQ ID NO: 2343188
ucaacugcagcacuucuuc

SEQ ID NO: 2343190 - RNA, 19 nt, Artificial Sequence
  Description of Artificial Sequence: Synthetic oligonucleotide
  Sense strand starting at position 330 of SEQ ID NO: 1885450
ucaugaguuccaggaauua

SEQ ID NO: 2343191 - RNA, 19 nt, Artificial Sequence
  Description of Artificial Sequence: Synthetic oligonucleotide
  Antisense strand to SEQ ID NO: 2343190
uaauuccuggaacucauga

SEQ ID NO: 2343192 - RNA, 19 nt, Artificial Sequence
  Description of Artificial Sequence: Synthetic oligonucleotide
  Sense strand starting at position 339 of SEQ ID NO: 1885450
ccaggaauuauguaugguu

SEQ ID NO: 2343193 - RNA, 19 nt, Artificial Sequence
  Description of Artificial Sequence: Synthetic oligonucleotide
  Antisense strand to SEQ ID NO: 2343192
aaccauacauaauuccugg

SEQ ID NO: 2343194 - RNA, 19 nt, Artificial Sequence
  Description of Artificial Sequence: Synthetic oligonucleotide
  Sense strand starting at position 341 of SEQ ID NO: 1885450
aggaauuauguaugguugu

SEQ ID NO: 2343195 - RNA, 19 nt, Artificial Sequence
  Description of Artificial Sequence: Synthetic oligonucleotide
  Antisense strand to SEQ ID NO: 2343194
acaaccauacauaauuccu

SEQ ID NO: 2343196 - RNA, 19 nt, Artificial Sequence
  Description of Artificial Sequence: Synthetic oligonucleotide
  Sense strand starting at position 479 of SEQ ID NO: 1885450
ugaacuccaucgucuauaa

SEQ ID NO: 2343197 - RNA, 19 nt, Artificial Sequence
  Description of Artificial Sequence: Synthetic oligonucleotide
  Antisense strand to SEQ ID NO: 2343196
uuauagacgauggaguuca

SEQ ID NO: 2343198 - RNA, 19 nt, Artificial Sequence
  Description of Artificial Sequence: Synthetic oligonucleotide
  Sense strand starting at position 598 of SEQ ID NO: 1885450
gugauuauauaguuaucac

SEQ ID NO: 2343199 - RNA, 19 nt, Artificial Sequence
  Description of Artificial Sequence: Synthetic oligonucleotide
  Antisense strand to SEQ ID NO: 2343198
gugauaacuauauaaucac

SEQ ID NO: 2343200 - RNA, 19 nt, Artificial Sequence
  Description of Artificial Sequence: Synthetic oligonucleotide
  Sense strand starting at position 613 of SEQ ID NO: 1885450
ucacauuuaguauguguua

SEQ ID NO: 2343201 - RNA, 19 nt, Artificial Sequence
  Description of Artificial Sequence: Synthetic oligonucleotide
  Antisense strand to SEQ ID NO: 2343200
uaacacauacuaaauguga

SEQ ID NO: 2343202 - RNA, 19 nt, Artificial Sequence
  Description of Artificial Sequence: Synthetic oligonucleotide
  Sense strand starting at position 614 of SEQ ID NO: 1885450
cacauuuaguauguguuau

SEQ ID NO: 2343203 - RNA, 19 nt, Artificial Sequence
  Description of Artificial Sequence: Synthetic oligonucleotide
  Antisense strand to SEQ ID NO: 2343202
auaacacauacuaaaugug

SEQ ID NO: 2343204 - RNA, 19 nt, Artificial Sequence
  Description of Artificial Sequence: Synthetic oligonucleotide
  Sense strand starting at position 616 of SEQ ID NO: 1885450
cauuuaguauguguuauac

SEQ ID NO: 2343205 - RNA, 19 nt, Artificial Sequence
  Description of Artificial Sequence: Synthetic oligonucleotide
  Antisense strand to SEQ ID NO: 2343204
guauaacacauacuaaaug

SEQ ID NO: 2343206 - RNA, 19 nt, Artificial Sequence
  Description of Artificial Sequence: Synthetic oligonucleotide
  Sense strand starting at position 836 of SEQ ID NO: 1885450
ugggaaaucucuccuucua

SEQ ID NO: 2343207 - RNA, 19 nt, Artificial Sequence
  Description of Artificial Sequence: Synthetic oligonucleotide
  Antisense strand to SEQ ID NO: 2343206
uagaaggagagauuuccca

SEQ ID NO: 2343208 - RNA, 19 nt, Artificial Sequence
  Description of Artificial Sequence: Synthetic oligonucleotide
  Sense strand starting at position 838 of SEQ ID NO: 1885450
ggaaaucucuccuucuaga

SEQ ID NO: 2343209 - RNA, 19 nt, Artificial Sequence
  Description of Artificial Sequence: Synthetic oligonucleotide
  Antisense strand to SEQ ID NO: 2343208
ucuagaaggagagauuucc

SEQ ID NO: 2343210 - RNA, 19 nt, Artificial Sequence
  Description of Artificial Sequence: Synthetic oligonucleotide
  Sense strand starting at position 862 of SEQ ID NO: 1885450
auuccagaagcaugaaacu

SEQ ID NO: 2343211 - RNA, 19 nt, Artificial Sequence
  Description of Artificial Sequence: Synthetic oligonucleotide
  Antisense strand to SEQ ID NO: 2343210
aguuucaugcuucuggaau

SEQ ID NO: 2343212 - RNA, 19 nt, Artificial Sequence
  Description of Artificial Sequence: Synthetic oligonucleotide
  Sense strand starting at position 871 of SEQ ID NO: 1885450
gcaugaaacuaccugggaa

SEQ ID NO: 2343213 - RNA, 19 nt, Artificial Sequence
  Description of Artificial Sequence: Synthetic oligonucleotide
  Antisense strand to SEQ ID NO: 2343212
uucccagguaguuucaugc

SEQ ID NO: 2343214 - RNA, 19 nt, Artificial Sequence
  Description of Artificial Sequence: Synthetic oligonucleotide
  Sense strand starting at position 1023 of SEQ ID NO: 1885450
guuagaccuguugggaaga

SEQ ID NO: 2343215 - RNA, 19 nt, Artificial Sequence
  Description of Artificial Sequence: Synthetic oligonucleotide
  Antisense strand to SEQ ID NO: 2343214
ucuucccaacaggucuaac

SEQ ID NO: 2343216 - RNA, 19 nt, Artificial Sequence
  Description of Artificial Sequence: Synthetic oligonucleotide
  Sense strand starting at position 1041 of SEQ ID NO: 1885450
aggccagucagaugaaauu

SEQ ID NO: 2343217 - RNA, 19 nt, Artificial Sequence
  Description of Artificial Sequence: Synthetic oligonucleotide
  Antisense strand to SEQ ID NO: 2343216
aauuucaucugacuggccu

SEQ ID NO: 2343218 - RNA, 19 nt, Artificial Sequence
  Description of Artificial Sequence: Synthetic oligonucleotide
  Sense strand starting at position 1077 of SEQ ID NO: 1885450
gacuaaggagucgggcaau

SEQ ID NO: 2343219 - RNA, 19 nt, Artificial Sequence
  Description of Artificial Sequence: Synthetic oligonucleotide
  Antisense strand to SEQ ID NO: 2343218
auugcccgacuccuuaguc

SEQ ID NO: 2343220 - RNA, 19 nt, Artificial Sequence
  Description of Artificial Sequence: Synthetic oligonucleotide
  Sense strand starting at position 1166 of SEQ ID NO: 1885450
ucgacuuuaggaggugaga

SEQ ID NO: 2343221 - RNA, 19 nt, Artificial Sequence
  Description of Artificial Sequence: Synthetic oligonucleotide
  Antisense strand to SEQ ID NO: 2343220
ucucaccuccuaaagucga

SEQ ID NO: 2343222 - RNA, 19 nt, Artificial Sequence
  Description of Artificial Sequence: Synthetic oligonucleotide
  Sense strand starting at position 1359 of SEQ ID NO: 1885450
gugugacaucuccggagga

SEQ ID NO: 2343223 - RNA, 19 nt, Artificial Sequence
  Description of Artificial Sequence: Synthetic oligonucleotide
  Antisense strand to SEQ ID NO: 2343222
uccuccggagaugucacac

SEQ ID NO: 2343224 - RNA, 19 nt, Artificial Sequence
  Description of Artificial Sequence: Synthetic oligonucleotide
  Sense strand starting at position 1372 of SEQ ID NO: 1885450
ggaggaagccuccgagauu

SEQ ID NO: 2343225 - RNA, 19 nt, Artificial Sequence
  Description of Artificial Sequence: Synthetic oligonucleotide
  Antisense strand to SEQ ID NO: 2343224
aaucucggaggcuuccucc

SEQ ID NO: 2343226 - RNA, 19 nt, Artificial Sequence
  Description of Artificial Sequence: Synthetic oligonucleotide
  Sense strand starting at position 1487 of SEQ ID NO: 1885450
ccggcuucuggagagaucu

SEQ ID NO: 2343227 - RNA, 19 nt, Artificial Sequence
  Description of Artificial Sequence: Synthetic oligonucleotide
  Antisense strand to SEQ ID NO: 2343226
agaucucuccagaagccgg

SEQ ID NO: 2343228 - RNA, 19 nt, Artificial Sequence
  Description of Artificial Sequence: Synthetic oligonucleotide
  Sense strand starting at position 1493 of SEQ ID NO: 1885450
ucuggagagaucugcgaga

SEQ ID NO: 2343229 - RNA, 19 nt, Artificial Sequence
  Description of Artificial Sequence: Synthetic oligonucleotide
  Antisense strand to SEQ ID NO: 2343228
ucucgcagaucucuccaga

SEQ ID NO: 2343230 - RNA, 19 nt, Artificial Sequence
  Description of Artificial Sequence: Synthetic oligonucleotide
  Sense strand starting at position 2221 of SEQ ID NO: 1885450
cgacauuauuucuagggau

SEQ ID NO: 2343231 - RNA, 19 nt, Artificial Sequence
  Description of Artificial Sequence: Synthetic oligonucleotide
  Antisense strand to SEQ ID NO: 2343230
aucccuagaaauaaugucg

SEQ ID NO: 2343232 - RNA, 19 nt, Artificial Sequence
  Description of Artificial Sequence: Synthetic oligonucleotide
  Sense strand starting at position 2224 of SEQ ID NO: 1885450
cauuauuucuagggaugga

SEQ ID NO: 2343233 - RNA, 19 nt, Artificial Sequence
  Description of Artificial Sequence: Synthetic oligonucleotide
  Antisense strand to SEQ ID NO: 2343232
uccaucccuagaaauaaug

SEQ ID NO: 2343234 - RNA, 19 nt, Artificial Sequence
  Description of Artificial Sequence: Synthetic oligonucleotide
  Sense strand starting at position 2616 of SEQ ID NO: 1885450
ugaggguuccgaggaaugu

SEQ ID NO: 2343235 - RNA, 19 nt, Artificial Sequence
  Description of Artificial Sequence: Synthetic oligonucleotide
  Antisense strand to SEQ ID NO: 2343234
acauuccucggaacccuca

SEQ ID NO: 2343236 - RNA, 19 nt, Artificial Sequence
  Description of Artificial Sequence: Synthetic oligonucleotide
  Sense strand starting at position 3198 of SEQ ID NO: 1885450
ucaucaaguccugggaaac

SEQ ID NO: 2343237 - RNA, 19 nt, Artificial Sequence
  Description of Artificial Sequence: Synthetic oligonucleotide
  Antisense strand to SEQ ID NO: 2343236
guuucccaggacuugauga

SEQ ID NO: 2343238 - RNA, 19 nt, Artificial Sequence
  Description of Artificial Sequence: Synthetic oligonucleotide
  Sense strand starting at position 3199 of SEQ ID NO: 1885450
caucaaguccugggaaacu

SEQ ID NO: 2343239 - RNA, 19 nt, Artificial Sequence
  Description of Artificial Sequence: Synthetic oligonucleotide
  Antisense strand to SEQ ID NO: 2343238
aguuucccaggacuugaug

SEQ ID NO: 2343240 - RNA, 19 nt, Artificial Sequence
  Description of Artificial Sequence: Synthetic oligonucleotide
  Sense strand starting at position 3268 of SEQ ID NO: 1885450
agugacccgaguuauaaau

SEQ ID NO: 2343241 - RNA, 19 nt, Artificial Sequence
  Description of Artificial Sequence: Synthetic oligonucleotide
  Antisense strand to SEQ ID NO: 2343240
auuuauaacucgggucacu

SEQ ID NO: 2343242 - RNA, 19 nt, Artificial Sequence
  Description of Artificial Sequence: Synthetic oligonucleotide
  Sense strand starting at position 3391 of SEQ ID NO: 1885450
guacguugaaauuaaguua

SEQ ID NO: 2343243 - RNA, 19 nt, Artificial Sequence
  Description of Artificial Sequence: Synthetic oligonucleotide
  Antisense strand to SEQ ID NO: 2343242
uaacuuaauuucaacguac

SEQ ID NO: 2343244 - RNA, 19 nt, Artificial Sequence
  Description of Artificial Sequence: Synthetic oligonucleotide
  Sense strand starting at position 3394 of SEQ ID NO: 1885450
cguugaaauuaaguuacca

SEQ ID NO: 2343245 - RNA, 19 nt, Artificial Sequence
  Description of Artificial Sequence: Synthetic oligonucleotide
  Antisense strand to SEQ ID NO: 2343244
ugguaacuuaauuucaacg

SEQ ID NO: 2343246 - RNA, 19 nt, Artificial Sequence
  Description of Artificial Sequence: Synthetic oligonucleotide
  Sense strand starting at position 3418 of SEQ ID NO: 1885450
uuuaauaaccaaggugauu

SEQ ID NO: 2343247 - RNA, 19 nt, Artificial Sequence
  Description of Artificial Sequence: Synthetic oligonucleotide
  Antisense strand to SEQ ID NO: 2343246
aaucaccuugguuauuaaa

SEQ ID NO: 2343248 - RNA, 19 nt, Artificial Sequence
  Description of Artificial Sequence: Synthetic oligonucleotide
  Sense strand starting at position 3436 of SEQ ID NO: 1885450
uauuaaacugauugagggu

SEQ ID NO: 2343249 - RNA, 19 nt, Artificial Sequence
  Description of Artificial Sequence: Synthetic oligonucleotide
  Antisense strand to SEQ ID NO: 2343248
acccucaaucaguuuaaua

SEQ ID NO: 2343250 - RNA, 19 nt, Artificial Sequence
  Description of Artificial Sequence: Synthetic oligonucleotide
  Sense strand starting at position 3480 of SEQ ID NO: 1885450
aguacuuucuugguaauca

SEQ ID NO: 2343251 - RNA, 19 nt, Artificial Sequence
  Description of Artificial Sequence: Synthetic oligonucleotide
  Antisense strand to SEQ ID NO: 2343250
ugauuaccaagaaaguacu

SEQ ID NO: 2343252 - RNA, 19 nt, Artificial Sequence
  Description of Artificial Sequence: Synthetic oligonucleotide
  Sense strand starting at position 3547 of SEQ ID NO: 1885450
ggaauuaagugcuuugauu

SEQ ID NO: 2343253 - RNA, 19 nt, Artificial Sequence
  Description of Artificial Sequence: Synthetic oligonucleotide
  Antisense strand to SEQ ID NO: 2343252
aaucaaagcacuuaauucc

SEQ ID NO: 2343254 - RNA, 19 nt, Artificial Sequence
  Description of Artificial Sequence: Synthetic oligonucleotide
  Sense strand starting at position 3857 of SEQ ID NO: 1885450
aggaguuaaacugagcagu

SEQ ID NO: 2343255 - RNA, 19 nt, Artificial Sequence
  Description of Artificial Sequence: Synthetic oligonucleotide
  Antisense strand to SEQ ID NO: 2343254
acugcucaguuuaacuccu

SEQ ID NO: 2343256 - RNA, 19 nt, Artificial Sequence
  Description of Artificial Sequence: Synthetic oligonucleotide
  Sense strand starting at position 3859 of SEQ ID NO: 1885450
gaguuaaacugagcaguga

SEQ ID NO: 2343257 - RNA, 19 nt, Artificial Sequence
  Description of Artificial Sequence: Synthetic oligonucleotide
  Antisense strand to SEQ ID NO: 2343256
ucacugcucaguuuaacuc

SEQ ID NO: 2343258 - RNA, 19 nt, Artificial Sequence
  Description of Artificial Sequence: Synthetic oligonucleotide
  Sense strand starting at position 3860 of SEQ ID NO: 1885450
aguuaaacugagcagugaa

SEQ ID NO: 2343259 - RNA, 19 nt, Artificial Sequence
  Description of Artificial Sequence: Synthetic oligonucleotide
  Antisense strand to SEQ ID NO: 2343258
uucacugcucaguuuaacu

SEQ ID NO: 2343260 - RNA, 19 nt, Artificial Sequence
  Description of Artificial Sequence: Synthetic oligonucleotide
  Sense strand starting at position 3863 of SEQ ID NO: 1885450
uaaacugagcagugaauga

SEQ ID NO: 2343261 - RNA, 19 nt, Artificial Sequence
  Description of Artificial Sequence: Synthetic oligonucleotide
  Antisense strand to SEQ ID NO: 2343260
ucauucacugcucaguuua

SEQ ID NO: 2343262 - RNA, 19 nt, Artificial Sequence
  Description of Artificial Sequence: Synthetic oligonucleotide
  Sense strand starting at position 3978 of SEQ ID NO: 1885450
agaaaucagcagugagaua

SEQ ID NO: 2343263 - RNA, 19 nt, Artificial Sequence
  Description of Artificial Sequence: Synthetic oligonucleotide
  Antisense strand to SEQ ID NO: 2343262
uaucucacugcugauuucu

SEQ ID NO: 2343264 - RNA, 19 nt, Artificial Sequence
  Description of Artificial Sequence: Synthetic oligonucleotide
  Sense strand starting at position 4 of SEQ ID NO: 1885451
agagaagucuaguaagcag

SEQ ID NO: 2343265 - RNA, 19 nt, Artificial Sequence
  Description of Artificial Sequence: Synthetic oligonucleotide
  Antisense strand to SEQ ID NO: 2343264
cugcuuacuagacuucucu

SEQ ID NO: 2343266 - RNA, 19 nt, Artificial Sequence
  Description of Artificial Sequence: Synthetic oligonucleotide
  Sense strand starting at position 12 of SEQ ID NO: 1885451
cuaguaagcagcuggagau

SEQ ID NO: 2343267 - RNA, 19 nt, Artificial Sequence
  Description of Artificial Sequence: Synthetic oligonucleotide
  Antisense strand to SEQ ID NO: 2343266
aucuccagcugcuuacuag

SEQ ID NO: 2343268 - RNA, 19 nt, Artificial Sequence
  Description of Artificial Sequence: Synthetic oligonucleotide
  Sense strand starting at position 100 of SEQ ID NO: 1885451
cauauagcagcugguaaau

SEQ ID NO: 2343269 - RNA, 19 nt, Artificial Sequence
  Description of Artificial Sequence: Synthetic oligonucleotide
  Antisense strand to SEQ ID NO: 2343268
auuuaccagcugcuauaug

SEQ ID NO: 2343270 - RNA, 19 nt, Artificial Sequence
  Description of Artificial Sequence: Synthetic oligonucleotide
  Sense strand starting at position 102 of SEQ ID NO: 1885451
uauagcagcugguaaauua

SEQ ID NO: 2343271 - RNA, 19 nt, Artificial Sequence
  Description of Artificial Sequence: Synthetic oligonucleotide
  Antisense strand to SEQ ID NO: 2343270
uaauuuaccagcugcuaua

SEQ ID NO: 2343272 - RNA, 19 nt, Artificial Sequence
  Description of Artificial Sequence: Synthetic oligonucleotide
  Sense strand starting at position 132 of SEQ ID NO: 1885451
caaauaugguggugaacaa

SEQ ID NO: 2343273 - RNA, 19 nt, Artificial Sequence
  Description of Artificial Sequence: Synthetic oligonucleotide
  Antisense strand to SEQ ID NO: 2343272
uuguucaccaccauauuug

SEQ ID NO: 2343274 - RNA, 19 nt, Artificial Sequence
  Description of Artificial Sequence: Synthetic oligonucleotide
  Sense strand starting at position 167 of SEQ ID NO: 1885451
augacugauuacuaagaaa

SEQ ID NO: 2343275 - RNA, 19 nt, Artificial Sequence
  Description of Artificial Sequence: Synthetic oligonucleotide
  Antisense strand to SEQ ID NO: 2343274
uuucuuaguaaucagucau

SEQ ID NO: 2343276 - RNA, 19 nt, Artificial Sequence
  Description of Artificial Sequence: Synthetic oligonucleotide
  Sense strand starting at position 170 of SEQ ID NO: 1885451
acugauuacuaagaaaguu

SEQ ID NO: 2343277 - RNA, 19 nt, Artificial Sequence
  Description of Artificial Sequence: Synthetic oligonucleotide
  Antisense strand to SEQ ID NO: 2343276
aacuuucuuaguaaucagu

SEQ ID NO: 2343278 - RNA, 19 nt, Artificial Sequence
  Description of Artificial Sequence: Synthetic oligonucleotide
  Sense strand starting at position 260 of SEQ ID NO: 1885451
aguacaauguccucuauau

SEQ ID NO: 2343279 - RNA, 19 nt, Artificial Sequence
  Description of Artificial Sequence: Synthetic oligonucleotide
  Antisense strand to SEQ ID NO: 2343278
auauagaggacauuguacu

SEQ ID NO: 2343280 - RNA, 19 nt, Artificial Sequence
  Description of Artificial Sequence: Synthetic oligonucleotide
  Sense strand starting at position 283 of SEQ ID NO: 1885451
uggacaauguccuggaauc

SEQ ID NO: 2343281 - RNA, 19 nt, Artificial Sequence
  Description of Artificial Sequence: Synthetic oligonucleotide
  Antisense strand to SEQ ID NO: 2343280
gauuccaggacauugucca

SEQ ID NO: 2343282 - RNA, 19 nt, Artificial Sequence
  Description of Artificial Sequence: Synthetic oligonucleotide
  Sense strand starting at position 284 of SEQ ID NO: 1885451
ggacaauguccuggaauca

SEQ ID NO: 2343283 - RNA, 19 nt, Artificial Sequence
  Description of Artificial Sequence: Synthetic oligonucleotide
  Antisense strand to SEQ ID NO: 2343282
ugauuccaggacauugucc

SEQ ID NO: 2343284 - RNA, 19 nt, Artificial Sequence
  Description of Artificial Sequence: Synthetic oligonucleotide
  Sense strand starting at position 300 of SEQ ID NO: 1885451
ucacaucgcuuacugaaau

SEQ ID NO: 2343285 - RNA, 19 nt, Artificial Sequence
  Description of Artificial Sequence: Synthetic oligonucleotide
  Antisense strand to SEQ ID NO: 2343284
auuucaguaagcgauguga

SEQ ID NO: 2343286 - RNA, 19 nt, Artificial Sequence
  Description of Artificial Sequence: Synthetic oligonucleotide
  Sense strand starting at position 325 of SEQ ID NO: 1885451
ugaaauauauguccucgga

SEQ ID NO: 2343287 - RNA, 19 nt, Artificial Sequence
  Description of Artificial Sequence: Synthetic oligonucleotide
  Antisense strand to SEQ ID NO: 2343286
uccgaggacauauauuuca

SEQ ID NO: 2343288 - RNA, 19 nt, Artificial Sequence
  Description of Artificial Sequence: Synthetic oligonucleotide
  Sense strand starting at position 327 of SEQ ID NO: 1885451
aaauauauguccucggaug

SEQ ID NO: 2343289 - RNA, 19 nt, Artificial Sequence
  Description of Artificial Sequence: Synthetic oligonucleotide
  Antisense strand to SEQ ID NO: 2343288
cauccgaggacauauauuu

SEQ ID NO: 2343290 - RNA, 19 nt, Artificial Sequence
  Description of Artificial Sequence: Synthetic oligonucleotide
  Sense strand starting at position 329 of SEQ ID NO: 1885451
auauauguccucggaugga

SEQ ID NO: 2343291 - RNA, 19 nt, Artificial Sequence
  Description of Artificial Sequence: Synthetic oligonucleotide
  Antisense strand to SEQ ID NO: 2343290
uccauccgaggacauauau

SEQ ID NO: 2343292 - RNA, 19 nt, Artificial Sequence
  Description of Artificial Sequence: Synthetic oligonucleotide
  Sense strand starting at position 332 of SEQ ID NO: 1885451
uauguccucggauggagaa

SEQ ID NO: 2343293 - RNA, 19 nt, Artificial Sequence
  Description of Artificial Sequence: Synthetic oligonucleotide
  Antisense strand to SEQ ID NO: 2343292
uucuccauccgaggacaua

SEQ ID NO: 2343294 - RNA, 19 nt, Artificial Sequence
  Description of Artificial Sequence: Synthetic oligonucleotide
  Sense strand starting at position 2082 of SEQ ID NO: 1885451
gagguugccuagucuagua

SEQ ID NO: 2343295 - RNA, 19 nt, Artificial Sequence
  Description of Artificial Sequence: Synthetic oligonucleotide
  Antisense strand to SEQ ID NO: 2343294
uacuagacuaggcaaccuc

SEQ ID NO: 2343296 - RNA, 19 nt, Artificial Sequence
  Description of Artificial Sequence: Synthetic oligonucleotide
  Sense strand starting at position 2129 of SEQ ID NO: 1885451
uguacaaaggacuguaaau

SEQ ID NO: 2343297 - RNA, 19 nt, Artificial Sequence
  Description of Artificial Sequence: Synthetic oligonucleotide
  Antisense strand to SEQ ID NO: 2343296
auuuacaguccuuuguaca

SEQ ID NO: 2343298 - RNA, 19 nt, Artificial Sequence
  Description of Artificial Sequence: Synthetic oligonucleotide
  Sense strand starting at position 2185 of SEQ ID NO: 1885451
guacuaagagcucacuaca

SEQ ID NO: 2343299 - RNA, 19 nt, Artificial Sequence
  Description of Artificial Sequence: Synthetic oligonucleotide
  Antisense strand to SEQ ID NO: 2343298
uguagugagcucuuaguac

SEQ ID NO: 2343300 - RNA, 19 nt, Artificial Sequence
  Description of Artificial Sequence: Synthetic oligonucleotide
  Sense strand starting at position 2217 of SEQ ID NO: 1885451
aauuaagagugccaggaau

SEQ ID NO: 2343301 - RNA, 19 nt, Artificial Sequence
  Description of Artificial Sequence: Synthetic oligonucleotide
  Antisense strand to SEQ ID NO: 2343300
auuccuggcacucuuaauu

SEQ ID NO: 2343302 - RNA, 19 nt, Artificial Sequence
  Description of Artificial Sequence: Synthetic oligonucleotide
  Sense strand starting at position 2416 of SEQ ID NO: 1885451
ucauauuagucgcuugauu

SEQ ID NO: 2343303 - RNA, 19 nt, Artificial Sequence
  Description of Artificial Sequence: Synthetic oligonucleotide
  Antisense strand to SEQ ID NO: 2343302
aaucaagcgacuaauauga

SEQ ID NO: 2343304 - RNA, 19 nt, Artificial Sequence
  Description of Artificial Sequence: Synthetic oligonucleotide
  Sense strand starting at position 2418 of SEQ ID NO: 1885451
auauuagucgcuugauuau

SEQ ID NO: 2343305 - RNA, 19 nt, Artificial Sequence
  Description of Artificial Sequence: Synthetic oligonucleotide
  Antisense strand to SEQ ID NO: 2343304
auaaucaagcgacuaauau

SEQ ID NO: 2343306 - RNA, 19 nt, Artificial Sequence
  Description of Artificial Sequence: Synthetic oligonucleotide
  Sense strand starting at position 2421 of SEQ ID NO: 1885451
uuagucgcuugauuauaga

SEQ ID NO: 2343307 - RNA, 19 nt, Artificial Sequence
  Description of Artificial Sequence: Synthetic oligonucleotide
  Antisense strand to SEQ ID NO: 2343306
ucuauaaucaagcgacuaa

SEQ ID NO: 2343308 - RNA, 19 nt, Artificial Sequence
  Description of Artificial Sequence: Synthetic oligonucleotide
  Sense strand starting at position 2757 of SEQ ID NO: 1885451
ggccgauuauaguaaacug

SEQ ID NO: 2343309 - RNA, 19 nt, Artificial Sequence
  Description of Artificial Sequence: Synthetic oligonucleotide
  Antisense strand to SEQ ID NO: 2343308
caguuuacuauaaucggcc

SEQ ID NO: 2343310 - RNA, 19 nt, Artificial Sequence
  Description of Artificial Sequence: Synthetic oligonucleotide
  Sense strand starting at position 2785 of SEQ ID NO: 1885451
auuguuacauccuuggaua

SEQ ID NO: 2343311 - RNA, 19 nt, Artificial Sequence
  Description of Artificial Sequence: Synthetic oligonucleotide
  Antisense strand to SEQ ID NO: 2343310
uauccaaggauguaacaau

SEQ ID NO: 2343312 - RNA, 19 nt, Artificial Sequence
  Description of Artificial Sequence: Synthetic oligonucleotide
  Sense strand starting at position 2786 of SEQ ID NO: 1885451
uuguuacauccuuggauac

SEQ ID NO: 2343313 - RNA, 19 nt, Artificial Sequence
  Description of Artificial Sequence: Synthetic oligonucleotide
  Antisense strand to SEQ ID NO: 2343312
guauccaaggauguaacaa

SEQ ID NO: 2343314 - RNA, 19 nt, Artificial Sequence
  Description of Artificial Sequence: Synthetic oligonucleotide
  Sense strand starting at position 2787 of SEQ ID NO: 1885451
uguuacauccuuggauaca

SEQ ID NO: 2343315 - RNA, 19 nt, Artificial Sequence
  Description of Artificial Sequence: Synthetic oligonucleotide
  Antisense strand to SEQ ID NO: 2343314
uguauccaaggauguaaca

SEQ ID NO: 2343316 - RNA, 19 nt, Artificial Sequence
  Description of Artificial Sequence: Synthetic oligonucleotide
  Sense strand starting at position 2788 of SEQ ID NO: 1885451
guuacauccuuggauacau

SEQ ID NO: 2343317 - RNA, 19 nt, Artificial Sequence
  Description of Artificial Sequence: Synthetic oligonucleotide
  Antisense strand to SEQ ID NO: 2343316
auguauccaaggauguaac

SEQ ID NO: 2343318 - RNA, 19 nt, Artificial Sequence
  Description of Artificial Sequence: Synthetic oligonucleotide
  Sense strand starting at position 2836 of SEQ ID NO: 1885451
uuuagauuauagcgagaga

SEQ ID NO: 2343319 - RNA, 19 nt, Artificial Sequence
  Description of Artificial Sequence: Synthetic oligonucleotide
  Antisense strand to SEQ ID NO: 2343318
ucucucgcuauaaucuaaa

SEQ ID NO: 2343320 - RNA, 19 nt, Artificial Sequence
  Description of Artificial Sequence: Synthetic oligonucleotide
  Sense strand starting at position 2857 of SEQ ID NO: 1885451
ggcaguuagcaagaaagga

SEQ ID NO: 2343321 - RNA, 19 nt, Artificial Sequence
  Description of Artificial Sequence: Synthetic oligonucleotide
  Antisense strand to SEQ ID NO: 2343320
uccuuucuugcuaacugcc

SEQ ID NO: 2343322 - RNA, 19 nt, Artificial Sequence
  Description of Artificial Sequence: Synthetic oligonucleotide
  Sense strand starting at position 3091 of SEQ ID NO: 1885451
gucggcuccucgaggauaa

SEQ ID NO: 2343323 - RNA, 19 nt, Artificial Sequence
  Description of Artificial Sequence: Synthetic oligonucleotide
  Antisense strand to SEQ ID NO: 2343322
uuauccucgaggagccgac

SEQ ID NO: 2343324 - RNA, 19 nt, Artificial Sequence
  Description of Artificial Sequence: Synthetic oligonucleotide
  Sense strand starting at position 3093 of SEQ ID NO: 1885451
cggcuccucgaggauaaga

SEQ ID NO: 2343325 - RNA, 19 nt, Artificial Sequence
  Description of Artificial Sequence: Synthetic oligonucleotide
  Antisense strand to SEQ ID NO: 2343324
ucuuauccucgaggagccg

SEQ ID NO: 2343326 - RNA, 19 nt, Artificial Sequence
  Description of Artificial Sequence: Synthetic oligonucleotide
  Sense strand starting at position 3095 of SEQ ID NO: 1885451
gcuccucgaggauaagaau

SEQ ID NO: 2343327 - RNA, 19 nt, Artificial Sequence
  Description of Artificial Sequence: Synthetic oligonucleotide
  Antisense strand to SEQ ID NO: 2343326
auucuuauccucgaggagc

SEQ ID NO: 2343328 - RNA, 19 nt, Artificial Sequence
  Description of Artificial Sequence: Synthetic oligonucleotide
  Sense strand starting at position 3104 of SEQ ID NO: 1885451
ggauaagaaucacaucuua

SEQ ID NO: 2343329 - RNA, 19 nt, Artificial Sequence
  Description of Artificial Sequence: Synthetic oligonucleotide
  Antisense strand to SEQ ID NO: 2343328
uaagaugugauucuuaucc

SEQ ID NO: 2343330 - RNA, 19 nt, Artificial Sequence
  Description of Artificial Sequence: Synthetic oligonucleotide
  Sense strand starting at position 3131 of SEQ ID NO: 1885451
uugugacuccuaugagccu

SEQ ID NO: 2343331 - RNA, 19 nt, Artificial Sequence
  Description of Artificial Sequence: Synthetic oligonucleotide
  Antisense strand to SEQ ID NO: 2343330
aggcucauaggagucacaa

SEQ ID NO: 2343332 - RNA, 19 nt, Artificial Sequence
  Description of Artificial Sequence: Synthetic oligonucleotide
  Sense strand starting at position 3137 of SEQ ID NO: 1885451
cuccuaugagccuagaaug

SEQ ID NO: 2343333 - RNA, 19 nt, Artificial Sequence
  Description of Artificial Sequence: Synthetic oligonucleotide
  Antisense strand to SEQ ID NO: 2343332
cauucuaggcucauaggag

SEQ ID NO: 2343334 - RNA, 19 nt, Artificial Sequence
  Description of Artificial Sequence: Synthetic oligonucleotide
  Sense strand starting at position 3145 of SEQ ID NO: 1885451
agccuagaaugguucuuau

SEQ ID NO: 2343335 - RNA, 19 nt, Artificial Sequence
  Description of Artificial Sequence: Synthetic oligonucleotide
  Antisense strand to SEQ ID NO: 2343334
auaagaaccauucuaggcu

SEQ ID NO: 2343336 - RNA, 19 nt, Artificial Sequence
  Description of Artificial Sequence: Synthetic oligonucleotide
  Sense strand starting at position 3148 of SEQ ID NO: 1885451
cuagaaugguucuuauaaa

SEQ ID NO: 2343337 - RNA, 19 nt, Artificial Sequence
  Description of Artificial Sequence: Synthetic oligonucleotide
  Antisense strand to SEQ ID NO: 2343336
uuuauaagaaccauucuag

SEQ ID NO: 2343338 - RNA, 19 nt, Artificial Sequence
  Description of Artificial Sequence: Synthetic oligonucleotide
  Sense strand starting at position 3451 of SEQ ID NO: 1885451
auuguccagucugaaacaa

SEQ ID NO: 2343339 - RNA, 19 nt, Artificial Sequence
  Description of Artificial Sequence: Synthetic oligonucleotide
  Antisense strand to SEQ ID NO: 2343338
uuguuucagacuggacaau

SEQ ID NO: 2343340 - RNA, 19 nt, Artificial Sequence
  Description of Artificial Sequence: Synthetic oligonucleotide
  Sense strand starting at position 3622 of SEQ ID NO: 1885451
ugcaauuaagaguaguuau

SEQ ID NO: 2343341 - RNA, 19 nt, Artificial Sequence
  Description of Artificial Sequence: Synthetic oligonucleotide
  Antisense strand to SEQ ID NO: 2343340
auaacuacucuuaauugca

SEQ ID NO: 2343342 - RNA, 19 nt, Artificial Sequence
  Description of Artificial Sequence: Synthetic oligonucleotide
  Sense strand starting at position 3748 of SEQ ID NO: 1885451
guucuaguauuugauacua

SEQ ID NO: 2343343 - RNA, 19 nt, Artificial Sequence
  Description of Artificial Sequence: Synthetic oligonucleotide
  Antisense strand to SEQ ID NO: 2343342
uaguaucaaauacuagaac

SEQ ID NO: 2343344 - RNA, 19 nt, Artificial Sequence
  Description of Artificial Sequence: Synthetic oligonucleotide
  Sense strand starting at position 85 of SEQ ID NO: 1885452
guaacuuuagcuuaaguaa

SEQ ID NO: 2343345 - RNA, 19 nt, Artificial Sequence
  Description of Artificial Sequence: Synthetic oligonucleotide
  Antisense strand to SEQ ID NO: 2343344
uuacuuaagcuaaaguuac

SEQ ID NO: 2343346 - RNA, 19 nt, Artificial Sequence
  Description of Artificial Sequence: Synthetic oligonucleotide
  Sense strand starting at position 327 of SEQ ID NO: 1885452
acaaaugauaaguggguuu

SEQ ID NO: 2343347 - RNA, 19 nt, Artificial Sequence
  Description of Artificial Sequence: Synthetic oligonucleotide
  Antisense strand to SEQ ID NO: 2343346
aaacccacuuaucauuugu

SEQ ID NO: 2343348 - RNA, 19 nt, Artificial Sequence
  Description of Artificial Sequence: Synthetic oligonucleotide
  Sense strand starting at position 450 of SEQ ID NO: 1885452
aggguagugaggcaaucaa

SEQ ID NO: 2343349 - RNA, 19 nt, Artificial Sequence
  Description of Artificial Sequence: Synthetic oligonucleotide
  Antisense strand to SEQ ID NO: 2343348
uugauugccucacuacccu

SEQ ID NO: 2343350 - RNA, 19 nt, Artificial Sequence
  Description of Artificial Sequence: Synthetic oligonucleotide
  Sense strand starting at position 500 of SEQ ID NO: 1885452
ugcauugcacaccagauau

SEQ ID NO: 2343351 - RNA, 19 nt, Artificial Sequence
  Description of Artificial Sequence: Synthetic oligonucleotide
  Antisense strand to SEQ ID NO: 2343350
auaucuggugugcaaugca

SEQ ID NO: 2343352 - RNA, 19 nt, Artificial Sequence
  Description of Artificial Sequence: Synthetic oligonucleotide
  Sense strand starting at position 643 of SEQ ID NO: 1885452
ugaggucauuuauagaaga

SEQ ID NO: 2343353 - RNA, 19 nt, Artificial Sequence
  Description of Artificial Sequence: Synthetic oligonucleotide
  Antisense strand to SEQ ID NO: 2343352
ucuucuauaaaugaccuca

SEQ ID NO: 2343354 - RNA, 19 nt, Artificial Sequence
  Description of Artificial Sequence: Synthetic oligonucleotide
  Sense strand starting at position 702 of SEQ ID NO: 1885452
aagagaaauguuggccaau

SEQ ID NO: 2343355 - RNA, 19 nt, Artificial Sequence
  Description of Artificial Sequence: Synthetic oligonucleotide
  Antisense strand to SEQ ID NO: 2343354
auuggccaacauuucucuu

SEQ ID NO: 2343356 - RNA, 19 nt, Artificial Sequence
  Description of Artificial Sequence: Synthetic oligonucleotide
  Sense strand starting at position 703 of SEQ ID NO: 1885452
agagaaauguuggccaauu

SEQ ID NO: 2343357 - RNA, 19 nt, Artificial Sequence
  Description of Artificial Sequence: Synthetic oligonucleotide
  Antisense strand to SEQ ID NO: 2343356
aauuggccaacauuucucu

SEQ ID NO: 2343358 - RNA, 19 nt, Artificial Sequence
  Description of Artificial Sequence: Synthetic oligonucleotide
  Sense strand starting at position 704 of SEQ ID NO: 1885452
gagaaauguuggccaauua

SEQ ID NO: 2343359 - RNA, 19 nt, Artificial Sequence
  Description of Artificial Sequence: Synthetic oligonucleotide
  Antisense strand to SEQ ID NO: 2343358
uaauuggccaacauuucuc

SEQ ID NO: 2343360 - RNA, 19 nt, Artificial Sequence
  Description of Artificial Sequence: Synthetic oligonucleotide
  Sense strand starting at position 764 of SEQ ID NO: 1885452
auguaaggccuugaauaau

SEQ ID NO: 2343361 - RNA, 19 nt, Artificial Sequence
  Description of Artificial Sequence: Synthetic oligonucleotide
  Antisense strand to SEQ ID NO: 2343360
auuauucaaggccuuacau

SEQ ID NO: 2343362 - RNA, 19 nt, Artificial Sequence
  Description of Artificial Sequence: Synthetic oligonucleotide
  Sense strand starting at position 798 of SEQ ID NO: 1885452
gcaaauuuggcuugagcuu

SEQ ID NO: 2343363 - RNA, 19 nt, Artificial Sequence
  Description of Artificial Sequence: Synthetic oligonucleotide
  Antisense strand to SEQ ID NO: 2343362
aagcucaagccaaauuugc

SEQ ID NO: 2343364 - RNA, 19 nt, Artificial Sequence
  Description of Artificial Sequence: Synthetic oligonucleotide
  Sense strand starting at position 809 of SEQ ID NO: 1885452
uugagcuucccugaucuaa

SEQ ID NO: 2343365 - RNA, 19 nt, Artificial Sequence
  Description of Artificial Sequence: Synthetic oligonucleotide
  Antisense strand to SEQ ID NO: 2343364
uuagaucagggaagcucaa

SEQ ID NO: 2343366 - RNA, 19 nt, Artificial Sequence
  Description of Artificial Sequence: Synthetic oligonucleotide
  Sense strand starting at position 948 of SEQ ID NO: 1885452
agaggaauuucucauacaa

SEQ ID NO: 2343367 - RNA, 19 nt, Artificial Sequence
  Description of Artificial Sequence: Synthetic oligonucleotide
  Antisense strand to SEQ ID NO: 2343366
uuguaugagaaauuccucu

SEQ ID NO: 2343368 - RNA, 19 nt, Artificial Sequence
  Description of Artificial Sequence: Synthetic oligonucleotide
  Sense strand starting at position 1022 of SEQ ID NO: 1885452
cugugaauucaguagugag

SEQ ID NO: 2343369 - RNA, 19 nt, Artificial Sequence
  Description of Artificial Sequence: Synthetic oligonucleotide
  Antisense strand to SEQ ID NO: 2343368
cucacuacugaauucacag

SEQ ID NO: 2343370 - RNA, 19 nt, Artificial Sequence
  Description of Artificial Sequence: Synthetic oligonucleotide
  Sense strand starting at position 1271 of SEQ ID NO: 1885452
acauuucugugguuaaguc

SEQ ID NO: 2343371 - RNA, 19 nt, Artificial Sequence
  Description of Artificial Sequence: Synthetic oligonucleotide
  Antisense strand to SEQ ID NO: 2343370
gacuuaaccacagaaaugu

SEQ ID NO: 2343372 - RNA, 19 nt, Artificial Sequence
  Description of Artificial Sequence: Synthetic oligonucleotide
  Sense strand starting at position 1423 of SEQ ID NO: 1885452
ugggaagucacauauugca

SEQ ID NO: 2343373 - RNA, 19 nt, Artificial Sequence
  Description of Artificial Sequence: Synthetic oligonucleotide
  Antisense strand to SEQ ID NO: 2343372
ugcaauaugugacuuccca

SEQ ID NO: 2343374 - RNA, 19 nt, Artificial Sequence
  Description of Artificial Sequence: Synthetic oligonucleotide
  Sense strand starting at position 1470 of SEQ ID NO: 1885452
uggaaaugcugaucuagga

SEQ ID NO: 2343375 - RNA, 19 nt, Artificial Sequence
  Description of Artificial Sequence: Synthetic oligonucleotide
  Antisense strand to SEQ ID NO: 2343374
uccuagaucagcauuucca

SEQ ID NO: 2343376 - RNA, 19 nt, Artificial Sequence
  Description of Artificial Sequence: Synthetic oligonucleotide
  Sense strand starting at position 1474 of SEQ ID NO: 1885452
aaugcugaucuaggagagu

SEQ ID NO: 2343377 - RNA, 19 nt, Artificial Sequence
  Description of Artificial Sequence: Synthetic oligonucleotide
  Antisense strand to SEQ ID NO: 2343376
acucuccuagaucagcauu

SEQ ID NO: 2343378 - RNA, 19 nt, Artificial Sequence
  Description of Artificial Sequence: Synthetic oligonucleotide
  Sense strand starting at position 1537 of SEQ ID NO: 1885452
cuugcauagauuuggcagu

SEQ ID NO: 2343379 - RNA, 19 nt, Artificial Sequence
  Description of Artificial Sequence: Synthetic oligonucleotide
  Antisense strand to SEQ ID NO: 2343378
acugccaaaucuaugcaag

SEQ ID NO: 2343380 - RNA, 19 nt, Artificial Sequence
  Description of Artificial Sequence: Synthetic oligonucleotide
  Sense strand starting at position 1692 of SEQ ID NO: 1885452
caaagauucuaucuugggu

SEQ ID NO: 2343381 - RNA, 19 nt, Artificial Sequence
  Description of Artificial Sequence: Synthetic oligonucleotide
  Antisense strand to SEQ ID NO: 2343380
acccaagauagaaucuuug

SEQ ID NO: 2343382 - RNA, 19 nt, Artificial Sequence
  Description of Artificial Sequence: Synthetic oligonucleotide
  Sense strand starting at position 1733 of SEQ ID NO: 1885452
gguauauggguagaguuaa

SEQ ID NO: 2343383 - RNA, 19 nt, Artificial Sequence
  Description of Artificial Sequence: Synthetic oligonucleotide
  Antisense strand to SEQ ID NO: 2343382
uuaacucuacccauauacc

SEQ ID NO: 2343384 - RNA, 19 nt, Artificial Sequence
  Description of Artificial Sequence: Synthetic oligonucleotide
  Sense strand starting at position 1823 of SEQ ID NO: 1885452
agaaauuauugccuucuag

SEQ ID NO: 2343385 - RNA, 19 nt, Artificial Sequence
  Description of Artificial Sequence: Synthetic oligonucleotide
  Antisense strand to SEQ ID NO: 2343384
cuagaaggcaauaauuucu

SEQ ID NO: 2343386 - RNA, 19 nt, Artificial Sequence
  Description of Artificial Sequence: Synthetic oligonucleotide
  Sense strand starting at position 1849 of SEQ ID NO: 1885452
uuugucuuaccauaaugua

SEQ ID NO: 2343387 - RNA, 19 nt, Artificial Sequence
  Description of Artificial Sequence: Synthetic oligonucleotide
  Antisense strand to SEQ ID NO: 2343386
uacauuaugguaagacaaa

SEQ ID NO: 2343388 - RNA, 19 nt, Artificial Sequence
  Description of Artificial Sequence: Synthetic oligonucleotide
  Sense strand starting at position 2183 of SEQ ID NO: 1885452
gcuuuaguuauggagacaa

SEQ ID NO: 2343389 - RNA, 19 nt, Artificial Sequence
  Description of Artificial Sequence: Synthetic oligonucleotide
  Antisense strand to SEQ ID NO: 2343388
uugucuccauaacuaaagc

SEQ ID NO: 2343390 - RNA, 19 nt, Artificial Sequence
  Description of Artificial Sequence: Synthetic oligonucleotide
  Sense strand starting at position 2296 of SEQ ID NO: 1885452
cgcuucuggagagaaauca

SEQ ID NO: 2343391 - RNA, 19 nt, Artificial Sequence
  Description of Artificial Sequence: Synthetic oligonucleotide
  Antisense strand to SEQ ID NO: 2343390
ugauuucucuccagaagcg

SEQ ID NO: 2343392 - RNA, 19 nt, Artificial Sequence
  Description of Artificial Sequence: Synthetic oligonucleotide
  Sense strand starting at position 2909 of SEQ ID NO: 1885452
aggaaccuuugauuaguau

SEQ ID NO: 2343393 - RNA, 19 nt, Artificial Sequence
  Description of Artificial Sequence: Synthetic oligonucleotide
  Antisense strand to SEQ ID NO: 2343392
auacuaaucaaagguuccu

SEQ ID NO: 2343394 - RNA, 19 nt, Artificial Sequence
  Description of Artificial Sequence: Synthetic oligonucleotide
  Sense strand starting at position 2937 of SEQ ID NO: 1885452
augagugaacaguagcauu

SEQ ID NO: 2343395 - RNA, 19 nt, Artificial Sequence
  Description of Artificial Sequence: Synthetic oligonucleotide
  Antisense strand to SEQ ID NO: 2343394
aaugcuacuguucacucau

SEQ ID NO: 2343396 - RNA, 19 nt, Artificial Sequence
  Description of Artificial Sequence: Synthetic oligonucleotide
  Sense strand starting at position 3112 of SEQ ID NO: 1885452
augauauuccaacgauucu

SEQ ID NO: 2343397 - RNA, 19 nt, Artificial Sequence
  Description of Artificial Sequence: Synthetic oligonucleotide
  Antisense strand to SEQ ID NO: 2343396
agaaucguuggaauaucau

SEQ ID NO: 2343398 - RNA, 19 nt, Artificial Sequence
  Description of Artificial Sequence: Synthetic oligonucleotide
  Sense strand starting at position 3180 of SEQ ID NO: 1885452
agaugcuuugagggacaca

SEQ ID NO: 2343399 - RNA, 19 nt, Artificial Sequence
  Description of Artificial Sequence: Synthetic oligonucleotide
  Antisense strand to SEQ ID NO: 2343398
ugugucccucaaagcaucu

SEQ ID NO: 2343400 - RNA, 19 nt, Artificial Sequence
  Description of Artificial Sequence: Synthetic oligonucleotide
  Sense strand starting at position 3443 of SEQ ID NO: 1885452
agacaaagcugcuuaaaua

SEQ ID NO: 2343401 - RNA, 19 nt, Artificial Sequence
  Description of Artificial Sequence: Synthetic oligonucleotide
  Antisense strand to SEQ ID NO: 2343400
uauuuaagcagcuuugucu

SEQ ID NO: 2343402 - RNA, 19 nt, Artificial Sequence
  Description of Artificial Sequence: Synthetic oligonucleotide
  Sense strand starting at position 3519 of SEQ ID NO: 1885452
aucagucuugcagaauauc

SEQ ID NO: 2343403 - RNA, 19 nt, Artificial Sequence
  Description of Artificial Sequence: Synthetic oligonucleotide
  Antisense strand to SEQ ID NO: 2343402
gauauucugcaagacugau

SEQ ID NO: 2343404 - RNA, 19 nt, Artificial Sequence
  Description of Artificial Sequence: Synthetic oligonucleotide
  Sense strand starting at position 3553 of SEQ ID NO: 1885452
aaggaauuccacugacugu

SEQ ID NO: 2343405 - RNA, 19 nt, Artificial Sequence
  Description of Artificial Sequence: Synthetic oligonucleotide
  Antisense strand to SEQ ID NO: 2343404
acagucaguggaauuccuu

SEQ ID NO: 2343406 - RNA, 19 nt, Artificial Sequence
  Description of Artificial Sequence: Synthetic oligonucleotide
  Sense strand starting at position 3588 of SEQ ID NO: 1885452
ucccaauacugaguggaau

SEQ ID NO: 2343407 - RNA, 19 nt, Artificial Sequence
  Description of Artificial Sequence: Synthetic oligonucleotide
  Antisense strand to SEQ ID NO: 2343406
auuccacucaguauuggga

SEQ ID NO: 2343408 - RNA, 19 nt, Artificial Sequence
  Description of Artificial Sequence: Synthetic oligonucleotide
  Sense strand starting at position 3589 of SEQ ID NO: 1885452
cccaauacugaguggaauu

SEQ ID NO: 2343409 - RNA, 19 nt, Artificial Sequence
  Description of Artificial Sequence: Synthetic oligonucleotide
  Antisense strand to SEQ ID NO: 2343408
aauuccacucaguauuggg

SEQ ID NO: 2343410 - RNA, 19 nt, Artificial Sequence
  Description of Artificial Sequence: Synthetic oligonucleotide
  Sense strand starting at position 3770 of SEQ ID NO: 1885452
uguucuuaggagcaaauaa

SEQ ID NO: 2343411 - RNA, 19 nt, Artificial Sequence
  Description of Artificial Sequence: Synthetic oligonucleotide
  Antisense strand to SEQ ID NO: 2343410
uuauuugcuccuaagaaca

SEQ ID NO: 2343412 - RNA, 19 nt, Artificial Sequence
  Description of Artificial Sequence: Synthetic oligonucleotide
  Sense strand starting at position 3789 of SEQ ID NO: 1885452
uugaaacauguugguugaa

SEQ ID NO: 2343413 - RNA, 19 nt, Artificial Sequence
  Description of Artificial Sequence: Synthetic oligonucleotide
  Antisense strand to SEQ ID NO: 2343412
uucaaccaacauguuucaa

SEQ ID NO: 2343414 - RNA, 19 nt, Artificial Sequence
  Description of Artificial Sequence: Synthetic oligonucleotide
  Sense strand starting at position 3791 of SEQ ID NO: 1885452
gaaacauguugguugaauu

SEQ ID NO: 2343415 - RNA, 19 nt, Artificial Sequence
  Description of Artificial Sequence: Synthetic oligonucleotide
  Antisense strand to SEQ ID NO: 2343414
aauucaaccaacauguuuc

SEQ ID NO: 2343416 - RNA, 19 nt, Artificial Sequence
  Description of Artificial Sequence: Synthetic oligonucleotide
  Sense strand starting at position 3839 of SEQ ID NO: 1885452
uagcccugugauuacagau

SEQ ID NO: 2343417 - RNA, 19 nt, Artificial Sequence
  Description of Artificial Sequence: Synthetic oligonucleotide
  Antisense strand to SEQ ID NO: 2343416
aucuguaaucacagggcua

SEQ ID NO: 2343418 - RNA, 19 nt, Artificial Sequence
  Description of Artificial Sequence: Synthetic oligonucleotide
  Sense strand starting at position 3872 of SEQ ID NO: 1885452
ugggaucaagaaugucuua

SEQ ID NO: 2343419 - RNA, 19 nt, Artificial Sequence
  Description of Artificial Sequence: Synthetic oligonucleotide
  Antisense strand to SEQ ID NO: 2343418
uaagacauucuugauccca

SEQ ID NO: 2343420 - RNA, 19 nt, Artificial Sequence
  Description of Artificial Sequence: Synthetic oligonucleotide
  Sense strand starting at position 3881 of SEQ ID NO: 1885452
gaaugucuuagggauguug

SEQ ID NO: 2343421 - RNA, 19 nt, Artificial Sequence
  Description of Artificial Sequence: Synthetic oligonucleotide
  Antisense strand to SEQ ID NO: 2343420
caacaucccuaagacauuc

SEQ ID NO: 2343422 - RNA, 19 nt, Artificial Sequence
  Description of Artificial Sequence: Synthetic oligonucleotide
  Sense strand starting at position 3890 of SEQ ID NO: 1885452
agggauguuguccaucaac

SEQ ID NO: 2343423 - RNA, 19 nt, Artificial Sequence
  Description of Artificial Sequence: Synthetic oligonucleotide
  Antisense strand to SEQ ID NO: 2343422
guugauggacaacaucccu

SEQ ID NO: 2343424 - RNA, 19 nt, Artificial Sequence
  Description of Artificial Sequence: Synthetic oligonucleotide
  Sense strand starting at position 544 of SEQ ID NO: 1885453
gaagacuuauugcugguau

SEQ ID NO: 2343425 - RNA, 19 nt, Artificial Sequence
  Description of Artificial Sequence: Synthetic oligonucleotide
  Antisense strand to SEQ ID NO: 2343424
auaccagcaauaagucuuc

SEQ ID NO: 2343426 - RNA, 19 nt, Artificial Sequence
  Description of Artificial Sequence: Synthetic oligonucleotide
  Sense strand starting at position 546 of SEQ ID NO: 1885453
agacuuauugcugguaucu

SEQ ID NO: 2343427 - RNA, 19 nt, Artificial Sequence
  Description of Artificial Sequence: Synthetic oligonucleotide
  Antisense strand to SEQ ID NO: 2343426
agauaccagcaauaagucu

SEQ ID NO: 2343428 - RNA, 19 nt, Artificial Sequence
  Description of Artificial Sequence: Synthetic oligonucleotide
  Sense strand starting at position 889 of SEQ ID NO: 1885453
cgcugucuugccucaaauu

SEQ ID NO: 2343429 - RNA, 19 nt, Artificial Sequence
  Description of Artificial Sequence: Synthetic oligonucleotide
  Antisense strand to SEQ ID NO: 2343428
aauuugaggcaagacagcg

SEQ ID NO: 2343430 - RNA, 19 nt, Artificial Sequence
  Description of Artificial Sequence: Synthetic oligonucleotide
  Sense strand starting at position 906 of SEQ ID NO: 1885453
uuguuaaccuuacuuaugu

SEQ ID NO: 2343431 - RNA, 19 nt, Artificial Sequence
  Description of Artificial Sequence: Synthetic oligonucleotide
  Antisense strand to SEQ ID NO: 2343430
acauaaguaagguuaacaa

SEQ ID NO: 2343432 - RNA, 19 nt, Artificial Sequence
  Description of Artificial Sequence: Synthetic oligonucleotide
  Sense strand starting at position 907 of SEQ ID NO: 1885453
uguuaaccuuacuuauguu

SEQ ID NO: 2343433 - RNA, 19 nt, Artificial Sequence
  Description of Artificial Sequence: Synthetic oligonucleotide
  Antisense strand to SEQ ID NO: 2343432
aacauaaguaagguuaaca

SEQ ID NO: 2343434 - RNA, 19 nt, Artificial Sequence
  Description of Artificial Sequence: Synthetic oligonucleotide
  Sense strand starting at position 1137 of SEQ ID NO: 1885453
agcagugaucucuagguua

SEQ ID NO: 2343435 - RNA, 19 nt, Artificial Sequence
  Description of Artificial Sequence: Synthetic oligonucleotide
  Antisense strand to SEQ ID NO: 2343434
uaaccuagagaucacugcu

SEQ ID NO: 2343436 - RNA, 19 nt, Artificial Sequence
  Description of Artificial Sequence: Synthetic oligonucleotide
  Sense strand starting at position 1142 of SEQ ID NO: 1885453
ugaucucuagguuagcuaa

SEQ ID NO: 2343437 - RNA, 19 nt, Artificial Sequence
  Description of Artificial Sequence: Synthetic oligonucleotide
  Antisense strand to SEQ ID NO: 2343436
uuagcuaaccuagagauca

SEQ ID NO: 2343438 - RNA, 19 nt, Artificial Sequence
  Description of Artificial Sequence: Synthetic oligonucleotide
  Sense strand starting at position 1149 of SEQ ID NO: 1885453
uagguuagcuaaguauaua

SEQ ID NO: 2343439 - RNA, 19 nt, Artificial Sequence
  Description of Artificial Sequence: Synthetic oligonucleotide
  Antisense strand to SEQ ID NO: 2343438
uauauacuuagcuaaccua

SEQ ID NO: 2343440 - RNA, 19 nt, Artificial Sequence
  Description of Artificial Sequence: Synthetic oligonucleotide
  Sense strand starting at position 1152 of SEQ ID NO: 1885453
guuagcuaaguauauaacu

SEQ ID NO: 2343441 - RNA, 19 nt, Artificial Sequence
  Description of Artificial Sequence: Synthetic oligonucleotide
  Antisense strand to SEQ ID NO: 2343440
aguuauauacuuagcuaac

SEQ ID NO: 2343442 - RNA, 19 nt, Artificial Sequence
  Description of Artificial Sequence: Synthetic oligonucleotide
  Sense strand starting at position 1274 of SEQ ID NO: 1885453
gaaaguuuccgggacguga

SEQ ID NO: 2343443 - RNA, 19 nt, Artificial Sequence
  Description of Artificial Sequence: Synthetic oligonucleotide
  Antisense strand to SEQ ID NO: 2343442
ucacgucccggaaacuuuc

SEQ ID NO: 2343444 - RNA, 19 nt, Artificial Sequence
  Description of Artificial Sequence: Synthetic oligonucleotide
  Sense strand starting at position 1349 of SEQ ID NO: 1885453
uggcaacaaugauugucaa

SEQ ID NO: 2343445 - RNA, 19 nt, Artificial Sequence
  Description of Artificial Sequence: Synthetic oligonucleotide
  Antisense strand to SEQ ID NO: 2343444
uugacaaucauuguugcca

SEQ ID NO: 2343446 - RNA, 19 nt, Artificial Sequence
  Description of Artificial Sequence: Synthetic oligonucleotide
  Sense strand starting at position 1350 of SEQ ID NO: 1885453
ggcaacaaugauugucaaa

SEQ ID NO: 2343447 - RNA, 19 nt, Artificial Sequence
  Description of Artificial Sequence: Synthetic oligonucleotide
  Antisense strand to SEQ ID NO: 2343446
uuugacaaucauuguugcc

SEQ ID NO: 2343448 - RNA, 19 nt, Artificial Sequence
  Description of Artificial Sequence: Synthetic oligonucleotide
  Sense strand starting at position 1505 of SEQ ID NO: 1885453
aaugcaagagucuggaagu

SEQ ID NO: 2343449 - RNA, 19 nt, Artificial Sequence
  Description of Artificial Sequence: Synthetic oligonucleotide
  Antisense strand to SEQ ID NO: 2343448
acuuccagacucuugcauu

SEQ ID NO: 2343450 - RNA, 19 nt, Artificial Sequence
  Description of Artificial Sequence: Synthetic oligonucleotide
  Sense strand starting at position 1508 of SEQ ID NO: 1885453
gcaagagucuggaagugga

SEQ ID NO: 2343451 - RNA, 19 nt, Artificial Sequence
  Description of Artificial Sequence: Synthetic oligonucleotide
  Antisense strand to SEQ ID NO: 2343450
uccacuuccagacucuugc

SEQ ID NO: 2343452 - RNA, 19 nt, Artificial Sequence
  Description of Artificial Sequence: Synthetic oligonucleotide
  Sense strand starting at position 1723 of SEQ ID NO: 1885453
ggucgauuagagcaucuga

SEQ ID NO: 2343453 - RNA, 19 nt, Artificial Sequence
  Description of Artificial Sequence: Synthetic oligonucleotide
  Antisense strand to SEQ ID NO: 2343452
ucagaugcucuaaucgacc

SEQ ID NO: 2343454 - RNA, 19 nt, Artificial Sequence
  Description of Artificial Sequence: Synthetic oligonucleotide
  Sense strand starting at position 1876 of SEQ ID NO: 1885453
ccgccauuccucguaguca

SEQ ID NO: 2343455 - RNA, 19 nt, Artificial Sequence
  Description of Artificial Sequence: Synthetic oligonucleotide
  Antisense strand to SEQ ID NO: 2343454
ugacuacgaggaauggcgg

SEQ ID NO: 2343456 - RNA, 19 nt, Artificial Sequence
  Description of Artificial Sequence: Synthetic oligonucleotide
  Sense strand starting at position 1979 of SEQ ID NO: 1885453
cgagcuuccgucuuaagca

SEQ ID NO: 2343457 - RNA, 19 nt, Artificial Sequence
  Description of Artificial Sequence: Synthetic oligonucleotide
  Antisense strand to SEQ ID NO: 2343456
ugcuuaagacggaagcucg

SEQ ID NO: 2343458 - RNA, 19 nt, Artificial Sequence
  Description of Artificial Sequence: Synthetic oligonucleotide
  Sense strand starting at position 2293 of SEQ ID NO: 1885453
uuccuuguccguuaauaac

SEQ ID NO: 2343459 - RNA, 19 nt, Artificial Sequence
  Description of Artificial Sequence: Synthetic oligonucleotide
  Antisense strand to SEQ ID NO: 2343458
guuauuaacggacaaggaa

SEQ ID NO: 2343460 - RNA, 19 nt, Artificial Sequence
  Description of Artificial Sequence: Synthetic oligonucleotide
  Sense strand starting at position 2777 of SEQ ID NO: 1885453
cuggauucccgcgaucauu

SEQ ID NO: 2343461 - RNA, 19 nt, Artificial Sequence
  Description of Artificial Sequence: Synthetic oligonucleotide
  Antisense strand to SEQ ID NO: 2343460
aaugaucgcgggaauccag

SEQ ID NO: 2343462 - RNA, 19 nt, Artificial Sequence
  Description of Artificial Sequence: Synthetic oligonucleotide
  Sense strand starting at position 2946 of SEQ ID NO: 1885453
gugggcuucccagaucaag

SEQ ID NO: 2343463 - RNA, 19 nt, Artificial Sequence
  Description of Artificial Sequence: Synthetic oligonucleotide
  Antisense strand to SEQ ID NO: 2343462
cuugaucugggaagcccac

SEQ ID NO: 2343464 - RNA, 19 nt, Artificial Sequence
  Description of Artificial Sequence: Synthetic oligonucleotide
  Sense strand starting at position 3146 of SEQ ID NO: 1885453
gggaguggucuuuaucuga

SEQ ID NO: 2343465 - RNA, 19 nt, Artificial Sequence
  Description of Artificial Sequence: Synthetic oligonucleotide
  Antisense strand to SEQ ID NO: 2343464
ucagauaaagaccacuccc

SEQ ID NO: 2343466 - RNA, 19 nt, Artificial Sequence
  Description of Artificial Sequence: Synthetic oligonucleotide
  Sense strand starting at position 3149 of SEQ ID NO: 1885453
aguggucuuuaucugacuu

SEQ ID NO: 2343467 - RNA, 19 nt, Artificial Sequence
  Description of Artificial Sequence: Synthetic oligonucleotide
  Antisense strand to SEQ ID NO: 2343466
aagucagauaaagaccacu

SEQ ID NO: 2343468 - RNA, 19 nt, Artificial Sequence
  Description of Artificial Sequence: Synthetic oligonucleotide
  Sense strand starting at position 3153 of SEQ ID NO: 1885453
gucuuuaucugacuuuaua

SEQ ID NO: 2343469 - RNA, 19 nt, Artificial Sequence
  Description of Artificial Sequence: Synthetic oligonucleotide
  Antisense strand to SEQ ID NO: 2343468
uauaaagucagauaaagac

SEQ ID NO: 2343470 - RNA, 19 nt, Artificial Sequence
  Description of Artificial Sequence: Synthetic oligonucleotide
  Sense strand starting at position 3175 of SEQ ID NO: 1885453
cuaccaaacuguguuaauu

SEQ ID NO: 2343471 - RNA, 19 nt, Artificial Sequence
  Description of Artificial Sequence: Synthetic oligonucleotide
  Antisense strand to SEQ ID NO: 2343470
aauuaacacaguuugguag

SEQ ID NO: 2343472 - RNA, 19 nt, Artificial Sequence
  Description of Artificial Sequence: Synthetic oligonucleotide
  Sense strand starting at position 3238 of SEQ ID NO: 1885453
auugcuuuggcuuauucua

SEQ ID NO: 2343473 - RNA, 19 nt, Artificial Sequence
  Description of Artificial Sequence: Synthetic oligonucleotide
  Antisense strand to SEQ ID NO: 2343472
uagaauaagccaaagcaau

SEQ ID NO: 2343474 - RNA, 19 nt, Artificial Sequence
  Description of Artificial Sequence: Synthetic oligonucleotide
  Sense strand starting at position 3252 of SEQ ID NO: 1885453
uucuaaggccauuguauuu

SEQ ID NO: 2343475 - RNA, 19 nt, Artificial Sequence
  Description of Artificial Sequence: Synthetic oligonucleotide
  Antisense strand to SEQ ID NO: 2343474
aaauacaauggccuuagaa

SEQ ID NO: 2343476 - RNA, 19 nt, Artificial Sequence
  Description of Artificial Sequence: Synthetic oligonucleotide
  Sense strand starting at position 3401 of SEQ ID NO: 1885453
ccauuuaaguggccguuua

SEQ ID NO: 2343477 - RNA, 19 nt, Artificial Sequence
  Description of Artificial Sequence: Synthetic oligonucleotide
  Antisense strand to SEQ ID NO: 2343476
uaaacggccacuuaaaugg

SEQ ID NO: 2343478 - RNA, 19 nt, Artificial Sequence
  Description of Artificial Sequence: Synthetic oligonucleotide
  Sense strand starting at position 3402 of SEQ ID NO: 1885453
cauuuaaguggccguuuau

SEQ ID NO: 2343479 - RNA, 19 nt, Artificial Sequence
  Description of Artificial Sequence: Synthetic oligonucleotide
  Antisense strand to SEQ ID NO: 2343478
auaaacggccacuuaaaug

SEQ ID NO: 2343480 - RNA, 19 nt, Artificial Sequence
  Description of Artificial Sequence: Synthetic oligonucleotide
  Sense strand starting at position 3494 of SEQ ID NO: 1885453
uuggauagacugcaguaua

SEQ ID NO: 2343481 - RNA, 19 nt, Artificial Sequence
  Description of Artificial Sequence: Synthetic oligonucleotide
  Antisense strand to SEQ ID NO: 2343480
uauacugcagucuauccaa

SEQ ID NO: 2343482 - RNA, 19 nt, Artificial Sequence
  Description of Artificial Sequence: Synthetic oligonucleotide
  Sense strand starting at position 3562 of SEQ ID NO: 1885453
ugcgauguuaaauagcauu

SEQ ID NO: 2343483 - RNA, 19 nt, Artificial Sequence
  Description of Artificial Sequence: Synthetic oligonucleotide
  Antisense strand to SEQ ID NO: 2343482
aaugcuauuuaacaucgca

SEQ ID NO: 2343484 - RNA, 19 nt, Artificial Sequence
  Description of Artificial Sequence: Synthetic oligonucleotide
  Sense strand starting at position 3676 of SEQ ID NO: 1885453
uuuguaauacuguguagag

SEQ ID NO: 2343485 - RNA, 19 nt, Artificial Sequence
  Description of Artificial Sequence: Synthetic oligonucleotide
  Antisense strand to SEQ ID NO: 2343484
cucuacacaguauuacaaa

SEQ ID NO: 2343486 - RNA, 19 nt, Artificial Sequence
  Description of Artificial Sequence: Synthetic oligonucleotide
  Sense strand starting at position 3700 of SEQ ID NO: 1885453
uggaauuuaugugaugaca

SEQ ID NO: 2343487 - RNA, 19 nt, Artificial Sequence
  Description of Artificial Sequence: Synthetic oligonucleotide
  Antisense strand to SEQ ID NO: 2343486
ugucaucacauaaauucca

SEQ ID NO: 2343488 - RNA, 19 nt, Artificial Sequence
  Description of Artificial Sequence: Synthetic oligonucleotide
  Sense strand starting at position 3702 of SEQ ID NO: 1885453
gaauuuaugugaugacaau

SEQ ID NO: 2343489 - RNA, 19 nt, Artificial Sequence
  Description of Artificial Sequence: Synthetic oligonucleotide
  Antisense strand to SEQ ID NO: 2343488
auugucaucacauaaauuc

SEQ ID NO: 2343490 - RNA, 19 nt, Artificial Sequence
  Description of Artificial Sequence: Synthetic oligonucleotide
  Sense strand starting at position 3720 of SEQ ID NO: 1885453
ucuugcaaucgugaauaaa

SEQ ID NO: 2343491 - RNA, 19 nt, Artificial Sequence
  Description of Artificial Sequence: Synthetic oligonucleotide
  Antisense strand to SEQ ID NO: 2343490
uuuauucacgauugcaaga

SEQ ID NO: 2343492 - RNA, 19 nt, Artificial Sequence
  Description of Artificial Sequence: Synthetic oligonucleotide
  Sense strand starting at position 3723 of SEQ ID NO: 1885453
ugcaaucgugaauaaagau

SEQ ID NO: 2343493 - RNA, 19 nt, Artificial Sequence
  Description of Artificial Sequence: Synthetic oligonucleotide
  Antisense strand to SEQ ID NO: 2343492
aucuuuauucacgauugca

SEQ ID NO: 2343494 - RNA, 19 nt, Artificial Sequence
  Description of Artificial Sequence: Synthetic oligonucleotide
  Sense strand starting at position 3729 of SEQ ID NO: 1885453
cgugaauaaagaugguuua

SEQ ID NO: 2343495 - RNA, 19 nt, Artificial Sequence
  Description of Artificial Sequence: Synthetic oligonucleotide
  Antisense strand to SEQ ID NO: 2343494
uaaaccaucuuuauucacg

SEQ ID NO: 2343496 - RNA, 19 nt, Artificial Sequence
  Description of Artificial Sequence: Synthetic oligonucleotide
  Sense strand starting at position 3741 of SEQ ID NO: 1885453
ugguuuaacuucucuguaa

SEQ ID NO: 2343497 - RNA, 19 nt, Artificial Sequence
  Description of Artificial Sequence: Synthetic oligonucleotide
  Antisense strand to SEQ ID NO: 2343496
uuacagagaaguuaaacca

SEQ ID NO: 2343498 - RNA, 19 nt, Artificial Sequence
  Description of Artificial Sequence: Synthetic oligonucleotide
  Sense strand starting at position 3742 of SEQ ID NO: 1885453
gguuuaacuucucuguaau

SEQ ID NO: 2343499 - RNA, 19 nt, Artificial Sequence
  Description of Artificial Sequence: Synthetic oligonucleotide
  Antisense strand to SEQ ID NO: 2343498
auuacagagaaguuaaacc

SEQ ID NO: 2343500 - RNA, 19 nt, Artificial Sequence
  Description of Artificial Sequence: Synthetic oligonucleotide
  Sense strand starting at position 3743 of SEQ ID NO: 1885453
guuuaacuucucuguaauc

SEQ ID NO: 2343501 - RNA, 19 nt, Artificial Sequence
  Description of Artificial Sequence: Synthetic oligonucleotide
  Antisense strand to SEQ ID NO: 2343500
gauuacagagaaguuaaac

SEQ ID NO: 2343502 - RNA, 19 nt, Artificial Sequence
  Description of Artificial Sequence: Synthetic oligonucleotide
  Sense strand starting at position 3752 of SEQ ID NO: 1885453
cucuguaaucuuuauacgu

SEQ ID NO: 2343503 - RNA, 19 nt, Artificial Sequence
  Description of Artificial Sequence: Synthetic oligonucleotide
  Antisense strand to SEQ ID NO: 2343502
acguauaaagauuacagag

SEQ ID NO: 2343504 - RNA, 19 nt, Artificial Sequence
  Description of Artificial Sequence: Synthetic oligonucleotide
  Sense strand starting at position 53 of SEQ ID NO: 1885454
agagcaauaucuuagauuu

SEQ ID NO: 2343505 - RNA, 19 nt, Artificial Sequence
  Description of Artificial Sequence: Synthetic oligonucleotide
  Antisense strand to SEQ ID NO: 2343504
aaaucuaagauauugcucu

SEQ ID NO: 2343506 - RNA, 19 nt, Artificial Sequence
  Description of Artificial Sequence: Synthetic oligonucleotide
  Sense strand starting at position 99 of SEQ ID NO: 1885454
guuagaacucaucauguuu

SEQ ID NO: 2343507 - RNA, 19 nt, Artificial Sequence
  Description of Artificial Sequence: Synthetic oligonucleotide
  Antisense strand to SEQ ID NO: 2343506
aaacaugaugaguucuaac

SEQ ID NO: 2343508 - RNA, 19 nt, Artificial Sequence
  Description of Artificial Sequence: Synthetic oligonucleotide
  Sense strand starting at position 211 of SEQ ID NO: 1885454
acagaaagauccuuuggcu

SEQ ID NO: 2343509 - RNA, 19 nt, Artificial Sequence
  Description of Artificial Sequence: Synthetic oligonucleotide
  Antisense strand to SEQ ID NO: 2343508
agccaaaggaucuuucugu

SEQ ID NO: 2343510 - RNA, 19 nt, Artificial Sequence
  Description of Artificial Sequence: Synthetic oligonucleotide
  Sense strand starting at position 388 of SEQ ID NO: 1885454
uccagacaguaaucuguua

SEQ ID NO: 2343511 - RNA, 19 nt, Artificial Sequence
  Description of Artificial Sequence: Synthetic oligonucleotide
  Antisense strand to SEQ ID NO: 2343510
uaacagauuacugucugga

SEQ ID NO: 2343512 - RNA, 19 nt, Artificial Sequence
  Description of Artificial Sequence: Synthetic oligonucleotide
  Sense strand starting at position 574 of SEQ ID NO: 1885454
aggaaauucuaguuuagcu

SEQ ID NO: 2343513 - RNA, 19 nt, Artificial Sequence
  Description of Artificial Sequence: Synthetic oligonucleotide
  Antisense strand to SEQ ID NO: 2343512
agcuaaacuagaauuuccu

SEQ ID NO: 2343514 - RNA, 19 nt, Artificial Sequence
  Description of Artificial Sequence: Synthetic oligonucleotide
  Sense strand starting at position 617 of SEQ ID NO: 1885454
acauauauuugggauccuu

SEQ ID NO: 2343515 - RNA, 19 nt, Artificial Sequence
  Description of Artificial Sequence: Synthetic oligonucleotide
  Antisense strand to SEQ ID NO: 2343514
aaggaucccaaauauaugu

SEQ ID NO: 2343516 - RNA, 19 nt, Artificial Sequence
  Description of Artificial Sequence: Synthetic oligonucleotide
  Sense strand starting at position 625 of SEQ ID NO: 1885454
uugggauccuuaccuugau

SEQ ID NO: 2343517 - RNA, 19 nt, Artificial Sequence
  Description of Artificial Sequence: Synthetic oligonucleotide
  Antisense strand to SEQ ID NO: 2343516
aucaagguaaggaucccaa

SEQ ID NO: 2343518 - RNA, 19 nt, Artificial Sequence
  Description of Artificial Sequence: Synthetic oligonucleotide
  Sense strand starting at position 726 of SEQ ID NO: 1885454
agaauaaggaacuguugua

SEQ ID NO: 2343519 - RNA, 19 nt, Artificial Sequence
  Description of Artificial Sequence: Synthetic oligonucleotide
  Antisense strand to SEQ ID NO: 2343518
uacaacaguuccuuauucu

SEQ ID NO: 2343520 - RNA, 19 nt, Artificial Sequence
  Description of Artificial Sequence: Synthetic oligonucleotide
  Sense strand starting at position 835 of SEQ ID NO: 1885454
uggagacagucaguaguua

SEQ ID NO: 2343521 - RNA, 19 nt, Artificial Sequence
  Description of Artificial Sequence: Synthetic oligonucleotide
  Antisense strand to SEQ ID NO: 2343520
uaacuacugacugucucca

SEQ ID NO: 2343522 - RNA, 19 nt, Artificial Sequence
  Description of Artificial Sequence: Synthetic oligonucleotide
  Sense strand starting at position 839 of SEQ ID NO: 1885454
gacagucaguaguuacuaa

SEQ ID NO: 2343523 - RNA, 19 nt, Artificial Sequence
  Description of Artificial Sequence: Synthetic oligonucleotide
  Antisense strand to SEQ ID NO: 2343522
uuaguaacuacugacuguc

SEQ ID NO: 2343524 - RNA, 19 nt, Artificial Sequence
  Description of Artificial Sequence: Synthetic oligonucleotide
  Sense strand starting at position 846 of SEQ ID NO: 1885454
aguaguuacuaaccaccua

SEQ ID NO: 2343525 - RNA, 19 nt, Artificial Sequence
  Description of Artificial Sequence: Synthetic oligonucleotide
  Antisense strand to SEQ ID NO: 2343524
uaggugguuaguaacuacu

SEQ ID NO: 2343526 - RNA, 19 nt, Artificial Sequence
  Description of Artificial Sequence: Synthetic oligonucleotide
  Sense strand starting at position 880 of SEQ ID NO: 1885454
agguaagguuauccagcaa

SEQ ID NO: 2343527 - RNA, 19 nt, Artificial Sequence
  Description of Artificial Sequence: Synthetic oligonucleotide
  Antisense strand to SEQ ID NO: 2343526
uugcuggauaaccuuaccu

SEQ ID NO: 2343528 - RNA, 19 nt, Artificial Sequence
  Description of Artificial Sequence: Synthetic oligonucleotide
  Sense strand starting at position 1016 of SEQ ID NO: 1885454
cuggcuuuagggcaguaau

SEQ ID NO: 2343529 - RNA, 19 nt, Artificial Sequence
  Description of Artificial Sequence: Synthetic oligonucleotide
  Antisense strand to SEQ ID NO: 2343528
auuacugcccuaaagccag

SEQ ID NO: 2343530 - RNA, 19 nt, Artificial Sequence
  Description of Artificial Sequence: Synthetic oligonucleotide
  Sense strand starting at position 1074 of SEQ ID NO: 1885454
aggugauugguggaagcaa

SEQ ID NO: 2343531 - RNA, 19 nt, Artificial Sequence
  Description of Artificial Sequence: Synthetic oligonucleotide
  Antisense strand to SEQ ID NO: 2343530
uugcuuccaccaaucaccu

SEQ ID NO: 2343532 - RNA, 19 nt, Artificial Sequence
  Description of Artificial Sequence: Synthetic oligonucleotide
  Sense strand starting at position 1075 of SEQ ID NO: 1885454
ggugauugguggaagcaaa

SEQ ID NO: 2343533 - RNA, 19 nt, Artificial Sequence
  Description of Artificial Sequence: Synthetic oligonucleotide
  Antisense strand to SEQ ID NO: 2343532
uuugcuuccaccaaucacc

SEQ ID NO: 2343534 - RNA, 19 nt, Artificial Sequence
  Description of Artificial Sequence: Synthetic oligonucleotide
  Sense strand starting at position 1102 of SEQ ID NO: 1885454
cugggaagucuucaggcau

SEQ ID NO: 2343535 - RNA, 19 nt, Artificial Sequence
  Description of Artificial Sequence: Synthetic oligonucleotide
  Antisense strand to SEQ ID NO: 2343534
augccugaagacuucccag

SEQ ID NO: 2343536 - RNA, 19 nt, Artificial Sequence
  Description of Artificial Sequence: Synthetic oligonucleotide
  Sense strand starting at position 1158 of SEQ ID NO: 1885454
gugcaaauuuggagggagu

SEQ ID NO: 2343537 - RNA, 19 nt, Artificial Sequence
  Description of Artificial Sequence: Synthetic oligonucleotide
  Antisense strand to SEQ ID NO: 2343536
acucccuccaaauuugcac

SEQ ID NO: 2343538 - RNA, 19 nt, Artificial Sequence
  Description of Artificial Sequence: Synthetic oligonucleotide
  Sense strand starting at position 1177 of SEQ ID NO: 1885454
ugguaugaaacaugcagua

SEQ ID NO: 2343539 - RNA, 19 nt, Artificial Sequence
  Description of Artificial Sequence: Synthetic oligonucleotide
  Antisense strand to SEQ ID NO: 2343538
uacugcauguuucauacca

SEQ ID NO: 2343540 - RNA, 19 nt, Artificial Sequence
  Description of Artificial Sequence: Synthetic oligonucleotide
  Sense strand starting at position 1280 of SEQ ID NO: 1885454
guuauaagcagagggaguu

SEQ ID NO: 2343541 - RNA, 19 nt, Artificial Sequence
  Description of Artificial Sequence: Synthetic oligonucleotide
  Antisense strand to SEQ ID NO: 2343540
aacucccucugcuuauaac

SEQ ID NO: 2343542 - RNA, 19 nt, Artificial Sequence
  Description of Artificial Sequence: Synthetic oligonucleotide
  Sense strand starting at position 1762 of SEQ ID NO: 1885454
ggaugaaaguuuguaguug

SEQ ID NO: 2343543 - RNA, 19 nt, Artificial Sequence
  Description of Artificial Sequence: Synthetic oligonucleotide
  Antisense strand to SEQ ID NO: 2343542
caacuacaaacuuucaucc

SEQ ID NO: 2343544 - RNA, 19 nt, Artificial Sequence
  Description of Artificial Sequence: Synthetic oligonucleotide
  Sense strand starting at position 1837 of SEQ ID NO: 1885454
gacagugguccggaaagcu

SEQ ID NO: 2343545 - RNA, 19 nt, Artificial Sequence
  Description of Artificial Sequence: Synthetic oligonucleotide
  Antisense strand to SEQ ID NO: 2343544
agcuuuccggaccacuguc

SEQ ID NO: 2343546 - RNA, 19 nt, Artificial Sequence
  Description of Artificial Sequence: Synthetic oligonucleotide
  Sense strand starting at position 1858 of SEQ ID NO: 1885454
cugcaagaacuguacaaau

SEQ ID NO: 2343547 - RNA, 19 nt, Artificial Sequence
  Description of Artificial Sequence: Synthetic oligonucleotide
  Antisense strand to SEQ ID NO: 2343546
auuuguacaguucuugcag

SEQ ID NO: 2343548 - RNA, 19 nt, Artificial Sequence
  Description of Artificial Sequence: Synthetic oligonucleotide
  Sense strand starting at position 2261 of SEQ ID NO: 1885454
ggguguggcaucgcucuua

SEQ ID NO: 2343549 - RNA, 19 nt, Artificial Sequence
  Description of Artificial Sequence: Synthetic oligonucleotide
  Antisense strand to SEQ ID NO: 2343548
uaagagcgaugccacaccc

SEQ ID NO: 2343550 - RNA, 19 nt, Artificial Sequence
  Description of Artificial Sequence: Synthetic oligonucleotide
  Sense strand starting at position 2277 of SEQ ID NO: 1885454
uuaggaguaugcucaacug

SEQ ID NO: 2343551 - RNA, 19 nt, Artificial Sequence
  Description of Artificial Sequence: Synthetic oligonucleotide
  Antisense strand to SEQ ID NO: 2343550
caguugagcauacuccuaa

SEQ ID NO: 2343552 - RNA, 19 nt, Artificial Sequence
  Description of Artificial Sequence: Synthetic oligonucleotide
  Sense strand starting at position 2500 of SEQ ID NO: 1885454
aagagaaguccuggaagcu

SEQ ID NO: 2343553 - RNA, 19 nt, Artificial Sequence
  Description of Artificial Sequence: Synthetic oligonucleotide
  Antisense strand to SEQ ID NO: 2343552
agcuuccaggacuucucuu

SEQ ID NO: 2343554 - RNA, 19 nt, Artificial Sequence
  Description of Artificial Sequence: Synthetic oligonucleotide
  Sense strand starting at position 2687 of SEQ ID NO: 1885454
cgccucuaaccugaauuga

SEQ ID NO: 2343555 - RNA, 19 nt, Artificial Sequence
  Description of Artificial Sequence: Synthetic oligonucleotide
  Antisense strand to SEQ ID NO: 2343554
ucaauucagguuagaggcg

SEQ ID NO: 2343556 - RNA, 19 nt, Artificial Sequence
  Description of Artificial Sequence: Synthetic oligonucleotide
  Sense strand starting at position 2851 of SEQ ID NO: 1885454
cguguagucagcuccauca

SEQ ID NO: 2343557 - RNA, 19 nt, Artificial Sequence
  Description of Artificial Sequence: Synthetic oligonucleotide
  Antisense strand to SEQ ID NO: 2343556
ugauggagcugacuacacg

SEQ ID NO: 2343558 - RNA, 19 nt, Artificial Sequence
  Description of Artificial Sequence: Synthetic oligonucleotide
  Sense strand starting at position 2890 of SEQ ID NO: 1885454
uggccauugcugcuguaua

SEQ ID NO: 2343559 - RNA, 19 nt, Artificial Sequence
  Description of Artificial Sequence: Synthetic oligonucleotide
  Antisense strand to SEQ ID NO: 2343558
uauacagcagcaauggcca

SEQ ID NO: 2343560 - RNA, 19 nt, Artificial Sequence
  Description of Artificial Sequence: Synthetic oligonucleotide
  Sense strand starting at position 2892 of SEQ ID NO: 1885454
gccauugcugcuguauagu

SEQ ID NO: 2343561 - RNA, 19 nt, Artificial Sequence
  Description of Artificial Sequence: Synthetic oligonucleotide
  Antisense strand to SEQ ID NO: 2343560
acuauacagcagcaauggc

SEQ ID NO: 2343562 - RNA, 19 nt, Artificial Sequence
  Description of Artificial Sequence: Synthetic oligonucleotide
  Sense strand starting at position 2912 of SEQ ID NO: 1885454
ggguaacugugauuccaca

SEQ ID NO: 2343563 - RNA, 19 nt, Artificial Sequence
  Description of Artificial Sequence: Synthetic oligonucleotide
  Antisense strand to SEQ ID NO: 2343562
uguggaaucacaguuaccc

SEQ ID NO: 2343564 - RNA, 19 nt, Artificial Sequence
  Description of Artificial Sequence: Synthetic oligonucleotide
  Sense strand starting at position 2939 of SEQ ID NO: 1885454
ggagcagugaaggauuguu

SEQ ID NO: 2343565 - RNA, 19 nt, Artificial Sequence
  Description of Artificial Sequence: Synthetic oligonucleotide
  Antisense strand to SEQ ID NO: 2343564
aacaauccuucacugcucc

SEQ ID NO: 2343566 - RNA, 19 nt, Artificial Sequence
  Description of Artificial Sequence: Synthetic oligonucleotide
  Sense strand starting at position 2944 of SEQ ID NO: 1885454
agugaaggauuguucaagu

SEQ ID NO: 2343567 - RNA, 19 nt, Artificial Sequence
  Description of Artificial Sequence: Synthetic oligonucleotide
  Antisense strand to SEQ ID NO: 2343566
acuugaacaauccuucacu

SEQ ID NO: 2343568 - RNA, 19 nt, Artificial Sequence
  Description of Artificial Sequence: Synthetic oligonucleotide
  Sense strand starting at position 2972 of SEQ ID NO: 1885454
cuagaauugugcucccaaa

SEQ ID NO: 2343569 - RNA, 19 nt, Artificial Sequence
  Description of Artificial Sequence: Synthetic oligonucleotide
  Antisense strand to SEQ ID NO: 2343568
uuugggagcacaauucuag

SEQ ID NO: 2343570 - RNA, 19 nt, Artificial Sequence
  Description of Artificial Sequence: Synthetic oligonucleotide
  Sense strand starting at position 3518 of SEQ ID NO: 1885454
gguccuagcugcucaauuu

SEQ ID NO: 2343571 - RNA, 19 nt, Artificial Sequence
  Description of Artificial Sequence: Synthetic oligonucleotide
  Antisense strand to SEQ ID NO: 2343570
aaauugagcagcuaggacc

SEQ ID NO: 2343572 - RNA, 19 nt, Artificial Sequence
  Description of Artificial Sequence: Synthetic oligonucleotide
  Sense strand starting at position 3519 of SEQ ID NO: 1885454
guccuagcugcucaauuua

SEQ ID NO: 2343573 - RNA, 19 nt, Artificial Sequence
  Description of Artificial Sequence: Synthetic oligonucleotide
  Antisense strand to SEQ ID NO: 2343572
uaaauugagcagcuaggac

SEQ ID NO: 2343574 - RNA, 19 nt, Artificial Sequence
  Description of Artificial Sequence: Synthetic oligonucleotide
  Sense strand starting at position 3543 of SEQ ID NO: 1885454
gaaggcagcuuccuugaga

SEQ ID NO: 2343575 - RNA, 19 nt, Artificial Sequence
  Description of Artificial Sequence: Synthetic oligonucleotide
  Antisense strand to SEQ ID NO: 2343574
ucucaaggaagcugccuuc

SEQ ID NO: 2343576 - RNA, 19 nt, Artificial Sequence
  Description of Artificial Sequence: Synthetic oligonucleotide
  Sense strand starting at position 3745 of SEQ ID NO: 1885454
uccgaaauaggaugagguu

SEQ ID NO: 2343577 - RNA, 19 nt, Artificial Sequence
  Description of Artificial Sequence: Synthetic oligonucleotide
  Antisense strand to SEQ ID NO: 2343576
aaccucauccuauuucgga

SEQ ID NO: 2343578 - RNA, 19 nt, Artificial Sequence
  Description of Artificial Sequence: Synthetic oligonucleotide
  Sense strand starting at position 3760 of SEQ ID NO: 1885454
gguugauggugacugauga

SEQ ID NO: 2343579 - RNA, 19 nt, Artificial Sequence
  Description of Artificial Sequence: Synthetic oligonucleotide
  Antisense strand to SEQ ID NO: 2343578
ucaucagucaccaucaacc

SEQ ID NO: 2343580 - RNA, 19 nt, Artificial Sequence
  Description of Artificial Sequence: Synthetic oligonucleotide
  Sense strand starting at position 3771 of SEQ ID NO: 1885454
acugaugacuaacuguuau

SEQ ID NO: 2343581 - RNA, 19 nt, Artificial Sequence
  Description of Artificial Sequence: Synthetic oligonucleotide
  Antisense strand to SEQ ID NO: 2343580
auaacaguuagucaucagu

SEQ ID NO: 2343582 - RNA, 19 nt, Artificial Sequence
  Description of Artificial Sequence: Synthetic oligonucleotide
  Sense strand starting at position 3906 of SEQ ID NO: 1885454
ggucgagagccugaaauca

SEQ ID NO: 2343583 - RNA, 19 nt, Artificial Sequence
  Description of Artificial Sequence: Synthetic oligonucleotide
  Antisense strand to SEQ ID NO: 2343582
ugauuucaggcucucgacc

SEQ ID NO: 2343584 - RNA, 19 nt, Artificial Sequence
  Description of Artificial Sequence: Synthetic oligonucleotide
  Sense strand starting at position 95 of SEQ ID NO: 1885455
gccaguuuccgugcaguuu

SEQ ID NO: 2343585 - RNA, 19 nt, Artificial Sequence
  Description of Artificial Sequence: Synthetic oligonucleotide
  Antisense strand to SEQ ID NO: 2343584
aaacugcacggaaacuggc

SEQ ID NO: 2343586 - RNA, 19 nt, Artificial Sequence
  Description of Artificial Sequence: Synthetic oligonucleotide
  Sense strand starting at position 101 of SEQ ID NO: 1885455
uuccgugcaguuugaagau

SEQ ID NO: 2343587 - RNA, 19 nt, Artificial Sequence
  Description of Artificial Sequence: Synthetic oligonucleotide
  Antisense strand to SEQ ID NO: 2343586
aucuucaaacugcacggaa

SEQ ID NO: 2343588 - RNA, 19 nt, Artificial Sequence
  Description of Artificial Sequence: Synthetic oligonucleotide
  Sense strand starting at position 111 of SEQ ID NO: 1885455
uuugaagauucugugguua

SEQ ID NO: 2343589 - RNA, 19 nt, Artificial Sequence
  Description of Artificial Sequence: Synthetic oligonucleotide
  Antisense strand to SEQ ID NO: 2343588
uaaccacagaaucuucaaa

SEQ ID NO: 2343590 - RNA, 19 nt, Artificial Sequence
  Description of Artificial Sequence: Synthetic oligonucleotide
  Sense strand starting at position 115 of SEQ ID NO: 1885455
aagauucugugguuaauac

SEQ ID NO: 2343591 - RNA, 19 nt, Artificial Sequence
  Description of Artificial Sequence: Synthetic oligonucleotide
  Antisense strand to SEQ ID NO: 2343590
guauuaaccacagaaucuu

SEQ ID NO: 2343592 - RNA, 19 nt, Artificial Sequence
  Description of Artificial Sequence: Synthetic oligonucleotide
  Sense strand starting at position 116 of SEQ ID NO: 1885455
agauucugugguuaauaca

SEQ ID NO: 2343593 - RNA, 19 nt, Artificial Sequence
  Description of Artificial Sequence: Synthetic oligonucleotide
  Antisense strand to SEQ ID NO: 2343592
uguauuaaccacagaaucu

SEQ ID NO: 2343594 - RNA, 19 nt, Artificial Sequence
  Description of Artificial Sequence: Synthetic oligonucleotide
  Sense strand starting at position 168 of SEQ ID NO: 1885455
cuauuugauugccagcguu

SEQ ID NO: 2343595 - RNA, 19 nt, Artificial Sequence
  Description of Artificial Sequence: Synthetic oligonucleotide
  Antisense strand to SEQ ID NO: 2343594
aacgcuggcaaucaaauag

SEQ ID NO: 2343596 - RNA, 19 nt, Artificial Sequence
  Description of Artificial Sequence: Synthetic oligonucleotide
  Sense strand starting at position 178 of SEQ ID NO: 1885455
gccagcguuuccuuuccua

SEQ ID NO: 2343597 - RNA, 19 nt, Artificial Sequence
  Description of Artificial Sequence: Synthetic oligonucleotide
  Antisense strand to SEQ ID NO: 2343596
uaggaaaggaaacgcuggc

SEQ ID NO: 2343598 - RNA, 19 nt, Artificial Sequence
  Description of Artificial Sequence: Synthetic oligonucleotide
  Sense strand starting at position 235 of SEQ ID NO: 1885455
gccuuaauguaaguuuagu

SEQ ID NO: 2343599 - RNA, 19 nt, Artificial Sequence
  Description of Artificial Sequence: Synthetic oligonucleotide
  Antisense strand to SEQ ID NO: 2343598
acuaaacuuacauuaaggc

SEQ ID NO: 2343600 - RNA, 19 nt, Artificial Sequence
  Description of Artificial Sequence: Synthetic oligonucleotide
  Sense strand starting at position 240 of SEQ ID NO: 1885455
aauguaaguuuagugaaac

SEQ ID NO: 2343601 - RNA, 19 nt, Artificial Sequence
  Description of Artificial Sequence: Synthetic oligonucleotide
  Antisense strand to SEQ ID NO: 2343600
guuucacuaaacuuacauu

SEQ ID NO: 2343602 - RNA, 19 nt, Artificial Sequence
  Description of Artificial Sequence: Synthetic oligonucleotide
  Sense strand starting at position 267 of SEQ ID NO: 1885455
ggaguaaauuuagaugcau

SEQ ID NO: 2343603 - RNA, 19 nt, Artificial Sequence
  Description of Artificial Sequence: Synthetic oligonucleotide
  Antisense strand to SEQ ID NO: 2343602
augcaucuaaauuuacucc

SEQ ID NO: 2343604 - RNA, 19 nt, Artificial Sequence
  Description of Artificial Sequence: Synthetic oligonucleotide
  Sense strand starting at position 371 of SEQ ID NO: 1885455
aauugaguggcgcaaucau

SEQ ID NO: 2343605 - RNA, 19 nt, Artificial Sequence
  Description of Artificial Sequence: Synthetic oligonucleotide
  Antisense strand to SEQ ID NO: 2343604
augauugcgccacucaauu

SEQ ID NO: 2343606 - RNA, 19 nt, Artificial Sequence
  Description of Artificial Sequence: Synthetic oligonucleotide
  Sense strand starting at position 380 of SEQ ID NO: 1885455
gcgcaaucauaagcucacu

SEQ ID NO: 2343607 - RNA, 19 nt, Artificial Sequence
  Description of Artificial Sequence: Synthetic oligonucleotide
  Antisense strand to SEQ ID NO: 2343606
agugagcuuaugauugcgc

SEQ ID NO: 2343608 - RNA, 19 nt, Artificial Sequence
  Description of Artificial Sequence: Synthetic oligonucleotide
  Sense strand starting at position 393 of SEQ ID NO: 1885455
cucacugaauccucgaacu

SEQ ID NO: 2343609 - RNA, 19 nt, Artificial Sequence
  Description of Artificial Sequence: Synthetic oligonucleotide
  Antisense strand to SEQ ID NO: 2343608
aguucgaggauucagugag

SEQ ID NO: 2343610 - RNA, 19 nt, Artificial Sequence
  Description of Artificial Sequence: Synthetic oligonucleotide
  Sense strand starting at position 1119 of SEQ ID NO: 1885455
ccucaauggcgauggugaa

SEQ ID NO: 2343611 - RNA, 19 nt, Artificial Sequence
  Description of Artificial Sequence: Synthetic oligonucleotide
  Antisense strand to SEQ ID NO: 2343610
uucaccaucgccauugagg

SEQ ID NO: 2343612 - RNA, 19 nt, Artificial Sequence
  Description of Artificial Sequence: Synthetic oligonucleotide
  Sense strand starting at position 1222 of SEQ ID NO: 1885455
ggaguucuaggacgacaac

SEQ ID NO: 2343613 - RNA, 19 nt, Artificial Sequence
  Description of Artificial Sequence: Synthetic oligonucleotide
  Antisense strand to SEQ ID NO: 2343612
guugucguccuagaacucc

SEQ ID NO: 2343614 - RNA, 19 nt, Artificial Sequence
  Description of Artificial Sequence: Synthetic oligonucleotide
  Sense strand starting at position 1315 of SEQ ID NO: 1885455
aaacguucgugcccuguua

SEQ ID NO: 2343615 - RNA, 19 nt, Artificial Sequence
  Description of Artificial Sequence: Synthetic oligonucleotide
  Antisense strand to SEQ ID NO: 2343614
uaacagggcacgaacguuu

SEQ ID NO: 2343616 - RNA, 19 nt, Artificial Sequence
  Description of Artificial Sequence: Synthetic oligonucleotide
  Sense strand starting at position 1328 of SEQ ID NO: 1885455
cuguuacguccacagcauu

SEQ ID NO: 2343617 - RNA, 19 nt, Artificial Sequence
  Description of Artificial Sequence: Synthetic oligonucleotide
  Antisense strand to SEQ ID NO: 2343616
aaugcuguggacguaacag

SEQ ID NO: 2343618 - RNA, 19 nt, Artificial Sequence
  Description of Artificial Sequence: Synthetic oligonucleotide
  Sense strand starting at position 1487 of SEQ ID NO: 1885455
auccguucucuccgcaaau

SEQ ID NO: 2343619 - RNA, 19 nt, Artificial Sequence
  Description of Artificial Sequence: Synthetic oligonucleotide
  Antisense strand to SEQ ID NO: 2343618
auuugcggagagaacggau

SEQ ID NO: 2343620 - RNA, 19 nt, Artificial Sequence
  Description of Artificial Sequence: Synthetic oligonucleotide
  Sense strand starting at position 2261 of SEQ ID NO: 1885455
cgauucguuacucccguua

SEQ ID NO: 2343621 - RNA, 19 nt, Artificial Sequence
  Description of Artificial Sequence: Synthetic oligonucleotide
  Antisense strand to SEQ ID NO: 2343620
uaacgggaguaacgaaucg

SEQ ID NO: 2343622 - RNA, 19 nt, Artificial Sequence
  Description of Artificial Sequence: Synthetic oligonucleotide
  Sense strand starting at position 2265 of SEQ ID NO: 1885455
ucguuacucccguuaaggu

SEQ ID NO: 2343623 - RNA, 19 nt, Artificial Sequence
  Description of Artificial Sequence: Synthetic oligonucleotide
  Antisense strand to SEQ ID NO: 2343622
accuuaacgggaguaacga

SEQ ID NO: 2343624 - RNA, 19 nt, Artificial Sequence
  Description of Artificial Sequence: Synthetic oligonucleotide
  Sense strand starting at position 2353 of SEQ ID NO: 1885455
ggaugauuguaacaaucac

SEQ ID NO: 2343625 - RNA, 19 nt, Artificial Sequence
  Description of Artificial Sequence: Synthetic oligonucleotide
  Antisense strand to SEQ ID NO: 2343624
gugauuguuacaaucaucc

SEQ ID NO: 2343626 - RNA, 19 nt, Artificial Sequence
  Description of Artificial Sequence: Synthetic oligonucleotide
  Sense strand starting at position 2371 of SEQ ID NO: 1885455
cuuaaauggucgcuucgua

SEQ ID NO: 2343627 - RNA, 19 nt, Artificial Sequence
  Description of Artificial Sequence: Synthetic oligonucleotide
  Antisense strand to SEQ ID NO: 2343626
uacgaagcgaccauuuaag

SEQ ID NO: 2343628 - RNA, 19 nt, Artificial Sequence
  Description of Artificial Sequence: Synthetic oligonucleotide
  Sense strand starting at position 2766 of SEQ ID NO: 1885455
ucacgagcuauggauguau

SEQ ID NO: 2343629 - RNA, 19 nt, Artificial Sequence
  Description of Artificial Sequence: Synthetic oligonucleotide
  Antisense strand to SEQ ID NO: 2343628
auacauccauagcucguga

SEQ ID NO: 2343630 - RNA, 19 nt, Artificial Sequence
  Description of Artificial Sequence: Synthetic oligonucleotide
  Sense strand starting at position 2770 of SEQ ID NO: 1885455
gagcuauggauguaucugu

SEQ ID NO: 2343631 - RNA, 19 nt, Artificial Sequence
  Description of Artificial Sequence: Synthetic oligonucleotide
  Antisense strand to SEQ ID NO: 2343630
acagauacauccauagcuc

SEQ ID NO: 2343632 - RNA, 19 nt, Artificial Sequence
  Description of Artificial Sequence: Synthetic oligonucleotide
  Sense strand starting at position 2777 of SEQ ID NO: 1885455
ggauguaucugugucuccu

SEQ ID NO: 2343633 - RNA, 19 nt, Artificial Sequence
  Description of Artificial Sequence: Synthetic oligonucleotide
  Antisense strand to SEQ ID NO: 2343632
aggagacacagauacaucc

SEQ ID NO: 2343634 - RNA, 19 nt, Artificial Sequence
  Description of Artificial Sequence: Synthetic oligonucleotide
  Sense strand starting at position 2858 of SEQ ID NO: 1885455
ugaaccucuuguguaugaa

SEQ ID NO: 2343635 - RNA, 19 nt, Artificial Sequence
  Description of Artificial Sequence: Synthetic oligonucleotide
  Antisense strand to SEQ ID NO: 2343634
uucauacacaagagguuca

SEQ ID NO: 2343636 - RNA, 19 nt, Artificial Sequence
  Description of Artificial Sequence: Synthetic oligonucleotide
  Sense strand starting at position 2859 of SEQ ID NO: 1885455
gaaccucuuguguaugaau

SEQ ID NO: 2343637 - RNA, 19 nt, Artificial Sequence
  Description of Artificial Sequence: Synthetic oligonucleotide
  Antisense strand to SEQ ID NO: 2343636
auucauacacaagagguuc

SEQ ID NO: 2343638 - RNA, 19 nt, Artificial Sequence
  Description of Artificial Sequence: Synthetic oligonucleotide
  Sense strand starting at position 2961 of SEQ ID NO: 1885455
cgguacauacaaggaaaua

SEQ ID NO: 2343639 - RNA, 19 nt, Artificial Sequence
  Description of Artificial Sequence: Synthetic oligonucleotide
  Antisense strand to SEQ ID NO: 2343638
uauuuccuuguauguaccg

SEQ ID NO: 2343640 - RNA, 19 nt, Artificial Sequence
  Description of Artificial Sequence: Synthetic oligonucleotide
  Sense strand starting at position 2991 of SEQ ID NO: 1885455
accacauagucgcugucau

SEQ ID NO: 2343641 - RNA, 19 nt, Artificial Sequence
  Description of Artificial Sequence: Synthetic oligonucleotide
  Antisense strand to SEQ ID NO: 2343640
augacagcgacuauguggu

SEQ ID NO: 2343642 - RNA, 19 nt, Artificial Sequence
  Description of Artificial Sequence: Synthetic oligonucleotide
  Sense strand starting at position 2992 of SEQ ID NO: 1885455
ccacauagucgcugucauu

SEQ ID NO: 2343643 - RNA, 19 nt, Artificial Sequence
  Description of Artificial Sequence: Synthetic oligonucleotide
  Antisense strand to SEQ ID NO: 2343642
aaugacagcgacuaugugg

SEQ ID NO: 2343644 - RNA, 19 nt, Artificial Sequence
  Description of Artificial Sequence: Synthetic oligonucleotide
  Sense strand starting at position 2995 of SEQ ID NO: 1885455
cauagucgcugucauuuau

SEQ ID NO: 2343645 - RNA, 19 nt, Artificial Sequence
  Description of Artificial Sequence: Synthetic oligonucleotide
  Antisense strand to SEQ ID NO: 2343644
auaaaugacagcgacuaug

SEQ ID NO: 2343646 - RNA, 19 nt, Artificial Sequence
  Description of Artificial Sequence: Synthetic oligonucleotide
  Sense strand starting at position 3001 of SEQ ID NO: 1885455
cgcugucauuuaucacaag

SEQ ID NO: 2343647 - RNA, 19 nt, Artificial Sequence
  Description of Artificial Sequence: Synthetic oligonucleotide
  Antisense strand to SEQ ID NO: 2343646
cuugugauaaaugacagcg

SEQ ID NO: 2343648 - RNA, 19 nt, Artificial Sequence
  Description of Artificial Sequence: Synthetic oligonucleotide
  Sense strand starting at position 3002 of SEQ ID NO: 1885455
gcugucauuuaucacaagu

SEQ ID NO: 2343649 - RNA, 19 nt, Artificial Sequence
  Description of Artificial Sequence: Synthetic oligonucleotide
  Antisense strand to SEQ ID NO: 2343648
acuugugauaaaugacagc

SEQ ID NO: 2343650 - RNA, 19 nt, Artificial Sequence
  Description of Artificial Sequence: Synthetic oligonucleotide
  Sense strand starting at position 3221 of SEQ ID NO: 1885455
aguuauaguugagguagga

SEQ ID NO: 2343651 - RNA, 19 nt, Artificial Sequence
  Description of Artificial Sequence: Synthetic oligonucleotide
  Antisense strand to SEQ ID NO: 2343650
uccuaccucaacuauaacu

SEQ ID NO: 2343652 - RNA, 19 nt, Artificial Sequence
  Description of Artificial Sequence: Synthetic oligonucleotide
  Sense strand starting at position 3236 of SEQ ID NO: 1885455
aggagaucagcaggacuuu

SEQ ID NO: 2343653 - RNA, 19 nt, Artificial Sequence
  Description of Artificial Sequence: Synthetic oligonucleotide
  Antisense strand to SEQ ID NO: 2343652
aaaguccugcugaucuccu

SEQ ID NO: 2343654 - RNA, 19 nt, Artificial Sequence
  Description of Artificial Sequence: Synthetic oligonucleotide
  Sense strand starting at position 3363 of SEQ ID NO: 1885455
ccaggauggugaccaaagu

SEQ ID NO: 2343655 - RNA, 19 nt, Artificial Sequence
  Description of Artificial Sequence: Synthetic oligonucleotide
  Antisense strand to SEQ ID NO: 2343654
acuuuggucaccauccugg

SEQ ID NO: 2343656 - RNA, 19 nt, Artificial Sequence
  Description of Artificial Sequence: Synthetic oligonucleotide
  Sense strand starting at position 3449 of SEQ ID NO: 1885455
ccagcacucugacaguuua

SEQ ID NO: 2343657 - RNA, 19 nt, Artificial Sequence
  Description of Artificial Sequence: Synthetic oligonucleotide
  Antisense strand to SEQ ID NO: 2343656
uaaacugucagagugcugg

SEQ ID NO: 2343658 - RNA, 19 nt, Artificial Sequence
  Description of Artificial Sequence: Synthetic oligonucleotide
  Sense strand starting at position 3513 of SEQ ID NO: 1885455
acggaagaauucucaguuc

SEQ ID NO: 2343659 - RNA, 19 nt, Artificial Sequence
  Description of Artificial Sequence: Synthetic oligonucleotide
  Antisense strand to SEQ ID NO: 2343658
gaacugagaauucuuccgu

SEQ ID NO: 2343660 - RNA, 19 nt, Artificial Sequence
  Description of Artificial Sequence: Synthetic oligonucleotide
  Sense strand starting at position 3579 of SEQ ID NO: 1885455
ccuuauuuagcguacgaug

SEQ ID NO: 2343661 - RNA, 19 nt, Artificial Sequence
  Description of Artificial Sequence: Synthetic oligonucleotide
  Antisense strand to SEQ ID NO: 2343660
caucguacgcuaaauaagg

SEQ ID NO: 2343662 - RNA, 19 nt, Artificial Sequence
  Description of Artificial Sequence: Synthetic oligonucleotide
  Sense strand starting at position 3581 of SEQ ID NO: 1885455
uuauuuagcguacgaugaa

SEQ ID NO: 2343663 - RNA, 19 nt, Artificial Sequence
  Description of Artificial Sequence: Synthetic oligonucleotide
  Antisense strand to SEQ ID NO: 2343662
uucaucguacgcuaaauaa

SEQ ID NO: 2343664 - RNA, 19 nt, Artificial Sequence
  Description of Artificial Sequence: Synthetic oligonucleotide
  Sense strand starting at position 30 of SEQ ID NO: 1885456
agauguaucucaggcagag

SEQ ID NO: 2343665 - RNA, 19 nt, Artificial Sequence
  Description of Artificial Sequence: Synthetic oligonucleotide
  Antisense strand to SEQ ID NO: 2343664
cucugccugagauacaucu

SEQ ID NO: 2343666 - RNA, 19 nt, Artificial Sequence
  Description of Artificial Sequence: Synthetic oligonucleotide
  Sense strand starting at position 218 of SEQ ID NO: 1885456
agacuaaauuucuggcuuu

SEQ ID NO: 2343667 - RNA, 19 nt, Artificial Sequence
  Description of Artificial Sequence: Synthetic oligonucleotide
  Antisense strand to SEQ ID NO: 2343666
aaagccagaaauuuagucu

SEQ ID NO: 2343668 - RNA, 19 nt, Artificial Sequence
  Description of Artificial Sequence: Synthetic oligonucleotide
  Sense strand starting at position 385 of SEQ ID NO: 1885456
ggaauuaacuuccucugua

SEQ ID NO: 2343669 - RNA, 19 nt, Artificial Sequence
  Description of Artificial Sequence: Synthetic oligonucleotide
  Antisense strand to SEQ ID NO: 2343668
uacagaggaaguuaauucc

SEQ ID NO: 2343670 - RNA, 19 nt, Artificial Sequence
  Description of Artificial Sequence: Synthetic oligonucleotide
  Sense strand starting at position 388 of SEQ ID NO: 1885456
auuaacuuccucuguagga

SEQ ID NO: 2343671 - RNA, 19 nt, Artificial Sequence
  Description of Artificial Sequence: Synthetic oligonucleotide
  Antisense strand to SEQ ID NO: 2343670
uccuacagaggaaguuaau

SEQ ID NO: 2343672 - RNA, 19 nt, Artificial Sequence
  Description of Artificial Sequence: Synthetic oligonucleotide
  Sense strand starting at position 389 of SEQ ID NO: 1885456
uuaacuuccucuguaggaa

SEQ ID NO: 2343673 - RNA, 19 nt, Artificial Sequence
  Description of Artificial Sequence: Synthetic oligonucleotide
  Antisense strand to SEQ ID NO: 2343672
uuccuacagaggaaguuaa

SEQ ID NO: 2343674 - RNA, 19 nt, Artificial Sequence
  Description of Artificial Sequence: Synthetic oligonucleotide
  Sense strand starting at position 457 of SEQ ID NO: 1885456
uccagcgucucauguggaa

SEQ ID NO: 2343675 - RNA, 19 nt, Artificial Sequence
  Description of Artificial Sequence: Synthetic oligonucleotide
  Antisense strand to SEQ ID NO: 2343674
uuccacaugagacgcugga

SEQ ID NO: 2343676 - RNA, 19 nt, Artificial Sequence
  Description of Artificial Sequence: Synthetic oligonucleotide
  Sense strand starting at position 561 of SEQ ID NO: 1885456
uaacacagucgguaaagau

SEQ ID NO: 2343677 - RNA, 19 nt, Artificial Sequence
  Description of Artificial Sequence: Synthetic oligonucleotide
  Antisense strand to SEQ ID NO: 2343676
aucuuuaccgacuguguua

SEQ ID NO: 2343678 - RNA, 19 nt, Artificial Sequence
  Description of Artificial Sequence: Synthetic oligonucleotide
  Sense strand starting at position 618 of SEQ ID NO: 1885456
acugcagugugguauccaa

SEQ ID NO: 2343679 - RNA, 19 nt, Artificial Sequence
  Description of Artificial Sequence: Synthetic oligonucleotide
  Antisense strand to SEQ ID NO: 2343678
uuggauaccacacugcagu

SEQ ID NO: 2343680 - RNA, 19 nt, Artificial Sequence
  Description of Artificial Sequence: Synthetic oligonucleotide
  Sense strand starting at position 742 of SEQ ID NO: 1885456
guagcuuauguguugucau

SEQ ID NO: 2343681 - RNA, 19 nt, Artificial Sequence
  Description of Artificial Sequence: Synthetic oligonucleotide
  Antisense strand to SEQ ID NO: 2343680
augacaacacauaagcuac

SEQ ID NO: 2343682 - RNA, 19 nt, Artificial Sequence
  Description of Artificial Sequence: Synthetic oligonucleotide
  Sense strand starting at position 743 of SEQ ID NO: 1885456
uagcuuauguguugucauu

SEQ ID NO: 2343683 - RNA, 19 nt, Artificial Sequence
  Description of Artificial Sequence: Synthetic oligonucleotide
  Antisense strand to SEQ ID NO: 2343682
aaugacaacacauaagcua

SEQ ID NO: 2343684 - RNA, 19 nt, Artificial Sequence
  Description of Artificial Sequence: Synthetic oligonucleotide
  Sense strand starting at position 745 of SEQ ID NO: 1885456
gcuuauguguugucauucu

SEQ ID NO: 2343685 - RNA, 19 nt, Artificial Sequence
  Description of Artificial Sequence: Synthetic oligonucleotide
  Antisense strand to SEQ ID NO: 2343684
agaaugacaacacauaagc

SEQ ID NO: 2343686 - RNA, 19 nt, Artificial Sequence
  Description of Artificial Sequence: Synthetic oligonucleotide
  Sense strand starting at position 752 of SEQ ID NO: 1885456
uguugucauucugaaauaa

SEQ ID NO: 2343687 - RNA, 19 nt, Artificial Sequence
  Description of Artificial Sequence: Synthetic oligonucleotide
  Antisense strand to SEQ ID NO: 2343686
uuauuucagaaugacaaca

SEQ ID NO: 2343688 - RNA, 19 nt, Artificial Sequence
  Description of Artificial Sequence: Synthetic oligonucleotide
  Sense strand starting at position 787 of SEQ ID NO: 1885456
agaauuuagugcgaggcaa

SEQ ID NO: 2343689 - RNA, 19 nt, Artificial Sequence
  Description of Artificial Sequence: Synthetic oligonucleotide
  Antisense strand to SEQ ID NO: 2343688
uugccucgcacuaaauucu

SEQ ID NO: 2343690 - RNA, 19 nt, Artificial Sequence
  Description of Artificial Sequence: Synthetic oligonucleotide
  Sense strand starting at position 801 of SEQ ID NO: 1885456
ggcaaacauucgugugcag

SEQ ID NO: 2343691 - RNA, 19 nt, Artificial Sequence
  Description of Artificial Sequence: Synthetic oligonucleotide
  Antisense strand to SEQ ID NO: 2343690
cugcacacgaauguuugcc

SEQ ID NO: 2343692 - RNA, 19 nt, Artificial Sequence
  Description of Artificial Sequence: Synthetic oligonucleotide
  Sense strand starting at position 803 of SEQ ID NO: 1885456
caaacauucgugugcagca

SEQ ID NO: 2343693 - RNA, 19 nt, Artificial Sequence
  Description of Artificial Sequence: Synthetic oligonucleotide
  Antisense strand to SEQ ID NO: 2343692
ugcugcacacgaauguuug

SEQ ID NO: 2343694 - RNA, 19 nt, Artificial Sequence
  Description of Artificial Sequence: Synthetic oligonucleotide
  Sense strand starting at position 804 of SEQ ID NO: 1885456
aaacauucgugugcagcau

SEQ ID NO: 2343695 - RNA, 19 nt, Artificial Sequence
  Description of Artificial Sequence: Synthetic oligonucleotide
  Antisense strand to SEQ ID NO: 2343694
augcugcacacgaauguuu

SEQ ID NO: 2343696 - RNA, 19 nt, Artificial Sequence
  Description of Artificial Sequence: Synthetic oligonucleotide
  Sense strand starting at position 2450 of SEQ ID NO: 1885456
gggacuagugugugcacua

SEQ ID NO: 2343697 - RNA, 19 nt, Artificial Sequence
  Description of Artificial Sequence: Synthetic oligonucleotide
  Antisense strand to SEQ ID NO: 2343696
uagugcacacacuaguccc

SEQ ID NO: 2343698 - RNA, 19 nt, Artificial Sequence
  Description of Artificial Sequence: Synthetic oligonucleotide
  Sense strand starting at position 2492 of SEQ ID NO: 1885456
gggacuggugugugcacua

SEQ ID NO: 2343699 - RNA, 19 nt, Artificial Sequence
  Description of Artificial Sequence: Synthetic oligonucleotide
  Antisense strand to SEQ ID NO: 2343698
uagugcacacaccaguccc

SEQ ID NO: 2343700 - RNA, 19 nt, Artificial Sequence
  Description of Artificial Sequence: Synthetic oligonucleotide
  Sense strand starting at position 3042 of SEQ ID NO: 1885456
cggguaugucaggaugugu

SEQ ID NO: 2343701 - RNA, 19 nt, Artificial Sequence
  Description of Artificial Sequence: Synthetic oligonucleotide
  Antisense strand to SEQ ID NO: 2343700
acacauccugacauacccg

SEQ ID NO: 2343702 - RNA, 19 nt, Artificial Sequence
  Description of Artificial Sequence: Synthetic oligonucleotide
  Sense strand starting at position 3053 of SEQ ID NO: 1885456
ggauguguguuugugugca

SEQ ID NO: 2343703 - RNA, 19 nt, Artificial Sequence
  Description of Artificial Sequence: Synthetic oligonucleotide
  Antisense strand to SEQ ID NO: 2343702
ugcacacaaacacacaucc

SEQ ID NO: 2343704 - RNA, 19 nt, Artificial Sequence
  Description of Artificial Sequence: Synthetic oligonucleotide
  Sense strand starting at position 3057 of SEQ ID NO: 1885456
guguguuugugugcaggga

SEQ ID NO: 2343705 - RNA, 19 nt, Artificial Sequence
  Description of Artificial Sequence: Synthetic oligonucleotide
  Antisense strand to SEQ ID NO: 2343704
ucccugcacacaaacacac

SEQ ID NO: 2343706 - RNA, 19 nt, Artificial Sequence
  Description of Artificial Sequence: Synthetic oligonucleotide
  Sense strand starting at position 3318 of SEQ ID NO: 1885456
ugugcauagacguguguau

SEQ ID NO: 2343707 - RNA, 19 nt, Artificial Sequence
  Description of Artificial Sequence: Synthetic oligonucleotide
  Antisense strand to SEQ ID NO: 2343706
auacacacgucuaugcaca

SEQ ID NO: 2343708 - RNA, 19 nt, Artificial Sequence
  Description of Artificial Sequence: Synthetic oligonucleotide
  Sense strand starting at position 3320 of SEQ ID NO: 1885456
ugcauagacguguguaugu

SEQ ID NO: 2343709 - RNA, 19 nt, Artificial Sequence
  Description of Artificial Sequence: Synthetic oligonucleotide
  Antisense strand to SEQ ID NO: 2343708
acauacacacgucuaugca

SEQ ID NO: 2343710 - RNA, 19 nt, Artificial Sequence
  Description of Artificial Sequence: Synthetic oligonucleotide
  Sense strand starting at position 3433 of SEQ ID NO: 1885456
cgcccagauucccaacaau

SEQ ID NO: 2343711 - RNA, 19 nt, Artificial Sequence
  Description of Artificial Sequence: Synthetic oligonucleotide
  Antisense strand to SEQ ID NO: 2343710
auuguugggaaucugggcg

SEQ ID NO: 2343712 - RNA, 19 nt, Artificial Sequence
  Description of Artificial Sequence: Synthetic oligonucleotide
  Sense strand starting at position 3561 of SEQ ID NO: 1885456
cccggagucuuggagacuu

SEQ ID NO: 2343713 - RNA, 19 nt, Artificial Sequence
  Description of Artificial Sequence: Synthetic oligonucleotide
  Antisense strand to SEQ ID NO: 2343712
aagucuccaagacuccggg

SEQ ID NO: 2343714 - RNA, 19 nt, Artificial Sequence
  Description of Artificial Sequence: Synthetic oligonucleotide
  Sense strand starting at position 3563 of SEQ ID NO: 1885456
cggagucuuggagacuuaa

SEQ ID NO: 2343715 - RNA, 19 nt, Artificial Sequence
  Description of Artificial Sequence: Synthetic oligonucleotide
  Antisense strand to SEQ ID NO: 2343714
uuaagucuccaagacuccg

SEQ ID NO: 2343716 - RNA, 19 nt, Artificial Sequence
  Description of Artificial Sequence: Synthetic oligonucleotide
  Sense strand starting at position 3646 of SEQ ID NO: 1885456
cagagaagaguccgaaguu

SEQ ID NO: 2343717 - RNA, 19 nt, Artificial Sequence
  Description of Artificial Sequence: Synthetic oligonucleotide
  Antisense strand to SEQ ID NO: 2343716
aacuucggacucuucucug

SEQ ID NO: 2343718 - RNA, 19 nt, Artificial Sequence
  Description of Artificial Sequence: Synthetic oligonucleotide
  Sense strand starting at position 3751 of SEQ ID NO: 1885456
cugccugugcgguguauua

SEQ ID NO: 2343719 - RNA, 19 nt, Artificial Sequence
  Description of Artificial Sequence: Synthetic oligonucleotide
  Antisense strand to SEQ ID NO: 2343718
uaauacaccgcacaggcag

SEQ ID NO: 2343720 - RNA, 19 nt, Artificial Sequence
  Description of Artificial Sequence: Synthetic oligonucleotide
  Sense strand starting at position 3753 of SEQ ID NO: 1885456
gccugugcgguguauuauu

SEQ ID NO: 2343721 - RNA, 19 nt, Artificial Sequence
  Description of Artificial Sequence: Synthetic oligonucleotide
  Antisense strand to SEQ ID NO: 2343720
aauaauacaccgcacaggc

SEQ ID NO: 2343722 - RNA, 19 nt, Artificial Sequence
  Description of Artificial Sequence: Synthetic oligonucleotide
  Sense strand starting at position 3761 of SEQ ID NO: 1885456
gguguauuauuacaugaca

SEQ ID NO: 2343723 - RNA, 19 nt, Artificial Sequence
  Description of Artificial Sequence: Synthetic oligonucleotide
  Antisense strand to SEQ ID NO: 2343722
ugucauguaauaauacacc

SEQ ID NO: 2343724 - RNA, 19 nt, Artificial Sequence
  Description of Artificial Sequence: Synthetic oligonucleotide
  Sense strand starting at position 3841 of SEQ ID NO: 1885456
cccuaaagcucuggucacu

SEQ ID NO: 2343725 - RNA, 19 nt, Artificial Sequence
  Description of Artificial Sequence: Synthetic oligonucleotide
  Antisense strand to SEQ ID NO: 2343724
agugaccagagcuuuaggg

SEQ ID NO: 2343726 - RNA, 19 nt, Artificial Sequence
  Description of Artificial Sequence: Synthetic oligonucleotide
  Sense strand starting at position 3850 of SEQ ID NO: 1885456
ucuggucacuuggcuuaaa

SEQ ID NO: 2343727 - RNA, 19 nt, Artificial Sequence
  Description of Artificial Sequence: Synthetic oligonucleotide
  Antisense strand to SEQ ID NO: 2343726
uuuaagccaagugaccaga

SEQ ID NO: 2343728 - RNA, 19 nt, Artificial Sequence
  Description of Artificial Sequence: Synthetic oligonucleotide
  Sense strand starting at position 3861 of SEQ ID NO: 1885456
ggcuuaaacugcuuacaag

SEQ ID NO: 2343729 - RNA, 19 nt, Artificial Sequence
  Description of Artificial Sequence: Synthetic oligonucleotide
  Antisense strand to SEQ ID NO: 2343728
cuuguaagcaguuuaagcc

SEQ ID NO: 2343730 - RNA, 19 nt, Artificial Sequence
  Description of Artificial Sequence: Synthetic oligonucleotide
  Sense strand starting at position 3862 of SEQ ID NO: 1885456
gcuuaaacugcuuacaagu

SEQ ID NO: 2343731 - RNA, 19 nt, Artificial Sequence
  Description of Artificial Sequence: Synthetic oligonucleotide
  Antisense strand to SEQ ID NO: 2343730
acuuguaagcaguuuaagc

SEQ ID NO: 2343732 - RNA, 19 nt, Artificial Sequence
  Description of Artificial Sequence: Synthetic oligonucleotide
  Sense strand starting at position 3885 of SEQ ID NO: 1885456
acccguuucuucuuugaag

SEQ ID NO: 2343733 - RNA, 19 nt, Artificial Sequence
  Description of Artificial Sequence: Synthetic oligonucleotide
  Antisense strand to SEQ ID NO: 2343732
cuucaaagaagaaacgggu

SEQ ID NO: 2343734 - RNA, 19 nt, Artificial Sequence
  Description of Artificial Sequence: Synthetic oligonucleotide
  Sense strand starting at position 3886 of SEQ ID NO: 1885456
cccguuucuucuuugaaga

SEQ ID NO: 2343735 - RNA, 19 nt, Artificial Sequence
  Description of Artificial Sequence: Synthetic oligonucleotide
  Antisense strand to SEQ ID NO: 2343734
ucuucaaagaagaaacggg

SEQ ID NO: 2343736 - RNA, 19 nt, Artificial Sequence
  Description of Artificial Sequence: Synthetic oligonucleotide
  Sense strand starting at position 3887 of SEQ ID NO: 1885456
ccguuucuucuuugaagac

SEQ ID NO: 2343737 - RNA, 19 nt, Artificial Sequence
  Description of Artificial Sequence: Synthetic oligonucleotide
  Antisense strand to SEQ ID NO: 2343736
gucuucaaagaagaaacgg

SEQ ID NO: 2343738 - RNA, 19 nt, Artificial Sequence
  Description of Artificial Sequence: Synthetic oligonucleotide
  Sense strand starting at position 3888 of SEQ ID NO: 1885456
cguuucuucuuugaagacu

SEQ ID NO: 2343739 - RNA, 19 nt, Artificial Sequence
  Description of Artificial Sequence: Synthetic oligonucleotide
  Antisense strand to SEQ ID NO: 2343738
agucuucaaagaagaaacg

SEQ ID NO: 2343740 - RNA, 19 nt, Artificial Sequence
  Description of Artificial Sequence: Synthetic oligonucleotide
  Sense strand starting at position 3952 of SEQ ID NO: 1885456
cuuagagaacacugauguu

SEQ ID NO: 2343741 - RNA, 19 nt, Artificial Sequence
  Description of Artificial Sequence: Synthetic oligonucleotide
  Antisense strand to SEQ ID NO: 2343740
aacaucaguguucucuaag

SEQ ID NO: 2343742 - RNA, 19 nt, Artificial Sequence
  Description of Artificial Sequence: Synthetic oligonucleotide
  Sense strand starting at position 143 of SEQ ID NO: 1885457
acaguauuaaugugugaua

SEQ ID NO: 2343743 - RNA, 19 nt, Artificial Sequence
  Description of Artificial Sequence: Synthetic oligonucleotide
  Antisense strand to SEQ ID NO: 2343742
uaucacacauuaauacugu

SEQ ID NO: 2343744 - RNA, 19 nt, Artificial Sequence
  Description of Artificial Sequence: Synthetic oligonucleotide
  Sense strand starting at position 144 of SEQ ID NO: 1885457
caguauuaaugugugauaa

SEQ ID NO: 2343745 - RNA, 19 nt, Artificial Sequence
  Description of Artificial Sequence: Synthetic oligonucleotide
  Antisense strand to SEQ ID NO: 2343744
uuaucacacauuaauacug

SEQ ID NO: 2343746 - RNA, 19 nt, Artificial Sequence
  Description of Artificial Sequence: Synthetic oligonucleotide
  Sense strand starting at position 154 of SEQ ID NO: 1885457
gugugauaaucaucucaua

SEQ ID NO: 2343747 - RNA, 19 nt, Artificial Sequence
  Description of Artificial Sequence: Synthetic oligonucleotide
  Antisense strand to SEQ ID NO: 2343746
uaugagaugauuaucacac

SEQ ID NO: 2343748 - RNA, 19 nt, Artificial Sequence
  Description of Artificial Sequence: Synthetic oligonucleotide
  Sense strand starting at position 596 of SEQ ID NO: 1885457
gguuaauuucuuggcucuu

SEQ ID NO: 2343749 - RNA, 19 nt, Artificial Sequence
  Description of Artificial Sequence: Synthetic oligonucleotide
  Antisense strand to SEQ ID NO: 2343748
aagagccaagaaauuaacc

SEQ ID NO: 2343750 - RNA, 19 nt, Artificial Sequence
  Description of Artificial Sequence: Synthetic oligonucleotide
  Sense strand starting at position 687 of SEQ ID NO: 1885457
ugcugaaugcuauauuauu

SEQ ID NO: 2343751 - RNA, 19 nt, Artificial Sequence
  Description of Artificial Sequence: Synthetic oligonucleotide
  Antisense strand to SEQ ID NO: 2343750
aauaauauagcauucagca

SEQ ID NO: 2343752 - RNA, 19 nt, Artificial Sequence
  Description of Artificial Sequence: Synthetic oligonucleotide
  Sense strand starting at position 736 of SEQ ID NO: 1885457
auugucugauacuuugauu

SEQ ID NO: 2343753 - RNA, 19 nt, Artificial Sequence
  Description of Artificial Sequence: Synthetic oligonucleotide
  Antisense strand to SEQ ID NO: 2343752
aaucaaaguaucagacaau

SEQ ID NO: 2343754 - RNA, 19 nt, Artificial Sequence
  Description of Artificial Sequence: Synthetic oligonucleotide
  Sense strand starting at position 778 of SEQ ID NO: 1885457
guaggacuggaucgaacuu

SEQ ID NO: 2343755 - RNA, 19 nt, Artificial Sequence
  Description of Artificial Sequence: Synthetic oligonucleotide
  Antisense strand to SEQ ID NO: 2343754
aaguucgauccaguccuac

SEQ ID NO: 2343756 - RNA, 19 nt, Artificial Sequence
  Description of Artificial Sequence: Synthetic oligonucleotide
  Sense strand starting at position 804 of SEQ ID NO: 1885457
auuggaaucuuggugcaaa

SEQ ID NO: 2343757 - RNA, 19 nt, Artificial Sequence
  Description of Artificial Sequence: Synthetic oligonucleotide
  Antisense strand to SEQ ID NO: 2343756
uuugcaccaagauuccaau

SEQ ID NO: 2343758 - RNA, 19 nt, Artificial Sequence
  Description of Artificial Sequence: Synthetic oligonucleotide
  Sense strand starting at position 817 of SEQ ID NO: 1885457
ugcaaauccuaguucuaag

SEQ ID NO: 2343759 - RNA, 19 nt, Artificial Sequence
  Description of Artificial Sequence: Synthetic oligonucleotide
  Antisense strand to SEQ ID NO: 2343758
cuuagaacuaggauuugca

SEQ ID NO: 2343760 - RNA, 19 nt, Artificial Sequence
  Description of Artificial Sequence: Synthetic oligonucleotide
  Sense strand starting at position 908 of SEQ ID NO: 1885457
augccaaagaugugacgau

SEQ ID NO: 2343761 - RNA, 19 nt, Artificial Sequence
  Description of Artificial Sequence: Synthetic oligonucleotide
  Antisense strand to SEQ ID NO: 2343760
aucgucacaucuuuggcau

SEQ ID NO: 2343762 - RNA, 19 nt, Artificial Sequence
  Description of Artificial Sequence: Synthetic oligonucleotide
  Sense strand starting at position 912 of SEQ ID NO: 1885457
caaagaugugacgauguga

SEQ ID NO: 2343763 - RNA, 19 nt, Artificial Sequence
  Description of Artificial Sequence: Synthetic oligonucleotide
  Antisense strand to SEQ ID NO: 2343762
ucacaucgucacaucuuug

SEQ ID NO: 2343764 - RNA, 19 nt, Artificial Sequence
  Description of Artificial Sequence: Synthetic oligonucleotide
  Sense strand starting at position 1221 of SEQ ID NO: 1885457
cuuaguaauuggguguaaa

SEQ ID NO: 2343765 - RNA, 19 nt, Artificial Sequence
  Description of Artificial Sequence: Synthetic oligonucleotide
  Antisense strand to SEQ ID NO: 2343764
uuuacacccaauuacuaag

SEQ ID NO: 2343766 - RNA, 19 nt, Artificial Sequence
  Description of Artificial Sequence: Synthetic oligonucleotide
  Sense strand starting at position 1222 of SEQ ID NO: 1885457
uuaguaauuggguguaaag

SEQ ID NO: 2343767 - RNA, 19 nt, Artificial Sequence
  Description of Artificial Sequence: Synthetic oligonucleotide
  Antisense strand to SEQ ID NO: 2343766
cuuuacacccaauuacuaa

SEQ ID NO: 2343768 - RNA, 19 nt, Artificial Sequence
  Description of Artificial Sequence: Synthetic oligonucleotide
  Sense strand starting at position 1224 of SEQ ID NO: 1885457
aguaauuggguguaaaguc

SEQ ID NO: 2343769 - RNA, 19 nt, Artificial Sequence
  Description of Artificial Sequence: Synthetic oligonucleotide
  Antisense strand to SEQ ID NO: 2343768
gacuuuacacccaauuacu

SEQ ID NO: 2343770 - RNA, 19 nt, Artificial Sequence
  Description of Artificial Sequence: Synthetic oligonucleotide
  Sense strand starting at position 1268 of SEQ ID NO: 1885457
ggaaacucccuuuguguga

SEQ ID NO: 2343771 - RNA, 19 nt, Artificial Sequence
  Description of Artificial Sequence: Synthetic oligonucleotide
  Antisense strand to SEQ ID NO: 2343770
ucacacaaagggaguuucc

SEQ ID NO: 2343772 - RNA, 19 nt, Artificial Sequence
  Description of Artificial Sequence: Synthetic oligonucleotide
  Sense strand starting at position 1288 of SEQ ID NO: 1885457
ccucuagcaccagggauaa

SEQ ID NO: 2343773 - RNA, 19 nt, Artificial Sequence
  Description of Artificial Sequence: Synthetic oligonucleotide
  Antisense strand to SEQ ID NO: 2343772
uuaucccuggugcuagagg

SEQ ID NO: 2343774 - RNA, 19 nt, Artificial Sequence
  Description of Artificial Sequence: Synthetic oligonucleotide
  Sense strand starting at position 1349 of SEQ ID NO: 1885457
ccaagugcgaaauaguaaa

SEQ ID NO: 2343775 - RNA, 19 nt, Artificial Sequence
  Description of Artificial Sequence: Synthetic oligonucleotide
  Antisense strand to SEQ ID NO: 2343774
uuuacuauuucgcacuugg

SEQ ID NO: 2343776 - RNA, 19 nt, Artificial Sequence
  Description of Artificial Sequence: Synthetic oligonucleotide
  Sense strand starting at position 1650 of SEQ ID NO: 1885457
cgggcagucccgagaucua

SEQ ID NO: 2343777 - RNA, 19 nt, Artificial Sequence
  Description of Artificial Sequence: Synthetic oligonucleotide
  Antisense strand to SEQ ID NO: 2343776
uagaucucgggacugcccg

SEQ ID NO: 2343778 - RNA, 19 nt, Artificial Sequence
  Description of Artificial Sequence: Synthetic oligonucleotide
  Sense strand starting at position 1708 of SEQ ID NO: 1885457
ucuccuaccuugguugaua

SEQ ID NO: 2343779 - RNA, 19 nt, Artificial Sequence
  Description of Artificial Sequence: Synthetic oligonucleotide
  Antisense strand to SEQ ID NO: 2343778
uaucaaccaagguaggaga

SEQ ID NO: 2343780 - RNA, 19 nt, Artificial Sequence
  Description of Artificial Sequence: Synthetic oligonucleotide
  Sense strand starting at position 1724 of SEQ ID NO: 1885457
auacucacguucccagaaa

SEQ ID NO: 2343781 - RNA, 19 nt, Artificial Sequence
  Description of Artificial Sequence: Synthetic oligonucleotide
  Antisense strand to SEQ ID NO: 2343780
uuucugggaacgugaguau

SEQ ID NO: 2343782 - RNA, 19 nt, Artificial Sequence
  Description of Artificial Sequence: Synthetic oligonucleotide
  Sense strand starting at position 2121 of SEQ ID NO: 1885457
ggacgugcccucuauauga

SEQ ID NO: 2343783 - RNA, 19 nt, Artificial Sequence
  Description of Artificial Sequence: Synthetic oligonucleotide
  Antisense strand to SEQ ID NO: 2343782
ucauauagagggcacgucc

SEQ ID NO: 2343784 - RNA, 19 nt, Artificial Sequence
  Description of Artificial Sequence: Synthetic oligonucleotide
  Sense strand starting at position 2547 of SEQ ID NO: 1885457
uguguauccggcagacgau

SEQ ID NO: 2343785 - RNA, 19 nt, Artificial Sequence
  Description of Artificial Sequence: Synthetic oligonucleotide
  Antisense strand to SEQ ID NO: 2343784
aucgucugccggauacaca

SEQ ID NO: 2343786 - RNA, 19 nt, Artificial Sequence
  Description of Artificial Sequence: Synthetic oligonucleotide
  Sense strand starting at position 2568 of SEQ ID NO: 1885457
gauguucuccgacaucuac

SEQ ID NO: 2343787 - RNA, 19 nt, Artificial Sequence
  Description of Artificial Sequence: Synthetic oligonucleotide
  Antisense strand to SEQ ID NO: 2343786
guagaugucggagaacauc

SEQ ID NO: 2343788 - RNA, 19 nt, Artificial Sequence
  Description of Artificial Sequence: Synthetic oligonucleotide
  Sense strand starting at position 2583 of SEQ ID NO: 1885457
cuacaagauccgggagauc

SEQ ID NO: 2343789 - RNA, 19 nt, Artificial Sequence
  Description of Artificial Sequence: Synthetic oligonucleotide
  Antisense strand to SEQ ID NO: 2343788
gaucucccggaucuuguag

SEQ ID NO: 2343790 - RNA, 19 nt, Artificial Sequence
  Description of Artificial Sequence: Synthetic oligonucleotide
  Sense strand starting at position 2787 of SEQ ID NO: 1885457
ggagcugauccuggaaaua

SEQ ID NO: 2343791 - RNA, 19 nt, Artificial Sequence
  Description of Artificial Sequence: Synthetic oligonucleotide
  Antisense strand to SEQ ID NO: 2343790
uauuuccaggaucagcucc

SEQ ID NO: 2343792 - RNA, 19 nt, Artificial Sequence
  Description of Artificial Sequence: Synthetic oligonucleotide
  Sense strand starting at position 3006 of SEQ ID NO: 1885457
uugagaaauccacggguca

SEQ ID NO: 2343793 - RNA, 19 nt, Artificial Sequence
  Description of Artificial Sequence: Synthetic oligonucleotide
  Antisense strand to SEQ ID NO: 2343792
ugacccguggauuucucaa

SEQ ID NO: 2343794 - RNA, 19 nt, Artificial Sequence
  Description of Artificial Sequence: Synthetic oligonucleotide
  Sense strand starting at position 3007 of SEQ ID NO: 1885457
ugagaaauccacgggucac

SEQ ID NO: 2343795 - RNA, 19 nt, Artificial Sequence
  Description of Artificial Sequence: Synthetic oligonucleotide
  Antisense strand to SEQ ID NO: 2343794
gugacccguggauuucuca

SEQ ID NO: 2343796 - RNA, 19 nt, Artificial Sequence
  Description of Artificial Sequence: Synthetic oligonucleotide
  Sense strand starting at position 3073 of SEQ ID NO: 1885457
gaauacuucuuauccguga

SEQ ID NO: 2343797 - RNA, 19 nt, Artificial Sequence
  Description of Artificial Sequence: Synthetic oligonucleotide
  Antisense strand to SEQ ID NO: 2343796
ucacggauaagaaguauuc

SEQ ID NO: 2343798 - RNA, 19 nt, Artificial Sequence
  Description of Artificial Sequence: Synthetic oligonucleotide
  Sense strand starting at position 3078 of SEQ ID NO: 1885457
cuucuuauccgugaacuau

SEQ ID NO: 2343799 - RNA, 19 nt, Artificial Sequence
  Description of Artificial Sequence: Synthetic oligonucleotide
  Antisense strand to SEQ ID NO: 2343798
auaguucacggauaagaag

SEQ ID NO: 2343800 - RNA, 19 nt, Artificial Sequence
  Description of Artificial Sequence: Synthetic oligonucleotide
  Sense strand starting at position 3090 of SEQ ID NO: 1885457
gaacuauuggcguggaagg

SEQ ID NO: 2343801 - RNA, 19 nt, Artificial Sequence
  Description of Artificial Sequence: Synthetic oligonucleotide
  Antisense strand to SEQ ID NO: 2343800
ccuuccacgccaauaguuc

SEQ ID NO: 2343802 - RNA, 19 nt, Artificial Sequence
  Description of Artificial Sequence: Synthetic oligonucleotide
  Sense strand starting at position 3158 of SEQ ID NO: 1885457
gcagauggucaguaggaca

SEQ ID NO: 2343803 - RNA, 19 nt, Artificial Sequence
  Description of Artificial Sequence: Synthetic oligonucleotide
  Antisense strand to SEQ ID NO: 2343802
uguccuacugaccaucugc

SEQ ID NO: 2343804 - RNA, 19 nt, Artificial Sequence
  Description of Artificial Sequence: Synthetic oligonucleotide
  Sense strand starting at position 3269 of SEQ ID NO: 1885457
cgauauugucaugaaccau

SEQ ID NO: 2343805 - RNA, 19 nt, Artificial Sequence
  Description of Artificial Sequence: Synthetic oligonucleotide
  Antisense strand to SEQ ID NO: 2343804
augguucaugacaauaucg

SEQ ID NO: 2343806 - RNA, 19 nt, Artificial Sequence
  Description of Artificial Sequence: Synthetic oligonucleotide
  Sense strand starting at position 3345 of SEQ ID NO: 1885457
augaaaucguaagugauac

SEQ ID NO: 2343807 - RNA, 19 nt, Artificial Sequence
  Description of Artificial Sequence: Synthetic oligonucleotide
  Antisense strand to SEQ ID NO: 2343806
guaucacuuacgauuucau

SEQ ID NO: 2343808 - RNA, 19 nt, Artificial Sequence
  Description of Artificial Sequence: Synthetic oligonucleotide
  Sense strand starting at position 3346 of SEQ ID NO: 1885457
ugaaaucguaagugauacu

SEQ ID NO: 2343809 - RNA, 19 nt, Artificial Sequence
  Description of Artificial Sequence: Synthetic oligonucleotide
  Antisense strand to SEQ ID NO: 2343808
aguaucacuuacgauuuca

SEQ ID NO: 2343810 - RNA, 19 nt, Artificial Sequence
  Description of Artificial Sequence: Synthetic oligonucleotide
  Sense strand starting at position 3373 of SEQ ID NO: 1885457
cuagcugaugucuagaauc

SEQ ID NO: 2343811 - RNA, 19 nt, Artificial Sequence
  Description of Artificial Sequence: Synthetic oligonucleotide
  Antisense strand to SEQ ID NO: 2343810
gauucuagacaucagcuag

SEQ ID NO: 2343812 - RNA, 19 nt, Artificial Sequence
  Description of Artificial Sequence: Synthetic oligonucleotide
  Sense strand starting at position 3375 of SEQ ID NO: 1885457
agcugaugucuagaaucuu

SEQ ID NO: 2343813 - RNA, 19 nt, Artificial Sequence
  Description of Artificial Sequence: Synthetic oligonucleotide
  Antisense strand to SEQ ID NO: 2343812
aagauucuagacaucagcu

SEQ ID NO: 2343814 - RNA, 19 nt, Artificial Sequence
  Description of Artificial Sequence: Synthetic oligonucleotide
  Sense strand starting at position 3400 of SEQ ID NO: 1885457
uuuaaagauuggcuaacuu

SEQ ID NO: 2343815 - RNA, 19 nt, Artificial Sequence
  Description of Artificial Sequence: Synthetic oligonucleotide
  Antisense strand to SEQ ID NO: 2343814
aaguuagccaaucuuuaaa

SEQ ID NO: 2343816 - RNA, 19 nt, Artificial Sequence
  Description of Artificial Sequence: Synthetic oligonucleotide
  Sense strand starting at position 3423 of SEQ ID NO: 1885457
gguucuuucgcagugggua

SEQ ID NO: 2343817 - RNA, 19 nt, Artificial Sequence
  Description of Artificial Sequence: Synthetic oligonucleotide
  Antisense strand to SEQ ID NO: 2343816
uacccacugcgaaagaacc

SEQ ID NO: 2343818 - RNA, 19 nt, Artificial Sequence
  Description of Artificial Sequence: Synthetic oligonucleotide
  Sense strand starting at position 3599 of SEQ ID NO: 1885457
agauaccuucugugaacua

SEQ ID NO: 2343819 - RNA, 19 nt, Artificial Sequence
  Description of Artificial Sequence: Synthetic oligonucleotide
  Antisense strand to SEQ ID NO: 2343818
uaguucacagaagguaucu

SEQ ID NO: 2343820 - RNA, 19 nt, Artificial Sequence
  Description of Artificial Sequence: Synthetic oligonucleotide
  Sense strand starting at position 3846 of SEQ ID NO: 1885457
ccagguaaauaccuuaagu

SEQ ID NO: 2343821 - RNA, 19 nt, Artificial Sequence
  Description of Artificial Sequence: Synthetic oligonucleotide
  Antisense strand to SEQ ID NO: 2343820
acuuaagguauuuaccugg

SEQ ID NO: 2343822 - RNA, 19 nt, Artificial Sequence
  Description of Artificial Sequence: Synthetic oligonucleotide
  Sense strand starting at position 444 of SEQ ID NO: 1885460
ccaucauggccucgagcau

SEQ ID NO: 2343823 - RNA, 19 nt, Artificial Sequence
  Description of Artificial Sequence: Synthetic oligonucleotide
  Antisense strand to SEQ ID NO: 2343822
augcucgaggccaugaugg

SEQ ID NO: 2343824 - RNA, 19 nt, Artificial Sequence
  Description of Artificial Sequence: Synthetic oligonucleotide
  Sense strand starting at position 465 of SEQ ID NO: 1885460
ccaagaacagcuugugcau

SEQ ID NO: 2343825 - RNA, 19 nt, Artificial Sequence
  Description of Artificial Sequence: Synthetic oligonucleotide
  Antisense strand to SEQ ID NO: 2343824
augcacaagcuguucuugg

SEQ ID NO: 2343826 - RNA, 19 nt, Artificial Sequence
  Description of Artificial Sequence: Synthetic oligonucleotide
  Sense strand starting at position 717 of SEQ ID NO: 1885460
gggccuucaguagaacgua

SEQ ID NO: 2343827 - RNA, 19 nt, Artificial Sequence
  Description of Artificial Sequence: Synthetic oligonucleotide
  Antisense strand to SEQ ID NO: 2343826
uacguucuacugaaggccc

SEQ ID NO: 2343828 - RNA, 19 nt, Artificial Sequence
  Description of Artificial Sequence: Synthetic oligonucleotide
  Sense strand starting at position 836 of SEQ ID NO: 1885460
aggacuaaguccucagcga

SEQ ID NO: 2343829 - RNA, 19 nt, Artificial Sequence
  Description of Artificial Sequence: Synthetic oligonucleotide
  Antisense strand to SEQ ID NO: 2343828
ucgcugaggacuuaguccu

SEQ ID NO: 2343830 - RNA, 19 nt, Artificial Sequence
  Description of Artificial Sequence: Synthetic oligonucleotide
  Sense strand starting at position 837 of SEQ ID NO: 1885460
ggacuaaguccucagcgaa

SEQ ID NO: 2343831 - RNA, 19 nt, Artificial Sequence
  Description of Artificial Sequence: Synthetic oligonucleotide
  Antisense strand to SEQ ID NO: 2343830
uucgcugaggacuuagucc

SEQ ID NO: 2343832 - RNA, 19 nt, Artificial Sequence
  Description of Artificial Sequence: Synthetic oligonucleotide
  Sense strand starting at position 932 of SEQ ID NO: 1885460
acugacaucuggucagaca

SEQ ID NO: 2343833 - RNA, 19 nt, Artificial Sequence
  Description of Artificial Sequence: Synthetic oligonucleotide
  Antisense strand to SEQ ID NO: 2343832
ugucugaccagaugucagu

SEQ ID NO: 2343834 - RNA, 19 nt, Artificial Sequence
  Description of Artificial Sequence: Synthetic oligonucleotide
  Sense strand starting at position 999 of SEQ ID NO: 1885460
ccacgaucucucggucaaa

SEQ ID NO: 2343835 - RNA, 19 nt, Artificial Sequence
  Description of Artificial Sequence: Synthetic oligonucleotide
  Antisense strand to SEQ ID NO: 2343834
uuugaccgagagaucgugg

SEQ ID NO: 2343836 - RNA, 19 nt, Artificial Sequence
  Description of Artificial Sequence: Synthetic oligonucleotide
  Sense strand starting at position 1000 of SEQ ID NO: 1885460
cacgaucucucggucaaag

SEQ ID NO: 2343837 - RNA, 19 nt, Artificial Sequence
  Description of Artificial Sequence: Synthetic oligonucleotide
  Antisense strand to SEQ ID NO: 2343836
cuuugaccgagagaucgug

SEQ ID NO: 2343838 - RNA, 19 nt, Artificial Sequence
  Description of Artificial Sequence: Synthetic oligonucleotide
  Sense strand starting at position 1002 of SEQ ID NO: 1885460
cgaucucucggucaaagag

SEQ ID NO: 2343839 - RNA, 19 nt, Artificial Sequence
  Description of Artificial Sequence: Synthetic oligonucleotide
  Antisense strand to SEQ ID NO: 2343838
cucuuugaccgagagaucg

SEQ ID NO: 2343840 - RNA, 19 nt, Artificial Sequence
  Description of Artificial Sequence: Synthetic oligonucleotide
  Sense strand starting at position 1306 of SEQ ID NO: 1885460
uccgcuuggugaucucaca

SEQ ID NO: 2343841 - RNA, 19 nt, Artificial Sequence
  Description of Artificial Sequence: Synthetic oligonucleotide
  Antisense strand to SEQ ID NO: 2343840
ugugagaucaccaagcgga

SEQ ID NO: 2343842 - RNA, 19 nt, Artificial Sequence
  Description of Artificial Sequence: Synthetic oligonucleotide
  Sense strand starting at position 1360 of SEQ ID NO: 1885460
ccuggaugguccucuugaa

SEQ ID NO: 2343843 - RNA, 19 nt, Artificial Sequence
  Description of Artificial Sequence: Synthetic oligonucleotide
  Antisense strand to SEQ ID NO: 2343842
uucaagaggaccauccagg

SEQ ID NO: 2343844 - RNA, 19 nt, Artificial Sequence
  Description of Artificial Sequence: Synthetic oligonucleotide
  Sense strand starting at position 1634 of SEQ ID NO: 1885460
ccggcucugccaugaugua

SEQ ID NO: 2343845 - RNA, 19 nt, Artificial Sequence
  Description of Artificial Sequence: Synthetic oligonucleotide
  Antisense strand to SEQ ID NO: 2343844
uacaucauggcagagccgg

SEQ ID NO: 2343846 - RNA, 19 nt, Artificial Sequence
  Description of Artificial Sequence: Synthetic oligonucleotide
  Sense strand starting at position 1778 of SEQ ID NO: 1885460
gcagguccacucuaauauu

SEQ ID NO: 2343847 - RNA, 19 nt, Artificial Sequence
  Description of Artificial Sequence: Synthetic oligonucleotide
  Antisense strand to SEQ ID NO: 2343846
aauauuagaguggaccugc

SEQ ID NO: 2343848 - RNA, 19 nt, Artificial Sequence
  Description of Artificial Sequence: Synthetic oligonucleotide
  Sense strand starting at position 1862 of SEQ ID NO: 1885460
uugggaaguugccuaaagu

SEQ ID NO: 2343849 - RNA, 19 nt, Artificial Sequence
  Description of Artificial Sequence: Synthetic oligonucleotide
  Antisense strand to SEQ ID NO: 2343848
acuuuaggcaacuucccaa

SEQ ID NO: 2343850 - RNA, 19 nt, Artificial Sequence
  Description of Artificial Sequence: Synthetic oligonucleotide
  Sense strand starting at position 1863 of SEQ ID NO: 1885460
ugggaaguugccuaaaguu

SEQ ID NO: 2343851 - RNA, 19 nt, Artificial Sequence
  Description of Artificial Sequence: Synthetic oligonucleotide
  Antisense strand to SEQ ID NO: 2343850
aacuuuaggcaacuuccca

SEQ ID NO: 2343852 - RNA, 19 nt, Artificial Sequence
  Description of Artificial Sequence: Synthetic oligonucleotide
  Sense strand starting at position 2733 of SEQ ID NO: 1885460
uuguuaugucuuugcaggu

SEQ ID NO: 2343853 - RNA, 19 nt, Artificial Sequence
  Description of Artificial Sequence: Synthetic oligonucleotide
  Antisense strand to SEQ ID NO: 2343852
accugcaaagacauaacaa

SEQ ID NO: 2343854 - RNA, 19 nt, Artificial Sequence
  Description of Artificial Sequence: Synthetic oligonucleotide
  Sense strand starting at position 2734 of SEQ ID NO: 1885460
uguuaugucuuugcagguu

SEQ ID NO: 2343855 - RNA, 19 nt, Artificial Sequence
  Description of Artificial Sequence: Synthetic oligonucleotide
  Antisense strand to SEQ ID NO: 2343854
aaccugcaaagacauaaca

SEQ ID NO: 2343856 - RNA, 19 nt, Artificial Sequence
  Description of Artificial Sequence: Synthetic oligonucleotide
  Sense strand starting at position 2776 of SEQ ID NO: 1885460
gcugaaagcucaucugcca

SEQ ID NO: 2343857 - RNA, 19 nt, Artificial Sequence
  Description of Artificial Sequence: Synthetic oligonucleotide
  Antisense strand to SEQ ID NO: 2343856
uggcagaugagcuuucagc

SEQ ID NO: 2343858 - RNA, 19 nt, Artificial Sequence
  Description of Artificial Sequence: Synthetic oligonucleotide
  Sense strand starting at position 2831 of SEQ ID NO: 1885460
ggaggugacuuuguacaca

SEQ ID NO: 2343859 - RNA, 19 nt, Artificial Sequence
  Description of Artificial Sequence: Synthetic oligonucleotide
  Antisense strand to SEQ ID NO: 2343858
uguguacaaagucaccucc

SEQ ID NO: 2343860 - RNA, 19 nt, Artificial Sequence
  Description of Artificial Sequence: Synthetic oligonucleotide
  Sense strand starting at position 2857 of SEQ ID NO: 1885460
caguguuuggcugccaguu

SEQ ID NO: 2343861 - RNA, 19 nt, Artificial Sequence
  Description of Artificial Sequence: Synthetic oligonucleotide
  Antisense strand to SEQ ID NO: 2343860
aacuggcagccaaacacug

SEQ ID NO: 2343862 - RNA, 19 nt, Artificial Sequence
  Description of Artificial Sequence: Synthetic oligonucleotide
  Sense strand starting at position 2869 of SEQ ID NO: 1885460
gccaguuucccucuugugu

SEQ ID NO: 2343863 - RNA, 19 nt, Artificial Sequence
  Description of Artificial Sequence: Synthetic oligonucleotide
  Antisense strand to SEQ ID NO: 2343862
acacaagagggaaacuggc

SEQ ID NO: 2343864 - RNA, 19 nt, Artificial Sequence
  Description of Artificial Sequence: Synthetic oligonucleotide
  Sense strand starting at position 2876 of SEQ ID NO: 1885460
ucccucuuguguguaacua

SEQ ID NO: 2343865 - RNA, 19 nt, Artificial Sequence
  Description of Artificial Sequence: Synthetic oligonucleotide
  Antisense strand to SEQ ID NO: 2343864
uaguuacacacaagaggga

SEQ ID NO: 2343866 - RNA, 19 nt, Artificial Sequence
  Description of Artificial Sequence: Synthetic oligonucleotide
  Sense strand starting at position 2877 of SEQ ID NO: 1885460
cccucuuguguguaacuau

SEQ ID NO: 2343867 - RNA, 19 nt, Artificial Sequence
  Description of Artificial Sequence: Synthetic oligonucleotide
  Antisense strand to SEQ ID NO: 2343866
auaguuacacacaagaggg

SEQ ID NO: 2343868 - RNA, 19 nt, Artificial Sequence
  Description of Artificial Sequence: Synthetic oligonucleotide
  Sense strand starting at position 2884 of SEQ ID NO: 1885460
guguguaacuauucuaggu

SEQ ID NO: 2343869 - RNA, 19 nt, Artificial Sequence
  Description of Artificial Sequence: Synthetic oligonucleotide
  Antisense strand to SEQ ID NO: 2343868
accuagaauaguuacacac

SEQ ID NO: 2343870 - RNA, 19 nt, Artificial Sequence
  Description of Artificial Sequence: Synthetic oligonucleotide
  Sense strand starting at position 2888 of SEQ ID NO: 1885460
guaacuauucuagguauga

SEQ ID NO: 2343871 - RNA, 19 nt, Artificial Sequence
  Description of Artificial Sequence: Synthetic oligonucleotide
  Antisense strand to SEQ ID NO: 2343870
ucauaccuagaauaguuac

SEQ ID NO: 2343872 - RNA, 19 nt, Artificial Sequence
  Description of Artificial Sequence: Synthetic oligonucleotide
  Sense strand starting at position 2899 of SEQ ID NO: 1885460
agguaugacuccuugagca

SEQ ID NO: 2343873 - RNA, 19 nt, Artificial Sequence
  Description of Artificial Sequence: Synthetic oligonucleotide
  Antisense strand to SEQ ID NO: 2343872
ugcucaaggagucauaccu

SEQ ID NO: 2343874 - RNA, 19 nt, Artificial Sequence
  Description of Artificial Sequence: Synthetic oligonucleotide
  Sense strand starting at position 2901 of SEQ ID NO: 1885460
guaugacuccuugagcaug

SEQ ID NO: 2343875 - RNA, 19 nt, Artificial Sequence
  Description of Artificial Sequence: Synthetic oligonucleotide
  Antisense strand to SEQ ID NO: 2343874
caugcucaaggagucauac

SEQ ID NO: 2343876 - RNA, 19 nt, Artificial Sequence
  Description of Artificial Sequence: Synthetic oligonucleotide
  Sense strand starting at position 2903 of SEQ ID NO: 1885460
augacuccuugagcaugaa

SEQ ID NO: 2343877 - RNA, 19 nt, Artificial Sequence
  Description of Artificial Sequence: Synthetic oligonucleotide
  Antisense strand to SEQ ID NO: 2343876
uucaugcucaaggagucau

SEQ ID NO: 2343878 - RNA, 19 nt, Artificial Sequence
  Description of Artificial Sequence: Synthetic oligonucleotide
  Sense strand starting at position 2906 of SEQ ID NO: 1885460
acuccuugagcaugaaaug

SEQ ID NO: 2343879 - RNA, 19 nt, Artificial Sequence
  Description of Artificial Sequence: Synthetic oligonucleotide
  Antisense strand to SEQ ID NO: 2343878
cauuucaugcucaaggagu

SEQ ID NO: 2343880 - RNA, 19 nt, Artificial Sequence
  Description of Artificial Sequence: Synthetic oligonucleotide
  Sense strand starting at position 2959 of SEQ ID NO: 1885460
caagaauugguguguagac

SEQ ID NO: 2343881 - RNA, 19 nt, Artificial Sequence
  Description of Artificial Sequence: Synthetic oligonucleotide
  Antisense strand to SEQ ID NO: 2343880
gucuacacaccaauucuug

SEQ ID NO: 2343882 - RNA, 19 nt, Artificial Sequence
  Description of Artificial Sequence: Synthetic oligonucleotide
  Sense strand starting at position 2960 of SEQ ID NO: 1885460
aagaauugguguguagacu

SEQ ID NO: 2343883 - RNA, 19 nt, Artificial Sequence
  Description of Artificial Sequence: Synthetic oligonucleotide
  Antisense strand to SEQ ID NO: 2343882
agucuacacaccaauucuu

SEQ ID NO: 2343884 - RNA, 19 nt, Artificial Sequence
  Description of Artificial Sequence: Synthetic oligonucleotide
  Sense strand starting at position 3632 of SEQ ID NO: 1885460
ugcugaauaucuguucugu

SEQ ID NO: 2343885 - RNA, 19 nt, Artificial Sequence
  Description of Artificial Sequence: Synthetic oligonucleotide
  Antisense strand to SEQ ID NO: 2343884
acagaacagauauucagca

SEQ ID NO: 2343886 - RNA, 19 nt, Artificial Sequence
  Description of Artificial Sequence: Synthetic oligonucleotide
  Sense strand starting at position 3641 of SEQ ID NO: 1885460
ucuguucuguucuuacuau

SEQ ID NO: 2343887 - RNA, 19 nt, Artificial Sequence
  Description of Artificial Sequence: Synthetic oligonucleotide
  Antisense strand to SEQ ID NO: 2343886
auaguaagaacagaacaga

SEQ ID NO: 2343888 - RNA, 19 nt, Artificial Sequence
  Description of Artificial Sequence: Synthetic oligonucleotide
  Sense strand starting at position 3647 of SEQ ID NO: 1885460
cuguucuuacuaugguuau

SEQ ID NO: 2343889 - RNA, 19 nt, Artificial Sequence
  Description of Artificial Sequence: Synthetic oligonucleotide
  Antisense strand to SEQ ID NO: 2343888
auaaccauaguaagaacag

SEQ ID NO: 2343890 - RNA, 19 nt, Artificial Sequence
  Description of Artificial Sequence: Synthetic oligonucleotide
  Sense strand starting at position 3658 of SEQ ID NO: 1885460
augguuaugcugugcaaca

SEQ ID NO: 2343891 - RNA, 19 nt, Artificial Sequence
  Description of Artificial Sequence: Synthetic oligonucleotide
  Antisense strand to SEQ ID NO: 2343890
uguugcacagcauaaccau

SEQ ID NO: 2343892 - RNA, 19 nt, Artificial Sequence
  Description of Artificial Sequence: Synthetic oligonucleotide
  Sense strand starting at position 3659 of SEQ ID NO: 1885460
ugguuaugcugugcaacau

SEQ ID NO: 2343893 - RNA, 19 nt, Artificial Sequence
  Description of Artificial Sequence: Synthetic oligonucleotide
  Antisense strand to SEQ ID NO: 2343892
auguugcacagcauaacca

SEQ ID NO: 2343894 - RNA, 19 nt, Artificial Sequence
  Description of Artificial Sequence: Synthetic oligonucleotide
  Sense strand starting at position 3660 of SEQ ID NO: 1885460
gguuaugcugugcaacaua

SEQ ID NO: 2343895 - RNA, 19 nt, Artificial Sequence
  Description of Artificial Sequence: Synthetic oligonucleotide
  Antisense strand to SEQ ID NO: 2343894
uauguugcacagcauaacc

SEQ ID NO: 2343896 - RNA, 19 nt, Artificial Sequence
  Description of Artificial Sequence: Synthetic oligonucleotide
  Sense strand starting at position 3750 of SEQ ID NO: 1885460
acauuaguuugcuuuacau

SEQ ID NO: 2343897 - RNA, 19 nt, Artificial Sequence
  Description of Artificial Sequence: Synthetic oligonucleotide
  Antisense strand to SEQ ID NO: 2343896
auguaaagcaaacuaaugu

SEQ ID NO: 2343898 - RNA, 19 nt, Artificial Sequence
  Description of Artificial Sequence: Synthetic oligonucleotide
  Sense strand starting at position 3786 of SEQ ID NO: 1885460
uuggcuuaacuguaucaua

SEQ ID NO: 2343899 - RNA, 19 nt, Artificial Sequence
  Description of Artificial Sequence: Synthetic oligonucleotide
  Antisense strand to SEQ ID NO: 2343898
uaugauacaguuaagccaa

SEQ ID NO: 2343900 - RNA, 19 nt, Artificial Sequence
  Description of Artificial Sequence: Synthetic oligonucleotide
  Sense strand starting at position 3813 of SEQ ID NO: 1885460
agucuaugccuugauaaua

SEQ ID NO: 2343901 - RNA, 19 nt, Artificial Sequence
  Description of Artificial Sequence: Synthetic oligonucleotide
  Antisense strand to SEQ ID NO: 2343900
uauuaucaaggcauagacu

SEQ ID NO: 2343902 - RNA, 19 nt, Artificial Sequence
  Description of Artificial Sequence: Synthetic oligonucleotide
  Sense strand starting at position 811 of SEQ ID NO: 1885458
ccacuaugagauugccauu

SEQ ID NO: 2343903 - RNA, 19 nt, Artificial Sequence
  Description of Artificial Sequence: Synthetic oligonucleotide
  Antisense strand to SEQ ID NO: 2343902
aauggcaaucucauagugg

SEQ ID NO: 2343904 - RNA, 19 nt, Artificial Sequence
  Description of Artificial Sequence: Synthetic oligonucleotide
  Sense strand starting at position 839 of SEQ ID NO: 1885458
gugagaugguaucauuaaa

SEQ ID NO: 2343905 - RNA, 19 nt, Artificial Sequence
  Description of Artificial Sequence: Synthetic oligonucleotide
  Antisense strand to SEQ ID NO: 2343904
uuuaaugauaccaucucac

SEQ ID NO: 2343906 - RNA, 19 nt, Artificial Sequence
  Description of Artificial Sequence: Synthetic oligonucleotide
  Sense strand starting at position 1764 of SEQ ID NO: 1885458
guccaucugucuccuugua

SEQ ID NO: 2343907 - RNA, 19 nt, Artificial Sequence
  Description of Artificial Sequence: Synthetic oligonucleotide
  Antisense strand to SEQ ID NO: 2343906
uacaaggagacagauggac

SEQ ID NO: 2343908 - RNA, 19 nt, Artificial Sequence
  Description of Artificial Sequence: Synthetic oligonucleotide
  Sense strand starting at position 1766 of SEQ ID NO: 1885458
ccaucugucuccuuguaug

SEQ ID NO: 2343909 - RNA, 19 nt, Artificial Sequence
  Description of Artificial Sequence: Synthetic oligonucleotide
  Antisense strand to SEQ ID NO: 2343908
cauacaaggagacagaugg

SEQ ID NO: 2343910 - RNA, 19 nt, Artificial Sequence
  Description of Artificial Sequence: Synthetic oligonucleotide
  Sense strand starting at position 1800 of SEQ ID NO: 1885458
uggguuaguggauguguuu

SEQ ID NO: 2343911 - RNA, 19 nt, Artificial Sequence
  Description of Artificial Sequence: Synthetic oligonucleotide
  Antisense strand to SEQ ID NO: 2343910
aaacacauccacuaaccca

SEQ ID NO: 2343912 - RNA, 19 nt, Artificial Sequence
  Description of Artificial Sequence: Synthetic oligonucleotide
  Sense strand starting at position 1806 of SEQ ID NO: 1885458
aguggauguguuugggaga

SEQ ID NO: 2343913 - RNA, 19 nt, Artificial Sequence
  Description of Artificial Sequence: Synthetic oligonucleotide
  Antisense strand to SEQ ID NO: 2343912
ucucccaaacacauccacu

SEQ ID NO: 2343914 - RNA, 19 nt, Artificial Sequence
  Description of Artificial Sequence: Synthetic oligonucleotide
  Sense strand starting at position 1811 of SEQ ID NO: 1885458
auguguuugggagaagugu

SEQ ID NO: 2343915 - RNA, 19 nt, Artificial Sequence
  Description of Artificial Sequence: Synthetic oligonucleotide
  Antisense strand to SEQ ID NO: 2343914
acacuucucccaaacacau

SEQ ID NO: 2343916 - RNA, 19 nt, Artificial Sequence
  Description of Artificial Sequence: Synthetic oligonucleotide
  Sense strand starting at position 1819 of SEQ ID NO: 1885458
gggagaaguguguauggau

SEQ ID NO: 2343917 - RNA, 19 nt, Artificial Sequence
  Description of Artificial Sequence: Synthetic oligonucleotide
  Antisense strand to SEQ ID NO: 2343916
auccauacacacuucuccc

SEQ ID NO: 2343918 - RNA, 19 nt, Artificial Sequence
  Description of Artificial Sequence: Synthetic oligonucleotide
  Sense strand starting at position 1846 of SEQ ID NO: 1885458
ggaugcauggauggauaua

SEQ ID NO: 2343919 - RNA, 19 nt, Artificial Sequence
  Description of Artificial Sequence: Synthetic oligonucleotide
  Antisense strand to SEQ ID NO: 2343918
uauauccauccaugcaucc

SEQ ID NO: 2343920 - RNA, 19 nt, Artificial Sequence
  Description of Artificial Sequence: Synthetic oligonucleotide
  Sense strand starting at position 1882 of SEQ ID NO: 1885458
gugugugaauacuucuaug

SEQ ID NO: 2343921 - RNA, 19 nt, Artificial Sequence
  Description of Artificial Sequence: Synthetic oligonucleotide
  Antisense strand to SEQ ID NO: 2343920
cauagaaguauucacacac

SEQ ID NO: 2343922 - RNA, 19 nt, Artificial Sequence
  Description of Artificial Sequence: Synthetic oligonucleotide
  Sense strand starting at position 1890 of SEQ ID NO: 1885458
auacuucuaugcucaguua

SEQ ID NO: 2343923 - RNA, 19 nt, Artificial Sequence
  Description of Artificial Sequence: Synthetic oligonucleotide
  Antisense strand to SEQ ID NO: 2343922
uaacugagcauagaaguau

SEQ ID NO: 2343924 - RNA, 19 nt, Artificial Sequence
  Description of Artificial Sequence: Synthetic oligonucleotide
  Sense strand starting at position 2125 of SEQ ID NO: 1885458
acuauuuggucugaaaugu

SEQ ID NO: 2343925 - RNA, 19 nt, Artificial Sequence
  Description of Artificial Sequence: Synthetic oligonucleotide
  Antisense strand to SEQ ID NO: 2343924
acauuucagaccaaauagu

SEQ ID NO: 2343926 - RNA, 19 nt, Artificial Sequence
  Description of Artificial Sequence: Synthetic oligonucleotide
  Sense strand starting at position 2483 of SEQ ID NO: 1885458
cagaguucugcagggucaa

SEQ ID NO: 2343927 - RNA, 19 nt, Artificial Sequence
  Description of Artificial Sequence: Synthetic oligonucleotide
  Antisense strand to SEQ ID NO: 2343926
uugacccugcagaacucug

SEQ ID NO: 2343928 - RNA, 19 nt, Artificial Sequence
  Description of Artificial Sequence: Synthetic oligonucleotide
  Sense strand starting at position 2484 of SEQ ID NO: 1885458
agaguucugcagggucaaa

SEQ ID NO: 2343929 - RNA, 19 nt, Artificial Sequence
  Description of Artificial Sequence: Synthetic oligonucleotide
  Antisense strand to SEQ ID NO: 2343928
uuugacccugcagaacucu

SEQ ID NO: 2343930 - RNA, 19 nt, Artificial Sequence
  Description of Artificial Sequence: Synthetic oligonucleotide
  Sense strand starting at position 2528 of SEQ ID NO: 1885458
uucucuucuccugaggagu

SEQ ID NO: 2343931 - RNA, 19 nt, Artificial Sequence
  Description of Artificial Sequence: Synthetic oligonucleotide
  Antisense strand to SEQ ID NO: 2343930
acuccucaggagaagagaa

SEQ ID NO: 2343932 - RNA, 19 nt, Artificial Sequence
  Description of Artificial Sequence: Synthetic oligonucleotide
  Sense strand starting at position 2758 of SEQ ID NO: 1885458
cggccucuauauugauuua

SEQ ID NO: 2343933 - RNA, 19 nt, Artificial Sequence
  Description of Artificial Sequence: Synthetic oligonucleotide
  Antisense strand to SEQ ID NO: 2343932
uaaaucaauauagaggccg

SEQ ID NO: 2343934 - RNA, 19 nt, Artificial Sequence
  Description of Artificial Sequence: Synthetic oligonucleotide
  Sense strand starting at position 2774 of SEQ ID NO: 1885458
uuauuuaugucucacaguu

SEQ ID NO: 2343935 - RNA, 19 nt, Artificial Sequence
  Description of Artificial Sequence: Synthetic oligonucleotide
  Antisense strand to SEQ ID NO: 2343934
aacugugagacauaaauaa

SEQ ID NO: 2343936 - RNA, 19 nt, Artificial Sequence
  Description of Artificial Sequence: Synthetic oligonucleotide
  Sense strand starting at position 2860 of SEQ ID NO: 1885458
auauauguaucguccaaca

SEQ ID NO: 2343937 - RNA, 19 nt, Artificial Sequence
  Description of Artificial Sequence: Synthetic oligonucleotide
  Antisense strand to SEQ ID NO: 2343936
uguuggacgauacauauau

SEQ ID NO: 2343938 - RNA, 19 nt, Artificial Sequence
  Description of Artificial Sequence: Synthetic oligonucleotide
  Sense strand starting at position 2865 of SEQ ID NO: 1885458
uguaucguccaacaccaau

SEQ ID NO: 2343939 - RNA, 19 nt, Artificial Sequence
  Description of Artificial Sequence: Synthetic oligonucleotide
  Antisense strand to SEQ ID NO: 2343938
auugguguuggacgauaca

SEQ ID NO: 2343940 - RNA, 19 nt, Artificial Sequence
  Description of Artificial Sequence: Synthetic oligonucleotide
  Sense strand starting at position 2924 of SEQ ID NO: 1885458
aagcgauguuuaguucuuu

SEQ ID NO: 2343941 - RNA, 19 nt, Artificial Sequence
  Description of Artificial Sequence: Synthetic oligonucleotide
  Antisense strand to SEQ ID NO: 2343940
aaagaacuaaacaucgcuu

SEQ ID NO: 2343942 - RNA, 19 nt, Artificial Sequence
  Description of Artificial Sequence: Synthetic oligonucleotide
  Sense strand starting at position 2925 of SEQ ID NO: 1885458
agcgauguuuaguucuuua

SEQ ID NO: 2343943 - RNA, 19 nt, Artificial Sequence
  Description of Artificial Sequence: Synthetic oligonucleotide
  Antisense strand to SEQ ID NO: 2343942
uaaagaacuaaacaucgcu

SEQ ID NO: 2343944 - RNA, 19 nt, Artificial Sequence
  Description of Artificial Sequence: Synthetic oligonucleotide
  Sense strand starting at position 3084 of SEQ ID NO: 1885458
ugucuucucugcucucaca

SEQ ID NO: 2343945 - RNA, 19 nt, Artificial Sequence
  Description of Artificial Sequence: Synthetic oligonucleotide
  Antisense strand to SEQ ID NO: 2343944
ugugagagcagagaagaca

SEQ ID NO: 2343946 - RNA, 19 nt, Artificial Sequence
  Description of Artificial Sequence: Synthetic oligonucleotide
  Sense strand starting at position 3171 of SEQ ID NO: 1885458
gguagagcucuggguguga

SEQ ID NO: 2343947 - RNA, 19 nt, Artificial Sequence
  Description of Artificial Sequence: Synthetic oligonucleotide
  Antisense strand to SEQ ID NO: 2343946
ucacacccagagcucuacc

SEQ ID NO: 2343948 - RNA, 19 nt, Artificial Sequence
  Description of Artificial Sequence: Synthetic oligonucleotide
  Sense strand starting at position 3175 of SEQ ID NO: 1885458
gagcucugggugugaggaa

SEQ ID NO: 2343949 - RNA, 19 nt, Artificial Sequence
  Description of Artificial Sequence: Synthetic oligonucleotide
  Antisense strand to SEQ ID NO: 2343948
uuccucacacccagagcuc

SEQ ID NO: 2343950 - RNA, 19 nt, Artificial Sequence
  Description of Artificial Sequence: Synthetic oligonucleotide
  Sense strand starting at position 3260 of SEQ ID NO: 1885458
ucgcuuguugcucugcaua

SEQ ID NO: 2343951 - RNA, 19 nt, Artificial Sequence
  Description of Artificial Sequence: Synthetic oligonucleotide
  Antisense strand to SEQ ID NO: 2343950
uaugcagagcaacaagcga

SEQ ID NO: 2343952 - RNA, 19 nt, Artificial Sequence
  Description of Artificial Sequence: Synthetic oligonucleotide
  Sense strand starting at position 3337 of SEQ ID NO: 1885458
uaaguaugugccugcuacu

SEQ ID NO: 2343953 - RNA, 19 nt, Artificial Sequence
  Description of Artificial Sequence: Synthetic oligonucleotide
  Antisense strand to SEQ ID NO: 2343952
aguagcaggcacauacuua

SEQ ID NO: 2343954 - RNA, 19 nt, Artificial Sequence
  Description of Artificial Sequence: Synthetic oligonucleotide
  Sense strand starting at position 3482 of SEQ ID NO: 1885458
agacauucuguauggccau

SEQ ID NO: 2343955 - RNA, 19 nt, Artificial Sequence
  Description of Artificial Sequence: Synthetic oligonucleotide
  Antisense strand to SEQ ID NO: 2343954
auggccauacagaaugucu

SEQ ID NO: 2343956 - RNA, 19 nt, Artificial Sequence
  Description of Artificial Sequence: Synthetic oligonucleotide
  Sense strand starting at position 3488 of SEQ ID NO: 1885458
ucuguauggccauggauga

SEQ ID NO: 2343957 - RNA, 19 nt, Artificial Sequence
  Description of Artificial Sequence: Synthetic oligonucleotide
  Antisense strand to SEQ ID NO: 2343956
ucauccauggccauacaga

SEQ ID NO: 2343958 - RNA, 19 nt, Artificial Sequence
  Description of Artificial Sequence: Synthetic oligonucleotide
  Sense strand starting at position 3489 of SEQ ID NO: 1885458
cuguauggccauggaugau

SEQ ID NO: 2343959 - RNA, 19 nt, Artificial Sequence
  Description of Artificial Sequence: Synthetic oligonucleotide
  Antisense strand to SEQ ID NO: 2343958
aucauccauggccauacag

SEQ ID NO: 2343960 - RNA, 19 nt, Artificial Sequence
  Description of Artificial Sequence: Synthetic oligonucleotide
  Sense strand starting at position 3498 of SEQ ID NO: 1885458
cauggaugauccugagagu

SEQ ID NO: 2343961 - RNA, 19 nt, Artificial Sequence
  Description of Artificial Sequence: Synthetic oligonucleotide
  Antisense strand to SEQ ID NO: 2343960
acucucaggaucauccaug

SEQ ID NO: 2343962 - RNA, 19 nt, Artificial Sequence
  Description of Artificial Sequence: Synthetic oligonucleotide
  Sense strand starting at position 3591 of SEQ ID NO: 1885458
cuguguuugugugucuaga

SEQ ID NO: 2343963 - RNA, 19 nt, Artificial Sequence
  Description of Artificial Sequence: Synthetic oligonucleotide
  Antisense strand to SEQ ID NO: 2343962
ucuagacacacaaacacag

SEQ ID NO: 2343964 - RNA, 19 nt, Artificial Sequence
  Description of Artificial Sequence: Synthetic oligonucleotide
  Sense strand starting at position 3593 of SEQ ID NO: 1885458
guguuugugugucuagaua

SEQ ID NO: 2343965 - RNA, 19 nt, Artificial Sequence
  Description of Artificial Sequence: Synthetic oligonucleotide
  Antisense strand to SEQ ID NO: 2343964
uaucuagacacacaaacac

SEQ ID NO: 2343966 - RNA, 19 nt, Artificial Sequence
  Description of Artificial Sequence: Synthetic oligonucleotide
  Sense strand starting at position 3616 of SEQ ID NO: 1885458
gaaguaguauaucugcaca

SEQ ID NO: 2343967 - RNA, 19 nt, Artificial Sequence
  Description of Artificial Sequence: Synthetic oligonucleotide
  Antisense strand to SEQ ID NO: 2343966
ugugcagauauacuacuuc

SEQ ID NO: 2343968 - RNA, 19 nt, Artificial Sequence
  Description of Artificial Sequence: Synthetic oligonucleotide
  Sense strand starting at position 3618 of SEQ ID NO: 1885458
aguaguauaucugcacaua

SEQ ID NO: 2343969 - RNA, 19 nt, Artificial Sequence
  Description of Artificial Sequence: Synthetic oligonucleotide
  Antisense strand to SEQ ID NO: 2343968
uaugugcagauauacuacu

SEQ ID NO: 2343970 - RNA, 19 nt, Artificial Sequence
  Description of Artificial Sequence: Synthetic oligonucleotide
  Sense strand starting at position 3619 of SEQ ID NO: 1885458
guaguauaucugcacauac

SEQ ID NO: 2343971 - RNA, 19 nt, Artificial Sequence
  Description of Artificial Sequence: Synthetic oligonucleotide
  Antisense strand to SEQ ID NO: 2343970
guaugugcagauauacuac

SEQ ID NO: 2343972 - RNA, 19 nt, Artificial Sequence
  Description of Artificial Sequence: Synthetic oligonucleotide
  Sense strand starting at position 3621 of SEQ ID NO: 1885458
aguauaucugcacauacau

SEQ ID NO: 2343973 - RNA, 19 nt, Artificial Sequence
  Description of Artificial Sequence: Synthetic oligonucleotide
  Antisense strand to SEQ ID NO: 2343972
auguaugugcagauauacu

SEQ ID NO: 2343974 - RNA, 19 nt, Artificial Sequence
  Description of Artificial Sequence: Synthetic oligonucleotide
  Sense strand starting at position 3708 of SEQ ID NO: 1885458
gaugucaauucuguaugca

SEQ ID NO: 2343975 - RNA, 19 nt, Artificial Sequence
  Description of Artificial Sequence: Synthetic oligonucleotide
  Antisense strand to SEQ ID NO: 2343974
ugcauacagaauugacauc

SEQ ID NO: 2343976 - RNA, 19 nt, Artificial Sequence
  Description of Artificial Sequence: Synthetic oligonucleotide
  Sense strand starting at position 3709 of SEQ ID NO: 1885458
augucaauucuguaugcag

SEQ ID NO: 2343977 - RNA, 19 nt, Artificial Sequence
  Description of Artificial Sequence: Synthetic oligonucleotide
  Antisense strand to SEQ ID NO: 2343976
cugcauacagaauugacau

SEQ ID NO: 2343978 - RNA, 19 nt, Artificial Sequence
  Description of Artificial Sequence: Synthetic oligonucleotide
  Sense strand starting at position 3843 of SEQ ID NO: 1885458
auguguauaucacuaauuc

SEQ ID NO: 2343979 - RNA, 19 nt, Artificial Sequence
  Description of Artificial Sequence: Synthetic oligonucleotide
  Antisense strand to SEQ ID NO: 2343978
gaauuagugauauacacau

SEQ ID NO: 2343980 - RNA, 19 nt, Artificial Sequence
  Description of Artificial Sequence: Synthetic oligonucleotide
  Sense strand starting at position 3886 of SEQ ID NO: 1885458
ggcggauucucacucucau

SEQ ID NO: 2343981 - RNA, 19 nt, Artificial Sequence
  Description of Artificial Sequence: Synthetic oligonucleotide
  Antisense strand to SEQ ID NO: 2343980
augagagugagaauccgcc

SEQ ID NO: 2343982 - RNA, 19 nt, Artificial Sequence
  Description of Artificial Sequence: Synthetic oligonucleotide
  Sense strand starting at position 117 of SEQ ID NO: 1885459
aagaguaguaacgaggcaa

SEQ ID NO: 2343983 - RNA, 19 nt, Artificial Sequence
  Description of Artificial Sequence: Synthetic oligonucleotide
  Antisense strand to SEQ ID NO: 2343982
uugccucguuacuacucuu

SEQ ID NO: 2343984 - RNA, 19 nt, Artificial Sequence
  Description of Artificial Sequence: Synthetic oligonucleotide
  Sense strand starting at position 121 of SEQ ID NO: 1885459
guaguaacgaggcaagaau

SEQ ID NO: 2343985 - RNA, 19 nt, Artificial Sequence
  Description of Artificial Sequence: Synthetic oligonucleotide
  Antisense strand to SEQ ID NO: 2343984
auucuugccucguuacuac

SEQ ID NO: 2343986 - RNA, 19 nt, Artificial Sequence
  Description of Artificial Sequence: Synthetic oligonucleotide
  Sense strand starting at position 130 of SEQ ID NO: 1885459
aggcaagaaucuuaagaua

SEQ ID NO: 2343987 - RNA, 19 nt, Artificial Sequence
  Description of Artificial Sequence: Synthetic oligonucleotide
  Antisense strand to SEQ ID NO: 2343986
uaucuuaagauucuugccu

SEQ ID NO: 2343988 - RNA, 19 nt, Artificial Sequence
  Description of Artificial Sequence: Synthetic oligonucleotide
  Sense strand starting at position 489 of SEQ ID NO: 1885459
ccaagaaucuaaggauaac

SEQ ID NO: 2343989 - RNA, 19 nt, Artificial Sequence
  Description of Artificial Sequence: Synthetic oligonucleotide
  Antisense strand to SEQ ID NO: 2343988
guuauccuuagauucuugg

SEQ ID NO: 2343990 - RNA, 19 nt, Artificial Sequence
  Description of Artificial Sequence: Synthetic oligonucleotide
  Sense strand starting at position 619 of SEQ ID NO: 1885459
ugucaucacuggcuaguga

SEQ ID NO: 2343991 - RNA, 19 nt, Artificial Sequence
  Description of Artificial Sequence: Synthetic oligonucleotide
  Antisense strand to SEQ ID NO: 2343990
ucacuagccagugaugaca

SEQ ID NO: 2343992 - RNA, 19 nt, Artificial Sequence
  Description of Artificial Sequence: Synthetic oligonucleotide
  Sense strand starting at position 620 of SEQ ID NO: 1885459
gucaucacuggcuagugaa

SEQ ID NO: 2343993 - RNA, 19 nt, Artificial Sequence
  Description of Artificial Sequence: Synthetic oligonucleotide
  Antisense strand to SEQ ID NO: 2343992
uucacuagccagugaugac

SEQ ID NO: 2343994 - RNA, 19 nt, Artificial Sequence
  Description of Artificial Sequence: Synthetic oligonucleotide
  Sense strand starting at position 654 of SEQ ID NO: 1885459
aggaauucucagcaaaugu

SEQ ID NO: 2343995 - RNA, 19 nt, Artificial Sequence
  Description of Artificial Sequence: Synthetic oligonucleotide
  Antisense strand to SEQ ID NO: 2343994
acauuugcugagaauuccu

SEQ ID NO: 2343996 - RNA, 19 nt, Artificial Sequence
  Description of Artificial Sequence: Synthetic oligonucleotide
  Sense strand starting at position 803 of SEQ ID NO: 1885459
uuaauaagugacugagguu

SEQ ID NO: 2343997 - RNA, 19 nt, Artificial Sequence
  Description of Artificial Sequence: Synthetic oligonucleotide
  Antisense strand to SEQ ID NO: 2343996
aaccucagucacuuauuaa

SEQ ID NO: 2343998 - RNA, 19 nt, Artificial Sequence
  Description of Artificial Sequence: Synthetic oligonucleotide
  Sense strand starting at position 826 of SEQ ID NO: 1885459
guaauacuaucuccaggau

SEQ ID NO: 2343999 - RNA, 19 nt, Artificial Sequence
  Description of Artificial Sequence: Synthetic oligonucleotide
  Antisense strand to SEQ ID NO: 2343998
auccuggagauaguauuac

SEQ ID NO: 2344000 - RNA, 19 nt, Artificial Sequence
  Description of Artificial Sequence: Synthetic oligonucleotide
  Sense strand starting at position 1201 of SEQ ID NO: 1885459
gggauaauaugacaucaaa

SEQ ID NO: 2344001 - RNA, 19 nt, Artificial Sequence
  Description of Artificial Sequence: Synthetic oligonucleotide
  Antisense strand to SEQ ID NO: 2344000
uuugaugucauauuauccc

SEQ ID NO: 2344002 - RNA, 19 nt, Artificial Sequence
  Description of Artificial Sequence: Synthetic oligonucleotide
  Sense strand starting at position 1333 of SEQ ID NO: 1885459
auugucucaguuuauuaga

SEQ ID NO: 2344003 - RNA, 19 nt, Artificial Sequence
  Description of Artificial Sequence: Synthetic oligonucleotide
  Antisense strand to SEQ ID NO: 2344002
ucuaauaaacugagacaau

SEQ ID NO: 2344004 - RNA, 19 nt, Artificial Sequence
  Description of Artificial Sequence: Synthetic oligonucleotide
  Sense strand starting at position 1335 of SEQ ID NO: 1885459
ugucucaguuuauuagaau

SEQ ID NO: 2344005 - RNA, 19 nt, Artificial Sequence
  Description of Artificial Sequence: Synthetic oligonucleotide
  Antisense strand to SEQ ID NO: 2344004
auucuaauaaacugagaca

SEQ ID NO: 2344006 - RNA, 19 nt, Artificial Sequence
  Description of Artificial Sequence: Synthetic oligonucleotide
  Sense strand starting at position 1347 of SEQ ID NO: 1885459
uuagaauauggauggucuu

SEQ ID NO: 2344007 - RNA, 19 nt, Artificial Sequence
  Description of Artificial Sequence: Synthetic oligonucleotide
  Antisense strand to SEQ ID NO: 2344006
aagaccauccauauucuaa

SEQ ID NO: 2344008 - RNA, 19 nt, Artificial Sequence
  Description of Artificial Sequence: Synthetic oligonucleotide
  Sense strand starting at position 1348 of SEQ ID NO: 1885459
uagaauauggauggucuuu

SEQ ID NO: 2344009 - RNA, 19 nt, Artificial Sequence
  Description of Artificial Sequence: Synthetic oligonucleotide
  Antisense strand to SEQ ID NO: 2344008
aaagaccauccauauucua

SEQ ID NO: 2344010 - RNA, 19 nt, Artificial Sequence
  Description of Artificial Sequence: Synthetic oligonucleotide
  Sense strand starting at position 1409 of SEQ ID NO: 1885459
ggaauuaucuuggaaucug

SEQ ID NO: 2344011 - RNA, 19 nt, Artificial Sequence
  Description of Artificial Sequence: Synthetic oligonucleotide
  Antisense strand to SEQ ID NO: 2344010
cagauuccaagauaauucc

SEQ ID NO: 2344012 - RNA, 19 nt, Artificial Sequence
  Description of Artificial Sequence: Synthetic oligonucleotide
  Sense strand starting at position 1426 of SEQ ID NO: 1885459
ugauaauucugagacucua

SEQ ID NO: 2344013 - RNA, 19 nt, Artificial Sequence
  Description of Artificial Sequence: Synthetic oligonucleotide
  Antisense strand to SEQ ID NO: 2344012
uagagucucagaauuauca

SEQ ID NO: 2344014 - RNA, 19 nt, Artificial Sequence
  Description of Artificial Sequence: Synthetic oligonucleotide
  Sense strand starting at position 1434 of SEQ ID NO: 1885459
cugagacucuacuaaugac

SEQ ID NO: 2344015 - RNA, 19 nt, Artificial Sequence
  Description of Artificial Sequence: Synthetic oligonucleotide
  Antisense strand to SEQ ID NO: 2344014
gucauuaguagagucucag

SEQ ID NO: 2344016 - RNA, 19 nt, Artificial Sequence
  Description of Artificial Sequence: Synthetic oligonucleotide
  Sense strand starting at position 1466 of SEQ ID NO: 1885459
ucuacauuaugugcucauu

SEQ ID NO: 2344017 - RNA, 19 nt, Artificial Sequence
  Description of Artificial Sequence: Synthetic oligonucleotide
  Antisense strand to SEQ ID NO: 2344016
aaugagcacauaauguaga

SEQ ID NO: 2344018 - RNA, 19 nt, Artificial Sequence
  Description of Artificial Sequence: Synthetic oligonucleotide
  Sense strand starting at position 1681 of SEQ ID NO: 1885459
gugugucccuccucaauca

SEQ ID NO: 2344019 - RNA, 19 nt, Artificial Sequence
  Description of Artificial Sequence: Synthetic oligonucleotide
  Antisense strand to SEQ ID NO: 2344018
ugauugaggagggacacac

SEQ ID NO: 2344020 - RNA, 19 nt, Artificial Sequence
  Description of Artificial Sequence: Synthetic oligonucleotide
  Sense strand starting at position 1689 of SEQ ID NO: 1885459
cuccucaaucaccguguua

SEQ ID NO: 2344021 - RNA, 19 nt, Artificial Sequence
  Description of Artificial Sequence: Synthetic oligonucleotide
  Antisense strand to SEQ ID NO: 2344020
uaacacggugauugaggag

SEQ ID NO: 2344022 - RNA, 19 nt, Artificial Sequence
  Description of Artificial Sequence: Synthetic oligonucleotide
  Sense strand starting at position 1691 of SEQ ID NO: 1885459
ccucaaucaccguguuaug

SEQ ID NO: 2344023 - RNA, 19 nt, Artificial Sequence
  Description of Artificial Sequence: Synthetic oligonucleotide
  Antisense strand to SEQ ID NO: 2344022
cauaacacggugauugagg

SEQ ID NO: 2344024 - RNA, 19 nt, Artificial Sequence
  Description of Artificial Sequence: Synthetic oligonucleotide
  Sense strand starting at position 1700 of SEQ ID NO: 1885459
ccguguuauguugaucauu

SEQ ID NO: 2344025 - RNA, 19 nt, Artificial Sequence
  Description of Artificial Sequence: Synthetic oligonucleotide
  Antisense strand to SEQ ID NO: 2344024
aaugaucaacauaacacgg

SEQ ID NO: 2344026 - RNA, 19 nt, Artificial Sequence
  Description of Artificial Sequence: Synthetic oligonucleotide
  Sense strand starting at position 1813 of SEQ ID NO: 1885459
uguauucugcugcaacuua

SEQ ID NO: 2344027 - RNA, 19 nt, Artificial Sequence
  Description of Artificial Sequence: Synthetic oligonucleotide
  Antisense strand to SEQ ID NO: 2344026
uaaguugcagcagaauaca

SEQ ID NO: 2344028 - RNA, 19 nt, Artificial Sequence
  Description of Artificial Sequence: Synthetic oligonucleotide
  Sense strand starting at position 1849 of SEQ ID NO: 1885459
guuucugaaauuugucugu

SEQ ID NO: 2344029 - RNA, 19 nt, Artificial Sequence
  Description of Artificial Sequence: Synthetic oligonucleotide
  Antisense strand to SEQ ID NO: 2344028
acagacaaauuucagaaac

SEQ ID NO: 2344030 - RNA, 19 nt, Artificial Sequence
  Description of Artificial Sequence: Synthetic oligonucleotide
  Sense strand starting at position 1856 of SEQ ID NO: 1885459
aaauuugucugugaugaug

SEQ ID NO: 2344031 - RNA, 19 nt, Artificial Sequence
  Description of Artificial Sequence: Synthetic oligonucleotide
  Antisense strand to SEQ ID NO: 2344030
caucaucacagacaaauuu

SEQ ID NO: 2344032 - RNA, 19 nt, Artificial Sequence
  Description of Artificial Sequence: Synthetic oligonucleotide
  Sense strand starting at position 1865 of SEQ ID NO: 1885459
ugugaugauguguauagcu

SEQ ID NO: 2344033 - RNA, 19 nt, Artificial Sequence
  Description of Artificial Sequence: Synthetic oligonucleotide
  Antisense strand to SEQ ID NO: 2344032
agcuauacacaucaucaca

SEQ ID NO: 2344034 - RNA, 19 nt, Artificial Sequence
  Description of Artificial Sequence: Synthetic oligonucleotide
  Sense strand starting at position 1867 of SEQ ID NO: 1885459
ugaugauguguauagcucu

SEQ ID NO: 2344035 - RNA, 19 nt, Artificial Sequence
  Description of Artificial Sequence: Synthetic oligonucleotide
  Antisense strand to SEQ ID NO: 2344034
agagcuauacacaucauca

SEQ ID NO: 2344036 - RNA, 19 nt, Artificial Sequence
  Description of Artificial Sequence: Synthetic oligonucleotide
  Sense strand starting at position 1870 of SEQ ID NO: 1885459
ugauguguauagcucuauu

SEQ ID NO: 2344037 - RNA, 19 nt, Artificial Sequence
  Description of Artificial Sequence: Synthetic oligonucleotide
  Antisense strand to SEQ ID NO: 2344036
aauagagcuauacacauca

SEQ ID NO: 2344038 - RNA, 19 nt, Artificial Sequence
  Description of Artificial Sequence: Synthetic oligonucleotide
  Sense strand starting at position 1904 of SEQ ID NO: 1885459
uccauauaguguuccauug

SEQ ID NO: 2344039 - RNA, 19 nt, Artificial Sequence
  Description of Artificial Sequence: Synthetic oligonucleotide
  Antisense strand to SEQ ID NO: 2344038
caauggaacacuauaugga

SEQ ID NO: 2344040 - RNA, 19 nt, Artificial Sequence
  Description of Artificial Sequence: Synthetic oligonucleotide
  Sense strand starting at position 1914 of SEQ ID NO: 1885459
guuccauugcaaggauaaa

SEQ ID NO: 2344041 - RNA, 19 nt, Artificial Sequence
  Description of Artificial Sequence: Synthetic oligonucleotide
  Antisense strand to SEQ ID NO: 2344040
uuuauccuugcaauggaac

SEQ ID NO: 2344042 - RNA, 19 nt, Artificial Sequence
  Description of Artificial Sequence: Synthetic oligonucleotide
  Sense strand starting at position 1943 of SEQ ID NO: 1885459
uuaucaguucuccaggucu

SEQ ID NO: 2344043 - RNA, 19 nt, Artificial Sequence
  Description of Artificial Sequence: Synthetic oligonucleotide
  Antisense strand to SEQ ID NO: 2344042
agaccuggagaacugauaa

SEQ ID NO: 2344044 - RNA, 19 nt, Artificial Sequence
  Description of Artificial Sequence: Synthetic oligonucleotide
  Sense strand starting at position 1990 of SEQ ID NO: 1885459
cuucgaucauuucuguacu

SEQ ID NO: 2344045 - RNA, 19 nt, Artificial Sequence
  Description of Artificial Sequence: Synthetic oligonucleotide
  Antisense strand to SEQ ID NO: 2344044
aguacagaaaugaucgaag

SEQ ID NO: 2344046 - RNA, 19 nt, Artificial Sequence
  Description of Artificial Sequence: Synthetic oligonucleotide
  Sense strand starting at position 2020 of SEQ ID NO: 1885459
ccuuaucugcaagagguuu

SEQ ID NO: 2344047 - RNA, 19 nt, Artificial Sequence
  Description of Artificial Sequence: Synthetic oligonucleotide
  Antisense strand to SEQ ID NO: 2344046
aaaccucuugcagauaagg

SEQ ID NO: 2344048 - RNA, 19 nt, Artificial Sequence
  Description of Artificial Sequence: Synthetic oligonucleotide
  Sense strand starting at position 2047 of SEQ ID NO: 1885459
ggguauguucuccaggaac

SEQ ID NO: 2344049 - RNA, 19 nt, Artificial Sequence
  Description of Artificial Sequence: Synthetic oligonucleotide
  Antisense strand to SEQ ID NO: 2344048
guuccuggagaacauaccc

SEQ ID NO: 2344050 - RNA, 19 nt, Artificial Sequence
  Description of Artificial Sequence: Synthetic oligonucleotide
  Sense strand starting at position 2049 of SEQ ID NO: 1885459
guauguucuccaggaacag

SEQ ID NO: 2344051 - RNA, 19 nt, Artificial Sequence
  Description of Artificial Sequence: Synthetic oligonucleotide
  Antisense strand to SEQ ID NO: 2344050
cuguuccuggagaacauac

SEQ ID NO: 2344052 - RNA, 19 nt, Artificial Sequence
  Description of Artificial Sequence: Synthetic oligonucleotide
  Sense strand starting at position 2297 of SEQ ID NO: 1885459
ccuucuaaggguuaugcau

SEQ ID NO: 2344053 - RNA, 19 nt, Artificial Sequence
  Description of Artificial Sequence: Synthetic oligonucleotide
  Antisense strand to SEQ ID NO: 2344052
augcauaacccuuagaagg

SEQ ID NO: 2344054 - RNA, 19 nt, Artificial Sequence
  Description of Artificial Sequence: Synthetic oligonucleotide
  Sense strand starting at position 2329 of SEQ ID NO: 1885459
augcuaccucaauaugguu

SEQ ID NO: 2344055 - RNA, 19 nt, Artificial Sequence
  Description of Artificial Sequence: Synthetic oligonucleotide
  Antisense strand to SEQ ID NO: 2344054
aaccauauugagguagcau

SEQ ID NO: 2344056 - RNA, 19 nt, Artificial Sequence
  Description of Artificial Sequence: Synthetic oligonucleotide
  Sense strand starting at position 2355 of SEQ ID NO: 1885459
gcauuucccugagcauuau

SEQ ID NO: 2344057 - RNA, 19 nt, Artificial Sequence
  Description of Artificial Sequence: Synthetic oligonucleotide
  Antisense strand to SEQ ID NO: 2344056
auaaugcucagggaaaugc

SEQ ID NO: 2344058 - RNA, 19 nt, Artificial Sequence
  Description of Artificial Sequence: Synthetic oligonucleotide
  Sense strand starting at position 2455 of SEQ ID NO: 1885459
guugucuucuacuugauuu

SEQ ID NO: 2344059 - RNA, 19 nt, Artificial Sequence
  Description of Artificial Sequence: Synthetic oligonucleotide
  Antisense strand to SEQ ID NO: 2344058
aaaucaaguagaagacaac

SEQ ID NO: 2344060 - RNA, 19 nt, Artificial Sequence
  Description of Artificial Sequence: Synthetic oligonucleotide
  Sense strand starting at position 2813 of SEQ ID NO: 1885459
guuuguuugggacagaagu

SEQ ID NO: 2344061 - RNA, 19 nt, Artificial Sequence
  Description of Artificial Sequence: Synthetic oligonucleotide
  Antisense strand to SEQ ID NO: 2344060
acuucugucccaaacaaac

SEQ ID NO: 2344062 - RNA, 19 nt, Artificial Sequence
  Description of Artificial Sequence: Synthetic oligonucleotide
  Sense strand starting at position 447 of SEQ ID NO: 1885461
augguacuggcaggaguaa

SEQ ID NO: 2344063 - RNA, 19 nt, Artificial Sequence
  Description of Artificial Sequence: Synthetic oligonucleotide
  Antisense strand to SEQ ID NO: 2344062
uuacuccugccaguaccau

SEQ ID NO: 2344064 - RNA, 19 nt, Artificial Sequence
  Description of Artificial Sequence: Synthetic oligonucleotide
  Sense strand starting at position 486 of SEQ ID NO: 1885461
agggaaguaucuugauuac

SEQ ID NO: 2344065 - RNA, 19 nt, Artificial Sequence
  Description of Artificial Sequence: Synthetic oligonucleotide
  Antisense strand to SEQ ID NO: 2344064
guaaucaagauacuucccu

SEQ ID NO: 2344066 - RNA, 19 nt, Artificial Sequence
  Description of Artificial Sequence: Synthetic oligonucleotide
  Sense strand starting at position 489 of SEQ ID NO: 1885461
gaaguaucuugauuacuga

SEQ ID NO: 2344067 - RNA, 19 nt, Artificial Sequence
  Description of Artificial Sequence: Synthetic oligonucleotide
  Antisense strand to SEQ ID NO: 2344066
ucaguaaucaagauacuuc

SEQ ID NO: 2344068 - RNA, 19 nt, Artificial Sequence
  Description of Artificial Sequence: Synthetic oligonucleotide
  Sense strand starting at position 492 of SEQ ID NO: 1885461
guaucuugauuacugaauu

SEQ ID NO: 2344069 - RNA, 19 nt, Artificial Sequence
  Description of Artificial Sequence: Synthetic oligonucleotide
  Antisense strand to SEQ ID NO: 2344068
aauucaguaaucaagauac

SEQ ID NO: 2344070 - RNA, 19 nt, Artificial Sequence
  Description of Artificial Sequence: Synthetic oligonucleotide
  Sense strand starting at position 584 of SEQ ID NO: 1885461
guugauauuguauacagca

SEQ ID NO: 2344071 - RNA, 19 nt, Artificial Sequence
  Description of Artificial Sequence: Synthetic oligonucleotide
  Antisense strand to SEQ ID NO: 2344070
ugcuguauacaauaucaac

SEQ ID NO: 2344072 - RNA, 19 nt, Artificial Sequence
  Description of Artificial Sequence: Synthetic oligonucleotide
  Sense strand starting at position 591 of SEQ ID NO: 1885461
uuguauacagcauagauau

SEQ ID NO: 2344073 - RNA, 19 nt, Artificial Sequence
  Description of Artificial Sequence: Synthetic oligonucleotide
  Antisense strand to SEQ ID NO: 2344072
auaucuaugcuguauacaa

SEQ ID NO: 2344074 - RNA, 19 nt, Artificial Sequence
  Description of Artificial Sequence: Synthetic oligonucleotide
  Sense strand starting at position 858 of SEQ ID NO: 1885461
agcgauguuucagaacuag

SEQ ID NO: 2344075 - RNA, 19 nt, Artificial Sequence
  Description of Artificial Sequence: Synthetic oligonucleotide
  Antisense strand to SEQ ID NO: 2344074
cuaguucugaaacaucgcu

SEQ ID NO: 2344076 - RNA, 19 nt, Artificial Sequence
  Description of Artificial Sequence: Synthetic oligonucleotide
  Sense strand starting at position 1006 of SEQ ID NO: 1885461
aggaacauacgugguauaa

SEQ ID NO: 2344077 - RNA, 19 nt, Artificial Sequence
  Description of Artificial Sequence: Synthetic oligonucleotide
  Antisense strand to SEQ ID NO: 2344076
uuauaccacguauguuccu

SEQ ID NO: 2344078 - RNA, 19 nt, Artificial Sequence
  Description of Artificial Sequence: Synthetic oligonucleotide
  Sense strand starting at position 1232 of SEQ ID NO: 1885461
cuaaaucuguaagaaagca

SEQ ID NO: 2344079 - RNA, 19 nt, Artificial Sequence
  Description of Artificial Sequence: Synthetic oligonucleotide
  Antisense strand to SEQ ID NO: 2344078
ugcuuucuuacagauuuag

SEQ ID NO: 2344080 - RNA, 19 nt, Artificial Sequence
  Description of Artificial Sequence: Synthetic oligonucleotide
  Sense strand starting at position 1773 of SEQ ID NO: 1885461
agagauuguuucucccaaa

SEQ ID NO: 2344081 - RNA, 19 nt, Artificial Sequence
  Description of Artificial Sequence: Synthetic oligonucleotide
  Antisense strand to SEQ ID NO: 2344080
uuugggagaaacaaucucu

SEQ ID NO: 2344082 - RNA, 19 nt, Artificial Sequence
  Description of Artificial Sequence: Synthetic oligonucleotide
  Sense strand starting at position 1795 of SEQ ID NO: 1885461
ugacgaucauuugaggaaa

SEQ ID NO: 2344083 - RNA, 19 nt, Artificial Sequence
  Description of Artificial Sequence: Synthetic oligonucleotide
  Antisense strand to SEQ ID NO: 2344082
uuuccucaaaugaucguca

SEQ ID NO: 2344084 - RNA, 19 nt, Artificial Sequence
  Description of Artificial Sequence: Synthetic oligonucleotide
  Sense strand starting at position 1797 of SEQ ID NO: 1885461
acgaucauuugaggaaaga

SEQ ID NO: 2344085 - RNA, 19 nt, Artificial Sequence
  Description of Artificial Sequence: Synthetic oligonucleotide
  Antisense strand to SEQ ID NO: 2344084
ucuuuccucaaaugaucgu

SEQ ID NO: 2344086 - RNA, 19 nt, Artificial Sequence
  Description of Artificial Sequence: Synthetic oligonucleotide
  Sense strand starting at position 1808 of SEQ ID NO: 1885461
aggaaagacuuggagacuu

SEQ ID NO: 2344087 - RNA, 19 nt, Artificial Sequence
  Description of Artificial Sequence: Synthetic oligonucleotide
  Antisense strand to SEQ ID NO: 2344086
aagucuccaagucuuuccu

SEQ ID NO: 2344088 - RNA, 19 nt, Artificial Sequence
  Description of Artificial Sequence: Synthetic oligonucleotide
  Sense strand starting at position 1855 of SEQ ID NO: 1885461
ccggcauugucccaaaccu

SEQ ID NO: 2344089 - RNA, 19 nt, Artificial Sequence
  Description of Artificial Sequence: Synthetic oligonucleotide
  Antisense strand to SEQ ID NO: 2344088
agguuugggacaaugccgg

SEQ ID NO: 2344090 - RNA, 19 nt, Artificial Sequence
  Description of Artificial Sequence: Synthetic oligonucleotide
  Sense strand starting at position 2412 of SEQ ID NO: 1885461
uggcaaugcuucgugccaa

SEQ ID NO: 2344091 - RNA, 19 nt, Artificial Sequence
  Description of Artificial Sequence: Synthetic oligonucleotide
  Antisense strand to SEQ ID NO: 2344090
uuggcacgaagcauugcca

SEQ ID NO: 2344092 - RNA, 19 nt, Artificial Sequence
  Description of Artificial Sequence: Synthetic oligonucleotide
  Sense strand starting at position 2413 of SEQ ID NO: 1885461
ggcaaugcuucgugccaaa

SEQ ID NO: 2344093 - RNA, 19 nt, Artificial Sequence
  Description of Artificial Sequence: Synthetic oligonucleotide
  Antisense strand to SEQ ID NO: 2344092
uuuggcacgaagcauugcc

SEQ ID NO: 2344094 - RNA, 19 nt, Artificial Sequence
  Description of Artificial Sequence: Synthetic oligonucleotide
  Sense strand starting at position 2775 of SEQ ID NO: 1885461
ugaucaaaccuacgaauua

SEQ ID NO: 2344095 - RNA, 19 nt, Artificial Sequence
  Description of Artificial Sequence: Synthetic oligonucleotide
  Antisense strand to SEQ ID NO: 2344094
uaauucguagguuugauca

SEQ ID NO: 2344096 - RNA, 19 nt, Artificial Sequence
  Description of Artificial Sequence: Synthetic oligonucleotide
  Sense strand starting at position 2867 of SEQ ID NO: 1885461
uuuauugaaucuugcuaga

SEQ ID NO: 2344097 - RNA, 19 nt, Artificial Sequence
  Description of Artificial Sequence: Synthetic oligonucleotide
  Antisense strand to SEQ ID NO: 2344096
ucuagcaagauucaauaaa

SEQ ID NO: 2344098 - RNA, 19 nt, Artificial Sequence
  Description of Artificial Sequence: Synthetic oligonucleotide
  Sense strand starting at position 2870 of SEQ ID NO: 1885461
auugaaucuugcuagauag

SEQ ID NO: 2344099 - RNA, 19 nt, Artificial Sequence
  Description of Artificial Sequence: Synthetic oligonucleotide
  Antisense strand to SEQ ID NO: 2344098
cuaucuagcaagauucaau

SEQ ID NO: 2344100 - RNA, 19 nt, Artificial Sequence
  Description of Artificial Sequence: Synthetic oligonucleotide
  Sense strand starting at position 66 of SEQ ID NO: 1885462
agucauuguuacgugaagu

SEQ ID NO: 2344101 - RNA, 19 nt, Artificial Sequence
  Description of Artificial Sequence: Synthetic oligonucleotide
  Antisense strand to SEQ ID NO: 2344100
acuucacguaacaaugacu

SEQ ID NO: 2344102 - RNA, 19 nt, Artificial Sequence
  Description of Artificial Sequence: Synthetic oligonucleotide
  Sense strand starting at position 114 of SEQ ID NO: 1885462
uguuaucacauacguagga

SEQ ID NO: 2344103 - RNA, 19 nt, Artificial Sequence
  Description of Artificial Sequence: Synthetic oligonucleotide
  Antisense strand to SEQ ID NO: 2344102
uccuacguaugugauaaca

SEQ ID NO: 2344104 - RNA, 19 nt, Artificial Sequence
  Description of Artificial Sequence: Synthetic oligonucleotide
  Sense strand starting at position 529 of SEQ ID NO: 1885462
gcauuaagacacugcaagu

SEQ ID NO: 2344105 - RNA, 19 nt, Artificial Sequence
  Description of Artificial Sequence: Synthetic oligonucleotide
  Antisense strand to SEQ ID NO: 2344104
acuugcagugucuuaaugc

SEQ ID NO: 2344106 - RNA, 19 nt, Artificial Sequence
  Description of Artificial Sequence: Synthetic oligonucleotide
  Sense strand starting at position 770 of SEQ ID NO: 1885462
gcuacucaccagggugaua

SEQ ID NO: 2344107 - RNA, 19 nt, Artificial Sequence
  Description of Artificial Sequence: Synthetic oligonucleotide
  Antisense strand to SEQ ID NO: 2344106
uaucacccuggugaguagc

SEQ ID NO: 2344108 - RNA, 19 nt, Artificial Sequence
  Description of Artificial Sequence: Synthetic oligonucleotide
  Sense strand starting at position 916 of SEQ ID NO: 1885462
cugcauagagcuuggaaua

SEQ ID NO: 2344109 - RNA, 19 nt, Artificial Sequence
  Description of Artificial Sequence: Synthetic oligonucleotide
  Antisense strand to SEQ ID NO: 2344108
uauuccaagcucuaugcag

SEQ ID NO: 2344110 - RNA, 19 nt, Artificial Sequence
  Description of Artificial Sequence: Synthetic oligonucleotide
  Sense strand starting at position 994 of SEQ ID NO: 1885462
cugaccaauccugauguuu

SEQ ID NO: 2344111 - RNA, 19 nt, Artificial Sequence
  Description of Artificial Sequence: Synthetic oligonucleotide
  Antisense strand to SEQ ID NO: 2344110
aaacaucaggauuggucag

SEQ ID NO: 2344112 - RNA, 19 nt, Artificial Sequence
  Description of Artificial Sequence: Synthetic oligonucleotide
  Sense strand starting at position 1202 of SEQ ID NO: 1885462
guggauuaguggagaucag

SEQ ID NO: 2344113 - RNA, 19 nt, Artificial Sequence
  Description of Artificial Sequence: Synthetic oligonucleotide
  Antisense strand to SEQ ID NO: 2344112
cugaucuccacuaauccac

SEQ ID NO: 2344114 - RNA, 19 nt, Artificial Sequence
  Description of Artificial Sequence: Synthetic oligonucleotide
  Sense strand starting at position 1462 of SEQ ID NO: 1885462
aaauaaaucgagugccuuu

SEQ ID NO: 2344115 - RNA, 19 nt, Artificial Sequence
  Description of Artificial Sequence: Synthetic oligonucleotide
  Antisense strand to SEQ ID NO: 2344114
aaaggcacucgauuuauuu

SEQ ID NO: 2344116 - RNA, 19 nt, Artificial Sequence
  Description of Artificial Sequence: Synthetic oligonucleotide
  Sense strand starting at position 1507 of SEQ ID NO: 1885462
cucuauuaagcagguauua

SEQ ID NO: 2344117 - RNA, 19 nt, Artificial Sequence
  Description of Artificial Sequence: Synthetic oligonucleotide
  Antisense strand to SEQ ID NO: 2344116
uaauaccugcuuaauagag

SEQ ID NO: 2344118 - RNA, 19 nt, Artificial Sequence
  Description of Artificial Sequence: Synthetic oligonucleotide
  Sense strand starting at position 1528 of SEQ ID NO: 1885462
ggcucuccauggcuauaau

SEQ ID NO: 2344119 - RNA, 19 nt, Artificial Sequence
  Description of Artificial Sequence: Synthetic oligonucleotide
  Antisense strand to SEQ ID NO: 2344118
auuauagccauggagagcc

SEQ ID NO: 2344120 - RNA, 19 nt, Artificial Sequence
  Description of Artificial Sequence: Synthetic oligonucleotide
  Sense strand starting at position 1529 of SEQ ID NO: 1885462
gcucuccauggcuauaaua

SEQ ID NO: 2344121 - RNA, 19 nt, Artificial Sequence
  Description of Artificial Sequence: Synthetic oligonucleotide
  Antisense strand to SEQ ID NO: 2344120
uauuauagccauggagagc

SEQ ID NO: 2344122 - RNA, 19 nt, Artificial Sequence
  Description of Artificial Sequence: Synthetic oligonucleotide
  Sense strand starting at position 1531 of SEQ ID NO: 1885462
ucuccauggcuauaauaga

SEQ ID NO: 2344123 - RNA, 19 nt, Artificial Sequence
  Description of Artificial Sequence: Synthetic oligonucleotide
  Antisense strand to SEQ ID NO: 2344122
ucuauuauagccauggaga

SEQ ID NO: 2344124 - RNA, 19 nt, Artificial Sequence
  Description of Artificial Sequence: Synthetic oligonucleotide
  Sense strand starting at position 1547 of SEQ ID NO: 1885462
agaggaacucugggccuua

SEQ ID NO: 2344125 - RNA, 19 nt, Artificial Sequence
  Description of Artificial Sequence: Synthetic oligonucleotide
  Antisense strand to SEQ ID NO: 2344124
uaaggcccagaguuccucu

SEQ ID NO: 2344126 - RNA, 19 nt, Artificial Sequence
  Description of Artificial Sequence: Synthetic oligonucleotide
  Sense strand starting at position 1548 of SEQ ID NO: 1885462
gaggaacucugggccuuau

SEQ ID NO: 2344127 - RNA, 19 nt, Artificial Sequence
  Description of Artificial Sequence: Synthetic oligonucleotide
  Antisense strand to SEQ ID NO: 2344126
auaaggcccagaguuccuc

SEQ ID NO: 2344128 - RNA, 19 nt, Artificial Sequence
  Description of Artificial Sequence: Synthetic oligonucleotide
  Sense strand starting at position 1617 of SEQ ID NO: 1885462
uaaacaguagucggucuua

SEQ ID NO: 2344129 - RNA, 19 nt, Artificial Sequence
  Description of Artificial Sequence: Synthetic oligonucleotide
  Antisense strand to SEQ ID NO: 2344128
uaagaccgacuacuguuua

SEQ ID NO: 2344130 - RNA, 19 nt, Artificial Sequence
  Description of Artificial Sequence: Synthetic oligonucleotide
  Sense strand starting at position 2268 of SEQ ID NO: 1885462
ugacaagccucagaaggaa

SEQ ID NO: 2344131 - RNA, 19 nt, Artificial Sequence
  Description of Artificial Sequence: Synthetic oligonucleotide
  Antisense strand to SEQ ID NO: 2344130
uuccuucugaggcuuguca

SEQ ID NO: 2344132 - RNA, 19 nt, Artificial Sequence
  Description of Artificial Sequence: Synthetic oligonucleotide
  Sense strand starting at position 2331 of SEQ ID NO: 1885462
cagcuuugguccucacaga

SEQ ID NO: 2344133 - RNA, 19 nt, Artificial Sequence
  Description of Artificial Sequence: Synthetic oligonucleotide
  Antisense strand to SEQ ID NO: 2344132
ucugugaggaccaaagcug

SEQ ID NO: 2344134 - RNA, 19 nt, Artificial Sequence
  Description of Artificial Sequence: Synthetic oligonucleotide
  Sense strand starting at position 2332 of SEQ ID NO: 1885462
agcuuugguccucacagau

SEQ ID NO: 2344135 - RNA, 19 nt, Artificial Sequence
  Description of Artificial Sequence: Synthetic oligonucleotide
  Antisense strand to SEQ ID NO: 2344134
aucugugaggaccaaagcu

SEQ ID NO: 2344136 - RNA, 19 nt, Artificial Sequence
  Description of Artificial Sequence: Synthetic oligonucleotide
  Sense strand starting at position 2372 of SEQ ID NO: 1885462
gugauuaacucagucauca

SEQ ID NO: 2344137 - RNA, 19 nt, Artificial Sequence
  Description of Artificial Sequence: Synthetic oligonucleotide
  Antisense strand to SEQ ID NO: 2344136
ugaugacugaguuaaucac

SEQ ID NO: 2344138 - RNA, 19 nt, Artificial Sequence
  Description of Artificial Sequence: Synthetic oligonucleotide
  Sense strand starting at position 2688 of SEQ ID NO: 1885462
auuuaaaucugguagaaca

SEQ ID NO: 2344139 - RNA, 19 nt, Artificial Sequence
  Description of Artificial Sequence: Synthetic oligonucleotide
  Antisense strand to SEQ ID NO: 2344138
uguucuaccagauuuaaau

SEQ ID NO: 2344140 - RNA, 19 nt, Artificial Sequence
  Description of Artificial Sequence: Synthetic oligonucleotide
  Sense strand starting at position 2738 of SEQ ID NO: 1885462
auaggcucuuccucaugaa

SEQ ID NO: 2344141 - RNA, 19 nt, Artificial Sequence
  Description of Artificial Sequence: Synthetic oligonucleotide
  Antisense strand to SEQ ID NO: 2344140
uucaugaggaagagccuau

SEQ ID NO: 2344142 - RNA, 19 nt, Artificial Sequence
  Description of Artificial Sequence: Synthetic oligonucleotide
  Sense strand starting at position 2797 of SEQ ID NO: 1885462
ugaguuuguauuggaauug

SEQ ID NO: 2344143 - RNA, 19 nt, Artificial Sequence
  Description of Artificial Sequence: Synthetic oligonucleotide
  Antisense strand to SEQ ID NO: 2344142
caauuccaauacaaacuca

SEQ ID NO: 2344144 - RNA, 19 nt, Artificial Sequence
  Description of Artificial Sequence: Synthetic oligonucleotide
  Sense strand starting at position 2917 of SEQ ID NO: 1885462
ugaguuguuguugcuggua

SEQ ID NO: 2344145 - RNA, 19 nt, Artificial Sequence
  Description of Artificial Sequence: Synthetic oligonucleotide
  Antisense strand to SEQ ID NO: 2344144
uaccagcaacaacaacuca

SEQ ID NO: 2344146 - RNA, 19 nt, Artificial Sequence
  Description of Artificial Sequence: Synthetic oligonucleotide
  Sense strand starting at position 3006 of SEQ ID NO: 1885462
uugucuauagauuguccaa

SEQ ID NO: 2344147 - RNA, 19 nt, Artificial Sequence
  Description of Artificial Sequence: Synthetic oligonucleotide
  Antisense strand to SEQ ID NO: 2344146
uuggacaaucuauagacaa

SEQ ID NO: 2344148 - RNA, 19 nt, Artificial Sequence
  Description of Artificial Sequence: Synthetic oligonucleotide
  Sense strand starting at position 3008 of SEQ ID NO: 1885462
gucuauagauuguccaaga

SEQ ID NO: 2344149 - RNA, 19 nt, Artificial Sequence
  Description of Artificial Sequence: Synthetic oligonucleotide
  Antisense strand to SEQ ID NO: 2344148
ucuuggacaaucuauagac

SEQ ID NO: 2344150 - RNA, 19 nt, Artificial Sequence
  Description of Artificial Sequence: Synthetic oligonucleotide
  Sense strand starting at position 3009 of SEQ ID NO: 1885462
ucuauagauuguccaagag

SEQ ID NO: 2344151 - RNA, 19 nt, Artificial Sequence
  Description of Artificial Sequence: Synthetic oligonucleotide
  Antisense strand to SEQ ID NO: 2344150
cucuuggacaaucuauaga

SEQ ID NO: 2344152 - RNA, 19 nt, Artificial Sequence
  Description of Artificial Sequence: Synthetic oligonucleotide
  Sense strand starting at position 3120 of SEQ ID NO: 1885462
cucaauaaguaguccuuau

SEQ ID NO: 2344153 - RNA, 19 nt, Artificial Sequence
  Description of Artificial Sequence: Synthetic oligonucleotide
  Antisense strand to SEQ ID NO: 2344152
auaaggacuacuuauugag

SEQ ID NO: 2344154 - RNA, 19 nt, Artificial Sequence
  Description of Artificial Sequence: Synthetic oligonucleotide
  Sense strand starting at position 3124 of SEQ ID NO: 1885462
auaaguaguccuuauuccu

SEQ ID NO: 2344155 - RNA, 19 nt, Artificial Sequence
  Description of Artificial Sequence: Synthetic oligonucleotide
  Antisense strand to SEQ ID NO: 2344154
aggaauaaggacuacuuau

SEQ ID NO: 2344156 - RNA, 19 nt, Artificial Sequence
  Description of Artificial Sequence: Synthetic oligonucleotide
  Sense strand starting at position 3279 of SEQ ID NO: 1885462
gguuaugguuuauuacgau

SEQ ID NO: 2344157 - RNA, 19 nt, Artificial Sequence
  Description of Artificial Sequence: Synthetic oligonucleotide
  Antisense strand to SEQ ID NO: 2344156
aucguaauaaaccauaacc

SEQ ID NO: 2344158 - RNA, 19 nt, Artificial Sequence
  Description of Artificial Sequence: Synthetic oligonucleotide
  Sense strand starting at position 3285 of SEQ ID NO: 1885462
gguuuauuacgaugaaagg

SEQ ID NO: 2344159 - RNA, 19 nt, Artificial Sequence
  Description of Artificial Sequence: Synthetic oligonucleotide
  Antisense strand to SEQ ID NO: 2344158
ccuuucaucguaauaaacc

SEQ ID NO: 2344160 - RNA, 19 nt, Artificial Sequence
  Description of Artificial Sequence: Synthetic oligonucleotide
  Sense strand starting at position 3308 of SEQ ID NO: 1885462
agaauacauucggaaggaa

SEQ ID NO: 2344161 - RNA, 19 nt, Artificial Sequence
  Description of Artificial Sequence: Synthetic oligonucleotide
  Antisense strand to SEQ ID NO: 2344160
uuccuuccgaauguauucu

SEQ ID NO: 2344162 - RNA, 19 nt, Artificial Sequence
  Description of Artificial Sequence: Synthetic oligonucleotide
  Sense strand starting at position 3385 of SEQ ID NO: 1885462
uguggaguuauaugaacag

SEQ ID NO: 2344163 - RNA, 19 nt, Artificial Sequence
  Description of Artificial Sequence: Synthetic oligonucleotide
  Antisense strand to SEQ ID NO: 2344162
cuguucauauaacuccaca

SEQ ID NO: 2344164 - RNA, 19 nt, Artificial Sequence
  Description of Artificial Sequence: Synthetic oligonucleotide
  Sense strand starting at position 3418 of SEQ ID NO: 1885462
agcaaugacgugugacaau

SEQ ID NO: 2344165 - RNA, 19 nt, Artificial Sequence
  Description of Artificial Sequence: Synthetic oligonucleotide
  Antisense strand to SEQ ID NO: 2344164
auugucacacgucauugcu

SEQ ID NO: 2344166 - RNA, 19 nt, Artificial Sequence
  Description of Artificial Sequence: Synthetic oligonucleotide
  Sense strand starting at position 3703 of SEQ ID NO: 1885462
agagcuaauaguuggucaa

SEQ ID NO: 2344167 - RNA, 19 nt, Artificial Sequence
  Description of Artificial Sequence: Synthetic oligonucleotide
  Antisense strand to SEQ ID NO: 2344166
uugaccaacuauuagcucu

SEQ ID NO: 2344168 - RNA, 19 nt, Artificial Sequence
  Description of Artificial Sequence: Synthetic oligonucleotide
  Sense strand starting at position 3704 of SEQ ID NO: 1885462
gagcuaauaguuggucaag

SEQ ID NO: 2344169 - RNA, 19 nt, Artificial Sequence
  Description of Artificial Sequence: Synthetic oligonucleotide
  Antisense strand to SEQ ID NO: 2344168
cuugaccaacuauuagcuc

SEQ ID NO: 2344170 - RNA, 19 nt, Artificial Sequence
  Description of Artificial Sequence: Synthetic oligonucleotide
  Sense strand starting at position 3705 of SEQ ID NO: 1885462
agcuaauaguuggucaaga

SEQ ID NO: 2344171 - RNA, 19 nt, Artificial Sequence
  Description of Artificial Sequence: Synthetic oligonucleotide
  Antisense strand to SEQ ID NO: 2344170
ucuugaccaacuauuagcu

SEQ ID NO: 2344172 - RNA, 19 nt, Artificial Sequence
  Description of Artificial Sequence: Synthetic oligonucleotide
  Sense strand starting at position 3706 of SEQ ID NO: 1885462
gcuaauaguuggucaagag

SEQ ID NO: 2344173 - RNA, 19 nt, Artificial Sequence
  Description of Artificial Sequence: Synthetic oligonucleotide
  Antisense strand to SEQ ID NO: 2344172
cucuugaccaacuauuagc

SEQ ID NO: 2344174 - RNA, 19 nt, Artificial Sequence
  Description of Artificial Sequence: Synthetic oligonucleotide
  Sense strand starting at position 3707 of SEQ ID NO: 1885462
cuaauaguuggucaagagu

SEQ ID NO: 2344175 - RNA, 19 nt, Artificial Sequence
  Description of Artificial Sequence: Synthetic oligonucleotide
  Antisense strand to SEQ ID NO: 2344174
acucuugaccaacuauuag

SEQ ID NO: 2344176 - RNA, 19 nt, Artificial Sequence
  Description of Artificial Sequence: Synthetic oligonucleotide
  Sense strand starting at position 3733 of SEQ ID NO: 1885462
uucuuugaggcaugcaauc

SEQ ID NO: 2344177 - RNA, 19 nt, Artificial Sequence
  Description of Artificial Sequence: Synthetic oligonucleotide
  Antisense strand to SEQ ID NO: 2344176
gauugcaugccucaaagaa

SEQ ID NO: 2344178 - RNA, 19 nt, Artificial Sequence
  Description of Artificial Sequence: Synthetic oligonucleotide
  Sense strand starting at position 3751 of SEQ ID NO: 1885462
cccauagcugcugagucaa

SEQ ID NO: 2344179 - RNA, 19 nt, Artificial Sequence
  Description of Artificial Sequence: Synthetic oligonucleotide
  Antisense strand to SEQ ID NO: 2344178
uugacucagcagcuauggg

SEQ ID NO: 2344180 - RNA, 19 nt, Artificial Sequence
  Description of Artificial Sequence: Synthetic oligonucleotide
  Sense strand starting at position 568 of SEQ ID NO: 1885463
gaagacuuauugcugguau

SEQ ID NO: 2344181 - RNA, 19 nt, Artificial Sequence
  Description of Artificial Sequence: Synthetic oligonucleotide
  Antisense strand to SEQ ID NO: 2344180
auaccagcaauaagucuuc

SEQ ID NO: 2344182 - RNA, 19 nt, Artificial Sequence
  Description of Artificial Sequence: Synthetic oligonucleotide
  Sense strand starting at position 570 of SEQ ID NO: 1885463
agacuuauugcugguaucu

SEQ ID NO: 2344183 - RNA, 19 nt, Artificial Sequence
  Description of Artificial Sequence: Synthetic oligonucleotide
  Antisense strand to SEQ ID NO: 2344182
agauaccagcaauaagucu

SEQ ID NO: 2344184 - RNA, 19 nt, Artificial Sequence
  Description of Artificial Sequence: Synthetic oligonucleotide
  Sense strand starting at position 913 of SEQ ID NO: 1885463
cgcugucuugccucaaauu

SEQ ID NO: 2344185 - RNA, 19 nt, Artificial Sequence
  Description of Artificial Sequence: Synthetic oligonucleotide
  Antisense strand to SEQ ID NO: 2344184
aauuugaggcaagacagcg

SEQ ID NO: 2344186 - RNA, 19 nt, Artificial Sequence
  Description of Artificial Sequence: Synthetic oligonucleotide
  Sense strand starting at position 930 of SEQ ID NO: 1885463
uuguuaaccuuacuuaugu

SEQ ID NO: 2344187 - RNA, 19 nt, Artificial Sequence
  Description of Artificial Sequence: Synthetic oligonucleotide
  Antisense strand to SEQ ID NO: 2344186
acauaaguaagguuaacaa

SEQ ID NO: 2344188 - RNA, 19 nt, Artificial Sequence
  Description of Artificial Sequence: Synthetic oligonucleotide
  Sense strand starting at position 931 of SEQ ID NO: 1885463
uguuaaccuuacuuauguu

SEQ ID NO: 2344189 - RNA, 19 nt, Artificial Sequence
  Description of Artificial Sequence: Synthetic oligonucleotide
  Antisense strand to SEQ ID NO: 2344188
aacauaaguaagguuaaca

SEQ ID NO: 2344190 - RNA, 19 nt, Artificial Sequence
  Description of Artificial Sequence: Synthetic oligonucleotide
  Sense strand starting at position 1161 of SEQ ID NO: 1885463
agcagugaucucuagguua

SEQ ID NO: 2344191 - RNA, 19 nt, Artificial Sequence
  Description of Artificial Sequence: Synthetic oligonucleotide
  Antisense strand to SEQ ID NO: 2344190
uaaccuagagaucacugcu

SEQ ID NO: 2344192 - RNA, 19 nt, Artificial Sequence
  Description of Artificial Sequence: Synthetic oligonucleotide
  Sense strand starting at position 1166 of SEQ ID NO: 1885463
ugaucucuagguuagcuaa

SEQ ID NO: 2344193 - RNA, 19 nt, Artificial Sequence
  Description of Artificial Sequence: Synthetic oligonucleotide
  Antisense strand to SEQ ID NO: 2344192
uuagcuaaccuagagauca

SEQ ID NO: 2344194 - RNA, 19 nt, Artificial Sequence
  Description of Artificial Sequence: Synthetic oligonucleotide
  Sense strand starting at position 1173 of SEQ ID NO: 1885463
uagguuagcuaaguauaua

SEQ ID NO: 2344195 - RNA, 19 nt, Artificial Sequence
  Description of Artificial Sequence: Synthetic oligonucleotide
  Antisense strand to SEQ ID NO: 2344194
uauauacuuagcuaaccua

SEQ ID NO: 2344196 - RNA, 19 nt, Artificial Sequence
  Description of Artificial Sequence: Synthetic oligonucleotide
  Sense strand starting at position 1176 of SEQ ID NO: 1885463
guuagcuaaguauauaacu

SEQ ID NO: 2344197 - RNA, 19 nt, Artificial Sequence
  Description of Artificial Sequence: Synthetic oligonucleotide
  Antisense strand to SEQ ID NO: 2344196
aguuauauacuuagcuaac

SEQ ID NO: 2344198 - RNA, 19 nt, Artificial Sequence
  Description of Artificial Sequence: Synthetic oligonucleotide
  Sense strand starting at position 1298 of SEQ ID NO: 1885463
gaaaguuuccgggacguga

SEQ ID NO: 2344199 - RNA, 19 nt, Artificial Sequence
  Description of Artificial Sequence: Synthetic oligonucleotide
  Antisense strand to SEQ ID NO: 2344198
ucacgucccggaaacuuuc

SEQ ID NO: 2344200 - RNA, 19 nt, Artificial Sequence
  Description of Artificial Sequence: Synthetic oligonucleotide
  Sense strand starting at position 1373 of SEQ ID NO: 1885463
uggcaacaaugauugucaa

SEQ ID NO: 2344201 - RNA, 19 nt, Artificial Sequence
  Description of Artificial Sequence: Synthetic oligonucleotide
  Antisense strand to SEQ ID NO: 2344200
uugacaaucauuguugcca

SEQ ID NO: 2344202 - RNA, 19 nt, Artificial Sequence
  Description of Artificial Sequence: Synthetic oligonucleotide
  Sense strand starting at position 1374 of SEQ ID NO: 1885463
ggcaacaaugauugucaaa

SEQ ID NO: 2344203 - RNA, 19 nt, Artificial Sequence
  Description of Artificial Sequence: Synthetic oligonucleotide
  Antisense strand to SEQ ID NO: 2344202
uuugacaaucauuguugcc

SEQ ID NO: 2344204 - RNA, 19 nt, Artificial Sequence
  Description of Artificial Sequence: Synthetic oligonucleotide
  Sense strand starting at position 1529 of SEQ ID NO: 1885463
aaugcaagagucuggaagu

SEQ ID NO: 2344205 - RNA, 19 nt, Artificial Sequence
  Description of Artificial Sequence: Synthetic oligonucleotide
  Antisense strand to SEQ ID NO: 2344204
acuuccagacucuugcauu

SEQ ID NO: 2344206 - RNA, 19 nt, Artificial Sequence
  Description of Artificial Sequence: Synthetic oligonucleotide
  Sense strand starting at position 1532 of SEQ ID NO: 1885463
gcaagagucuggaagugga

SEQ ID NO: 2344207 - RNA, 19 nt, Artificial Sequence
  Description of Artificial Sequence: Synthetic oligonucleotide
  Antisense strand to SEQ ID NO: 2344206
uccacuuccagacucuugc

SEQ ID NO: 2344208 - RNA, 19 nt, Artificial Sequence
  Description of Artificial Sequence: Synthetic oligonucleotide
  Sense strand starting at position 1747 of SEQ ID NO: 1885463
ggucgauuagagcaucuga

SEQ ID NO: 2344209 - RNA, 19 nt, Artificial Sequence
  Description of Artificial Sequence: Synthetic oligonucleotide
  Antisense strand to SEQ ID NO: 2344208
ucagaugcucuaaucgacc

SEQ ID NO: 2344210 - RNA, 19 nt, Artificial Sequence
  Description of Artificial Sequence: Synthetic oligonucleotide
  Sense strand starting at position 1900 of SEQ ID NO: 1885463
ccgccauuccucguaguca

SEQ ID NO: 2344211 - RNA, 19 nt, Artificial Sequence
  Description of Artificial Sequence: Synthetic oligonucleotide
  Antisense strand to SEQ ID NO: 2344210
ugacuacgaggaauggcgg

SEQ ID NO: 2344212 - RNA, 19 nt, Artificial Sequence
  Description of Artificial Sequence: Synthetic oligonucleotide
  Sense strand starting at position 2003 of SEQ ID NO: 1885463
cgagcuuccgucuuaagca

SEQ ID NO: 2344213 - RNA, 19 nt, Artificial Sequence
  Description of Artificial Sequence: Synthetic oligonucleotide
  Antisense strand to SEQ ID NO: 2344212
ugcuuaagacggaagcucg

SEQ ID NO: 2344214 - RNA, 19 nt, Artificial Sequence
  Description of Artificial Sequence: Synthetic oligonucleotide
  Sense strand starting at position 2317 of SEQ ID NO: 1885463
uuccuuguccguuaauaac

SEQ ID NO: 2344215 - RNA, 19 nt, Artificial Sequence
  Description of Artificial Sequence: Synthetic oligonucleotide
  Antisense strand to SEQ ID NO: 2344214
guuauuaacggacaaggaa

SEQ ID NO: 2344216 - RNA, 19 nt, Artificial Sequence
  Description of Artificial Sequence: Synthetic oligonucleotide
  Sense strand starting at position 2801 of SEQ ID NO: 1885463
cuggauucccgcgaucauu

SEQ ID NO: 2344217 - RNA, 19 nt, Artificial Sequence
  Description of Artificial Sequence: Synthetic oligonucleotide
  Antisense strand to SEQ ID NO: 2344216
aaugaucgcgggaauccag

SEQ ID NO: 2344218 - RNA, 19 nt, Artificial Sequence
  Description of Artificial Sequence: Synthetic oligonucleotide
  Sense strand starting at position 2970 of SEQ ID NO: 1885463
gugggcuucccagaucaag

SEQ ID NO: 2344219 - RNA, 19 nt, Artificial Sequence
  Description of Artificial Sequence: Synthetic oligonucleotide
  Antisense strand to SEQ ID NO: 2344218
cuugaucugggaagcccac

SEQ ID NO: 2344220 - RNA, 19 nt, Artificial Sequence
  Description of Artificial Sequence: Synthetic oligonucleotide
  Sense strand starting at position 3170 of SEQ ID NO: 1885463
gggaguggucuuuaucuga

SEQ ID NO: 2344221 - RNA, 19 nt, Artificial Sequence
  Description of Artificial Sequence: Synthetic oligonucleotide
  Antisense strand to SEQ ID NO: 2344220
ucagauaaagaccacuccc

SEQ ID NO: 2344222 - RNA, 19 nt, Artificial Sequence
  Description of Artificial Sequence: Synthetic oligonucleotide
  Sense strand starting at position 3173 of SEQ ID NO: 1885463
aguggucuuuaucugacuu

SEQ ID NO: 2344223 - RNA, 19 nt, Artificial Sequence
  Description of Artificial Sequence: Synthetic oligonucleotide
  Antisense strand to SEQ ID NO: 2344222
aagucagauaaagaccacu

SEQ ID NO: 2344224 - RNA, 19 nt, Artificial Sequence
  Description of Artificial Sequence: Synthetic oligonucleotide
  Sense strand starting at position 3177 of SEQ ID NO: 1885463
gucuuuaucugacuuuaua

SEQ ID NO: 2344225 - RNA, 19 nt, Artificial Sequence
  Description of Artificial Sequence: Synthetic oligonucleotide
  Antisense strand to SEQ ID NO: 2344224
uauaaagucagauaaagac

SEQ ID NO: 2344226 - RNA, 19 nt, Artificial Sequence
  Description of Artificial Sequence: Synthetic oligonucleotide
  Sense strand starting at position 3199 of SEQ ID NO: 1885463
cuaccaaacuguguuaauu

SEQ ID NO: 2344227 - RNA, 19 nt, Artificial Sequence
  Description of Artificial Sequence: Synthetic oligonucleotide
  Antisense strand to SEQ ID NO: 2344226
aauuaacacaguuugguag

SEQ ID NO: 2344228 - RNA, 19 nt, Artificial Sequence
  Description of Artificial Sequence: Synthetic oligonucleotide
  Sense strand starting at position 3262 of SEQ ID NO: 1885463
auugcuuuggcuuauucua

SEQ ID NO: 2344229 - RNA, 19 nt, Artificial Sequence
  Description of Artificial Sequence: Synthetic oligonucleotide
  Antisense strand to SEQ ID NO: 2344228
uagaauaagccaaagcaau

SEQ ID NO: 2344230 - RNA, 19 nt, Artificial Sequence
  Description of Artificial Sequence: Synthetic oligonucleotide
  Sense strand starting at position 3276 of SEQ ID NO: 1885463
uucuaaggccauuguauuu

SEQ ID NO: 2344231 - RNA, 19 nt, Artificial Sequence
  Description of Artificial Sequence: Synthetic oligonucleotide
  Antisense strand to SEQ ID NO: 2344230
aaauacaauggccuuagaa

SEQ ID NO: 2344232 - RNA, 19 nt, Artificial Sequence
  Description of Artificial Sequence: Synthetic oligonucleotide
  Sense strand starting at position 3425 of SEQ ID NO: 1885463
ccauuuaaguggccguuua

SEQ ID NO: 2344233 - RNA, 19 nt, Artificial Sequence
  Description of Artificial Sequence: Synthetic oligonucleotide
  Antisense strand to SEQ ID NO: 2344232
uaaacggccacuuaaaugg

SEQ ID NO: 2344234 - RNA, 19 nt, Artificial Sequence
  Description of Artificial Sequence: Synthetic oligonucleotide
  Sense strand starting at position 3426 of SEQ ID NO: 1885463
cauuuaaguggccguuuau

SEQ ID NO: 2344235 - RNA, 19 nt, Artificial Sequence
  Description of Artificial Sequence: Synthetic oligonucleotide
  Antisense strand to SEQ ID NO: 2344234
auaaacggccacuuaaaug

SEQ ID NO: 2344236 - RNA, 19 nt, Artificial Sequence
  Description of Artificial Sequence: Synthetic oligonucleotide
  Sense strand starting at position 3518 of SEQ ID NO: 1885463
uuggauagacugcaguaua

SEQ ID NO: 2344237 - RNA, 19 nt, Artificial Sequence
  Description of Artificial Sequence: Synthetic oligonucleotide
  Antisense strand to SEQ ID NO: 2344236
uauacugcagucuauccaa

SEQ ID NO: 2344238 - RNA, 19 nt, Artificial Sequence
  Description of Artificial Sequence: Synthetic oligonucleotide
  Sense strand starting at position 3586 of SEQ ID NO: 1885463
ugcgauguuaaauagcauu

SEQ ID NO: 2344239 - RNA, 19 nt, Artificial Sequence
  Description of Artificial Sequence: Synthetic oligonucleotide
  Antisense strand to SEQ ID NO: 2344238
aaugcuauuuaacaucgca

SEQ ID NO: 2344240 - RNA, 19 nt, Artificial Sequence
  Description of Artificial Sequence: Synthetic oligonucleotide
  Sense strand starting at position 3700 of SEQ ID NO: 1885463
uuuguaauacuguguagag

SEQ ID NO: 2344241 - RNA, 19 nt, Artificial Sequence
  Description of Artificial Sequence: Synthetic oligonucleotide
  Antisense strand to SEQ ID NO: 2344240
cucuacacaguauuacaaa

SEQ ID NO: 2344242 - RNA, 19 nt, Artificial Sequence
  Description of Artificial Sequence: Synthetic oligonucleotide
  Sense strand starting at position 3724 of SEQ ID NO: 1885463
uggaauuuaugugaugaca

SEQ ID NO: 2344243 - RNA, 19 nt, Artificial Sequence
  Description of Artificial Sequence: Synthetic oligonucleotide
  Antisense strand to SEQ ID NO: 2344242
ugucaucacauaaauucca

SEQ ID NO: 2344244 - RNA, 19 nt, Artificial Sequence
  Description of Artificial Sequence: Synthetic oligonucleotide
  Sense strand starting at position 3726 of SEQ ID NO: 1885463
gaauuuaugugaugacaau

SEQ ID NO: 2344245 - RNA, 19 nt, Artificial Sequence
  Description of Artificial Sequence: Synthetic oligonucleotide
  Antisense strand to SEQ ID NO: 2344244
auugucaucacauaaauuc

SEQ ID NO: 2344246 - RNA, 19 nt, Artificial Sequence
  Description of Artificial Sequence: Synthetic oligonucleotide
  Sense strand starting at position 3744 of SEQ ID NO: 1885463
ucuugcaaucgugaauaaa

SEQ ID NO: 2344247 - RNA, 19 nt, Artificial Sequence
  Description of Artificial Sequence: Synthetic oligonucleotide
  Antisense strand to SEQ ID NO: 2344246
uuuauucacgauugcaaga

SEQ ID NO: 2344248 - RNA, 19 nt, Artificial Sequence
  Description of Artificial Sequence: Synthetic oligonucleotide
  Sense strand starting at position 3747 of SEQ ID NO: 1885463
ugcaaucgugaauaaagau

SEQ ID NO: 2344249 - RNA, 19 nt, Artificial Sequence
  Description of Artificial Sequence: Synthetic oligonucleotide
  Antisense strand to SEQ ID NO: 2344248
aucuuuauucacgauugca

SEQ ID NO: 2344250 - RNA, 19 nt, Artificial Sequence
  Description of Artificial Sequence: Synthetic oligonucleotide
  Sense strand starting at position 3753 of SEQ ID NO: 1885463
cgugaauaaagaugguuua

SEQ ID NO: 2344251 - RNA, 19 nt, Artificial Sequence
  Description of Artificial Sequence: Synthetic oligonucleotide
  Antisense strand to SEQ ID NO: 2344250
uaaaccaucuuuauucacg

SEQ ID NO: 2344252 - RNA, 19 nt, Artificial Sequence
  Description of Artificial Sequence: Synthetic oligonucleotide
  Sense strand starting at position 3765 of SEQ ID NO: 1885463
ugguuuaacuucucuguaa

SEQ ID NO: 2344253 - RNA, 19 nt, Artificial Sequence
  Description of Artificial Sequence: Synthetic oligonucleotide
  Antisense strand to SEQ ID NO: 2344252
uuacagagaaguuaaacca

SEQ ID NO: 2344254 - RNA, 19 nt, Artificial Sequence
  Description of Artificial Sequence: Synthetic oligonucleotide
  Sense strand starting at position 3766 of SEQ ID NO: 1885463
gguuuaacuucucuguaau

SEQ ID NO: 2344255 - RNA, 19 nt, Artificial Sequence
  Description of Artificial Sequence: Synthetic oligonucleotide
  Antisense strand to SEQ ID NO: 2344254
auuacagagaaguuaaacc

SEQ ID NO: 2344256 - RNA, 19 nt, Artificial Sequence
  Description of Artificial Sequence: Synthetic oligonucleotide
  Sense strand starting at position 3767 of SEQ ID NO: 1885463
guuuaacuucucuguaauc

SEQ ID NO: 2344257 - RNA, 19 nt, Artificial Sequence
  Description of Artificial Sequence: Synthetic oligonucleotide
  Antisense strand to SEQ ID NO: 2344256
gauuacagagaaguuaaac

SEQ ID NO: 2344258 - RNA, 19 nt, Artificial Sequence
  Description of Artificial Sequence: Synthetic oligonucleotide
  Sense strand starting at position 3776 of SEQ ID NO: 1885463
cucuguaaucuuuauacgu

SEQ ID NO: 2344259 - RNA, 19 nt, Artificial Sequence
  Description of Artificial Sequence: Synthetic oligonucleotide
  Antisense strand to SEQ ID NO: 2344258
acguauaaagauuacagag

SEQ ID NO: 2344260 - RNA, 19 nt, Artificial Sequence
  Description of Artificial Sequence: Synthetic oligonucleotide
  Sense strand starting at position 82 of SEQ ID NO: 1885464
uguguaacauggcuuuaca

SEQ ID NO: 2344261 - RNA, 19 nt, Artificial Sequence
  Description of Artificial Sequence: Synthetic oligonucleotide
  Antisense strand to SEQ ID NO: 2344260
uguaaagccauguuacaca

SEQ ID NO: 2344262 - RNA, 19 nt, Artificial Sequence
  Description of Artificial Sequence: Synthetic oligonucleotide
  Sense strand starting at position 273 of SEQ ID NO: 1885464
ucuaguccuugcccaaaga

SEQ ID NO: 2344263 - RNA, 19 nt, Artificial Sequence
  Description of Artificial Sequence: Synthetic oligonucleotide
  Antisense strand to SEQ ID NO: 2344262
ucuuugggcaaggacuaga

SEQ ID NO: 2344264 - RNA, 19 nt, Artificial Sequence
  Description of Artificial Sequence: Synthetic oligonucleotide
  Sense strand starting at position 412 of SEQ ID NO: 1885464
acguccuaccagugauguu

SEQ ID NO: 2344265 - RNA, 19 nt, Artificial Sequence
  Description of Artificial Sequence: Synthetic oligonucleotide
  Antisense strand to SEQ ID NO: 2344264
aacaucacugguaggacgu

SEQ ID NO: 2344266 - RNA, 19 nt, Artificial Sequence
  Description of Artificial Sequence: Synthetic oligonucleotide
  Sense strand starting at position 413 of SEQ ID NO: 1885464
cguccuaccagugauguuu

SEQ ID NO: 2344267 - RNA, 19 nt, Artificial Sequence
  Description of Artificial Sequence: Synthetic oligonucleotide
  Antisense strand to SEQ ID NO: 2344266
aaacaucacugguaggacg

SEQ ID NO: 2344268 - RNA, 19 nt, Artificial Sequence
  Description of Artificial Sequence: Synthetic oligonucleotide
  Sense strand starting at position 1994 of SEQ ID NO: 1885464
uggcaaugcuucguaccaa

SEQ ID NO: 2344269 - RNA, 19 nt, Artificial Sequence
  Description of Artificial Sequence: Synthetic oligonucleotide
  Antisense strand to SEQ ID NO: 2344268
uugguacgaagcauugcca

SEQ ID NO: 2344270 - RNA, 19 nt, Artificial Sequence
  Description of Artificial Sequence: Synthetic oligonucleotide
  Sense strand starting at position 1995 of SEQ ID NO: 1885464
ggcaaugcuucguaccaaa

SEQ ID NO: 2344271 - RNA, 19 nt, Artificial Sequence
  Description of Artificial Sequence: Synthetic oligonucleotide
  Antisense strand to SEQ ID NO: 2344270
uuugguacgaagcauugcc

SEQ ID NO: 2344272 - RNA, 19 nt, Artificial Sequence
  Description of Artificial Sequence: Synthetic oligonucleotide
  Sense strand starting at position 2357 of SEQ ID NO: 1885464
ugaucaaaccuacgaauua

SEQ ID NO: 2344273 - RNA, 19 nt, Artificial Sequence
  Description of Artificial Sequence: Synthetic oligonucleotide
  Antisense strand to SEQ ID NO: 2344272
uaauucguagguuugauca

SEQ ID NO: 2344274 - RNA, 19 nt, Artificial Sequence
  Description of Artificial Sequence: Synthetic oligonucleotide
  Sense strand starting at position 2667 of SEQ ID NO: 1885464
gccagcagagauugaggua

SEQ ID NO: 2344275 - RNA, 19 nt, Artificial Sequence
  Description of Artificial Sequence: Synthetic oligonucleotide
  Antisense strand to SEQ ID NO: 2344274
uaccucaaucucugcuggc

SEQ ID NO: 2344276 - RNA, 19 nt, Artificial Sequence
  Description of Artificial Sequence: Synthetic oligonucleotide
  Sense strand starting at position 2670 of SEQ ID NO: 1885464
agcagagauugagguaucu

SEQ ID NO: 2344277 - RNA, 19 nt, Artificial Sequence
  Description of Artificial Sequence: Synthetic oligonucleotide
  Antisense strand to SEQ ID NO: 2344276
agauaccucaaucucugcu

SEQ ID NO: 2344278 - RNA, 19 nt, Artificial Sequence
  Description of Artificial Sequence: Synthetic oligonucleotide
  Sense strand starting at position 2731 of SEQ ID NO: 1885464
ucauauccugccgaacuaa

SEQ ID NO: 2344279 - RNA, 19 nt, Artificial Sequence
  Description of Artificial Sequence: Synthetic oligonucleotide
  Antisense strand to SEQ ID NO: 2344278
uuaguucggcaggauauga

SEQ ID NO: 2344280 - RNA, 19 nt, Artificial Sequence
  Description of Artificial Sequence: Synthetic oligonucleotide
  Sense strand starting at position 2791 of SEQ ID NO: 1885464
agcaaaugccaagagaguu

SEQ ID NO: 2344281 - RNA, 19 nt, Artificial Sequence
  Description of Artificial Sequence: Synthetic oligonucleotide
  Antisense strand to SEQ ID NO: 2344280
aacucucuuggcauuugcu

SEQ ID NO: 2344282 - RNA, 19 nt, Artificial Sequence
  Description of Artificial Sequence: Synthetic oligonucleotide
  Sense strand starting at position 2995 of SEQ ID NO: 1885464
ugucaauaguaaccuugaa

SEQ ID NO: 2344283 - RNA, 19 nt, Artificial Sequence
  Description of Artificial Sequence: Synthetic oligonucleotide
  Antisense strand to SEQ ID NO: 2344282
uucaagguuacuauugaca

SEQ ID NO: 2344284 - RNA, 19 nt, Artificial Sequence
  Description of Artificial Sequence: Synthetic oligonucleotide
  Sense strand starting at position 3384 of SEQ ID NO: 1885464
aggucacagaguggaaauu

SEQ ID NO: 2344285 - RNA, 19 nt, Artificial Sequence
  Description of Artificial Sequence: Synthetic oligonucleotide
  Antisense strand to SEQ ID NO: 2344284
aauuuccacucugugaccu

SEQ ID NO: 2344286 - RNA, 19 nt, Artificial Sequence
  Description of Artificial Sequence: Synthetic oligonucleotide
  Sense strand starting at position 3671 of SEQ ID NO: 1885464
uuggcucacccagguuaau

SEQ ID NO: 2344287 - RNA, 19 nt, Artificial Sequence
  Description of Artificial Sequence: Synthetic oligonucleotide
  Antisense strand to SEQ ID NO: 2344286
auuaaccugggugagccaa

SEQ ID NO: 2344288 - RNA, 19 nt, Artificial Sequence
  Description of Artificial Sequence: Synthetic oligonucleotide
  Sense strand starting at position 349 of SEQ ID NO: 1885465
ucgguaauuuccgucggga

SEQ ID NO: 2344289 - RNA, 19 nt, Artificial Sequence
  Description of Artificial Sequence: Synthetic oligonucleotide
  Antisense strand to SEQ ID NO: 2344288
ucccgacggaaauuaccga

SEQ ID NO: 2344290 - RNA, 19 nt, Artificial Sequence
  Description of Artificial Sequence: Synthetic oligonucleotide
  Sense strand starting at position 351 of SEQ ID NO: 1885465
gguaauuuccgucgggaga

SEQ ID NO: 2344291 - RNA, 19 nt, Artificial Sequence
  Description of Artificial Sequence: Synthetic oligonucleotide
  Antisense strand to SEQ ID NO: 2344290
ucucccgacggaaauuacc

SEQ ID NO: 2344292 - RNA, 19 nt, Artificial Sequence
  Description of Artificial Sequence: Synthetic oligonucleotide
  Sense strand starting at position 352 of SEQ ID NO: 1885465
guaauuuccgucgggagac

SEQ ID NO: 2344293 - RNA, 19 nt, Artificial Sequence
  Description of Artificial Sequence: Synthetic oligonucleotide
  Antisense strand to SEQ ID NO: 2344292
gucucccgacggaaauuac

SEQ ID NO: 2344294 - RNA, 19 nt, Artificial Sequence
  Description of Artificial Sequence: Synthetic oligonucleotide
  Sense strand starting at position 1524 of SEQ ID NO: 1885465
ccacgugaagcagaauaua

SEQ ID NO: 2344295 - RNA, 19 nt, Artificial Sequence
  Description of Artificial Sequence: Synthetic oligonucleotide
  Antisense strand to SEQ ID NO: 2344294
uauauucugcuucacgugg

SEQ ID NO: 2344296 - RNA, 19 nt, Artificial Sequence
  Description of Artificial Sequence: Synthetic oligonucleotide
  Sense strand starting at position 2148 of SEQ ID NO: 1885465
guggcuuccagauaacuag

SEQ ID NO: 2344297 - RNA, 19 nt, Artificial Sequence
  Description of Artificial Sequence: Synthetic oligonucleotide
  Antisense strand to SEQ ID NO: 2344296
cuaguuaucuggaagccac

SEQ ID NO: 2344298 - RNA, 19 nt, Artificial Sequence
  Description of Artificial Sequence: Synthetic oligonucleotide
  Sense strand starting at position 2166 of SEQ ID NO: 1885465
gcguuacuccugcucagau

SEQ ID NO: 2344299 - RNA, 19 nt, Artificial Sequence
  Description of Artificial Sequence: Synthetic oligonucleotide
  Antisense strand to SEQ ID NO: 2344298
aucugagcaggaguaacgc

SEQ ID NO: 2344300 - RNA, 19 nt, Artificial Sequence
  Description of Artificial Sequence: Synthetic oligonucleotide
  Sense strand starting at position 2179 of SEQ ID NO: 1885465
ucagaucuccgcuaguauc

SEQ ID NO: 2344301 - RNA, 19 nt, Artificial Sequence
  Description of Artificial Sequence: Synthetic oligonucleotide
  Antisense strand to SEQ ID NO: 2344300
gauacuagcggagaucuga

SEQ ID NO: 2344302 - RNA, 19 nt, Artificial Sequence
  Description of Artificial Sequence: Synthetic oligonucleotide
  Sense strand starting at position 2224 of SEQ ID NO: 1885465
cacugagagcuaugaugau

SEQ ID NO: 2344303 - RNA, 19 nt, Artificial Sequence
  Description of Artificial Sequence: Synthetic oligonucleotide
  Antisense strand to SEQ ID NO: 2344302
aucaucauagcucucagug

SEQ ID NO: 2344304 - RNA, 19 nt, Artificial Sequence
  Description of Artificial Sequence: Synthetic oligonucleotide
  Sense strand starting at position 2230 of SEQ ID NO: 1885465
gagcuaugaugaucuggau

SEQ ID NO: 2344305 - RNA, 19 nt, Artificial Sequence
  Description of Artificial Sequence: Synthetic oligonucleotide
  Antisense strand to SEQ ID NO: 2344304
auccagaucaucauagcuc

SEQ ID NO: 2344306 - RNA, 19 nt, Artificial Sequence
  Description of Artificial Sequence: Synthetic oligonucleotide
  Sense strand starting at position 2248 of SEQ ID NO: 1885465
ugaaucucacacggaagau

SEQ ID NO: 2344307 - RNA, 19 nt, Artificial Sequence
  Description of Artificial Sequence: Synthetic oligonucleotide
  Antisense strand to SEQ ID NO: 2344306
aucuuccgugugagauuca

SEQ ID NO: 2344308 - RNA, 19 nt, Artificial Sequence
  Description of Artificial Sequence: Synthetic oligonucleotide
  Sense strand starting at position 2264 of SEQ ID NO: 1885465
gaucucucuucuucggaga

SEQ ID NO: 2344309 - RNA, 19 nt, Artificial Sequence
  Description of Artificial Sequence: Synthetic oligonucleotide
  Antisense strand to SEQ ID NO: 2344308
ucuccgaagaagagagauc

SEQ ID NO: 2344310 - RNA, 19 nt, Artificial Sequence
  Description of Artificial Sequence: Synthetic oligonucleotide
  Sense strand starting at position 2265 of SEQ ID NO: 1885465
aucucucuucuucggagau

SEQ ID NO: 2344311 - RNA, 19 nt, Artificial Sequence
  Description of Artificial Sequence: Synthetic oligonucleotide
  Antisense strand to SEQ ID NO: 2344310
aucuccgaagaagagagau

SEQ ID NO: 2344312 - RNA, 19 nt, Artificial Sequence
  Description of Artificial Sequence: Synthetic oligonucleotide
  Sense strand starting at position 2275 of SEQ ID NO: 1885465
uucggagauccuugaugug

SEQ ID NO: 2344313 - RNA, 19 nt, Artificial Sequence
  Description of Artificial Sequence: Synthetic oligonucleotide
  Antisense strand to SEQ ID NO: 2344312
cacaucaaggaucuccgaa

SEQ ID NO: 2344314 - RNA, 19 nt, Artificial Sequence
  Description of Artificial Sequence: Synthetic oligonucleotide
  Sense strand starting at position 2285 of SEQ ID NO: 1885465
cuugaugugucacuuucca

SEQ ID NO: 2344315 - RNA, 19 nt, Artificial Sequence
  Description of Artificial Sequence: Synthetic oligonucleotide
  Antisense strand to SEQ ID NO: 2344314
uggaaagugacacaucaag

SEQ ID NO: 2344316 - RNA, 19 nt, Artificial Sequence
  Description of Artificial Sequence: Synthetic oligonucleotide
  Sense strand starting at position 2446 of SEQ ID NO: 1885465
uguugugaucaaugggaau

SEQ ID NO: 2344317 - RNA, 19 nt, Artificial Sequence
  Description of Artificial Sequence: Synthetic oligonucleotide
  Antisense strand to SEQ ID NO: 2344316
auucccauugaucacaaca

SEQ ID NO: 2344318 - RNA, 19 nt, Artificial Sequence
  Description of Artificial Sequence: Synthetic oligonucleotide
  Sense strand starting at position 2452 of SEQ ID NO: 1885465
gaucaaugggaaugcucau

SEQ ID NO: 2344319 - RNA, 19 nt, Artificial Sequence
  Description of Artificial Sequence: Synthetic oligonucleotide
  Antisense strand to SEQ ID NO: 2344318
augagcauucccauugauc

SEQ ID NO: 2344320 - RNA, 19 nt, Artificial Sequence
  Description of Artificial Sequence: Synthetic oligonucleotide
  Sense strand starting at position 2458 of SEQ ID NO: 1885465
ugggaaugcucauccacac

SEQ ID NO: 2344321 - RNA, 19 nt, Artificial Sequence
  Description of Artificial Sequence: Synthetic oligonucleotide
  Antisense strand to SEQ ID NO: 2344320
guguggaugagcauuccca

SEQ ID NO: 2344322 - RNA, 19 nt, Artificial Sequence
  Description of Artificial Sequence: Synthetic oligonucleotide
  Sense strand starting at position 2656 of SEQ ID NO: 1885465
ugcuguaucauccaguggu

SEQ ID NO: 2344323 - RNA, 19 nt, Artificial Sequence
  Description of Artificial Sequence: Synthetic oligonucleotide
  Antisense strand to SEQ ID NO: 2344322
accacuggaugauacagca

SEQ ID NO: 2344324 - RNA, 19 nt, Artificial Sequence
  Description of Artificial Sequence: Synthetic oligonucleotide
  Sense strand starting at position 2675 of SEQ ID NO: 1885465
ucaccugcaucuguaauga

SEQ ID NO: 2344325 - RNA, 19 nt, Artificial Sequence
  Description of Artificial Sequence: Synthetic oligonucleotide
  Antisense strand to SEQ ID NO: 2344324
ucauuacagaugcagguga

SEQ ID NO: 2344326 - RNA, 19 nt, Artificial Sequence
  Description of Artificial Sequence: Synthetic oligonucleotide
  Sense strand starting at position 2708 of SEQ ID NO: 1885465
ccaaguacuacagguggaa

SEQ ID NO: 2344327 - RNA, 19 nt, Artificial Sequence
  Description of Artificial Sequence: Synthetic oligonucleotide
  Antisense strand to SEQ ID NO: 2344326
uuccaccuguaguacuugg

SEQ ID NO: 2344328 - RNA, 19 nt, Artificial Sequence
  Description of Artificial Sequence: Synthetic oligonucleotide
  Sense strand starting at position 2729 of SEQ ID NO: 1885465
gguauaaauucuguuacug

SEQ ID NO: 2344329 - RNA, 19 nt, Artificial Sequence
  Description of Artificial Sequence: Synthetic oligonucleotide
  Antisense strand to SEQ ID NO: 2344328
caguaacagaauuuauacc

SEQ ID NO: 2344330 - RNA, 19 nt, Artificial Sequence
  Description of Artificial Sequence: Synthetic oligonucleotide
  Sense strand starting at position 2748 of SEQ ID NO: 1885465
gcacuaguacaguaaauaa

SEQ ID NO: 2344331 - RNA, 19 nt, Artificial Sequence
  Description of Artificial Sequence: Synthetic oligonucleotide
  Antisense strand to SEQ ID NO: 2344330
uuauuuacuguacuagugc

SEQ ID NO: 2344332 - RNA, 19 nt, Artificial Sequence
  Description of Artificial Sequence: Synthetic oligonucleotide
  Sense strand starting at position 2881 of SEQ ID NO: 1885465
uggaguuaccagugguguu

SEQ ID NO: 2344333 - RNA, 19 nt, Artificial Sequence
  Description of Artificial Sequence: Synthetic oligonucleotide
  Antisense strand to SEQ ID NO: 2344332
aacaccacugguaacucca

SEQ ID NO: 2344334 - RNA, 19 nt, Artificial Sequence
  Description of Artificial Sequence: Synthetic oligonucleotide
  Sense strand starting at position 2882 of SEQ ID NO: 1885465
ggaguuaccagugguguua

SEQ ID NO: 2344335 - RNA, 19 nt, Artificial Sequence
  Description of Artificial Sequence: Synthetic oligonucleotide
  Antisense strand to SEQ ID NO: 2344334
uaacaccacugguaacucc

SEQ ID NO: 2344336 - RNA, 19 nt, Artificial Sequence
  Description of Artificial Sequence: Synthetic oligonucleotide
  Sense strand starting at position 2899 of SEQ ID NO: 1885465
uaaugugaauaucuugagu

SEQ ID NO: 2344337 - RNA, 19 nt, Artificial Sequence
  Description of Artificial Sequence: Synthetic oligonucleotide
  Antisense strand to SEQ ID NO: 2344336
acucaagauauucacauua

SEQ ID NO: 2344338 - RNA, 19 nt, Artificial Sequence
  Description of Artificial Sequence: Synthetic oligonucleotide
  Sense strand starting at position 2904 of SEQ ID NO: 1885465
ugaauaucuugaguggcau

SEQ ID NO: 2344339 - RNA, 19 nt, Artificial Sequence
  Description of Artificial Sequence: Synthetic oligonucleotide
  Antisense strand to SEQ ID NO: 2344338
augccacucaagauauuca

SEQ ID NO: 2344340 - RNA, 19 nt, Artificial Sequence
  Description of Artificial Sequence: Synthetic oligonucleotide
  Sense strand starting at position 2905 of SEQ ID NO: 1885465
gaauaucuugaguggcaug

SEQ ID NO: 2344341 - RNA, 19 nt, Artificial Sequence
  Description of Artificial Sequence: Synthetic oligonucleotide
  Antisense strand to SEQ ID NO: 2344340
caugccacucaagauauuc

SEQ ID NO: 2344342 - RNA, 19 nt, Artificial Sequence
  Description of Artificial Sequence: Synthetic oligonucleotide
  Sense strand starting at position 2923 of SEQ ID NO: 1885465
gggcaaugguacuauuucu

SEQ ID NO: 2344343 - RNA, 19 nt, Artificial Sequence
  Description of Artificial Sequence: Synthetic oligonucleotide
  Antisense strand to SEQ ID NO: 2344342
agaaauaguaccauugccc

SEQ ID NO: 2344344 - RNA, 19 nt, Artificial Sequence
  Description of Artificial Sequence: Synthetic oligonucleotide
  Sense strand starting at position 2951 of SEQ ID NO: 1885465
gcuguuagcaguguuccua

SEQ ID NO: 2344345 - RNA, 19 nt, Artificial Sequence
  Description of Artificial Sequence: Synthetic oligonucleotide
  Antisense strand to SEQ ID NO: 2344344
uaggaacacugcuaacagc

SEQ ID NO: 2344346 - RNA, 19 nt, Artificial Sequence
  Description of Artificial Sequence: Synthetic oligonucleotide
  Sense strand starting at position 3024 of SEQ ID NO: 1885465
caguuaacacuucgagguu

SEQ ID NO: 2344347 - RNA, 19 nt, Artificial Sequence
  Description of Artificial Sequence: Synthetic oligonucleotide
  Antisense strand to SEQ ID NO: 2344346
aaccucgaaguguuaacug

SEQ ID NO: 2344348 - RNA, 19 nt, Artificial Sequence
  Description of Artificial Sequence: Synthetic oligonucleotide
  Sense strand starting at position 3055 of SEQ ID NO: 1885465
guuagauucuaguucugag

SEQ ID NO: 2344349 - RNA, 19 nt, Artificial Sequence
  Description of Artificial Sequence: Synthetic oligonucleotide
  Antisense strand to SEQ ID NO: 2344348
cucagaacuagaaucuaac

SEQ ID NO: 2344350 - RNA, 19 nt, Artificial Sequence
  Description of Artificial Sequence: Synthetic oligonucleotide
  Sense strand starting at position 3136 of SEQ ID NO: 1885465
uacagaaggugugcugaua

SEQ ID NO: 2344351 - RNA, 19 nt, Artificial Sequence
  Description of Artificial Sequence: Synthetic oligonucleotide
  Antisense strand to SEQ ID NO: 2344350
uaucagcacaccuucugua

SEQ ID NO: 2344352 - RNA, 19 nt, Artificial Sequence
  Description of Artificial Sequence: Synthetic oligonucleotide
  Sense strand starting at position 3219 of SEQ ID NO: 1885465
gugggaguucagugagcag

SEQ ID NO: 2344353 - RNA, 19 nt, Artificial Sequence
  Description of Artificial Sequence: Synthetic oligonucleotide
  Antisense strand to SEQ ID NO: 2344352
cugcucacugaacucccac

SEQ ID NO: 2344354 - RNA, 19 nt, Artificial Sequence
  Description of Artificial Sequence: Synthetic oligonucleotide
  Sense strand starting at position 3392 of SEQ ID NO: 1885465
agcacugguccacagagua

SEQ ID NO: 2344355 - RNA, 19 nt, Artificial Sequence
  Description of Artificial Sequence: Synthetic oligonucleotide
  Antisense strand to SEQ ID NO: 2344354
uacucuguggaccagugcu

SEQ ID NO: 2344356 - RNA, 19 nt, Artificial Sequence
  Description of Artificial Sequence: Synthetic oligonucleotide
  Sense strand starting at position 3405 of SEQ ID NO: 1885465
agaguauuccagcaguuag

SEQ ID NO: 2344357 - RNA, 19 nt, Artificial Sequence
  Description of Artificial Sequence: Synthetic oligonucleotide
  Antisense strand to SEQ ID NO: 2344356
cuaacugcuggaauacucu

SEQ ID NO: 2344358 - RNA, 19 nt, Artificial Sequence
  Description of Artificial Sequence: Synthetic oligonucleotide
  Sense strand starting at position 3419 of SEQ ID NO: 1885465
guuaguauaccacagagua

SEQ ID NO: 2344359 - RNA, 19 nt, Artificial Sequence
  Description of Artificial Sequence: Synthetic oligonucleotide
  Antisense strand to SEQ ID NO: 2344358
uacucugugguauacuaac

SEQ ID NO: 2344360 - RNA, 19 nt, Artificial Sequence
  Description of Artificial Sequence: Synthetic oligonucleotide
  Sense strand starting at position 3566 of SEQ ID NO: 1885465
guaaaugugguugguguaa

SEQ ID NO: 2344361 - RNA, 19 nt, Artificial Sequence
  Description of Artificial Sequence: Synthetic oligonucleotide
  Antisense strand to SEQ ID NO: 2344360
uuacaccaaccacauuuac

SEQ ID NO: 2344362 - RNA, 19 nt, Artificial Sequence
  Description of Artificial Sequence: Synthetic oligonucleotide
  Sense strand starting at position 3650 of SEQ ID NO: 1885465
gcggcuccuccagugcaaa

SEQ ID NO: 2344363 - RNA, 19 nt, Artificial Sequence
  Description of Artificial Sequence: Synthetic oligonucleotide
  Antisense strand to SEQ ID NO: 2344362
uuugcacuggaggagccgc

SEQ ID NO: 2344364 - RNA, 19 nt, Artificial Sequence
  Description of Artificial Sequence: Synthetic oligonucleotide
  Sense strand starting at position 3753 of SEQ ID NO: 1885465
augucaaaucagugacuca

SEQ ID NO: 2344365 - RNA, 19 nt, Artificial Sequence
  Description of Artificial Sequence: Synthetic oligonucleotide
  Antisense strand to SEQ ID NO: 2344364
ugagucacugauuugacau

SEQ ID NO: 2344366 - RNA, 19 nt, Artificial Sequence
  Description of Artificial Sequence: Synthetic oligonucleotide
  Sense strand starting at position 3834 of SEQ ID NO: 1885465
agcccaguucugcaggagu

SEQ ID NO: 2344367 - RNA, 19 nt, Artificial Sequence
  Description of Artificial Sequence: Synthetic oligonucleotide
  Antisense strand to SEQ ID NO: 2344366
acuccugcagaacugggcu

SEQ ID NO: 2344368 - RNA, 19 nt, Artificial Sequence
  Description of Artificial Sequence: Synthetic oligonucleotide
  Sense strand starting at position 69 of SEQ ID NO: 1885466
cucuccauuucucugugua

SEQ ID NO: 2344369 - RNA, 19 nt, Artificial Sequence
  Description of Artificial Sequence: Synthetic oligonucleotide
  Antisense strand to SEQ ID NO: 2344368
uacacagagaaauggagag

SEQ ID NO: 2344370 - RNA, 19 nt, Artificial Sequence
  Description of Artificial Sequence: Synthetic oligonucleotide
  Sense strand starting at position 70 of SEQ ID NO: 1885466
ucuccauuucucuguguau

SEQ ID NO: 2344371 - RNA, 19 nt, Artificial Sequence
  Description of Artificial Sequence: Synthetic oligonucleotide
  Antisense strand to SEQ ID NO: 2344370
auacacagagaaauggaga

SEQ ID NO: 2344372 - RNA, 19 nt, Artificial Sequence
  Description of Artificial Sequence: Synthetic oligonucleotide
  Sense strand starting at position 71 of SEQ ID NO: 1885466
cuccauuucucuguguauu

SEQ ID NO: 2344373 - RNA, 19 nt, Artificial Sequence
  Description of Artificial Sequence: Synthetic oligonucleotide
  Antisense strand to SEQ ID NO: 2344372
aauacacagagaaauggag

SEQ ID NO: 2344374 - RNA, 19 nt, Artificial Sequence
  Description of Artificial Sequence: Synthetic oligonucleotide
  Sense strand starting at position 181 of SEQ ID NO: 1885466
uggcaagacuacuuauucu

SEQ ID NO: 2344375 - RNA, 19 nt, Artificial Sequence
  Description of Artificial Sequence: Synthetic oligonucleotide
  Antisense strand to SEQ ID NO: 2344374
agaauaaguagucuugcca

SEQ ID NO: 2344376 - RNA, 19 nt, Artificial Sequence
  Description of Artificial Sequence: Synthetic oligonucleotide
  Sense strand starting at position 213 of SEQ ID NO: 1885466
cagaauaugccagggauug

SEQ ID NO: 2344377 - RNA, 19 nt, Artificial Sequence
  Description of Artificial Sequence: Synthetic oligonucleotide
  Antisense strand to SEQ ID NO: 2344376
caaucccuggcauauucug

SEQ ID NO: 2344378 - RNA, 19 nt, Artificial Sequence
  Description of Artificial Sequence: Synthetic oligonucleotide
  Sense strand starting at position 944 of SEQ ID NO: 1885466
gcccaaaugauuuguguug

SEQ ID NO: 2344379 - RNA, 19 nt, Artificial Sequence
  Description of Artificial Sequence: Synthetic oligonucleotide
  Antisense strand to SEQ ID NO: 2344378
caacacaaaucauuugggc

SEQ ID NO: 2344380 - RNA, 19 nt, Artificial Sequence
  Description of Artificial Sequence: Synthetic oligonucleotide
  Sense strand starting at position 1074 of SEQ ID NO: 1885466
cuguguugccgggcagauu

SEQ ID NO: 2344381 - RNA, 19 nt, Artificial Sequence
  Description of Artificial Sequence: Synthetic oligonucleotide
  Antisense strand to SEQ ID NO: 2344380
aaucugcccggcaacacag

SEQ ID NO: 2344382 - RNA, 19 nt, Artificial Sequence
  Description of Artificial Sequence: Synthetic oligonucleotide
  Sense strand starting at position 1148 of SEQ ID NO: 1885466
cacaauggagacuguguua

SEQ ID NO: 2344383 - RNA, 19 nt, Artificial Sequence
  Description of Artificial Sequence: Synthetic oligonucleotide
  Antisense strand to SEQ ID NO: 2344382
uaacacagucuccauugug

SEQ ID NO: 2344384 - RNA, 19 nt, Artificial Sequence
  Description of Artificial Sequence: Synthetic oligonucleotide
  Sense strand starting at position 1260 of SEQ ID NO: 1885466
uuuguuaaaucucugaggu

SEQ ID NO: 2344385 - RNA, 19 nt, Artificial Sequence
  Description of Artificial Sequence: Synthetic oligonucleotide
  Antisense strand to SEQ ID NO: 2344384
accucagagauuuaacaaa

SEQ ID NO: 2344386 - RNA, 19 nt, Artificial Sequence
  Description of Artificial Sequence: Synthetic oligonucleotide
  Sense strand starting at position 1683 of SEQ ID NO: 1885466
gccucagagccugaagaau

SEQ ID NO: 2344387 - RNA, 19 nt, Artificial Sequence
  Description of Artificial Sequence: Synthetic oligonucleotide
  Antisense strand to SEQ ID NO: 2344386
auucuucaggcucugaggc

SEQ ID NO: 2344388 - RNA, 19 nt, Artificial Sequence
  Description of Artificial Sequence: Synthetic oligonucleotide
  Sense strand starting at position 1726 of SEQ ID NO: 1885466
ggagguucuccugagcuac

SEQ ID NO: 2344389 - RNA, 19 nt, Artificial Sequence
  Description of Artificial Sequence: Synthetic oligonucleotide
  Antisense strand to SEQ ID NO: 2344388
guagcucaggagaaccucc

SEQ ID NO: 2344390 - RNA, 19 nt, Artificial Sequence
  Description of Artificial Sequence: Synthetic oligonucleotide
  Sense strand starting at position 1759 of SEQ ID NO: 1885466
cuaugaaggccucaguauu

SEQ ID NO: 2344391 - RNA, 19 nt, Artificial Sequence
  Description of Artificial Sequence: Synthetic oligonucleotide
  Antisense strand to SEQ ID NO: 2344390
aauacugaggccuucauag

SEQ ID NO: 2344392 - RNA, 19 nt, Artificial Sequence
  Description of Artificial Sequence: Synthetic oligonucleotide
  Sense strand starting at position 1785 of SEQ ID NO: 1885466
cccugaacuuggcugaaga

SEQ ID NO: 2344393 - RNA, 19 nt, Artificial Sequence
  Description of Artificial Sequence: Synthetic oligonucleotide
  Antisense strand to SEQ ID NO: 2344392
ucuucagccaaguucaggg

SEQ ID NO: 2344394 - RNA, 19 nt, Artificial Sequence
  Description of Artificial Sequence: Synthetic oligonucleotide
  Sense strand starting at position 1786 of SEQ ID NO: 1885466
ccugaacuuggcugaagau

SEQ ID NO: 2344395 - RNA, 19 nt, Artificial Sequence
  Description of Artificial Sequence: Synthetic oligonucleotide
  Antisense strand to SEQ ID NO: 2344394
aucuucagccaaguucagg

SEQ ID NO: 2344396 - RNA, 19 nt, Artificial Sequence
  Description of Artificial Sequence: Synthetic oligonucleotide
  Sense strand starting at position 1961 of SEQ ID NO: 1885466
agaagacucugguuuccag

SEQ ID NO: 2344397 - RNA, 19 nt, Artificial Sequence
  Description of Artificial Sequence: Synthetic oligonucleotide
  Antisense strand to SEQ ID NO: 2344396
cuggaaaccagagucuucu

SEQ ID NO: 2344398 - RNA, 19 nt, Artificial Sequence
  Description of Artificial Sequence: Synthetic oligonucleotide
  Sense strand starting at position 2060 of SEQ ID NO: 1885466
acauuuagucuucgugggu

SEQ ID NO: 2344399 - RNA, 19 nt, Artificial Sequence
  Description of Artificial Sequence: Synthetic oligonucleotide
  Antisense strand to SEQ ID NO: 2344398
acccacgaagacuaaaugu

SEQ ID NO: 2344400 - RNA, 19 nt, Artificial Sequence
  Description of Artificial Sequence: Synthetic oligonucleotide
  Sense strand starting at position 2061 of SEQ ID NO: 1885466
cauuuagucuucguggguu

SEQ ID NO: 2344401 - RNA, 19 nt, Artificial Sequence
  Description of Artificial Sequence: Synthetic oligonucleotide
  Antisense strand to SEQ ID NO: 2344400
aacccacgaagacuaaaug

SEQ ID NO: 2344402 - RNA, 19 nt, Artificial Sequence
  Description of Artificial Sequence: Synthetic oligonucleotide
  Sense strand starting at position 2131 of SEQ ID NO: 1885466
gucagagaagcccaaugua

SEQ ID NO: 2344403 - RNA, 19 nt, Artificial Sequence
  Description of Artificial Sequence: Synthetic oligonucleotide
  Antisense strand to SEQ ID NO: 2344402
uacauugggcuucucugac

SEQ ID NO: 2344404 - RNA, 19 nt, Artificial Sequence
  Description of Artificial Sequence: Synthetic oligonucleotide
  Sense strand starting at position 2214 of SEQ ID NO: 1885466
uccagacuugcucacugaa

SEQ ID NO: 2344405 - RNA, 19 nt, Artificial Sequence
  Description of Artificial Sequence: Synthetic oligonucleotide
  Antisense strand to SEQ ID NO: 2344404
uucagugagcaagucugga

SEQ ID NO: 2344406 - RNA, 19 nt, Artificial Sequence
  Description of Artificial Sequence: Synthetic oligonucleotide
  Sense strand starting at position 2217 of SEQ ID NO: 1885466
agacuugcucacugaauaa

SEQ ID NO: 2344407 - RNA, 19 nt, Artificial Sequence
  Description of Artificial Sequence: Synthetic oligonucleotide
  Antisense strand to SEQ ID NO: 2344406
uuauucagugagcaagucu

SEQ ID NO: 2344408 - RNA, 19 nt, Artificial Sequence
  Description of Artificial Sequence: Synthetic oligonucleotide
  Sense strand starting at position 2491 of SEQ ID NO: 1885466
gagauucuuguacagccau

SEQ ID NO: 2344409 - RNA, 19 nt, Artificial Sequence
  Description of Artificial Sequence: Synthetic oligonucleotide
  Antisense strand to SEQ ID NO: 2344408
auggcuguacaagaaucuc

SEQ ID NO: 2344410 - RNA, 19 nt, Artificial Sequence
  Description of Artificial Sequence: Synthetic oligonucleotide
  Sense strand starting at position 2613 of SEQ ID NO: 1885466
auggaacacuauucgucaa

SEQ ID NO: 2344411 - RNA, 19 nt, Artificial Sequence
  Description of Artificial Sequence: Synthetic oligonucleotide
  Antisense strand to SEQ ID NO: 2344410
uugacgaauaguguuccau

SEQ ID NO: 2344412 - RNA, 19 nt, Artificial Sequence
  Description of Artificial Sequence: Synthetic oligonucleotide
  Sense strand starting at position 2615 of SEQ ID NO: 1885466
ggaacacuauucgucaaug

SEQ ID NO: 2344413 - RNA, 19 nt, Artificial Sequence
  Description of Artificial Sequence: Synthetic oligonucleotide
  Antisense strand to SEQ ID NO: 2344412
cauugacgaauaguguucc

SEQ ID NO: 2344414 - RNA, 19 nt, Artificial Sequence
  Description of Artificial Sequence: Synthetic oligonucleotide
  Sense strand starting at position 2616 of SEQ ID NO: 1885466
gaacacuauucgucaauga

SEQ ID NO: 2344415 - RNA, 19 nt, Artificial Sequence
  Description of Artificial Sequence: Synthetic oligonucleotide
  Antisense strand to SEQ ID NO: 2344414
ucauugacgaauaguguuc

SEQ ID NO: 2344416 - RNA, 19 nt, Artificial Sequence
  Description of Artificial Sequence: Synthetic oligonucleotide
  Sense strand starting at position 2675 of SEQ ID NO: 1885466
ccuggagaacauuaugcuu

SEQ ID NO: 2344417 - RNA, 19 nt, Artificial Sequence
  Description of Artificial Sequence: Synthetic oligonucleotide
  Antisense strand to SEQ ID NO: 2344416
aagcauaauguucuccagg

SEQ ID NO: 2344418 - RNA, 19 nt, Artificial Sequence
  Description of Artificial Sequence: Synthetic oligonucleotide
  Sense strand starting at position 2678 of SEQ ID NO: 1885466
ggagaacauuaugcuuaag

SEQ ID NO: 2344419 - RNA, 19 nt, Artificial Sequence
  Description of Artificial Sequence: Synthetic oligonucleotide
  Antisense strand to SEQ ID NO: 2344418
cuuaagcauaauguucucc

SEQ ID NO: 2344420 - RNA, 19 nt, Artificial Sequence
  Description of Artificial Sequence: Synthetic oligonucleotide
  Sense strand starting at position 2681 of SEQ ID NO: 1885466
gaacauuaugcuuaagcga

SEQ ID NO: 2344421 - RNA, 19 nt, Artificial Sequence
  Description of Artificial Sequence: Synthetic oligonucleotide
  Antisense strand to SEQ ID NO: 2344420
ucgcuuaagcauaauguuc

SEQ ID NO: 2344422 - RNA, 19 nt, Artificial Sequence
  Description of Artificial Sequence: Synthetic oligonucleotide
  Sense strand starting at position 2847 of SEQ ID NO: 1885466
agaguucugguuugggauu

SEQ ID NO: 2344423 - RNA, 19 nt, Artificial Sequence
  Description of Artificial Sequence: Synthetic oligonucleotide
  Antisense strand to SEQ ID NO: 2344422
aaucccaaaccagaacucu

SEQ ID NO: 2344424 - RNA, 19 nt, Artificial Sequence
  Description of Artificial Sequence: Synthetic oligonucleotide
  Sense strand starting at position 2882 of SEQ ID NO: 1885466
aaugaugacgguugcacaa

SEQ ID NO: 2344425 - RNA, 19 nt, Artificial Sequence
  Description of Artificial Sequence: Synthetic oligonucleotide
  Antisense strand to SEQ ID NO: 2344424
uugugcaaccgucaucauu

SEQ ID NO: 2344426 - RNA, 19 nt, Artificial Sequence
  Description of Artificial Sequence: Synthetic oligonucleotide
  Sense strand starting at position 2889 of SEQ ID NO: 1885466
acgguugcacaauaauaaa

SEQ ID NO: 2344427 - RNA, 19 nt, Artificial Sequence
  Description of Artificial Sequence: Synthetic oligonucleotide
  Antisense strand to SEQ ID NO: 2344426
uuuauuauugugcaaccgu

SEQ ID NO: 2344428 - RNA, 19 nt, Artificial Sequence
  Description of Artificial Sequence: Synthetic oligonucleotide
  Sense strand starting at position 2920 of SEQ ID NO: 1885466
cgccaaauuguacacuuaa

SEQ ID NO: 2344429 - RNA, 19 nt, Artificial Sequence
  Description of Artificial Sequence: Synthetic oligonucleotide
  Antisense strand to SEQ ID NO: 2344428
uuaaguguacaauuuggcg

SEQ ID NO: 2344430 - RNA, 19 nt, Artificial Sequence
  Description of Artificial Sequence: Synthetic oligonucleotide
  Sense strand starting at position 3066 of SEQ ID NO: 1885466
ugcccagaccucuaugaua

SEQ ID NO: 2344431 - RNA, 19 nt, Artificial Sequence
  Description of Artificial Sequence: Synthetic oligonucleotide
  Antisense strand to SEQ ID NO: 2344430
uaucauagaggucugggca

SEQ ID NO: 2344432 - RNA, 19 nt, Artificial Sequence
  Description of Artificial Sequence: Synthetic oligonucleotide
  Sense strand starting at position 3068 of SEQ ID NO: 1885466
cccagaccucuaugauaag

SEQ ID NO: 2344433 - RNA, 19 nt, Artificial Sequence
  Description of Artificial Sequence: Synthetic oligonucleotide
  Antisense strand to SEQ ID NO: 2344432
cuuaucauagaggucuggg

SEQ ID NO: 2344434 - RNA, 19 nt, Artificial Sequence
  Description of Artificial Sequence: Synthetic oligonucleotide
  Sense strand starting at position 3459 of SEQ ID NO: 1885466
gaaagauuguaggugcuca

SEQ ID NO: 2344435 - RNA, 19 nt, Artificial Sequence
  Description of Artificial Sequence: Synthetic oligonucleotide
  Antisense strand to SEQ ID NO: 2344434
ugagcaccuacaaucuuuc

SEQ ID NO: 2344436 - RNA, 19 nt, Artificial Sequence
  Description of Artificial Sequence: Synthetic oligonucleotide
  Sense strand starting at position 3464 of SEQ ID NO: 1885466
auuguaggugcucauauga

SEQ ID NO: 2344437 - RNA, 19 nt, Artificial Sequence
  Description of Artificial Sequence: Synthetic oligonucleotide
  Antisense strand to SEQ ID NO: 2344436
ucauaugagcaccuacaau

SEQ ID NO: 2344438 - RNA, 19 nt, Artificial Sequence
  Description of Artificial Sequence: Synthetic oligonucleotide
  Sense strand starting at position 3475 of SEQ ID NO: 1885466
ucauaugaauuugaaggau

SEQ ID NO: 2344439 - RNA, 19 nt, Artificial Sequence
  Description of Artificial Sequence: Synthetic oligonucleotide
  Antisense strand to SEQ ID NO: 2344438
auccuucaaauucauauga

SEQ ID NO: 2344440 - RNA, 19 nt, Artificial Sequence
  Description of Artificial Sequence: Synthetic oligonucleotide
  Sense strand starting at position 3715 of SEQ ID NO: 1885466
gaccuuacgguuuagauau

SEQ ID NO: 2344441 - RNA, 19 nt, Artificial Sequence
  Description of Artificial Sequence: Synthetic oligonucleotide
  Antisense strand to SEQ ID NO: 2344440
auaucuaaaccguaagguc

SEQ ID NO: 2344442 - RNA, 19 nt, Artificial Sequence
  Description of Artificial Sequence: Synthetic oligonucleotide
  Sense strand starting at position 3963 of SEQ ID NO: 1885466
uaagaaauguguuugcuaa

SEQ ID NO: 2344443 - RNA, 19 nt, Artificial Sequence
  Description of Artificial Sequence: Synthetic oligonucleotide
  Antisense strand to SEQ ID NO: 2344442
uuagcaaacacauuucuua

SEQ ID NO: 2344444 - RNA, 19 nt, Artificial Sequence
  Description of Artificial Sequence: Synthetic oligonucleotide
  Sense strand starting at position 3964 of SEQ ID NO: 1885466
aagaaauguguuugcuaaa

SEQ ID NO: 2344445 - RNA, 19 nt, Artificial Sequence
  Description of Artificial Sequence: Synthetic oligonucleotide
  Antisense strand to SEQ ID NO: 2344444
uuuagcaaacacauuucuu

SEQ ID NO: 2344446 - RNA, 19 nt, Artificial Sequence
  Description of Artificial Sequence: Synthetic oligonucleotide
  Sense strand starting at position 3965 of SEQ ID NO: 1885466
agaaauguguuugcuaaag

SEQ ID NO: 2344447 - RNA, 19 nt, Artificial Sequence
  Description of Artificial Sequence: Synthetic oligonucleotide
  Antisense strand to SEQ ID NO: 2344446
cuuuagcaaacacauuucu

SEQ ID NO: 2344448 - RNA, 19 nt, Artificial Sequence
  Description of Artificial Sequence: Synthetic oligonucleotide
  Sense strand starting at position 63 of SEQ ID NO: 1885467
guucaucgcccagaggaga

SEQ ID NO: 2344449 - RNA, 19 nt, Artificial Sequence
  Description of Artificial Sequence: Synthetic oligonucleotide
  Antisense strand to SEQ ID NO: 2344448
ucuccucugggcgaugaac

SEQ ID NO: 2344450 - RNA, 19 nt, Artificial Sequence
  Description of Artificial Sequence: Synthetic oligonucleotide
  Sense strand starting at position 231 of SEQ ID NO: 1885467
acaguuugguuccuagaau

SEQ ID NO: 2344451 - RNA, 19 nt, Artificial Sequence
  Description of Artificial Sequence: Synthetic oligonucleotide
  Antisense strand to SEQ ID NO: 2344450
auucuaggaaccaaacugu

SEQ ID NO: 2344452 - RNA, 19 nt, Artificial Sequence
  Description of Artificial Sequence: Synthetic oligonucleotide
  Sense strand starting at position 298 of SEQ ID NO: 1885467
acaguugcccuguaucaaa

SEQ ID NO: 2344453 - RNA, 19 nt, Artificial Sequence
  Description of Artificial Sequence: Synthetic oligonucleotide
  Antisense strand to SEQ ID NO: 2344452
uuugauacagggcaacugu

SEQ ID NO: 2344454 - RNA, 19 nt, Artificial Sequence
  Description of Artificial Sequence: Synthetic oligonucleotide
  Sense strand starting at position 301 of SEQ ID NO: 1885467
guugcccuguaucaaauuu

SEQ ID NO: 2344455 - RNA, 19 nt, Artificial Sequence
  Description of Artificial Sequence: Synthetic oligonucleotide
  Antisense strand to SEQ ID NO: 2344454
aaauuugauacagggcaac

SEQ ID NO: 2344456 - RNA, 19 nt, Artificial Sequence
  Description of Artificial Sequence: Synthetic oligonucleotide
  Sense strand starting at position 319 of SEQ ID NO: 1885467
ugaauacacuuggccaaua

SEQ ID NO: 2344457 - RNA, 19 nt, Artificial Sequence
  Description of Artificial Sequence: Synthetic oligonucleotide
  Antisense strand to SEQ ID NO: 2344456
uauuggccaaguguauuca

SEQ ID NO: 2344458 - RNA, 19 nt, Artificial Sequence
  Description of Artificial Sequence: Synthetic oligonucleotide
  Sense strand starting at position 403 of SEQ ID NO: 1885467
uacuuuggccagcaaggau

SEQ ID NO: 2344459 - RNA, 19 nt, Artificial Sequence
  Description of Artificial Sequence: Synthetic oligonucleotide
  Antisense strand to SEQ ID NO: 2344458
auccuugcuggccaaagua

SEQ ID NO: 2344460 - RNA, 19 nt, Artificial Sequence
  Description of Artificial Sequence: Synthetic oligonucleotide
  Sense strand starting at position 585 of SEQ ID NO: 1885467
gaagauuacuuaguaguug

SEQ ID NO: 2344461 - RNA, 19 nt, Artificial Sequence
  Description of Artificial Sequence: Synthetic oligonucleotide
  Antisense strand to SEQ ID NO: 2344460
caacuacuaaguaaucuuc

SEQ ID NO: 2344462 - RNA, 19 nt, Artificial Sequence
  Description of Artificial Sequence: Synthetic oligonucleotide
  Sense strand starting at position 696 of SEQ ID NO: 1885467
cugagaaguugagaaguga

SEQ ID NO: 2344463 - RNA, 19 nt, Artificial Sequence
  Description of Artificial Sequence: Synthetic oligonucleotide
  Antisense strand to SEQ ID NO: 2344462
ucacuucucaacuucucag

SEQ ID NO: 2344464 - RNA, 19 nt, Artificial Sequence
  Description of Artificial Sequence: Synthetic oligonucleotide
  Sense strand starting at position 732 of SEQ ID NO: 1885467
gccuguggcgcugauacua

SEQ ID NO: 2344465 - RNA, 19 nt, Artificial Sequence
  Description of Artificial Sequence: Synthetic oligonucleotide
  Antisense strand to SEQ ID NO: 2344464
uaguaucagcgccacaggc

SEQ ID NO: 2344466 - RNA, 19 nt, Artificial Sequence
  Description of Artificial Sequence: Synthetic oligonucleotide
  Sense strand starting at position 1139 of SEQ ID NO: 1885467
ggaaaugucagauguuucu

SEQ ID NO: 2344467 - RNA, 19 nt, Artificial Sequence
  Description of Artificial Sequence: Synthetic oligonucleotide
  Antisense strand to SEQ ID NO: 2344466
agaaacaucugacauuucc

SEQ ID NO: 2344468 - RNA, 19 nt, Artificial Sequence
  Description of Artificial Sequence: Synthetic oligonucleotide
  Sense strand starting at position 1259 of SEQ ID NO: 1885467
cgcagucuaccuuaccgaa

SEQ ID NO: 2344469 - RNA, 19 nt, Artificial Sequence
  Description of Artificial Sequence: Synthetic oligonucleotide
  Antisense strand to SEQ ID NO: 2344468
uucgguaagguagacugcg

SEQ ID NO: 2344470 - RNA, 19 nt, Artificial Sequence
  Description of Artificial Sequence: Synthetic oligonucleotide
  Sense strand starting at position 1306 of SEQ ID NO: 1885467
gccguuuaacuggcuguaa

SEQ ID NO: 2344471 - RNA, 19 nt, Artificial Sequence
  Description of Artificial Sequence: Synthetic oligonucleotide
  Antisense strand to SEQ ID NO: 2344470
uuacagccaguuaaacggc

SEQ ID NO: 2344472 - RNA, 19 nt, Artificial Sequence
  Description of Artificial Sequence: Synthetic oligonucleotide
  Sense strand starting at position 1307 of SEQ ID NO: 1885467
ccguuuaacuggcuguaaa

SEQ ID NO: 2344473 - RNA, 19 nt, Artificial Sequence
  Description of Artificial Sequence: Synthetic oligonucleotide
  Antisense strand to SEQ ID NO: 2344472
uuuacagccaguuaaacgg

SEQ ID NO: 2344474 - RNA, 19 nt, Artificial Sequence
  Description of Artificial Sequence: Synthetic oligonucleotide
  Sense strand starting at position 2813 of SEQ ID NO: 1885467
ugaaguuacucuuugccaa

SEQ ID NO: 2344475 - RNA, 19 nt, Artificial Sequence
  Description of Artificial Sequence: Synthetic oligonucleotide
  Antisense strand to SEQ ID NO: 2344474
uuggcaaagaguaacuuca

SEQ ID NO: 2344476 - RNA, 19 nt, Artificial Sequence
  Description of Artificial Sequence: Synthetic oligonucleotide
  Sense strand starting at position 2816 of SEQ ID NO: 1885467
aguuacucuuugccaaagu

SEQ ID NO: 2344477 - RNA, 19 nt, Artificial Sequence
  Description of Artificial Sequence: Synthetic oligonucleotide
  Antisense strand to SEQ ID NO: 2344476
acuuuggcaaagaguaacu

SEQ ID NO: 2344478 - RNA, 19 nt, Artificial Sequence
  Description of Artificial Sequence: Synthetic oligonucleotide
  Sense strand starting at position 2843 of SEQ ID NO: 1885467
uuaaaugugugagccugaa

SEQ ID NO: 2344479 - RNA, 19 nt, Artificial Sequence
  Description of Artificial Sequence: Synthetic oligonucleotide
  Antisense strand to SEQ ID NO: 2344478
uucaggcucacacauuuaa

SEQ ID NO: 2344480 - RNA, 19 nt, Artificial Sequence
  Description of Artificial Sequence: Synthetic oligonucleotide
  Sense strand starting at position 2899 of SEQ ID NO: 1885467
aguugaucucgugaaagua

SEQ ID NO: 2344481 - RNA, 19 nt, Artificial Sequence
  Description of Artificial Sequence: Synthetic oligonucleotide
  Antisense strand to SEQ ID NO: 2344480
uacuuucacgagaucaacu

SEQ ID NO: 2344482 - RNA, 19 nt, Artificial Sequence
  Description of Artificial Sequence: Synthetic oligonucleotide
  Sense strand starting at position 2908 of SEQ ID NO: 1885467
cgugaaaguagggaguaaa

SEQ ID NO: 2344483 - RNA, 19 nt, Artificial Sequence
  Description of Artificial Sequence: Synthetic oligonucleotide
  Antisense strand to SEQ ID NO: 2344482
uuuacucccuacuuucacg

SEQ ID NO: 2344484 - RNA, 19 nt, Artificial Sequence
  Description of Artificial Sequence: Synthetic oligonucleotide
  Sense strand starting at position 2933 of SEQ ID NO: 1885467
guuauucuuguacagagga

SEQ ID NO: 2344485 - RNA, 19 nt, Artificial Sequence
  Description of Artificial Sequence: Synthetic oligonucleotide
  Antisense strand to SEQ ID NO: 2344484
uccucuguacaagaauaac

SEQ ID NO: 2344486 - RNA, 19 nt, Artificial Sequence
  Description of Artificial Sequence: Synthetic oligonucleotide
  Sense strand starting at position 2997 of SEQ ID NO: 1885467
aaguuauaguuagaaggaa

SEQ ID NO: 2344487 - RNA, 19 nt, Artificial Sequence
  Description of Artificial Sequence: Synthetic oligonucleotide
  Antisense strand to SEQ ID NO: 2344486
uuccuucuaacuauaacuu

SEQ ID NO: 2344488 - RNA, 19 nt, Artificial Sequence
  Description of Artificial Sequence: Synthetic oligonucleotide
  Sense strand starting at position 3035 of SEQ ID NO: 1885467
gcacguuuggaugacuaua

SEQ ID NO: 2344489 - RNA, 19 nt, Artificial Sequence
  Description of Artificial Sequence: Synthetic oligonucleotide
  Antisense strand to SEQ ID NO: 2344488
uauagucauccaaacgugc

SEQ ID NO: 2344490 - RNA, 19 nt, Artificial Sequence
  Description of Artificial Sequence: Synthetic oligonucleotide
  Sense strand starting at position 3043 of SEQ ID NO: 1885467
ggaugacuauacucaacga

SEQ ID NO: 2344491 - RNA, 19 nt, Artificial Sequence
  Description of Artificial Sequence: Synthetic oligonucleotide
  Antisense strand to SEQ ID NO: 2344490
ucguugaguauagucaucc

SEQ ID NO: 2344492 - RNA, 19 nt, Artificial Sequence
  Description of Artificial Sequence: Synthetic oligonucleotide
  Sense strand starting at position 3154 of SEQ ID NO: 1885467
cccugauuagaugguugca

SEQ ID NO: 2344493 - RNA, 19 nt, Artificial Sequence
  Description of Artificial Sequence: Synthetic oligonucleotide
  Antisense strand to SEQ ID NO: 2344492
ugcaaccaucuaaucaggg

SEQ ID NO: 2344494 - RNA, 19 nt, Artificial Sequence
  Description of Artificial Sequence: Synthetic oligonucleotide
  Sense strand starting at position 3156 of SEQ ID NO: 1885467
cugauuagaugguugcaca

SEQ ID NO: 2344495 - RNA, 19 nt, Artificial Sequence
  Description of Artificial Sequence: Synthetic oligonucleotide
  Antisense strand to SEQ ID NO: 2344494
ugugcaaccaucuaaucag

SEQ ID NO: 2344496 - RNA, 19 nt, Artificial Sequence
  Description of Artificial Sequence: Synthetic oligonucleotide
  Sense strand starting at position 3157 of SEQ ID NO: 1885467
ugauuagaugguugcacaa

SEQ ID NO: 2344497 - RNA, 19 nt, Artificial Sequence
  Description of Artificial Sequence: Synthetic oligonucleotide
  Antisense strand to SEQ ID NO: 2344496
uugugcaaccaucuaauca

SEQ ID NO: 2344498 - RNA, 19 nt, Artificial Sequence
  Description of Artificial Sequence: Synthetic oligonucleotide
  Sense strand starting at position 3166 of SEQ ID NO: 1885467
gguugcacaauguguauau

SEQ ID NO: 2344499 - RNA, 19 nt, Artificial Sequence
  Description of Artificial Sequence: Synthetic oligonucleotide
  Antisense strand to SEQ ID NO: 2344498
auauacacauugugcaacc

SEQ ID NO: 2344500 - RNA, 19 nt, Artificial Sequence
  Description of Artificial Sequence: Synthetic oligonucleotide
  Sense strand starting at position 3216 of SEQ ID NO: 1885467
acaugcaauuaugugagaa

SEQ ID NO: 2344501 - RNA, 19 nt, Artificial Sequence
  Description of Artificial Sequence: Synthetic oligonucleotide
  Antisense strand to SEQ ID NO: 2344500
uucucacauaauugcaugu

SEQ ID NO: 2344502 - RNA, 19 nt, Artificial Sequence
  Description of Artificial Sequence: Synthetic oligonucleotide
  Sense strand starting at position 3279 of SEQ ID NO: 1885467
agggauaggcuauggagua

SEQ ID NO: 2344503 - RNA, 19 nt, Artificial Sequence
  Description of Artificial Sequence: Synthetic oligonucleotide
  Antisense strand to SEQ ID NO: 2344502
uacuccauagccuaucccu

SEQ ID NO: 2344504 - RNA, 19 nt, Artificial Sequence
  Description of Artificial Sequence: Synthetic oligonucleotide
  Sense strand starting at position 3341 of SEQ ID NO: 1885467
gugugcuaaaucugugauu

SEQ ID NO: 2344505 - RNA, 19 nt, Artificial Sequence
  Description of Artificial Sequence: Synthetic oligonucleotide
  Antisense strand to SEQ ID NO: 2344504
aaucacagauuuagcacac

SEQ ID NO: 2344506 - RNA, 19 nt, Artificial Sequence
  Description of Artificial Sequence: Synthetic oligonucleotide
  Sense strand starting at position 3342 of SEQ ID NO: 1885467
ugugcuaaaucugugauuc

SEQ ID NO: 2344507 - RNA, 19 nt, Artificial Sequence
  Description of Artificial Sequence: Synthetic oligonucleotide
  Antisense strand to SEQ ID NO: 2344506
gaaucacagauuuagcaca

SEQ ID NO: 2344508 - RNA, 19 nt, Artificial Sequence
  Description of Artificial Sequence: Synthetic oligonucleotide
  Sense strand starting at position 3343 of SEQ ID NO: 1885467
gugcuaaaucugugauucg

SEQ ID NO: 2344509 - RNA, 19 nt, Artificial Sequence
  Description of Artificial Sequence: Synthetic oligonucleotide
  Antisense strand to SEQ ID NO: 2344508
cgaaucacagauuuagcac

SEQ ID NO: 2344510 - RNA, 19 nt, Artificial Sequence
  Description of Artificial Sequence: Synthetic oligonucleotide
  Sense strand starting at position 3346 of SEQ ID NO: 1885467
cuaaaucugugauucguag

SEQ ID NO: 2344511 - RNA, 19 nt, Artificial Sequence
  Description of Artificial Sequence: Synthetic oligonucleotide
  Antisense strand to SEQ ID NO: 2344510
cuacgaaucacagauuuag

SEQ ID NO: 2344512 - RNA, 19 nt, Artificial Sequence
  Description of Artificial Sequence: Synthetic oligonucleotide
  Sense strand starting at position 3352 of SEQ ID NO: 1885467
cugugauucguagaucaac

SEQ ID NO: 2344513 - RNA, 19 nt, Artificial Sequence
  Description of Artificial Sequence: Synthetic oligonucleotide
  Antisense strand to SEQ ID NO: 2344512
guugaucuacgaaucacag

SEQ ID NO: 2344514 - RNA, 19 nt, Artificial Sequence
  Description of Artificial Sequence: Synthetic oligonucleotide
  Sense strand starting at position 3355 of SEQ ID NO: 1885467
ugauucguagaucaacaca

SEQ ID NO: 2344515 - RNA, 19 nt, Artificial Sequence
  Description of Artificial Sequence: Synthetic oligonucleotide
  Antisense strand to SEQ ID NO: 2344514
uguguugaucuacgaauca

SEQ ID NO: 2344516 - RNA, 19 nt, Artificial Sequence
  Description of Artificial Sequence: Synthetic oligonucleotide
  Sense strand starting at position 3411 of SEQ ID NO: 1885467
uguuaacacugauuauaga

SEQ ID NO: 2344517 - RNA, 19 nt, Artificial Sequence
  Description of Artificial Sequence: Synthetic oligonucleotide
  Antisense strand to SEQ ID NO: 2344516
ucuauaaucaguguuaaca

SEQ ID NO: 2344518 - RNA, 19 nt, Artificial Sequence
  Description of Artificial Sequence: Synthetic oligonucleotide
  Sense strand starting at position 3459 of SEQ ID NO: 1885467
uuaggcuuuauucguaaag

SEQ ID NO: 2344519 - RNA, 19 nt, Artificial Sequence
  Description of Artificial Sequence: Synthetic oligonucleotide
  Antisense strand to SEQ ID NO: 2344518
cuuuacgaauaaagccuaa

SEQ ID NO: 2344520 - RNA, 19 nt, Artificial Sequence
  Description of Artificial Sequence: Synthetic oligonucleotide
  Sense strand starting at position 3460 of SEQ ID NO: 1885467
uaggcuuuauucguaaagu

SEQ ID NO: 2344521 - RNA, 19 nt, Artificial Sequence
  Description of Artificial Sequence: Synthetic oligonucleotide
  Antisense strand to SEQ ID NO: 2344520
acuuuacgaauaaagccua

SEQ ID NO: 2344522 - RNA, 19 nt, Artificial Sequence
  Description of Artificial Sequence: Synthetic oligonucleotide
  Sense strand starting at position 3868 of SEQ ID NO: 1885467
gguccuuuauguuugcaga

SEQ ID NO: 2344523 - RNA, 19 nt, Artificial Sequence
  Description of Artificial Sequence: Synthetic oligonucleotide
  Antisense strand to SEQ ID NO: 2344522
ucugcaaacauaaaggacc

SEQ ID NO: 2344524 - RNA, 19 nt, Artificial Sequence
  Description of Artificial Sequence: Synthetic oligonucleotide
  Sense strand starting at position 3869 of SEQ ID NO: 1885467
guccuuuauguuugcagaa

SEQ ID NO: 2344525 - RNA, 19 nt, Artificial Sequence
  Description of Artificial Sequence: Synthetic oligonucleotide
  Antisense strand to SEQ ID NO: 2344524
uucugcaaacauaaaggac

SEQ ID NO: 2344526 - RNA, 19 nt, Artificial Sequence
  Description of Artificial Sequence: Synthetic oligonucleotide
  Sense strand starting at position 3870 of SEQ ID NO: 1885467
uccuuuauguuugcagaag

SEQ ID NO: 2344527 - RNA, 19 nt, Artificial Sequence
  Description of Artificial Sequence: Synthetic oligonucleotide
  Antisense strand to SEQ ID NO: 2344526
cuucugcaaacauaaagga

SEQ ID NO: 2344528 - RNA, 19 nt, Artificial Sequence
  Description of Artificial Sequence: Synthetic oligonucleotide
  Sense strand starting at position 50 of SEQ ID NO: 1885469
aacauuaugcaucggucaa

SEQ ID NO: 2344529 - RNA, 19 nt, Artificial Sequence
  Description of Artificial Sequence: Synthetic oligonucleotide
  Antisense strand to SEQ ID NO: 2344528
uugaccgaugcauaauguu

SEQ ID NO: 2344530 - RNA, 19 nt, Artificial Sequence
  Description of Artificial Sequence: Synthetic oligonucleotide
  Sense strand starting at position 52 of SEQ ID NO: 1885469
cauuaugcaucggucaacu

SEQ ID NO: 2344531 - RNA, 19 nt, Artificial Sequence
  Description of Artificial Sequence: Synthetic oligonucleotide
  Antisense strand to SEQ ID NO: 2344530
aguugaccgaugcauaaug

SEQ ID NO: 2344532 - RNA, 19 nt, Artificial Sequence
  Description of Artificial Sequence: Synthetic oligonucleotide
  Sense strand starting at position 121 of SEQ ID NO: 1885469
ucuguacaguuguccaauu

SEQ ID NO: 2344533 - RNA, 19 nt, Artificial Sequence
  Description of Artificial Sequence: Synthetic oligonucleotide
  Antisense strand to SEQ ID NO: 2344532
aauuggacaacuguacaga

SEQ ID NO: 2344534 - RNA, 19 nt, Artificial Sequence
  Description of Artificial Sequence: Synthetic oligonucleotide
  Sense strand starting at position 123 of SEQ ID NO: 1885469
uguacaguuguccaauugu

SEQ ID NO: 2344535 - RNA, 19 nt, Artificial Sequence
  Description of Artificial Sequence: Synthetic oligonucleotide
  Antisense strand to SEQ ID NO: 2344534
acaauuggacaacuguaca

SEQ ID NO: 2344536 - RNA, 19 nt, Artificial Sequence
  Description of Artificial Sequence: Synthetic oligonucleotide
  Sense strand starting at position 190 of SEQ ID NO: 1885469
augucuuagcauuauuaug

SEQ ID NO: 2344537 - RNA, 19 nt, Artificial Sequence
  Description of Artificial Sequence: Synthetic oligonucleotide
  Antisense strand to SEQ ID NO: 2344536
cauaauaaugcuaagacau

SEQ ID NO: 2344538 - RNA, 19 nt, Artificial Sequence
  Description of Artificial Sequence: Synthetic oligonucleotide
  Sense strand starting at position 722 of SEQ ID NO: 1885469
cuucuauaaucaguguuaa

SEQ ID NO: 2344539 - RNA, 19 nt, Artificial Sequence
  Description of Artificial Sequence: Synthetic oligonucleotide
  Antisense strand to SEQ ID NO: 2344538
uuaacacugauuauagaag

SEQ ID NO: 2344540 - RNA, 19 nt, Artificial Sequence
  Description of Artificial Sequence: Synthetic oligonucleotide
  Sense strand starting at position 723 of SEQ ID NO: 1885469
uucuauaaucaguguuaac

SEQ ID NO: 2344541 - RNA, 19 nt, Artificial Sequence
  Description of Artificial Sequence: Synthetic oligonucleotide
  Antisense strand to SEQ ID NO: 2344540
guuaacacugauuauagaa

SEQ ID NO: 2344542 - RNA, 19 nt, Artificial Sequence
  Description of Artificial Sequence: Synthetic oligonucleotide
  Sense strand starting at position 780 of SEQ ID NO: 1885469
uguguugaucuacgaauca

SEQ ID NO: 2344543 - RNA, 19 nt, Artificial Sequence
  Description of Artificial Sequence: Synthetic oligonucleotide
  Antisense strand to SEQ ID NO: 2344542
ugauucguagaucaacaca

SEQ ID NO: 2344544 - RNA, 19 nt, Artificial Sequence
  Description of Artificial Sequence: Synthetic oligonucleotide
  Sense strand starting at position 818 of SEQ ID NO: 1885469
ggcacuuaugagcacugaa

SEQ ID NO: 2344545 - RNA, 19 nt, Artificial Sequence
  Description of Artificial Sequence: Synthetic oligonucleotide
  Antisense strand to SEQ ID NO: 2344544
uucagugcucauaagugcc

SEQ ID NO: 2344546 - RNA, 19 nt, Artificial Sequence
  Description of Artificial Sequence: Synthetic oligonucleotide
  Sense strand starting at position 851 of SEQ ID NO: 1885469
uuuaguacuccauagccua

SEQ ID NO: 2344547 - RNA, 19 nt, Artificial Sequence
  Description of Artificial Sequence: Synthetic oligonucleotide
  Antisense strand to SEQ ID NO: 2344546
uaggcuauggaguacuaaa

SEQ ID NO: 2344548 - RNA, 19 nt, Artificial Sequence
  Description of Artificial Sequence: Synthetic oligonucleotide
  Sense strand starting at position 986 of SEQ ID NO: 1885469
ccaucuaaucaggguaauu

SEQ ID NO: 2344549 - RNA, 19 nt, Artificial Sequence
  Description of Artificial Sequence: Synthetic oligonucleotide
  Antisense strand to SEQ ID NO: 2344548
aauuacccugauuagaugg

SEQ ID NO: 2344550 - RNA, 19 nt, Artificial Sequence
  Description of Artificial Sequence: Synthetic oligonucleotide
  Sense strand starting at position 1078 of SEQ ID NO: 1885469
ugaaguuaacauuaucguu

SEQ ID NO: 2344551 - RNA, 19 nt, Artificial Sequence
  Description of Artificial Sequence: Synthetic oligonucleotide
  Antisense strand to SEQ ID NO: 2344550
aacgauaauguuaacuuca

SEQ ID NO: 2344552 - RNA, 19 nt, Artificial Sequence
  Description of Artificial Sequence: Synthetic oligonucleotide
  Sense strand starting at position 1080 of SEQ ID NO: 1885469
aaguuaacauuaucguuga

SEQ ID NO: 2344553 - RNA, 19 nt, Artificial Sequence
  Description of Artificial Sequence: Synthetic oligonucleotide
  Antisense strand to SEQ ID NO: 2344552
ucaacgauaauguuaacuu

SEQ ID NO: 2344554 - RNA, 19 nt, Artificial Sequence
  Description of Artificial Sequence: Synthetic oligonucleotide
  Sense strand starting at position 1083 of SEQ ID NO: 1885469
uuaacauuaucguugagua

SEQ ID NO: 2344555 - RNA, 19 nt, Artificial Sequence
  Description of Artificial Sequence: Synthetic oligonucleotide
  Antisense strand to SEQ ID NO: 2344554
uacucaacgauaauguuaa

SEQ ID NO: 2344556 - RNA, 19 nt, Artificial Sequence
  Description of Artificial Sequence: Synthetic oligonucleotide
  Sense strand starting at position 1084 of SEQ ID NO: 1885469
uaacauuaucguugaguau

SEQ ID NO: 2344557 - RNA, 19 nt, Artificial Sequence
  Description of Artificial Sequence: Synthetic oligonucleotide
  Antisense strand to SEQ ID NO: 2344556
auacucaacgauaauguua

SEQ ID NO: 2344558 - RNA, 19 nt, Artificial Sequence
  Description of Artificial Sequence: Synthetic oligonucleotide
  Sense strand starting at position 1085 of SEQ ID NO: 1885469
aacauuaucguugaguaua

SEQ ID NO: 2344559 - RNA, 19 nt, Artificial Sequence
  Description of Artificial Sequence: Synthetic oligonucleotide
  Antisense strand to SEQ ID NO: 2344558
uauacucaacgauaauguu

SEQ ID NO: 2344560 - RNA, 19 nt, Artificial Sequence
  Description of Artificial Sequence: Synthetic oligonucleotide
  Sense strand starting at position 1087 of SEQ ID NO: 1885469
cauuaucguugaguauagu

SEQ ID NO: 2344561 - RNA, 19 nt, Artificial Sequence
  Description of Artificial Sequence: Synthetic oligonucleotide
  Antisense strand to SEQ ID NO: 2344560
acuauacucaacgauaaug

SEQ ID NO: 2344562 - RNA, 19 nt, Artificial Sequence
  Description of Artificial Sequence: Synthetic oligonucleotide
  Sense strand starting at position 1090 of SEQ ID NO: 1885469
uaucguugaguauagucau

SEQ ID NO: 2344563 - RNA, 19 nt, Artificial Sequence
  Description of Artificial Sequence: Synthetic oligonucleotide
  Antisense strand to SEQ ID NO: 2344562
augacuauacucaacgaua

SEQ ID NO: 2344564 - RNA, 19 nt, Artificial Sequence
  Description of Artificial Sequence: Synthetic oligonucleotide
  Sense strand starting at position 1093 of SEQ ID NO: 1885469
cguugaguauagucaucca

SEQ ID NO: 2344565 - RNA, 19 nt, Artificial Sequence
  Description of Artificial Sequence: Synthetic oligonucleotide
  Antisense strand to SEQ ID NO: 2344564
uggaugacuauacucaacg

SEQ ID NO: 2344566 - RNA, 19 nt, Artificial Sequence
  Description of Artificial Sequence: Synthetic oligonucleotide
  Sense strand starting at position 1096 of SEQ ID NO: 1885469
ugaguauagucauccaaac

SEQ ID NO: 2344567 - RNA, 19 nt, Artificial Sequence
  Description of Artificial Sequence: Synthetic oligonucleotide
  Antisense strand to SEQ ID NO: 2344566
guuuggaugacuauacuca

SEQ ID NO: 2344568 - RNA, 19 nt, Artificial Sequence
  Description of Artificial Sequence: Synthetic oligonucleotide
  Sense strand starting at position 1098 of SEQ ID NO: 1885469
aguauagucauccaaacgu

SEQ ID NO: 2344569 - RNA, 19 nt, Artificial Sequence
  Description of Artificial Sequence: Synthetic oligonucleotide
  Antisense strand to SEQ ID NO: 2344568
acguuuggaugacuauacu

SEQ ID NO: 2344570 - RNA, 19 nt, Artificial Sequence
  Description of Artificial Sequence: Synthetic oligonucleotide
  Sense strand starting at position 1109 of SEQ ID NO: 1885469
ccaaacgugcaagagaaua

SEQ ID NO: 2344571 - RNA, 19 nt, Artificial Sequence
  Description of Artificial Sequence: Synthetic oligonucleotide
  Antisense strand to SEQ ID NO: 2344570
uauucucuugcacguuugg

SEQ ID NO: 2344572 - RNA, 19 nt, Artificial Sequence
  Description of Artificial Sequence: Synthetic oligonucleotide
  Sense strand starting at position 1150 of SEQ ID NO: 1885469
auaacuuugugucuguuga

SEQ ID NO: 2344573 - RNA, 19 nt, Artificial Sequence
  Description of Artificial Sequence: Synthetic oligonucleotide
  Antisense strand to SEQ ID NO: 2344572
ucaacagacacaaaguuau

SEQ ID NO: 2344574 - RNA, 19 nt, Artificial Sequence
  Description of Artificial Sequence: Synthetic oligonucleotide
  Sense strand starting at position 2868 of SEQ ID NO: 1885469
aauugacuuucgguaaggu

SEQ ID NO: 2344575 - RNA, 19 nt, Artificial Sequence
  Description of Artificial Sequence: Synthetic oligonucleotide
  Antisense strand to SEQ ID NO: 2344574
accuuaccgaaagucaauu

SEQ ID NO: 2344576 - RNA, 19 nt, Artificial Sequence
  Description of Artificial Sequence: Synthetic oligonucleotide
  Sense strand starting at position 2869 of SEQ ID NO: 1885469
auugacuuucgguaaggua

SEQ ID NO: 2344577 - RNA, 19 nt, Artificial Sequence
  Description of Artificial Sequence: Synthetic oligonucleotide
  Antisense strand to SEQ ID NO: 2344576
uaccuuaccgaaagucaau

SEQ ID NO: 2344578 - RNA, 19 nt, Artificial Sequence
  Description of Artificial Sequence: Synthetic oligonucleotide
  Sense strand starting at position 2882 of SEQ ID NO: 1885469
aagguagacugcguguuaa

SEQ ID NO: 2344579 - RNA, 19 nt, Artificial Sequence
  Description of Artificial Sequence: Synthetic oligonucleotide
  Antisense strand to SEQ ID NO: 2344578
uuaacacgcagucuaccuu

SEQ ID NO: 2344580 - RNA, 19 nt, Artificial Sequence
  Description of Artificial Sequence: Synthetic oligonucleotide
  Sense strand starting at position 2892 of SEQ ID NO: 1885469
gcguguuaacaguuaggca

SEQ ID NO: 2344581 - RNA, 19 nt, Artificial Sequence
  Description of Artificial Sequence: Synthetic oligonucleotide
  Antisense strand to SEQ ID NO: 2344580
ugccuaacuguuaacacgc

SEQ ID NO: 2344582 - RNA, 19 nt, Artificial Sequence
  Description of Artificial Sequence: Synthetic oligonucleotide
  Sense strand starting at position 3351 of SEQ ID NO: 1885469
ugucaugaaucuucugaga

SEQ ID NO: 2344583 - RNA, 19 nt, Artificial Sequence
  Description of Artificial Sequence: Synthetic oligonucleotide
  Antisense strand to SEQ ID NO: 2344582
ucucagaagauucaugaca

SEQ ID NO: 2344584 - RNA, 19 nt, Artificial Sequence
  Description of Artificial Sequence: Synthetic oligonucleotide
  Sense strand starting at position 3372 of SEQ ID NO: 1885469
gugugucucgucuuauagu

SEQ ID NO: 2344585 - RNA, 19 nt, Artificial Sequence
  Description of Artificial Sequence: Synthetic oligonucleotide
  Antisense strand to SEQ ID NO: 2344584
acuauaagacgagacacac

SEQ ID NO: 2344586 - RNA, 19 nt, Artificial Sequence
  Description of Artificial Sequence: Synthetic oligonucleotide
  Sense strand starting at position 3378 of SEQ ID NO: 1885469
cucgucuuauagucugaca

SEQ ID NO: 2344587 - RNA, 19 nt, Artificial Sequence
  Description of Artificial Sequence: Synthetic oligonucleotide
  Antisense strand to SEQ ID NO: 2344586
ugucagacuauaagacgag

SEQ ID NO: 2344588 - RNA, 19 nt, Artificial Sequence
  Description of Artificial Sequence: Synthetic oligonucleotide
  Sense strand starting at position 3386 of SEQ ID NO: 1885469
auagucugacagugaguua

SEQ ID NO: 2344589 - RNA, 19 nt, Artificial Sequence
  Description of Artificial Sequence: Synthetic oligonucleotide
  Antisense strand to SEQ ID NO: 2344588
uaacucacugucagacuau

SEQ ID NO: 2344590 - RNA, 19 nt, Artificial Sequence
  Description of Artificial Sequence: Synthetic oligonucleotide
  Sense strand starting at position 3389 of SEQ ID NO: 1885469
gucugacagugaguuagua

SEQ ID NO: 2344591 - RNA, 19 nt, Artificial Sequence
  Description of Artificial Sequence: Synthetic oligonucleotide
  Antisense strand to SEQ ID NO: 2344590
uacuaacucacugucagac

SEQ ID NO: 2344592 - RNA, 19 nt, Artificial Sequence
  Description of Artificial Sequence: Synthetic oligonucleotide
  Sense strand starting at position 3391 of SEQ ID NO: 1885469
cugacagugaguuaguauc

SEQ ID NO: 2344593 - RNA, 19 nt, Artificial Sequence
  Description of Artificial Sequence: Synthetic oligonucleotide
  Antisense strand to SEQ ID NO: 2344592
gauacuaacucacugucag

SEQ ID NO: 2344594 - RNA, 19 nt, Artificial Sequence
  Description of Artificial Sequence: Synthetic oligonucleotide
  Sense strand starting at position 3527 of SEQ ID NO: 1885469
uggauuggucccggaguau

SEQ ID NO: 2344595 - RNA, 19 nt, Artificial Sequence
  Description of Artificial Sequence: Synthetic oligonucleotide
  Antisense strand to SEQ ID NO: 2344594
auacuccgggaccaaucca

SEQ ID NO: 2344596 - RNA, 19 nt, Artificial Sequence
  Description of Artificial Sequence: Synthetic oligonucleotide
  Sense strand starting at position 3528 of SEQ ID NO: 1885469
ggauuggucccggaguaug

SEQ ID NO: 2344597 - RNA, 19 nt, Artificial Sequence
  Description of Artificial Sequence: Synthetic oligonucleotide
  Antisense strand to SEQ ID NO: 2344596
cauacuccgggaccaaucc

SEQ ID NO: 2344598 - RNA, 19 nt, Artificial Sequence
  Description of Artificial Sequence: Synthetic oligonucleotide
  Sense strand starting at position 3772 of SEQ ID NO: 1885469
agagaaaucuuauugguug

SEQ ID NO: 2344599 - RNA, 19 nt, Artificial Sequence
  Description of Artificial Sequence: Synthetic oligonucleotide
  Antisense strand to SEQ ID NO: 2344598
caaccaauaagauuucucu

SEQ ID NO: 2344600 - RNA, 19 nt, Artificial Sequence
  Description of Artificial Sequence: Synthetic oligonucleotide
  Sense strand starting at position 3777 of SEQ ID NO: 1885469
aaucuuauugguugcugua

SEQ ID NO: 2344601 - RNA, 19 nt, Artificial Sequence
  Description of Artificial Sequence: Synthetic oligonucleotide
  Antisense strand to SEQ ID NO: 2344600
uacagcaaccaauaagauu

SEQ ID NO: 2344602 - RNA, 19 nt, Artificial Sequence
  Description of Artificial Sequence: Synthetic oligonucleotide
  Sense strand starting at position 3796 of SEQ ID NO: 1885469
cuguauuagccaugagauu

SEQ ID NO: 2344603 - RNA, 19 nt, Artificial Sequence
  Description of Artificial Sequence: Synthetic oligonucleotide
  Antisense strand to SEQ ID NO: 2344602
aaucucauggcuaauacag

SEQ ID NO: 2344604 - RNA, 19 nt, Artificial Sequence
  Description of Artificial Sequence: Synthetic oligonucleotide
  Sense strand starting at position 3797 of SEQ ID NO: 1885469
uguauuagccaugagauua

SEQ ID NO: 2344605 - RNA, 19 nt, Artificial Sequence
  Description of Artificial Sequence: Synthetic oligonucleotide
  Antisense strand to SEQ ID NO: 2344604
uaaucucauggcuaauaca

SEQ ID NO: 2344606 - RNA, 19 nt, Artificial Sequence
  Description of Artificial Sequence: Synthetic oligonucleotide
  Sense strand starting at position 3898 of SEQ ID NO: 1885469
uguugaauucuaggaacca

SEQ ID NO: 2344607 - RNA, 19 nt, Artificial Sequence
  Description of Artificial Sequence: Synthetic oligonucleotide
  Antisense strand to SEQ ID NO: 2344606
ugguuccuagaauucaaca

SEQ ID NO: 2344608 - RNA, 19 nt, Artificial Sequence
  Description of Artificial Sequence: Synthetic oligonucleotide
  Sense strand starting at position 52 of SEQ ID NO: 1885468
aacauuaugcaucggucaa

SEQ ID NO: 2344609 - RNA, 19 nt, Artificial Sequence
  Description of Artificial Sequence: Synthetic oligonucleotide
  Antisense strand to SEQ ID NO: 2344608
uugaccgaugcauaauguu

SEQ ID NO: 2344610 - RNA, 19 nt, Artificial Sequence
  Description of Artificial Sequence: Synthetic oligonucleotide
  Sense strand starting at position 54 of SEQ ID NO: 1885468
cauuaugcaucggucaacu

SEQ ID NO: 2344611 - RNA, 19 nt, Artificial Sequence
  Description of Artificial Sequence: Synthetic oligonucleotide
  Antisense strand to SEQ ID NO: 2344610
aguugaccgaugcauaaug

SEQ ID NO: 2344612 - RNA, 19 nt, Artificial Sequence
  Description of Artificial Sequence: Synthetic oligonucleotide
  Sense strand starting at position 123 of SEQ ID NO: 1885468
ucuguacaguuguccaauu

SEQ ID NO: 2344613 - RNA, 19 nt, Artificial Sequence
  Description of Artificial Sequence: Synthetic oligonucleotide
  Antisense strand to SEQ ID NO: 2344612
aauuggacaacuguacaga

SEQ ID NO: 2344614 - RNA, 19 nt, Artificial Sequence
  Description of Artificial Sequence: Synthetic oligonucleotide
  Sense strand starting at position 125 of SEQ ID NO: 1885468
uguacaguuguccaauugu

SEQ ID NO: 2344615 - RNA, 19 nt, Artificial Sequence
  Description of Artificial Sequence: Synthetic oligonucleotide
  Antisense strand to SEQ ID NO: 2344614
acaauuggacaacuguaca

SEQ ID NO: 2344616 - RNA, 19 nt, Artificial Sequence
  Description of Artificial Sequence: Synthetic oligonucleotide
  Sense strand starting at position 192 of SEQ ID NO: 1885468
augucuuagcauuauuaug

SEQ ID NO: 2344617 - RNA, 19 nt, Artificial Sequence
  Description of Artificial Sequence: Synthetic oligonucleotide
  Antisense strand to SEQ ID NO: 2344616
cauaauaaugcuaagacau

SEQ ID NO: 2344618 - RNA, 19 nt, Artificial Sequence
  Description of Artificial Sequence: Synthetic oligonucleotide
  Sense strand starting at position 724 of SEQ ID NO: 1885468
cuucuauaaucaguguuaa

SEQ ID NO: 2344619 - RNA, 19 nt, Artificial Sequence
  Description of Artificial Sequence: Synthetic oligonucleotide
  Antisense strand to SEQ ID NO: 2344618
uuaacacugauuauagaag

SEQ ID NO: 2344620 - RNA, 19 nt, Artificial Sequence
  Description of Artificial Sequence: Synthetic oligonucleotide
  Sense strand starting at position 725 of SEQ ID NO: 1885468
uucuauaaucaguguuaac

SEQ ID NO: 2344621 - RNA, 19 nt, Artificial Sequence
  Description of Artificial Sequence: Synthetic oligonucleotide
  Antisense strand to SEQ ID NO: 2344620
guuaacacugauuauagaa

SEQ ID NO: 2344622 - RNA, 19 nt, Artificial Sequence
  Description of Artificial Sequence: Synthetic oligonucleotide
  Sense strand starting at position 782 of SEQ ID NO: 1885468
uguguugaucuacgaauca

SEQ ID NO: 2344623 - RNA, 19 nt, Artificial Sequence
  Description of Artificial Sequence: Synthetic oligonucleotide
  Antisense strand to SEQ ID NO: 2344622
ugauucguagaucaacaca

SEQ ID NO: 2344624 - RNA, 19 nt, Artificial Sequence
  Description of Artificial Sequence: Synthetic oligonucleotide
  Sense strand starting at position 820 of SEQ ID NO: 1885468
ggcacuuaugagcacugaa

SEQ ID NO: 2344625 - RNA, 19 nt, Artificial Sequence
  Description of Artificial Sequence: Synthetic oligonucleotide
  Antisense strand to SEQ ID NO: 2344624
uucagugcucauaagugcc

SEQ ID NO: 2344626 - RNA, 19 nt, Artificial Sequence
  Description of Artificial Sequence: Synthetic oligonucleotide
  Sense strand starting at position 853 of SEQ ID NO: 1885468
uuuaguacuccauagccua

SEQ ID NO: 2344627 - RNA, 19 nt, Artificial Sequence
  Description of Artificial Sequence: Synthetic oligonucleotide
  Antisense strand to SEQ ID NO: 2344626
uaggcuauggaguacuaaa

SEQ ID NO: 2344628 - RNA, 19 nt, Artificial Sequence
  Description of Artificial Sequence: Synthetic oligonucleotide
  Sense strand starting at position 988 of SEQ ID NO: 1885468
ccaucuaaucaggguaauu

SEQ ID NO: 2344629 - RNA, 19 nt, Artificial Sequence
  Description of Artificial Sequence: Synthetic oligonucleotide
  Antisense strand to SEQ ID NO: 2344628
aauuacccugauuagaugg

SEQ ID NO: 2344630 - RNA, 19 nt, Artificial Sequence
  Description of Artificial Sequence: Synthetic oligonucleotide
  Sense strand starting at position 1080 of SEQ ID NO: 1885468
ugaaguuaacauuaucguu

SEQ ID NO: 2344631 - RNA, 19 nt, Artificial Sequence
  Description of Artificial Sequence: Synthetic oligonucleotide
  Antisense strand to SEQ ID NO: 2344630
aacgauaauguuaacuuca

SEQ ID NO: 2344632 - RNA, 19 nt, Artificial Sequence
  Description of Artificial Sequence: Synthetic oligonucleotide
  Sense strand starting at position 1082 of SEQ ID NO: 1885468
aaguuaacauuaucguuga

SEQ ID NO: 2344633 - RNA, 19 nt, Artificial Sequence
  Description of Artificial Sequence: Synthetic oligonucleotide
  Antisense strand to SEQ ID NO: 2344632
ucaacgauaauguuaacuu

SEQ ID NO: 2344634 - RNA, 19 nt, Artificial Sequence
  Description of Artificial Sequence: Synthetic oligonucleotide
  Sense strand starting at position 1085 of SEQ ID NO: 1885468
uuaacauuaucguugagua

SEQ ID NO: 2344635 - RNA, 19 nt, Artificial Sequence
  Description of Artificial Sequence: Synthetic oligonucleotide
  Antisense strand to SEQ ID NO: 2344634
uacucaacgauaauguuaa

SEQ ID NO: 2344636 - RNA, 19 nt, Artificial Sequence
  Description of Artificial Sequence: Synthetic oligonucleotide
  Sense strand starting at position 1086 of SEQ ID NO: 1885468
uaacauuaucguugaguau

SEQ ID NO: 2344637 - RNA, 19 nt, Artificial Sequence
  Description of Artificial Sequence: Synthetic oligonucleotide
  Antisense strand to SEQ ID NO: 2344636
auacucaacgauaauguua

SEQ ID NO: 2344638 - RNA, 19 nt, Artificial Sequence
  Description of Artificial Sequence: Synthetic oligonucleotide
  Sense strand starting at position 1087 of SEQ ID NO: 1885468
aacauuaucguugaguaua

SEQ ID NO: 2344639 - RNA, 19 nt, Artificial Sequence
  Description of Artificial Sequence: Synthetic oligonucleotide
  Antisense strand to SEQ ID NO: 2344638
uauacucaacgauaauguu

SEQ ID NO: 2344640 - RNA, 19 nt, Artificial Sequence
  Description of Artificial Sequence: Synthetic oligonucleotide
  Sense strand starting at position 1089 of SEQ ID NO: 1885468
cauuaucguugaguauagu

SEQ ID NO: 2344641 - RNA, 19 nt, Artificial Sequence
  Description of Artificial Sequence: Synthetic oligonucleotide
  Antisense strand to SEQ ID NO: 2344640
acuauacucaacgauaaug

SEQ ID NO: 2344642 - RNA, 19 nt, Artificial Sequence
  Description of Artificial Sequence: Synthetic oligonucleotide
  Sense strand starting at position 1092 of SEQ ID NO: 1885468
uaucguugaguauagucau

SEQ ID NO: 2344643 - RNA, 19 nt, Artificial Sequence
  Description of Artificial Sequence: Synthetic oligonucleotide
  Antisense strand to SEQ ID NO: 2344642
augacuauacucaacgaua

SEQ ID NO: 2344644 - RNA, 19 nt, Artificial Sequence
  Description of Artificial Sequence: Synthetic oligonucleotide
  Sense strand starting at position 1095 of SEQ ID NO: 1885468
cguugaguauagucaucca

SEQ ID NO: 2344645 - RNA, 19 nt, Artificial Sequence
  Description of Artificial Sequence: Synthetic oligonucleotide
  Antisense strand to SEQ ID NO: 2344644
uggaugacuauacucaacg

SEQ ID NO: 2344646 - RNA, 19 nt, Artificial Sequence
  Description of Artificial Sequence: Synthetic oligonucleotide
  Sense strand starting at position 1098 of SEQ ID NO: 1885468
ugaguauagucauccaaac

SEQ ID NO: 2344647 - RNA, 19 nt, Artificial Sequence
  Description of Artificial Sequence: Synthetic oligonucleotide
  Antisense strand to SEQ ID NO: 2344646
guuuggaugacuauacuca

SEQ ID NO: 2344648 - RNA, 19 nt, Artificial Sequence
  Description of Artificial Sequence: Synthetic oligonucleotide
  Sense strand starting at position 1100 of SEQ ID NO: 1885468
aguauagucauccaaacgu

SEQ ID NO: 2344649 - RNA, 19 nt, Artificial Sequence
  Description of Artificial Sequence: Synthetic oligonucleotide
  Antisense strand to SEQ ID NO: 2344648
acguuuggaugacuauacu

SEQ ID NO: 2344650 - RNA, 19 nt, Artificial Sequence
  Description of Artificial Sequence: Synthetic oligonucleotide
  Sense strand starting at position 1111 of SEQ ID NO: 1885468
ccaaacgugcaagagaaua

SEQ ID NO: 2344651 - RNA, 19 nt, Artificial Sequence
  Description of Artificial Sequence: Synthetic oligonucleotide
  Antisense strand to SEQ ID NO: 2344650
uauucucuugcacguuugg

SEQ ID NO: 2344652 - RNA, 19 nt, Artificial Sequence
  Description of Artificial Sequence: Synthetic oligonucleotide
  Sense strand starting at position 1152 of SEQ ID NO: 1885468
auaacuuugugucuguuga

SEQ ID NO: 2344653 - RNA, 19 nt, Artificial Sequence
  Description of Artificial Sequence: Synthetic oligonucleotide
  Antisense strand to SEQ ID NO: 2344652
ucaacagacacaaaguuau

SEQ ID NO: 2344654 - RNA, 19 nt, Artificial Sequence
  Description of Artificial Sequence: Synthetic oligonucleotide
  Sense strand starting at position 2870 of SEQ ID NO: 1885468
aauugacuuucgguaaggu

SEQ ID NO: 2344655 - RNA, 19 nt, Artificial Sequence
  Description of Artificial Sequence: Synthetic oligonucleotide
  Antisense strand to SEQ ID NO: 2344654
accuuaccgaaagucaauu

SEQ ID NO: 2344656 - RNA, 19 nt, Artificial Sequence
  Description of Artificial Sequence: Synthetic oligonucleotide
  Sense strand starting at position 2871 of SEQ ID NO: 1885468
auugacuuucgguaaggua

SEQ ID NO: 2344657 - RNA, 19 nt, Artificial Sequence
  Description of Artificial Sequence: Synthetic oligonucleotide
  Antisense strand to SEQ ID NO: 2344656
uaccuuaccgaaagucaau

SEQ ID NO: 2344658 - RNA, 19 nt, Artificial Sequence
  Description of Artificial Sequence: Synthetic oligonucleotide
  Sense strand starting at position 2884 of SEQ ID NO: 1885468
aagguagacugcguguuaa

SEQ ID NO: 2344659 - RNA, 19 nt, Artificial Sequence
  Description of Artificial Sequence: Synthetic oligonucleotide
  Antisense strand to SEQ ID NO: 2344658
uuaacacgcagucuaccuu

SEQ ID NO: 2344660 - RNA, 19 nt, Artificial Sequence
  Description of Artificial Sequence: Synthetic oligonucleotide
  Sense strand starting at position 2894 of SEQ ID NO: 1885468
gcguguuaacaguuaggca

SEQ ID NO: 2344661 - RNA, 19 nt, Artificial Sequence
  Description of Artificial Sequence: Synthetic oligonucleotide
  Antisense strand to SEQ ID NO: 2344660
ugccuaacuguuaacacgc

SEQ ID NO: 2344662 - RNA, 19 nt, Artificial Sequence
  Description of Artificial Sequence: Synthetic oligonucleotide
  Sense strand starting at position 3353 of SEQ ID NO: 1885468
ugucaugaaucuucugaga

SEQ ID NO: 2344663 - RNA, 19 nt, Artificial Sequence
  Description of Artificial Sequence: Synthetic oligonucleotide
  Antisense strand to SEQ ID NO: 2344662
ucucagaagauucaugaca

SEQ ID NO: 2344664 - RNA, 19 nt, Artificial Sequence
  Description of Artificial Sequence: Synthetic oligonucleotide
  Sense strand starting at position 3374 of SEQ ID NO: 1885468
gugugucucgucuuauagu

SEQ ID NO: 2344665 - RNA, 19 nt, Artificial Sequence
  Description of Artificial Sequence: Synthetic oligonucleotide
  Antisense strand to SEQ ID NO: 2344664
acuauaagacgagacacac

SEQ ID NO: 2344666 - RNA, 19 nt, Artificial Sequence
  Description of Artificial Sequence: Synthetic oligonucleotide
  Sense strand starting at position 3380 of SEQ ID NO: 1885468
cucgucuuauagucugaca

SEQ ID NO: 2344667 - RNA, 19 nt, Artificial Sequence
  Description of Artificial Sequence: Synthetic oligonucleotide
  Antisense strand to SEQ ID NO: 2344666
ugucagacuauaagacgag

SEQ ID NO: 2344668 - RNA, 19 nt, Artificial Sequence
  Description of Artificial Sequence: Synthetic oligonucleotide
  Sense strand starting at position 3388 of SEQ ID NO: 1885468
auagucugacagugaguua

SEQ ID NO: 2344669 - RNA, 19 nt, Artificial Sequence
  Description of Artificial Sequence: Synthetic oligonucleotide
  Antisense strand to SEQ ID NO: 2344668
uaacucacugucagacuau

SEQ ID NO: 2344670 - RNA, 19 nt, Artificial Sequence
  Description of Artificial Sequence: Synthetic oligonucleotide
  Sense strand starting at position 3391 of SEQ ID NO: 1885468
gucugacagugaguuagua

SEQ ID NO: 2344671 - RNA, 19 nt, Artificial Sequence
  Description of Artificial Sequence: Synthetic oligonucleotide
  Antisense strand to SEQ ID NO: 2344670
uacuaacucacugucagac

SEQ ID NO: 2344672 - RNA, 19 nt, Artificial Sequence
  Description of Artificial Sequence: Synthetic oligonucleotide
  Sense strand starting at position 3393 of SEQ ID NO: 1885468
cugacagugaguuaguauc

SEQ ID NO: 2344673 - RNA, 19 nt, Artificial Sequence
  Description of Artificial Sequence: Synthetic oligonucleotide
  Antisense strand to SEQ ID NO: 2344672
gauacuaacucacugucag

SEQ ID NO: 2344674 - RNA, 19 nt, Artificial Sequence
  Description of Artificial Sequence: Synthetic oligonucleotide
  Sense strand starting at position 3529 of SEQ ID NO: 1885468
uggauuggucccggaguau

SEQ ID NO: 2344675 - RNA, 19 nt, Artificial Sequence
  Description of Artificial Sequence: Synthetic oligonucleotide
  Antisense strand to SEQ ID NO: 2344674
auacuccgggaccaaucca

SEQ ID NO: 2344676 - RNA, 19 nt, Artificial Sequence
  Description of Artificial Sequence: Synthetic oligonucleotide
  Sense strand starting at position 3530 of SEQ ID NO: 1885468
ggauuggucccggaguaug

SEQ ID NO: 2344677 - RNA, 19 nt, Artificial Sequence
  Description of Artificial Sequence: Synthetic oligonucleotide
  Antisense strand to SEQ ID NO: 2344676
cauacuccgggaccaaucc

SEQ ID NO: 2344678 - RNA, 19 nt, Artificial Sequence
  Description of Artificial Sequence: Synthetic oligonucleotide
  Sense strand starting at position 3774 of SEQ ID NO: 1885468
agagaaaucuuauugguug

SEQ ID NO: 2344679 - RNA, 19 nt, Artificial Sequence
  Description of Artificial Sequence: Synthetic oligonucleotide
  Antisense strand to SEQ ID NO: 2344678
caaccaauaagauuucucu

SEQ ID NO: 2344680 - RNA, 19 nt, Artificial Sequence
  Description of Artificial Sequence: Synthetic oligonucleotide
  Sense strand starting at position 3779 of SEQ ID NO: 1885468
aaucuuauugguugcugua

SEQ ID NO: 2344681 - RNA, 19 nt, Artificial Sequence
  Description of Artificial Sequence: Synthetic oligonucleotide
  Antisense strand to SEQ ID NO: 2344680
uacagcaaccaauaagauu

SEQ ID NO: 2344682 - RNA, 19 nt, Artificial Sequence
  Description of Artificial Sequence: Synthetic oligonucleotide
  Sense strand starting at position 3798 of SEQ ID NO: 1885468
cuguauuagccaugagauu

SEQ ID NO: 2344683 - RNA, 19 nt, Artificial Sequence
  Description of Artificial Sequence: Synthetic oligonucleotide
  Antisense strand to SEQ ID NO: 2344682
aaucucauggcuaauacag

SEQ ID NO: 2344684 - RNA, 19 nt, Artificial Sequence
  Description of Artificial Sequence: Synthetic oligonucleotide
  Sense strand starting at position 3799 of SEQ ID NO: 1885468
uguauuagccaugagauua

SEQ ID NO: 2344685 - RNA, 19 nt, Artificial Sequence
  Description of Artificial Sequence: Synthetic oligonucleotide
  Antisense strand to SEQ ID NO: 2344684
uaaucucauggcuaauaca

SEQ ID NO: 2344686 - RNA, 19 nt, Artificial Sequence
  Description of Artificial Sequence: Synthetic oligonucleotide
  Sense strand starting at position 3900 of SEQ ID NO: 1885468
uguugaauucuaggaacca

SEQ ID NO: 2344687 - RNA, 19 nt, Artificial Sequence
  Description of Artificial Sequence: Synthetic oligonucleotide
  Antisense strand to SEQ ID NO: 2344686
ugguuccuagaauucaaca

SEQ ID NO: 2344688 - RNA, 19 nt, Artificial Sequence
  Description of Artificial Sequence: Synthetic oligonucleotide
  Sense strand starting at position 78 of SEQ ID NO: 1885470
ucgaguacauuugcauauu

SEQ ID NO: 2344689 - RNA, 19 nt, Artificial Sequence
  Description of Artificial Sequence: Synthetic oligonucleotide
  Antisense strand to SEQ ID NO: 2344688
aauaugcaaauguacucga

SEQ ID NO: 2344690 - RNA, 19 nt, Artificial Sequence
  Description of Artificial Sequence: Synthetic oligonucleotide
  Sense strand starting at position 265 of SEQ ID NO: 1885470
cggauuuauccauguagug

SEQ ID NO: 2344691 - RNA, 19 nt, Artificial Sequence
  Description of Artificial Sequence: Synthetic oligonucleotide
  Antisense strand to SEQ ID NO: 2344690
cacuacauggauaaauccg

SEQ ID NO: 2344692 - RNA, 19 nt, Artificial Sequence
  Description of Artificial Sequence: Synthetic oligonucleotide
  Sense strand starting at position 289 of SEQ ID NO: 1885470
uuuacauugguguaaagau

SEQ ID NO: 2344693 - RNA, 19 nt, Artificial Sequence
  Description of Artificial Sequence: Synthetic oligonucleotide
  Antisense strand to SEQ ID NO: 2344692
aucuuuacaccaauguaaa

SEQ ID NO: 2344694 - RNA, 19 nt, Artificial Sequence
  Description of Artificial Sequence: Synthetic oligonucleotide
  Sense strand starting at position 501 of SEQ ID NO: 1885470
gucagcuauguacagauaa

SEQ ID NO: 2344695 - RNA, 19 nt, Artificial Sequence
  Description of Artificial Sequence: Synthetic oligonucleotide
  Antisense strand to SEQ ID NO: 2344694
uuaucuguacauagcugac

SEQ ID NO: 2344696 - RNA, 19 nt, Artificial Sequence
  Description of Artificial Sequence: Synthetic oligonucleotide
  Sense strand starting at position 597 of SEQ ID NO: 1885470
ggguguuugcaugagaaug

SEQ ID NO: 2344697 - RNA, 19 nt, Artificial Sequence
  Description of Artificial Sequence: Synthetic oligonucleotide
  Antisense strand to SEQ ID NO: 2344696
cauucucaugcaaacaccc

SEQ ID NO: 2344698 - RNA, 19 nt, Artificial Sequence
  Description of Artificial Sequence: Synthetic oligonucleotide
  Sense strand starting at position 719 of SEQ ID NO: 1885470
ugaaacguuguagaugaga

SEQ ID NO: 2344699 - RNA, 19 nt, Artificial Sequence
  Description of Artificial Sequence: Synthetic oligonucleotide
  Antisense strand to SEQ ID NO: 2344698
ucucaucuacaacguuuca

SEQ ID NO: 2344700 - RNA, 19 nt, Artificial Sequence
  Description of Artificial Sequence: Synthetic oligonucleotide
  Sense strand starting at position 918 of SEQ ID NO: 1885470
gguuguacggaucauggau

SEQ ID NO: 2344701 - RNA, 19 nt, Artificial Sequence
  Description of Artificial Sequence: Synthetic oligonucleotide
  Antisense strand to SEQ ID NO: 2344700
auccaugauccguacaacc

SEQ ID NO: 2344702 - RNA, 19 nt, Artificial Sequence
  Description of Artificial Sequence: Synthetic oligonucleotide
  Sense strand starting at position 925 of SEQ ID NO: 1885470
cggaucauggauugguaaa

SEQ ID NO: 2344703 - RNA, 19 nt, Artificial Sequence
  Description of Artificial Sequence: Synthetic oligonucleotide
  Antisense strand to SEQ ID NO: 2344702
uuuaccaauccaugauccg

SEQ ID NO: 2344704 - RNA, 19 nt, Artificial Sequence
  Description of Artificial Sequence: Synthetic oligonucleotide
  Sense strand starting at position 927 of SEQ ID NO: 1885470
gaucauggauugguaaauc

SEQ ID NO: 2344705 - RNA, 19 nt, Artificial Sequence
  Description of Artificial Sequence: Synthetic oligonucleotide
  Antisense strand to SEQ ID NO: 2344704
gauuuaccaauccaugauc

SEQ ID NO: 2344706 - RNA, 19 nt, Artificial Sequence
  Description of Artificial Sequence: Synthetic oligonucleotide
  Sense strand starting at position 946 of SEQ ID NO: 1885470
auugaaauuuaucagucag

SEQ ID NO: 2344707 - RNA, 19 nt, Artificial Sequence
  Description of Artificial Sequence: Synthetic oligonucleotide
  Antisense strand to SEQ ID NO: 2344706
cugacugauaaauuucaau

SEQ ID NO: 2344708 - RNA, 19 nt, Artificial Sequence
  Description of Artificial Sequence: Synthetic oligonucleotide
  Sense strand starting at position 978 of SEQ ID NO: 1885470
gguacuaauuaauuaugca

SEQ ID NO: 2344709 - RNA, 19 nt, Artificial Sequence
  Description of Artificial Sequence: Synthetic oligonucleotide
  Antisense strand to SEQ ID NO: 2344708
ugcauaauuaauuaguacc

SEQ ID NO: 2344710 - RNA, 19 nt, Artificial Sequence
  Description of Artificial Sequence: Synthetic oligonucleotide
  Sense strand starting at position 1047 of SEQ ID NO: 1885470
cugcaauaaccucaagagu

SEQ ID NO: 2344711 - RNA, 19 nt, Artificial Sequence
  Description of Artificial Sequence: Synthetic oligonucleotide
  Antisense strand to SEQ ID NO: 2344710
acucuugagguuauugcag

SEQ ID NO: 2344712 - RNA, 19 nt, Artificial Sequence
  Description of Artificial Sequence: Synthetic oligonucleotide
  Sense strand starting at position 1304 of SEQ ID NO: 1885470
gauggaaugucuuccuuaa

SEQ ID NO: 2344713 - RNA, 19 nt, Artificial Sequence
  Description of Artificial Sequence: Synthetic oligonucleotide
  Antisense strand to SEQ ID NO: 2344712
uuaaggaagacauuccauc

SEQ ID NO: 2344714 - RNA, 19 nt, Artificial Sequence
  Description of Artificial Sequence: Synthetic oligonucleotide
  Sense strand starting at position 2125 of SEQ ID NO: 1885470
uuugguaauuugcuaccau

SEQ ID NO: 2344715 - RNA, 19 nt, Artificial Sequence
  Description of Artificial Sequence: Synthetic oligonucleotide
  Antisense strand to SEQ ID NO: 2344714
augguagcaaauuaccaaa

SEQ ID NO: 2344716 - RNA, 19 nt, Artificial Sequence
  Description of Artificial Sequence: Synthetic oligonucleotide
  Sense strand starting at position 2302 of SEQ ID NO: 1885470
cgcgcucuaaaguuucuaa

SEQ ID NO: 2344717 - RNA, 19 nt, Artificial Sequence
  Description of Artificial Sequence: Synthetic oligonucleotide
  Antisense strand to SEQ ID NO: 2344716
uuagaaacuuuagagcgcg

SEQ ID NO: 2344718 - RNA, 19 nt, Artificial Sequence
  Description of Artificial Sequence: Synthetic oligonucleotide
  Sense strand starting at position 2357 of SEQ ID NO: 1885470
agaagcaggaauuguaaca

SEQ ID NO: 2344719 - RNA, 19 nt, Artificial Sequence
  Description of Artificial Sequence: Synthetic oligonucleotide
  Antisense strand to SEQ ID NO: 2344718
uguuacaauuccugcuucu

SEQ ID NO: 2344720 - RNA, 19 nt, Artificial Sequence
  Description of Artificial Sequence: Synthetic oligonucleotide
  Sense strand starting at position 2461 of SEQ ID NO: 1885470
uuuacuuuccgauacugau

SEQ ID NO: 2344721 - RNA, 19 nt, Artificial Sequence
  Description of Artificial Sequence: Synthetic oligonucleotide
  Antisense strand to SEQ ID NO: 2344720
aucaguaucggaaaguaaa

SEQ ID NO: 2344722 - RNA, 19 nt, Artificial Sequence
  Description of Artificial Sequence: Synthetic oligonucleotide
  Sense strand starting at position 2498 of SEQ ID NO: 1885470
gguuaaguaagagagcuau

SEQ ID NO: 2344723 - RNA, 19 nt, Artificial Sequence
  Description of Artificial Sequence: Synthetic oligonucleotide
  Antisense strand to SEQ ID NO: 2344722
auagcucucuuacuuaacc

SEQ ID NO: 2344724 - RNA, 19 nt, Artificial Sequence
  Description of Artificial Sequence: Synthetic oligonucleotide
  Sense strand starting at position 2509 of SEQ ID NO: 1885470
agagcuaucaaguacgaau

SEQ ID NO: 2344725 - RNA, 19 nt, Artificial Sequence
  Description of Artificial Sequence: Synthetic oligonucleotide
  Antisense strand to SEQ ID NO: 2344724
auucguacuugauagcucu

SEQ ID NO: 2344726 - RNA, 19 nt, Artificial Sequence
  Description of Artificial Sequence: Synthetic oligonucleotide
  Sense strand starting at position 2523 of SEQ ID NO: 1885470
cgaauuaucuaugccaaga

SEQ ID NO: 2344727 - RNA, 19 nt, Artificial Sequence
  Description of Artificial Sequence: Synthetic oligonucleotide
  Antisense strand to SEQ ID NO: 2344726
ucuuggcauagauaauucg

SEQ ID NO: 2344728 - RNA, 19 nt, Artificial Sequence
  Description of Artificial Sequence: Synthetic oligonucleotide
  Sense strand starting at position 2585 of SEQ ID NO: 1885470
gggaacguggcgucuaguu

SEQ ID NO: 2344729 - RNA, 19 nt, Artificial Sequence
  Description of Artificial Sequence: Synthetic oligonucleotide
  Antisense strand to SEQ ID NO: 2344728
aacuagacgccacguuccc

SEQ ID NO: 2344730 - RNA, 19 nt, Artificial Sequence
  Description of Artificial Sequence: Synthetic oligonucleotide
  Sense strand starting at position 2786 of SEQ ID NO: 1885470
gucaacucucuaggaucua

SEQ ID NO: 2344731 - RNA, 19 nt, Artificial Sequence
  Description of Artificial Sequence: Synthetic oligonucleotide
  Antisense strand to SEQ ID NO: 2344730
uagauccuagagaguugac

SEQ ID NO: 2344732 - RNA, 19 nt, Artificial Sequence
  Description of Artificial Sequence: Synthetic oligonucleotide
  Sense strand starting at position 2803 of SEQ ID NO: 1885470
uaacauccuguguagugau

SEQ ID NO: 2344733 - RNA, 19 nt, Artificial Sequence
  Description of Artificial Sequence: Synthetic oligonucleotide
  Antisense strand to SEQ ID NO: 2344732
aucacuacacaggauguua

SEQ ID NO: 2344734 - RNA, 19 nt, Artificial Sequence
  Description of Artificial Sequence: Synthetic oligonucleotide
  Sense strand starting at position 2810 of SEQ ID NO: 1885470
cuguguagugaugacggaa

SEQ ID NO: 2344735 - RNA, 19 nt, Artificial Sequence
  Description of Artificial Sequence: Synthetic oligonucleotide
  Antisense strand to SEQ ID NO: 2344734
uuccgucaucacuacacag

SEQ ID NO: 2344736 - RNA, 19 nt, Artificial Sequence
  Description of Artificial Sequence: Synthetic oligonucleotide
  Sense strand starting at position 2813 of SEQ ID NO: 1885470
uguagugaugacggaagaa

SEQ ID NO: 2344737 - RNA, 19 nt, Artificial Sequence
  Description of Artificial Sequence: Synthetic oligonucleotide
  Antisense strand to SEQ ID NO: 2344736
uucuuccgucaucacuaca

SEQ ID NO: 2344738 - RNA, 19 nt, Artificial Sequence
  Description of Artificial Sequence: Synthetic oligonucleotide
  Sense strand starting at position 2861 of SEQ ID NO: 1885470
aaaccucuguguuuggaaa

SEQ ID NO: 2344739 - RNA, 19 nt, Artificial Sequence
  Description of Artificial Sequence: Synthetic oligonucleotide
  Antisense strand to SEQ ID NO: 2344738
uuuccaaacacagagguuu

SEQ ID NO: 2344740 - RNA, 19 nt, Artificial Sequence
  Description of Artificial Sequence: Synthetic oligonucleotide
  Sense strand starting at position 2971 of SEQ ID NO: 1885470
ggcaaucuaguugaucuuu

SEQ ID NO: 2344741 - RNA, 19 nt, Artificial Sequence
  Description of Artificial Sequence: Synthetic oligonucleotide
  Antisense strand to SEQ ID NO: 2344740
aaagaucaacuagauugcc

SEQ ID NO: 2344742 - RNA, 19 nt, Artificial Sequence
  Description of Artificial Sequence: Synthetic oligonucleotide
  Sense strand starting at position 2976 of SEQ ID NO: 1885470
ucuaguugaucuuuagaau

SEQ ID NO: 2344743 - RNA, 19 nt, Artificial Sequence
  Description of Artificial Sequence: Synthetic oligonucleotide
  Antisense strand to SEQ ID NO: 2344742
auucuaaagaucaacuaga

SEQ ID NO: 2344744 - RNA, 19 nt, Artificial Sequence
  Description of Artificial Sequence: Synthetic oligonucleotide
  Sense strand starting at position 2982 of SEQ ID NO: 1885470
ugaucuuuagaauaugcau

SEQ ID NO: 2344745 - RNA, 19 nt, Artificial Sequence
  Description of Artificial Sequence: Synthetic oligonucleotide
  Antisense strand to SEQ ID NO: 2344744
augcauauucuaaagauca

SEQ ID NO: 2344746 - RNA, 19 nt, Artificial Sequence
  Description of Artificial Sequence: Synthetic oligonucleotide
  Sense strand starting at position 2996 of SEQ ID NO: 1885470
ugcaucagauucuuaagga

SEQ ID NO: 2344747 - RNA, 19 nt, Artificial Sequence
  Description of Artificial Sequence: Synthetic oligonucleotide
  Antisense strand to SEQ ID NO: 2344746
uccuuaagaaucugaugca

SEQ ID NO: 2344748 - RNA, 19 nt, Artificial Sequence
  Description of Artificial Sequence: Synthetic oligonucleotide
  Sense strand starting at position 3034 of SEQ ID NO: 1885470
ccaggaaggaacuguagua

SEQ ID NO: 2344749 - RNA, 19 nt, Artificial Sequence
  Description of Artificial Sequence: Synthetic oligonucleotide
  Antisense strand to SEQ ID NO: 2344748
uacuacaguuccuuccugg

SEQ ID NO: 2344750 - RNA, 19 nt, Artificial Sequence
  Description of Artificial Sequence: Synthetic oligonucleotide
  Sense strand starting at position 3041 of SEQ ID NO: 1885470
ggaacuguaguagggauaa

SEQ ID NO: 2344751 - RNA, 19 nt, Artificial Sequence
  Description of Artificial Sequence: Synthetic oligonucleotide
  Antisense strand to SEQ ID NO: 2344750
uuaucccuacuacaguucc

SEQ ID NO: 2344752 - RNA, 19 nt, Artificial Sequence
  Description of Artificial Sequence: Synthetic oligonucleotide
  Sense strand starting at position 3144 of SEQ ID NO: 1885470
ugaguaggcaaguaagacu

SEQ ID NO: 2344753 - RNA, 19 nt, Artificial Sequence
  Description of Artificial Sequence: Synthetic oligonucleotide
  Antisense strand to SEQ ID NO: 2344752
agucuuacuugccuacuca

SEQ ID NO: 2344754 - RNA, 19 nt, Artificial Sequence
  Description of Artificial Sequence: Synthetic oligonucleotide
  Sense strand starting at position 3202 of SEQ ID NO: 1885470
auggucuuaccauauaugu

SEQ ID NO: 2344755 - RNA, 19 nt, Artificial Sequence
  Description of Artificial Sequence: Synthetic oligonucleotide
  Antisense strand to SEQ ID NO: 2344754
acauauaugguaagaccau

SEQ ID NO: 2344756 - RNA, 19 nt, Artificial Sequence
  Description of Artificial Sequence: Synthetic oligonucleotide
  Sense strand starting at position 3228 of SEQ ID NO: 1885470
gccaaauauugauugacag

SEQ ID NO: 2344757 - RNA, 19 nt, Artificial Sequence
  Description of Artificial Sequence: Synthetic oligonucleotide
  Antisense strand to SEQ ID NO: 2344756
cugucaaucaauauuuggc

SEQ ID NO: 2344758 - RNA, 19 nt, Artificial Sequence
  Description of Artificial Sequence: Synthetic oligonucleotide
  Sense strand starting at position 3268 of SEQ ID NO: 1885470
gccuuaauagcugaaacua

SEQ ID NO: 2344759 - RNA, 19 nt, Artificial Sequence
  Description of Artificial Sequence: Synthetic oligonucleotide
  Antisense strand to SEQ ID NO: 2344758
uaguuucagcuauuaaggc

SEQ ID NO: 2344760 - RNA, 19 nt, Artificial Sequence
  Description of Artificial Sequence: Synthetic oligonucleotide
  Sense strand starting at position 3446 of SEQ ID NO: 1885470
gcauccugcuauuuauagu

SEQ ID NO: 2344761 - RNA, 19 nt, Artificial Sequence
  Description of Artificial Sequence: Synthetic oligonucleotide
  Antisense strand to SEQ ID NO: 2344760
acuauaaauagcaggaugc

SEQ ID NO: 2344762 - RNA, 19 nt, Artificial Sequence
  Description of Artificial Sequence: Synthetic oligonucleotide
  Sense strand starting at position 3468 of SEQ ID NO: 1885470
guuucugcucaugaaucaa

SEQ ID NO: 2344763 - RNA, 19 nt, Artificial Sequence
  Description of Artificial Sequence: Synthetic oligonucleotide
  Antisense strand to SEQ ID NO: 2344762
uugauucaugagcagaaac

SEQ ID NO: 2344764 - RNA, 19 nt, Artificial Sequence
  Description of Artificial Sequence: Synthetic oligonucleotide
  Sense strand starting at position 3583 of SEQ ID NO: 1885470
ugacuuuaguacucagauu

SEQ ID NO: 2344765 - RNA, 19 nt, Artificial Sequence
  Description of Artificial Sequence: Synthetic oligonucleotide
  Antisense strand to SEQ ID NO: 2344764
aaucugaguacuaaaguca

SEQ ID NO: 2344766 - RNA, 19 nt, Artificial Sequence
  Description of Artificial Sequence: Synthetic oligonucleotide
  Sense strand starting at position 3746 of SEQ ID NO: 1885470
gcaugauuucugcagccuc

SEQ ID NO: 2344767 - RNA, 19 nt, Artificial Sequence
  Description of Artificial Sequence: Synthetic oligonucleotide
  Antisense strand to SEQ ID NO: 2344766
gaggcugcagaaaucaugc

SEQ ID NO: 2344768 - RNA, 19 nt, Artificial Sequence
  Description of Artificial Sequence: Synthetic oligonucleotide
  Sense strand starting at position 50 of SEQ ID NO: 1885471
aggcccuuugaucauguga

SEQ ID NO: 2344769 - RNA, 19 nt, Artificial Sequence
  Description of Artificial Sequence: Synthetic oligonucleotide
  Antisense strand to SEQ ID NO: 2344768
ucacaugaucaaagggccu

SEQ ID NO: 2344770 - RNA, 19 nt, Artificial Sequence
  Description of Artificial Sequence: Synthetic oligonucleotide
  Sense strand starting at position 57 of SEQ ID NO: 1885471
uugaucaugugauuauuag

SEQ ID NO: 2344771 - RNA, 19 nt, Artificial Sequence
  Description of Artificial Sequence: Synthetic oligonucleotide
  Antisense strand to SEQ ID NO: 2344770
cuaauaaucacaugaucaa

SEQ ID NO: 2344772 - RNA, 19 nt, Artificial Sequence
  Description of Artificial Sequence: Synthetic oligonucleotide
  Sense strand starting at position 68 of SEQ ID NO: 1885471
auuauuagagcuugauaac

SEQ ID NO: 2344773 - RNA, 19 nt, Artificial Sequence
  Description of Artificial Sequence: Synthetic oligonucleotide
  Antisense strand to SEQ ID NO: 2344772
guuaucaagcucuaauaau

SEQ ID NO: 2344774 - RNA, 19 nt, Artificial Sequence
  Description of Artificial Sequence: Synthetic oligonucleotide
  Sense strand starting at position 69 of SEQ ID NO: 1885471
uuauuagagcuugauaacu

SEQ ID NO: 2344775 - RNA, 19 nt, Artificial Sequence
  Description of Artificial Sequence: Synthetic oligonucleotide
  Antisense strand to SEQ ID NO: 2344774
aguuaucaagcucuaauaa

SEQ ID NO: 2344776 - RNA, 19 nt, Artificial Sequence
  Description of Artificial Sequence: Synthetic oligonucleotide
  Sense strand starting at position 78 of SEQ ID NO: 1885471
cuugauaacugguuguaca

SEQ ID NO: 2344777 - RNA, 19 nt, Artificial Sequence
  Description of Artificial Sequence: Synthetic oligonucleotide
  Antisense strand to SEQ ID NO: 2344776
uguacaaccaguuaucaag

SEQ ID NO: 2344778 - RNA, 19 nt, Artificial Sequence
  Description of Artificial Sequence: Synthetic oligonucleotide
  Sense strand starting at position 79 of SEQ ID NO: 1885471
uugauaacugguuguacaa

SEQ ID NO: 2344779 - RNA, 19 nt, Artificial Sequence
  Description of Artificial Sequence: Synthetic oligonucleotide
  Antisense strand to SEQ ID NO: 2344778
uuguacaaccaguuaucaa

SEQ ID NO: 2344780 - RNA, 19 nt, Artificial Sequence
  Description of Artificial Sequence: Synthetic oligonucleotide
  Sense strand starting at position 128 of SEQ ID NO: 1885471
uucugacuucuccauuagu

SEQ ID NO: 2344781 - RNA, 19 nt, Artificial Sequence
  Description of Artificial Sequence: Synthetic oligonucleotide
  Antisense strand to SEQ ID NO: 2344780
acuaauggagaagucagaa

SEQ ID NO: 2344782 - RNA, 19 nt, Artificial Sequence
  Description of Artificial Sequence: Synthetic oligonucleotide
  Sense strand starting at position 131 of SEQ ID NO: 1885471
ugacuucuccauuaguguu

SEQ ID NO: 2344783 - RNA, 19 nt, Artificial Sequence
  Description of Artificial Sequence: Synthetic oligonucleotide
  Antisense strand to SEQ ID NO: 2344782
aacacuaauggagaaguca

SEQ ID NO: 2344784 - RNA, 19 nt, Artificial Sequence
  Description of Artificial Sequence: Synthetic oligonucleotide
  Sense strand starting at position 326 of SEQ ID NO: 1885471
uuaacuuugaugggauagu

SEQ ID NO: 2344785 - RNA, 19 nt, Artificial Sequence
  Description of Artificial Sequence: Synthetic oligonucleotide
  Antisense strand to SEQ ID NO: 2344784
acuaucccaucaaaguuaa

SEQ ID NO: 2344786 - RNA, 19 nt, Artificial Sequence
  Description of Artificial Sequence: Synthetic oligonucleotide
  Sense strand starting at position 385 of SEQ ID NO: 1885471
ugugaacauuuacagauca

SEQ ID NO: 2344787 - RNA, 19 nt, Artificial Sequence
  Description of Artificial Sequence: Synthetic oligonucleotide
  Antisense strand to SEQ ID NO: 2344786
ugaucuguaaauguucaca

SEQ ID NO: 2344788 - RNA, 19 nt, Artificial Sequence
  Description of Artificial Sequence: Synthetic oligonucleotide
  Sense strand starting at position 518 of SEQ ID NO: 1885471
cacagaaauugugucagga

SEQ ID NO: 2344789 - RNA, 19 nt, Artificial Sequence
  Description of Artificial Sequence: Synthetic oligonucleotide
  Antisense strand to SEQ ID NO: 2344788
uccugacacaauuucugug

SEQ ID NO: 2344790 - RNA, 19 nt, Artificial Sequence
  Description of Artificial Sequence: Synthetic oligonucleotide
  Sense strand starting at position 567 of SEQ ID NO: 1885471
aggaguaauagauggcauu

SEQ ID NO: 2344791 - RNA, 19 nt, Artificial Sequence
  Description of Artificial Sequence: Synthetic oligonucleotide
  Antisense strand to SEQ ID NO: 2344790
aaugccaucuauuacuccu

SEQ ID NO: 2344792 - RNA, 19 nt, Artificial Sequence
  Description of Artificial Sequence: Synthetic oligonucleotide
  Sense strand starting at position 732 of SEQ ID NO: 1885471
gagcucaaauguuuagaac

SEQ ID NO: 2344793 - RNA, 19 nt, Artificial Sequence
  Description of Artificial Sequence: Synthetic oligonucleotide
  Antisense strand to SEQ ID NO: 2344792
guucuaaacauuugagcuc

SEQ ID NO: 2344794 - RNA, 19 nt, Artificial Sequence
  Description of Artificial Sequence: Synthetic oligonucleotide
  Sense strand starting at position 733 of SEQ ID NO: 1885471
agcucaaauguuuagaaca

SEQ ID NO: 2344795 - RNA, 19 nt, Artificial Sequence
  Description of Artificial Sequence: Synthetic oligonucleotide
  Antisense strand to SEQ ID NO: 2344794
uguucuaaacauuugagcu

SEQ ID NO: 2344796 - RNA, 19 nt, Artificial Sequence
  Description of Artificial Sequence: Synthetic oligonucleotide
  Sense strand starting at position 775 of SEQ ID NO: 1885471
uugguaacucuacaguagu

SEQ ID NO: 2344797 - RNA, 19 nt, Artificial Sequence
  Description of Artificial Sequence: Synthetic oligonucleotide
  Antisense strand to SEQ ID NO: 2344796
acuacuguagaguuaccaa

SEQ ID NO: 2344798 - RNA, 19 nt, Artificial Sequence
  Description of Artificial Sequence: Synthetic oligonucleotide
  Sense strand starting at position 851 of SEQ ID NO: 1885471
uccugucuugcugaugaga

SEQ ID NO: 2344799 - RNA, 19 nt, Artificial Sequence
  Description of Artificial Sequence: Synthetic oligonucleotide
  Antisense strand to SEQ ID NO: 2344798
ucucaucagcaagacagga

SEQ ID NO: 2344800 - RNA, 19 nt, Artificial Sequence
  Description of Artificial Sequence: Synthetic oligonucleotide
  Sense strand starting at position 1102 of SEQ ID NO: 1885471
cuguuugugcuauuccuuu

SEQ ID NO: 2344801 - RNA, 19 nt, Artificial Sequence
  Description of Artificial Sequence: Synthetic oligonucleotide
  Antisense strand to SEQ ID NO: 2344800
aaaggaauagcacaaacag

SEQ ID NO: 2344802 - RNA, 19 nt, Artificial Sequence
  Description of Artificial Sequence: Synthetic oligonucleotide
  Sense strand starting at position 1382 of SEQ ID NO: 1885471
guuaucagagcucgaaaca

SEQ ID NO: 2344803 - RNA, 19 nt, Artificial Sequence
  Description of Artificial Sequence: Synthetic oligonucleotide
  Antisense strand to SEQ ID NO: 2344802
uguuucgagcucugauaac

SEQ ID NO: 2344804 - RNA, 19 nt, Artificial Sequence
  Description of Artificial Sequence: Synthetic oligonucleotide
  Sense strand starting at position 1410 of SEQ ID NO: 1885471
gagaaccacuggucucuua

SEQ ID NO: 2344805 - RNA, 19 nt, Artificial Sequence
  Description of Artificial Sequence: Synthetic oligonucleotide
  Antisense strand to SEQ ID NO: 2344804
uaagagaccagugguucuc

SEQ ID NO: 2344806 - RNA, 19 nt, Artificial Sequence
  Description of Artificial Sequence: Synthetic oligonucleotide
  Sense strand starting at position 2114 of SEQ ID NO: 1885471
ccagacuugcuauaguaca

SEQ ID NO: 2344807 - RNA, 19 nt, Artificial Sequence
  Description of Artificial Sequence: Synthetic oligonucleotide
  Antisense strand to SEQ ID NO: 2344806
uguacuauagcaagucugg

SEQ ID NO: 2344808 - RNA, 19 nt, Artificial Sequence
  Description of Artificial Sequence: Synthetic oligonucleotide
  Sense strand starting at position 2384 of SEQ ID NO: 1885471
ucagaagacuuuguuuacu

SEQ ID NO: 2344809 - RNA, 19 nt, Artificial Sequence
  Description of Artificial Sequence: Synthetic oligonucleotide
  Antisense strand to SEQ ID NO: 2344808
aguaaacaaagucuucuga

SEQ ID NO: 2344810 - RNA, 19 nt, Artificial Sequence
  Description of Artificial Sequence: Synthetic oligonucleotide
  Sense strand starting at position 2539 of SEQ ID NO: 1885471
gaacacagguagucagaua

SEQ ID NO: 2344811 - RNA, 19 nt, Artificial Sequence
  Description of Artificial Sequence: Synthetic oligonucleotide
  Antisense strand to SEQ ID NO: 2344810
uaucugacuaccuguguuc

SEQ ID NO: 2344812 - RNA, 19 nt, Artificial Sequence
  Description of Artificial Sequence: Synthetic oligonucleotide
  Sense strand starting at position 2578 of SEQ ID NO: 1885471
ggccuacuacuuugauacu

SEQ ID NO: 2344813 - RNA, 19 nt, Artificial Sequence
  Description of Artificial Sequence: Synthetic oligonucleotide
  Antisense strand to SEQ ID NO: 2344812
aguaucaaaguaguaggcc

SEQ ID NO: 2344814 - RNA, 19 nt, Artificial Sequence
  Description of Artificial Sequence: Synthetic oligonucleotide
  Sense strand starting at position 2728 of SEQ ID NO: 1885471
cgcccuuucucauuuauga

SEQ ID NO: 2344815 - RNA, 19 nt, Artificial Sequence
  Description of Artificial Sequence: Synthetic oligonucleotide
  Antisense strand to SEQ ID NO: 2344814
ucauaaaugagaaagggcg

SEQ ID NO: 2344816 - RNA, 19 nt, Artificial Sequence
  Description of Artificial Sequence: Synthetic oligonucleotide
  Sense strand starting at position 2733 of SEQ ID NO: 1885471
uuucucauuuaugagauga

SEQ ID NO: 2344817 - RNA, 19 nt, Artificial Sequence
  Description of Artificial Sequence: Synthetic oligonucleotide
  Antisense strand to SEQ ID NO: 2344816
ucaucucauaaaugagaaa

SEQ ID NO: 2344818 - RNA, 19 nt, Artificial Sequence
  Description of Artificial Sequence: Synthetic oligonucleotide
  Sense strand starting at position 2735 of SEQ ID NO: 1885471
ucucauuuaugagaugaac

SEQ ID NO: 2344819 - RNA, 19 nt, Artificial Sequence
  Description of Artificial Sequence: Synthetic oligonucleotide
  Antisense strand to SEQ ID NO: 2344818
guucaucucauaaaugaga

SEQ ID NO: 2344820 - RNA, 19 nt, Artificial Sequence
  Description of Artificial Sequence: Synthetic oligonucleotide
  Sense strand starting at position 2925 of SEQ ID NO: 1885471
ggcgguucuccuuugugua

SEQ ID NO: 2344821 - RNA, 19 nt, Artificial Sequence
  Description of Artificial Sequence: Synthetic oligonucleotide
  Antisense strand to SEQ ID NO: 2344820
uacacaaaggagaaccgcc

SEQ ID NO: 2344822 - RNA, 19 nt, Artificial Sequence
  Description of Artificial Sequence: Synthetic oligonucleotide
  Sense strand starting at position 2939 of SEQ ID NO: 1885471
guguacugaccugaucuaa

SEQ ID NO: 2344823 - RNA, 19 nt, Artificial Sequence
  Description of Artificial Sequence: Synthetic oligonucleotide
  Antisense strand to SEQ ID NO: 2344822
uuagaucaggucaguacac

SEQ ID NO: 2344824 - RNA, 19 nt, Artificial Sequence
  Description of Artificial Sequence: Synthetic oligonucleotide
  Sense strand starting at position 2965 of SEQ ID NO: 1885471
ugauacaugcugcauucua

SEQ ID NO: 2344825 - RNA, 19 nt, Artificial Sequence
  Description of Artificial Sequence: Synthetic oligonucleotide
  Antisense strand to SEQ ID NO: 2344824
uagaaugcagcauguauca

SEQ ID NO: 2344826 - RNA, 19 nt, Artificial Sequence
  Description of Artificial Sequence: Synthetic oligonucleotide
  Sense strand starting at position 3039 of SEQ ID NO: 1885471
uauuaaaguuguguggaaa

SEQ ID NO: 2344827 - RNA, 19 nt, Artificial Sequence
  Description of Artificial Sequence: Synthetic oligonucleotide
  Antisense strand to SEQ ID NO: 2344826
uuuccacacaacuuuaaua

SEQ ID NO: 2344828 - RNA, 19 nt, Artificial Sequence
  Description of Artificial Sequence: Synthetic oligonucleotide
  Sense strand starting at position 3040 of SEQ ID NO: 1885471
auuaaaguuguguggaaac

SEQ ID NO: 2344829 - RNA, 19 nt, Artificial Sequence
  Description of Artificial Sequence: Synthetic oligonucleotide
  Antisense strand to SEQ ID NO: 2344828
guuuccacacaacuuuaau

SEQ ID NO: 2344830 - RNA, 19 nt, Artificial Sequence
  Description of Artificial Sequence: Synthetic oligonucleotide
  Sense strand starting at position 3042 of SEQ ID NO: 1885471
uaaaguuguguggaaacua

SEQ ID NO: 2344831 - RNA, 19 nt, Artificial Sequence
  Description of Artificial Sequence: Synthetic oligonucleotide
  Antisense strand to SEQ ID NO: 2344830
uaguuuccacacaacuuua

SEQ ID NO: 2344832 - RNA, 19 nt, Artificial Sequence
  Description of Artificial Sequence: Synthetic oligonucleotide
  Sense strand starting at position 3047 of SEQ ID NO: 1885471
uuguguggaaacuaauagu

SEQ ID NO: 2344833 - RNA, 19 nt, Artificial Sequence
  Description of Artificial Sequence: Synthetic oligonucleotide
  Antisense strand to SEQ ID NO: 2344832
acuauuaguuuccacacaa

SEQ ID NO: 2344834 - RNA, 19 nt, Artificial Sequence
  Description of Artificial Sequence: Synthetic oligonucleotide
  Sense strand starting at position 3091 of SEQ ID NO: 1885471
augauagaugcacauucuu

SEQ ID NO: 2344835 - RNA, 19 nt, Artificial Sequence
  Description of Artificial Sequence: Synthetic oligonucleotide
  Antisense strand to SEQ ID NO: 2344834
aagaaugugcaucuaucau

SEQ ID NO: 2344836 - RNA, 19 nt, Artificial Sequence
  Description of Artificial Sequence: Synthetic oligonucleotide
  Sense strand starting at position 3144 of SEQ ID NO: 1885471
uguauuguucucuacuuua

SEQ ID NO: 2344837 - RNA, 19 nt, Artificial Sequence
  Description of Artificial Sequence: Synthetic oligonucleotide
  Antisense strand to SEQ ID NO: 2344836
uaaaguagagaacaauaca

SEQ ID NO: 2344838 - RNA, 19 nt, Artificial Sequence
  Description of Artificial Sequence: Synthetic oligonucleotide
  Sense strand starting at position 3251 of SEQ ID NO: 1885471
uauugugggccaggagauu

SEQ ID NO: 2344839 - RNA, 19 nt, Artificial Sequence
  Description of Artificial Sequence: Synthetic oligonucleotide
  Antisense strand to SEQ ID NO: 2344838
aaucuccuggcccacaaua

SEQ ID NO: 2344840 - RNA, 19 nt, Artificial Sequence
  Description of Artificial Sequence: Synthetic oligonucleotide
  Sense strand starting at position 3289 of SEQ ID NO: 1885471
uuaauuccagauugaauug

SEQ ID NO: 2344841 - RNA, 19 nt, Artificial Sequence
  Description of Artificial Sequence: Synthetic oligonucleotide
  Antisense strand to SEQ ID NO: 2344840
caauucaaucuggaauuaa

SEQ ID NO: 2344842 - RNA, 19 nt, Artificial Sequence
  Description of Artificial Sequence: Synthetic oligonucleotide
  Sense strand starting at position 3409 of SEQ ID NO: 1885471
uuccaugauugacuaugua

SEQ ID NO: 2344843 - RNA, 19 nt, Artificial Sequence
  Description of Artificial Sequence: Synthetic oligonucleotide
  Antisense strand to SEQ ID NO: 2344842
uacauagucaaucauggaa

SEQ ID NO: 2344844 - RNA, 19 nt, Artificial Sequence
  Description of Artificial Sequence: Synthetic oligonucleotide
  Sense strand starting at position 3791 of SEQ ID NO: 1885471
aucauaguggaaugcagaa

SEQ ID NO: 2344845 - RNA, 19 nt, Artificial Sequence
  Description of Artificial Sequence: Synthetic oligonucleotide
  Antisense strand to SEQ ID NO: 2344844
uucugcauuccacuaugau

SEQ ID NO: 2344846 - RNA, 19 nt, Artificial Sequence
  Description of Artificial Sequence: Synthetic oligonucleotide
  Sense strand starting at position 3923 of SEQ ID NO: 1885471
ugggaagacccaugccuuu

SEQ ID NO: 2344847 - RNA, 19 nt, Artificial Sequence
  Description of Artificial Sequence: Synthetic oligonucleotide
  Antisense strand to SEQ ID NO: 2344846
aaaggcaugggucuuccca

SEQ ID NO: 2344848 - RNA, 19 nt, Artificial Sequence
  Description of Artificial Sequence: Synthetic oligonucleotide
  Sense strand starting at position 162 of SEQ ID NO: 1885472
ccuggauaucucgggcuua

SEQ ID NO: 2344849 - RNA, 19 nt, Artificial Sequence
  Description of Artificial Sequence: Synthetic oligonucleotide
  Antisense strand to SEQ ID NO: 2344848
uaagcccgagauauccagg

SEQ ID NO: 2344850 - RNA, 19 nt, Artificial Sequence
  Description of Artificial Sequence: Synthetic oligonucleotide
  Sense strand starting at position 167 of SEQ ID NO: 1885472
auaucucgggcuuaaguua

SEQ ID NO: 2344851 - RNA, 19 nt, Artificial Sequence
  Description of Artificial Sequence: Synthetic oligonucleotide
  Antisense strand to SEQ ID NO: 2344850
uaacuuaagcccgagauau

SEQ ID NO: 2344852 - RNA, 19 nt, Artificial Sequence
  Description of Artificial Sequence: Synthetic oligonucleotide
  Sense strand starting at position 174 of SEQ ID NO: 1885472
gggcuuaaguuauccucuu

SEQ ID NO: 2344853 - RNA, 19 nt, Artificial Sequence
  Description of Artificial Sequence: Synthetic oligonucleotide
  Antisense strand to SEQ ID NO: 2344852
aagaggauaacuuaagccc

SEQ ID NO: 2344854 - RNA, 19 nt, Artificial Sequence
  Description of Artificial Sequence: Synthetic oligonucleotide
  Sense strand starting at position 175 of SEQ ID NO: 1885472
ggcuuaaguuauccucuua

SEQ ID NO: 2344855 - RNA, 19 nt, Artificial Sequence
  Description of Artificial Sequence: Synthetic oligonucleotide
  Antisense strand to SEQ ID NO: 2344854
uaagaggauaacuuaagcc

SEQ ID NO: 2344856 - RNA, 19 nt, Artificial Sequence
  Description of Artificial Sequence: Synthetic oligonucleotide
  Sense strand starting at position 190 of SEQ ID NO: 1885472
cuuacuucgccucacaagu

SEQ ID NO: 2344857 - RNA, 19 nt, Artificial Sequence
  Description of Artificial Sequence: Synthetic oligonucleotide
  Antisense strand to SEQ ID NO: 2344856
acuugugaggcgaaguaag

SEQ ID NO: 2344858 - RNA, 19 nt, Artificial Sequence
  Description of Artificial Sequence: Synthetic oligonucleotide
  Sense strand starting at position 712 of SEQ ID NO: 1885472
uuagaaaggccuuguucuu

SEQ ID NO: 2344859 - RNA, 19 nt, Artificial Sequence
  Description of Artificial Sequence: Synthetic oligonucleotide
  Antisense strand to SEQ ID NO: 2344858
aagaacaaggccuuucuaa

SEQ ID NO: 2344860 - RNA, 19 nt, Artificial Sequence
  Description of Artificial Sequence: Synthetic oligonucleotide
  Sense strand starting at position 767 of SEQ ID NO: 1885472
cugugacauguucggauua

SEQ ID NO: 2344861 - RNA, 19 nt, Artificial Sequence
  Description of Artificial Sequence: Synthetic oligonucleotide
  Antisense strand to SEQ ID NO: 2344860
uaauccgaacaugucacag

SEQ ID NO: 2344862 - RNA, 19 nt, Artificial Sequence
  Description of Artificial Sequence: Synthetic oligonucleotide
  Sense strand starting at position 794 of SEQ ID NO: 1885472
ggaggcauaugggugguua

SEQ ID NO: 2344863 - RNA, 19 nt, Artificial Sequence
  Description of Artificial Sequence: Synthetic oligonucleotide
  Antisense strand to SEQ ID NO: 2344862
uaaccacccauaugccucc

SEQ ID NO: 2344864 - RNA, 19 nt, Artificial Sequence
  Description of Artificial Sequence: Synthetic oligonucleotide
  Sense strand starting at position 847 of SEQ ID NO: 1885472
cagaccuguuugcuggaau

SEQ ID NO: 2344865 - RNA, 19 nt, Artificial Sequence
  Description of Artificial Sequence: Synthetic oligonucleotide
  Antisense strand to SEQ ID NO: 2344864
auuccagcaaacaggucug

SEQ ID NO: 2344866 - RNA, 19 nt, Artificial Sequence
  Description of Artificial Sequence: Synthetic oligonucleotide
  Sense strand starting at position 850 of SEQ ID NO: 1885472
accuguuugcuggaauaga

SEQ ID NO: 2344867 - RNA, 19 nt, Artificial Sequence
  Description of Artificial Sequence: Synthetic oligonucleotide
  Antisense strand to SEQ ID NO: 2344866
ucuauuccagcaaacaggu

SEQ ID NO: 2344868 - RNA, 19 nt, Artificial Sequence
  Description of Artificial Sequence: Synthetic oligonucleotide
  Sense strand starting at position 959 of SEQ ID NO: 1885472
gcccuagaggucuaagaug

SEQ ID NO: 2344869 - RNA, 19 nt, Artificial Sequence
  Description of Artificial Sequence: Synthetic oligonucleotide
  Antisense strand to SEQ ID NO: 2344868
caucuuagaccucuagggc

SEQ ID NO: 2344870 - RNA, 19 nt, Artificial Sequence
  Description of Artificial Sequence: Synthetic oligonucleotide
  Sense strand starting at position 976 of SEQ ID NO: 1885472
uguagaaacccuuguccaa

SEQ ID NO: 2344871 - RNA, 19 nt, Artificial Sequence
  Description of Artificial Sequence: Synthetic oligonucleotide
  Antisense strand to SEQ ID NO: 2344870
uuggacaaggguuucuaca

SEQ ID NO: 2344872 - RNA, 19 nt, Artificial Sequence
  Description of Artificial Sequence: Synthetic oligonucleotide
  Sense strand starting at position 1180 of SEQ ID NO: 1885472
uggaaucacuauggaaaca

SEQ ID NO: 2344873 - RNA, 19 nt, Artificial Sequence
  Description of Artificial Sequence: Synthetic oligonucleotide
  Antisense strand to SEQ ID NO: 2344872
uguuuccauagugauucca

SEQ ID NO: 2344874 - RNA, 19 nt, Artificial Sequence
  Description of Artificial Sequence: Synthetic oligonucleotide
  Sense strand starting at position 1552 of SEQ ID NO: 1885472
aaggauuucucacagggca

SEQ ID NO: 2344875 - RNA, 19 nt, Artificial Sequence
  Description of Artificial Sequence: Synthetic oligonucleotide
  Antisense strand to SEQ ID NO: 2344874
ugcccugugagaaauccuu

SEQ ID NO: 2344876 - RNA, 19 nt, Artificial Sequence
  Description of Artificial Sequence: Synthetic oligonucleotide
  Sense strand starting at position 1611 of SEQ ID NO: 1885472
caucacugcuggcuugaga

SEQ ID NO: 2344877 - RNA, 19 nt, Artificial Sequence
  Description of Artificial Sequence: Synthetic oligonucleotide
  Antisense strand to SEQ ID NO: 2344876
ucucaagccagcagugaug

SEQ ID NO: 2344878 - RNA, 19 nt, Artificial Sequence
  Description of Artificial Sequence: Synthetic oligonucleotide
  Sense strand starting at position 1643 of SEQ ID NO: 1885472
gcagcucaaugugcagaua

SEQ ID NO: 2344879 - RNA, 19 nt, Artificial Sequence
  Description of Artificial Sequence: Synthetic oligonucleotide
  Antisense strand to SEQ ID NO: 2344878
uaucugcacauugagcugc

SEQ ID NO: 2344880 - RNA, 19 nt, Artificial Sequence
  Description of Artificial Sequence: Synthetic oligonucleotide
  Sense strand starting at position 1644 of SEQ ID NO: 1885472
cagcucaaugugcagauau

SEQ ID NO: 2344881 - RNA, 19 nt, Artificial Sequence
  Description of Artificial Sequence: Synthetic oligonucleotide
  Antisense strand to SEQ ID NO: 2344880
auaucugcacauugagcug

SEQ ID NO: 2344882 - RNA, 19 nt, Artificial Sequence
  Description of Artificial Sequence: Synthetic oligonucleotide
  Sense strand starting at position 1823 of SEQ ID NO: 1885472
guuugacuccggugauuca

SEQ ID NO: 2344883 - RNA, 19 nt, Artificial Sequence
  Description of Artificial Sequence: Synthetic oligonucleotide
  Antisense strand to SEQ ID NO: 2344882
ugaaucaccggagucaaac

SEQ ID NO: 2344884 - RNA, 19 nt, Artificial Sequence
  Description of Artificial Sequence: Synthetic oligonucleotide
  Sense strand starting at position 1882 of SEQ ID NO: 1885472
gcauacccggguuaucuua

SEQ ID NO: 2344885 - RNA, 19 nt, Artificial Sequence
  Description of Artificial Sequence: Synthetic oligonucleotide
  Antisense strand to SEQ ID NO: 2344884
uaagauaacccggguaugc

SEQ ID NO: 2344886 - RNA, 19 nt, Artificial Sequence
  Description of Artificial Sequence: Synthetic oligonucleotide
  Sense strand starting at position 2589 of SEQ ID NO: 1885472
gcugugauuggguggaaga

SEQ ID NO: 2344887 - RNA, 19 nt, Artificial Sequence
  Description of Artificial Sequence: Synthetic oligonucleotide
  Antisense strand to SEQ ID NO: 2344886
ucuuccacccaaucacagc

SEQ ID NO: 2344888 - RNA, 19 nt, Artificial Sequence
  Description of Artificial Sequence: Synthetic oligonucleotide
  Sense strand starting at position 2590 of SEQ ID NO: 1885472
cugugauuggguggaagau

SEQ ID NO: 2344889 - RNA, 19 nt, Artificial Sequence
  Description of Artificial Sequence: Synthetic oligonucleotide
  Antisense strand to SEQ ID NO: 2344888
aucuuccacccaaucacag

SEQ ID NO: 2344890 - RNA, 19 nt, Artificial Sequence
  Description of Artificial Sequence: Synthetic oligonucleotide
  Sense strand starting at position 3236 of SEQ ID NO: 1885472
acggaagucaagugcagau

SEQ ID NO: 2344891 - RNA, 19 nt, Artificial Sequence
  Description of Artificial Sequence: Synthetic oligonucleotide
  Antisense strand to SEQ ID NO: 2344890
aucugcacuugacuuccgu

SEQ ID NO: 2344892 - RNA, 19 nt, Artificial Sequence
  Description of Artificial Sequence: Synthetic oligonucleotide
  Sense strand starting at position 3333 of SEQ ID NO: 1885472
auaaguacuguugaaauuc

SEQ ID NO: 2344893 - RNA, 19 nt, Artificial Sequence
  Description of Artificial Sequence: Synthetic oligonucleotide
  Antisense strand to SEQ ID NO: 2344892
gaauuucaacaguacuuau

SEQ ID NO: 2344894 - RNA, 19 nt, Artificial Sequence
  Description of Artificial Sequence: Synthetic oligonucleotide
  Sense strand starting at position 3411 of SEQ ID NO: 1885472
gcagucuugucucugggaa

SEQ ID NO: 2344895 - RNA, 19 nt, Artificial Sequence
  Description of Artificial Sequence: Synthetic oligonucleotide
  Antisense strand to SEQ ID NO: 2344894
uucccagagacaagacugc

SEQ ID NO: 2344896 - RNA, 19 nt, Artificial Sequence
  Description of Artificial Sequence: Synthetic oligonucleotide
  Sense strand starting at position 3412 of SEQ ID NO: 1885472
cagucuugucucugggaau

SEQ ID NO: 2344897 - RNA, 19 nt, Artificial Sequence
  Description of Artificial Sequence: Synthetic oligonucleotide
  Antisense strand to SEQ ID NO: 2344896
auucccagagacaagacug

SEQ ID NO: 2344898 - RNA, 19 nt, Artificial Sequence
  Description of Artificial Sequence: Synthetic oligonucleotide
  Sense strand starting at position 3425 of SEQ ID NO: 1885472
gggaaugcacguuaaucuu

SEQ ID NO: 2344899 - RNA, 19 nt, Artificial Sequence
  Description of Artificial Sequence: Synthetic oligonucleotide
  Antisense strand to SEQ ID NO: 2344898
aagauuaacgugcauuccc

SEQ ID NO: 2344900 - RNA, 19 nt, Artificial Sequence
  Description of Artificial Sequence: Synthetic oligonucleotide
  Sense strand starting at position 3458 of SEQ ID NO: 1885472
gcuuuccugucauuuguuu

SEQ ID NO: 2344901 - RNA, 19 nt, Artificial Sequence
  Description of Artificial Sequence: Synthetic oligonucleotide
  Antisense strand to SEQ ID NO: 2344900
aaacaaaugacaggaaagc

SEQ ID NO: 2344902 - RNA, 19 nt, Artificial Sequence
  Description of Artificial Sequence: Synthetic oligonucleotide
  Sense strand starting at position 3462 of SEQ ID NO: 1885472
uccugucauuuguuuacuu

SEQ ID NO: 2344903 - RNA, 19 nt, Artificial Sequence
  Description of Artificial Sequence: Synthetic oligonucleotide
  Antisense strand to SEQ ID NO: 2344902
aaguaaacaaaugacagga

SEQ ID NO: 2344904 - RNA, 19 nt, Artificial Sequence
  Description of Artificial Sequence: Synthetic oligonucleotide
  Sense strand starting at position 3569 of SEQ ID NO: 1885472
ggcguuuaaauagacugua

SEQ ID NO: 2344905 - RNA, 19 nt, Artificial Sequence
  Description of Artificial Sequence: Synthetic oligonucleotide
  Antisense strand to SEQ ID NO: 2344904
uacagucuauuuaaacgcc

SEQ ID NO: 2344906 - RNA, 19 nt, Artificial Sequence
  Description of Artificial Sequence: Synthetic oligonucleotide
  Sense strand starting at position 3596 of SEQ ID NO: 1885472
gugcuaaugcccgcuggaa

SEQ ID NO: 2344907 - RNA, 19 nt, Artificial Sequence
  Description of Artificial Sequence: Synthetic oligonucleotide
  Antisense strand to SEQ ID NO: 2344906
uuccagcgggcauuagcac

SEQ ID NO: 2344908 - RNA, 19 nt, Artificial Sequence
  Description of Artificial Sequence: Synthetic oligonucleotide
  Sense strand starting at position 3608 of SEQ ID NO: 1885472
gcuggaagucccgaauuaa

SEQ ID NO: 2344909 - RNA, 19 nt, Artificial Sequence
  Description of Artificial Sequence: Synthetic oligonucleotide
  Antisense strand to SEQ ID NO: 2344908
uuaauucgggacuuccagc

SEQ ID NO: 2344910 - RNA, 19 nt, Artificial Sequence
  Description of Artificial Sequence: Synthetic oligonucleotide
  Sense strand starting at position 3630 of SEQ ID NO: 1885472
aaacgugggcgcguuuaaa

SEQ ID NO: 2344911 - RNA, 19 nt, Artificial Sequence
  Description of Artificial Sequence: Synthetic oligonucleotide
  Antisense strand to SEQ ID NO: 2344910
uuuaaacgcgcccacguuu

SEQ ID NO: 2344912 - RNA, 19 nt, Artificial Sequence
  Description of Artificial Sequence: Synthetic oligonucleotide
  Sense strand starting at position 3687 of SEQ ID NO: 1885472
uccacaugaugagacaaau

SEQ ID NO: 2344913 - RNA, 19 nt, Artificial Sequence
  Description of Artificial Sequence: Synthetic oligonucleotide
  Antisense strand to SEQ ID NO: 2344912
auuugucucaucaugugga

SEQ ID NO: 2344914 - RNA, 19 nt, Artificial Sequence
  Description of Artificial Sequence: Synthetic oligonucleotide
  Sense strand starting at position 3714 of SEQ ID NO: 1885472
uuaguuccucaugagcuua

SEQ ID NO: 2344915 - RNA, 19 nt, Artificial Sequence
  Description of Artificial Sequence: Synthetic oligonucleotide
  Antisense strand to SEQ ID NO: 2344914
uaagcucaugaggaacuaa

SEQ ID NO: 2344916 - RNA, 19 nt, Artificial Sequence
  Description of Artificial Sequence: Synthetic oligonucleotide
  Sense strand starting at position 3719 of SEQ ID NO: 1885472
uccucaugagcuuauaugu

SEQ ID NO: 2344917 - RNA, 19 nt, Artificial Sequence
  Description of Artificial Sequence: Synthetic oligonucleotide
  Antisense strand to SEQ ID NO: 2344916
acauauaagcucaugagga

SEQ ID NO: 2344918 - RNA, 19 nt, Artificial Sequence
  Description of Artificial Sequence: Synthetic oligonucleotide
  Sense strand starting at position 3725 of SEQ ID NO: 1885472
ugagcuuauauguagggau

SEQ ID NO: 2344919 - RNA, 19 nt, Artificial Sequence
  Description of Artificial Sequence: Synthetic oligonucleotide
  Antisense strand to SEQ ID NO: 2344918
aucccuacauauaagcuca

SEQ ID NO: 2344920 - RNA, 19 nt, Artificial Sequence
  Description of Artificial Sequence: Synthetic oligonucleotide
  Sense strand starting at position 3727 of SEQ ID NO: 1885472
agcuuauauguagggauca

SEQ ID NO: 2344921 - RNA, 19 nt, Artificial Sequence
  Description of Artificial Sequence: Synthetic oligonucleotide
  Antisense strand to SEQ ID NO: 2344920
ugaucccuacauauaagcu

SEQ ID NO: 2344922 - RNA, 19 nt, Artificial Sequence
  Description of Artificial Sequence: Synthetic oligonucleotide
  Sense strand starting at position 3892 of SEQ ID NO: 1885472
ccaucuaagggugguacau

SEQ ID NO: 2344923 - RNA, 19 nt, Artificial Sequence
  Description of Artificial Sequence: Synthetic oligonucleotide
  Antisense strand to SEQ ID NO: 2344922
auguaccacccuuagaugg

SEQ ID NO: 2344924 - RNA, 19 nt, Artificial Sequence
  Description of Artificial Sequence: Synthetic oligonucleotide
  Sense strand starting at position 3922 of SEQ ID NO: 1885472
uucuuuaaggaguggugaa

SEQ ID NO: 2344925 - RNA, 19 nt, Artificial Sequence
  Description of Artificial Sequence: Synthetic oligonucleotide
  Antisense strand to SEQ ID NO: 2344924
uucaccacuccuuaaagaa

SEQ ID NO: 2344926 - RNA, 19 nt, Artificial Sequence
  Description of Artificial Sequence: Synthetic oligonucleotide
  Sense strand starting at position 3937 of SEQ ID NO: 1885472
ugaaucagaucugaaagau

SEQ ID NO: 2344927 - RNA, 19 nt, Artificial Sequence
  Description of Artificial Sequence: Synthetic oligonucleotide
  Antisense strand to SEQ ID NO: 2344926
aucuuucagaucugauuca

SEQ ID NO: 2344928 - RNA, 19 nt, Artificial Sequence
  Description of Artificial Sequence: Synthetic oligonucleotide
  Sense strand starting at position 6 of SEQ ID NO: 1885473
cuugucucagccugacaaa

SEQ ID NO: 2344929 - RNA, 19 nt, Artificial Sequence
  Description of Artificial Sequence: Synthetic oligonucleotide
  Antisense strand to SEQ ID NO: 2344928
uuugucaggcugagacaag

SEQ ID NO: 2344930 - RNA, 19 nt, Artificial Sequence
  Description of Artificial Sequence: Synthetic oligonucleotide
  Sense strand starting at position 62 of SEQ ID NO: 1885473
acuaccuucucugugaaga

SEQ ID NO: 2344931 - RNA, 19 nt, Artificial Sequence
  Description of Artificial Sequence: Synthetic oligonucleotide
  Antisense strand to SEQ ID NO: 2344930
ucuucacagagaagguagu

SEQ ID NO: 2344932 - RNA, 19 nt, Artificial Sequence
  Description of Artificial Sequence: Synthetic oligonucleotide
  Sense strand starting at position 63 of SEQ ID NO: 1885473
cuaccuucucugugaagac

SEQ ID NO: 2344933 - RNA, 19 nt, Artificial Sequence
  Description of Artificial Sequence: Synthetic oligonucleotide
  Antisense strand to SEQ ID NO: 2344932
gucuucacagagaagguag

SEQ ID NO: 2344934 - RNA, 19 nt, Artificial Sequence
  Description of Artificial Sequence: Synthetic oligonucleotide
  Sense strand starting at position 117 of SEQ ID NO: 1885473
ccuaaaucucuugacacgu

SEQ ID NO: 2344935 - RNA, 19 nt, Artificial Sequence
  Description of Artificial Sequence: Synthetic oligonucleotide
  Antisense strand to SEQ ID NO: 2344934
acgugucaagagauuuagg

SEQ ID NO: 2344936 - RNA, 19 nt, Artificial Sequence
  Description of Artificial Sequence: Synthetic oligonucleotide
  Sense strand starting at position 232 of SEQ ID NO: 1885473
gcaguuacucaauaaaugu

SEQ ID NO: 2344937 - RNA, 19 nt, Artificial Sequence
  Description of Artificial Sequence: Synthetic oligonucleotide
  Antisense strand to SEQ ID NO: 2344936
acauuuauugaguaacugc

SEQ ID NO: 2344938 - RNA, 19 nt, Artificial Sequence
  Description of Artificial Sequence: Synthetic oligonucleotide
  Sense strand starting at position 443 of SEQ ID NO: 1885473
ugcaaugagcuauaauacu

SEQ ID NO: 2344939 - RNA, 19 nt, Artificial Sequence
  Description of Artificial Sequence: Synthetic oligonucleotide
  Antisense strand to SEQ ID NO: 2344938
aguauuauagcucauugca

SEQ ID NO: 2344940 - RNA, 19 nt, Artificial Sequence
  Description of Artificial Sequence: Synthetic oligonucleotide
  Sense strand starting at position 532 of SEQ ID NO: 1885473
guuguugaaugcucuaacu

SEQ ID NO: 2344941 - RNA, 19 nt, Artificial Sequence
  Description of Artificial Sequence: Synthetic oligonucleotide
  Antisense strand to SEQ ID NO: 2344940
aguuagagcauucaacaac

SEQ ID NO: 2344942 - RNA, 19 nt, Artificial Sequence
  Description of Artificial Sequence: Synthetic oligonucleotide
  Sense strand starting at position 534 of SEQ ID NO: 1885473
uguugaaugcucuaacuug

SEQ ID NO: 2344943 - RNA, 19 nt, Artificial Sequence
  Description of Artificial Sequence: Synthetic oligonucleotide
  Antisense strand to SEQ ID NO: 2344942
caaguuagagcauucaaca

SEQ ID NO: 2344944 - RNA, 19 nt, Artificial Sequence
  Description of Artificial Sequence: Synthetic oligonucleotide
  Sense strand starting at position 556 of SEQ ID NO: 1885473
ugaucucuccauugucuua

SEQ ID NO: 2344945 - RNA, 19 nt, Artificial Sequence
  Description of Artificial Sequence: Synthetic oligonucleotide
  Antisense strand to SEQ ID NO: 2344944
uaagacaauggagagauca

SEQ ID NO: 2344946 - RNA, 19 nt, Artificial Sequence
  Description of Artificial Sequence: Synthetic oligonucleotide
  Sense strand starting at position 584 of SEQ ID NO: 1885473
gcucuuagugcuuauauca

SEQ ID NO: 2344947 - RNA, 19 nt, Artificial Sequence
  Description of Artificial Sequence: Synthetic oligonucleotide
  Antisense strand to SEQ ID NO: 2344946
ugauauaagcacuaagagc

SEQ ID NO: 2344948 - RNA, 19 nt, Artificial Sequence
  Description of Artificial Sequence: Synthetic oligonucleotide
  Sense strand starting at position 654 of SEQ ID NO: 1885473
cugaguuccagcgagauua

SEQ ID NO: 2344949 - RNA, 19 nt, Artificial Sequence
  Description of Artificial Sequence: Synthetic oligonucleotide
  Antisense strand to SEQ ID NO: 2344948
uaaucucgcuggaacucag

SEQ ID NO: 2344950 - RNA, 19 nt, Artificial Sequence
  Description of Artificial Sequence: Synthetic oligonucleotide
  Sense strand starting at position 656 of SEQ ID NO: 1885473
gaguuccagcgagauuaaa

SEQ ID NO: 2344951 - RNA, 19 nt, Artificial Sequence
  Description of Artificial Sequence: Synthetic oligonucleotide
  Antisense strand to SEQ ID NO: 2344950
uuuaaucucgcuggaacuc

SEQ ID NO: 2344952 - RNA, 19 nt, Artificial Sequence
  Description of Artificial Sequence: Synthetic oligonucleotide
  Sense strand starting at position 664 of SEQ ID NO: 1885473
gcgagauuaaauggagaua

SEQ ID NO: 2344953 - RNA, 19 nt, Artificial Sequence
  Description of Artificial Sequence: Synthetic oligonucleotide
  Antisense strand to SEQ ID NO: 2344952
uaucuccauuuaaucucgc

SEQ ID NO: 2344954 - RNA, 19 nt, Artificial Sequence
  Description of Artificial Sequence: Synthetic oligonucleotide
  Sense strand starting at position 677 of SEQ ID NO: 1885473
gagauaucuugaccaaggu

SEQ ID NO: 2344955 - RNA, 19 nt, Artificial Sequence
  Description of Artificial Sequence: Synthetic oligonucleotide
  Antisense strand to SEQ ID NO: 2344954
accuuggucaagauaucuc

SEQ ID NO: 2344956 - RNA, 19 nt, Artificial Sequence
  Description of Artificial Sequence: Synthetic oligonucleotide
  Sense strand starting at position 807 of SEQ ID NO: 1885473
augugcucaaaguaggaaa

SEQ ID NO: 2344957 - RNA, 19 nt, Artificial Sequence
  Description of Artificial Sequence: Synthetic oligonucleotide
  Antisense strand to SEQ ID NO: 2344956
uuuccuacuuugagcacau

SEQ ID NO: 2344958 - RNA, 19 nt, Artificial Sequence
  Description of Artificial Sequence: Synthetic oligonucleotide
  Sense strand starting at position 849 of SEQ ID NO: 1885473
aaauuuaugucuuaggguu

SEQ ID NO: 2344959 - RNA, 19 nt, Artificial Sequence
  Description of Artificial Sequence: Synthetic oligonucleotide
  Antisense strand to SEQ ID NO: 2344958
aacccuaagacauaaauuu

SEQ ID NO: 2344960 - RNA, 19 nt, Artificial Sequence
  Description of Artificial Sequence: Synthetic oligonucleotide
  Sense strand starting at position 917 of SEQ ID NO: 1885473
uuguguaacuacuuauuac

SEQ ID NO: 2344961 - RNA, 19 nt, Artificial Sequence
  Description of Artificial Sequence: Synthetic oligonucleotide
  Antisense strand to SEQ ID NO: 2344960
guaauaaguaguuacacaa

SEQ ID NO: 2344962 - RNA, 19 nt, Artificial Sequence
  Description of Artificial Sequence: Synthetic oligonucleotide
  Sense strand starting at position 2473 of SEQ ID NO: 1885473
gcgcuaacugcuguguaac

SEQ ID NO: 2344963 - RNA, 19 nt, Artificial Sequence
  Description of Artificial Sequence: Synthetic oligonucleotide
  Antisense strand to SEQ ID NO: 2344962
guuacacagcaguuagcgc

SEQ ID NO: 2344964 - RNA, 19 nt, Artificial Sequence
  Description of Artificial Sequence: Synthetic oligonucleotide
  Sense strand starting at position 2546 of SEQ ID NO: 1885473
ggacuaagguuucugauga

SEQ ID NO: 2344965 - RNA, 19 nt, Artificial Sequence
  Description of Artificial Sequence: Synthetic oligonucleotide
  Antisense strand to SEQ ID NO: 2344964
ucaucagaaaccuuagucc

SEQ ID NO: 2344966 - RNA, 19 nt, Artificial Sequence
  Description of Artificial Sequence: Synthetic oligonucleotide
  Sense strand starting at position 2553 of SEQ ID NO: 1885473
gguuucugaugaccuagaa

SEQ ID NO: 2344967 - RNA, 19 nt, Artificial Sequence
  Description of Artificial Sequence: Synthetic oligonucleotide
  Antisense strand to SEQ ID NO: 2344966
uucuaggucaucagaaacc

SEQ ID NO: 2344968 - RNA, 19 nt, Artificial Sequence
  Description of Artificial Sequence: Synthetic oligonucleotide
  Sense strand starting at position 2608 of SEQ ID NO: 1885473
ccagaauucugacuuaggu

SEQ ID NO: 2344969 - RNA, 19 nt, Artificial Sequence
  Description of Artificial Sequence: Synthetic oligonucleotide
  Antisense strand to SEQ ID NO: 2344968
accuaagucagaauucugg

SEQ ID NO: 2344970 - RNA, 19 nt, Artificial Sequence
  Description of Artificial Sequence: Synthetic oligonucleotide
  Sense strand starting at position 2623 of SEQ ID NO: 1885473
agguuauaauacucguaga

SEQ ID NO: 2344971 - RNA, 19 nt, Artificial Sequence
  Description of Artificial Sequence: Synthetic oligonucleotide
  Antisense strand to SEQ ID NO: 2344970
ucuacgaguauuauaaccu

SEQ ID NO: 2344972 - RNA, 19 nt, Artificial Sequence
  Description of Artificial Sequence: Synthetic oligonucleotide
  Sense strand starting at position 2624 of SEQ ID NO: 1885473
gguuauaauacucguagag

SEQ ID NO: 2344973 - RNA, 19 nt, Artificial Sequence
  Description of Artificial Sequence: Synthetic oligonucleotide
  Antisense strand to SEQ ID NO: 2344972
cucuacgaguauuauaacc

SEQ ID NO: 2344974 - RNA, 19 nt, Artificial Sequence
  Description of Artificial Sequence: Synthetic oligonucleotide
  Sense strand starting at position 2628 of SEQ ID NO: 1885473
auaauacucguagagguua

SEQ ID NO: 2344975 - RNA, 19 nt, Artificial Sequence
  Description of Artificial Sequence: Synthetic oligonucleotide
  Antisense strand to SEQ ID NO: 2344974
uaaccucuacgaguauuau

SEQ ID NO: 2344976 - RNA, 19 nt, Artificial Sequence
  Description of Artificial Sequence: Synthetic oligonucleotide
  Sense strand starting at position 2647 of SEQ ID NO: 1885473
augccucagcccuauggaa

SEQ ID NO: 2344977 - RNA, 19 nt, Artificial Sequence
  Description of Artificial Sequence: Synthetic oligonucleotide
  Antisense strand to SEQ ID NO: 2344976
uuccauagggcugaggcau

SEQ ID NO: 2344978 - RNA, 19 nt, Artificial Sequence
  Description of Artificial Sequence: Synthetic oligonucleotide
  Sense strand starting at position 2649 of SEQ ID NO: 1885473
gccucagcccuauggaauu

SEQ ID NO: 2344979 - RNA, 19 nt, Artificial Sequence
  Description of Artificial Sequence: Synthetic oligonucleotide
  Antisense strand to SEQ ID NO: 2344978
aauuccauagggcugaggc

SEQ ID NO: 2344980 - RNA, 19 nt, Artificial Sequence
  Description of Artificial Sequence: Synthetic oligonucleotide
  Sense strand starting at position 2762 of SEQ ID NO: 1885473
ggaacauucuugccaaaga

SEQ ID NO: 2344981 - RNA, 19 nt, Artificial Sequence
  Description of Artificial Sequence: Synthetic oligonucleotide
  Antisense strand to SEQ ID NO: 2344980
ucuuuggcaagaauguucc

SEQ ID NO: 2344982 - RNA, 19 nt, Artificial Sequence
  Description of Artificial Sequence: Synthetic oligonucleotide
  Sense strand starting at position 2859 of SEQ ID NO: 1885473
auucuuagagcugacaguu

SEQ ID NO: 2344983 - RNA, 19 nt, Artificial Sequence
  Description of Artificial Sequence: Synthetic oligonucleotide
  Antisense strand to SEQ ID NO: 2344982
aacugucagcucuaagaau

SEQ ID NO: 2344984 - RNA, 19 nt, Artificial Sequence
  Description of Artificial Sequence: Synthetic oligonucleotide
  Sense strand starting at position 2940 of SEQ ID NO: 1885473
aagugauucgcuggagaac

SEQ ID NO: 2344985 - RNA, 19 nt, Artificial Sequence
  Description of Artificial Sequence: Synthetic oligonucleotide
  Antisense strand to SEQ ID NO: 2344984
guucuccagcgaaucacuu

SEQ ID NO: 2344986 - RNA, 19 nt, Artificial Sequence
  Description of Artificial Sequence: Synthetic oligonucleotide
  Sense strand starting at position 2941 of SEQ ID NO: 1885473
agugauucgcuggagaaca

SEQ ID NO: 2344987 - RNA, 19 nt, Artificial Sequence
  Description of Artificial Sequence: Synthetic oligonucleotide
  Antisense strand to SEQ ID NO: 2344986
uguucuccagcgaaucacu

SEQ ID NO: 2344988 - RNA, 19 nt, Artificial Sequence
  Description of Artificial Sequence: Synthetic oligonucleotide
  Sense strand starting at position 2979 of SEQ ID NO: 1885473
agaaucacaugcuuugauu

SEQ ID NO: 2344989 - RNA, 19 nt, Artificial Sequence
  Description of Artificial Sequence: Synthetic oligonucleotide
  Antisense strand to SEQ ID NO: 2344988
aaucaaagcaugugauucu

SEQ ID NO: 2344990 - RNA, 19 nt, Artificial Sequence
  Description of Artificial Sequence: Synthetic oligonucleotide
  Sense strand starting at position 2991 of SEQ ID NO: 1885473
uuugauuucuaagcucagu

SEQ ID NO: 2344991 - RNA, 19 nt, Artificial Sequence
  Description of Artificial Sequence: Synthetic oligonucleotide
  Antisense strand to SEQ ID NO: 2344990
acugagcuuagaaaucaaa

SEQ ID NO: 2344992 - RNA, 19 nt, Artificial Sequence
  Description of Artificial Sequence: Synthetic oligonucleotide
  Sense strand starting at position 3065 of SEQ ID NO: 1885473
gaguuagaguuacugugau

SEQ ID NO: 2344993 - RNA, 19 nt, Artificial Sequence
  Description of Artificial Sequence: Synthetic oligonucleotide
  Antisense strand to SEQ ID NO: 2344992
aucacaguaacucuaacuc

SEQ ID NO: 2344994 - RNA, 19 nt, Artificial Sequence
  Description of Artificial Sequence: Synthetic oligonucleotide
  Sense strand starting at position 3200 of SEQ ID NO: 1885473
uucguuguccucuugcauu

SEQ ID NO: 2344995 - RNA, 19 nt, Artificial Sequence
  Description of Artificial Sequence: Synthetic oligonucleotide
  Antisense strand to SEQ ID NO: 2344994
aaugcaagaggacaacgaa

SEQ ID NO: 2344996 - RNA, 19 nt, Artificial Sequence
  Description of Artificial Sequence: Synthetic oligonucleotide
  Sense strand starting at position 3695 of SEQ ID NO: 1885473
ucacuucugggcuguuuau

SEQ ID NO: 2344997 - RNA, 19 nt, Artificial Sequence
  Description of Artificial Sequence: Synthetic oligonucleotide
  Antisense strand to SEQ ID NO: 2344996
auaaacagcccagaaguga

SEQ ID NO: 2344998 - RNA, 19 nt, Artificial Sequence
  Description of Artificial Sequence: Synthetic oligonucleotide
  Sense strand starting at position 3734 of SEQ ID NO: 1885473
uuguguguucuuuauuugu

SEQ ID NO: 2344999 - RNA, 19 nt, Artificial Sequence
  Description of Artificial Sequence: Synthetic oligonucleotide
  Antisense strand to SEQ ID NO: 2344998
acaaauaaagaacacacaa

SEQ ID NO: 2345000 - RNA, 19 nt, Artificial Sequence
  Description of Artificial Sequence: Synthetic oligonucleotide
  Sense strand starting at position 3872 of SEQ ID NO: 1885473
ggucguugaggguagguua

SEQ ID NO: 2345001 - RNA, 19 nt, Artificial Sequence
  Description of Artificial Sequence: Synthetic oligonucleotide
  Antisense strand to SEQ ID NO: 2345000
uaaccuacccucaacgacc

SEQ ID NO: 2345002 - RNA, 19 nt, Artificial Sequence
  Description of Artificial Sequence: Synthetic oligonucleotide
  Sense strand starting at position 3879 of SEQ ID NO: 1885473
gaggguagguuacuuaacu

SEQ ID NO: 2345003 - RNA, 19 nt, Artificial Sequence
  Description of Artificial Sequence: Synthetic oligonucleotide
  Antisense strand to SEQ ID NO: 2345002
aguuaaguaaccuacccuc

SEQ ID NO: 2345004 - RNA, 19 nt, Artificial Sequence
  Description of Artificial Sequence: Synthetic oligonucleotide
  Sense strand starting at position 3880 of SEQ ID NO: 1885473
aggguagguuacuuaacuu

SEQ ID NO: 2345005 - RNA, 19 nt, Artificial Sequence
  Description of Artificial Sequence: Synthetic oligonucleotide
  Antisense strand to SEQ ID NO: 2345004
aaguuaaguaaccuacccu

SEQ ID NO: 2345006 - RNA, 19 nt, Artificial Sequence
  Description of Artificial Sequence: Synthetic oligonucleotide
  Sense strand starting at position 3943 of SEQ ID NO: 1885473
cuauuaugguuguugugag

SEQ ID NO: 2345007 - RNA, 19 nt, Artificial Sequence
  Description of Artificial Sequence: Synthetic oligonucleotide
  Antisense strand to SEQ ID NO: 2345006
cucacaacaaccauaauag

SEQ ID NO: 2345008 - RNA, 19 nt, Artificial Sequence
  Description of Artificial Sequence: Synthetic oligonucleotide
  Sense strand starting at position 30 of SEQ ID NO: 1885474
guaucaucauaaguugaug

SEQ ID NO: 2345009 - RNA, 19 nt, Artificial Sequence
  Description of Artificial Sequence: Synthetic oligonucleotide
  Antisense strand to SEQ ID NO: 2345008
caucaacuuaugaugauac

SEQ ID NO: 2345010 - RNA, 19 nt, Artificial Sequence
  Description of Artificial Sequence: Synthetic oligonucleotide
  Sense strand starting at position 199 of SEQ ID NO: 1885474
uuggaaauguauuccacaa

SEQ ID NO: 2345011 - RNA, 19 nt, Artificial Sequence
  Description of Artificial Sequence: Synthetic oligonucleotide
  Antisense strand to SEQ ID NO: 2345010
uuguggaauacauuuccaa

SEQ ID NO: 2345012 - RNA, 19 nt, Artificial Sequence
  Description of Artificial Sequence: Synthetic oligonucleotide
  Sense strand starting at position 241 of SEQ ID NO: 1885474
cagggauagucgucccaaa

SEQ ID NO: 2345013 - RNA, 19 nt, Artificial Sequence
  Description of Artificial Sequence: Synthetic oligonucleotide
  Antisense strand to SEQ ID NO: 2345012
uuugggacgacuaucccug

SEQ ID NO: 2345014 - RNA, 19 nt, Artificial Sequence
  Description of Artificial Sequence: Synthetic oligonucleotide
  Sense strand starting at position 264 of SEQ ID NO: 1885474
aacguucuauagguacaaa

SEQ ID NO: 2345015 - RNA, 19 nt, Artificial Sequence
  Description of Artificial Sequence: Synthetic oligonucleotide
  Antisense strand to SEQ ID NO: 2345014
uuuguaccuauagaacguu

SEQ ID NO: 2345016 - RNA, 19 nt, Artificial Sequence
  Description of Artificial Sequence: Synthetic oligonucleotide
  Sense strand starting at position 267 of SEQ ID NO: 1885474
guucuauagguacaaagua

SEQ ID NO: 2345017 - RNA, 19 nt, Artificial Sequence
  Description of Artificial Sequence: Synthetic oligonucleotide
  Antisense strand to SEQ ID NO: 2345016
uacuuuguaccuauagaac

SEQ ID NO: 2345018 - RNA, 19 nt, Artificial Sequence
  Description of Artificial Sequence: Synthetic oligonucleotide
  Sense strand starting at position 372 of SEQ ID NO: 1885474
ccaaauacuugguugaaag

SEQ ID NO: 2345019 - RNA, 19 nt, Artificial Sequence
  Description of Artificial Sequence: Synthetic oligonucleotide
  Antisense strand to SEQ ID NO: 2345018
cuuucaaccaaguauuugg

SEQ ID NO: 2345020 - RNA, 19 nt, Artificial Sequence
  Description of Artificial Sequence: Synthetic oligonucleotide
  Sense strand starting at position 382 of SEQ ID NO: 1885474
gguugaaagcuguacaaau

SEQ ID NO: 2345021 - RNA, 19 nt, Artificial Sequence
  Description of Artificial Sequence: Synthetic oligonucleotide
  Antisense strand to SEQ ID NO: 2345020
auuuguacagcuuucaacc

SEQ ID NO: 2345022 - RNA, 19 nt, Artificial Sequence
  Description of Artificial Sequence: Synthetic oligonucleotide
  Sense strand starting at position 431 of SEQ ID NO: 1885474
cuuucaagaguggguggua

SEQ ID NO: 2345023 - RNA, 19 nt, Artificial Sequence
  Description of Artificial Sequence: Synthetic oligonucleotide
  Antisense strand to SEQ ID NO: 2345022
uaccacccacucuugaaag

SEQ ID NO: 2345024 - RNA, 19 nt, Artificial Sequence
  Description of Artificial Sequence: Synthetic oligonucleotide
  Sense strand starting at position 440 of SEQ ID NO: 1885474
gugggugguacagauucuu

SEQ ID NO: 2345025 - RNA, 19 nt, Artificial Sequence
  Description of Artificial Sequence: Synthetic oligonucleotide
  Antisense strand to SEQ ID NO: 2345024
aagaaucuguaccacccac

SEQ ID NO: 2345026 - RNA, 19 nt, Artificial Sequence
  Description of Artificial Sequence: Synthetic oligonucleotide
  Sense strand starting at position 445 of SEQ ID NO: 1885474
ugguacagauucuucucau

SEQ ID NO: 2345027 - RNA, 19 nt, Artificial Sequence
  Description of Artificial Sequence: Synthetic oligonucleotide
  Antisense strand to SEQ ID NO: 2345026
augagaagaaucuguacca

SEQ ID NO: 2345028 - RNA, 19 nt, Artificial Sequence
  Description of Artificial Sequence: Synthetic oligonucleotide
  Sense strand starting at position 446 of SEQ ID NO: 1885474
gguacagauucuucucauu

SEQ ID NO: 2345029 - RNA, 19 nt, Artificial Sequence
  Description of Artificial Sequence: Synthetic oligonucleotide
  Antisense strand to SEQ ID NO: 2345028
aaugagaagaaucuguacc

SEQ ID NO: 2345030 - RNA, 19 nt, Artificial Sequence
  Description of Artificial Sequence: Synthetic oligonucleotide
  Sense strand starting at position 637 of SEQ ID NO: 1885474
gcagcagauguauacagaa

SEQ ID NO: 2345031 - RNA, 19 nt, Artificial Sequence
  Description of Artificial Sequence: Synthetic oligonucleotide
  Antisense strand to SEQ ID NO: 2345030
uucuguauacaucugcugc

SEQ ID NO: 2345032 - RNA, 19 nt, Artificial Sequence
  Description of Artificial Sequence: Synthetic oligonucleotide
  Sense strand starting at position 737 of SEQ ID NO: 1885474
uggagaaauugcccaauau

SEQ ID NO: 2345033 - RNA, 19 nt, Artificial Sequence
  Description of Artificial Sequence: Synthetic oligonucleotide
  Antisense strand to SEQ ID NO: 2345032
auauugggcaauuucucca

SEQ ID NO: 2345034 - RNA, 19 nt, Artificial Sequence
  Description of Artificial Sequence: Synthetic oligonucleotide
  Sense strand starting at position 843 of SEQ ID NO: 1885474
uagguuaaauccuugaagu

SEQ ID NO: 2345035 - RNA, 19 nt, Artificial Sequence
  Description of Artificial Sequence: Synthetic oligonucleotide
  Antisense strand to SEQ ID NO: 2345034
acuucaaggauuuaaccua

SEQ ID NO: 2345036 - RNA, 19 nt, Artificial Sequence
  Description of Artificial Sequence: Synthetic oligonucleotide
  Sense strand starting at position 844 of SEQ ID NO: 1885474
agguuaaauccuugaagua

SEQ ID NO: 2345037 - RNA, 19 nt, Artificial Sequence
  Description of Artificial Sequence: Synthetic oligonucleotide
  Antisense strand to SEQ ID NO: 2345036
uacuucaaggauuuaaccu

SEQ ID NO: 2345038 - RNA, 19 nt, Artificial Sequence
  Description of Artificial Sequence: Synthetic oligonucleotide
  Sense strand starting at position 845 of SEQ ID NO: 1885474
gguuaaauccuugaaguau

SEQ ID NO: 2345039 - RNA, 19 nt, Artificial Sequence
  Description of Artificial Sequence: Synthetic oligonucleotide
  Antisense strand to SEQ ID NO: 2345038
auacuucaaggauuuaacc

SEQ ID NO: 2345040 - RNA, 19 nt, Artificial Sequence
  Description of Artificial Sequence: Synthetic oligonucleotide
  Sense strand starting at position 1373 of SEQ ID NO: 1885474
cguuccuucccagaaggau

SEQ ID NO: 2345041 - RNA, 19 nt, Artificial Sequence
  Description of Artificial Sequence: Synthetic oligonucleotide
  Antisense strand to SEQ ID NO: 2345040
auccuucugggaaggaacg

SEQ ID NO: 2345042 - RNA, 19 nt, Artificial Sequence
  Description of Artificial Sequence: Synthetic oligonucleotide
  Sense strand starting at position 1917 of SEQ ID NO: 1885474
gcaggacuugugggagcaa

SEQ ID NO: 2345043 - RNA, 19 nt, Artificial Sequence
  Description of Artificial Sequence: Synthetic oligonucleotide
  Antisense strand to SEQ ID NO: 2345042
uugcucccacaaguccugc

SEQ ID NO: 2345044 - RNA, 19 nt, Artificial Sequence
  Description of Artificial Sequence: Synthetic oligonucleotide
  Sense strand starting at position 2289 of SEQ ID NO: 1885474
uggaaaugauuccuuagcu

SEQ ID NO: 2345045 - RNA, 19 nt, Artificial Sequence
  Description of Artificial Sequence: Synthetic oligonucleotide
  Antisense strand to SEQ ID NO: 2345044
agcuaaggaaucauuucca

SEQ ID NO: 2345046 - RNA, 19 nt, Artificial Sequence
  Description of Artificial Sequence: Synthetic oligonucleotide
  Sense strand starting at position 2290 of SEQ ID NO: 1885474
ggaaaugauuccuuagcug

SEQ ID NO: 2345047 - RNA, 19 nt, Artificial Sequence
  Description of Artificial Sequence: Synthetic oligonucleotide
  Antisense strand to SEQ ID NO: 2345046
cagcuaaggaaucauuucc

SEQ ID NO: 2345048 - RNA, 19 nt, Artificial Sequence
  Description of Artificial Sequence: Synthetic oligonucleotide
  Sense strand starting at position 2323 of SEQ ID NO: 1885474
gcccucucuguguacagaa

SEQ ID NO: 2345049 - RNA, 19 nt, Artificial Sequence
  Description of Artificial Sequence: Synthetic oligonucleotide
  Antisense strand to SEQ ID NO: 2345048
uucuguacacagagagggc

SEQ ID NO: 2345050 - RNA, 19 nt, Artificial Sequence
  Description of Artificial Sequence: Synthetic oligonucleotide
  Sense strand starting at position 2425 of SEQ ID NO: 1885474
aagaaugcacauuguuaga

SEQ ID NO: 2345051 - RNA, 19 nt, Artificial Sequence
  Description of Artificial Sequence: Synthetic oligonucleotide
  Antisense strand to SEQ ID NO: 2345050
ucuaacaaugugcauucuu

SEQ ID NO: 2345052 - RNA, 19 nt, Artificial Sequence
  Description of Artificial Sequence: Synthetic oligonucleotide
  Sense strand starting at position 2427 of SEQ ID NO: 1885474
gaaugcacauuguuagaag

SEQ ID NO: 2345053 - RNA, 19 nt, Artificial Sequence
  Description of Artificial Sequence: Synthetic oligonucleotide
  Antisense strand to SEQ ID NO: 2345052
cuucuaacaaugugcauuc

SEQ ID NO: 2345054 - RNA, 19 nt, Artificial Sequence
  Description of Artificial Sequence: Synthetic oligonucleotide
  Sense strand starting at position 2508 of SEQ ID NO: 1885474
aacgguagauaccuguaau

SEQ ID NO: 2345055 - RNA, 19 nt, Artificial Sequence
  Description of Artificial Sequence: Synthetic oligonucleotide
  Antisense strand to SEQ ID NO: 2345054
auuacagguaucuaccguu

SEQ ID NO: 2345056 - RNA, 19 nt, Artificial Sequence
  Description of Artificial Sequence: Synthetic oligonucleotide
  Sense strand starting at position 2509 of SEQ ID NO: 1885474
acgguagauaccuguaauu

SEQ ID NO: 2345057 - RNA, 19 nt, Artificial Sequence
  Description of Artificial Sequence: Synthetic oligonucleotide
  Antisense strand to SEQ ID NO: 2345056
aauuacagguaucuaccgu

SEQ ID NO: 2345058 - RNA, 19 nt, Artificial Sequence
  Description of Artificial Sequence: Synthetic oligonucleotide
  Sense strand starting at position 2544 of SEQ ID NO: 1885474
uaggguccaucaguuugau

SEQ ID NO: 2345059 - RNA, 19 nt, Artificial Sequence
  Description of Artificial Sequence: Synthetic oligonucleotide
  Antisense strand to SEQ ID NO: 2345058
aucaaacugauggacccua

SEQ ID NO: 2345060 - RNA, 19 nt, Artificial Sequence
  Description of Artificial Sequence: Synthetic oligonucleotide
  Sense strand starting at position 2557 of SEQ ID NO: 1885474
uuugauucguaacccaaau

SEQ ID NO: 2345061 - RNA, 19 nt, Artificial Sequence
  Description of Artificial Sequence: Synthetic oligonucleotide
  Antisense strand to SEQ ID NO: 2345060
auuuggguuacgaaucaaa

SEQ ID NO: 2345062 - RNA, 19 nt, Artificial Sequence
  Description of Artificial Sequence: Synthetic oligonucleotide
  Sense strand starting at position 2669 of SEQ ID NO: 1885474
agagguugcuaagcaauga

SEQ ID NO: 2345063 - RNA, 19 nt, Artificial Sequence
  Description of Artificial Sequence: Synthetic oligonucleotide
  Antisense strand to SEQ ID NO: 2345062
ucauugcuuagcaaccucu

SEQ ID NO: 2345064 - RNA, 19 nt, Artificial Sequence
  Description of Artificial Sequence: Synthetic oligonucleotide
  Sense strand starting at position 2705 of SEQ ID NO: 1885474
ccagaagcaucacugugaa

SEQ ID NO: 2345065 - RNA, 19 nt, Artificial Sequence
  Description of Artificial Sequence: Synthetic oligonucleotide
  Antisense strand to SEQ ID NO: 2345064
uucacagugaugcuucugg

SEQ ID NO: 2345066 - RNA, 19 nt, Artificial Sequence
  Description of Artificial Sequence: Synthetic oligonucleotide
  Sense strand starting at position 2708 of SEQ ID NO: 1885474
gaagcaucacugugaagac

SEQ ID NO: 2345067 - RNA, 19 nt, Artificial Sequence
  Description of Artificial Sequence: Synthetic oligonucleotide
  Antisense strand to SEQ ID NO: 2345066
gucuucacagugaugcuuc

SEQ ID NO: 2345068 - RNA, 19 nt, Artificial Sequence
  Description of Artificial Sequence: Synthetic oligonucleotide
  Sense strand starting at position 3192 of SEQ ID NO: 1885474
ugcugugucagagaaaugu

SEQ ID NO: 2345069 - RNA, 19 nt, Artificial Sequence
  Description of Artificial Sequence: Synthetic oligonucleotide
  Antisense strand to SEQ ID NO: 2345068
acauuucucugacacagca

SEQ ID NO: 2345070 - RNA, 19 nt, Artificial Sequence
  Description of Artificial Sequence: Synthetic oligonucleotide
  Sense strand starting at position 3196 of SEQ ID NO: 1885474
gugucagagaaauguagua

SEQ ID NO: 2345071 - RNA, 19 nt, Artificial Sequence
  Description of Artificial Sequence: Synthetic oligonucleotide
  Antisense strand to SEQ ID NO: 2345070
uacuacauuucucugacac

SEQ ID NO: 2345072 - RNA, 19 nt, Artificial Sequence
  Description of Artificial Sequence: Synthetic oligonucleotide
  Sense strand starting at position 3218 of SEQ ID NO: 1885474
gcgaguaaguauuuaauca

SEQ ID NO: 2345073 - RNA, 19 nt, Artificial Sequence
  Description of Artificial Sequence: Synthetic oligonucleotide
  Antisense strand to SEQ ID NO: 2345072
ugauuaaauacuuacucgc

SEQ ID NO: 2345074 - RNA, 19 nt, Artificial Sequence
  Description of Artificial Sequence: Synthetic oligonucleotide
  Sense strand starting at position 3274 of SEQ ID NO: 1885474
agauucuguucucccugau

SEQ ID NO: 2345075 - RNA, 19 nt, Artificial Sequence
  Description of Artificial Sequence: Synthetic oligonucleotide
  Antisense strand to SEQ ID NO: 2345074
aucagggagaacagaaucu

SEQ ID NO: 2345076 - RNA, 19 nt, Artificial Sequence
  Description of Artificial Sequence: Synthetic oligonucleotide
  Sense strand starting at position 3515 of SEQ ID NO: 1885474
ggcugcuagaaaugaucuu

SEQ ID NO: 2345077 - RNA, 19 nt, Artificial Sequence
  Description of Artificial Sequence: Synthetic oligonucleotide
  Antisense strand to SEQ ID NO: 2345076
aagaucauuucuagcagcc

SEQ ID NO: 2345078 - RNA, 19 nt, Artificial Sequence
  Description of Artificial Sequence: Synthetic oligonucleotide
  Sense strand starting at position 3623 of SEQ ID NO: 1885474
auagaaauugguugucuca

SEQ ID NO: 2345079 - RNA, 19 nt, Artificial Sequence
  Description of Artificial Sequence: Synthetic oligonucleotide
  Antisense strand to SEQ ID NO: 2345078
ugagacaaccaauuucuau

SEQ ID NO: 2345080 - RNA, 19 nt, Artificial Sequence
  Description of Artificial Sequence: Synthetic oligonucleotide
  Sense strand starting at position 3625 of SEQ ID NO: 1885474
agaaauugguugucucaca

SEQ ID NO: 2345081 - RNA, 19 nt, Artificial Sequence
  Description of Artificial Sequence: Synthetic oligonucleotide
  Antisense strand to SEQ ID NO: 2345080
ugugagacaaccaauuucu

SEQ ID NO: 2345082 - RNA, 19 nt, Artificial Sequence
  Description of Artificial Sequence: Synthetic oligonucleotide
  Sense strand starting at position 3626 of SEQ ID NO: 1885474
gaaauugguugucucacag

SEQ ID NO: 2345083 - RNA, 19 nt, Artificial Sequence
  Description of Artificial Sequence: Synthetic oligonucleotide
  Antisense strand to SEQ ID NO: 2345082
cugugagacaaccaauuuc

SEQ ID NO: 2345084 - RNA, 19 nt, Artificial Sequence
  Description of Artificial Sequence: Synthetic oligonucleotide
  Sense strand starting at position 3650 of SEQ ID NO: 1885474
gaggguaggugucccaaau

SEQ ID NO: 2345085 - RNA, 19 nt, Artificial Sequence
  Description of Artificial Sequence: Synthetic oligonucleotide
  Antisense strand to SEQ ID NO: 2345084
auuugggacaccuacccuc

SEQ ID NO: 2345086 - RNA, 19 nt, Artificial Sequence
  Description of Artificial Sequence: Synthetic oligonucleotide
  Sense strand starting at position 3769 of SEQ ID NO: 1885474
gguauuggaucauuagggu

SEQ ID NO: 2345087 - RNA, 19 nt, Artificial Sequence
  Description of Artificial Sequence: Synthetic oligonucleotide
  Antisense strand to SEQ ID NO: 2345086
acccuaaugauccaauacc

SEQ ID NO: 2345088 - RNA, 19 nt, Artificial Sequence
  Description of Artificial Sequence: Synthetic oligonucleotide
  Sense strand starting at position 386 of SEQ ID NO: 1885475
gggcauggccaggaucuaa

SEQ ID NO: 2345089 - RNA, 19 nt, Artificial Sequence
  Description of Artificial Sequence: Synthetic oligonucleotide
  Antisense strand to SEQ ID NO: 2345088
uuagauccuggccaugccc

SEQ ID NO: 2345090 - RNA, 19 nt, Artificial Sequence
  Description of Artificial Sequence: Synthetic oligonucleotide
  Sense strand starting at position 571 of SEQ ID NO: 1885475
gcccgucgggaaguguaau

SEQ ID NO: 2345091 - RNA, 19 nt, Artificial Sequence
  Description of Artificial Sequence: Synthetic oligonucleotide
  Antisense strand to SEQ ID NO: 2345090
auuacacuucccgacgggc

SEQ ID NO: 2345092 - RNA, 19 nt, Artificial Sequence
  Description of Artificial Sequence: Synthetic oligonucleotide
  Sense strand starting at position 862 of SEQ ID NO: 1885475
aaauguacacgaugggaua

SEQ ID NO: 2345093 - RNA, 19 nt, Artificial Sequence
  Description of Artificial Sequence: Synthetic oligonucleotide
  Antisense strand to SEQ ID NO: 2345092
uaucccaucguguacauuu

SEQ ID NO: 2345094 - RNA, 19 nt, Artificial Sequence
  Description of Artificial Sequence: Synthetic oligonucleotide
  Sense strand starting at position 1088 of SEQ ID NO: 1885475
ggagacaacugccagaaua

SEQ ID NO: 2345095 - RNA, 19 nt, Artificial Sequence
  Description of Artificial Sequence: Synthetic oligonucleotide
  Antisense strand to SEQ ID NO: 2345094
uauucuggcaguugucucc

SEQ ID NO: 2345096 - RNA, 19 nt, Artificial Sequence
  Description of Artificial Sequence: Synthetic oligonucleotide
  Sense strand starting at position 1098 of SEQ ID NO: 1885475
gccagaauauucguuacag

SEQ ID NO: 2345097 - RNA, 19 nt, Artificial Sequence
  Description of Artificial Sequence: Synthetic oligonucleotide
  Antisense strand to SEQ ID NO: 2345096
cuguaacgaauauucuggc

SEQ ID NO: 2345098 - RNA, 19 nt, Artificial Sequence
  Description of Artificial Sequence: Synthetic oligonucleotide
  Sense strand starting at position 1099 of SEQ ID NO: 1885475
ccagaauauucguuacagu

SEQ ID NO: 2345099 - RNA, 19 nt, Artificial Sequence
  Description of Artificial Sequence: Synthetic oligonucleotide
  Antisense strand to SEQ ID NO: 2345098
acuguaacgaauauucugg

SEQ ID NO: 2345100 - RNA, 19 nt, Artificial Sequence
  Description of Artificial Sequence: Synthetic oligonucleotide
  Sense strand starting at position 1100 of SEQ ID NO: 1885475
cagaauauucguuacagug

SEQ ID NO: 2345101 - RNA, 19 nt, Artificial Sequence
  Description of Artificial Sequence: Synthetic oligonucleotide
  Antisense strand to SEQ ID NO: 2345100
cacuguaacgaauauucug

SEQ ID NO: 2345102 - RNA, 19 nt, Artificial Sequence
  Description of Artificial Sequence: Synthetic oligonucleotide
  Sense strand starting at position 1167 of SEQ ID NO: 1885475
ggaauaagucuaugcacac

SEQ ID NO: 2345103 - RNA, 19 nt, Artificial Sequence
  Description of Artificial Sequence: Synthetic oligonucleotide
  Antisense strand to SEQ ID NO: 2345102
gugugcauagacuuauucc

SEQ ID NO: 2345104 - RNA, 19 nt, Artificial Sequence
  Description of Artificial Sequence: Synthetic oligonucleotide
  Sense strand starting at position 1303 of SEQ ID NO: 1885475
auucgaaaccgcuauauag

SEQ ID NO: 2345105 - RNA, 19 nt, Artificial Sequence
  Description of Artificial Sequence: Synthetic oligonucleotide
  Antisense strand to SEQ ID NO: 2345104
cuauauagcgguuucgaau

SEQ ID NO: 2345106 - RNA, 19 nt, Artificial Sequence
  Description of Artificial Sequence: Synthetic oligonucleotide
  Sense strand starting at position 1305 of SEQ ID NO: 1885475
ucgaaaccgcuauauagau

SEQ ID NO: 2345107 - RNA, 19 nt, Artificial Sequence
  Description of Artificial Sequence: Synthetic oligonucleotide
  Antisense strand to SEQ ID NO: 2345106
aucuauauagcgguuucga

SEQ ID NO: 2345108 - RNA, 19 nt, Artificial Sequence
  Description of Artificial Sequence: Synthetic oligonucleotide
  Sense strand starting at position 1767 of SEQ ID NO: 1885475
cggaacuccugcucccaaa

SEQ ID NO: 2345109 - RNA, 19 nt, Artificial Sequence
  Description of Artificial Sequence: Synthetic oligonucleotide
  Antisense strand to SEQ ID NO: 2345108
uuugggagcaggaguuccg

SEQ ID NO: 2345110 - RNA, 19 nt, Artificial Sequence
  Description of Artificial Sequence: Synthetic oligonucleotide
  Sense strand starting at position 1937 of SEQ ID NO: 1885475
agagacggcguuugauaga

SEQ ID NO: 2345111 - RNA, 19 nt, Artificial Sequence
  Description of Artificial Sequence: Synthetic oligonucleotide
  Antisense strand to SEQ ID NO: 2345110
ucuaucaaacgccgucucu

SEQ ID NO: 2345112 - RNA, 19 nt, Artificial Sequence
  Description of Artificial Sequence: Synthetic oligonucleotide
  Sense strand starting at position 1942 of SEQ ID NO: 1885475
cggcguuugauagagagga

SEQ ID NO: 2345113 - RNA, 19 nt, Artificial Sequence
  Description of Artificial Sequence: Synthetic oligonucleotide
  Antisense strand to SEQ ID NO: 2345112
uccucucuaucaaacgccg

SEQ ID NO: 2345114 - RNA, 19 nt, Artificial Sequence
  Description of Artificial Sequence: Synthetic oligonucleotide
  Sense strand starting at position 1943 of SEQ ID NO: 1885475
ggcguuugauagagaggaa

SEQ ID NO: 2345115 - RNA, 19 nt, Artificial Sequence
  Description of Artificial Sequence: Synthetic oligonucleotide
  Antisense strand to SEQ ID NO: 2345114
uuccucucuaucaaacgcc

SEQ ID NO: 2345116 - RNA, 19 nt, Artificial Sequence
  Description of Artificial Sequence: Synthetic oligonucleotide
  Sense strand starting at position 1944 of SEQ ID NO: 1885475
gcguuugauagagaggaag

SEQ ID NO: 2345117 - RNA, 19 nt, Artificial Sequence
  Description of Artificial Sequence: Synthetic oligonucleotide
  Antisense strand to SEQ ID NO: 2345116
cuuccucucuaucaaacgc

SEQ ID NO: 2345118 - RNA, 19 nt, Artificial Sequence
  Description of Artificial Sequence: Synthetic oligonucleotide
  Sense strand starting at position 1946 of SEQ ID NO: 1885475
guuugauagagaggaaggu

SEQ ID NO: 2345119 - RNA, 19 nt, Artificial Sequence
  Description of Artificial Sequence: Synthetic oligonucleotide
  Antisense strand to SEQ ID NO: 2345118
accuuccucucuaucaaac

SEQ ID NO: 2345120 - RNA, 19 nt, Artificial Sequence
  Description of Artificial Sequence: Synthetic oligonucleotide
  Sense strand starting at position 2080 of SEQ ID NO: 1885475
acaauagguauccgagagu

SEQ ID NO: 2345121 - RNA, 19 nt, Artificial Sequence
  Description of Artificial Sequence: Synthetic oligonucleotide
  Antisense strand to SEQ ID NO: 2345120
acucucggauaccuauugu

SEQ ID NO: 2345122 - RNA, 19 nt, Artificial Sequence
  Description of Artificial Sequence: Synthetic oligonucleotide
  Sense strand starting at position 2083 of SEQ ID NO: 1885475
auagguauccgagagugua

SEQ ID NO: 2345123 - RNA, 19 nt, Artificial Sequence
  Description of Artificial Sequence: Synthetic oligonucleotide
  Antisense strand to SEQ ID NO: 2345122
uacacucucggauaccuau

SEQ ID NO: 2345124 - RNA, 19 nt, Artificial Sequence
  Description of Artificial Sequence: Synthetic oligonucleotide
  Sense strand starting at position 2091 of SEQ ID NO: 1885475
ccgagaguguaacuacuuu

SEQ ID NO: 2345125 - RNA, 19 nt, Artificial Sequence
  Description of Artificial Sequence: Synthetic oligonucleotide
  Antisense strand to SEQ ID NO: 2345124
aaaguaguuacacucucgg

SEQ ID NO: 2345126 - RNA, 19 nt, Artificial Sequence
  Description of Artificial Sequence: Synthetic oligonucleotide
  Sense strand starting at position 2097 of SEQ ID NO: 1885475
guguaacuacuuuauggca

SEQ ID NO: 2345127 - RNA, 19 nt, Artificial Sequence
  Description of Artificial Sequence: Synthetic oligonucleotide
  Antisense strand to SEQ ID NO: 2345126
ugccauaaaguaguuacac

SEQ ID NO: 2345128 - RNA, 19 nt, Artificial Sequence
  Description of Artificial Sequence: Synthetic oligonucleotide
  Sense strand starting at position 2129 of SEQ ID NO: 1885475
cuguguauaauagauguuu

SEQ ID NO: 2345129 - RNA, 19 nt, Artificial Sequence
  Description of Artificial Sequence: Synthetic oligonucleotide
  Antisense strand to SEQ ID NO: 2345128
aaacaucuauuauacacag

SEQ ID NO: 2345130 - RNA, 19 nt, Artificial Sequence
  Description of Artificial Sequence: Synthetic oligonucleotide
  Sense strand starting at position 2512 of SEQ ID NO: 1885475
aucgauagauaagauagau

SEQ ID NO: 2345131 - RNA, 19 nt, Artificial Sequence
  Description of Artificial Sequence: Synthetic oligonucleotide
  Antisense strand to SEQ ID NO: 2345130
aucuaucuuaucuaucgau

SEQ ID NO: 2345132 - RNA, 19 nt, Artificial Sequence
  Description of Artificial Sequence: Synthetic oligonucleotide
  Sense strand starting at position 2539 of SEQ ID NO: 1885475
gaaugaaaugcuuaucagu

SEQ ID NO: 2345133 - RNA, 19 nt, Artificial Sequence
  Description of Artificial Sequence: Synthetic oligonucleotide
  Antisense strand to SEQ ID NO: 2345132
acugauaagcauuucauuc

SEQ ID NO: 2345134 - RNA, 19 nt, Artificial Sequence
  Description of Artificial Sequence: Synthetic oligonucleotide
  Sense strand starting at position 2547 of SEQ ID NO: 1885475
ugcuuaucaguugacugau

SEQ ID NO: 2345135 - RNA, 19 nt, Artificial Sequence
  Description of Artificial Sequence: Synthetic oligonucleotide
  Antisense strand to SEQ ID NO: 2345134
aucagucaacugauaagca

SEQ ID NO: 2345136 - RNA, 19 nt, Artificial Sequence
  Description of Artificial Sequence: Synthetic oligonucleotide
  Sense strand starting at position 2549 of SEQ ID NO: 1885475
cuuaucaguugacugauua

SEQ ID NO: 2345137 - RNA, 19 nt, Artificial Sequence
  Description of Artificial Sequence: Synthetic oligonucleotide
  Antisense strand to SEQ ID NO: 2345136
uaaucagucaacugauaag

SEQ ID NO: 2345138 - RNA, 19 nt, Artificial Sequence
  Description of Artificial Sequence: Synthetic oligonucleotide
  Sense strand starting at position 2550 of SEQ ID NO: 1885475
uuaucaguugacugauuag

SEQ ID NO: 2345139 - RNA, 19 nt, Artificial Sequence
  Description of Artificial Sequence: Synthetic oligonucleotide
  Antisense strand to SEQ ID NO: 2345138
cuaaucagucaacugauaa

SEQ ID NO: 2345140 - RNA, 19 nt, Artificial Sequence
  Description of Artificial Sequence: Synthetic oligonucleotide
  Sense strand starting at position 2553 of SEQ ID NO: 1885475
ucaguugacugauuaguac

SEQ ID NO: 2345141 - RNA, 19 nt, Artificial Sequence
  Description of Artificial Sequence: Synthetic oligonucleotide
  Antisense strand to SEQ ID NO: 2345140
guacuaaucagucaacuga

SEQ ID NO: 2345142 - RNA, 19 nt, Artificial Sequence
  Description of Artificial Sequence: Synthetic oligonucleotide
  Sense strand starting at position 2642 of SEQ ID NO: 1885475
cuggaugugucuucucacu

SEQ ID NO: 2345143 - RNA, 19 nt, Artificial Sequence
  Description of Artificial Sequence: Synthetic oligonucleotide
  Antisense strand to SEQ ID NO: 2345142
agugagaagacacauccag

SEQ ID NO: 2345144 - RNA, 19 nt, Artificial Sequence
  Description of Artificial Sequence: Synthetic oligonucleotide
  Sense strand starting at position 2644 of SEQ ID NO: 1885475
ggaugugucuucucacuuu

SEQ ID NO: 2345145 - RNA, 19 nt, Artificial Sequence
  Description of Artificial Sequence: Synthetic oligonucleotide
  Antisense strand to SEQ ID NO: 2345144
aaagugagaagacacaucc

SEQ ID NO: 2345146 - RNA, 19 nt, Artificial Sequence
  Description of Artificial Sequence: Synthetic oligonucleotide
  Sense strand starting at position 2753 of SEQ ID NO: 1885475
guaggucaaucaguugaca

SEQ ID NO: 2345147 - RNA, 19 nt, Artificial Sequence
  Description of Artificial Sequence: Synthetic oligonucleotide
  Antisense strand to SEQ ID NO: 2345146
ugucaacugauugaccuac

SEQ ID NO: 2345148 - RNA, 19 nt, Artificial Sequence
  Description of Artificial Sequence: Synthetic oligonucleotide
  Sense strand starting at position 2756 of SEQ ID NO: 1885475
ggucaaucaguugacaauu

SEQ ID NO: 2345149 - RNA, 19 nt, Artificial Sequence
  Description of Artificial Sequence: Synthetic oligonucleotide
  Antisense strand to SEQ ID NO: 2345148
aauugucaacugauugacc

SEQ ID NO: 2345150 - RNA, 19 nt, Artificial Sequence
  Description of Artificial Sequence: Synthetic oligonucleotide
  Sense strand starting at position 3485 of SEQ ID NO: 1885475
ugcuguguaggcuuuccua

SEQ ID NO: 2345151 - RNA, 19 nt, Artificial Sequence
  Description of Artificial Sequence: Synthetic oligonucleotide
  Antisense strand to SEQ ID NO: 2345150
uaggaaagccuacacagca

SEQ ID NO: 2345152 - RNA, 19 nt, Artificial Sequence
  Description of Artificial Sequence: Synthetic oligonucleotide
  Sense strand starting at position 3497 of SEQ ID NO: 1885475
uuuccuaugcaauguagga

SEQ ID NO: 2345153 - RNA, 19 nt, Artificial Sequence
  Description of Artificial Sequence: Synthetic oligonucleotide
  Antisense strand to SEQ ID NO: 2345152
uccuacauugcauaggaaa

SEQ ID NO: 2345154 - RNA, 19 nt, Artificial Sequence
  Description of Artificial Sequence: Synthetic oligonucleotide
  Sense strand starting at position 3756 of SEQ ID NO: 1885475
ucaaguaugucuuucuuau

SEQ ID NO: 2345155 - RNA, 19 nt, Artificial Sequence
  Description of Artificial Sequence: Synthetic oligonucleotide
  Antisense strand to SEQ ID NO: 2345154
auaagaaagacauacuuga

SEQ ID NO: 2345156 - RNA, 19 nt, Artificial Sequence
  Description of Artificial Sequence: Synthetic oligonucleotide
  Sense strand starting at position 3847 of SEQ ID NO: 1885475
gucaccucucuaggguaau

SEQ ID NO: 2345157 - RNA, 19 nt, Artificial Sequence
  Description of Artificial Sequence: Synthetic oligonucleotide
  Antisense strand to SEQ ID NO: 2345156
auuacccuagagaggugac

SEQ ID NO: 2345158 - RNA, 19 nt, Artificial Sequence
  Description of Artificial Sequence: Synthetic oligonucleotide
  Sense strand starting at position 3850 of SEQ ID NO: 1885475
accucucuaggguaaucua

SEQ ID NO: 2345159 - RNA, 19 nt, Artificial Sequence
  Description of Artificial Sequence: Synthetic oligonucleotide
  Antisense strand to SEQ ID NO: 2345158
uagauuacccuagagaggu

SEQ ID NO: 2345160 - RNA, 19 nt, Artificial Sequence
  Description of Artificial Sequence: Synthetic oligonucleotide
  Sense strand starting at position 3857 of SEQ ID NO: 1885475
uaggguaaucuagguuuac

SEQ ID NO: 2345161 - RNA, 19 nt, Artificial Sequence
  Description of Artificial Sequence: Synthetic oligonucleotide
  Antisense strand to SEQ ID NO: 2345160
guaaaccuagauuacccua

SEQ ID NO: 2345162 - RNA, 19 nt, Artificial Sequence
  Description of Artificial Sequence: Synthetic oligonucleotide
  Sense strand starting at position 3858 of SEQ ID NO: 1885475
aggguaaucuagguuuaca

SEQ ID NO: 2345163 - RNA, 19 nt, Artificial Sequence
  Description of Artificial Sequence: Synthetic oligonucleotide
  Antisense strand to SEQ ID NO: 2345162
uguaaaccuagauuacccu

SEQ ID NO: 2345164 - RNA, 19 nt, Artificial Sequence
  Description of Artificial Sequence: Synthetic oligonucleotide
  Sense strand starting at position 3861 of SEQ ID NO: 1885475
guaaucuagguuuacagau

SEQ ID NO: 2345165 - RNA, 19 nt, Artificial Sequence
  Description of Artificial Sequence: Synthetic oligonucleotide
  Antisense strand to SEQ ID NO: 2345164
aucuguaaaccuagauuac

SEQ ID NO: 2345166 - RNA, 19 nt, Artificial Sequence
  Description of Artificial Sequence: Synthetic oligonucleotide
  Sense strand starting at position 3946 of SEQ ID NO: 1885475
cucagcauugucuauuacu

SEQ ID NO: 2345167 - RNA, 19 nt, Artificial Sequence
  Description of Artificial Sequence: Synthetic oligonucleotide
  Antisense strand to SEQ ID NO: 2345166
aguaauagacaaugcugag

SEQ ID NO: 2345168 - RNA, 19 nt, Artificial Sequence
  Description of Artificial Sequence: Synthetic oligonucleotide
  Sense strand starting at position 597 of SEQ ID NO: 1885476
cagggcugguucuuaaaga

SEQ ID NO: 2345169 - RNA, 19 nt, Artificial Sequence
  Description of Artificial Sequence: Synthetic oligonucleotide
  Antisense strand to SEQ ID NO: 2345168
ucuuuaagaaccagcccug

SEQ ID NO: 2345170 - RNA, 19 nt, Artificial Sequence
  Description of Artificial Sequence: Synthetic oligonucleotide
  Sense strand starting at position 598 of SEQ ID NO: 1885476
agggcugguucuuaaagaa

SEQ ID NO: 2345171 - RNA, 19 nt, Artificial Sequence
  Description of Artificial Sequence: Synthetic oligonucleotide
  Antisense strand to SEQ ID NO: 2345170
uucuuuaagaaccagcccu

SEQ ID NO: 2345172 - RNA, 19 nt, Artificial Sequence
  Description of Artificial Sequence: Synthetic oligonucleotide
  Sense strand starting at position 664 of SEQ ID NO: 1885476
gaaugcagagcuggaguua

SEQ ID NO: 2345173 - RNA, 19 nt, Artificial Sequence
  Description of Artificial Sequence: Synthetic oligonucleotide
  Antisense strand to SEQ ID NO: 2345172
uaacuccagcucugcauuc

SEQ ID NO: 2345174 - RNA, 19 nt, Artificial Sequence
  Description of Artificial Sequence: Synthetic oligonucleotide
  Sense strand starting at position 893 of SEQ ID NO: 1885476
guaguaauuucucaaacuc

SEQ ID NO: 2345175 - RNA, 19 nt, Artificial Sequence
  Description of Artificial Sequence: Synthetic oligonucleotide
  Antisense strand to SEQ ID NO: 2345174
gaguuugagaaauuacuac

SEQ ID NO: 2345176 - RNA, 19 nt, Artificial Sequence
  Description of Artificial Sequence: Synthetic oligonucleotide
  Sense strand starting at position 978 of SEQ ID NO: 1885476
cccggcuaauaguuauuau

SEQ ID NO: 2345177 - RNA, 19 nt, Artificial Sequence
  Description of Artificial Sequence: Synthetic oligonucleotide
  Antisense strand to SEQ ID NO: 2345176
auaauaacuauuagccggg

SEQ ID NO: 2345178 - RNA, 19 nt, Artificial Sequence
  Description of Artificial Sequence: Synthetic oligonucleotide
  Sense strand starting at position 1098 of SEQ ID NO: 1885476
gcaguuuaccaucacugca

SEQ ID NO: 2345179 - RNA, 19 nt, Artificial Sequence
  Description of Artificial Sequence: Synthetic oligonucleotide
  Antisense strand to SEQ ID NO: 2345178
ugcagugaugguaaacugc

SEQ ID NO: 2345180 - RNA, 19 nt, Artificial Sequence
  Description of Artificial Sequence: Synthetic oligonucleotide
  Sense strand starting at position 1235 of SEQ ID NO: 1885476
uugguuucaccagaggugu

SEQ ID NO: 2345181 - RNA, 19 nt, Artificial Sequence
  Description of Artificial Sequence: Synthetic oligonucleotide
  Antisense strand to SEQ ID NO: 2345180
acaccucuggugaaaccaa

SEQ ID NO: 2345182 - RNA, 19 nt, Artificial Sequence
  Description of Artificial Sequence: Synthetic oligonucleotide
  Sense strand starting at position 1318 of SEQ ID NO: 1885476
auuuccuaccuguguaauu

SEQ ID NO: 2345183 - RNA, 19 nt, Artificial Sequence
  Description of Artificial Sequence: Synthetic oligonucleotide
  Antisense strand to SEQ ID NO: 2345182
aauuacacagguaggaaau

SEQ ID NO: 2345184 - RNA, 19 nt, Artificial Sequence
  Description of Artificial Sequence: Synthetic oligonucleotide
  Sense strand starting at position 1319 of SEQ ID NO: 1885476
uuuccuaccuguguaauua

SEQ ID NO: 2345185 - RNA, 19 nt, Artificial Sequence
  Description of Artificial Sequence: Synthetic oligonucleotide
  Antisense strand to SEQ ID NO: 2345184
uaauuacacagguaggaaa

SEQ ID NO: 2345186 - RNA, 19 nt, Artificial Sequence
  Description of Artificial Sequence: Synthetic oligonucleotide
  Sense strand starting at position 1320 of SEQ ID NO: 1885476
uuccuaccuguguaauuag

SEQ ID NO: 2345187 - RNA, 19 nt, Artificial Sequence
  Description of Artificial Sequence: Synthetic oligonucleotide
  Antisense strand to SEQ ID NO: 2345186
cuaauuacacagguaggaa

SEQ ID NO: 2345188 - RNA, 19 nt, Artificial Sequence
  Description of Artificial Sequence: Synthetic oligonucleotide
  Sense strand starting at position 1323 of SEQ ID NO: 1885476
cuaccuguguaauuagaga

SEQ ID NO: 2345189 - RNA, 19 nt, Artificial Sequence
  Description of Artificial Sequence: Synthetic oligonucleotide
  Antisense strand to SEQ ID NO: 2345188
ucucuaauuacacagguag

SEQ ID NO: 2345190 - RNA, 19 nt, Artificial Sequence
  Description of Artificial Sequence: Synthetic oligonucleotide
  Sense strand starting at position 1328 of SEQ ID NO: 1885476
uguguaauuagagaaagcu

SEQ ID NO: 2345191 - RNA, 19 nt, Artificial Sequence
  Description of Artificial Sequence: Synthetic oligonucleotide
  Antisense strand to SEQ ID NO: 2345190
agcuuucucuaauuacaca

SEQ ID NO: 2345192 - RNA, 19 nt, Artificial Sequence
  Description of Artificial Sequence: Synthetic oligonucleotide
  Sense strand starting at position 1344 of SEQ ID NO: 1885476
gcuauaaauguguaggcuu

SEQ ID NO: 2345193 - RNA, 19 nt, Artificial Sequence
  Description of Artificial Sequence: Synthetic oligonucleotide
  Antisense strand to SEQ ID NO: 2345192
aagccuacacauuuauagc

SEQ ID NO: 2345194 - RNA, 19 nt, Artificial Sequence
  Description of Artificial Sequence: Synthetic oligonucleotide
  Sense strand starting at position 1442 of SEQ ID NO: 1885476
ucucaugucccacgucauu

SEQ ID NO: 2345195 - RNA, 19 nt, Artificial Sequence
  Description of Artificial Sequence: Synthetic oligonucleotide
  Antisense strand to SEQ ID NO: 2345194
aaugacgugggacaugaga

SEQ ID NO: 2345196 - RNA, 19 nt, Artificial Sequence
  Description of Artificial Sequence: Synthetic oligonucleotide
  Sense strand starting at position 1447 of SEQ ID NO: 1885476
ugucccacgucauuaauca

SEQ ID NO: 2345197 - RNA, 19 nt, Artificial Sequence
  Description of Artificial Sequence: Synthetic oligonucleotide
  Antisense strand to SEQ ID NO: 2345196
ugauuaaugacgugggaca

SEQ ID NO: 2345198 - RNA, 19 nt, Artificial Sequence
  Description of Artificial Sequence: Synthetic oligonucleotide
  Sense strand starting at position 1448 of SEQ ID NO: 1885476
gucccacgucauuaaucau

SEQ ID NO: 2345199 - RNA, 19 nt, Artificial Sequence
  Description of Artificial Sequence: Synthetic oligonucleotide
  Antisense strand to SEQ ID NO: 2345198
augauuaaugacgugggac

SEQ ID NO: 2345200 - RNA, 19 nt, Artificial Sequence
  Description of Artificial Sequence: Synthetic oligonucleotide
  Sense strand starting at position 1473 of SEQ ID NO: 1885476
cccugucaguucuaauuac

SEQ ID NO: 2345201 - RNA, 19 nt, Artificial Sequence
  Description of Artificial Sequence: Synthetic oligonucleotide
  Antisense strand to SEQ ID NO: 2345200
guaauuagaacugacaggg

SEQ ID NO: 2345202 - RNA, 19 nt, Artificial Sequence
  Description of Artificial Sequence: Synthetic oligonucleotide
  Sense strand starting at position 1480 of SEQ ID NO: 1885476
aguucuaauuaccuuugua

SEQ ID NO: 2345203 - RNA, 19 nt, Artificial Sequence
  Description of Artificial Sequence: Synthetic oligonucleotide
  Antisense strand to SEQ ID NO: 2345202
uacaaagguaauuagaacu

SEQ ID NO: 2345204 - RNA, 19 nt, Artificial Sequence
  Description of Artificial Sequence: Synthetic oligonucleotide
  Sense strand starting at position 1984 of SEQ ID NO: 1885476
gcggaacucacgcagguua

SEQ ID NO: 2345205 - RNA, 19 nt, Artificial Sequence
  Description of Artificial Sequence: Synthetic oligonucleotide
  Antisense strand to SEQ ID NO: 2345204
uaaccugcgugaguuccgc

SEQ ID NO: 2345206 - RNA, 19 nt, Artificial Sequence
  Description of Artificial Sequence: Synthetic oligonucleotide
  Sense strand starting at position 2286 of SEQ ID NO: 1885476
aauaguagcuaaugguuaa

SEQ ID NO: 2345207 - RNA, 19 nt, Artificial Sequence
  Description of Artificial Sequence: Synthetic oligonucleotide
  Antisense strand to SEQ ID NO: 2345206
uuaaccauuagcuacuauu

SEQ ID NO: 2345208 - RNA, 19 nt, Artificial Sequence
  Description of Artificial Sequence: Synthetic oligonucleotide
  Sense strand starting at position 2290 of SEQ ID NO: 1885476
guagcuaaugguuaauacu

SEQ ID NO: 2345209 - RNA, 19 nt, Artificial Sequence
  Description of Artificial Sequence: Synthetic oligonucleotide
  Antisense strand to SEQ ID NO: 2345208
aguauuaaccauuagcuac

SEQ ID NO: 2345210 - RNA, 19 nt, Artificial Sequence
  Description of Artificial Sequence: Synthetic oligonucleotide
  Sense strand starting at position 2299 of SEQ ID NO: 1885476
gguuaauacuuacaagaac

SEQ ID NO: 2345211 - RNA, 19 nt, Artificial Sequence
  Description of Artificial Sequence: Synthetic oligonucleotide
  Antisense strand to SEQ ID NO: 2345210
guucuuguaaguauuaacc

SEQ ID NO: 2345212 - RNA, 19 nt, Artificial Sequence
  Description of Artificial Sequence: Synthetic oligonucleotide
  Sense strand starting at position 2455 of SEQ ID NO: 1885476
ccaggaguuucgcaccaac

SEQ ID NO: 2345213 - RNA, 19 nt, Artificial Sequence
  Description of Artificial Sequence: Synthetic oligonucleotide
  Antisense strand to SEQ ID NO: 2345212
guuggugcgaaacuccugg

SEQ ID NO: 2345214 - RNA, 19 nt, Artificial Sequence
  Description of Artificial Sequence: Synthetic oligonucleotide
  Sense strand starting at position 2733 of SEQ ID NO: 1885476
gagcuugugagaggugaca

SEQ ID NO: 2345215 - RNA, 19 nt, Artificial Sequence
  Description of Artificial Sequence: Synthetic oligonucleotide
  Antisense strand to SEQ ID NO: 2345214
ugucaccucucacaagcuc

SEQ ID NO: 2345216 - RNA, 19 nt, Artificial Sequence
  Description of Artificial Sequence: Synthetic oligonucleotide
  Sense strand starting at position 3130 of SEQ ID NO: 1885476
gcugccuucccacgggaaa

SEQ ID NO: 2345217 - RNA, 19 nt, Artificial Sequence
  Description of Artificial Sequence: Synthetic oligonucleotide
  Antisense strand to SEQ ID NO: 2345216
uuucccgugggaaggcagc

SEQ ID NO: 2345218 - RNA, 19 nt, Artificial Sequence
  Description of Artificial Sequence: Synthetic oligonucleotide
  Sense strand starting at position 3336 of SEQ ID NO: 1885476
gcacgauccacugggugaa

SEQ ID NO: 2345219 - RNA, 19 nt, Artificial Sequence
  Description of Artificial Sequence: Synthetic oligonucleotide
  Antisense strand to SEQ ID NO: 2345218
uucacccaguggaucgugc

SEQ ID NO: 2345220 - RNA, 19 nt, Artificial Sequence
  Description of Artificial Sequence: Synthetic oligonucleotide
  Sense strand starting at position 3560 of SEQ ID NO: 1885476
gucaacacucuguaucuaa

SEQ ID NO: 2345221 - RNA, 19 nt, Artificial Sequence
  Description of Artificial Sequence: Synthetic oligonucleotide
  Antisense strand to SEQ ID NO: 2345220
uuagauacagaguguugac

SEQ ID NO: 2345222 - RNA, 19 nt, Artificial Sequence
  Description of Artificial Sequence: Synthetic oligonucleotide
  Sense strand starting at position 3606 of SEQ ID NO: 1885476
uugugucuagcugaggaau

SEQ ID NO: 2345223 - RNA, 19 nt, Artificial Sequence
  Description of Artificial Sequence: Synthetic oligonucleotide
  Antisense strand to SEQ ID NO: 2345222
auuccucagcuagacacaa

SEQ ID NO: 2345224 - RNA, 19 nt, Artificial Sequence
  Description of Artificial Sequence: Synthetic oligonucleotide
  Sense strand starting at position 3608 of SEQ ID NO: 1885476
gugucuagcugaggaauug

SEQ ID NO: 2345225 - RNA, 19 nt, Artificial Sequence
  Description of Artificial Sequence: Synthetic oligonucleotide
  Antisense strand to SEQ ID NO: 2345224
caauuccucagcuagacac

SEQ ID NO: 2345226 - RNA, 19 nt, Artificial Sequence
  Description of Artificial Sequence: Synthetic oligonucleotide
  Sense strand starting at position 3609 of SEQ ID NO: 1885476
ugucuagcugaggaauugu

SEQ ID NO: 2345227 - RNA, 19 nt, Artificial Sequence
  Description of Artificial Sequence: Synthetic oligonucleotide
  Antisense strand to SEQ ID NO: 2345226
acaauuccucagcuagaca

SEQ ID NO: 2345228 - RNA, 19 nt, Artificial Sequence
  Description of Artificial Sequence: Synthetic oligonucleotide
  Sense strand starting at position 3895 of SEQ ID NO: 1885476
ccaugaacucaccgggaaa

SEQ ID NO: 2345229 - RNA, 19 nt, Artificial Sequence
  Description of Artificial Sequence: Synthetic oligonucleotide
  Antisense strand to SEQ ID NO: 2345228
uuucccggugaguucaugg

SEQ ID NO: 2345230 - RNA, 19 nt, Artificial Sequence
  Description of Artificial Sequence: Synthetic oligonucleotide
  Sense strand starting at position 12 of SEQ ID NO: 1885477
cgucuaacucaugacauca

SEQ ID NO: 2345231 - RNA, 19 nt, Artificial Sequence
  Description of Artificial Sequence: Synthetic oligonucleotide
  Antisense strand to SEQ ID NO: 2345230
ugaugucaugaguuagacg

SEQ ID NO: 2345232 - RNA, 19 nt, Artificial Sequence
  Description of Artificial Sequence: Synthetic oligonucleotide
  Sense strand starting at position 102 of SEQ ID NO: 1885477
ucuaguacauucccugaua

SEQ ID NO: 2345233 - RNA, 19 nt, Artificial Sequence
  Description of Artificial Sequence: Synthetic oligonucleotide
  Antisense strand to SEQ ID NO: 2345232
uaucagggaauguacuaga

SEQ ID NO: 2345234 - RNA, 19 nt, Artificial Sequence
  Description of Artificial Sequence: Synthetic oligonucleotide
  Sense strand starting at position 103 of SEQ ID NO: 1885477
cuaguacauucccugauau

SEQ ID NO: 2345235 - RNA, 19 nt, Artificial Sequence
  Description of Artificial Sequence: Synthetic oligonucleotide
  Antisense strand to SEQ ID NO: 2345234
auaucagggaauguacuag

SEQ ID NO: 2345236 - RNA, 19 nt, Artificial Sequence
  Description of Artificial Sequence: Synthetic oligonucleotide
  Sense strand starting at position 121 of SEQ ID NO: 1885477
ugcagauggugcucagcaa

SEQ ID NO: 2345237 - RNA, 19 nt, Artificial Sequence
  Description of Artificial Sequence: Synthetic oligonucleotide
  Antisense strand to SEQ ID NO: 2345236
uugcugagcaccaucugca

SEQ ID NO: 2345238 - RNA, 19 nt, Artificial Sequence
  Description of Artificial Sequence: Synthetic oligonucleotide
  Sense strand starting at position 122 of SEQ ID NO: 1885477
gcagauggugcucagcaaa

SEQ ID NO: 2345239 - RNA, 19 nt, Artificial Sequence
  Description of Artificial Sequence: Synthetic oligonucleotide
  Antisense strand to SEQ ID NO: 2345238
uuugcugagcaccaucugc

SEQ ID NO: 2345240 - RNA, 19 nt, Artificial Sequence
  Description of Artificial Sequence: Synthetic oligonucleotide
  Sense strand starting at position 125 of SEQ ID NO: 1885477
gauggugcucagcaaauau

SEQ ID NO: 2345241 - RNA, 19 nt, Artificial Sequence
  Description of Artificial Sequence: Synthetic oligonucleotide
  Antisense strand to SEQ ID NO: 2345240
auauuugcugagcaccauc

SEQ ID NO: 2345242 - RNA, 19 nt, Artificial Sequence
  Description of Artificial Sequence: Synthetic oligonucleotide
  Sense strand starting at position 173 of SEQ ID NO: 1885477
accauuacccucuguguua

SEQ ID NO: 2345243 - RNA, 19 nt, Artificial Sequence
  Description of Artificial Sequence: Synthetic oligonucleotide
  Antisense strand to SEQ ID NO: 2345242
uaacacagaggguaauggu

SEQ ID NO: 2345244 - RNA, 19 nt, Artificial Sequence
  Description of Artificial Sequence: Synthetic oligonucleotide
  Sense strand starting at position 192 of SEQ ID NO: 1885477
gguuuagagccacaguuua

SEQ ID NO: 2345245 - RNA, 19 nt, Artificial Sequence
  Description of Artificial Sequence: Synthetic oligonucleotide
  Antisense strand to SEQ ID NO: 2345244
uaaacuguggcucuaaacc

SEQ ID NO: 2345246 - RNA, 19 nt, Artificial Sequence
  Description of Artificial Sequence: Synthetic oligonucleotide
  Sense strand starting at position 203 of SEQ ID NO: 1885477
acaguuuagaagcggugau

SEQ ID NO: 2345247 - RNA, 19 nt, Artificial Sequence
  Description of Artificial Sequence: Synthetic oligonucleotide
  Antisense strand to SEQ ID NO: 2345246
aucaccgcuucuaaacugu

SEQ ID NO: 2345248 - RNA, 19 nt, Artificial Sequence
  Description of Artificial Sequence: Synthetic oligonucleotide
  Sense strand starting at position 204 of SEQ ID NO: 1885477
caguuuagaagcggugaua

SEQ ID NO: 2345249 - RNA, 19 nt, Artificial Sequence
  Description of Artificial Sequence: Synthetic oligonucleotide
  Antisense strand to SEQ ID NO: 2345248
uaucaccgcuucuaaacug

SEQ ID NO: 2345250 - RNA, 19 nt, Artificial Sequence
  Description of Artificial Sequence: Synthetic oligonucleotide
  Sense strand starting at position 305 of SEQ ID NO: 1885477
ggguaacacucauaugaau

SEQ ID NO: 2345251 - RNA, 19 nt, Artificial Sequence
  Description of Artificial Sequence: Synthetic oligonucleotide
  Antisense strand to SEQ ID NO: 2345250
auucauaugaguguuaccc

SEQ ID NO: 2345252 - RNA, 19 nt, Artificial Sequence
  Description of Artificial Sequence: Synthetic oligonucleotide
  Sense strand starting at position 317 of SEQ ID NO: 1885477
uaugaauaugugugguuga

SEQ ID NO: 2345253 - RNA, 19 nt, Artificial Sequence
  Description of Artificial Sequence: Synthetic oligonucleotide
  Antisense strand to SEQ ID NO: 2345252
ucaaccacacauauucaua

SEQ ID NO: 2345254 - RNA, 19 nt, Artificial Sequence
  Description of Artificial Sequence: Synthetic oligonucleotide
  Sense strand starting at position 320 of SEQ ID NO: 1885477
gaauaugugugguugacga

SEQ ID NO: 2345255 - RNA, 19 nt, Artificial Sequence
  Description of Artificial Sequence: Synthetic oligonucleotide
  Antisense strand to SEQ ID NO: 2345254
ucgucaaccacacauauuc

SEQ ID NO: 2345256 - RNA, 19 nt, Artificial Sequence
  Description of Artificial Sequence: Synthetic oligonucleotide
  Sense strand starting at position 322 of SEQ ID NO: 1885477
auaugugugguugacgaau

SEQ ID NO: 2345257 - RNA, 19 nt, Artificial Sequence
  Description of Artificial Sequence: Synthetic oligonucleotide
  Antisense strand to SEQ ID NO: 2345256
auucgucaaccacacauau

SEQ ID NO: 2345258 - RNA, 19 nt, Artificial Sequence
  Description of Artificial Sequence: Synthetic oligonucleotide
  Sense strand starting at position 328 of SEQ ID NO: 1885477
gugguugacgaaugaugca

SEQ ID NO: 2345259 - RNA, 19 nt, Artificial Sequence
  Description of Artificial Sequence: Synthetic oligonucleotide
  Antisense strand to SEQ ID NO: 2345258
ugcaucauucgucaaccac

SEQ ID NO: 2345260 - RNA, 19 nt, Artificial Sequence
  Description of Artificial Sequence: Synthetic oligonucleotide
  Sense strand starting at position 360 of SEQ ID NO: 1885477
uccgauaucugcucacaac

SEQ ID NO: 2345261 - RNA, 19 nt, Artificial Sequence
  Description of Artificial Sequence: Synthetic oligonucleotide
  Antisense strand to SEQ ID NO: 2345260
guugugagcagauaucgga

SEQ ID NO: 2345262 - RNA, 19 nt, Artificial Sequence
  Description of Artificial Sequence: Synthetic oligonucleotide
  Sense strand starting at position 361 of SEQ ID NO: 1885477
ccgauaucugcucacaaca

SEQ ID NO: 2345263 - RNA, 19 nt, Artificial Sequence
  Description of Artificial Sequence: Synthetic oligonucleotide
  Antisense strand to SEQ ID NO: 2345262
uguugugagcagauaucgg

SEQ ID NO: 2345264 - RNA, 19 nt, Artificial Sequence
  Description of Artificial Sequence: Synthetic oligonucleotide
  Sense strand starting at position 382 of SEQ ID NO: 1885477
agcaguggcucuucugaga

SEQ ID NO: 2345265 - RNA, 19 nt, Artificial Sequence
  Description of Artificial Sequence: Synthetic oligonucleotide
  Antisense strand to SEQ ID NO: 2345264
ucucagaagagccacugcu

SEQ ID NO: 2345266 - RNA, 19 nt, Artificial Sequence
  Description of Artificial Sequence: Synthetic oligonucleotide
  Sense strand starting at position 502 of SEQ ID NO: 1885477
ccuuccugucagugaacuu

SEQ ID NO: 2345267 - RNA, 19 nt, Artificial Sequence
  Description of Artificial Sequence: Synthetic oligonucleotide
  Antisense strand to SEQ ID NO: 2345266
aaguucacugacaggaagg

SEQ ID NO: 2345268 - RNA, 19 nt, Artificial Sequence
  Description of Artificial Sequence: Synthetic oligonucleotide
  Sense strand starting at position 625 of SEQ ID NO: 1885477
acaguccucccuuaguauu

SEQ ID NO: 2345269 - RNA, 19 nt, Artificial Sequence
  Description of Artificial Sequence: Synthetic oligonucleotide
  Antisense strand to SEQ ID NO: 2345268
aauacuaagggaggacugu

SEQ ID NO: 2345270 - RNA, 19 nt, Artificial Sequence
  Description of Artificial Sequence: Synthetic oligonucleotide
  Sense strand starting at position 636 of SEQ ID NO: 1885477
uuaguauuggcaggguauu

SEQ ID NO: 2345271 - RNA, 19 nt, Artificial Sequence
  Description of Artificial Sequence: Synthetic oligonucleotide
  Antisense strand to SEQ ID NO: 2345270
aauacccugccaauacuaa

SEQ ID NO: 2345272 - RNA, 19 nt, Artificial Sequence
  Description of Artificial Sequence: Synthetic oligonucleotide
  Sense strand starting at position 727 of SEQ ID NO: 1885477
gguucugaagccuguggau

SEQ ID NO: 2345273 - RNA, 19 nt, Artificial Sequence
  Description of Artificial Sequence: Synthetic oligonucleotide
  Antisense strand to SEQ ID NO: 2345272
auccacaggcuucagaacc

SEQ ID NO: 2345274 - RNA, 19 nt, Artificial Sequence
  Description of Artificial Sequence: Synthetic oligonucleotide
  Sense strand starting at position 729 of SEQ ID NO: 1885477
uucugaagccuguggauau

SEQ ID NO: 2345275 - RNA, 19 nt, Artificial Sequence
  Description of Artificial Sequence: Synthetic oligonucleotide
  Antisense strand to SEQ ID NO: 2345274
auauccacaggcuucagaa

SEQ ID NO: 2345276 - RNA, 19 nt, Artificial Sequence
  Description of Artificial Sequence: Synthetic oligonucleotide
  Sense strand starting at position 751 of SEQ ID NO: 1885477
gggccaaaugcauauaugu

SEQ ID NO: 2345277 - RNA, 19 nt, Artificial Sequence
  Description of Artificial Sequence: Synthetic oligonucleotide
  Antisense strand to SEQ ID NO: 2345276
acauauaugcauuuggccc

SEQ ID NO: 2345278 - RNA, 19 nt, Artificial Sequence
  Description of Artificial Sequence: Synthetic oligonucleotide
  Sense strand starting at position 1160 of SEQ ID NO: 1885477
gagguuuauuugcuacugu

SEQ ID NO: 2345279 - RNA, 19 nt, Artificial Sequence
  Description of Artificial Sequence: Synthetic oligonucleotide
  Antisense strand to SEQ ID NO: 2345278
acaguagcaaauaaaccuc

SEQ ID NO: 2345280 - RNA, 19 nt, Artificial Sequence
  Description of Artificial Sequence: Synthetic oligonucleotide
  Sense strand starting at position 1169 of SEQ ID NO: 1885477
uugcuacuguucuucggaa

SEQ ID NO: 2345281 - RNA, 19 nt, Artificial Sequence
  Description of Artificial Sequence: Synthetic oligonucleotide
  Antisense strand to SEQ ID NO: 2345280
uuccgaagaacaguagcaa

SEQ ID NO: 2345282 - RNA, 19 nt, Artificial Sequence
  Description of Artificial Sequence: Synthetic oligonucleotide
  Sense strand starting at position 1237 of SEQ ID NO: 1885477
gggcauuagcgcguuuaga

SEQ ID NO: 2345283 - RNA, 19 nt, Artificial Sequence
  Description of Artificial Sequence: Synthetic oligonucleotide
  Antisense strand to SEQ ID NO: 2345282
ucuaaacgcgcuaaugccc

SEQ ID NO: 2345284 - RNA, 19 nt, Artificial Sequence
  Description of Artificial Sequence: Synthetic oligonucleotide
  Sense strand starting at position 1238 of SEQ ID NO: 1885477
ggcauuagcgcguuuagac

SEQ ID NO: 2345285 - RNA, 19 nt, Artificial Sequence
  Description of Artificial Sequence: Synthetic oligonucleotide
  Antisense strand to SEQ ID NO: 2345284
gucuaaacgcgcuaaugcc

SEQ ID NO: 2345286 - RNA, 19 nt, Artificial Sequence
  Description of Artificial Sequence: Synthetic oligonucleotide
  Sense strand starting at position 1239 of SEQ ID NO: 1885477
gcauuagcgcguuuagacu

SEQ ID NO: 2345287 - RNA, 19 nt, Artificial Sequence
  Description of Artificial Sequence: Synthetic oligonucleotide
  Antisense strand to SEQ ID NO: 2345286
agucuaaacgcgcuaaugc

SEQ ID NO: 2345288 - RNA, 19 nt, Artificial Sequence
  Description of Artificial Sequence: Synthetic oligonucleotide
  Sense strand starting at position 1248 of SEQ ID NO: 1885477
cguuuagacucuccucuua

SEQ ID NO: 2345289 - RNA, 19 nt, Artificial Sequence
  Description of Artificial Sequence: Synthetic oligonucleotide
  Antisense strand to SEQ ID NO: 2345288
uaagaggagagucuaaacg

SEQ ID NO: 2345290 - RNA, 19 nt, Artificial Sequence
  Description of Artificial Sequence: Synthetic oligonucleotide
  Sense strand starting at position 1365 of SEQ ID NO: 1885477
guuugucaggcauaagguu

SEQ ID NO: 2345291 - RNA, 19 nt, Artificial Sequence
  Description of Artificial Sequence: Synthetic oligonucleotide
  Antisense strand to SEQ ID NO: 2345290
aaccuuaugccugacaaac

SEQ ID NO: 2345292 - RNA, 19 nt, Artificial Sequence
  Description of Artificial Sequence: Synthetic oligonucleotide
  Sense strand starting at position 1373 of SEQ ID NO: 1885477
ggcauaagguuaccggauu

SEQ ID NO: 2345293 - RNA, 19 nt, Artificial Sequence
  Description of Artificial Sequence: Synthetic oligonucleotide
  Antisense strand to SEQ ID NO: 2345292
aauccgguaaccuuaugcc

SEQ ID NO: 2345294 - RNA, 19 nt, Artificial Sequence
  Description of Artificial Sequence: Synthetic oligonucleotide
  Sense strand starting at position 1384 of SEQ ID NO: 1885477
accggauuggccugugaag

SEQ ID NO: 2345295 - RNA, 19 nt, Artificial Sequence
  Description of Artificial Sequence: Synthetic oligonucleotide
  Antisense strand to SEQ ID NO: 2345294
cuucacaggccaauccggu

SEQ ID NO: 2345296 - RNA, 19 nt, Artificial Sequence
  Description of Artificial Sequence: Synthetic oligonucleotide
  Sense strand starting at position 1386 of SEQ ID NO: 1885477
cggauuggccugugaaguc

SEQ ID NO: 2345297 - RNA, 19 nt, Artificial Sequence
  Description of Artificial Sequence: Synthetic oligonucleotide
  Antisense strand to SEQ ID NO: 2345296
gacuucacaggccaauccg

SEQ ID NO: 2345298 - RNA, 19 nt, Artificial Sequence
  Description of Artificial Sequence: Synthetic oligonucleotide
  Sense strand starting at position 1827 of SEQ ID NO: 1885477
cgguggagucgugaaauuc

SEQ ID NO: 2345299 - RNA, 19 nt, Artificial Sequence
  Description of Artificial Sequence: Synthetic oligonucleotide
  Antisense strand to SEQ ID NO: 2345298
gaauuucacgacuccaccg

SEQ ID NO: 2345300 - RNA, 19 nt, Artificial Sequence
  Description of Artificial Sequence: Synthetic oligonucleotide
  Sense strand starting at position 1835 of SEQ ID NO: 1885477
ucgugaaauucccaagaaa

SEQ ID NO: 2345301 - RNA, 19 nt, Artificial Sequence
  Description of Artificial Sequence: Synthetic oligonucleotide
  Antisense strand to SEQ ID NO: 2345300
uuucuugggaauuucacga

SEQ ID NO: 2345302 - RNA, 19 nt, Artificial Sequence
  Description of Artificial Sequence: Synthetic oligonucleotide
  Sense strand starting at position 2378 of SEQ ID NO: 1885477
uucagugugcguggagauu

SEQ ID NO: 2345303 - RNA, 19 nt, Artificial Sequence
  Description of Artificial Sequence: Synthetic oligonucleotide
  Antisense strand to SEQ ID NO: 2345302
aaucuccacgcacacugaa

SEQ ID NO: 2345304 - RNA, 19 nt, Artificial Sequence
  Description of Artificial Sequence: Synthetic oligonucleotide
  Sense strand starting at position 3094 of SEQ ID NO: 1885477
cugcuugcuccggaucgau

SEQ ID NO: 2345305 - RNA, 19 nt, Artificial Sequence
  Description of Artificial Sequence: Synthetic oligonucleotide
  Antisense strand to SEQ ID NO: 2345304
aucgauccggagcaagcag

SEQ ID NO: 2345306 - RNA, 19 nt, Artificial Sequence
  Description of Artificial Sequence: Synthetic oligonucleotide
  Sense strand starting at position 3269 of SEQ ID NO: 1885477
uccggaucugccuggagaa

SEQ ID NO: 2345307 - RNA, 19 nt, Artificial Sequence
  Description of Artificial Sequence: Synthetic oligonucleotide
  Antisense strand to SEQ ID NO: 2345306
uucuccaggcagauccgga

SEQ ID NO: 2345308 - RNA, 19 nt, Artificial Sequence
  Description of Artificial Sequence: Synthetic oligonucleotide
  Sense strand starting at position 3889 of SEQ ID NO: 1885477
uggcgcgucccuuuggaua

SEQ ID NO: 2345309 - RNA, 19 nt, Artificial Sequence
  Description of Artificial Sequence: Synthetic oligonucleotide
  Antisense strand to SEQ ID NO: 2345308
uauccaaagggacgcgcca

SEQ ID NO: 2345310 - RNA, 19 nt, Artificial Sequence
  Description of Artificial Sequence: Synthetic oligonucleotide
  Sense strand starting at position 407 of SEQ ID NO: 1885478
agauuccuuccagguuaga

SEQ ID NO: 2345311 - RNA, 19 nt, Artificial Sequence
  Description of Artificial Sequence: Synthetic oligonucleotide
  Antisense strand to SEQ ID NO: 2345310
ucuaaccuggaaggaaucu

SEQ ID NO: 2345312 - RNA, 19 nt, Artificial Sequence
  Description of Artificial Sequence: Synthetic oligonucleotide
  Sense strand starting at position 410 of SEQ ID NO: 1885478
uuccuuccagguuagaauu

SEQ ID NO: 2345313 - RNA, 19 nt, Artificial Sequence
  Description of Artificial Sequence: Synthetic oligonucleotide
  Antisense strand to SEQ ID NO: 2345312
aauucuaaccuggaaggaa

SEQ ID NO: 2345314 - RNA, 19 nt, Artificial Sequence
  Description of Artificial Sequence: Synthetic oligonucleotide
  Sense strand starting at position 644 of SEQ ID NO: 1885478
guccuaacucauuaucugu

SEQ ID NO: 2345315 - RNA, 19 nt, Artificial Sequence
  Description of Artificial Sequence: Synthetic oligonucleotide
  Antisense strand to SEQ ID NO: 2345314
acagauaaugaguuaggac

SEQ ID NO: 2345316 - RNA, 19 nt, Artificial Sequence
  Description of Artificial Sequence: Synthetic oligonucleotide
  Sense strand starting at position 649 of SEQ ID NO: 1885478
aacucauuaucugugggau

SEQ ID NO: 2345317 - RNA, 19 nt, Artificial Sequence
  Description of Artificial Sequence: Synthetic oligonucleotide
  Antisense strand to SEQ ID NO: 2345316
aucccacagauaaugaguu

SEQ ID NO: 2345318 - RNA, 19 nt, Artificial Sequence
  Description of Artificial Sequence: Synthetic oligonucleotide
  Sense strand starting at position 650 of SEQ ID NO: 1885478
acucauuaucugugggauu

SEQ ID NO: 2345319 - RNA, 19 nt, Artificial Sequence
  Description of Artificial Sequence: Synthetic oligonucleotide
  Antisense strand to SEQ ID NO: 2345318
aaucccacagauaaugagu

SEQ ID NO: 2345320 - RNA, 19 nt, Artificial Sequence
  Description of Artificial Sequence: Synthetic oligonucleotide
  Sense strand starting at position 652 of SEQ ID NO: 1885478
ucauuaucugugggauuag

SEQ ID NO: 2345321 - RNA, 19 nt, Artificial Sequence
  Description of Artificial Sequence: Synthetic oligonucleotide
  Antisense strand to SEQ ID NO: 2345320
cuaaucccacagauaauga

SEQ ID NO: 2345322 - RNA, 19 nt, Artificial Sequence
  Description of Artificial Sequence: Synthetic oligonucleotide
  Sense strand starting at position 716 of SEQ ID NO: 1885478
guaaauugagcuugcauuu

SEQ ID NO: 2345323 - RNA, 19 nt, Artificial Sequence
  Description of Artificial Sequence: Synthetic oligonucleotide
  Antisense strand to SEQ ID NO: 2345322
aaaugcaagcucaauuuac

SEQ ID NO: 2345324 - RNA, 19 nt, Artificial Sequence
  Description of Artificial Sequence: Synthetic oligonucleotide
  Sense strand starting at position 749 of SEQ ID NO: 1885478
agggaagauuagccacauu

SEQ ID NO: 2345325 - RNA, 19 nt, Artificial Sequence
  Description of Artificial Sequence: Synthetic oligonucleotide
  Antisense strand to SEQ ID NO: 2345324
aauguggcuaaucuucccu

SEQ ID NO: 2345326 - RNA, 19 nt, Artificial Sequence
  Description of Artificial Sequence: Synthetic oligonucleotide
  Sense strand starting at position 816 of SEQ ID NO: 1885478
ccuuuauugcucuaggaag

SEQ ID NO: 2345327 - RNA, 19 nt, Artificial Sequence
  Description of Artificial Sequence: Synthetic oligonucleotide
  Antisense strand to SEQ ID NO: 2345326
cuuccuagagcaauaaagg

SEQ ID NO: 2345328 - RNA, 19 nt, Artificial Sequence
  Description of Artificial Sequence: Synthetic oligonucleotide
  Sense strand starting at position 818 of SEQ ID NO: 1885478
uuuauugcucuaggaagaa

SEQ ID NO: 2345329 - RNA, 19 nt, Artificial Sequence
  Description of Artificial Sequence: Synthetic oligonucleotide
  Antisense strand to SEQ ID NO: 2345328
uucuuccuagagcaauaaa

SEQ ID NO: 2345330 - RNA, 19 nt, Artificial Sequence
  Description of Artificial Sequence: Synthetic oligonucleotide
  Sense strand starting at position 1099 of SEQ ID NO: 1885478
uaagaaaccugacuugguu

SEQ ID NO: 2345331 - RNA, 19 nt, Artificial Sequence
  Description of Artificial Sequence: Synthetic oligonucleotide
  Antisense strand to SEQ ID NO: 2345330
aaccaagucagguuucuua

SEQ ID NO: 2345332 - RNA, 19 nt, Artificial Sequence
  Description of Artificial Sequence: Synthetic oligonucleotide
  Sense strand starting at position 1103 of SEQ ID NO: 1885478
aaaccugacuugguuugau

SEQ ID NO: 2345333 - RNA, 19 nt, Artificial Sequence
  Description of Artificial Sequence: Synthetic oligonucleotide
  Antisense strand to SEQ ID NO: 2345332
aucaaaccaagucagguuu

SEQ ID NO: 2345334 - RNA, 19 nt, Artificial Sequence
  Description of Artificial Sequence: Synthetic oligonucleotide
  Sense strand starting at position 1106 of SEQ ID NO: 1885478
ccugacuugguuugaugau

SEQ ID NO: 2345335 - RNA, 19 nt, Artificial Sequence
  Description of Artificial Sequence: Synthetic oligonucleotide
  Antisense strand to SEQ ID NO: 2345334
aucaucaaaccaagucagg

SEQ ID NO: 2345336 - RNA, 19 nt, Artificial Sequence
  Description of Artificial Sequence: Synthetic oligonucleotide
  Sense strand starting at position 1182 of SEQ ID NO: 1885478
uaauauguguaucuagaug

SEQ ID NO: 2345337 - RNA, 19 nt, Artificial Sequence
  Description of Artificial Sequence: Synthetic oligonucleotide
  Antisense strand to SEQ ID NO: 2345336
caucuagauacacauauua

SEQ ID NO: 2345338 - RNA, 19 nt, Artificial Sequence
  Description of Artificial Sequence: Synthetic oligonucleotide
  Sense strand starting at position 1533 of SEQ ID NO: 1885478
agaagagugaagggcuauu

SEQ ID NO: 2345339 - RNA, 19 nt, Artificial Sequence
  Description of Artificial Sequence: Synthetic oligonucleotide
  Antisense strand to SEQ ID NO: 2345338
aauagcccuucacucuucu

SEQ ID NO: 2345340 - RNA, 19 nt, Artificial Sequence
  Description of Artificial Sequence: Synthetic oligonucleotide
  Sense strand starting at position 1642 of SEQ ID NO: 1885478
uggaaauggaaacgugagu

SEQ ID NO: 2345341 - RNA, 19 nt, Artificial Sequence
  Description of Artificial Sequence: Synthetic oligonucleotide
  Antisense strand to SEQ ID NO: 2345340
acucacguuuccauuucca

SEQ ID NO: 2345342 - RNA, 19 nt, Artificial Sequence
  Description of Artificial Sequence: Synthetic oligonucleotide
  Sense strand starting at position 1858 of SEQ ID NO: 1885478
ggcuaaucgaccugagaag

SEQ ID NO: 2345343 - RNA, 19 nt, Artificial Sequence
  Description of Artificial Sequence: Synthetic oligonucleotide
  Antisense strand to SEQ ID NO: 2345342
cuucucaggucgauuagcc

SEQ ID NO: 2345344 - RNA, 19 nt, Artificial Sequence
  Description of Artificial Sequence: Synthetic oligonucleotide
  Sense strand starting at position 2330 of SEQ ID NO: 1885478
aggcaaacaucagugaaca

SEQ ID NO: 2345345 - RNA, 19 nt, Artificial Sequence
  Description of Artificial Sequence: Synthetic oligonucleotide
  Antisense strand to SEQ ID NO: 2345344
uguucacugauguuugccu

SEQ ID NO: 2345346 - RNA, 19 nt, Artificial Sequence
  Description of Artificial Sequence: Synthetic oligonucleotide
  Sense strand starting at position 2331 of SEQ ID NO: 1885478
ggcaaacaucagugaacaa

SEQ ID NO: 2345347 - RNA, 19 nt, Artificial Sequence
  Description of Artificial Sequence: Synthetic oligonucleotide
  Antisense strand to SEQ ID NO: 2345346
uuguucacugauguuugcc

SEQ ID NO: 2345348 - RNA, 19 nt, Artificial Sequence
  Description of Artificial Sequence: Synthetic oligonucleotide
  Sense strand starting at position 2363 of SEQ ID NO: 1885478
uccugaggagcuuaauucu

SEQ ID NO: 2345349 - RNA, 19 nt, Artificial Sequence
  Description of Artificial Sequence: Synthetic oligonucleotide
  Antisense strand to SEQ ID NO: 2345348
agaauuaagcuccucagga

SEQ ID NO: 2345350 - RNA, 19 nt, Artificial Sequence
  Description of Artificial Sequence: Synthetic oligonucleotide
  Sense strand starting at position 2371 of SEQ ID NO: 1885478
agcuuaauucuggagguga

SEQ ID NO: 2345351 - RNA, 19 nt, Artificial Sequence
  Description of Artificial Sequence: Synthetic oligonucleotide
  Antisense strand to SEQ ID NO: 2345350
ucaccuccagaauuaagcu

SEQ ID NO: 2345352 - RNA, 19 nt, Artificial Sequence
  Description of Artificial Sequence: Synthetic oligonucleotide
  Sense strand starting at position 2373 of SEQ ID NO: 1885478
cuuaauucuggaggugaga

SEQ ID NO: 2345353 - RNA, 19 nt, Artificial Sequence
  Description of Artificial Sequence: Synthetic oligonucleotide
  Antisense strand to SEQ ID NO: 2345352
ucucaccuccagaauuaag

SEQ ID NO: 2345354 - RNA, 19 nt, Artificial Sequence
  Description of Artificial Sequence: Synthetic oligonucleotide
  Sense strand starting at position 2721 of SEQ ID NO: 1885478
uaaauauguugaguaggau

SEQ ID NO: 2345355 - RNA, 19 nt, Artificial Sequence
  Description of Artificial Sequence: Synthetic oligonucleotide
  Antisense strand to SEQ ID NO: 2345354
auccuacucaacauauuua

SEQ ID NO: 2345356 - RNA, 19 nt, Artificial Sequence
  Description of Artificial Sequence: Synthetic oligonucleotide
  Sense strand starting at position 2724 of SEQ ID NO: 1885478
auauguugaguaggauaca

SEQ ID NO: 2345357 - RNA, 19 nt, Artificial Sequence
  Description of Artificial Sequence: Synthetic oligonucleotide
  Antisense strand to SEQ ID NO: 2345356
uguauccuacucaacauau

SEQ ID NO: 2345358 - RNA, 19 nt, Artificial Sequence
  Description of Artificial Sequence: Synthetic oligonucleotide
  Sense strand starting at position 2776 of SEQ ID NO: 1885478
cuuaaaguuugggucauaa

SEQ ID NO: 2345359 - RNA, 19 nt, Artificial Sequence
  Description of Artificial Sequence: Synthetic oligonucleotide
  Antisense strand to SEQ ID NO: 2345358
uuaugacccaaacuuuaag

SEQ ID NO: 2345360 - RNA, 19 nt, Artificial Sequence
  Description of Artificial Sequence: Synthetic oligonucleotide
  Sense strand starting at position 2906 of SEQ ID NO: 1885478
gucaaauaaugcuugaaca

SEQ ID NO: 2345361 - RNA, 19 nt, Artificial Sequence
  Description of Artificial Sequence: Synthetic oligonucleotide
  Antisense strand to SEQ ID NO: 2345360
uguucaagcauuauuugac

SEQ ID NO: 2345362 - RNA, 19 nt, Artificial Sequence
  Description of Artificial Sequence: Synthetic oligonucleotide
  Sense strand starting at position 2991 of SEQ ID NO: 1885478
aguugagucagucaaucua

SEQ ID NO: 2345363 - RNA, 19 nt, Artificial Sequence
  Description of Artificial Sequence: Synthetic oligonucleotide
  Antisense strand to SEQ ID NO: 2345362
uagauugacugacucaacu

SEQ ID NO: 2345364 - RNA, 19 nt, Artificial Sequence
  Description of Artificial Sequence: Synthetic oligonucleotide
  Sense strand starting at position 3067 of SEQ ID NO: 1885478
uguggaugaagaugguuaa

SEQ ID NO: 2345365 - RNA, 19 nt, Artificial Sequence
  Description of Artificial Sequence: Synthetic oligonucleotide
  Antisense strand to SEQ ID NO: 2345364
uuaaccaucuucauccaca

SEQ ID NO: 2345366 - RNA, 19 nt, Artificial Sequence
  Description of Artificial Sequence: Synthetic oligonucleotide
  Sense strand starting at position 3068 of SEQ ID NO: 1885478
guggaugaagaugguuaaa

SEQ ID NO: 2345367 - RNA, 19 nt, Artificial Sequence
  Description of Artificial Sequence: Synthetic oligonucleotide
  Antisense strand to SEQ ID NO: 2345366
uuuaaccaucuucauccac

SEQ ID NO: 2345368 - RNA, 19 nt, Artificial Sequence
  Description of Artificial Sequence: Synthetic oligonucleotide
  Sense strand starting at position 3089 of SEQ ID NO: 1885478
uagaguugauguguaaaca

SEQ ID NO: 2345369 - RNA, 19 nt, Artificial Sequence
  Description of Artificial Sequence: Synthetic oligonucleotide
  Antisense strand to SEQ ID NO: 2345368
uguuuacacaucaacucua

SEQ ID NO: 2345370 - RNA, 19 nt, Artificial Sequence
  Description of Artificial Sequence: Synthetic oligonucleotide
  Sense strand starting at position 3090 of SEQ ID NO: 1885478
agaguugauguguaaacau

SEQ ID NO: 2345371 - RNA, 19 nt, Artificial Sequence
  Description of Artificial Sequence: Synthetic oligonucleotide
  Antisense strand to SEQ ID NO: 2345370
auguuuacacaucaacucu

SEQ ID NO: 2345372 - RNA, 19 nt, Artificial Sequence
  Description of Artificial Sequence: Synthetic oligonucleotide
  Sense strand starting at position 3149 of SEQ ID NO: 1885478
aacugugguguuuauugau

SEQ ID NO: 2345373 - RNA, 19 nt, Artificial Sequence
  Description of Artificial Sequence: Synthetic oligonucleotide
  Antisense strand to SEQ ID NO: 2345372
aucaauaaacaccacaguu

SEQ ID NO: 2345374 - RNA, 19 nt, Artificial Sequence
  Description of Artificial Sequence: Synthetic oligonucleotide
  Sense strand starting at position 3173 of SEQ ID NO: 1885478
guggauugacuguauacau

SEQ ID NO: 2345375 - RNA, 19 nt, Artificial Sequence
  Description of Artificial Sequence: Synthetic oligonucleotide
  Antisense strand to SEQ ID NO: 2345374
auguauacagucaauccac

SEQ ID NO: 2345376 - RNA, 19 nt, Artificial Sequence
  Description of Artificial Sequence: Synthetic oligonucleotide
  Sense strand starting at position 3216 of SEQ ID NO: 1885478
uccuuaugugaauaugcca

SEQ ID NO: 2345377 - RNA, 19 nt, Artificial Sequence
  Description of Artificial Sequence: Synthetic oligonucleotide
  Antisense strand to SEQ ID NO: 2345376
uggcauauucacauaagga

SEQ ID NO: 2345378 - RNA, 19 nt, Artificial Sequence
  Description of Artificial Sequence: Synthetic oligonucleotide
  Sense strand starting at position 3250 of SEQ ID NO: 1885478
caaugagauauggguuugu

SEQ ID NO: 2345379 - RNA, 19 nt, Artificial Sequence
  Description of Artificial Sequence: Synthetic oligonucleotide
  Antisense strand to SEQ ID NO: 2345378
acaaacccauaucucauug

SEQ ID NO: 2345380 - RNA, 19 nt, Artificial Sequence
  Description of Artificial Sequence: Synthetic oligonucleotide
  Sense strand starting at position 3254 of SEQ ID NO: 1885478
gagauauggguuugugaca

SEQ ID NO: 2345381 - RNA, 19 nt, Artificial Sequence
  Description of Artificial Sequence: Synthetic oligonucleotide
  Antisense strand to SEQ ID NO: 2345380
ugucacaaacccauaucuc

SEQ ID NO: 2345382 - RNA, 19 nt, Artificial Sequence
  Description of Artificial Sequence: Synthetic oligonucleotide
  Sense strand starting at position 3269 of SEQ ID NO: 1885478
gacaguaggcacggaaauu

SEQ ID NO: 2345383 - RNA, 19 nt, Artificial Sequence
  Description of Artificial Sequence: Synthetic oligonucleotide
  Antisense strand to SEQ ID NO: 2345382
aauuuccgugccuacuguc

SEQ ID NO: 2345384 - RNA, 19 nt, Artificial Sequence
  Description of Artificial Sequence: Synthetic oligonucleotide
  Sense strand starting at position 3685 of SEQ ID NO: 1885478
gugcuauaacaaggacaga

SEQ ID NO: 2345385 - RNA, 19 nt, Artificial Sequence
  Description of Artificial Sequence: Synthetic oligonucleotide
  Antisense strand to SEQ ID NO: 2345384
ucuguccuuguuauagcac

SEQ ID NO: 2345386 - RNA, 19 nt, Artificial Sequence
  Description of Artificial Sequence: Synthetic oligonucleotide
  Sense strand starting at position 3872 of SEQ ID NO: 1885478
uggagcuuagaguaaugua

SEQ ID NO: 2345387 - RNA, 19 nt, Artificial Sequence
  Description of Artificial Sequence: Synthetic oligonucleotide
  Antisense strand to SEQ ID NO: 2345386
uacauuacucuaagcucca

SEQ ID NO: 2345388 - RNA, 19 nt, Artificial Sequence
  Description of Artificial Sequence: Synthetic oligonucleotide
  Sense strand starting at position 3885 of SEQ ID NO: 1885478
aauguaguaccauggagau

SEQ ID NO: 2345389 - RNA, 19 nt, Artificial Sequence
  Description of Artificial Sequence: Synthetic oligonucleotide
  Antisense strand to SEQ ID NO: 2345388
aucuccaugguacuacauu

SEQ ID NO: 2345390 - RNA, 19 nt, Artificial Sequence
  Description of Artificial Sequence: Synthetic oligonucleotide
  Sense strand starting at position 34 of SEQ ID NO: 1885479
gaggauaugugggcagcaa

SEQ ID NO: 2345391 - RNA, 19 nt, Artificial Sequence
  Description of Artificial Sequence: Synthetic oligonucleotide
  Antisense strand to SEQ ID NO: 2345390
uugcugcccacauauccuc

SEQ ID NO: 2345392 - RNA, 19 nt, Artificial Sequence
  Description of Artificial Sequence: Synthetic oligonucleotide
  Sense strand starting at position 35 of SEQ ID NO: 1885479
aggauaugugggcagcaaa

SEQ ID NO: 2345393 - RNA, 19 nt, Artificial Sequence
  Description of Artificial Sequence: Synthetic oligonucleotide
  Antisense strand to SEQ ID NO: 2345392
uuugcugcccacauauccu

SEQ ID NO: 2345394 - RNA, 19 nt, Artificial Sequence
  Description of Artificial Sequence: Synthetic oligonucleotide
  Sense strand starting at position 54 of SEQ ID NO: 1885479
uguggagauuuccauuaag

SEQ ID NO: 2345395 - RNA, 19 nt, Artificial Sequence
  Description of Artificial Sequence: Synthetic oligonucleotide
  Antisense strand to SEQ ID NO: 2345394
cuuaauggaaaucuccaca

SEQ ID NO: 2345396 - RNA, 19 nt, Artificial Sequence
  Description of Artificial Sequence: Synthetic oligonucleotide
  Sense strand starting at position 102 of SEQ ID NO: 1885479
gggacuguaauaugaaagu

SEQ ID NO: 2345397 - RNA, 19 nt, Artificial Sequence
  Description of Artificial Sequence: Synthetic oligonucleotide
  Antisense strand to SEQ ID NO: 2345396
acuuucauauuacaguccc

SEQ ID NO: 2345398 - RNA, 19 nt, Artificial Sequence
  Description of Artificial Sequence: Synthetic oligonucleotide
  Sense strand starting at position 117 of SEQ ID NO: 1885479
aaguuaggucaagggaagu

SEQ ID NO: 2345399 - RNA, 19 nt, Artificial Sequence
  Description of Artificial Sequence: Synthetic oligonucleotide
  Antisense strand to SEQ ID NO: 2345398
acuucccuugaccuaacuu

SEQ ID NO: 2345400 - RNA, 19 nt, Artificial Sequence
  Description of Artificial Sequence: Synthetic oligonucleotide
  Sense strand starting at position 152 of SEQ ID NO: 1885479
gggaaaguugaguauaugu

SEQ ID NO: 2345401 - RNA, 19 nt, Artificial Sequence
  Description of Artificial Sequence: Synthetic oligonucleotide
  Antisense strand to SEQ ID NO: 2345400
acauauacucaacuuuccc

SEQ ID NO: 2345402 - RNA, 19 nt, Artificial Sequence
  Description of Artificial Sequence: Synthetic oligonucleotide
  Sense strand starting at position 154 of SEQ ID NO: 1885479
gaaaguugaguauauguua

SEQ ID NO: 2345403 - RNA, 19 nt, Artificial Sequence
  Description of Artificial Sequence: Synthetic oligonucleotide
  Antisense strand to SEQ ID NO: 2345402
uaacauauacucaacuuuc

SEQ ID NO: 2345404 - RNA, 19 nt, Artificial Sequence
  Description of Artificial Sequence: Synthetic oligonucleotide
  Sense strand starting at position 188 of SEQ ID NO: 1885479
aguuuauggagagguauaa

SEQ ID NO: 2345405 - RNA, 19 nt, Artificial Sequence
  Description of Artificial Sequence: Synthetic oligonucleotide
  Antisense strand to SEQ ID NO: 2345404
uuauaccucuccauaaacu

SEQ ID NO: 2345406 - RNA, 19 nt, Artificial Sequence
  Description of Artificial Sequence: Synthetic oligonucleotide
  Sense strand starting at position 197 of SEQ ID NO: 1885479
agagguauaacuugaaguu

SEQ ID NO: 2345407 - RNA, 19 nt, Artificial Sequence
  Description of Artificial Sequence: Synthetic oligonucleotide
  Antisense strand to SEQ ID NO: 2345406
aacuucaaguuauaccucu

SEQ ID NO: 2345408 - RNA, 19 nt, Artificial Sequence
  Description of Artificial Sequence: Synthetic oligonucleotide
  Sense strand starting at position 235 of SEQ ID NO: 1885479
gccgucucucacgucuaua

SEQ ID NO: 2345409 - RNA, 19 nt, Artificial Sequence
  Description of Artificial Sequence: Synthetic oligonucleotide
  Antisense strand to SEQ ID NO: 2345408
uauagacgugagagacggc

SEQ ID NO: 2345410 - RNA, 19 nt, Artificial Sequence
  Description of Artificial Sequence: Synthetic oligonucleotide
  Sense strand starting at position 238 of SEQ ID NO: 1885479
gucucucacgucuauaauc

SEQ ID NO: 2345411 - RNA, 19 nt, Artificial Sequence
  Description of Artificial Sequence: Synthetic oligonucleotide
  Antisense strand to SEQ ID NO: 2345410
gauuauagacgugagagac

SEQ ID NO: 2345412 - RNA, 19 nt, Artificial Sequence
  Description of Artificial Sequence: Synthetic oligonucleotide
  Sense strand starting at position 254 of SEQ ID NO: 1885479
aucucaguacuuugugaga

SEQ ID NO: 2345413 - RNA, 19 nt, Artificial Sequence
  Description of Artificial Sequence: Synthetic oligonucleotide
  Antisense strand to SEQ ID NO: 2345412
ucucacaaaguacugagau

SEQ ID NO: 2345414 - RNA, 19 nt, Artificial Sequence
  Description of Artificial Sequence: Synthetic oligonucleotide
  Sense strand starting at position 744 of SEQ ID NO: 1885479
guggcagugagcuaagagu

SEQ ID NO: 2345415 - RNA, 19 nt, Artificial Sequence
  Description of Artificial Sequence: Synthetic oligonucleotide
  Antisense strand to SEQ ID NO: 2345414
acucuuagcucacugccac

SEQ ID NO: 2345416 - RNA, 19 nt, Artificial Sequence
  Description of Artificial Sequence: Synthetic oligonucleotide
  Sense strand starting at position 889 of SEQ ID NO: 1885479
ggguaaagugauggaguca

SEQ ID NO: 2345417 - RNA, 19 nt, Artificial Sequence
  Description of Artificial Sequence: Synthetic oligonucleotide
  Antisense strand to SEQ ID NO: 2345416
ugacuccaucacuuuaccc

SEQ ID NO: 2345418 - RNA, 19 nt, Artificial Sequence
  Description of Artificial Sequence: Synthetic oligonucleotide
  Sense strand starting at position 902 of SEQ ID NO: 1885479
gagucaauucccggagggu

SEQ ID NO: 2345419 - RNA, 19 nt, Artificial Sequence
  Description of Artificial Sequence: Synthetic oligonucleotide
  Antisense strand to SEQ ID NO: 2345418
acccuccgggaauugacuc

SEQ ID NO: 2345420 - RNA, 19 nt, Artificial Sequence
  Description of Artificial Sequence: Synthetic oligonucleotide
  Sense strand starting at position 903 of SEQ ID NO: 1885479
agucaauucccggagggua

SEQ ID NO: 2345421 - RNA, 19 nt, Artificial Sequence
  Description of Artificial Sequence: Synthetic oligonucleotide
  Antisense strand to SEQ ID NO: 2345420
uacccuccgggaauugacu

SEQ ID NO: 2345422 - RNA, 19 nt, Artificial Sequence
  Description of Artificial Sequence: Synthetic oligonucleotide
  Sense strand starting at position 1127 of SEQ ID NO: 1885479
agcugugggaguugauaau

SEQ ID NO: 2345423 - RNA, 19 nt, Artificial Sequence
  Description of Artificial Sequence: Synthetic oligonucleotide
  Antisense strand to SEQ ID NO: 2345422
auuaucaacucccacagcu

SEQ ID NO: 2345424 - RNA, 19 nt, Artificial Sequence
  Description of Artificial Sequence: Synthetic oligonucleotide
  Sense strand starting at position 1272 of SEQ ID NO: 1885479
uuccuuguaacggguaaca

SEQ ID NO: 2345425 - RNA, 19 nt, Artificial Sequence
  Description of Artificial Sequence: Synthetic oligonucleotide
  Antisense strand to SEQ ID NO: 2345424
uguuacccguuacaaggaa

SEQ ID NO: 2345426 - RNA, 19 nt, Artificial Sequence
  Description of Artificial Sequence: Synthetic oligonucleotide
  Sense strand starting at position 1283 of SEQ ID NO: 1885479
ggguaacagcuguaauaug

SEQ ID NO: 2345427 - RNA, 19 nt, Artificial Sequence
  Description of Artificial Sequence: Synthetic oligonucleotide
  Antisense strand to SEQ ID NO: 2345426
cauauuacagcuguuaccc

SEQ ID NO: 2345428 - RNA, 19 nt, Artificial Sequence
  Description of Artificial Sequence: Synthetic oligonucleotide
  Sense strand starting at position 1323 of SEQ ID NO: 1885479
gaugacugcugucuacauu

SEQ ID NO: 2345429 - RNA, 19 nt, Artificial Sequence
  Description of Artificial Sequence: Synthetic oligonucleotide
  Antisense strand to SEQ ID NO: 2345428
aauguagacagcagucauc

SEQ ID NO: 2345430 - RNA, 19 nt, Artificial Sequence
  Description of Artificial Sequence: Synthetic oligonucleotide
  Sense strand starting at position 1324 of SEQ ID NO: 1885479
augacugcugucuacauua

SEQ ID NO: 2345431 - RNA, 19 nt, Artificial Sequence
  Description of Artificial Sequence: Synthetic oligonucleotide
  Antisense strand to SEQ ID NO: 2345430
uaauguagacagcagucau

SEQ ID NO: 2345432 - RNA, 19 nt, Artificial Sequence
  Description of Artificial Sequence: Synthetic oligonucleotide
  Sense strand starting at position 1344 of SEQ ID NO: 1885479
uuuccaugugcaugaauug

SEQ ID NO: 2345433 - RNA, 19 nt, Artificial Sequence
  Description of Artificial Sequence: Synthetic oligonucleotide
  Antisense strand to SEQ ID NO: 2345432
caauucaugcacauggaaa

SEQ ID NO: 2345434 - RNA, 19 nt, Artificial Sequence
  Description of Artificial Sequence: Synthetic oligonucleotide
  Sense strand starting at position 1345 of SEQ ID NO: 1885479
uuccaugugcaugaauuga

SEQ ID NO: 2345435 - RNA, 19 nt, Artificial Sequence
  Description of Artificial Sequence: Synthetic oligonucleotide
  Antisense strand to SEQ ID NO: 2345434
ucaauucaugcacauggaa

SEQ ID NO: 2345436 - RNA, 19 nt, Artificial Sequence
  Description of Artificial Sequence: Synthetic oligonucleotide
  Sense strand starting at position 1353 of SEQ ID NO: 1885479
gcaugaauugaguaguuac

SEQ ID NO: 2345437 - RNA, 19 nt, Artificial Sequence
  Description of Artificial Sequence: Synthetic oligonucleotide
  Antisense strand to SEQ ID NO: 2345436
guaacuacucaauucaugc

SEQ ID NO: 2345438 - RNA, 19 nt, Artificial Sequence
  Description of Artificial Sequence: Synthetic oligonucleotide
  Sense strand starting at position 1506 of SEQ ID NO: 1885479
cgaucugguaguuaacuuu

SEQ ID NO: 2345439 - RNA, 19 nt, Artificial Sequence
  Description of Artificial Sequence: Synthetic oligonucleotide
  Antisense strand to SEQ ID NO: 2345438
aaaguuaacuaccagaucg

SEQ ID NO: 2345440 - RNA, 19 nt, Artificial Sequence
  Description of Artificial Sequence: Synthetic oligonucleotide
  Sense strand starting at position 1512 of SEQ ID NO: 1885479
gguaguuaacuuuaucauc

SEQ ID NO: 2345441 - RNA, 19 nt, Artificial Sequence
  Description of Artificial Sequence: Synthetic oligonucleotide
  Antisense strand to SEQ ID NO: 2345440
gaugauaaaguuaacuacc

SEQ ID NO: 2345442 - RNA, 19 nt, Artificial Sequence
  Description of Artificial Sequence: Synthetic oligonucleotide
  Sense strand starting at position 1545 of SEQ ID NO: 1885479
agucauuccugggcccuaa

SEQ ID NO: 2345443 - RNA, 19 nt, Artificial Sequence
  Description of Artificial Sequence: Synthetic oligonucleotide
  Antisense strand to SEQ ID NO: 2345442
uuagggcccaggaaugacu

SEQ ID NO: 2345444 - RNA, 19 nt, Artificial Sequence
  Description of Artificial Sequence: Synthetic oligonucleotide
  Sense strand starting at position 1563 of SEQ ID NO: 1885479
aguagagacggcuagaauu

SEQ ID NO: 2345445 - RNA, 19 nt, Artificial Sequence
  Description of Artificial Sequence: Synthetic oligonucleotide
  Antisense strand to SEQ ID NO: 2345444
aauucuagccgucucuacu

SEQ ID NO: 2345446 - RNA, 19 nt, Artificial Sequence
  Description of Artificial Sequence: Synthetic oligonucleotide
  Sense strand starting at position 1574 of SEQ ID NO: 1885479
cuagaauuaccacgugagu

SEQ ID NO: 2345447 - RNA, 19 nt, Artificial Sequence
  Description of Artificial Sequence: Synthetic oligonucleotide
  Antisense strand to SEQ ID NO: 2345446
acucacgugguaauucuag

SEQ ID NO: 2345448 - RNA, 19 nt, Artificial Sequence
  Description of Artificial Sequence: Synthetic oligonucleotide
  Sense strand starting at position 1576 of SEQ ID NO: 1885479
agaauuaccacgugaguaa

SEQ ID NO: 2345449 - RNA, 19 nt, Artificial Sequence
  Description of Artificial Sequence: Synthetic oligonucleotide
  Antisense strand to SEQ ID NO: 2345448
uuacucacgugguaauucu

SEQ ID NO: 2345450 - RNA, 19 nt, Artificial Sequence
  Description of Artificial Sequence: Synthetic oligonucleotide
  Sense strand starting at position 1577 of SEQ ID NO: 1885479
gaauuaccacgugaguaaa

SEQ ID NO: 2345451 - RNA, 19 nt, Artificial Sequence
  Description of Artificial Sequence: Synthetic oligonucleotide
  Antisense strand to SEQ ID NO: 2345450
uuuacucacgugguaauuc

SEQ ID NO: 2345452 - RNA, 19 nt, Artificial Sequence
  Description of Artificial Sequence: Synthetic oligonucleotide
  Sense strand starting at position 1612 of SEQ ID NO: 1885479
auaauuagauuggccacaa

SEQ ID NO: 2345453 - RNA, 19 nt, Artificial Sequence
  Description of Artificial Sequence: Synthetic oligonucleotide
  Antisense strand to SEQ ID NO: 2345452
uuguggccaaucuaauuau

SEQ ID NO: 2345454 - RNA, 19 nt, Artificial Sequence
  Description of Artificial Sequence: Synthetic oligonucleotide
  Sense strand starting at position 1642 of SEQ ID NO: 1885479
gaaagauacugcguagcaa

SEQ ID NO: 2345455 - RNA, 19 nt, Artificial Sequence
  Description of Artificial Sequence: Synthetic oligonucleotide
  Antisense strand to SEQ ID NO: 2345454
uugcuacgcaguaucuuuc

SEQ ID NO: 2345456 - RNA, 19 nt, Artificial Sequence
  Description of Artificial Sequence: Synthetic oligonucleotide
  Sense strand starting at position 1643 of SEQ ID NO: 1885479
aaagauacugcguagcaaa

SEQ ID NO: 2345457 - RNA, 19 nt, Artificial Sequence
  Description of Artificial Sequence: Synthetic oligonucleotide
  Antisense strand to SEQ ID NO: 2345456
uuugcuacgcaguaucuuu

SEQ ID NO: 2345458 - RNA, 19 nt, Artificial Sequence
  Description of Artificial Sequence: Synthetic oligonucleotide
  Sense strand starting at position 1902 of SEQ ID NO: 1885479
aguacaaguucuucuuuga

SEQ ID NO: 2345459 - RNA, 19 nt, Artificial Sequence
  Description of Artificial Sequence: Synthetic oligonucleotide
  Antisense strand to SEQ ID NO: 2345458
ucaaagaagaacuuguacu

SEQ ID NO: 2345460 - RNA, 19 nt, Artificial Sequence
  Description of Artificial Sequence: Synthetic oligonucleotide
  Sense strand starting at position 1906 of SEQ ID NO: 1885479
caaguucuucuuugaagga

SEQ ID NO: 2345461 - RNA, 19 nt, Artificial Sequence
  Description of Artificial Sequence: Synthetic oligonucleotide
  Antisense strand to SEQ ID NO: 2345460
uccuucaaagaagaacuug

SEQ ID NO: 2345462 - RNA, 19 nt, Artificial Sequence
  Description of Artificial Sequence: Synthetic oligonucleotide
  Sense strand starting at position 2670 of SEQ ID NO: 1885479
gcgggaacccuucaguuua

SEQ ID NO: 2345463 - RNA, 19 nt, Artificial Sequence
  Description of Artificial Sequence: Synthetic oligonucleotide
  Antisense strand to SEQ ID NO: 2345462
uaaacugaaggguucccgc

SEQ ID NO: 2345464 - RNA, 19 nt, Artificial Sequence
  Description of Artificial Sequence: Synthetic oligonucleotide
  Sense strand starting at position 2993 of SEQ ID NO: 1885479
guagaaauaguuugcuuua

SEQ ID NO: 2345465 - RNA, 19 nt, Artificial Sequence
  Description of Artificial Sequence: Synthetic oligonucleotide
  Antisense strand to SEQ ID NO: 2345464
uaaagcaaacuauuucuac

SEQ ID NO: 2345466 - RNA, 19 nt, Artificial Sequence
  Description of Artificial Sequence: Synthetic oligonucleotide
  Sense strand starting at position 2994 of SEQ ID NO: 1885479
uagaaauaguuugcuuuag

SEQ ID NO: 2345467 - RNA, 19 nt, Artificial Sequence
  Description of Artificial Sequence: Synthetic oligonucleotide
  Antisense strand to SEQ ID NO: 2345466
cuaaagcaaacuauuucua

SEQ ID NO: 2345468 - RNA, 19 nt, Artificial Sequence
  Description of Artificial Sequence: Synthetic oligonucleotide
  Sense strand starting at position 3046 of SEQ ID NO: 1885479
guguaucugguuuaaaucu

SEQ ID NO: 2345469 - RNA, 19 nt, Artificial Sequence
  Description of Artificial Sequence: Synthetic oligonucleotide
  Antisense strand to SEQ ID NO: 2345468
agauuuaaaccagauacac

SEQ ID NO: 2345470 - RNA, 19 nt, Artificial Sequence
  Description of Artificial Sequence: Synthetic oligonucleotide
  Sense strand starting at position 1144 of SEQ ID NO: 1885480
ucuucuagcguuuacucua

SEQ ID NO: 2345471 - RNA, 19 nt, Artificial Sequence
  Description of Artificial Sequence: Synthetic oligonucleotide
  Antisense strand to SEQ ID NO: 2345470
uagaguaaacgcuagaaga

SEQ ID NO: 2345472 - RNA, 19 nt, Artificial Sequence
  Description of Artificial Sequence: Synthetic oligonucleotide
  Sense strand starting at position 1149 of SEQ ID NO: 1885480
uagcguuuacucuaagcag

SEQ ID NO: 2345473 - RNA, 19 nt, Artificial Sequence
  Description of Artificial Sequence: Synthetic oligonucleotide
  Antisense strand to SEQ ID NO: 2345472
cugcuuagaguaaacgcua

SEQ ID NO: 2345474 - RNA, 19 nt, Artificial Sequence
  Description of Artificial Sequence: Synthetic oligonucleotide
  Sense strand starting at position 1158 of SEQ ID NO: 1885480
cucuaagcaguugauagaa

SEQ ID NO: 2345475 - RNA, 19 nt, Artificial Sequence
  Description of Artificial Sequence: Synthetic oligonucleotide
  Antisense strand to SEQ ID NO: 2345474
uucuaucaacugcuuagag

SEQ ID NO: 2345476 - RNA, 19 nt, Artificial Sequence
  Description of Artificial Sequence: Synthetic oligonucleotide
  Sense strand starting at position 1204 of SEQ ID NO: 1885480
agauauuucuauggccaga

SEQ ID NO: 2345477 - RNA, 19 nt, Artificial Sequence
  Description of Artificial Sequence: Synthetic oligonucleotide
  Antisense strand to SEQ ID NO: 2345476
ucuggccauagaaauaucu

SEQ ID NO: 2345478 - RNA, 19 nt, Artificial Sequence
  Description of Artificial Sequence: Synthetic oligonucleotide
  Sense strand starting at position 1209 of SEQ ID NO: 1885480
uuucuauggccagaugucu

SEQ ID NO: 2345479 - RNA, 19 nt, Artificial Sequence
  Description of Artificial Sequence: Synthetic oligonucleotide
  Antisense strand to SEQ ID NO: 2345478
agacaucuggccauagaaa

SEQ ID NO: 2345480 - RNA, 19 nt, Artificial Sequence
  Description of Artificial Sequence: Synthetic oligonucleotide
  Sense strand starting at position 1214 of SEQ ID NO: 1885480
auggccagaugucuauaua

SEQ ID NO: 2345481 - RNA, 19 nt, Artificial Sequence
  Description of Artificial Sequence: Synthetic oligonucleotide
  Antisense strand to SEQ ID NO: 2345480
uauauagacaucuggccau

SEQ ID NO: 2345482 - RNA, 19 nt, Artificial Sequence
  Description of Artificial Sequence: Synthetic oligonucleotide
  Sense strand starting at position 1215 of SEQ ID NO: 1885480
uggccagaugucuauauau

SEQ ID NO: 2345483 - RNA, 19 nt, Artificial Sequence
  Description of Artificial Sequence: Synthetic oligonucleotide
  Antisense strand to SEQ ID NO: 2345482
auauauagacaucuggcca

SEQ ID NO: 2345484 - RNA, 19 nt, Artificial Sequence
  Description of Artificial Sequence: Synthetic oligonucleotide
  Sense strand starting at position 1434 of SEQ ID NO: 1885480
cuaucauuugauuguuugu

SEQ ID NO: 2345485 - RNA, 19 nt, Artificial Sequence
  Description of Artificial Sequence: Synthetic oligonucleotide
  Antisense strand to SEQ ID NO: 2345484
acaaacaaucaaaugauag

SEQ ID NO: 2345486 - RNA, 19 nt, Artificial Sequence
  Description of Artificial Sequence: Synthetic oligonucleotide
  Sense strand starting at position 1616 of SEQ ID NO: 1885480
guccucugucaugaggaua

SEQ ID NO: 2345487 - RNA, 19 nt, Artificial Sequence
  Description of Artificial Sequence: Synthetic oligonucleotide
  Antisense strand to SEQ ID NO: 2345486
uauccucaugacagaggac

SEQ ID NO: 2345488 - RNA, 19 nt, Artificial Sequence
  Description of Artificial Sequence: Synthetic oligonucleotide
  Sense strand starting at position 1779 of SEQ ID NO: 1885480
aucuuuaagacuuaggcga

SEQ ID NO: 2345489 - RNA, 19 nt, Artificial Sequence
  Description of Artificial Sequence: Synthetic oligonucleotide
  Antisense strand to SEQ ID NO: 2345488
ucgccuaagucuuaaagau

SEQ ID NO: 2345490 - RNA, 19 nt, Artificial Sequence
  Description of Artificial Sequence: Synthetic oligonucleotide
  Sense strand starting at position 1783 of SEQ ID NO: 1885480
uuaagacuuaggcgagaga

SEQ ID NO: 2345491 - RNA, 19 nt, Artificial Sequence
  Description of Artificial Sequence: Synthetic oligonucleotide
  Antisense strand to SEQ ID NO: 2345490
ucucucgccuaagucuuaa

SEQ ID NO: 2345492 - RNA, 19 nt, Artificial Sequence
  Description of Artificial Sequence: Synthetic oligonucleotide
  Sense strand starting at position 1910 of SEQ ID NO: 1885480
aaaugaagagcugguuuaa

SEQ ID NO: 2345493 - RNA, 19 nt, Artificial Sequence
  Description of Artificial Sequence: Synthetic oligonucleotide
  Antisense strand to SEQ ID NO: 2345492
uuaaaccagcucuucauuu

SEQ ID NO: 2345494 - RNA, 19 nt, Artificial Sequence
  Description of Artificial Sequence: Synthetic oligonucleotide
  Sense strand starting at position 1944 of SEQ ID NO: 1885480
agccuuuaucuagacuaag

SEQ ID NO: 2345495 - RNA, 19 nt, Artificial Sequence
  Description of Artificial Sequence: Synthetic oligonucleotide
  Antisense strand to SEQ ID NO: 2345494
cuuagucuagauaaaggcu

SEQ ID NO: 2345496 - RNA, 19 nt, Artificial Sequence
  Description of Artificial Sequence: Synthetic oligonucleotide
  Sense strand starting at position 2013 of SEQ ID NO: 1885480
uguuacaacugauaguaca

SEQ ID NO: 2345497 - RNA, 19 nt, Artificial Sequence
  Description of Artificial Sequence: Synthetic oligonucleotide
  Antisense strand to SEQ ID NO: 2345496
uguacuaucaguuguaaca

SEQ ID NO: 2345498 - RNA, 19 nt, Artificial Sequence
  Description of Artificial Sequence: Synthetic oligonucleotide
  Sense strand starting at position 2047 of SEQ ID NO: 1885480
auaagagacuauuaugaca

SEQ ID NO: 2345499 - RNA, 19 nt, Artificial Sequence
  Description of Artificial Sequence: Synthetic oligonucleotide
  Antisense strand to SEQ ID NO: 2345498
ugucauaauagucucuuau

SEQ ID NO: 2345500 - RNA, 19 nt, Artificial Sequence
  Description of Artificial Sequence: Synthetic oligonucleotide
  Sense strand starting at position 2050 of SEQ ID NO: 1885480
agagacuauuaugacaaca

SEQ ID NO: 2345501 - RNA, 19 nt, Artificial Sequence
  Description of Artificial Sequence: Synthetic oligonucleotide
  Antisense strand to SEQ ID NO: 2345500
uguugucauaauagucucu

SEQ ID NO: 2345502 - RNA, 19 nt, Artificial Sequence
  Description of Artificial Sequence: Synthetic oligonucleotide
  Sense strand starting at position 2090 of SEQ ID NO: 1885480
gggaucaauuccuggacag

SEQ ID NO: 2345503 - RNA, 19 nt, Artificial Sequence
  Description of Artificial Sequence: Synthetic oligonucleotide
  Antisense strand to SEQ ID NO: 2345502
cuguccaggaauugauccc

SEQ ID NO: 2345504 - RNA, 19 nt, Artificial Sequence
  Description of Artificial Sequence: Synthetic oligonucleotide
  Sense strand starting at position 2160 of SEQ ID NO: 1885480
agugaugagugaggaaauu

SEQ ID NO: 2345505 - RNA, 19 nt, Artificial Sequence
  Description of Artificial Sequence: Synthetic oligonucleotide
  Antisense strand to SEQ ID NO: 2345504
aauuuccucacucaucacu

SEQ ID NO: 2345506 - RNA, 19 nt, Artificial Sequence
  Description of Artificial Sequence: Synthetic oligonucleotide
  Sense strand starting at position 2177 of SEQ ID NO: 1885480
uugaaucaguaauacauga

SEQ ID NO: 2345507 - RNA, 19 nt, Artificial Sequence
  Description of Artificial Sequence: Synthetic oligonucleotide
  Antisense strand to SEQ ID NO: 2345506
ucauguauuacugauucaa

SEQ ID NO: 2345508 - RNA, 19 nt, Artificial Sequence
  Description of Artificial Sequence: Synthetic oligonucleotide
  Sense strand starting at position 2181 of SEQ ID NO: 1885480
aucaguaauacaugagcga

SEQ ID NO: 2345509 - RNA, 19 nt, Artificial Sequence
  Description of Artificial Sequence: Synthetic oligonucleotide
  Antisense strand to SEQ ID NO: 2345508
ucgcucauguauuacugau

SEQ ID NO: 2345510 - RNA, 19 nt, Artificial Sequence
  Description of Artificial Sequence: Synthetic oligonucleotide
  Sense strand starting at position 2185 of SEQ ID NO: 1885480
guaauacaugagcgaggaa

SEQ ID NO: 2345511 - RNA, 19 nt, Artificial Sequence
  Description of Artificial Sequence: Synthetic oligonucleotide
  Antisense strand to SEQ ID NO: 2345510
uuccucgcucauguauuac

SEQ ID NO: 2345512 - RNA, 19 nt, Artificial Sequence
  Description of Artificial Sequence: Synthetic oligonucleotide
  Sense strand starting at position 2188 of SEQ ID NO: 1885480
auacaugagcgaggaaacu

SEQ ID NO: 2345513 - RNA, 19 nt, Artificial Sequence
  Description of Artificial Sequence: Synthetic oligonucleotide
  Antisense strand to SEQ ID NO: 2345512
aguuuccucgcucauguau

SEQ ID NO: 2345514 - RNA, 19 nt, Artificial Sequence
  Description of Artificial Sequence: Synthetic oligonucleotide
  Sense strand starting at position 2261 of SEQ ID NO: 1885480
agugcugaauucuacaaac

SEQ ID NO: 2345515 - RNA, 19 nt, Artificial Sequence
  Description of Artificial Sequence: Synthetic oligonucleotide
  Antisense strand to SEQ ID NO: 2345514
guuuguagaauucagcacu

SEQ ID NO: 2345516 - RNA, 19 nt, Artificial Sequence
  Description of Artificial Sequence: Synthetic oligonucleotide
  Sense strand starting at position 2331 of SEQ ID NO: 1885480
aggaaugaguauugccaaa

SEQ ID NO: 2345517 - RNA, 19 nt, Artificial Sequence
  Description of Artificial Sequence: Synthetic oligonucleotide
  Antisense strand to SEQ ID NO: 2345516
uuuggcaauacucauuccu

SEQ ID NO: 2345518 - RNA, 19 nt, Artificial Sequence
  Description of Artificial Sequence: Synthetic oligonucleotide
  Sense strand starting at position 2333 of SEQ ID NO: 1885480
gaaugaguauugccaaacu

SEQ ID NO: 2345519 - RNA, 19 nt, Artificial Sequence
  Description of Artificial Sequence: Synthetic oligonucleotide
  Antisense strand to SEQ ID NO: 2345518
aguuuggcaauacucauuc

SEQ ID NO: 2345520 - RNA, 19 nt, Artificial Sequence
  Description of Artificial Sequence: Synthetic oligonucleotide
  Sense strand starting at position 2432 of SEQ ID NO: 1885480
cuccuugaugaauguacau

SEQ ID NO: 2345521 - RNA, 19 nt, Artificial Sequence
  Description of Artificial Sequence: Synthetic oligonucleotide
  Antisense strand to SEQ ID NO: 2345520
auguacauucaucaaggag

SEQ ID NO: 2345522 - RNA, 19 nt, Artificial Sequence
  Description of Artificial Sequence: Synthetic oligonucleotide
  Sense strand starting at position 2489 of SEQ ID NO: 1885480
acagcauauuaagaagacu

SEQ ID NO: 2345523 - RNA, 19 nt, Artificial Sequence
  Description of Artificial Sequence: Synthetic oligonucleotide
  Antisense strand to SEQ ID NO: 2345522
agucuucuuaauaugcugu

SEQ ID NO: 2345524 - RNA, 19 nt, Artificial Sequence
  Description of Artificial Sequence: Synthetic oligonucleotide
  Sense strand starting at position 2524 of SEQ ID NO: 1885480
ugggauuaaugccagugau

SEQ ID NO: 2345525 - RNA, 19 nt, Artificial Sequence
  Description of Artificial Sequence: Synthetic oligonucleotide
  Antisense strand to SEQ ID NO: 2345524
aucacuggcauuaauccca

SEQ ID NO: 2345526 - RNA, 19 nt, Artificial Sequence
  Description of Artificial Sequence: Synthetic oligonucleotide
  Sense strand starting at position 2527 of SEQ ID NO: 1885480
gauuaaugccagugaugca

SEQ ID NO: 2345527 - RNA, 19 nt, Artificial Sequence
  Description of Artificial Sequence: Synthetic oligonucleotide
  Antisense strand to SEQ ID NO: 2345526
ugcaucacuggcauuaauc

SEQ ID NO: 2345528 - RNA, 19 nt, Artificial Sequence
  Description of Artificial Sequence: Synthetic oligonucleotide
  Sense strand starting at position 2683 of SEQ ID NO: 1885480
acgaauuagguauagaguu

SEQ ID NO: 2345529 - RNA, 19 nt, Artificial Sequence
  Description of Artificial Sequence: Synthetic oligonucleotide
  Antisense strand to SEQ ID NO: 2345528
aacucuauaccuaauucgu

SEQ ID NO: 2345530 - RNA, 19 nt, Artificial Sequence
  Description of Artificial Sequence: Synthetic oligonucleotide
  Sense strand starting at position 2877 of SEQ ID NO: 1885480
aagucaaauugguccuguu

SEQ ID NO: 2345531 - RNA, 19 nt, Artificial Sequence
  Description of Artificial Sequence: Synthetic oligonucleotide
  Antisense strand to SEQ ID NO: 2345530
aacaggaccaauuugacuu

SEQ ID NO: 2345532 - RNA, 19 nt, Artificial Sequence
  Description of Artificial Sequence: Synthetic oligonucleotide
  Sense strand starting at position 2884 of SEQ ID NO: 1885480
auugguccuguuugcagau

SEQ ID NO: 2345533 - RNA, 19 nt, Artificial Sequence
  Description of Artificial Sequence: Synthetic oligonucleotide
  Antisense strand to SEQ ID NO: 2345532
aucugcaaacaggaccaau

SEQ ID NO: 2345534 - RNA, 19 nt, Artificial Sequence
  Description of Artificial Sequence: Synthetic oligonucleotide
  Sense strand starting at position 3019 of SEQ ID NO: 1885480
ucaauaugcuaauagugaa

SEQ ID NO: 2345535 - RNA, 19 nt, Artificial Sequence
  Description of Artificial Sequence: Synthetic oligonucleotide
  Antisense strand to SEQ ID NO: 2345534
uucacuauuagcauauuga

SEQ ID NO: 2345536 - RNA, 19 nt, Artificial Sequence
  Description of Artificial Sequence: Synthetic oligonucleotide
  Sense strand starting at position 3098 of SEQ ID NO: 1885480
acagcaaacuccuaggaau

SEQ ID NO: 2345537 - RNA, 19 nt, Artificial Sequence
  Description of Artificial Sequence: Synthetic oligonucleotide
  Antisense strand to SEQ ID NO: 2345536
auuccuaggaguuugcugu

SEQ ID NO: 2345538 - RNA, 19 nt, Artificial Sequence
  Description of Artificial Sequence: Synthetic oligonucleotide
  Sense strand starting at position 3101 of SEQ ID NO: 1885480
gcaaacuccuaggaauaaa

SEQ ID NO: 2345539 - RNA, 19 nt, Artificial Sequence
  Description of Artificial Sequence: Synthetic oligonucleotide
  Antisense strand to SEQ ID NO: 2345538
uuuauuccuaggaguuugc

SEQ ID NO: 2345540 - RNA, 19 nt, Artificial Sequence
  Description of Artificial Sequence: Synthetic oligonucleotide
  Sense strand starting at position 3352 of SEQ ID NO: 1885480
auuccauuggagugugaag

SEQ ID NO: 2345541 - RNA, 19 nt, Artificial Sequence
  Description of Artificial Sequence: Synthetic oligonucleotide
  Antisense strand to SEQ ID NO: 2345540
cuucacacuccaauggaau

SEQ ID NO: 2345542 - RNA, 19 nt, Artificial Sequence
  Description of Artificial Sequence: Synthetic oligonucleotide
  Sense strand starting at position 3578 of SEQ ID NO: 1885480
uuggauauucuaugcagaa

SEQ ID NO: 2345543 - RNA, 19 nt, Artificial Sequence
  Description of Artificial Sequence: Synthetic oligonucleotide
  Antisense strand to SEQ ID NO: 2345542
uucugcauagaauauccaa

SEQ ID NO: 2345544 - RNA, 19 nt, Artificial Sequence
  Description of Artificial Sequence: Synthetic oligonucleotide
  Sense strand starting at position 3579 of SEQ ID NO: 1885480
uggauauucuaugcagaag

SEQ ID NO: 2345545 - RNA, 19 nt, Artificial Sequence
  Description of Artificial Sequence: Synthetic oligonucleotide
  Antisense strand to SEQ ID NO: 2345544
cuucugcauagaauaucca

SEQ ID NO: 2345546 - RNA, 19 nt, Artificial Sequence
  Description of Artificial Sequence: Synthetic oligonucleotide
  Sense strand starting at position 3716 of SEQ ID NO: 1885480
ucccaauauugggcugaau

SEQ ID NO: 2345547 - RNA, 19 nt, Artificial Sequence
  Description of Artificial Sequence: Synthetic oligonucleotide
  Antisense strand to SEQ ID NO: 2345546
auucagcccaauauuggga

SEQ ID NO: 2345548 - RNA, 19 nt, Artificial Sequence
  Description of Artificial Sequence: Synthetic oligonucleotide
  Sense strand starting at position 3891 of SEQ ID NO: 1885480
cuauuuaucugacaagagg

SEQ ID NO: 2345549 - RNA, 19 nt, Artificial Sequence
  Description of Artificial Sequence: Synthetic oligonucleotide
  Antisense strand to SEQ ID NO: 2345548
ccucuugucagauaaauag

SEQ ID NO: 2345550 - RNA, 19 nt, Artificial Sequence
  Description of Artificial Sequence: Synthetic oligonucleotide
  Sense strand starting at position 92 of SEQ ID NO: 1885481
aggugacaccauugauaug

SEQ ID NO: 2345551 - RNA, 19 nt, Artificial Sequence
  Description of Artificial Sequence: Synthetic oligonucleotide
  Antisense strand to SEQ ID NO: 2345550
cauaucaauggugucaccu

SEQ ID NO: 2345552 - RNA, 19 nt, Artificial Sequence
  Description of Artificial Sequence: Synthetic oligonucleotide
  Sense strand starting at position 142 of SEQ ID NO: 1885481
agaggaaugucucucacau

SEQ ID NO: 2345553 - RNA, 19 nt, Artificial Sequence
  Description of Artificial Sequence: Synthetic oligonucleotide
  Antisense strand to SEQ ID NO: 2345552
augugagagacauuccucu

SEQ ID NO: 2345554 - RNA, 19 nt, Artificial Sequence
  Description of Artificial Sequence: Synthetic oligonucleotide
  Sense strand starting at position 454 of SEQ ID NO: 1885481
uugaccucuugucuacaga

SEQ ID NO: 2345555 - RNA, 19 nt, Artificial Sequence
  Description of Artificial Sequence: Synthetic oligonucleotide
  Antisense strand to SEQ ID NO: 2345554
ucuguagacaagaggucaa

SEQ ID NO: 2345556 - RNA, 19 nt, Artificial Sequence
  Description of Artificial Sequence: Synthetic oligonucleotide
  Sense strand starting at position 457 of SEQ ID NO: 1885481
accucuugucuacagaguu

SEQ ID NO: 2345557 - RNA, 19 nt, Artificial Sequence
  Description of Artificial Sequence: Synthetic oligonucleotide
  Antisense strand to SEQ ID NO: 2345556
aacucuguagacaagaggu

SEQ ID NO: 2345558 - RNA, 19 nt, Artificial Sequence
  Description of Artificial Sequence: Synthetic oligonucleotide
  Sense strand starting at position 678 of SEQ ID NO: 1885481
cagacaugaucccugguuu

SEQ ID NO: 2345559 - RNA, 19 nt, Artificial Sequence
  Description of Artificial Sequence: Synthetic oligonucleotide
  Antisense strand to SEQ ID NO: 2345558
aaaccagggaucaugucug

SEQ ID NO: 2345560 - RNA, 19 nt, Artificial Sequence
  Description of Artificial Sequence: Synthetic oligonucleotide
  Sense strand starting at position 679 of SEQ ID NO: 1885481
agacaugaucccugguuua

SEQ ID NO: 2345561 - RNA, 19 nt, Artificial Sequence
  Description of Artificial Sequence: Synthetic oligonucleotide
  Antisense strand to SEQ ID NO: 2345560
uaaaccagggaucaugucu

SEQ ID NO: 2345562 - RNA, 19 nt, Artificial Sequence
  Description of Artificial Sequence: Synthetic oligonucleotide
  Sense strand starting at position 733 of SEQ ID NO: 1885481
gugaauuucucugcuggca

SEQ ID NO: 2345563 - RNA, 19 nt, Artificial Sequence
  Description of Artificial Sequence: Synthetic oligonucleotide
  Antisense strand to SEQ ID NO: 2345562
ugccagcagagaaauucac

SEQ ID NO: 2345564 - RNA, 19 nt, Artificial Sequence
  Description of Artificial Sequence: Synthetic oligonucleotide
  Sense strand starting at position 898 of SEQ ID NO: 1885481
ucaauagguggacgacaua

SEQ ID NO: 2345565 - RNA, 19 nt, Artificial Sequence
  Description of Artificial Sequence: Synthetic oligonucleotide
  Antisense strand to SEQ ID NO: 2345564
uaugucguccaccuauuga

SEQ ID NO: 2345566 - RNA, 19 nt, Artificial Sequence
  Description of Artificial Sequence: Synthetic oligonucleotide
  Sense strand starting at position 935 of SEQ ID NO: 1885481
ggccaaguauacuuauaag

SEQ ID NO: 2345567 - RNA, 19 nt, Artificial Sequence
  Description of Artificial Sequence: Synthetic oligonucleotide
  Antisense strand to SEQ ID NO: 2345566
cuuauaaguauacuuggcc

SEQ ID NO: 2345568 - RNA, 19 nt, Artificial Sequence
  Description of Artificial Sequence: Synthetic oligonucleotide
  Sense strand starting at position 1002 of SEQ ID NO: 1885481
acugauuuguuuccguuga

SEQ ID NO: 2345569 - RNA, 19 nt, Artificial Sequence
  Description of Artificial Sequence: Synthetic oligonucleotide
  Antisense strand to SEQ ID NO: 2345568
ucaacggaaacaaaucagu

SEQ ID NO: 2345570 - RNA, 19 nt, Artificial Sequence
  Description of Artificial Sequence: Synthetic oligonucleotide
  Sense strand starting at position 1004 of SEQ ID NO: 1885481
ugauuuguuuccguugaga

SEQ ID NO: 2345571 - RNA, 19 nt, Artificial Sequence
  Description of Artificial Sequence: Synthetic oligonucleotide
  Antisense strand to SEQ ID NO: 2345570
ucucaacggaaacaaauca

SEQ ID NO: 2345572 - RNA, 19 nt, Artificial Sequence
  Description of Artificial Sequence: Synthetic oligonucleotide
  Sense strand starting at position 1006 of SEQ ID NO: 1885481
auuuguuuccguugagaga

SEQ ID NO: 2345573 - RNA, 19 nt, Artificial Sequence
  Description of Artificial Sequence: Synthetic oligonucleotide
  Antisense strand to SEQ ID NO: 2345572
ucucucaacggaaacaaau

SEQ ID NO: 2345574 - RNA, 19 nt, Artificial Sequence
  Description of Artificial Sequence: Synthetic oligonucleotide
  Sense strand starting at position 1007 of SEQ ID NO: 1885481
uuuguuuccguugagagaa

SEQ ID NO: 2345575 - RNA, 19 nt, Artificial Sequence
  Description of Artificial Sequence: Synthetic oligonucleotide
  Antisense strand to SEQ ID NO: 2345574
uucucucaacggaaacaaa

SEQ ID NO: 2345576 - RNA, 19 nt, Artificial Sequence
  Description of Artificial Sequence: Synthetic oligonucleotide
  Sense strand starting at position 1023 of SEQ ID NO: 1885481
gaaaucauuuaggaucugu

SEQ ID NO: 2345577 - RNA, 19 nt, Artificial Sequence
  Description of Artificial Sequence: Synthetic oligonucleotide
  Antisense strand to SEQ ID NO: 2345576
acagauccuaaaugauuuc

SEQ ID NO: 2345578 - RNA, 19 nt, Artificial Sequence
  Description of Artificial Sequence: Synthetic oligonucleotide
  Sense strand starting at position 1128 of SEQ ID NO: 1885481
ggaauccacuauguugaca

SEQ ID NO: 2345579 - RNA, 19 nt, Artificial Sequence
  Description of Artificial Sequence: Synthetic oligonucleotide
  Antisense strand to SEQ ID NO: 2345578
ugucaacauaguggauucc

SEQ ID NO: 2345580 - RNA, 19 nt, Artificial Sequence
  Description of Artificial Sequence: Synthetic oligonucleotide
  Sense strand starting at position 1180 of SEQ ID NO: 1885481
uugcuuugagaguaaauga

SEQ ID NO: 2345581 - RNA, 19 nt, Artificial Sequence
  Description of Artificial Sequence: Synthetic oligonucleotide
  Antisense strand to SEQ ID NO: 2345580
ucauuuacucucaaagcaa

SEQ ID NO: 2345582 - RNA, 19 nt, Artificial Sequence
  Description of Artificial Sequence: Synthetic oligonucleotide
  Sense strand starting at position 1514 of SEQ ID NO: 1885481
ccacguaaccaugauagua

SEQ ID NO: 2345583 - RNA, 19 nt, Artificial Sequence
  Description of Artificial Sequence: Synthetic oligonucleotide
  Antisense strand to SEQ ID NO: 2345582
uacuaucaugguuacgugg

SEQ ID NO: 2345584 - RNA, 19 nt, Artificial Sequence
  Description of Artificial Sequence: Synthetic oligonucleotide
  Sense strand starting at position 1528 of SEQ ID NO: 1885481
uaguaacagucaucuggga

SEQ ID NO: 2345585 - RNA, 19 nt, Artificial Sequence
  Description of Artificial Sequence: Synthetic oligonucleotide
  Antisense strand to SEQ ID NO: 2345584
ucccagaugacuguuacua

SEQ ID NO: 2345586 - RNA, 19 nt, Artificial Sequence
  Description of Artificial Sequence: Synthetic oligonucleotide
  Sense strand starting at position 1530 of SEQ ID NO: 1885481
guaacagucaucugggaug

SEQ ID NO: 2345587 - RNA, 19 nt, Artificial Sequence
  Description of Artificial Sequence: Synthetic oligonucleotide
  Antisense strand to SEQ ID NO: 2345586
caucccagaugacuguuac

SEQ ID NO: 2345588 - RNA, 19 nt, Artificial Sequence
  Description of Artificial Sequence: Synthetic oligonucleotide
  Sense strand starting at position 1987 of SEQ ID NO: 1885481
cagagcaauguuggaagua

SEQ ID NO: 2345589 - RNA, 19 nt, Artificial Sequence
  Description of Artificial Sequence: Synthetic oligonucleotide
  Antisense strand to SEQ ID NO: 2345588
uacuuccaacauugcucug

SEQ ID NO: 2345590 - RNA, 19 nt, Artificial Sequence
  Description of Artificial Sequence: Synthetic oligonucleotide
  Sense strand starting at position 2017 of SEQ ID NO: 1885481
auggguuggaaaggugaua

SEQ ID NO: 2345591 - RNA, 19 nt, Artificial Sequence
  Description of Artificial Sequence: Synthetic oligonucleotide
  Antisense strand to SEQ ID NO: 2345590
uaucaccuuuccaacccau

SEQ ID NO: 2345592 - RNA, 19 nt, Artificial Sequence
  Description of Artificial Sequence: Synthetic oligonucleotide
  Sense strand starting at position 2169 of SEQ ID NO: 1885481
uggugauaauaguugaagu

SEQ ID NO: 2345593 - RNA, 19 nt, Artificial Sequence
  Description of Artificial Sequence: Synthetic oligonucleotide
  Antisense strand to SEQ ID NO: 2345592
acuucaacuauuaucacca

SEQ ID NO: 2345594 - RNA, 19 nt, Artificial Sequence
  Description of Artificial Sequence: Synthetic oligonucleotide
  Sense strand starting at position 2177 of SEQ ID NO: 1885481
auaguugaaguuggaagau

SEQ ID NO: 2345595 - RNA, 19 nt, Artificial Sequence
  Description of Artificial Sequence: Synthetic oligonucleotide
  Antisense strand to SEQ ID NO: 2345594
aucuuccaacuucaacuau

SEQ ID NO: 2345596 - RNA, 19 nt, Artificial Sequence
  Description of Artificial Sequence: Synthetic oligonucleotide
  Sense strand starting at position 2186 of SEQ ID NO: 1885481
guuggaagauggguacuua

SEQ ID NO: 2345597 - RNA, 19 nt, Artificial Sequence
  Description of Artificial Sequence: Synthetic oligonucleotide
  Antisense strand to SEQ ID NO: 2345596
uaaguacccaucuuccaac

SEQ ID NO: 2345598 - RNA, 19 nt, Artificial Sequence
  Description of Artificial Sequence: Synthetic oligonucleotide
  Sense strand starting at position 2220 of SEQ ID NO: 1885481
cuuuacaggcaguaugaaa

SEQ ID NO: 2345599 - RNA, 19 nt, Artificial Sequence
  Description of Artificial Sequence: Synthetic oligonucleotide
  Antisense strand to SEQ ID NO: 2345598
uuucauacugccuguaaag

SEQ ID NO: 2345600 - RNA, 19 nt, Artificial Sequence
  Description of Artificial Sequence: Synthetic oligonucleotide
  Sense strand starting at position 2499 of SEQ ID NO: 1885481
acuuuauuagacugcaaga

SEQ ID NO: 2345601 - RNA, 19 nt, Artificial Sequence
  Description of Artificial Sequence: Synthetic oligonucleotide
  Antisense strand to SEQ ID NO: 2345600
ucuugcagucuaauaaagu

SEQ ID NO: 2345602 - RNA, 19 nt, Artificial Sequence
  Description of Artificial Sequence: Synthetic oligonucleotide
  Sense strand starting at position 2501 of SEQ ID NO: 1885481
uuuauuagacugcaagauu

SEQ ID NO: 2345603 - RNA, 19 nt, Artificial Sequence
  Description of Artificial Sequence: Synthetic oligonucleotide
  Antisense strand to SEQ ID NO: 2345602
aaucuugcagucuaauaaa

SEQ ID NO: 2345604 - RNA, 19 nt, Artificial Sequence
  Description of Artificial Sequence: Synthetic oligonucleotide
  Sense strand starting at position 2504 of SEQ ID NO: 1885481
auuagacugcaagauucuu

SEQ ID NO: 2345605 - RNA, 19 nt, Artificial Sequence
  Description of Artificial Sequence: Synthetic oligonucleotide
  Antisense strand to SEQ ID NO: 2345604
aagaaucuugcagucuaau

SEQ ID NO: 2345606 - RNA, 19 nt, Artificial Sequence
  Description of Artificial Sequence: Synthetic oligonucleotide
  Sense strand starting at position 2806 of SEQ ID NO: 1885481
ugagaaucugugcaguuua

SEQ ID NO: 2345607 - RNA, 19 nt, Artificial Sequence
  Description of Artificial Sequence: Synthetic oligonucleotide
  Antisense strand to SEQ ID NO: 2345606
uaaacugcacagauucuca

SEQ ID NO: 2345608 - RNA, 19 nt, Artificial Sequence
  Description of Artificial Sequence: Synthetic oligonucleotide
  Sense strand starting at position 2839 of SEQ ID NO: 1885481
aggaacucuugucuuauua

SEQ ID NO: 2345609 - RNA, 19 nt, Artificial Sequence
  Description of Artificial Sequence: Synthetic oligonucleotide
  Antisense strand to SEQ ID NO: 2345608
uaauaagacaagaguuccu

SEQ ID NO: 2345610 - RNA, 19 nt, Artificial Sequence
  Description of Artificial Sequence: Synthetic oligonucleotide
  Sense strand starting at position 2886 of SEQ ID NO: 1885481
uuaggaucgccagggaaga

SEQ ID NO: 2345611 - RNA, 19 nt, Artificial Sequence
  Description of Artificial Sequence: Synthetic oligonucleotide
  Antisense strand to SEQ ID NO: 2345610
ucuucccuggcgauccuaa

SEQ ID NO: 2345612 - RNA, 19 nt, Artificial Sequence
  Description of Artificial Sequence: Synthetic oligonucleotide
  Sense strand starting at position 2982 of SEQ ID NO: 1885481
uggcaacgcucauccauuu

SEQ ID NO: 2345613 - RNA, 19 nt, Artificial Sequence
  Description of Artificial Sequence: Synthetic oligonucleotide
  Antisense strand to SEQ ID NO: 2345612
aaauggaugagcguugcca

SEQ ID NO: 2345614 - RNA, 19 nt, Artificial Sequence
  Description of Artificial Sequence: Synthetic oligonucleotide
  Sense strand starting at position 3028 of SEQ ID NO: 1885481
auguguuuggagcauacau

SEQ ID NO: 2345615 - RNA, 19 nt, Artificial Sequence
  Description of Artificial Sequence: Synthetic oligonucleotide
  Antisense strand to SEQ ID NO: 2345614
auguaugcuccaaacacau

SEQ ID NO: 2345616 - RNA, 19 nt, Artificial Sequence
  Description of Artificial Sequence: Synthetic oligonucleotide
  Sense strand starting at position 3041 of SEQ ID NO: 1885481
auacauagugcaggacauu

SEQ ID NO: 2345617 - RNA, 19 nt, Artificial Sequence
  Description of Artificial Sequence: Synthetic oligonucleotide
  Antisense strand to SEQ ID NO: 2345616
aauguccugcacuauguau

SEQ ID NO: 2345618 - RNA, 19 nt, Artificial Sequence
  Description of Artificial Sequence: Synthetic oligonucleotide
  Sense strand starting at position 3054 of SEQ ID NO: 1885481
gacauugugcuagauauua

SEQ ID NO: 2345619 - RNA, 19 nt, Artificial Sequence
  Description of Artificial Sequence: Synthetic oligonucleotide
  Antisense strand to SEQ ID NO: 2345618
uaauaucuagcacaauguc

SEQ ID NO: 2345620 - RNA, 19 nt, Artificial Sequence
  Description of Artificial Sequence: Synthetic oligonucleotide
  Sense strand starting at position 3241 of SEQ ID NO: 1885481
gucugaaaugacugucaaa

SEQ ID NO: 2345621 - RNA, 19 nt, Artificial Sequence
  Description of Artificial Sequence: Synthetic oligonucleotide
  Antisense strand to SEQ ID NO: 2345620
uuugacagucauuucagac

SEQ ID NO: 2345622 - RNA, 19 nt, Artificial Sequence
  Description of Artificial Sequence: Synthetic oligonucleotide
  Sense strand starting at position 3278 of SEQ ID NO: 1885481
ugagcauguguagaaacaa

SEQ ID NO: 2345623 - RNA, 19 nt, Artificial Sequence
  Description of Artificial Sequence: Synthetic oligonucleotide
  Antisense strand to SEQ ID NO: 2345622
uuguuucuacacaugcuca

SEQ ID NO: 2345624 - RNA, 19 nt, Artificial Sequence
  Description of Artificial Sequence: Synthetic oligonucleotide
  Sense strand starting at position 3360 of SEQ ID NO: 1885481
cagggauccucauuguaca

SEQ ID NO: 2345625 - RNA, 19 nt, Artificial Sequence
  Description of Artificial Sequence: Synthetic oligonucleotide
  Antisense strand to SEQ ID NO: 2345624
uguacaaugaggaucccug

SEQ ID NO: 2345626 - RNA, 19 nt, Artificial Sequence
  Description of Artificial Sequence: Synthetic oligonucleotide
  Sense strand starting at position 3430 of SEQ ID NO: 1885481
cucaaauuaugagugauca

SEQ ID NO: 2345627 - RNA, 19 nt, Artificial Sequence
  Description of Artificial Sequence: Synthetic oligonucleotide
  Antisense strand to SEQ ID NO: 2345626
ugaucacucauaauuugag

SEQ ID NO: 2345628 - RNA, 19 nt, Artificial Sequence
  Description of Artificial Sequence: Synthetic oligonucleotide
  Sense strand starting at position 3781 of SEQ ID NO: 1885481
ucaggaaguugauuaauau

SEQ ID NO: 2345629 - RNA, 19 nt, Artificial Sequence
  Description of Artificial Sequence: Synthetic oligonucleotide
  Antisense strand to SEQ ID NO: 2345628
auauuaaucaacuuccuga

SEQ ID NO: 2345630 - RNA, 19 nt, Artificial Sequence
  Description of Artificial Sequence: Synthetic oligonucleotide
  Sense strand starting at position 336 of SEQ ID NO: 1885482
caaagaucgccuugcagag

SEQ ID NO: 2345631 - RNA, 19 nt, Artificial Sequence
  Description of Artificial Sequence: Synthetic oligonucleotide
  Antisense strand to SEQ ID NO: 2345630
cucugcaaggcgaucuuug

SEQ ID NO: 2345632 - RNA, 19 nt, Artificial Sequence
  Description of Artificial Sequence: Synthetic oligonucleotide
  Sense strand starting at position 411 of SEQ ID NO: 1885482
uuccaucuugcguauaaac

SEQ ID NO: 2345633 - RNA, 19 nt, Artificial Sequence
  Description of Artificial Sequence: Synthetic oligonucleotide
  Antisense strand to SEQ ID NO: 2345632
guuuauacgcaagauggaa

SEQ ID NO: 2345634 - RNA, 19 nt, Artificial Sequence
  Description of Artificial Sequence: Synthetic oligonucleotide
  Sense strand starting at position 426 of SEQ ID NO: 1885482
aaacguuugcgggacaugu

SEQ ID NO: 2345635 - RNA, 19 nt, Artificial Sequence
  Description of Artificial Sequence: Synthetic oligonucleotide
  Antisense strand to SEQ ID NO: 2345634
acaugucccgcaaacguuu

SEQ ID NO: 2345636 - RNA, 19 nt, Artificial Sequence
  Description of Artificial Sequence: Synthetic oligonucleotide
  Sense strand starting at position 673 of SEQ ID NO: 1885482
cguugucaugguuucguua

SEQ ID NO: 2345637 - RNA, 19 nt, Artificial Sequence
  Description of Artificial Sequence: Synthetic oligonucleotide
  Antisense strand to SEQ ID NO: 2345636
uaacgaaaccaugacaacg

SEQ ID NO: 2345638 - RNA, 19 nt, Artificial Sequence
  Description of Artificial Sequence: Synthetic oligonucleotide
  Sense strand starting at position 674 of SEQ ID NO: 1885482
guugucaugguuucguuau

SEQ ID NO: 2345639 - RNA, 19 nt, Artificial Sequence
  Description of Artificial Sequence: Synthetic oligonucleotide
  Antisense strand to SEQ ID NO: 2345638
auaacgaaaccaugacaac

SEQ ID NO: 2345640 - RNA, 19 nt, Artificial Sequence
  Description of Artificial Sequence: Synthetic oligonucleotide
  Sense strand starting at position 686 of SEQ ID NO: 1885482
ucguuauacacaggagcaa

SEQ ID NO: 2345641 - RNA, 19 nt, Artificial Sequence
  Description of Artificial Sequence: Synthetic oligonucleotide
  Antisense strand to SEQ ID NO: 2345640
uugcuccuguguauaacga

SEQ ID NO: 2345642 - RNA, 19 nt, Artificial Sequence
  Description of Artificial Sequence: Synthetic oligonucleotide
  Sense strand starting at position 746 of SEQ ID NO: 1885482
ugugcauguccauaagaac

SEQ ID NO: 2345643 - RNA, 19 nt, Artificial Sequence
  Description of Artificial Sequence: Synthetic oligonucleotide
  Antisense strand to SEQ ID NO: 2345642
guucuuauggacaugcaca

SEQ ID NO: 2345644 - RNA, 19 nt, Artificial Sequence
  Description of Artificial Sequence: Synthetic oligonucleotide
  Sense strand starting at position 788 of SEQ ID NO: 1885482
ccaggaaaucgcugcauaa

SEQ ID NO: 2345645 - RNA, 19 nt, Artificial Sequence
  Description of Artificial Sequence: Synthetic oligonucleotide
  Antisense strand to SEQ ID NO: 2345644
uuaugcagcgauuuccugg

SEQ ID NO: 2345646 - RNA, 19 nt, Artificial Sequence
  Description of Artificial Sequence: Synthetic oligonucleotide
  Sense strand starting at position 790 of SEQ ID NO: 1885482
aggaaaucgcugcauaaug

SEQ ID NO: 2345647 - RNA, 19 nt, Artificial Sequence
  Description of Artificial Sequence: Synthetic oligonucleotide
  Antisense strand to SEQ ID NO: 2345646
cauuaugcagcgauuuccu

SEQ ID NO: 2345648 - RNA, 19 nt, Artificial Sequence
  Description of Artificial Sequence: Synthetic oligonucleotide
  Sense strand starting at position 824 of SEQ ID NO: 1885482
ugacaugugcaguaguuau

SEQ ID NO: 2345649 - RNA, 19 nt, Artificial Sequence
  Description of Artificial Sequence: Synthetic oligonucleotide
  Antisense strand to SEQ ID NO: 2345648
auaacuacugcacauguca

SEQ ID NO: 2345650 - RNA, 19 nt, Artificial Sequence
  Description of Artificial Sequence: Synthetic oligonucleotide
  Sense strand starting at position 901 of SEQ ID NO: 1885482
uaaauaaugucugccugga

SEQ ID NO: 2345651 - RNA, 19 nt, Artificial Sequence
  Description of Artificial Sequence: Synthetic oligonucleotide
  Antisense strand to SEQ ID NO: 2345650
uccaggcagacauuauuua

SEQ ID NO: 2345652 - RNA, 19 nt, Artificial Sequence
  Description of Artificial Sequence: Synthetic oligonucleotide
  Sense strand starting at position 903 of SEQ ID NO: 1885482
aauaaugucugccuggagu

SEQ ID NO: 2345653 - RNA, 19 nt, Artificial Sequence
  Description of Artificial Sequence: Synthetic oligonucleotide
  Antisense strand to SEQ ID NO: 2345652
acuccaggcagacauuauu

SEQ ID NO: 2345654 - RNA, 19 nt, Artificial Sequence
  Description of Artificial Sequence: Synthetic oligonucleotide
  Sense strand starting at position 917 of SEQ ID NO: 1885482
ggaguaccaauguguaaca

SEQ ID NO: 2345655 - RNA, 19 nt, Artificial Sequence
  Description of Artificial Sequence: Synthetic oligonucleotide
  Antisense strand to SEQ ID NO: 2345654
uguuacacauugguacucc

SEQ ID NO: 2345656 - RNA, 19 nt, Artificial Sequence
  Description of Artificial Sequence: Synthetic oligonucleotide
  Sense strand starting at position 986 of SEQ ID NO: 1885482
uguggcacguauuuaauaa

SEQ ID NO: 2345657 - RNA, 19 nt, Artificial Sequence
  Description of Artificial Sequence: Synthetic oligonucleotide
  Antisense strand to SEQ ID NO: 2345656
uuauuaaauacgugccaca

SEQ ID NO: 2345658 - RNA, 19 nt, Artificial Sequence
  Description of Artificial Sequence: Synthetic oligonucleotide
  Sense strand starting at position 1134 of SEQ ID NO: 1885482
uauaguaccgcagaucaau

SEQ ID NO: 2345659 - RNA, 19 nt, Artificial Sequence
  Description of Artificial Sequence: Synthetic oligonucleotide
  Antisense strand to SEQ ID NO: 2345658
auugaucugcgguacuaua

SEQ ID NO: 2345660 - RNA, 19 nt, Artificial Sequence
  Description of Artificial Sequence: Synthetic oligonucleotide
  Sense strand starting at position 1208 of SEQ ID NO: 1885482
guuguaauauugccauaua

SEQ ID NO: 2345661 - RNA, 19 nt, Artificial Sequence
  Description of Artificial Sequence: Synthetic oligonucleotide
  Antisense strand to SEQ ID NO: 2345660
uauauggcaauauuacaac

SEQ ID NO: 2345662 - RNA, 19 nt, Artificial Sequence
  Description of Artificial Sequence: Synthetic oligonucleotide
  Sense strand starting at position 1211 of SEQ ID NO: 1885482
guaauauugccauauaugc

SEQ ID NO: 2345663 - RNA, 19 nt, Artificial Sequence
  Description of Artificial Sequence: Synthetic oligonucleotide
  Antisense strand to SEQ ID NO: 2345662
gcauauauggcaauauuac

SEQ ID NO: 2345664 - RNA, 19 nt, Artificial Sequence
  Description of Artificial Sequence: Synthetic oligonucleotide
  Sense strand starting at position 1220 of SEQ ID NO: 1885482
ccauauaugcgauaauaug

SEQ ID NO: 2345665 - RNA, 19 nt, Artificial Sequence
  Description of Artificial Sequence: Synthetic oligonucleotide
  Antisense strand to SEQ ID NO: 2345664
cauauuaucgcauauaugg

SEQ ID NO: 2345666 - RNA, 19 nt, Artificial Sequence
  Description of Artificial Sequence: Synthetic oligonucleotide
  Sense strand starting at position 1346 of SEQ ID NO: 1885482
gucucauugucaucaucuc

SEQ ID NO: 2345667 - RNA, 19 nt, Artificial Sequence
  Description of Artificial Sequence: Synthetic oligonucleotide
  Antisense strand to SEQ ID NO: 2345666
gagaugaugacaaugagac

SEQ ID NO: 2345668 - RNA, 19 nt, Artificial Sequence
  Description of Artificial Sequence: Synthetic oligonucleotide
  Sense strand starting at position 1353 of SEQ ID NO: 1885482
ugucaucaucucuaaaugu

SEQ ID NO: 2345669 - RNA, 19 nt, Artificial Sequence
  Description of Artificial Sequence: Synthetic oligonucleotide
  Antisense strand to SEQ ID NO: 2345668
acauuuagagaugaugaca

SEQ ID NO: 2345670 - RNA, 19 nt, Artificial Sequence
  Description of Artificial Sequence: Synthetic oligonucleotide
  Sense strand starting at position 1441 of SEQ ID NO: 1885482
ggguuugauuucguacgca

SEQ ID NO: 2345671 - RNA, 19 nt, Artificial Sequence
  Description of Artificial Sequence: Synthetic oligonucleotide
  Antisense strand to SEQ ID NO: 2345670
ugcguacgaaaucaaaccc

SEQ ID NO: 2345672 - RNA, 19 nt, Artificial Sequence
  Description of Artificial Sequence: Synthetic oligonucleotide
  Sense strand starting at position 1445 of SEQ ID NO: 1885482
uugauuucguacgcaaggu

SEQ ID NO: 2345673 - RNA, 19 nt, Artificial Sequence
  Description of Artificial Sequence: Synthetic oligonucleotide
  Antisense strand to SEQ ID NO: 2345672
accuugcguacgaaaucaa

SEQ ID NO: 2345674 - RNA, 19 nt, Artificial Sequence
  Description of Artificial Sequence: Synthetic oligonucleotide
  Sense strand starting at position 1473 of SEQ ID NO: 1885482
ucaugaugccucugagguc

SEQ ID NO: 2345675 - RNA, 19 nt, Artificial Sequence
  Description of Artificial Sequence: Synthetic oligonucleotide
  Antisense strand to SEQ ID NO: 2345674
gaccucagaggcaucauga

SEQ ID NO: 2345676 - RNA, 19 nt, Artificial Sequence
  Description of Artificial Sequence: Synthetic oligonucleotide
  Sense strand starting at position 1574 of SEQ ID NO: 1885482
gggucacccaucugcaaga

SEQ ID NO: 2345677 - RNA, 19 nt, Artificial Sequence
  Description of Artificial Sequence: Synthetic oligonucleotide
  Antisense strand to SEQ ID NO: 2345676
ucuugcagaugggugaccc

SEQ ID NO: 2345678 - RNA, 19 nt, Artificial Sequence
  Description of Artificial Sequence: Synthetic oligonucleotide
  Sense strand starting at position 1585 of SEQ ID NO: 1885482
cugcaagacuccuugguca

SEQ ID NO: 2345679 - RNA, 19 nt, Artificial Sequence
  Description of Artificial Sequence: Synthetic oligonucleotide
  Antisense strand to SEQ ID NO: 2345678
ugaccaaggagucuugcag

SEQ ID NO: 2345680 - RNA, 19 nt, Artificial Sequence
  Description of Artificial Sequence: Synthetic oligonucleotide
  Sense strand starting at position 1587 of SEQ ID NO: 1885482
gcaagacuccuuggucauc

SEQ ID NO: 2345681 - RNA, 19 nt, Artificial Sequence
  Description of Artificial Sequence: Synthetic oligonucleotide
  Antisense strand to SEQ ID NO: 2345680
gaugaccaaggagucuugc

SEQ ID NO: 2345682 - RNA, 19 nt, Artificial Sequence
  Description of Artificial Sequence: Synthetic oligonucleotide
  Sense strand starting at position 1619 of SEQ ID NO: 1885482
agcagaugucuaggccaaa

SEQ ID NO: 2345683 - RNA, 19 nt, Artificial Sequence
  Description of Artificial Sequence: Synthetic oligonucleotide
  Antisense strand to SEQ ID NO: 2345682
uuuggccuagacaucugcu

SEQ ID NO: 2345684 - RNA, 19 nt, Artificial Sequence
  Description of Artificial Sequence: Synthetic oligonucleotide
  Sense strand starting at position 1620 of SEQ ID NO: 1885482
gcagaugucuaggccaaag

SEQ ID NO: 2345685 - RNA, 19 nt, Artificial Sequence
  Description of Artificial Sequence: Synthetic oligonucleotide
  Antisense strand to SEQ ID NO: 2345684
cuuuggccuagacaucugc

SEQ ID NO: 2345686 - RNA, 19 nt, Artificial Sequence
  Description of Artificial Sequence: Synthetic oligonucleotide
  Sense strand starting at position 1890 of SEQ ID NO: 1885482
cagcgauagucauccaaag

SEQ ID NO: 2345687 - RNA, 19 nt, Artificial Sequence
  Description of Artificial Sequence: Synthetic oligonucleotide
  Antisense strand to SEQ ID NO: 2345686
cuuuggaugacuaucgcug

SEQ ID NO: 2345688 - RNA, 19 nt, Artificial Sequence
  Description of Artificial Sequence: Synthetic oligonucleotide
  Sense strand starting at position 1892 of SEQ ID NO: 1885482
gcgauagucauccaaagac

SEQ ID NO: 2345689 - RNA, 19 nt, Artificial Sequence
  Description of Artificial Sequence: Synthetic oligonucleotide
  Antisense strand to SEQ ID NO: 2345688
gucuuuggaugacuaucgc

SEQ ID NO: 2345690 - RNA, 19 nt, Artificial Sequence
  Description of Artificial Sequence: Synthetic oligonucleotide
  Sense strand starting at position 2292 of SEQ ID NO: 1885482
ugcucuguggguuaauagu

SEQ ID NO: 2345691 - RNA, 19 nt, Artificial Sequence
  Description of Artificial Sequence: Synthetic oligonucleotide
  Antisense strand to SEQ ID NO: 2345690
acuauuaacccacagagca

SEQ ID NO: 2345692 - RNA, 19 nt, Artificial Sequence
  Description of Artificial Sequence: Synthetic oligonucleotide
  Sense strand starting at position 2764 of SEQ ID NO: 1885482
gucccugaaaugcguaaau

SEQ ID NO: 2345693 - RNA, 19 nt, Artificial Sequence
  Description of Artificial Sequence: Synthetic oligonucleotide
  Antisense strand to SEQ ID NO: 2345692
auuuacgcauuucagggac

SEQ ID NO: 2345694 - RNA, 19 nt, Artificial Sequence
  Description of Artificial Sequence: Synthetic oligonucleotide
  Sense strand starting at position 2766 of SEQ ID NO: 1885482
cccugaaaugcguaaauca

SEQ ID NO: 2345695 - RNA, 19 nt, Artificial Sequence
  Description of Artificial Sequence: Synthetic oligonucleotide
  Antisense strand to SEQ ID NO: 2345694
ugauuuacgcauuucaggg

SEQ ID NO: 2345696 - RNA, 19 nt, Artificial Sequence
  Description of Artificial Sequence: Synthetic oligonucleotide
  Sense strand starting at position 2906 of SEQ ID NO: 1885482
uccaucuauugggaacaga

SEQ ID NO: 2345697 - RNA, 19 nt, Artificial Sequence
  Description of Artificial Sequence: Synthetic oligonucleotide
  Antisense strand to SEQ ID NO: 2345696
ucuguucccaauagaugga

SEQ ID NO: 2345698 - RNA, 19 nt, Artificial Sequence
  Description of Artificial Sequence: Synthetic oligonucleotide
  Sense strand starting at position 3237 of SEQ ID NO: 1885482
gaccgugguguguuucgaa

SEQ ID NO: 2345699 - RNA, 19 nt, Artificial Sequence
  Description of Artificial Sequence: Synthetic oligonucleotide
  Antisense strand to SEQ ID NO: 2345698
uucgaaacacaccacgguc

SEQ ID NO: 2345700 - RNA, 19 nt, Artificial Sequence
  Description of Artificial Sequence: Synthetic oligonucleotide
  Sense strand starting at position 3337 of SEQ ID NO: 1885482
augaacgauuacuaaugaa

SEQ ID NO: 2345701 - RNA, 19 nt, Artificial Sequence
  Description of Artificial Sequence: Synthetic oligonucleotide
  Antisense strand to SEQ ID NO: 2345700
uucauuaguaaucguucau

SEQ ID NO: 2345702 - RNA, 19 nt, Artificial Sequence
  Description of Artificial Sequence: Synthetic oligonucleotide
  Sense strand starting at position 3483 of SEQ ID NO: 1885482
cuaaauucuugugcugaag

SEQ ID NO: 2345703 - RNA, 19 nt, Artificial Sequence
  Description of Artificial Sequence: Synthetic oligonucleotide
  Antisense strand to SEQ ID NO: 2345702
cuucagcacaagaauuuag

SEQ ID NO: 2345704 - RNA, 19 nt, Artificial Sequence
  Description of Artificial Sequence: Synthetic oligonucleotide
  Sense strand starting at position 3887 of SEQ ID NO: 1885482
cguggacucuucccucaga

SEQ ID NO: 2345705 - RNA, 19 nt, Artificial Sequence
  Description of Artificial Sequence: Synthetic oligonucleotide
  Antisense strand to SEQ ID NO: 2345704
ucugagggaagaguccacg

SEQ ID NO: 2345706 - RNA, 19 nt, Artificial Sequence
  Description of Artificial Sequence: Synthetic oligonucleotide
  Sense strand starting at position 3888 of SEQ ID NO: 1885482
guggacucuucccucagau

SEQ ID NO: 2345707 - RNA, 19 nt, Artificial Sequence
  Description of Artificial Sequence: Synthetic oligonucleotide
  Antisense strand to SEQ ID NO: 2345706
aucugagggaagaguccac

SEQ ID NO: 2345708 - RNA, 19 nt, Artificial Sequence
  Description of Artificial Sequence: Synthetic oligonucleotide
  Sense strand starting at position 3983 of SEQ ID NO: 1885482
gcacacuucuucccugaga

SEQ ID NO: 2345709 - RNA, 19 nt, Artificial Sequence
  Description of Artificial Sequence: Synthetic oligonucleotide
  Antisense strand to SEQ ID NO: 2345708
ucucagggaagaagugugc

SEQ ID NO: 2345710 - RNA, 19 nt, Artificial Sequence
  Description of Artificial Sequence: Synthetic oligonucleotide
  Sense strand starting at position 21 of SEQ ID NO: 1885483
aguguugagaaaugugaca

SEQ ID NO: 2345711 - RNA, 19 nt, Artificial Sequence
  Description of Artificial Sequence: Synthetic oligonucleotide
  Antisense strand to SEQ ID NO: 2345710
ugucacauuucucaacacu

SEQ ID NO: 2345712 - RNA, 19 nt, Artificial Sequence
  Description of Artificial Sequence: Synthetic oligonucleotide
  Sense strand starting at position 23 of SEQ ID NO: 1885483
uguugagaaaugugacaaa

SEQ ID NO: 2345713 - RNA, 19 nt, Artificial Sequence
  Description of Artificial Sequence: Synthetic oligonucleotide
  Antisense strand to SEQ ID NO: 2345712
uuugucacauuucucaaca

SEQ ID NO: 2345714 - RNA, 19 nt, Artificial Sequence
  Description of Artificial Sequence: Synthetic oligonucleotide
  Sense strand starting at position 112 of SEQ ID NO: 1885483
aguaacaucgaagauguua

SEQ ID NO: 2345715 - RNA, 19 nt, Artificial Sequence
  Description of Artificial Sequence: Synthetic oligonucleotide
  Antisense strand to SEQ ID NO: 2345714
uaacaucuucgauguuacu

SEQ ID NO: 2345716 - RNA, 19 nt, Artificial Sequence
  Description of Artificial Sequence: Synthetic oligonucleotide
  Sense strand starting at position 133 of SEQ ID NO: 1885483
aguuaucugucagugggaa

SEQ ID NO: 2345717 - RNA, 19 nt, Artificial Sequence
  Description of Artificial Sequence: Synthetic oligonucleotide
  Antisense strand to SEQ ID NO: 2345716
uucccacugacagauaacu

SEQ ID NO: 2345718 - RNA, 19 nt, Artificial Sequence
  Description of Artificial Sequence: Synthetic oligonucleotide
  Sense strand starting at position 134 of SEQ ID NO: 1885483
guuaucugucagugggaag

SEQ ID NO: 2345719 - RNA, 19 nt, Artificial Sequence
  Description of Artificial Sequence: Synthetic oligonucleotide
  Antisense strand to SEQ ID NO: 2345718
cuucccacugacagauaac

SEQ ID NO: 2345720 - RNA, 19 nt, Artificial Sequence
  Description of Artificial Sequence: Synthetic oligonucleotide
  Sense strand starting at position 152 of SEQ ID NO: 1885483
gggaacggcaguuagaaau

SEQ ID NO: 2345721 - RNA, 19 nt, Artificial Sequence
  Description of Artificial Sequence: Synthetic oligonucleotide
  Antisense strand to SEQ ID NO: 2345720
auuucuaacugccguuccc

SEQ ID NO: 2345722 - RNA, 19 nt, Artificial Sequence
  Description of Artificial Sequence: Synthetic oligonucleotide
  Sense strand starting at position 199 of SEQ ID NO: 1885483
gagagauacuuuguacgga

SEQ ID NO: 2345723 - RNA, 19 nt, Artificial Sequence
  Description of Artificial Sequence: Synthetic oligonucleotide
  Antisense strand to SEQ ID NO: 2345722
uccguacaaaguaucucuc

SEQ ID NO: 2345724 - RNA, 19 nt, Artificial Sequence
  Description of Artificial Sequence: Synthetic oligonucleotide
  Sense strand starting at position 204 of SEQ ID NO: 1885483
auacuuuguacggacugau

SEQ ID NO: 2345725 - RNA, 19 nt, Artificial Sequence
  Description of Artificial Sequence: Synthetic oligonucleotide
  Antisense strand to SEQ ID NO: 2345724
aucaguccguacaaaguau

SEQ ID NO: 2345726 - RNA, 19 nt, Artificial Sequence
  Description of Artificial Sequence: Synthetic oligonucleotide
  Sense strand starting at position 295 of SEQ ID NO: 1885483
guuagugucagccagaaau

SEQ ID NO: 2345727 - RNA, 19 nt, Artificial Sequence
  Description of Artificial Sequence: Synthetic oligonucleotide
  Antisense strand to SEQ ID NO: 2345726
auuucuggcugacacuaac

SEQ ID NO: 2345728 - RNA, 19 nt, Artificial Sequence
  Description of Artificial Sequence: Synthetic oligonucleotide
  Sense strand starting at position 559 of SEQ ID NO: 1885483
cucgauugccaccaacauu

SEQ ID NO: 2345729 - RNA, 19 nt, Artificial Sequence
  Description of Artificial Sequence: Synthetic oligonucleotide
  Antisense strand to SEQ ID NO: 2345728
aauguugguggcaaucgag

SEQ ID NO: 2345730 - RNA, 19 nt, Artificial Sequence
  Description of Artificial Sequence: Synthetic oligonucleotide
  Sense strand starting at position 618 of SEQ ID NO: 1885483
uugauuacacagggcaaau

SEQ ID NO: 2345731 - RNA, 19 nt, Artificial Sequence
  Description of Artificial Sequence: Synthetic oligonucleotide
  Antisense strand to SEQ ID NO: 2345730
auuugcccuguguaaucaa

SEQ ID NO: 2345732 - RNA, 19 nt, Artificial Sequence
  Description of Artificial Sequence: Synthetic oligonucleotide
  Sense strand starting at position 1092 of SEQ ID NO: 1885483
ugauauaacuuagcaugga

SEQ ID NO: 2345733 - RNA, 19 nt, Artificial Sequence
  Description of Artificial Sequence: Synthetic oligonucleotide
  Antisense strand to SEQ ID NO: 2345732
uccaugcuaaguuauauca

SEQ ID NO: 2345734 - RNA, 19 nt, Artificial Sequence
  Description of Artificial Sequence: Synthetic oligonucleotide
  Sense strand starting at position 1177 of SEQ ID NO: 1885483
auguuuagugcucaguaaa

SEQ ID NO: 2345735 - RNA, 19 nt, Artificial Sequence
  Description of Artificial Sequence: Synthetic oligonucleotide
  Antisense strand to SEQ ID NO: 2345734
uuuacugagcacuaaacau

SEQ ID NO: 2345736 - RNA, 19 nt, Artificial Sequence
  Description of Artificial Sequence: Synthetic oligonucleotide
  Sense strand starting at position 1363 of SEQ ID NO: 1885483
gaaacagaggucuguuaac

SEQ ID NO: 2345737 - RNA, 19 nt, Artificial Sequence
  Description of Artificial Sequence: Synthetic oligonucleotide
  Antisense strand to SEQ ID NO: 2345736
guuaacagaccucuguuuc

SEQ ID NO: 2345738 - RNA, 19 nt, Artificial Sequence
  Description of Artificial Sequence: Synthetic oligonucleotide
  Sense strand starting at position 1455 of SEQ ID NO: 1885483
ucgaucuucugauccauca

SEQ ID NO: 2345739 - RNA, 19 nt, Artificial Sequence
  Description of Artificial Sequence: Synthetic oligonucleotide
  Antisense strand to SEQ ID NO: 2345738
ugauggaucagaagaucga

SEQ ID NO: 2345740 - RNA, 19 nt, Artificial Sequence
  Description of Artificial Sequence: Synthetic oligonucleotide
  Sense strand starting at position 1465 of SEQ ID NO: 1885483
gauccaucaucccugagga

SEQ ID NO: 2345741 - RNA, 19 nt, Artificial Sequence
  Description of Artificial Sequence: Synthetic oligonucleotide
  Antisense strand to SEQ ID NO: 2345740
uccucagggaugauggauc

SEQ ID NO: 2345742 - RNA, 19 nt, Artificial Sequence
  Description of Artificial Sequence: Synthetic oligonucleotide
  Sense strand starting at position 1466 of SEQ ID NO: 1885483
auccaucaucccugaggau

SEQ ID NO: 2345743 - RNA, 19 nt, Artificial Sequence
  Description of Artificial Sequence: Synthetic oligonucleotide
  Antisense strand to SEQ ID NO: 2345742
auccucagggaugauggau

SEQ ID NO: 2345744 - RNA, 19 nt, Artificial Sequence
  Description of Artificial Sequence: Synthetic oligonucleotide
  Sense strand starting at position 2545 of SEQ ID NO: 1885483
gggaaagucuggaagguuc

SEQ ID NO: 2345745 - RNA, 19 nt, Artificial Sequence
  Description of Artificial Sequence: Synthetic oligonucleotide
  Antisense strand to SEQ ID NO: 2345744
gaaccuuccagacuuuccc

SEQ ID NO: 2345746 - RNA, 19 nt, Artificial Sequence
  Description of Artificial Sequence: Synthetic oligonucleotide
  Sense strand starting at position 2572 of SEQ ID NO: 1885483
gaagaugucuacuccggau

SEQ ID NO: 2345747 - RNA, 19 nt, Artificial Sequence
  Description of Artificial Sequence: Synthetic oligonucleotide
  Antisense strand to SEQ ID NO: 2345746
auccggaguagacaucuuc

SEQ ID NO: 2345748 - RNA, 19 nt, Artificial Sequence
  Description of Artificial Sequence: Synthetic oligonucleotide
  Sense strand starting at position 2574 of SEQ ID NO: 1885483
agaugucuacuccggauga

SEQ ID NO: 2345749 - RNA, 19 nt, Artificial Sequence
  Description of Artificial Sequence: Synthetic oligonucleotide
  Antisense strand to SEQ ID NO: 2345748
ucauccggaguagacaucu

SEQ ID NO: 2345750 - RNA, 19 nt, Artificial Sequence
  Description of Artificial Sequence: Synthetic oligonucleotide
  Sense strand starting at position 2576 of SEQ ID NO: 1885483
augucuacuccggaugagu

SEQ ID NO: 2345751 - RNA, 19 nt, Artificial Sequence
  Description of Artificial Sequence: Synthetic oligonucleotide
  Antisense strand to SEQ ID NO: 2345750
acucauccggaguagacau

SEQ ID NO: 2345752 - RNA, 19 nt, Artificial Sequence
  Description of Artificial Sequence: Synthetic oligonucleotide
  Sense strand starting at position 2664 of SEQ ID NO: 1885483
ggguccucgcgggaauaau

SEQ ID NO: 2345753 - RNA, 19 nt, Artificial Sequence
  Description of Artificial Sequence: Synthetic oligonucleotide
  Antisense strand to SEQ ID NO: 2345752
auuauucccgcgaggaccc

SEQ ID NO: 2345754 - RNA, 19 nt, Artificial Sequence
  Description of Artificial Sequence: Synthetic oligonucleotide
  Sense strand starting at position 2778 of SEQ ID NO: 1885483
aguuuaaccugacauuuga

SEQ ID NO: 2345755 - RNA, 19 nt, Artificial Sequence
  Description of Artificial Sequence: Synthetic oligonucleotide
  Antisense strand to SEQ ID NO: 2345754
ucaaaugucagguuaaacu

SEQ ID NO: 2345756 - RNA, 19 nt, Artificial Sequence
  Description of Artificial Sequence: Synthetic oligonucleotide
  Sense strand starting at position 2843 of SEQ ID NO: 1885483
aucucuuucgacugaagag

SEQ ID NO: 2345757 - RNA, 19 nt, Artificial Sequence
  Description of Artificial Sequence: Synthetic oligonucleotide
  Antisense strand to SEQ ID NO: 2345756
cucuucagucgaaagagau

SEQ ID NO: 2345758 - RNA, 19 nt, Artificial Sequence
  Description of Artificial Sequence: Synthetic oligonucleotide
  Sense strand starting at position 2928 of SEQ ID NO: 1885483
cgaggcauuuacguguauu

SEQ ID NO: 2345759 - RNA, 19 nt, Artificial Sequence
  Description of Artificial Sequence: Synthetic oligonucleotide
  Antisense strand to SEQ ID NO: 2345758
aauacacguaaaugccucg

SEQ ID NO: 2345760 - RNA, 19 nt, Artificial Sequence
  Description of Artificial Sequence: Synthetic oligonucleotide
  Sense strand starting at position 2929 of SEQ ID NO: 1885483
gaggcauuuacguguauua

SEQ ID NO: 2345761 - RNA, 19 nt, Artificial Sequence
  Description of Artificial Sequence: Synthetic oligonucleotide
  Antisense strand to SEQ ID NO: 2345760
uaauacacguaaaugccuc

SEQ ID NO: 2345762 - RNA, 19 nt, Artificial Sequence
  Description of Artificial Sequence: Synthetic oligonucleotide
  Sense strand starting at position 3002 of SEQ ID NO: 1885483
gcaccuuaaguguauuaua

SEQ ID NO: 2345763 - RNA, 19 nt, Artificial Sequence
  Description of Artificial Sequence: Synthetic oligonucleotide
  Antisense strand to SEQ ID NO: 2345762
uauaauacacuuaaggugc

SEQ ID NO: 2345764 - RNA, 19 nt, Artificial Sequence
  Description of Artificial Sequence: Synthetic oligonucleotide
  Sense strand starting at position 3096 of SEQ ID NO: 1885483
gucuuuccucgagcguuua

SEQ ID NO: 2345765 - RNA, 19 nt, Artificial Sequence
  Description of Artificial Sequence: Synthetic oligonucleotide
  Antisense strand to SEQ ID NO: 2345764
uaaacgcucgaggaaagac

SEQ ID NO: 2345766 - RNA, 19 nt, Artificial Sequence
  Description of Artificial Sequence: Synthetic oligonucleotide
  Sense strand starting at position 3132 of SEQ ID NO: 1885483
aauuuaauuucgugaaguc

SEQ ID NO: 2345767 - RNA, 19 nt, Artificial Sequence
  Description of Artificial Sequence: Synthetic oligonucleotide
  Antisense strand to SEQ ID NO: 2345766
gacuucacgaaauuaaauu

SEQ ID NO: 2345768 - RNA, 19 nt, Artificial Sequence
  Description of Artificial Sequence: Synthetic oligonucleotide
  Sense strand starting at position 3217 of SEQ ID NO: 1885483
caaugacacguauaaagca

SEQ ID NO: 2345769 - RNA, 19 nt, Artificial Sequence
  Description of Artificial Sequence: Synthetic oligonucleotide
  Antisense strand to SEQ ID NO: 2345768
ugcuuuauacgugucauug

SEQ ID NO: 2345770 - RNA, 19 nt, Artificial Sequence
  Description of Artificial Sequence: Synthetic oligonucleotide
  Sense strand starting at position 3234 of SEQ ID NO: 1885483
caucuccuugugugaaaga

SEQ ID NO: 2345771 - RNA, 19 nt, Artificial Sequence
  Description of Artificial Sequence: Synthetic oligonucleotide
  Antisense strand to SEQ ID NO: 2345770
ucuuucacacaaggagaug

SEQ ID NO: 2345772 - RNA, 19 nt, Artificial Sequence
  Description of Artificial Sequence: Synthetic oligonucleotide
  Sense strand starting at position 3536 of SEQ ID NO: 1885483
ggaguaauauauguuauug

SEQ ID NO: 2345773 - RNA, 19 nt, Artificial Sequence
  Description of Artificial Sequence: Synthetic oligonucleotide
  Antisense strand to SEQ ID NO: 2345772
caauaacauauauuacucc

SEQ ID NO: 2345774 - RNA, 19 nt, Artificial Sequence
  Description of Artificial Sequence: Synthetic oligonucleotide
  Sense strand starting at position 3575 of SEQ ID NO: 1885483
acaguaauuugugaaugaa

SEQ ID NO: 2345775 - RNA, 19 nt, Artificial Sequence
  Description of Artificial Sequence: Synthetic oligonucleotide
  Antisense strand to SEQ ID NO: 2345774
uucauucacaaauuacugu

SEQ ID NO: 2345776 - RNA, 19 nt, Artificial Sequence
  Description of Artificial Sequence: Synthetic oligonucleotide
  Sense strand starting at position 3637 of SEQ ID NO: 1885483
cacuuaaguguugggagau

SEQ ID NO: 2345777 - RNA, 19 nt, Artificial Sequence
  Description of Artificial Sequence: Synthetic oligonucleotide
  Antisense strand to SEQ ID NO: 2345776
aucucccaacacuuaagug

SEQ ID NO: 2345778 - RNA, 19 nt, Artificial Sequence
  Description of Artificial Sequence: Synthetic oligonucleotide
  Sense strand starting at position 3643 of SEQ ID NO: 1885483
aguguugggagauaugcua

SEQ ID NO: 2345779 - RNA, 19 nt, Artificial Sequence
  Description of Artificial Sequence: Synthetic oligonucleotide
  Antisense strand to SEQ ID NO: 2345778
uagcauaucucccaacacu

SEQ ID NO: 2345780 - RNA, 19 nt, Artificial Sequence
  Description of Artificial Sequence: Synthetic oligonucleotide
  Sense strand starting at position 3816 of SEQ ID NO: 1885483
gaugaaguuguaugagauc

SEQ ID NO: 2345781 - RNA, 19 nt, Artificial Sequence
  Description of Artificial Sequence: Synthetic oligonucleotide
  Antisense strand to SEQ ID NO: 2345780
gaucucauacaacuucauc

SEQ ID NO: 2345782 - RNA, 19 nt, Artificial Sequence
  Description of Artificial Sequence: Synthetic oligonucleotide
  Sense strand starting at position 3828 of SEQ ID NO: 1885483
ugagaucuuuaauuaaggu

SEQ ID NO: 2345783 - RNA, 19 nt, Artificial Sequence
  Description of Artificial Sequence: Synthetic oligonucleotide
  Antisense strand to SEQ ID NO: 2345782
accuuaauuaaagaucuca

SEQ ID NO: 2345784 - RNA, 19 nt, Artificial Sequence
  Description of Artificial Sequence: Synthetic oligonucleotide
  Sense strand starting at position 3922 of SEQ ID NO: 1885483
aguuaauccugcuugacag

SEQ ID NO: 2345785 - RNA, 19 nt, Artificial Sequence
  Description of Artificial Sequence: Synthetic oligonucleotide
  Antisense strand to SEQ ID NO: 2345784
cugucaagcaggauuaacu

SEQ ID NO: 2345786 - RNA, 19 nt, Artificial Sequence
  Description of Artificial Sequence: Synthetic oligonucleotide
  Sense strand starting at position 3956 of SEQ ID NO: 1885483
ggaccaucuuauguauauu

SEQ ID NO: 2345787 - RNA, 19 nt, Artificial Sequence
  Description of Artificial Sequence: Synthetic oligonucleotide
  Antisense strand to SEQ ID NO: 2345786
aauauacauaagauggucc

SEQ ID NO: 2345788 - RNA, 19 nt, Artificial Sequence
  Description of Artificial Sequence: Synthetic oligonucleotide
  Sense strand starting at position 3980 of SEQ ID NO: 1885483
uuaaauguuugaccacaug

SEQ ID NO: 2345789 - RNA, 19 nt, Artificial Sequence
  Description of Artificial Sequence: Synthetic oligonucleotide
  Antisense strand to SEQ ID NO: 2345788
cauguggucaaacauuuaa

SEQ ID NO: 2345790 - RNA, 19 nt, Artificial Sequence
  Description of Artificial Sequence: Synthetic oligonucleotide
  Sense strand starting at position 14 of SEQ ID NO: 1885484
agaggucucucaucuugag

SEQ ID NO: 2345791 - RNA, 19 nt, Artificial Sequence
  Description of Artificial Sequence: Synthetic oligonucleotide
  Antisense strand to SEQ ID NO: 2345790
cucaagaugagagaccucu

SEQ ID NO: 2345792 - RNA, 19 nt, Artificial Sequence
  Description of Artificial Sequence: Synthetic oligonucleotide
  Sense strand starting at position 18 of SEQ ID NO: 1885484
gucucucaucuugagaaca

SEQ ID NO: 2345793 - RNA, 19 nt, Artificial Sequence
  Description of Artificial Sequence: Synthetic oligonucleotide
  Antisense strand to SEQ ID NO: 2345792
uguucucaagaugagagac

SEQ ID NO: 2345794 - RNA, 19 nt, Artificial Sequence
  Description of Artificial Sequence: Synthetic oligonucleotide
  Sense strand starting at position 37 of SEQ ID NO: 1885484
gacccaugguaagauuuau

SEQ ID NO: 2345795 - RNA, 19 nt, Artificial Sequence
  Description of Artificial Sequence: Synthetic oligonucleotide
  Antisense strand to SEQ ID NO: 2345794
auaaaucuuaccauggguc

SEQ ID NO: 2345796 - RNA, 19 nt, Artificial Sequence
  Description of Artificial Sequence: Synthetic oligonucleotide
  Sense strand starting at position 430 of SEQ ID NO: 1885484
guuucuuuccagcacaagu

SEQ ID NO: 2345797 - RNA, 19 nt, Artificial Sequence
  Description of Artificial Sequence: Synthetic oligonucleotide
  Antisense strand to SEQ ID NO: 2345796
acuugugcuggaaagaaac

SEQ ID NO: 2345798 - RNA, 19 nt, Artificial Sequence
  Description of Artificial Sequence: Synthetic oligonucleotide
  Sense strand starting at position 483 of SEQ ID NO: 1885484
gggaaaugucuugguugau

SEQ ID NO: 2345799 - RNA, 19 nt, Artificial Sequence
  Description of Artificial Sequence: Synthetic oligonucleotide
  Antisense strand to SEQ ID NO: 2345798
aucaaccaagacauuuccc

SEQ ID NO: 2345800 - RNA, 19 nt, Artificial Sequence
  Description of Artificial Sequence: Synthetic oligonucleotide
  Sense strand starting at position 484 of SEQ ID NO: 1885484
ggaaaugucuugguugauu

SEQ ID NO: 2345801 - RNA, 19 nt, Artificial Sequence
  Description of Artificial Sequence: Synthetic oligonucleotide
  Antisense strand to SEQ ID NO: 2345800
aaucaaccaagacauuucc

SEQ ID NO: 2345802 - RNA, 19 nt, Artificial Sequence
  Description of Artificial Sequence: Synthetic oligonucleotide
  Sense strand starting at position 578 of SEQ ID NO: 1885484
uucuauguucuagggauag

SEQ ID NO: 2345803 - RNA, 19 nt, Artificial Sequence
  Description of Artificial Sequence: Synthetic oligonucleotide
  Antisense strand to SEQ ID NO: 2345802
cuaucccuagaacauagaa

SEQ ID NO: 2345804 - RNA, 19 nt, Artificial Sequence
  Description of Artificial Sequence: Synthetic oligonucleotide
  Sense strand starting at position 601 of SEQ ID NO: 1885484
caaggacuuggucacugua

SEQ ID NO: 2345805 - RNA, 19 nt, Artificial Sequence
  Description of Artificial Sequence: Synthetic oligonucleotide
  Antisense strand to SEQ ID NO: 2345804
uacagugaccaaguccuug

SEQ ID NO: 2345806 - RNA, 19 nt, Artificial Sequence
  Description of Artificial Sequence: Synthetic oligonucleotide
  Sense strand starting at position 604 of SEQ ID NO: 1885484
ggacuuggucacuguaaca

SEQ ID NO: 2345807 - RNA, 19 nt, Artificial Sequence
  Description of Artificial Sequence: Synthetic oligonucleotide
  Antisense strand to SEQ ID NO: 2345806
uguuacagugaccaagucc

SEQ ID NO: 2345808 - RNA, 19 nt, Artificial Sequence
  Description of Artificial Sequence: Synthetic oligonucleotide
  Sense strand starting at position 665 of SEQ ID NO: 1885484
ccugguaacuccuuguuua

SEQ ID NO: 2345809 - RNA, 19 nt, Artificial Sequence
  Description of Artificial Sequence: Synthetic oligonucleotide
  Antisense strand to SEQ ID NO: 2345808
uaaacaaggaguuaccagg

SEQ ID NO: 2345810 - RNA, 19 nt, Artificial Sequence
  Description of Artificial Sequence: Synthetic oligonucleotide
  Sense strand starting at position 666 of SEQ ID NO: 1885484
cugguaacuccuuguuuaa

SEQ ID NO: 2345811 - RNA, 19 nt, Artificial Sequence
  Description of Artificial Sequence: Synthetic oligonucleotide
  Antisense strand to SEQ ID NO: 2345810
uuaaacaaggaguuaccag

SEQ ID NO: 2345812 - RNA, 19 nt, Artificial Sequence
  Description of Artificial Sequence: Synthetic oligonucleotide
  Sense strand starting at position 668 of SEQ ID NO: 1885484
gguaacuccuuguuuaaau

SEQ ID NO: 2345813 - RNA, 19 nt, Artificial Sequence
  Description of Artificial Sequence: Synthetic oligonucleotide
  Antisense strand to SEQ ID NO: 2345812
auuuaaacaaggaguuacc

SEQ ID NO: 2345814 - RNA, 19 nt, Artificial Sequence
  Description of Artificial Sequence: Synthetic oligonucleotide
  Sense strand starting at position 669 of SEQ ID NO: 1885484
guaacuccuuguuuaaauu

SEQ ID NO: 2345815 - RNA, 19 nt, Artificial Sequence
  Description of Artificial Sequence: Synthetic oligonucleotide
  Antisense strand to SEQ ID NO: 2345814
aauuuaaacaaggaguuac

SEQ ID NO: 2345816 - RNA, 19 nt, Artificial Sequence
  Description of Artificial Sequence: Synthetic oligonucleotide
  Sense strand starting at position 1202 of SEQ ID NO: 1885484
auuccacaccguuagucaa

SEQ ID NO: 2345817 - RNA, 19 nt, Artificial Sequence
  Description of Artificial Sequence: Synthetic oligonucleotide
  Antisense strand to SEQ ID NO: 2345816
uugacuaacgguguggaau

SEQ ID NO: 2345818 - RNA, 19 nt, Artificial Sequence
  Description of Artificial Sequence: Synthetic oligonucleotide
  Sense strand starting at position 1324 of SEQ ID NO: 1885484
uacagacauucuuugcgga

SEQ ID NO: 2345819 - RNA, 19 nt, Artificial Sequence
  Description of Artificial Sequence: Synthetic oligonucleotide
  Antisense strand to SEQ ID NO: 2345818
uccgcaaagaaugucugua

SEQ ID NO: 2345820 - RNA, 19 nt, Artificial Sequence
  Description of Artificial Sequence: Synthetic oligonucleotide
  Sense strand starting at position 1325 of SEQ ID NO: 1885484
acagacauucuuugcggau

SEQ ID NO: 2345821 - RNA, 19 nt, Artificial Sequence
  Description of Artificial Sequence: Synthetic oligonucleotide
  Antisense strand to SEQ ID NO: 2345820
auccgcaaagaaugucugu

SEQ ID NO: 2345822 - RNA, 19 nt, Artificial Sequence
  Description of Artificial Sequence: Synthetic oligonucleotide
  Sense strand starting at position 1326 of SEQ ID NO: 1885484
cagacauucuuugcggauc

SEQ ID NO: 2345823 - RNA, 19 nt, Artificial Sequence
  Description of Artificial Sequence: Synthetic oligonucleotide
  Antisense strand to SEQ ID NO: 2345822
gauccgcaaagaaugucug

SEQ ID NO: 2345824 - RNA, 19 nt, Artificial Sequence
  Description of Artificial Sequence: Synthetic oligonucleotide
  Sense strand starting at position 1342 of SEQ ID NO: 1885484
aucuuuggccaguaacaug

SEQ ID NO: 2345825 - RNA, 19 nt, Artificial Sequence
  Description of Artificial Sequence: Synthetic oligonucleotide
  Antisense strand to SEQ ID NO: 2345824
cauguuacuggccaaagau

SEQ ID NO: 2345826 - RNA, 19 nt, Artificial Sequence
  Description of Artificial Sequence: Synthetic oligonucleotide
  Sense strand starting at position 1424 of SEQ ID NO: 1885484
gauaaagugcucgccgcuu

SEQ ID NO: 2345827 - RNA, 19 nt, Artificial Sequence
  Description of Artificial Sequence: Synthetic oligonucleotide
  Antisense strand to SEQ ID NO: 2345826
aagcggcgagcacuuuauc

SEQ ID NO: 2345828 - RNA, 19 nt, Artificial Sequence
  Description of Artificial Sequence: Synthetic oligonucleotide
  Sense strand starting at position 1429 of SEQ ID NO: 1885484
agugcucgccgcuugaaga

SEQ ID NO: 2345829 - RNA, 19 nt, Artificial Sequence
  Description of Artificial Sequence: Synthetic oligonucleotide
  Antisense strand to SEQ ID NO: 2345828
ucuucaagcggcgagcacu

SEQ ID NO: 2345830 - RNA, 19 nt, Artificial Sequence
  Description of Artificial Sequence: Synthetic oligonucleotide
  Sense strand starting at position 1538 of SEQ ID NO: 1885484
auaaucauucucgggaaca

SEQ ID NO: 2345831 - RNA, 19 nt, Artificial Sequence
  Description of Artificial Sequence: Synthetic oligonucleotide
  Antisense strand to SEQ ID NO: 2345830
uguucccgagaaugauuau

SEQ ID NO: 2345832 - RNA, 19 nt, Artificial Sequence
  Description of Artificial Sequence: Synthetic oligonucleotide
  Sense strand starting at position 1586 of SEQ ID NO: 1885484
cucuguuacgcuuaaaggu

SEQ ID NO: 2345833 - RNA, 19 nt, Artificial Sequence
  Description of Artificial Sequence: Synthetic oligonucleotide
  Antisense strand to SEQ ID NO: 2345832
accuuuaagcguaacagag

SEQ ID NO: 2345834 - RNA, 19 nt, Artificial Sequence
  Description of Artificial Sequence: Synthetic oligonucleotide
  Sense strand starting at position 1599 of SEQ ID NO: 1885484
aaagguucuggcugucaac

SEQ ID NO: 2345835 - RNA, 19 nt, Artificial Sequence
  Description of Artificial Sequence: Synthetic oligonucleotide
  Antisense strand to SEQ ID NO: 2345834
guugacagccagaaccuuu

SEQ ID NO: 2345836 - RNA, 19 nt, Artificial Sequence
  Description of Artificial Sequence: Synthetic oligonucleotide
  Sense strand starting at position 2781 of SEQ ID NO: 1885484
cccguaaagggcugaucuu

SEQ ID NO: 2345837 - RNA, 19 nt, Artificial Sequence
  Description of Artificial Sequence: Synthetic oligonucleotide
  Antisense strand to SEQ ID NO: 2345836
aagaucagcccuuuacggg

SEQ ID NO: 2345838 - RNA, 19 nt, Artificial Sequence
  Description of Artificial Sequence: Synthetic oligonucleotide
  Sense strand starting at position 2943 of SEQ ID NO: 1885484
gauagauuaugcguuucca

SEQ ID NO: 2345839 - RNA, 19 nt, Artificial Sequence
  Description of Artificial Sequence: Synthetic oligonucleotide
  Antisense strand to SEQ ID NO: 2345838
uggaaacgcauaaucuauc

SEQ ID NO: 2345840 - RNA, 19 nt, Artificial Sequence
  Description of Artificial Sequence: Synthetic oligonucleotide
  Sense strand starting at position 2979 of SEQ ID NO: 1885484
gcgagccguuugauagaaa

SEQ ID NO: 2345841 - RNA, 19 nt, Artificial Sequence
  Description of Artificial Sequence: Synthetic oligonucleotide
  Antisense strand to SEQ ID NO: 2345840
uuucuaucaaacggcucgc

SEQ ID NO: 2345842 - RNA, 19 nt, Artificial Sequence
  Description of Artificial Sequence: Synthetic oligonucleotide
  Sense strand starting at position 2982 of SEQ ID NO: 1885484
agccguuugauagaaacca

SEQ ID NO: 2345843 - RNA, 19 nt, Artificial Sequence
  Description of Artificial Sequence: Synthetic oligonucleotide
  Antisense strand to SEQ ID NO: 2345842
ugguuucuaucaaacggcu

SEQ ID NO: 2345844 - RNA, 19 nt, Artificial Sequence
  Description of Artificial Sequence: Synthetic oligonucleotide
  Sense strand starting at position 3044 of SEQ ID NO: 1885484
aggcgagugaaugaauuau

SEQ ID NO: 2345845 - RNA, 19 nt, Artificial Sequence
  Description of Artificial Sequence: Synthetic oligonucleotide
  Antisense strand to SEQ ID NO: 2345844
auaauucauucacucgccu

SEQ ID NO: 2345846 - RNA, 19 nt, Artificial Sequence
  Description of Artificial Sequence: Synthetic oligonucleotide
  Sense strand starting at position 3218 of SEQ ID NO: 1885484
gacuucugugagggaagau

SEQ ID NO: 2345847 - RNA, 19 nt, Artificial Sequence
  Description of Artificial Sequence: Synthetic oligonucleotide
  Antisense strand to SEQ ID NO: 2345846
aucuucccucacagaaguc

SEQ ID NO: 2345848 - RNA, 19 nt, Artificial Sequence
  Description of Artificial Sequence: Synthetic oligonucleotide
  Sense strand starting at position 3353 of SEQ ID NO: 1885484
ugcuuagaguuucuggaaa

SEQ ID NO: 2345849 - RNA, 19 nt, Artificial Sequence
  Description of Artificial Sequence: Synthetic oligonucleotide
  Antisense strand to SEQ ID NO: 2345848
uuuccagaaacucuaagca

SEQ ID NO: 2345850 - RNA, 19 nt, Artificial Sequence
  Description of Artificial Sequence: Synthetic oligonucleotide
  Sense strand starting at position 3406 of SEQ ID NO: 1885484
uaguguucggaagguuaca

SEQ ID NO: 2345851 - RNA, 19 nt, Artificial Sequence
  Description of Artificial Sequence: Synthetic oligonucleotide
  Antisense strand to SEQ ID NO: 2345850
uguaaccuuccgaacacua

SEQ ID NO: 2345852 - RNA, 19 nt, Artificial Sequence
  Description of Artificial Sequence: Synthetic oligonucleotide
  Sense strand starting at position 3418 of SEQ ID NO: 1885484
gguuacaagagcuacuguu

SEQ ID NO: 2345853 - RNA, 19 nt, Artificial Sequence
  Description of Artificial Sequence: Synthetic oligonucleotide
  Antisense strand to SEQ ID NO: 2345852
aacaguagcucuuguaacc

SEQ ID NO: 2345854 - RNA, 19 nt, Artificial Sequence
  Description of Artificial Sequence: Synthetic oligonucleotide
  Sense strand starting at position 3646 of SEQ ID NO: 1885484
ugggaugacugcucagaag

SEQ ID NO: 2345855 - RNA, 19 nt, Artificial Sequence
  Description of Artificial Sequence: Synthetic oligonucleotide
  Antisense strand to SEQ ID NO: 2345854
cuucugagcagucauccca

SEQ ID NO: 2345856 - RNA, 19 nt, Artificial Sequence
  Description of Artificial Sequence: Synthetic oligonucleotide
  Sense strand starting at position 3710 of SEQ ID NO: 1885484
uaguguucugcagaagccu

SEQ ID NO: 2345857 - RNA, 19 nt, Artificial Sequence
  Description of Artificial Sequence: Synthetic oligonucleotide
  Antisense strand to SEQ ID NO: 2345856
aggcuucugcagaacacua

SEQ ID NO: 2345858 - RNA, 19 nt, Artificial Sequence
  Description of Artificial Sequence: Synthetic oligonucleotide
  Sense strand starting at position 3726 of SEQ ID NO: 1885484
ccuugugcuguaguaaguu

SEQ ID NO: 2345859 - RNA, 19 nt, Artificial Sequence
  Description of Artificial Sequence: Synthetic oligonucleotide
  Antisense strand to SEQ ID NO: 2345858
aacuuacuacagcacaagg

SEQ ID NO: 2345860 - RNA, 19 nt, Artificial Sequence
  Description of Artificial Sequence: Synthetic oligonucleotide
  Sense strand starting at position 3732 of SEQ ID NO: 1885484
gcuguaguaaguuaucauu

SEQ ID NO: 2345861 - RNA, 19 nt, Artificial Sequence
  Description of Artificial Sequence: Synthetic oligonucleotide
  Antisense strand to SEQ ID NO: 2345860
aaugauaacuuacuacagc

SEQ ID NO: 2345862 - RNA, 19 nt, Artificial Sequence
  Description of Artificial Sequence: Synthetic oligonucleotide
  Sense strand starting at position 3734 of SEQ ID NO: 1885484
uguaguaaguuaucauucu

SEQ ID NO: 2345863 - RNA, 19 nt, Artificial Sequence
  Description of Artificial Sequence: Synthetic oligonucleotide
  Antisense strand to SEQ ID NO: 2345862
agaaugauaacuuacuaca

SEQ ID NO: 2345864 - RNA, 19 nt, Artificial Sequence
  Description of Artificial Sequence: Synthetic oligonucleotide
  Sense strand starting at position 3868 of SEQ ID NO: 1885484
gcaaguuaucggcuucagu

SEQ ID NO: 2345865 - RNA, 19 nt, Artificial Sequence
  Description of Artificial Sequence: Synthetic oligonucleotide
  Antisense strand to SEQ ID NO: 2345864
acugaagccgauaacuugc

SEQ ID NO: 2345866 - RNA, 19 nt, Artificial Sequence
  Description of Artificial Sequence: Synthetic oligonucleotide
  Sense strand starting at position 3886 of SEQ ID NO: 1885484
uggucugucagaugacaag

SEQ ID NO: 2345867 - RNA, 19 nt, Artificial Sequence
  Description of Artificial Sequence: Synthetic oligonucleotide
  Antisense strand to SEQ ID NO: 2345866
cuugucaucugacagacca

SEQ ID NO: 2345868 - RNA, 19 nt, Artificial Sequence
  Description of Artificial Sequence: Synthetic oligonucleotide
  Sense strand starting at position 3946 of SEQ ID NO: 1885484
ugaaauagacucuguagau

SEQ ID NO: 2345869 - RNA, 19 nt, Artificial Sequence
  Description of Artificial Sequence: Synthetic oligonucleotide
  Antisense strand to SEQ ID NO: 2345868
aucuacagagucuauuuca

SEQ ID NO: 2345870 - RNA, 19 nt, Artificial Sequence
  Description of Artificial Sequence: Synthetic oligonucleotide
  Sense strand starting at position 24 of SEQ ID NO: 1885485
uuuauuuggcuuugguuua

SEQ ID NO: 2345871 - RNA, 19 nt, Artificial Sequence
  Description of Artificial Sequence: Synthetic oligonucleotide
  Antisense strand to SEQ ID NO: 2345870
uaaaccaaagccaaauaaa

SEQ ID NO: 2345872 - RNA, 19 nt, Artificial Sequence
  Description of Artificial Sequence: Synthetic oligonucleotide
  Sense strand starting at position 35 of SEQ ID NO: 1885485
uugguuuauguugauacau

SEQ ID NO: 2345873 - RNA, 19 nt, Artificial Sequence
  Description of Artificial Sequence: Synthetic oligonucleotide
  Antisense strand to SEQ ID NO: 2345872
auguaucaacauaaaccaa

SEQ ID NO: 2345874 - RNA, 19 nt, Artificial Sequence
  Description of Artificial Sequence: Synthetic oligonucleotide
  Sense strand starting at position 73 of SEQ ID NO: 1885485
ucugauuauuuaggacaua

SEQ ID NO: 2345875 - RNA, 19 nt, Artificial Sequence
  Description of Artificial Sequence: Synthetic oligonucleotide
  Antisense strand to SEQ ID NO: 2345874
uauguccuaaauaaucaga

SEQ ID NO: 2345876 - RNA, 19 nt, Artificial Sequence
  Description of Artificial Sequence: Synthetic oligonucleotide
  Sense strand starting at position 74 of SEQ ID NO: 1885485
cugauuauuuaggacauaa

SEQ ID NO: 2345877 - RNA, 19 nt, Artificial Sequence
  Description of Artificial Sequence: Synthetic oligonucleotide
  Antisense strand to SEQ ID NO: 2345876
uuauguccuaaauaaucag

SEQ ID NO: 2345878 - RNA, 19 nt, Artificial Sequence
  Description of Artificial Sequence: Synthetic oligonucleotide
  Sense strand starting at position 110 of SEQ ID NO: 1885485
ggguguacacucuauagua

SEQ ID NO: 2345879 - RNA, 19 nt, Artificial Sequence
  Description of Artificial Sequence: Synthetic oligonucleotide
  Antisense strand to SEQ ID NO: 2345878
uacuauagaguguacaccc

SEQ ID NO: 2345880 - RNA, 19 nt, Artificial Sequence
  Description of Artificial Sequence: Synthetic oligonucleotide
  Sense strand starting at position 112 of SEQ ID NO: 1885485
guguacacucuauaguacu

SEQ ID NO: 2345881 - RNA, 19 nt, Artificial Sequence
  Description of Artificial Sequence: Synthetic oligonucleotide
  Antisense strand to SEQ ID NO: 2345880
aguacuauagaguguacac

SEQ ID NO: 2345882 - RNA, 19 nt, Artificial Sequence
  Description of Artificial Sequence: Synthetic oligonucleotide
  Sense strand starting at position 144 of SEQ ID NO: 1885485
agguuaugacuuugaacug

SEQ ID NO: 2345883 - RNA, 19 nt, Artificial Sequence
  Description of Artificial Sequence: Synthetic oligonucleotide
  Antisense strand to SEQ ID NO: 2345882
caguucaaagucauaaccu

SEQ ID NO: 2345884 - RNA, 19 nt, Artificial Sequence
  Description of Artificial Sequence: Synthetic oligonucleotide
  Sense strand starting at position 309 of SEQ ID NO: 1885485
guuggaaugcaucaacauu

SEQ ID NO: 2345885 - RNA, 19 nt, Artificial Sequence
  Description of Artificial Sequence: Synthetic oligonucleotide
  Antisense strand to SEQ ID NO: 2345884
aauguugaugcauuccaac

SEQ ID NO: 2345886 - RNA, 19 nt, Artificial Sequence
  Description of Artificial Sequence: Synthetic oligonucleotide
  Sense strand starting at position 335 of SEQ ID NO: 1885485
acauaagugguguagauac

SEQ ID NO: 2345887 - RNA, 19 nt, Artificial Sequence
  Description of Artificial Sequence: Synthetic oligonucleotide
  Antisense strand to SEQ ID NO: 2345886
guaucuacaccacuuaugu

SEQ ID NO: 2345888 - RNA, 19 nt, Artificial Sequence
  Description of Artificial Sequence: Synthetic oligonucleotide
  Sense strand starting at position 343 of SEQ ID NO: 1885485
gguguagauaccuauggca

SEQ ID NO: 2345889 - RNA, 19 nt, Artificial Sequence
  Description of Artificial Sequence: Synthetic oligonucleotide
  Antisense strand to SEQ ID NO: 2345888
ugccauagguaucuacacc

SEQ ID NO: 2345890 - RNA, 19 nt, Artificial Sequence
  Description of Artificial Sequence: Synthetic oligonucleotide
  Sense strand starting at position 345 of SEQ ID NO: 1885485
uguagauaccuauggcauu

SEQ ID NO: 2345891 - RNA, 19 nt, Artificial Sequence
  Description of Artificial Sequence: Synthetic oligonucleotide
  Antisense strand to SEQ ID NO: 2345890
aaugccauagguaucuaca

SEQ ID NO: 2345892 - RNA, 19 nt, Artificial Sequence
  Description of Artificial Sequence: Synthetic oligonucleotide
  Sense strand starting at position 447 of SEQ ID NO: 1885485
gcaaguuuccuuccgcauc

SEQ ID NO: 2345893 - RNA, 19 nt, Artificial Sequence
  Description of Artificial Sequence: Synthetic oligonucleotide
  Antisense strand to SEQ ID NO: 2345892
gaugcggaaggaaacuugc

SEQ ID NO: 2345894 - RNA, 19 nt, Artificial Sequence
  Description of Artificial Sequence: Synthetic oligonucleotide
  Sense strand starting at position 563 of SEQ ID NO: 1885485
aagggaguggcucgaauaa

SEQ ID NO: 2345895 - RNA, 19 nt, Artificial Sequence
  Description of Artificial Sequence: Synthetic oligonucleotide
  Antisense strand to SEQ ID NO: 2345894
uuauucgagccacucccuu

SEQ ID NO: 2345896 - RNA, 19 nt, Artificial Sequence
  Description of Artificial Sequence: Synthetic oligonucleotide
  Sense strand starting at position 565 of SEQ ID NO: 1885485
gggaguggcucgaauaaag

SEQ ID NO: 2345897 - RNA, 19 nt, Artificial Sequence
  Description of Artificial Sequence: Synthetic oligonucleotide
  Antisense strand to SEQ ID NO: 2345896
cuuuauucgagccacuccc

SEQ ID NO: 2345898 - RNA, 19 nt, Artificial Sequence
  Description of Artificial Sequence: Synthetic oligonucleotide
  Sense strand starting at position 709 of SEQ ID NO: 1885485
agaacuucugcuggaauau

SEQ ID NO: 2345899 - RNA, 19 nt, Artificial Sequence
  Description of Artificial Sequence: Synthetic oligonucleotide
  Antisense strand to SEQ ID NO: 2345898
auauuccagcagaaguucu

SEQ ID NO: 2345900 - RNA, 19 nt, Artificial Sequence
  Description of Artificial Sequence: Synthetic oligonucleotide
  Sense strand starting at position 721 of SEQ ID NO: 1885485
ggaauauugugacaaauuu

SEQ ID NO: 2345901 - RNA, 19 nt, Artificial Sequence
  Description of Artificial Sequence: Synthetic oligonucleotide
  Antisense strand to SEQ ID NO: 2345900
aaauuugucacaauauucc

SEQ ID NO: 2345902 - RNA, 19 nt, Artificial Sequence
  Description of Artificial Sequence: Synthetic oligonucleotide
  Sense strand starting at position 868 of SEQ ID NO: 1885485
ucaguaccuuauguaacau

SEQ ID NO: 2345903 - RNA, 19 nt, Artificial Sequence
  Description of Artificial Sequence: Synthetic oligonucleotide
  Antisense strand to SEQ ID NO: 2345902
auguuacauaagguacuga

SEQ ID NO: 2345904 - RNA, 19 nt, Artificial Sequence
  Description of Artificial Sequence: Synthetic oligonucleotide
  Sense strand starting at position 1085 of SEQ ID NO: 1885485
ggcagauuccgaugaccuc

SEQ ID NO: 2345905 - RNA, 19 nt, Artificial Sequence
  Description of Artificial Sequence: Synthetic oligonucleotide
  Antisense strand to SEQ ID NO: 2345904
gaggucaucggaaucugcc

SEQ ID NO: 2345906 - RNA, 19 nt, Artificial Sequence
  Description of Artificial Sequence: Synthetic oligonucleotide
  Sense strand starting at position 1091 of SEQ ID NO: 1885485
uuccgaugaccucgggaaa

SEQ ID NO: 2345907 - RNA, 19 nt, Artificial Sequence
  Description of Artificial Sequence: Synthetic oligonucleotide
  Antisense strand to SEQ ID NO: 2345906
uuucccgaggucaucggaa

SEQ ID NO: 2345908 - RNA, 19 nt, Artificial Sequence
  Description of Artificial Sequence: Synthetic oligonucleotide
  Sense strand starting at position 1268 of SEQ ID NO: 1885485
agugaauauguuuaaggca

SEQ ID NO: 2345909 - RNA, 19 nt, Artificial Sequence
  Description of Artificial Sequence: Synthetic oligonucleotide
  Antisense strand to SEQ ID NO: 2345908
ugccuuaaacauauucacu

SEQ ID NO: 2345910 - RNA, 19 nt, Artificial Sequence
  Description of Artificial Sequence: Synthetic oligonucleotide
  Sense strand starting at position 1276 of SEQ ID NO: 1885485
uguuuaaggcaguauaaua

SEQ ID NO: 2345911 - RNA, 19 nt, Artificial Sequence
  Description of Artificial Sequence: Synthetic oligonucleotide
  Antisense strand to SEQ ID NO: 2345910
uauuauacugccuuaaaca

SEQ ID NO: 2345912 - RNA, 19 nt, Artificial Sequence
  Description of Artificial Sequence: Synthetic oligonucleotide
  Sense strand starting at position 1305 of SEQ ID NO: 1885485
ggacgacaguuccuaaagu

SEQ ID NO: 2345913 - RNA, 19 nt, Artificial Sequence
  Description of Artificial Sequence: Synthetic oligonucleotide
  Antisense strand to SEQ ID NO: 2345912
acuuuaggaacugucgucc

SEQ ID NO: 2345914 - RNA, 19 nt, Artificial Sequence
  Description of Artificial Sequence: Synthetic oligonucleotide
  Sense strand starting at position 1327 of SEQ ID NO: 1885485
gcugguaguggcgugaaca

SEQ ID NO: 2345915 - RNA, 19 nt, Artificial Sequence
  Description of Artificial Sequence: Synthetic oligonucleotide
  Antisense strand to SEQ ID NO: 2345914
uguucacgccacuaccagc

SEQ ID NO: 2345916 - RNA, 19 nt, Artificial Sequence
  Description of Artificial Sequence: Synthetic oligonucleotide
  Sense strand starting at position 1564 of SEQ ID NO: 1885485
gagcgauccucagccagaa

SEQ ID NO: 2345917 - RNA, 19 nt, Artificial Sequence
  Description of Artificial Sequence: Synthetic oligonucleotide
  Antisense strand to SEQ ID NO: 2345916
uucuggcugaggaucgcuc

SEQ ID NO: 2345918 - RNA, 19 nt, Artificial Sequence
  Description of Artificial Sequence: Synthetic oligonucleotide
  Sense strand starting at position 1660 of SEQ ID NO: 1885485
uuucuuuaaugcucagaga

SEQ ID NO: 2345919 - RNA, 19 nt, Artificial Sequence
  Description of Artificial Sequence: Synthetic oligonucleotide
  Antisense strand to SEQ ID NO: 2345918
ucucugagcauuaaagaaa

SEQ ID NO: 2345920 - RNA, 19 nt, Artificial Sequence
  Description of Artificial Sequence: Synthetic oligonucleotide
  Sense strand starting at position 1661 of SEQ ID NO: 1885485
uucuuuaaugcucagagac

SEQ ID NO: 2345921 - RNA, 19 nt, Artificial Sequence
  Description of Artificial Sequence: Synthetic oligonucleotide
  Antisense strand to SEQ ID NO: 2345920
gucucugagcauuaaagaa

SEQ ID NO: 2345922 - RNA, 19 nt, Artificial Sequence
  Description of Artificial Sequence: Synthetic oligonucleotide
  Sense strand starting at position 2351 of SEQ ID NO: 1885485
ugagguaaaguucgggaga

SEQ ID NO: 2345923 - RNA, 19 nt, Artificial Sequence
  Description of Artificial Sequence: Synthetic oligonucleotide
  Antisense strand to SEQ ID NO: 2345922
ucucccgaacuuuaccuca

SEQ ID NO: 2345924 - RNA, 19 nt, Artificial Sequence
  Description of Artificial Sequence: Synthetic oligonucleotide
  Sense strand starting at position 2920 of SEQ ID NO: 1885485
agcugcagcguuagggaua

SEQ ID NO: 2345925 - RNA, 19 nt, Artificial Sequence
  Description of Artificial Sequence: Synthetic oligonucleotide
  Antisense strand to SEQ ID NO: 2345924
uaucccuaacgcugcagcu

SEQ ID NO: 2345926 - RNA, 19 nt, Artificial Sequence
  Description of Artificial Sequence: Synthetic oligonucleotide
  Sense strand starting at position 2975 of SEQ ID NO: 1885485
gugcuuucuccacagguga

SEQ ID NO: 2345927 - RNA, 19 nt, Artificial Sequence
  Description of Artificial Sequence: Synthetic oligonucleotide
  Antisense strand to SEQ ID NO: 2345926
ucaccuguggagaaagcac

SEQ ID NO: 2345928 - RNA, 19 nt, Artificial Sequence
  Description of Artificial Sequence: Synthetic oligonucleotide
  Sense strand starting at position 3144 of SEQ ID NO: 1885485
acgaguuccaccuggaaag

SEQ ID NO: 2345929 - RNA, 19 nt, Artificial Sequence
  Description of Artificial Sequence: Synthetic oligonucleotide
  Antisense strand to SEQ ID NO: 2345928
cuuuccagguggaacucgu

SEQ ID NO: 2345930 - RNA, 19 nt, Artificial Sequence
  Description of Artificial Sequence: Synthetic oligonucleotide
  Sense strand starting at position 3488 of SEQ ID NO: 1885485
cgcacuuauccacacagaa

SEQ ID NO: 2345931 - RNA, 19 nt, Artificial Sequence
  Description of Artificial Sequence: Synthetic oligonucleotide
  Antisense strand to SEQ ID NO: 2345930
uucuguguggauaagugcg

SEQ ID NO: 2345932 - RNA, 19 nt, Artificial Sequence
  Description of Artificial Sequence: Synthetic oligonucleotide
  Sense strand starting at position 3534 of SEQ ID NO: 1885485
cguuauuagaaaugcaaga

SEQ ID NO: 2345933 - RNA, 19 nt, Artificial Sequence
  Description of Artificial Sequence: Synthetic oligonucleotide
  Antisense strand to SEQ ID NO: 2345932
ucuugcauuucuaauaacg

SEQ ID NO: 2345934 - RNA, 19 nt, Artificial Sequence
  Description of Artificial Sequence: Synthetic oligonucleotide
  Sense strand starting at position 3610 of SEQ ID NO: 1885485
uguuauuaggccguuuagu

SEQ ID NO: 2345935 - RNA, 19 nt, Artificial Sequence
  Description of Artificial Sequence: Synthetic oligonucleotide
  Antisense strand to SEQ ID NO: 2345934
acuaaacggccuaauaaca

SEQ ID NO: 2345936 - RNA, 19 nt, Artificial Sequence
  Description of Artificial Sequence: Synthetic oligonucleotide
  Sense strand starting at position 3661 of SEQ ID NO: 1885485
auacuucuaccaugugaua

SEQ ID NO: 2345937 - RNA, 19 nt, Artificial Sequence
  Description of Artificial Sequence: Synthetic oligonucleotide
  Antisense strand to SEQ ID NO: 2345936
uaucacaugguagaaguau

SEQ ID NO: 2345938 - RNA, 19 nt, Artificial Sequence
  Description of Artificial Sequence: Synthetic oligonucleotide
  Sense strand starting at position 3687 of SEQ ID NO: 1885485
ggauuuggccaucgcuuaa

SEQ ID NO: 2345939 - RNA, 19 nt, Artificial Sequence
  Description of Artificial Sequence: Synthetic oligonucleotide
  Antisense strand to SEQ ID NO: 2345938
uuaagcgauggccaaaucc

SEQ ID NO: 2345940 - RNA, 19 nt, Artificial Sequence
  Description of Artificial Sequence: Synthetic oligonucleotide
  Sense strand starting at position 3691 of SEQ ID NO: 1885485
uuggccaucgcuuaauaaa

SEQ ID NO: 2345941 - RNA, 19 nt, Artificial Sequence
  Description of Artificial Sequence: Synthetic oligonucleotide
  Antisense strand to SEQ ID NO: 2345940
uuuauuaagcgauggccaa

SEQ ID NO: 2345942 - RNA, 19 nt, Artificial Sequence
  Description of Artificial Sequence: Synthetic oligonucleotide
  Sense strand starting at position 3733 of SEQ ID NO: 1885485
agagcaagauaggcauaua

SEQ ID NO: 2345943 - RNA, 19 nt, Artificial Sequence
  Description of Artificial Sequence: Synthetic oligonucleotide
  Antisense strand to SEQ ID NO: 2345942
uauaugccuaucuugcucu

SEQ ID NO: 2345944 - RNA, 19 nt, Artificial Sequence
  Description of Artificial Sequence: Synthetic oligonucleotide
  Sense strand starting at position 3809 of SEQ ID NO: 1885485
uugugauaggcaggaaacu

SEQ ID NO: 2345945 - RNA, 19 nt, Artificial Sequence
  Description of Artificial Sequence: Synthetic oligonucleotide
  Antisense strand to SEQ ID NO: 2345944
aguuuccugccuaucacaa

SEQ ID NO: 2345946 - RNA, 19 nt, Artificial Sequence
  Description of Artificial Sequence: Synthetic oligonucleotide
  Sense strand starting at position 3980 of SEQ ID NO: 1885485
gguguuuauccgcaugaag

SEQ ID NO: 2345947 - RNA, 19 nt, Artificial Sequence
  Description of Artificial Sequence: Synthetic oligonucleotide
  Antisense strand to SEQ ID NO: 2345946
cuucaugcggauaaacacc

SEQ ID NO: 2345948 - RNA, 19 nt, Artificial Sequence
  Description of Artificial Sequence: Synthetic oligonucleotide
  Sense strand starting at position 3983 of SEQ ID NO: 1885485
guuuauccgcaugaaggau

SEQ ID NO: 2345949 - RNA, 19 nt, Artificial Sequence
  Description of Artificial Sequence: Synthetic oligonucleotide
  Antisense strand to SEQ ID NO: 2345948
auccuucaugcggauaaac

SEQ ID NO: 2345950 - RNA, 19 nt, Artificial Sequence
  Description of Artificial Sequence: Synthetic oligonucleotide
  Sense strand starting at position 111 of SEQ ID NO: 1885486
aggaccugccuccauaauu

SEQ ID NO: 2345951 - RNA, 19 nt, Artificial Sequence
  Description of Artificial Sequence: Synthetic oligonucleotide
  Antisense strand to SEQ ID NO: 2345950
aauuauggaggcagguccu

SEQ ID NO: 2345952 - RNA, 19 nt, Artificial Sequence
  Description of Artificial Sequence: Synthetic oligonucleotide
  Sense strand starting at position 164 of SEQ ID NO: 1885486
ugggaauggugaguuacaa

SEQ ID NO: 2345953 - RNA, 19 nt, Artificial Sequence
  Description of Artificial Sequence: Synthetic oligonucleotide
  Antisense strand to SEQ ID NO: 2345952
uuguaacucaccauuccca

SEQ ID NO: 2345954 - RNA, 19 nt, Artificial Sequence
  Description of Artificial Sequence: Synthetic oligonucleotide
  Sense strand starting at position 230 of SEQ ID NO: 1885486
guaguacaucuacauuaug

SEQ ID NO: 2345955 - RNA, 19 nt, Artificial Sequence
  Description of Artificial Sequence: Synthetic oligonucleotide
  Antisense strand to SEQ ID NO: 2345954
cauaauguagauguacuac

SEQ ID NO: 2345956 - RNA, 19 nt, Artificial Sequence
  Description of Artificial Sequence: Synthetic oligonucleotide
  Sense strand starting at position 603 of SEQ ID NO: 1885486
agaucaauggauuguguga

SEQ ID NO: 2345957 - RNA, 19 nt, Artificial Sequence
  Description of Artificial Sequence: Synthetic oligonucleotide
  Antisense strand to SEQ ID NO: 2345956
ucacacaauccauugaucu

SEQ ID NO: 2345958 - RNA, 19 nt, Artificial Sequence
  Description of Artificial Sequence: Synthetic oligonucleotide
  Sense strand starting at position 622 of SEQ ID NO: 1885486
augucaauuaccugguugu

SEQ ID NO: 2345959 - RNA, 19 nt, Artificial Sequence
  Description of Artificial Sequence: Synthetic oligonucleotide
  Antisense strand to SEQ ID NO: 2345958
acaaccagguaauugacau

SEQ ID NO: 2345960 - RNA, 19 nt, Artificial Sequence
  Description of Artificial Sequence: Synthetic oligonucleotide
  Sense strand starting at position 625 of SEQ ID NO: 1885486
ucaauuaccugguugugau

SEQ ID NO: 2345961 - RNA, 19 nt, Artificial Sequence
  Description of Artificial Sequence: Synthetic oligonucleotide
  Antisense strand to SEQ ID NO: 2345960
aucacaaccagguaauuga

SEQ ID NO: 2345962 - RNA, 19 nt, Artificial Sequence
  Description of Artificial Sequence: Synthetic oligonucleotide
  Sense strand starting at position 626 of SEQ ID NO: 1885486
caauuaccugguugugaua

SEQ ID NO: 2345963 - RNA, 19 nt, Artificial Sequence
  Description of Artificial Sequence: Synthetic oligonucleotide
  Antisense strand to SEQ ID NO: 2345962
uaucacaaccagguaauug

SEQ ID NO: 2345964 - RNA, 19 nt, Artificial Sequence
  Description of Artificial Sequence: Synthetic oligonucleotide
  Sense strand starting at position 633 of SEQ ID NO: 1885486
cugguugugauaugguacu

SEQ ID NO: 2345965 - RNA, 19 nt, Artificial Sequence
  Description of Artificial Sequence: Synthetic oligonucleotide
  Antisense strand to SEQ ID NO: 2345964
aguaccauaucacaaccag

SEQ ID NO: 2345966 - RNA, 19 nt, Artificial Sequence
  Description of Artificial Sequence: Synthetic oligonucleotide
  Sense strand starting at position 711 of SEQ ID NO: 1885486
uuacaauugcauggaaauc

SEQ ID NO: 2345967 - RNA, 19 nt, Artificial Sequence
  Description of Artificial Sequence: Synthetic oligonucleotide
  Antisense strand to SEQ ID NO: 2345966
gauuuccaugcaauuguaa

SEQ ID NO: 2345968 - RNA, 19 nt, Artificial Sequence
  Description of Artificial Sequence: Synthetic oligonucleotide
  Sense strand starting at position 790 of SEQ ID NO: 1885486
ggcaauauucuacauuguu

SEQ ID NO: 2345969 - RNA, 19 nt, Artificial Sequence
  Description of Artificial Sequence: Synthetic oligonucleotide
  Antisense strand to SEQ ID NO: 2345968
aacaauguagaauauugcc

SEQ ID NO: 2345970 - RNA, 19 nt, Artificial Sequence
  Description of Artificial Sequence: Synthetic oligonucleotide
  Sense strand starting at position 865 of SEQ ID NO: 1885486
aauaaaugucaucacguag

SEQ ID NO: 2345971 - RNA, 19 nt, Artificial Sequence
  Description of Artificial Sequence: Synthetic oligonucleotide
  Antisense strand to SEQ ID NO: 2345970
cuacgugaugacauuuauu

SEQ ID NO: 2345972 - RNA, 19 nt, Artificial Sequence
  Description of Artificial Sequence: Synthetic oligonucleotide
  Sense strand starting at position 1020 of SEQ ID NO: 1885486
ggagcuaccugaccaaaga

SEQ ID NO: 2345973 - RNA, 19 nt, Artificial Sequence
  Description of Artificial Sequence: Synthetic oligonucleotide
  Antisense strand to SEQ ID NO: 2345972
ucuuuggucagguagcucc

SEQ ID NO: 2345974 - RNA, 19 nt, Artificial Sequence
  Description of Artificial Sequence: Synthetic oligonucleotide
  Sense strand starting at position 1140 of SEQ ID NO: 1885486
ugccaucaagcauacagaa

SEQ ID NO: 2345975 - RNA, 19 nt, Artificial Sequence
  Description of Artificial Sequence: Synthetic oligonucleotide
  Antisense strand to SEQ ID NO: 2345974
uucuguaugcuugauggca

SEQ ID NO: 2345976 - RNA, 19 nt, Artificial Sequence
  Description of Artificial Sequence: Synthetic oligonucleotide
  Sense strand starting at position 1156 of SEQ ID NO: 1885486
gaaugaguguuagcaacac

SEQ ID NO: 2345977 - RNA, 19 nt, Artificial Sequence
  Description of Artificial Sequence: Synthetic oligonucleotide
  Antisense strand to SEQ ID NO: 2345976
guguugcuaacacucauuc

SEQ ID NO: 2345978 - RNA, 19 nt, Artificial Sequence
  Description of Artificial Sequence: Synthetic oligonucleotide
  Sense strand starting at position 1198 of SEQ ID NO: 1885486
guuagaagguccuuuagag

SEQ ID NO: 2345979 - RNA, 19 nt, Artificial Sequence
  Description of Artificial Sequence: Synthetic oligonucleotide
  Antisense strand to SEQ ID NO: 2345978
cucuaaaggaccuucuaac

SEQ ID NO: 2345980 - RNA, 19 nt, Artificial Sequence
  Description of Artificial Sequence: Synthetic oligonucleotide
  Sense strand starting at position 2480 of SEQ ID NO: 1885486
agguucauucguuguauuu

SEQ ID NO: 2345981 - RNA, 19 nt, Artificial Sequence
  Description of Artificial Sequence: Synthetic oligonucleotide
  Antisense strand to SEQ ID NO: 2345980
aaauacaacgaaugaaccu

SEQ ID NO: 2345982 - RNA, 19 nt, Artificial Sequence
  Description of Artificial Sequence: Synthetic oligonucleotide
  Sense strand starting at position 2490 of SEQ ID NO: 1885486
guuguauuuacgggccgga

SEQ ID NO: 2345983 - RNA, 19 nt, Artificial Sequence
  Description of Artificial Sequence: Synthetic oligonucleotide
  Antisense strand to SEQ ID NO: 2345982
uccggcccguaaauacaac

SEQ ID NO: 2345984 - RNA, 19 nt, Artificial Sequence
  Description of Artificial Sequence: Synthetic oligonucleotide
  Sense strand starting at position 2603 of SEQ ID NO: 1885486
cuuaaaggcucaguuguga

SEQ ID NO: 2345985 - RNA, 19 nt, Artificial Sequence
  Description of Artificial Sequence: Synthetic oligonucleotide
  Antisense strand to SEQ ID NO: 2345984
ucacaacugagccuuuaag

SEQ ID NO: 2345986 - RNA, 19 nt, Artificial Sequence
  Description of Artificial Sequence: Synthetic oligonucleotide
  Sense strand starting at position 2701 of SEQ ID NO: 1885486
ucuuuauaagcuggagucu

SEQ ID NO: 2345987 - RNA, 19 nt, Artificial Sequence
  Description of Artificial Sequence: Synthetic oligonucleotide
  Antisense strand to SEQ ID NO: 2345986
agacuccagcuuauaaaga

SEQ ID NO: 2345988 - RNA, 19 nt, Artificial Sequence
  Description of Artificial Sequence: Synthetic oligonucleotide
  Sense strand starting at position 2702 of SEQ ID NO: 1885486
cuuuauaagcuggagucuu

SEQ ID NO: 2345989 - RNA, 19 nt, Artificial Sequence
  Description of Artificial Sequence: Synthetic oligonucleotide
  Antisense strand to SEQ ID NO: 2345988
aagacuccagcuuauaaag

SEQ ID NO: 2345990 - RNA, 19 nt, Artificial Sequence
  Description of Artificial Sequence: Synthetic oligonucleotide
  Sense strand starting at position 2729 of SEQ ID NO: 1885486
cuuggaagaucugaauaca

SEQ ID NO: 2345991 - RNA, 19 nt, Artificial Sequence
  Description of Artificial Sequence: Synthetic oligonucleotide
  Antisense strand to SEQ ID NO: 2345990
uguauucagaucuuccaag

SEQ ID NO: 2345992 - RNA, 19 nt, Artificial Sequence
  Description of Artificial Sequence: Synthetic oligonucleotide
  Sense strand starting at position 2812 of SEQ ID NO: 1885486
aaugaaagcccgcagaauu

SEQ ID NO: 2345993 - RNA, 19 nt, Artificial Sequence
  Description of Artificial Sequence: Synthetic oligonucleotide
  Antisense strand to SEQ ID NO: 2345992
aauucugcgggcuuucauu

SEQ ID NO: 2345994 - RNA, 19 nt, Artificial Sequence
  Description of Artificial Sequence: Synthetic oligonucleotide
  Sense strand starting at position 2841 of SEQ ID NO: 1885486
ugauuuauaguuuggacgu

SEQ ID NO: 2345995 - RNA, 19 nt, Artificial Sequence
  Description of Artificial Sequence: Synthetic oligonucleotide
  Antisense strand to SEQ ID NO: 2345994
acguccaaacuauaaauca

SEQ ID NO: 2345996 - RNA, 19 nt, Artificial Sequence
  Description of Artificial Sequence: Synthetic oligonucleotide
  Sense strand starting at position 2863 of SEQ ID NO: 1885486
auucgaaaccauugucuuu

SEQ ID NO: 2345997 - RNA, 19 nt, Artificial Sequence
  Description of Artificial Sequence: Synthetic oligonucleotide
  Antisense strand to SEQ ID NO: 2345996
aaagacaaugguuucgaau

SEQ ID NO: 2345998 - RNA, 19 nt, Artificial Sequence
  Description of Artificial Sequence: Synthetic oligonucleotide
  Sense strand starting at position 2880 of SEQ ID NO: 1885486
uucucuguccucuguagaa

SEQ ID NO: 2345999 - RNA, 19 nt, Artificial Sequence
  Description of Artificial Sequence: Synthetic oligonucleotide
  Antisense strand to SEQ ID NO: 2345998
uucuacagaggacagagaa

SEQ ID NO: 2346000 - RNA, 19 nt, Artificial Sequence
  Description of Artificial Sequence: Synthetic oligonucleotide
  Sense strand starting at position 2882 of SEQ ID NO: 1885486
cucuguccucuguagaaga

SEQ ID NO: 2346001 - RNA, 19 nt, Artificial Sequence
  Description of Artificial Sequence: Synthetic oligonucleotide
  Antisense strand to SEQ ID NO: 2346000
ucuucuacagaggacagag

SEQ ID NO: 2346002 - RNA, 19 nt, Artificial Sequence
  Description of Artificial Sequence: Synthetic oligonucleotide
  Sense strand starting at position 2884 of SEQ ID NO: 1885486
cuguccucuguagaagaaa

SEQ ID NO: 2346003 - RNA, 19 nt, Artificial Sequence
  Description of Artificial Sequence: Synthetic oligonucleotide
  Antisense strand to SEQ ID NO: 2346002
uuucuucuacagaggacag

SEQ ID NO: 2346004 - RNA, 19 nt, Artificial Sequence
  Description of Artificial Sequence: Synthetic oligonucleotide
  Sense strand starting at position 2896 of SEQ ID NO: 1885486
gaagaaacaguuuguguga

SEQ ID NO: 2346005 - RNA, 19 nt, Artificial Sequence
  Description of Artificial Sequence: Synthetic oligonucleotide
  Antisense strand to SEQ ID NO: 2346004
ucacacaaacuguuucuuc

SEQ ID NO: 2346006 - RNA, 19 nt, Artificial Sequence
  Description of Artificial Sequence: Synthetic oligonucleotide
  Sense strand starting at position 2897 of SEQ ID NO: 1885486
aagaaacaguuugugugaa

SEQ ID NO: 2346007 - RNA, 19 nt, Artificial Sequence
  Description of Artificial Sequence: Synthetic oligonucleotide
  Antisense strand to SEQ ID NO: 2346006
uucacacaaacuguuucuu

SEQ ID NO: 2346008 - RNA, 19 nt, Artificial Sequence
  Description of Artificial Sequence: Synthetic oligonucleotide
  Sense strand starting at position 2957 of SEQ ID NO: 1885486
gaaggugggccauaugagu

SEQ ID NO: 2346009 - RNA, 19 nt, Artificial Sequence
  Description of Artificial Sequence: Synthetic oligonucleotide
  Antisense strand to SEQ ID NO: 2346008
acucauauggcccaccuuc

SEQ ID NO: 2346010 - RNA, 19 nt, Artificial Sequence
  Description of Artificial Sequence: Synthetic oligonucleotide
  Sense strand starting at position 2963 of SEQ ID NO: 1885486
gggccauaugagugugacu

SEQ ID NO: 2346011 - RNA, 19 nt, Artificial Sequence
  Description of Artificial Sequence: Synthetic oligonucleotide
  Antisense strand to SEQ ID NO: 2346010
agucacacucauauggccc

SEQ ID NO: 2346012 - RNA, 19 nt, Artificial Sequence
  Description of Artificial Sequence: Synthetic oligonucleotide
  Sense strand starting at position 2965 of SEQ ID NO: 1885486
gccauaugagugugacuga

SEQ ID NO: 2346013 - RNA, 19 nt, Artificial Sequence
  Description of Artificial Sequence: Synthetic oligonucleotide
  Antisense strand to SEQ ID NO: 2346012
ucagucacacucauauggc

SEQ ID NO: 2346014 - RNA, 19 nt, Artificial Sequence
  Description of Artificial Sequence: Synthetic oligonucleotide
  Sense strand starting at position 2968 of SEQ ID NO: 1885486
auaugagugugacugaagu

SEQ ID NO: 2346015 - RNA, 19 nt, Artificial Sequence
  Description of Artificial Sequence: Synthetic oligonucleotide
  Antisense strand to SEQ ID NO: 2346014
acuucagucacacucauau

SEQ ID NO: 2346016 - RNA, 19 nt, Artificial Sequence
  Description of Artificial Sequence: Synthetic oligonucleotide
  Sense strand starting at position 2970 of SEQ ID NO: 1885486
augagugugacugaaguuu

SEQ ID NO: 2346017 - RNA, 19 nt, Artificial Sequence
  Description of Artificial Sequence: Synthetic oligonucleotide
  Antisense strand to SEQ ID NO: 2346016
aaacuucagucacacucau

SEQ ID NO: 2346018 - RNA, 19 nt, Artificial Sequence
  Description of Artificial Sequence: Synthetic oligonucleotide
  Sense strand starting at position 2995 of SEQ ID NO: 1885486
agacauaugguguggaaug

SEQ ID NO: 2346019 - RNA, 19 nt, Artificial Sequence
  Description of Artificial Sequence: Synthetic oligonucleotide
  Antisense strand to SEQ ID NO: 2346018
cauuccacaccauaugucu

SEQ ID NO: 2346020 - RNA, 19 nt, Artificial Sequence
  Description of Artificial Sequence: Synthetic oligonucleotide
  Sense strand starting at position 3411 of SEQ ID NO: 1885486
agaagaggcuaauaauuaa

SEQ ID NO: 2346021 - RNA, 19 nt, Artificial Sequence
  Description of Artificial Sequence: Synthetic oligonucleotide
  Antisense strand to SEQ ID NO: 2346020
uuaauuauuagccucuucu

SEQ ID NO: 2346022 - RNA, 19 nt, Artificial Sequence
  Description of Artificial Sequence: Synthetic oligonucleotide
  Sense strand starting at position 3489 of SEQ ID NO: 1885486
gugggauaccaguaauagc

SEQ ID NO: 2346023 - RNA, 19 nt, Artificial Sequence
  Description of Artificial Sequence: Synthetic oligonucleotide
  Antisense strand to SEQ ID NO: 2346022
gcuauuacugguaucccac

SEQ ID NO: 2346024 - RNA, 19 nt, Artificial Sequence
  Description of Artificial Sequence: Synthetic oligonucleotide
  Sense strand starting at position 3499 of SEQ ID NO: 1885486
aguaauagcgauugugauu

SEQ ID NO: 2346025 - RNA, 19 nt, Artificial Sequence
  Description of Artificial Sequence: Synthetic oligonucleotide
  Antisense strand to SEQ ID NO: 2346024
aaucacaaucgcuauuacu

SEQ ID NO: 2346026 - RNA, 19 nt, Artificial Sequence
  Description of Artificial Sequence: Synthetic oligonucleotide
  Sense strand starting at position 3504 of SEQ ID NO: 1885486
uagcgauugugauuuguua

SEQ ID NO: 2346027 - RNA, 19 nt, Artificial Sequence
  Description of Artificial Sequence: Synthetic oligonucleotide
  Antisense strand to SEQ ID NO: 2346026
uaacaaaucacaaucgcua

SEQ ID NO: 2346028 - RNA, 19 nt, Artificial Sequence
  Description of Artificial Sequence: Synthetic oligonucleotide
  Sense strand starting at position 3506 of SEQ ID NO: 1885486
gcgauugugauuuguuaug

SEQ ID NO: 2346029 - RNA, 19 nt, Artificial Sequence
  Description of Artificial Sequence: Synthetic oligonucleotide
  Antisense strand to SEQ ID NO: 2346028
cauaacaaaucacaaucgc

SEQ ID NO: 2346030 - RNA, 19 nt, Artificial Sequence
  Description of Artificial Sequence: Synthetic oligonucleotide
  Sense strand starting at position 364 of SEQ ID NO: 1885487
aucucuauugucuaugauu

SEQ ID NO: 2346031 - RNA, 19 nt, Artificial Sequence
  Description of Artificial Sequence: Synthetic oligonucleotide
  Antisense strand to SEQ ID NO: 2346030
aaucauagacaauagagau

SEQ ID NO: 2346032 - RNA, 19 nt, Artificial Sequence
  Description of Artificial Sequence: Synthetic oligonucleotide
  Sense strand starting at position 367 of SEQ ID NO: 1885487
ucuauugucuaugauuuac

SEQ ID NO: 2346033 - RNA, 19 nt, Artificial Sequence
  Description of Artificial Sequence: Synthetic oligonucleotide
  Antisense strand to SEQ ID NO: 2346032
guaaaucauagacaauaga

SEQ ID NO: 2346034 - RNA, 19 nt, Artificial Sequence
  Description of Artificial Sequence: Synthetic oligonucleotide
  Sense strand starting at position 414 of SEQ ID NO: 1885487
gugacaacuauacgacuga

SEQ ID NO: 2346035 - RNA, 19 nt, Artificial Sequence
  Description of Artificial Sequence: Synthetic oligonucleotide
  Antisense strand to SEQ ID NO: 2346034
ucagucguauaguugucac

SEQ ID NO: 2346036 - RNA, 19 nt, Artificial Sequence
  Description of Artificial Sequence: Synthetic oligonucleotide
  Sense strand starting at position 887 of SEQ ID NO: 1885487
uuuaaaugucugggauaaa

SEQ ID NO: 2346037 - RNA, 19 nt, Artificial Sequence
  Description of Artificial Sequence: Synthetic oligonucleotide
  Antisense strand to SEQ ID NO: 2346036
uuuaucccagacauuuaaa

SEQ ID NO: 2346038 - RNA, 19 nt, Artificial Sequence
  Description of Artificial Sequence: Synthetic oligonucleotide
  Sense strand starting at position 888 of SEQ ID NO: 1885487
uuaaaugucugggauaaau

SEQ ID NO: 2346039 - RNA, 19 nt, Artificial Sequence
  Description of Artificial Sequence: Synthetic oligonucleotide
  Antisense strand to SEQ ID NO: 2346038
auuuaucccagacauuuaa

SEQ ID NO: 2346040 - RNA, 19 nt, Artificial Sequence
  Description of Artificial Sequence: Synthetic oligonucleotide
  Sense strand starting at position 987 of SEQ ID NO: 1885487
acacgaaacuauuaugaaa

SEQ ID NO: 2346041 - RNA, 19 nt, Artificial Sequence
  Description of Artificial Sequence: Synthetic oligonucleotide
  Antisense strand to SEQ ID NO: 2346040
uuucauaauaguuucgugu

SEQ ID NO: 2346042 - RNA, 19 nt, Artificial Sequence
  Description of Artificial Sequence: Synthetic oligonucleotide
  Sense strand starting at position 990 of SEQ ID NO: 1885487
cgaaacuauuaugaaacau

SEQ ID NO: 2346043 - RNA, 19 nt, Artificial Sequence
  Description of Artificial Sequence: Synthetic oligonucleotide
  Antisense strand to SEQ ID NO: 2346042
auguuucauaauaguuucg

SEQ ID NO: 2346044 - RNA, 19 nt, Artificial Sequence
  Description of Artificial Sequence: Synthetic oligonucleotide
  Sense strand starting at position 1051 of SEQ ID NO: 1885487
acacaaauggcuggauaau

SEQ ID NO: 2346045 - RNA, 19 nt, Artificial Sequence
  Description of Artificial Sequence: Synthetic oligonucleotide
  Antisense strand to SEQ ID NO: 2346044
auuauccagccauuugugu

SEQ ID NO: 2346046 - RNA, 19 nt, Artificial Sequence
  Description of Artificial Sequence: Synthetic oligonucleotide
  Sense strand starting at position 1063 of SEQ ID NO: 1885487
ggauaauaguaugagagaa

SEQ ID NO: 2346047 - RNA, 19 nt, Artificial Sequence
  Description of Artificial Sequence: Synthetic oligonucleotide
  Antisense strand to SEQ ID NO: 2346046
uucucucauacuauuaucc

SEQ ID NO: 2346048 - RNA, 19 nt, Artificial Sequence
  Description of Artificial Sequence: Synthetic oligonucleotide
  Sense strand starting at position 1065 of SEQ ID NO: 1885487
auaauaguaugagagaaac

SEQ ID NO: 2346049 - RNA, 19 nt, Artificial Sequence
  Description of Artificial Sequence: Synthetic oligonucleotide
  Antisense strand to SEQ ID NO: 2346048
guuucucucauacuauuau

SEQ ID NO: 2346050 - RNA, 19 nt, Artificial Sequence
  Description of Artificial Sequence: Synthetic oligonucleotide
  Sense strand starting at position 1083 of SEQ ID NO: 1885487
cgaggaguuucuuuacaua

SEQ ID NO: 2346051 - RNA, 19 nt, Artificial Sequence
  Description of Artificial Sequence: Synthetic oligonucleotide
  Antisense strand to SEQ ID NO: 2346050
uauguaaagaaacuccucg

SEQ ID NO: 2346052 - RNA, 19 nt, Artificial Sequence
  Description of Artificial Sequence: Synthetic oligonucleotide
  Sense strand starting at position 1215 of SEQ ID NO: 1885487
ccgccugcuccggaaagau

SEQ ID NO: 2346053 - RNA, 19 nt, Artificial Sequence
  Description of Artificial Sequence: Synthetic oligonucleotide
  Antisense strand to SEQ ID NO: 2346052
aucuuuccggagcaggcgg

SEQ ID NO: 2346054 - RNA, 19 nt, Artificial Sequence
  Description of Artificial Sequence: Synthetic oligonucleotide
  Sense strand starting at position 1284 of SEQ ID NO: 1885487
ugacgacuucccuguuuag

SEQ ID NO: 2346055 - RNA, 19 nt, Artificial Sequence
  Description of Artificial Sequence: Synthetic oligonucleotide
  Antisense strand to SEQ ID NO: 2346054
cuaaacagggaagucguca

SEQ ID NO: 2346056 - RNA, 19 nt, Artificial Sequence
  Description of Artificial Sequence: Synthetic oligonucleotide
  Sense strand starting at position 1424 of SEQ ID NO: 1885487
aagaucuacguguagggaa

SEQ ID NO: 2346057 - RNA, 19 nt, Artificial Sequence
  Description of Artificial Sequence: Synthetic oligonucleotide
  Antisense strand to SEQ ID NO: 2346056
uucccuacacguagaucuu

SEQ ID NO: 2346058 - RNA, 19 nt, Artificial Sequence
  Description of Artificial Sequence: Synthetic oligonucleotide
  Sense strand starting at position 1478 of SEQ ID NO: 1885487
aaaguuaauucugccagga

SEQ ID NO: 2346059 - RNA, 19 nt, Artificial Sequence
  Description of Artificial Sequence: Synthetic oligonucleotide
  Antisense strand to SEQ ID NO: 2346058
uccuggcagaauuaacuuu

SEQ ID NO: 2346060 - RNA, 19 nt, Artificial Sequence
  Description of Artificial Sequence: Synthetic oligonucleotide
  Sense strand starting at position 1482 of SEQ ID NO: 1885487
uuaauucugccaggauuag

SEQ ID NO: 2346061 - RNA, 19 nt, Artificial Sequence
  Description of Artificial Sequence: Synthetic oligonucleotide
  Antisense strand to SEQ ID NO: 2346060
cuaauccuggcagaauuaa

SEQ ID NO: 2346062 - RNA, 19 nt, Artificial Sequence
  Description of Artificial Sequence: Synthetic oligonucleotide
  Sense strand starting at position 1519 of SEQ ID NO: 1885487
aggugucccagagaugacu

SEQ ID NO: 2346063 - RNA, 19 nt, Artificial Sequence
  Description of Artificial Sequence: Synthetic oligonucleotide
  Antisense strand to SEQ ID NO: 2346062
agucaucucugggacaccu

SEQ ID NO: 2346064 - RNA, 19 nt, Artificial Sequence
  Description of Artificial Sequence: Synthetic oligonucleotide
  Sense strand starting at position 1904 of SEQ ID NO: 1885487
ucacuuucucguggaagau

SEQ ID NO: 2346065 - RNA, 19 nt, Artificial Sequence
  Description of Artificial Sequence: Synthetic oligonucleotide
  Antisense strand to SEQ ID NO: 2346064
aucuuccacgagaaaguga

SEQ ID NO: 2346066 - RNA, 19 nt, Artificial Sequence
  Description of Artificial Sequence: Synthetic oligonucleotide
  Sense strand starting at position 2061 of SEQ ID NO: 1885487
accaaucacccgugaggau

SEQ ID NO: 2346067 - RNA, 19 nt, Artificial Sequence
  Description of Artificial Sequence: Synthetic oligonucleotide
  Antisense strand to SEQ ID NO: 2346066
auccucacgggugauuggu

SEQ ID NO: 2346068 - RNA, 19 nt, Artificial Sequence
  Description of Artificial Sequence: Synthetic oligonucleotide
  Sense strand starting at position 2080 of SEQ ID NO: 1885487
gcgagugucgugaagcgaa

SEQ ID NO: 2346069 - RNA, 19 nt, Artificial Sequence
  Description of Artificial Sequence: Synthetic oligonucleotide
  Antisense strand to SEQ ID NO: 2346068
uucgcuucacgacacucgc

SEQ ID NO: 2346070 - RNA, 19 nt, Artificial Sequence
  Description of Artificial Sequence: Synthetic oligonucleotide
  Sense strand starting at position 2822 of SEQ ID NO: 1885487
gauguagguguugauguua

SEQ ID NO: 2346071 - RNA, 19 nt, Artificial Sequence
  Description of Artificial Sequence: Synthetic oligonucleotide
  Antisense strand to SEQ ID NO: 2346070
uaacaucaacaccuacauc

SEQ ID NO: 2346072 - RNA, 19 nt, Artificial Sequence
  Description of Artificial Sequence: Synthetic oligonucleotide
  Sense strand starting at position 2885 of SEQ ID NO: 1885487
cacaauguccaaggucaga

SEQ ID NO: 2346073 - RNA, 19 nt, Artificial Sequence
  Description of Artificial Sequence: Synthetic oligonucleotide
  Antisense strand to SEQ ID NO: 2346072
ucugaccuuggacauugug

SEQ ID NO: 2346074 - RNA, 19 nt, Artificial Sequence
  Description of Artificial Sequence: Synthetic oligonucleotide
  Sense strand starting at position 2898 of SEQ ID NO: 1885487
gucagauaguaaguugucu

SEQ ID NO: 2346075 - RNA, 19 nt, Artificial Sequence
  Description of Artificial Sequence: Synthetic oligonucleotide
  Antisense strand to SEQ ID NO: 2346074
agacaacuuacuaucugac

SEQ ID NO: 2346076 - RNA, 19 nt, Artificial Sequence
  Description of Artificial Sequence: Synthetic oligonucleotide
  Sense strand starting at position 2903 of SEQ ID NO: 1885487
auaguaaguugucuugcca

SEQ ID NO: 2346077 - RNA, 19 nt, Artificial Sequence
  Description of Artificial Sequence: Synthetic oligonucleotide
  Antisense strand to SEQ ID NO: 2346076
uggcaagacaacuuacuau

SEQ ID NO: 2346078 - RNA, 19 nt, Artificial Sequence
  Description of Artificial Sequence: Synthetic oligonucleotide
  Sense strand starting at position 2907 of SEQ ID NO: 1885487
uaaguugucuugccaggau

SEQ ID NO: 2346079 - RNA, 19 nt, Artificial Sequence
  Description of Artificial Sequence: Synthetic oligonucleotide
  Antisense strand to SEQ ID NO: 2346078
auccuggcaagacaacuua

SEQ ID NO: 2346080 - RNA, 19 nt, Artificial Sequence
  Description of Artificial Sequence: Synthetic oligonucleotide
  Sense strand starting at position 2989 of SEQ ID NO: 1885487
ccauaaauugugugggaga

SEQ ID NO: 2346081 - RNA, 19 nt, Artificial Sequence
  Description of Artificial Sequence: Synthetic oligonucleotide
  Antisense strand to SEQ ID NO: 2346080
ucucccacacaauuuaugg

SEQ ID NO: 2346082 - RNA, 19 nt, Artificial Sequence
  Description of Artificial Sequence: Synthetic oligonucleotide
  Sense strand starting at position 3439 of SEQ ID NO: 1885487
gaagacauguggucauguu

SEQ ID NO: 2346083 - RNA, 19 nt, Artificial Sequence
  Description of Artificial Sequence: Synthetic oligonucleotide
  Antisense strand to SEQ ID NO: 2346082
aacaugaccacaugucuuc

SEQ ID NO: 2346084 - RNA, 19 nt, Artificial Sequence
  Description of Artificial Sequence: Synthetic oligonucleotide
  Sense strand starting at position 3440 of SEQ ID NO: 1885487
aagacauguggucauguuu

SEQ ID NO: 2346085 - RNA, 19 nt, Artificial Sequence
  Description of Artificial Sequence: Synthetic oligonucleotide
  Antisense strand to SEQ ID NO: 2346084
aaacaugaccacaugucuu

SEQ ID NO: 2346086 - RNA, 19 nt, Artificial Sequence
  Description of Artificial Sequence: Synthetic oligonucleotide
  Sense strand starting at position 3492 of SEQ ID NO: 1885487
gcaguugcuguugaaggaa

SEQ ID NO: 2346087 - RNA, 19 nt, Artificial Sequence
  Description of Artificial Sequence: Synthetic oligonucleotide
  Antisense strand to SEQ ID NO: 2346086
uuccuucaacagcaacugc

SEQ ID NO: 2346088 - RNA, 19 nt, Artificial Sequence
  Description of Artificial Sequence: Synthetic oligonucleotide
  Sense strand starting at position 3504 of SEQ ID NO: 1885487
gaaggaaucuugggagaga

SEQ ID NO: 2346089 - RNA, 19 nt, Artificial Sequence
  Description of Artificial Sequence: Synthetic oligonucleotide
  Antisense strand to SEQ ID NO: 2346088
ucucucccaagauuccuuc

SEQ ID NO: 2346090 - RNA, 19 nt, Artificial Sequence
  Description of Artificial Sequence: Synthetic oligonucleotide
  Sense strand starting at position 3520 of SEQ ID NO: 1885487
agacgauggugguuuaaga

SEQ ID NO: 2346091 - RNA, 19 nt, Artificial Sequence
  Description of Artificial Sequence: Synthetic oligonucleotide
  Antisense strand to SEQ ID NO: 2346090
ucuuaaaccaccaucgucu

SEQ ID NO: 2346092 - RNA, 19 nt, Artificial Sequence
  Description of Artificial Sequence: Synthetic oligonucleotide
  Sense strand starting at position 3530 of SEQ ID NO: 1885487
gguuuaagagagugucuua

SEQ ID NO: 2346093 - RNA, 19 nt, Artificial Sequence
  Description of Artificial Sequence: Synthetic oligonucleotide
  Antisense strand to SEQ ID NO: 2346092
uaagacacucucuuaaacc

SEQ ID NO: 2346094 - RNA, 19 nt, Artificial Sequence
  Description of Artificial Sequence: Synthetic oligonucleotide
  Sense strand starting at position 3541 of SEQ ID NO: 1885487
gugucuuaaagauggaaau

SEQ ID NO: 2346095 - RNA, 19 nt, Artificial Sequence
  Description of Artificial Sequence: Synthetic oligonucleotide
  Antisense strand to SEQ ID NO: 2346094
auuuccaucuuuaagacac

SEQ ID NO: 2346096 - RNA, 19 nt, Artificial Sequence
  Description of Artificial Sequence: Synthetic oligonucleotide
  Sense strand starting at position 3573 of SEQ ID NO: 1885487
agauucuuuggacguaaag

SEQ ID NO: 2346097 - RNA, 19 nt, Artificial Sequence
  Description of Artificial Sequence: Synthetic oligonucleotide
  Antisense strand to SEQ ID NO: 2346096
cuuuacguccaaagaaucu

SEQ ID NO: 2346098 - RNA, 19 nt, Artificial Sequence
  Description of Artificial Sequence: Synthetic oligonucleotide
  Sense strand starting at position 3608 of SEQ ID NO: 1885487
ggugaugauaccgagugga

SEQ ID NO: 2346099 - RNA, 19 nt, Artificial Sequence
  Description of Artificial Sequence: Synthetic oligonucleotide
  Antisense strand to SEQ ID NO: 2346098
uccacucgguaucaucacc

SEQ ID NO: 2346100 - RNA, 19 nt, Artificial Sequence
  Description of Artificial Sequence: Synthetic oligonucleotide
  Sense strand starting at position 3611 of SEQ ID NO: 1885487
gaugauaccgaguggagga

SEQ ID NO: 2346101 - RNA, 19 nt, Artificial Sequence
  Description of Artificial Sequence: Synthetic oligonucleotide
  Antisense strand to SEQ ID NO: 2346100
uccuccacucgguaucauc

SEQ ID NO: 2346102 - RNA, 19 nt, Artificial Sequence
  Description of Artificial Sequence: Synthetic oligonucleotide
  Sense strand starting at position 3642 of SEQ ID NO: 1885487
uucgucuugagucgaauua

SEQ ID NO: 2346103 - RNA, 19 nt, Artificial Sequence
  Description of Artificial Sequence: Synthetic oligonucleotide
  Antisense strand to SEQ ID NO: 2346102
uaauucgacucaagacgaa

SEQ ID NO: 2346104 - RNA, 19 nt, Artificial Sequence
  Description of Artificial Sequence: Synthetic oligonucleotide
  Sense strand starting at position 3674 of SEQ ID NO: 1885487
ggacaaacguggagugguu

SEQ ID NO: 2346105 - RNA, 19 nt, Artificial Sequence
  Description of Artificial Sequence: Synthetic oligonucleotide
  Antisense strand to SEQ ID NO: 2346104
aaccacuccacguuugucc

SEQ ID NO: 2346106 - RNA, 19 nt, Artificial Sequence
  Description of Artificial Sequence: Synthetic oligonucleotide
  Sense strand starting at position 3801 of SEQ ID NO: 1885487
ccagagugcgugggagaua

SEQ ID NO: 2346107 - RNA, 19 nt, Artificial Sequence
  Description of Artificial Sequence: Synthetic oligonucleotide
  Antisense strand to SEQ ID NO: 2346106
uaucucccacgcacucugg

SEQ ID NO: 2346108 - RNA, 19 nt, Artificial Sequence
  Description of Artificial Sequence: Synthetic oligonucleotide
  Sense strand starting at position 3813 of SEQ ID NO: 1885487
ggagauaccagccaguuau

SEQ ID NO: 2346109 - RNA, 19 nt, Artificial Sequence
  Description of Artificial Sequence: Synthetic oligonucleotide
  Antisense strand to SEQ ID NO: 2346108
auaacuggcugguaucucc

SEQ ID NO: 2346110 - RNA, 19 nt, Artificial Sequence
  Description of Artificial Sequence: Synthetic oligonucleotide
  Sense strand starting at position 290 of SEQ ID NO: 1885488
agugcuuuacuguauuaua

SEQ ID NO: 2346111 - RNA, 19 nt, Artificial Sequence
  Description of Artificial Sequence: Synthetic oligonucleotide
  Antisense strand to SEQ ID NO: 2346110
uauaauacaguaaagcacu

SEQ ID NO: 2346112 - RNA, 19 nt, Artificial Sequence
  Description of Artificial Sequence: Synthetic oligonucleotide
  Sense strand starting at position 509 of SEQ ID NO: 1885488
cagguuugauaugcaacaa

SEQ ID NO: 2346113 - RNA, 19 nt, Artificial Sequence
  Description of Artificial Sequence: Synthetic oligonucleotide
  Antisense strand to SEQ ID NO: 2346112
uuguugcauaucaaaccug

SEQ ID NO: 2346114 - RNA, 19 nt, Artificial Sequence
  Description of Artificial Sequence: Synthetic oligonucleotide
  Sense strand starting at position 866 of SEQ ID NO: 1885488
gagcuucuacaggagcaua

SEQ ID NO: 2346115 - RNA, 19 nt, Artificial Sequence
  Description of Artificial Sequence: Synthetic oligonucleotide
  Antisense strand to SEQ ID NO: 2346114
uaugcuccuguagaagcuc

SEQ ID NO: 2346116 - RNA, 19 nt, Artificial Sequence
  Description of Artificial Sequence: Synthetic oligonucleotide
  Sense strand starting at position 3541 of SEQ ID NO: 1885488
aggcauuaccuguguaagg

SEQ ID NO: 2346117 - RNA, 19 nt, Artificial Sequence
  Description of Artificial Sequence: Synthetic oligonucleotide
  Antisense strand to SEQ ID NO: 2346116
ccuuacacagguaaugccu

SEQ ID NO: 2346118 - RNA, 19 nt, Artificial Sequence
  Description of Artificial Sequence: Synthetic oligonucleotide
  Sense strand starting at position 3543 of SEQ ID NO: 1885488
gcauuaccuguguaaggcu

SEQ ID NO: 2346119 - RNA, 19 nt, Artificial Sequence
  Description of Artificial Sequence: Synthetic oligonucleotide
  Antisense strand to SEQ ID NO: 2346118
agccuuacacagguaaugc

SEQ ID NO: 2346120 - RNA, 19 nt, Artificial Sequence
  Description of Artificial Sequence: Synthetic oligonucleotide
  Sense strand starting at position 5 of SEQ ID NO: 1885489
acuaacuagccauguggau

SEQ ID NO: 2346121 - RNA, 19 nt, Artificial Sequence
  Description of Artificial Sequence: Synthetic oligonucleotide
  Antisense strand to SEQ ID NO: 2346120
auccacauggcuaguuagu

SEQ ID NO: 2346122 - RNA, 19 nt, Artificial Sequence
  Description of Artificial Sequence: Synthetic oligonucleotide
  Sense strand starting at position 12 of SEQ ID NO: 1885489
agccauguggauugugaac

SEQ ID NO: 2346123 - RNA, 19 nt, Artificial Sequence
  Description of Artificial Sequence: Synthetic oligonucleotide
  Antisense strand to SEQ ID NO: 2346122
guucacaauccacauggcu

SEQ ID NO: 2346124 - RNA, 19 nt, Artificial Sequence
  Description of Artificial Sequence: Synthetic oligonucleotide
  Sense strand starting at position 461 of SEQ ID NO: 1885489
auuauuauacuaggugcaa

SEQ ID NO: 2346125 - RNA, 19 nt, Artificial Sequence
  Description of Artificial Sequence: Synthetic oligonucleotide
  Antisense strand to SEQ ID NO: 2346124
uugcaccuaguauaauaau

SEQ ID NO: 2346126 - RNA, 19 nt, Artificial Sequence
  Description of Artificial Sequence: Synthetic oligonucleotide
  Sense strand starting at position 462 of SEQ ID NO: 1885489
uuauuauacuaggugcaau

SEQ ID NO: 2346127 - RNA, 19 nt, Artificial Sequence
  Description of Artificial Sequence: Synthetic oligonucleotide
  Antisense strand to SEQ ID NO: 2346126
auugcaccuaguauaauaa

SEQ ID NO: 2346128 - RNA, 19 nt, Artificial Sequence
  Description of Artificial Sequence: Synthetic oligonucleotide
  Sense strand starting at position 465 of SEQ ID NO: 1885489
uuauacuaggugcaauuaa

SEQ ID NO: 2346129 - RNA, 19 nt, Artificial Sequence
  Description of Artificial Sequence: Synthetic oligonucleotide
  Antisense strand to SEQ ID NO: 2346128
uuaauugcaccuaguauaa

SEQ ID NO: 2346130 - RNA, 19 nt, Artificial Sequence
  Description of Artificial Sequence: Synthetic oligonucleotide
  Sense strand starting at position 510 of SEQ ID NO: 1885489
cagguuugauaugcaacaa

SEQ ID NO: 2346131 - RNA, 19 nt, Artificial Sequence
  Description of Artificial Sequence: Synthetic oligonucleotide
  Antisense strand to SEQ ID NO: 2346130
uuguugcauaucaaaccug

SEQ ID NO: 2346132 - RNA, 19 nt, Artificial Sequence
  Description of Artificial Sequence: Synthetic oligonucleotide
  Sense strand starting at position 757 of SEQ ID NO: 1885489
cugggugauuucugaacac

SEQ ID NO: 2346133 - RNA, 19 nt, Artificial Sequence
  Description of Artificial Sequence: Synthetic oligonucleotide
  Antisense strand to SEQ ID NO: 2346132
guguucagaaaucacccag

SEQ ID NO: 2346134 - RNA, 19 nt, Artificial Sequence
  Description of Artificial Sequence: Synthetic oligonucleotide
  Sense strand starting at position 867 of SEQ ID NO: 1885489
gagcuucuacaggagcaua

SEQ ID NO: 2346135 - RNA, 19 nt, Artificial Sequence
  Description of Artificial Sequence: Synthetic oligonucleotide
  Antisense strand to SEQ ID NO: 2346134
uaugcuccuguagaagcuc

SEQ ID NO: 2346136 - RNA, 19 nt, Artificial Sequence
  Description of Artificial Sequence: Synthetic oligonucleotide
  Sense strand starting at position 958 of SEQ ID NO: 1885489
acuguauuaugcuuggaga

SEQ ID NO: 2346137 - RNA, 19 nt, Artificial Sequence
  Description of Artificial Sequence: Synthetic oligonucleotide
  Antisense strand to SEQ ID NO: 2346136
ucuccaagcauaauacagu

SEQ ID NO: 2346138 - RNA, 19 nt, Artificial Sequence
  Description of Artificial Sequence: Synthetic oligonucleotide
  Sense strand starting at position 959 of SEQ ID NO: 1885489
cuguauuaugcuuggagag

SEQ ID NO: 2346139 - RNA, 19 nt, Artificial Sequence
  Description of Artificial Sequence: Synthetic oligonucleotide
  Antisense strand to SEQ ID NO: 2346138
cucuccaagcauaauacag

SEQ ID NO: 2346140 - RNA, 19 nt, Artificial Sequence
  Description of Artificial Sequence: Synthetic oligonucleotide
  Sense strand starting at position 960 of SEQ ID NO: 1885489
uguauuaugcuuggagaga

SEQ ID NO: 2346141 - RNA, 19 nt, Artificial Sequence
  Description of Artificial Sequence: Synthetic oligonucleotide
  Antisense strand to SEQ ID NO: 2346140
ucucuccaagcauaauaca

SEQ ID NO: 2346142 - RNA, 19 nt, Artificial Sequence
  Description of Artificial Sequence: Synthetic oligonucleotide
  Sense strand starting at position 971 of SEQ ID NO: 1885489
uggagagauuguuauggaa

SEQ ID NO: 2346143 - RNA, 19 nt, Artificial Sequence
  Description of Artificial Sequence: Synthetic oligonucleotide
  Antisense strand to SEQ ID NO: 2346142
uuccauaacaaucucucca

SEQ ID NO: 2346144 - RNA, 19 nt, Artificial Sequence
  Description of Artificial Sequence: Synthetic oligonucleotide
  Sense strand starting at position 1087 of SEQ ID NO: 1885489
uugauucuuacgggaguag

SEQ ID NO: 2346145 - RNA, 19 nt, Artificial Sequence
  Description of Artificial Sequence: Synthetic oligonucleotide
  Antisense strand to SEQ ID NO: 2346144
cuacucccguaagaaucaa

SEQ ID NO: 2346146 - RNA, 19 nt, Artificial Sequence
  Description of Artificial Sequence: Synthetic oligonucleotide
  Sense strand starting at position 1124 of SEQ ID NO: 1885489
agugaaauucaguaggcag

SEQ ID NO: 2346147 - RNA, 19 nt, Artificial Sequence
  Description of Artificial Sequence: Synthetic oligonucleotide
  Antisense strand to SEQ ID NO: 2346146
cugccuacugaauuucacu

SEQ ID NO: 2346148 - RNA, 19 nt, Artificial Sequence
  Description of Artificial Sequence: Synthetic oligonucleotide
  Sense strand starting at position 1280 of SEQ ID NO: 1885489
gugggaagaucugugcucu

SEQ ID NO: 2346149 - RNA, 19 nt, Artificial Sequence
  Description of Artificial Sequence: Synthetic oligonucleotide
  Antisense strand to SEQ ID NO: 2346148
agagcacagaucuucccac

SEQ ID NO: 2346150 - RNA, 19 nt, Artificial Sequence
  Description of Artificial Sequence: Synthetic oligonucleotide
  Sense strand starting at position 1281 of SEQ ID NO: 1885489
ugggaagaucugugcucua

SEQ ID NO: 2346151 - RNA, 19 nt, Artificial Sequence
  Description of Artificial Sequence: Synthetic oligonucleotide
  Antisense strand to SEQ ID NO: 2346150
uagagcacagaucuuccca

SEQ ID NO: 2346152 - RNA, 19 nt, Artificial Sequence
  Description of Artificial Sequence: Synthetic oligonucleotide
  Sense strand starting at position 1286 of SEQ ID NO: 1885489
agaucugugcucuaugcua

SEQ ID NO: 2346153 - RNA, 19 nt, Artificial Sequence
  Description of Artificial Sequence: Synthetic oligonucleotide
  Antisense strand to SEQ ID NO: 2346152
uagcauagagcacagaucu

SEQ ID NO: 2346154 - RNA, 19 nt, Artificial Sequence
  Description of Artificial Sequence: Synthetic oligonucleotide
  Sense strand starting at position 1304 of SEQ ID NO: 1885489
aaggacaugcucuguaaug

SEQ ID NO: 2346155 - RNA, 19 nt, Artificial Sequence
  Description of Artificial Sequence: Synthetic oligonucleotide
  Antisense strand to SEQ ID NO: 2346154
cauuacagagcauguccuu

SEQ ID NO: 2346156 - RNA, 19 nt, Artificial Sequence
  Description of Artificial Sequence: Synthetic oligonucleotide
  Sense strand starting at position 1305 of SEQ ID NO: 1885489
aggacaugcucuguaauga

SEQ ID NO: 2346157 - RNA, 19 nt, Artificial Sequence
  Description of Artificial Sequence: Synthetic oligonucleotide
  Antisense strand to SEQ ID NO: 2346156
ucauuacagagcauguccu

SEQ ID NO: 2346158 - RNA, 19 nt, Artificial Sequence
  Description of Artificial Sequence: Synthetic oligonucleotide
  Sense strand starting at position 1306 of SEQ ID NO: 1885489
ggacaugcucuguaaugac

SEQ ID NO: 2346159 - RNA, 19 nt, Artificial Sequence
  Description of Artificial Sequence: Synthetic oligonucleotide
  Antisense strand to SEQ ID NO: 2346158
gucauuacagagcaugucc

SEQ ID NO: 2346160 - RNA, 19 nt, Artificial Sequence
  Description of Artificial Sequence: Synthetic oligonucleotide
  Sense strand starting at position 1404 of SEQ ID NO: 1885489
gcuaucaacucuguguaga

SEQ ID NO: 2346161 - RNA, 19 nt, Artificial Sequence
  Description of Artificial Sequence: Synthetic oligonucleotide
  Antisense strand to SEQ ID NO: 2346160
ucuacacagaguugauagc

SEQ ID NO: 2346162 - RNA, 19 nt, Artificial Sequence
  Description of Artificial Sequence: Synthetic oligonucleotide
  Sense strand starting at position 1405 of SEQ ID NO: 1885489
cuaucaacucuguguagau

SEQ ID NO: 2346163 - RNA, 19 nt, Artificial Sequence
  Description of Artificial Sequence: Synthetic oligonucleotide
  Antisense strand to SEQ ID NO: 2346162
aucuacacagaguugauag

SEQ ID NO: 2346164 - RNA, 19 nt, Artificial Sequence
  Description of Artificial Sequence: Synthetic oligonucleotide
  Sense strand starting at position 1453 of SEQ ID NO: 1885489
accugcauuucuuugucua

SEQ ID NO: 2346165 - RNA, 19 nt, Artificial Sequence
  Description of Artificial Sequence: Synthetic oligonucleotide
  Antisense strand to SEQ ID NO: 2346164
uagacaaagaaaugcaggu

SEQ ID NO: 2346166 - RNA, 19 nt, Artificial Sequence
  Description of Artificial Sequence: Synthetic oligonucleotide
  Sense strand starting at position 1492 of SEQ ID NO: 1885489
aaauguagucuacaaacga

SEQ ID NO: 2346167 - RNA, 19 nt, Artificial Sequence
  Description of Artificial Sequence: Synthetic oligonucleotide
  Antisense strand to SEQ ID NO: 2346166
ucguuuguagacuacauuu

SEQ ID NO: 2346168 - RNA, 19 nt, Artificial Sequence
  Description of Artificial Sequence: Synthetic oligonucleotide
  Sense strand starting at position 1557 of SEQ ID NO: 1885489
cagaauucgguuuguccuu

SEQ ID NO: 2346169 - RNA, 19 nt, Artificial Sequence
  Description of Artificial Sequence: Synthetic oligonucleotide
  Antisense strand to SEQ ID NO: 2346168
aaggacaaaccgaauucug

SEQ ID NO: 2346170 - RNA, 19 nt, Artificial Sequence
  Description of Artificial Sequence: Synthetic oligonucleotide
  Sense strand starting at position 1608 of SEQ ID NO: 1885489
auacgagaaugggucuaaa

SEQ ID NO: 2346171 - RNA, 19 nt, Artificial Sequence
  Description of Artificial Sequence: Synthetic oligonucleotide
  Antisense strand to SEQ ID NO: 2346170
uuuagacccauucucguau

SEQ ID NO: 2346172 - RNA, 19 nt, Artificial Sequence
  Description of Artificial Sequence: Synthetic oligonucleotide
  Sense strand starting at position 2220 of SEQ ID NO: 1885489
agcagugggcgcuaaguaa

SEQ ID NO: 2346173 - RNA, 19 nt, Artificial Sequence
  Description of Artificial Sequence: Synthetic oligonucleotide
  Antisense strand to SEQ ID NO: 2346172
uuacuuagcgcccacugcu

SEQ ID NO: 2346174 - RNA, 19 nt, Artificial Sequence
  Description of Artificial Sequence: Synthetic oligonucleotide
  Sense strand starting at position 2328 of SEQ ID NO: 1885489
gaacuugguuuagugcuau

SEQ ID NO: 2346175 - RNA, 19 nt, Artificial Sequence
  Description of Artificial Sequence: Synthetic oligonucleotide
  Antisense strand to SEQ ID NO: 2346174
auagcacuaaaccaaguuc

SEQ ID NO: 2346176 - RNA, 19 nt, Artificial Sequence
  Description of Artificial Sequence: Synthetic oligonucleotide
  Sense strand starting at position 2431 of SEQ ID NO: 1885489
aguccugucccugaaacaa

SEQ ID NO: 2346177 - RNA, 19 nt, Artificial Sequence
  Description of Artificial Sequence: Synthetic oligonucleotide
  Antisense strand to SEQ ID NO: 2346176
uuguuucagggacaggacu

SEQ ID NO: 2346178 - RNA, 19 nt, Artificial Sequence
  Description of Artificial Sequence: Synthetic oligonucleotide
  Sense strand starting at position 2545 of SEQ ID NO: 1885489
ggcaguauuugaggaugau

SEQ ID NO: 2346179 - RNA, 19 nt, Artificial Sequence
  Description of Artificial Sequence: Synthetic oligonucleotide
  Antisense strand to SEQ ID NO: 2346178
aucauccucaaauacugcc

SEQ ID NO: 2346180 - RNA, 19 nt, Artificial Sequence
  Description of Artificial Sequence: Synthetic oligonucleotide
  Sense strand starting at position 2577 of SEQ ID NO: 1885489
ccugaucauggcuggugau

SEQ ID NO: 2346181 - RNA, 19 nt, Artificial Sequence
  Description of Artificial Sequence: Synthetic oligonucleotide
  Antisense strand to SEQ ID NO: 2346180
aucaccagccaugaucagg

SEQ ID NO: 2346182 - RNA, 19 nt, Artificial Sequence
  Description of Artificial Sequence: Synthetic oligonucleotide
  Sense strand starting at position 2767 of SEQ ID NO: 1885489
gcuggaguucccuguugac

SEQ ID NO: 2346183 - RNA, 19 nt, Artificial Sequence
  Description of Artificial Sequence: Synthetic oligonucleotide
  Antisense strand to SEQ ID NO: 2346182
gucaacagggaacuccagc

SEQ ID NO: 2346184 - RNA, 19 nt, Artificial Sequence
  Description of Artificial Sequence: Synthetic oligonucleotide
  Sense strand starting at position 2931 of SEQ ID NO: 1885489
ugaucugcucucuggaaga

SEQ ID NO: 2346185 - RNA, 19 nt, Artificial Sequence
  Description of Artificial Sequence: Synthetic oligonucleotide
  Antisense strand to SEQ ID NO: 2346184
ucuuccagagagcagauca

SEQ ID NO: 2346186 - RNA, 19 nt, Artificial Sequence
  Description of Artificial Sequence: Synthetic oligonucleotide
  Sense strand starting at position 3295 of SEQ ID NO: 1885489
gcaucucucaucugaggga

SEQ ID NO: 2346187 - RNA, 19 nt, Artificial Sequence
  Description of Artificial Sequence: Synthetic oligonucleotide
  Antisense strand to SEQ ID NO: 2346186
ucccucagaugagagaugc

SEQ ID NO: 2346188 - RNA, 19 nt, Artificial Sequence
  Description of Artificial Sequence: Synthetic oligonucleotide
  Sense strand starting at position 3533 of SEQ ID NO: 1885489
ggccaugauauaggcauua

SEQ ID NO: 2346189 - RNA, 19 nt, Artificial Sequence
  Description of Artificial Sequence: Synthetic oligonucleotide
  Antisense strand to SEQ ID NO: 2346188
uaaugccuauaucauggcc

SEQ ID NO: 2346190 - RNA, 19 nt, Artificial Sequence
  Description of Artificial Sequence: Synthetic oligonucleotide
  Sense strand starting at position 3544 of SEQ ID NO: 1885489
aggcauuaccucuguaagg

SEQ ID NO: 2346191 - RNA, 19 nt, Artificial Sequence
  Description of Artificial Sequence: Synthetic oligonucleotide
  Antisense strand to SEQ ID NO: 2346190
ccuuacagagguaaugccu

SEQ ID NO: 2346192 - RNA, 19 nt, Artificial Sequence
  Description of Artificial Sequence: Synthetic oligonucleotide
  Sense strand starting at position 3546 of SEQ ID NO: 1885489
gcauuaccucuguaaggcu

SEQ ID NO: 2346193 - RNA, 19 nt, Artificial Sequence
  Description of Artificial Sequence: Synthetic oligonucleotide
  Antisense strand to SEQ ID NO: 2346192
agccuuacagagguaaugc

SEQ ID NO: 2346194 - RNA, 19 nt, Artificial Sequence
  Description of Artificial Sequence: Synthetic oligonucleotide
  Sense strand starting at position 3727 of SEQ ID NO: 1885489
gccuucugacaguaggagu

SEQ ID NO: 2346195 - RNA, 19 nt, Artificial Sequence
  Description of Artificial Sequence: Synthetic oligonucleotide
  Antisense strand to SEQ ID NO: 2346194
acuccuacugucagaaggc

SEQ ID NO: 2346196 - RNA, 19 nt, Artificial Sequence
  Description of Artificial Sequence: Synthetic oligonucleotide
  Sense strand starting at position 3845 of SEQ ID NO: 1885489
gacaguguccugggaagug

SEQ ID NO: 2346197 - RNA, 19 nt, Artificial Sequence
  Description of Artificial Sequence: Synthetic oligonucleotide
  Antisense strand to SEQ ID NO: 2346196
cacuucccaggacacuguc

SEQ ID NO: 2346198 - RNA, 19 nt, Artificial Sequence
  Description of Artificial Sequence: Synthetic oligonucleotide
  Sense strand starting at position 3892 of SEQ ID NO: 1885489
uuauuucccugagaaagga

SEQ ID NO: 2346199 - RNA, 19 nt, Artificial Sequence
  Description of Artificial Sequence: Synthetic oligonucleotide
  Antisense strand to SEQ ID NO: 2346198
uccuuucucagggaaauaa

SEQ ID NO: 2346200 - RNA, 19 nt, Artificial Sequence
  Description of Artificial Sequence: Synthetic oligonucleotide
  Sense strand starting at position 290 of SEQ ID NO: 1885490
agugcuuuacuguauuaua

SEQ ID NO: 2346201 - RNA, 19 nt, Artificial Sequence
  Description of Artificial Sequence: Synthetic oligonucleotide
  Antisense strand to SEQ ID NO: 2346200
uauaauacaguaaagcacu

SEQ ID NO: 2346202 - RNA, 19 nt, Artificial Sequence
  Description of Artificial Sequence: Synthetic oligonucleotide
  Sense strand starting at position 509 of SEQ ID NO: 1885490
cagguuugauaugcaacaa

SEQ ID NO: 2346203 - RNA, 19 nt, Artificial Sequence
  Description of Artificial Sequence: Synthetic oligonucleotide
  Antisense strand to SEQ ID NO: 2346202
uuguugcauaucaaaccug

SEQ ID NO: 2346204 - RNA, 19 nt, Artificial Sequence
  Description of Artificial Sequence: Synthetic oligonucleotide
  Sense strand starting at position 866 of SEQ ID NO: 1885490
gagcuucuacaggagcaua

SEQ ID NO: 2346205 - RNA, 19 nt, Artificial Sequence
  Description of Artificial Sequence: Synthetic oligonucleotide
  Antisense strand to SEQ ID NO: 2346204
uaugcuccuguagaagcuc

SEQ ID NO: 2346206 - RNA, 19 nt, Artificial Sequence
  Description of Artificial Sequence: Synthetic oligonucleotide
  Sense strand starting at position 3541 of SEQ ID NO: 1885490
aggcauuaccuguguaagg

SEQ ID NO: 2346207 - RNA, 19 nt, Artificial Sequence
  Description of Artificial Sequence: Synthetic oligonucleotide
  Antisense strand to SEQ ID NO: 2346206
ccuuacacagguaaugccu

SEQ ID NO: 2346208 - RNA, 19 nt, Artificial Sequence
  Description of Artificial Sequence: Synthetic oligonucleotide
  Sense strand starting at position 3543 of SEQ ID NO: 1885490
gcauuaccuguguaaggcu

SEQ ID NO: 2346209 - RNA, 19 nt, Artificial Sequence
  Description of Artificial Sequence: Synthetic oligonucleotide
  Antisense strand to SEQ ID NO: 2346208
agccuuacacagguaaugc

SEQ ID NO: 2346210 - RNA, 19 nt, Artificial Sequence
  Description of Artificial Sequence: Synthetic oligonucleotide
  Sense strand starting at position 5 of SEQ ID NO: 1885491
acuaacuagccauguggau

SEQ ID NO: 2346211 - RNA, 19 nt, Artificial Sequence
  Description of Artificial Sequence: Synthetic oligonucleotide
  Antisense strand to SEQ ID NO: 2346210
auccacauggcuaguuagu

SEQ ID NO: 2346212 - RNA, 19 nt, Artificial Sequence
  Description of Artificial Sequence: Synthetic oligonucleotide
  Sense strand starting at position 12 of SEQ ID NO: 1885491
agccauguggauugugaac

SEQ ID NO: 2346213 - RNA, 19 nt, Artificial Sequence
  Description of Artificial Sequence: Synthetic oligonucleotide
  Antisense strand to SEQ ID NO: 2346212
guucacaauccacauggcu

SEQ ID NO: 2346214 - RNA, 19 nt, Artificial Sequence
  Description of Artificial Sequence: Synthetic oligonucleotide
  Sense strand starting at position 461 of SEQ ID NO: 1885491
auuauuauacuaggugcaa

SEQ ID NO: 2346215 - RNA, 19 nt, Artificial Sequence
  Description of Artificial Sequence: Synthetic oligonucleotide
  Antisense strand to SEQ ID NO: 2346214
uugcaccuaguauaauaau

SEQ ID NO: 2346216 - RNA, 19 nt, Artificial Sequence
  Description of Artificial Sequence: Synthetic oligonucleotide
  Sense strand starting at position 462 of SEQ ID NO: 1885491
uuauuauacuaggugcaau

SEQ ID NO: 2346217 - RNA, 19 nt, Artificial Sequence
  Description of Artificial Sequence: Synthetic oligonucleotide
  Antisense strand to SEQ ID NO: 2346216
auugcaccuaguauaauaa

SEQ ID NO: 2346218 - RNA, 19 nt, Artificial Sequence
  Description of Artificial Sequence: Synthetic oligonucleotide
  Sense strand starting at position 465 of SEQ ID NO: 1885491
uuauacuaggugcaauuaa

SEQ ID NO: 2346219 - RNA, 19 nt, Artificial Sequence
  Description of Artificial Sequence: Synthetic oligonucleotide
  Antisense strand to SEQ ID NO: 2346218
uuaauugcaccuaguauaa

SEQ ID NO: 2346220 - RNA, 19 nt, Artificial Sequence
  Description of Artificial Sequence: Synthetic oligonucleotide
  Sense strand starting at position 510 of SEQ ID NO: 1885491
cagguuugauaugcaacaa

SEQ ID NO: 2346221 - RNA, 19 nt, Artificial Sequence
  Description of Artificial Sequence: Synthetic oligonucleotide
  Antisense strand to SEQ ID NO: 2346220
uuguugcauaucaaaccug

SEQ ID NO: 2346222 - RNA, 19 nt, Artificial Sequence
  Description of Artificial Sequence: Synthetic oligonucleotide
  Sense strand starting at position 757 of SEQ ID NO: 1885491
cugggugauuucugaacac

SEQ ID NO: 2346223 - RNA, 19 nt, Artificial Sequence
  Description of Artificial Sequence: Synthetic oligonucleotide
  Antisense strand to SEQ ID NO: 2346222
guguucagaaaucacccag

SEQ ID NO: 2346224 - RNA, 19 nt, Artificial Sequence
  Description of Artificial Sequence: Synthetic oligonucleotide
  Sense strand starting at position 867 of SEQ ID NO: 1885491
gagcuucuacaggagcaua

SEQ ID NO: 2346225 - RNA, 19 nt, Artificial Sequence
  Description of Artificial Sequence: Synthetic oligonucleotide
  Antisense strand to SEQ ID NO: 2346224
uaugcuccuguagaagcuc

SEQ ID NO: 2346226 - RNA, 19 nt, Artificial Sequence
  Description of Artificial Sequence: Synthetic oligonucleotide
  Sense strand starting at position 958 of SEQ ID NO: 1885491
acuguauuaugcuuggaga

SEQ ID NO: 2346227 - RNA, 19 nt, Artificial Sequence
  Description of Artificial Sequence: Synthetic oligonucleotide
  Antisense strand to SEQ ID NO: 2346226
ucuccaagcauaauacagu

SEQ ID NO: 2346228 - RNA, 19 nt, Artificial Sequence
  Description of Artificial Sequence: Synthetic oligonucleotide
  Sense strand starting at position 959 of SEQ ID NO: 1885491
cuguauuaugcuuggagag

SEQ ID NO: 2346229 - RNA, 19 nt, Artificial Sequence
  Description of Artificial Sequence: Synthetic oligonucleotide
  Antisense strand to SEQ ID NO: 2346228
cucuccaagcauaauacag

SEQ ID NO: 2346230 - RNA, 19 nt, Artificial Sequence
  Description of Artificial Sequence: Synthetic oligonucleotide
  Sense strand starting at position 960 of SEQ ID NO: 1885491
uguauuaugcuuggagaga

SEQ ID NO: 2346231 - RNA, 19 nt, Artificial Sequence
  Description of Artificial Sequence: Synthetic oligonucleotide
  Antisense strand to SEQ ID NO: 2346230
ucucuccaagcauaauaca

SEQ ID NO: 2346232 - RNA, 19 nt, Artificial Sequence
  Description of Artificial Sequence: Synthetic oligonucleotide
  Sense strand starting at position 971 of SEQ ID NO: 1885491
uggagagauuguuauggaa

SEQ ID NO: 2346233 - RNA, 19 nt, Artificial Sequence
  Description of Artificial Sequence: Synthetic oligonucleotide
  Antisense strand to SEQ ID NO: 2346232
uuccauaacaaucucucca

SEQ ID NO: 2346234 - RNA, 19 nt, Artificial Sequence
  Description of Artificial Sequence: Synthetic oligonucleotide
  Sense strand starting at position 1087 of SEQ ID NO: 1885491
uugauucuuacgggaguag

SEQ ID NO: 2346235 - RNA, 19 nt, Artificial Sequence
  Description of Artificial Sequence: Synthetic oligonucleotide
  Antisense strand to SEQ ID NO: 2346234
cuacucccguaagaaucaa

SEQ ID NO: 2346236 - RNA, 19 nt, Artificial Sequence
  Description of Artificial Sequence: Synthetic oligonucleotide
  Sense strand starting at position 1124 of SEQ ID NO: 1885491
agugaaauucaguaggcag

SEQ ID NO: 2346237 - RNA, 19 nt, Artificial Sequence
  Description of Artificial Sequence: Synthetic oligonucleotide
  Antisense strand to SEQ ID NO: 2346236
cugccuacugaauuucacu

SEQ ID NO: 2346238 - RNA, 19 nt, Artificial Sequence
  Description of Artificial Sequence: Synthetic oligonucleotide
  Sense strand starting at position 1280 of SEQ ID NO: 1885491
gugggaagaucugugcucu

SEQ ID NO: 2346239 - RNA, 19 nt, Artificial Sequence
  Description of Artificial Sequence: Synthetic oligonucleotide
  Antisense strand to SEQ ID NO: 2346238
agagcacagaucuucccac

SEQ ID NO: 2346240 - RNA, 19 nt, Artificial Sequence
  Description of Artificial Sequence: Synthetic oligonucleotide
  Sense strand starting at position 1281 of SEQ ID NO: 1885491
ugggaagaucugugcucua

SEQ ID NO: 2346241 - RNA, 19 nt, Artificial Sequence
  Description of Artificial Sequence: Synthetic oligonucleotide
  Antisense strand to SEQ ID NO: 2346240
uagagcacagaucuuccca

SEQ ID NO: 2346242 - RNA, 19 nt, Artificial Sequence
  Description of Artificial Sequence: Synthetic oligonucleotide
  Sense strand starting at position 1286 of SEQ ID NO: 1885491
agaucugugcucuaugcua

SEQ ID NO: 2346243 - RNA, 19 nt, Artificial Sequence
  Description of Artificial Sequence: Synthetic oligonucleotide
  Antisense strand to SEQ ID NO: 2346242
uagcauagagcacagaucu

SEQ ID NO: 2346244 - RNA, 19 nt, Artificial Sequence
  Description of Artificial Sequence: Synthetic oligonucleotide
  Sense strand starting at position 1304 of SEQ ID NO: 1885491
aaggacaugcucuguaaug

SEQ ID NO: 2346245 - RNA, 19 nt, Artificial Sequence
  Description of Artificial Sequence: Synthetic oligonucleotide
  Antisense strand to SEQ ID NO: 2346244
cauuacagagcauguccuu

SEQ ID NO: 2346246 - RNA, 19 nt, Artificial Sequence
  Description of Artificial Sequence: Synthetic oligonucleotide
  Sense strand starting at position 1305 of SEQ ID NO: 1885491
aggacaugcucuguaauga

SEQ ID NO: 2346247 - RNA, 19 nt, Artificial Sequence
  Description of Artificial Sequence: Synthetic oligonucleotide
  Antisense strand to SEQ ID NO: 2346246
ucauuacagagcauguccu

SEQ ID NO: 2346248 - RNA, 19 nt, Artificial Sequence
  Description of Artificial Sequence: Synthetic oligonucleotide
  Sense strand starting at position 1306 of SEQ ID NO: 1885491
ggacaugcucuguaaugac

SEQ ID NO: 2346249 - RNA, 19 nt, Artificial Sequence
  Description of Artificial Sequence: Synthetic oligonucleotide
  Antisense strand to SEQ ID NO: 2346248
gucauuacagagcaugucc

SEQ ID NO: 2346250 - RNA, 19 nt, Artificial Sequence
  Description of Artificial Sequence: Synthetic oligonucleotide
  Sense strand starting at position 1404 of SEQ ID NO: 1885491
gcuaucaacucuguguaga

SEQ ID NO: 2346251 - RNA, 19 nt, Artificial Sequence
  Description of Artificial Sequence: Synthetic oligonucleotide
  Antisense strand to SEQ ID NO: 2346250
ucuacacagaguugauagc

SEQ ID NO: 2346252 - RNA, 19 nt, Artificial Sequence
  Description of Artificial Sequence: Synthetic oligonucleotide
  Sense strand starting at position 1405 of SEQ ID NO: 1885491
cuaucaacucuguguagau

SEQ ID NO: 2346253 - RNA, 19 nt, Artificial Sequence
  Description of Artificial Sequence: Synthetic oligonucleotide
  Antisense strand to SEQ ID NO: 2346252
aucuacacagaguugauag

SEQ ID NO: 2346254 - RNA, 19 nt, Artificial Sequence
  Description of Artificial Sequence: Synthetic oligonucleotide
  Sense strand starting at position 1453 of SEQ ID NO: 1885491
accugcauuucuuugucua

SEQ ID NO: 2346255 - RNA, 19 nt, Artificial Sequence
  Description of Artificial Sequence: Synthetic oligonucleotide
  Antisense strand to SEQ ID NO: 2346254
uagacaaagaaaugcaggu

SEQ ID NO: 2346256 - RNA, 19 nt, Artificial Sequence
  Description of Artificial Sequence: Synthetic oligonucleotide
  Sense strand starting at position 1492 of SEQ ID NO: 1885491
aaauguagucuacaaacga

SEQ ID NO: 2346257 - RNA, 19 nt, Artificial Sequence
  Description of Artificial Sequence: Synthetic oligonucleotide
  Antisense strand to SEQ ID NO: 2346256
ucguuuguagacuacauuu

SEQ ID NO: 2346258 - RNA, 19 nt, Artificial Sequence
  Description of Artificial Sequence: Synthetic oligonucleotide
  Sense strand starting at position 1557 of SEQ ID NO: 1885491
cagaauucgguuuguccuu

SEQ ID NO: 2346259 - RNA, 19 nt, Artificial Sequence
  Description of Artificial Sequence: Synthetic oligonucleotide
  Antisense strand to SEQ ID NO: 2346258
aaggacaaaccgaauucug

SEQ ID NO: 2346260 - RNA, 19 nt, Artificial Sequence
  Description of Artificial Sequence: Synthetic oligonucleotide
  Sense strand starting at position 1608 of SEQ ID NO: 1885491
auacgagaaugggucuaaa

SEQ ID NO: 2346261 - RNA, 19 nt, Artificial Sequence
  Description of Artificial Sequence: Synthetic oligonucleotide
  Antisense strand to SEQ ID NO: 2346260
uuuagacccauucucguau

SEQ ID NO: 2346262 - RNA, 19 nt, Artificial Sequence
  Description of Artificial Sequence: Synthetic oligonucleotide
  Sense strand starting at position 2220 of SEQ ID NO: 1885491
agcagugggcgcuaaguaa

SEQ ID NO: 2346263 - RNA, 19 nt, Artificial Sequence
  Description of Artificial Sequence: Synthetic oligonucleotide
  Antisense strand to SEQ ID NO: 2346262
uuacuuagcgcccacugcu

SEQ ID NO: 2346264 - RNA, 19 nt, Artificial Sequence
  Description of Artificial Sequence: Synthetic oligonucleotide
  Sense strand starting at position 2328 of SEQ ID NO: 1885491
gaacuugguuuagugcuau

SEQ ID NO: 2346265 - RNA, 19 nt, Artificial Sequence
  Description of Artificial Sequence: Synthetic oligonucleotide
  Antisense strand to SEQ ID NO: 2346264
auagcacuaaaccaaguuc

SEQ ID NO: 2346266 - RNA, 19 nt, Artificial Sequence
  Description of Artificial Sequence: Synthetic oligonucleotide
  Sense strand starting at position 2431 of SEQ ID NO: 1885491
aguccugucccugaaacaa

SEQ ID NO: 2346267 - RNA, 19 nt, Artificial Sequence
  Description of Artificial Sequence: Synthetic oligonucleotide
  Antisense strand to SEQ ID NO: 2346266
uuguuucagggacaggacu

SEQ ID NO: 2346268 - RNA, 19 nt, Artificial Sequence
  Description of Artificial Sequence: Synthetic oligonucleotide
  Sense strand starting at position 2545 of SEQ ID NO: 1885491
ggcaguauuugaggaugau

SEQ ID NO: 2346269 - RNA, 19 nt, Artificial Sequence
  Description of Artificial Sequence: Synthetic oligonucleotide
  Antisense strand to SEQ ID NO: 2346268
aucauccucaaauacugcc

SEQ ID NO: 2346270 - RNA, 19 nt, Artificial Sequence
  Description of Artificial Sequence: Synthetic oligonucleotide
  Sense strand starting at position 2577 of SEQ ID NO: 1885491
ccugaucauggcuggugau

SEQ ID NO: 2346271 - RNA, 19 nt, Artificial Sequence
  Description of Artificial Sequence: Synthetic oligonucleotide
  Antisense strand to SEQ ID NO: 2346270
aucaccagccaugaucagg

SEQ ID NO: 2346272 - RNA, 19 nt, Artificial Sequence
  Description of Artificial Sequence: Synthetic oligonucleotide
  Sense strand starting at position 2767 of SEQ ID NO: 1885491
gcuggaguucccuguugac

SEQ ID NO: 2346273 - RNA, 19 nt, Artificial Sequence
  Description of Artificial Sequence: Synthetic oligonucleotide
  Antisense strand to SEQ ID NO: 2346272
gucaacagggaacuccagc

SEQ ID NO: 2346274 - RNA, 19 nt, Artificial Sequence
  Description of Artificial Sequence: Synthetic oligonucleotide
  Sense strand starting at position 2931 of SEQ ID NO: 1885491
ugaucugcucucuggaaga

SEQ ID NO: 2346275 - RNA, 19 nt, Artificial Sequence
  Description of Artificial Sequence: Synthetic oligonucleotide
  Antisense strand to SEQ ID NO: 2346274
ucuuccagagagcagauca

SEQ ID NO: 2346276 - RNA, 19 nt, Artificial Sequence
  Description of Artificial Sequence: Synthetic oligonucleotide
  Sense strand starting at position 3295 of SEQ ID NO: 1885491
gcaucucucaucugaggga

SEQ ID NO: 2346277 - RNA, 19 nt, Artificial Sequence
  Description of Artificial Sequence: Synthetic oligonucleotide
  Antisense strand to SEQ ID NO: 2346276
ucccucagaugagagaugc

SEQ ID NO: 2346278 - RNA, 19 nt, Artificial Sequence
  Description of Artificial Sequence: Synthetic oligonucleotide
  Sense strand starting at position 3533 of SEQ ID NO: 1885491
ggccaugauauaggcauua

SEQ ID NO: 2346279 - RNA, 19 nt, Artificial Sequence
  Description of Artificial Sequence: Synthetic oligonucleotide
  Antisense strand to SEQ ID NO: 2346278
uaaugccuauaucauggcc

SEQ ID NO: 2346280 - RNA, 19 nt, Artificial Sequence
  Description of Artificial Sequence: Synthetic oligonucleotide
  Sense strand starting at position 3544 of SEQ ID NO: 1885491
aggcauuaccucuguaagg

SEQ ID NO: 2346281 - RNA, 19 nt, Artificial Sequence
  Description of Artificial Sequence: Synthetic oligonucleotide
  Antisense strand to SEQ ID NO: 2346280
ccuuacagagguaaugccu

SEQ ID NO: 2346282 - RNA, 19 nt, Artificial Sequence
  Description of Artificial Sequence: Synthetic oligonucleotide
  Sense strand starting at position 3546 of SEQ ID NO: 1885491
gcauuaccucuguaaggcu

SEQ ID NO: 2346283 - RNA, 19 nt, Artificial Sequence
  Description of Artificial Sequence: Synthetic oligonucleotide
  Antisense strand to SEQ ID NO: 2346282
agccuuacagagguaaugc

SEQ ID NO: 2346284 - RNA, 19 nt, Artificial Sequence
  Description of Artificial Sequence: Synthetic oligonucleotide
  Sense strand starting at position 3727 of SEQ ID NO: 1885491
gccuucugacaguaggagu

SEQ ID NO: 2346285 - RNA, 19 nt, Artificial Sequence
  Description of Artificial Sequence: Synthetic oligonucleotide
  Antisense strand to SEQ ID NO: 2346284
acuccuacugucagaaggc

SEQ ID NO: 2346286 - RNA, 19 nt, Artificial Sequence
  Description of Artificial Sequence: Synthetic oligonucleotide
  Sense strand starting at position 3845 of SEQ ID NO: 1885491
gacaguguccugggaagug

SEQ ID NO: 2346287 - RNA, 19 nt, Artificial Sequence
  Description of Artificial Sequence: Synthetic oligonucleotide
  Antisense strand to SEQ ID NO: 2346286
cacuucccaggacacuguc

SEQ ID NO: 2346288 - RNA, 19 nt, Artificial Sequence
  Description of Artificial Sequence: Synthetic oligonucleotide
  Sense strand starting at position 3892 of SEQ ID NO: 1885491
uuauuucccugagaaagga

SEQ ID NO: 2346289 - RNA, 19 nt, Artificial Sequence
  Description of Artificial Sequence: Synthetic oligonucleotide
  Antisense strand to SEQ ID NO: 2346288
uccuuucucagggaaauaa

SEQ ID NO: 2346290 - RNA, 19 nt, Artificial Sequence
  Description of Artificial Sequence: Synthetic oligonucleotide
  Sense strand starting at position 101 of SEQ ID NO: 1885492
ucgaacgguccuuaauauc

SEQ ID NO: 2346291 - RNA, 19 nt, Artificial Sequence
  Description of Artificial Sequence: Synthetic oligonucleotide
  Antisense strand to SEQ ID NO: 2346290
gauauuaaggaccguucga

SEQ ID NO: 2346292 - RNA, 19 nt, Artificial Sequence
  Description of Artificial Sequence: Synthetic oligonucleotide
  Sense strand starting at position 473 of SEQ ID NO: 1885492
ucguauguggcaucguaca

SEQ ID NO: 2346293 - RNA, 19 nt, Artificial Sequence
  Description of Artificial Sequence: Synthetic oligonucleotide
  Antisense strand to SEQ ID NO: 2346292
uguacgaugccacauacga

SEQ ID NO: 2346294 - RNA, 19 nt, Artificial Sequence
  Description of Artificial Sequence: Synthetic oligonucleotide
  Sense strand starting at position 657 of SEQ ID NO: 1885492
ucuccucuuguguagaaga

SEQ ID NO: 2346295 - RNA, 19 nt, Artificial Sequence
  Description of Artificial Sequence: Synthetic oligonucleotide
  Antisense strand to SEQ ID NO: 2346294
ucuucuacacaagaggaga

SEQ ID NO: 2346296 - RNA, 19 nt, Artificial Sequence
  Description of Artificial Sequence: Synthetic oligonucleotide
  Sense strand starting at position 659 of SEQ ID NO: 1885492
uccucuuguguagaagauu

SEQ ID NO: 2346297 - RNA, 19 nt, Artificial Sequence
  Description of Artificial Sequence: Synthetic oligonucleotide
  Antisense strand to SEQ ID NO: 2346296
aaucuucuacacaagagga

SEQ ID NO: 2346298 - RNA, 19 nt, Artificial Sequence
  Description of Artificial Sequence: Synthetic oligonucleotide
  Sense strand starting at position 796 of SEQ ID NO: 1885492
acuguuugccuagagaaga

SEQ ID NO: 2346299 - RNA, 19 nt, Artificial Sequence
  Description of Artificial Sequence: Synthetic oligonucleotide
  Antisense strand to SEQ ID NO: 2346298
ucuucucuaggcaaacagu

SEQ ID NO: 2346300 - RNA, 19 nt, Artificial Sequence
  Description of Artificial Sequence: Synthetic oligonucleotide
  Sense strand starting at position 807 of SEQ ID NO: 1885492
agagaagacucacuuuagu

SEQ ID NO: 2346301 - RNA, 19 nt, Artificial Sequence
  Description of Artificial Sequence: Synthetic oligonucleotide
  Antisense strand to SEQ ID NO: 2346300
acuaaagugagucuucucu

SEQ ID NO: 2346302 - RNA, 19 nt, Artificial Sequence
  Description of Artificial Sequence: Synthetic oligonucleotide
  Sense strand starting at position 815 of SEQ ID NO: 1885492
cucacuuuagucuggacau

SEQ ID NO: 2346303 - RNA, 19 nt, Artificial Sequence
  Description of Artificial Sequence: Synthetic oligonucleotide
  Antisense strand to SEQ ID NO: 2346302
auguccagacuaaagugag

SEQ ID NO: 2346304 - RNA, 19 nt, Artificial Sequence
  Description of Artificial Sequence: Synthetic oligonucleotide
  Sense strand starting at position 852 of SEQ ID NO: 1885492
auguaagucguccaaucag

SEQ ID NO: 2346305 - RNA, 19 nt, Artificial Sequence
  Description of Artificial Sequence: Synthetic oligonucleotide
  Antisense strand to SEQ ID NO: 2346304
cugauuggacgacuuacau

SEQ ID NO: 2346306 - RNA, 19 nt, Artificial Sequence
  Description of Artificial Sequence: Synthetic oligonucleotide
  Sense strand starting at position 984 of SEQ ID NO: 1885492
uugucccaucccugaaaug

SEQ ID NO: 2346307 - RNA, 19 nt, Artificial Sequence
  Description of Artificial Sequence: Synthetic oligonucleotide
  Antisense strand to SEQ ID NO: 2346306
cauuucagggaugggacaa

SEQ ID NO: 2346308 - RNA, 19 nt, Artificial Sequence
  Description of Artificial Sequence: Synthetic oligonucleotide
  Sense strand starting at position 985 of SEQ ID NO: 1885492
ugucccaucccugaaaugu

SEQ ID NO: 2346309 - RNA, 19 nt, Artificial Sequence
  Description of Artificial Sequence: Synthetic oligonucleotide
  Antisense strand to SEQ ID NO: 2346308
acauuucagggaugggaca

SEQ ID NO: 2346310 - RNA, 19 nt, Artificial Sequence
  Description of Artificial Sequence: Synthetic oligonucleotide
  Sense strand starting at position 1022 of SEQ ID NO: 1885492
augucagagcuucaggagu

SEQ ID NO: 2346311 - RNA, 19 nt, Artificial Sequence
  Description of Artificial Sequence: Synthetic oligonucleotide
  Antisense strand to SEQ ID NO: 2346310
acuccugaagcucugacau

SEQ ID NO: 2346312 - RNA, 19 nt, Artificial Sequence
  Description of Artificial Sequence: Synthetic oligonucleotide
  Sense strand starting at position 1235 of SEQ ID NO: 1885492
aaacuaacugaucgagugu

SEQ ID NO: 2346313 - RNA, 19 nt, Artificial Sequence
  Description of Artificial Sequence: Synthetic oligonucleotide
  Antisense strand to SEQ ID NO: 2346312
acacucgaucaguuaguuu

SEQ ID NO: 2346314 - RNA, 19 nt, Artificial Sequence
  Description of Artificial Sequence: Synthetic oligonucleotide
  Sense strand starting at position 1381 of SEQ ID NO: 1885492
aagccucgcguguuaagua

SEQ ID NO: 2346315 - RNA, 19 nt, Artificial Sequence
  Description of Artificial Sequence: Synthetic oligonucleotide
  Antisense strand to SEQ ID NO: 2346314
uacuuaacacgcgaggcuu

SEQ ID NO: 2346316 - RNA, 19 nt, Artificial Sequence
  Description of Artificial Sequence: Synthetic oligonucleotide
  Sense strand starting at position 2188 of SEQ ID NO: 1885492
aggugucuuuccuuauuua

SEQ ID NO: 2346317 - RNA, 19 nt, Artificial Sequence
  Description of Artificial Sequence: Synthetic oligonucleotide
  Antisense strand to SEQ ID NO: 2346316
uaaauaaggaaagacaccu

SEQ ID NO: 2346318 - RNA, 19 nt, Artificial Sequence
  Description of Artificial Sequence: Synthetic oligonucleotide
  Sense strand starting at position 2300 of SEQ ID NO: 1885492
acgagauugcuccaguuga

SEQ ID NO: 2346319 - RNA, 19 nt, Artificial Sequence
  Description of Artificial Sequence: Synthetic oligonucleotide
  Antisense strand to SEQ ID NO: 2346318
ucaacuggagcaaucucgu

SEQ ID NO: 2346320 - RNA, 19 nt, Artificial Sequence
  Description of Artificial Sequence: Synthetic oligonucleotide
  Sense strand starting at position 2408 of SEQ ID NO: 1885492
cgugguagcauuccuuagu

SEQ ID NO: 2346321 - RNA, 19 nt, Artificial Sequence
  Description of Artificial Sequence: Synthetic oligonucleotide
  Antisense strand to SEQ ID NO: 2346320
acuaaggaaugcuaccacg

SEQ ID NO: 2346322 - RNA, 19 nt, Artificial Sequence
  Description of Artificial Sequence: Synthetic oligonucleotide
  Sense strand starting at position 2411 of SEQ ID NO: 1885492
gguagcauuccuuaguaau

SEQ ID NO: 2346323 - RNA, 19 nt, Artificial Sequence
  Description of Artificial Sequence: Synthetic oligonucleotide
  Antisense strand to SEQ ID NO: 2346322
auuacuaaggaaugcuacc

SEQ ID NO: 2346324 - RNA, 19 nt, Artificial Sequence
  Description of Artificial Sequence: Synthetic oligonucleotide
  Sense strand starting at position 2671 of SEQ ID NO: 1885492
ucaguuucugaguauauca

SEQ ID NO: 2346325 - RNA, 19 nt, Artificial Sequence
  Description of Artificial Sequence: Synthetic oligonucleotide
  Antisense strand to SEQ ID NO: 2346324
ugauauacucagaaacuga

SEQ ID NO: 2346326 - RNA, 19 nt, Artificial Sequence
  Description of Artificial Sequence: Synthetic oligonucleotide
  Sense strand starting at position 2673 of SEQ ID NO: 1885492
aguuucugaguauaucaau

SEQ ID NO: 2346327 - RNA, 19 nt, Artificial Sequence
  Description of Artificial Sequence: Synthetic oligonucleotide
  Antisense strand to SEQ ID NO: 2346326
auugauauacucagaaacu

SEQ ID NO: 2346328 - RNA, 19 nt, Artificial Sequence
  Description of Artificial Sequence: Synthetic oligonucleotide
  Sense strand starting at position 2719 of SEQ ID NO: 1885492
uggucucaggauugagguu

SEQ ID NO: 2346329 - RNA, 19 nt, Artificial Sequence
  Description of Artificial Sequence: Synthetic oligonucleotide
  Antisense strand to SEQ ID NO: 2346328
aaccucaauccugagacca

SEQ ID NO: 2346330 - RNA, 19 nt, Artificial Sequence
  Description of Artificial Sequence: Synthetic oligonucleotide
  Sense strand starting at position 2720 of SEQ ID NO: 1885492
ggucucaggauugagguua

SEQ ID NO: 2346331 - RNA, 19 nt, Artificial Sequence
  Description of Artificial Sequence: Synthetic oligonucleotide
  Antisense strand to SEQ ID NO: 2346330
uaaccucaauccugagacc

SEQ ID NO: 2346332 - RNA, 19 nt, Artificial Sequence
  Description of Artificial Sequence: Synthetic oligonucleotide
  Sense strand starting at position 2731 of SEQ ID NO: 1885492
ugagguuaggcaggaaagu

SEQ ID NO: 2346333 - RNA, 19 nt, Artificial Sequence
  Description of Artificial Sequence: Synthetic oligonucleotide
  Antisense strand to SEQ ID NO: 2346332
acuuuccugccuaaccuca

SEQ ID NO: 2346334 - RNA, 19 nt, Artificial Sequence
  Description of Artificial Sequence: Synthetic oligonucleotide
  Sense strand starting at position 2745 of SEQ ID NO: 1885492
aaagucaugagaugguguu

SEQ ID NO: 2346335 - RNA, 19 nt, Artificial Sequence
  Description of Artificial Sequence: Synthetic oligonucleotide
  Antisense strand to SEQ ID NO: 2346334
aacaccaucucaugacuuu

SEQ ID NO: 2346336 - RNA, 19 nt, Artificial Sequence
  Description of Artificial Sequence: Synthetic oligonucleotide
  Sense strand starting at position 2817 of SEQ ID NO: 1885492
ggaacaugcuaggcauuga

SEQ ID NO: 2346337 - RNA, 19 nt, Artificial Sequence
  Description of Artificial Sequence: Synthetic oligonucleotide
  Antisense strand to SEQ ID NO: 2346336
ucaaugccuagcauguucc

SEQ ID NO: 2346338 - RNA, 19 nt, Artificial Sequence
  Description of Artificial Sequence: Synthetic oligonucleotide
  Sense strand starting at position 2883 of SEQ ID NO: 1885492
gaagauagacuucguuuag

SEQ ID NO: 2346339 - RNA, 19 nt, Artificial Sequence
  Description of Artificial Sequence: Synthetic oligonucleotide
  Antisense strand to SEQ ID NO: 2346338
cuaaacgaagucuaucuuc

SEQ ID NO: 2346340 - RNA, 19 nt, Artificial Sequence
  Description of Artificial Sequence: Synthetic oligonucleotide
  Sense strand starting at position 2884 of SEQ ID NO: 1885492
aagauagacuucguuuaga

SEQ ID NO: 2346341 - RNA, 19 nt, Artificial Sequence
  Description of Artificial Sequence: Synthetic oligonucleotide
  Antisense strand to SEQ ID NO: 2346340
ucuaaacgaagucuaucuu

SEQ ID NO: 2346342 - RNA, 19 nt, Artificial Sequence
  Description of Artificial Sequence: Synthetic oligonucleotide
  Sense strand starting at position 2887 of SEQ ID NO: 1885492
auagacuucguuuagagac

SEQ ID NO: 2346343 - RNA, 19 nt, Artificial Sequence
  Description of Artificial Sequence: Synthetic oligonucleotide
  Antisense strand to SEQ ID NO: 2346342
gucucuaaacgaagucuau

SEQ ID NO: 2346344 - RNA, 19 nt, Artificial Sequence
  Description of Artificial Sequence: Synthetic oligonucleotide
  Sense strand starting at position 2925 of SEQ ID NO: 1885492
cccaaugucuaagcaugaa

SEQ ID NO: 2346345 - RNA, 19 nt, Artificial Sequence
  Description of Artificial Sequence: Synthetic oligonucleotide
  Antisense strand to SEQ ID NO: 2346344
uucaugcuuagacauuggg

SEQ ID NO: 2346346 - RNA, 19 nt, Artificial Sequence
  Description of Artificial Sequence: Synthetic oligonucleotide
  Sense strand starting at position 3034 of SEQ ID NO: 1885492
uggagaaugucucuccaga

SEQ ID NO: 2346347 - RNA, 19 nt, Artificial Sequence
  Description of Artificial Sequence: Synthetic oligonucleotide
  Antisense strand to SEQ ID NO: 2346346
ucuggagagacauucucca

SEQ ID NO: 2346348 - RNA, 19 nt, Artificial Sequence
  Description of Artificial Sequence: Synthetic oligonucleotide
  Sense strand starting at position 3095 of SEQ ID NO: 1885492
ucgcuucaucuugcgguua

SEQ ID NO: 2346349 - RNA, 19 nt, Artificial Sequence
  Description of Artificial Sequence: Synthetic oligonucleotide
  Antisense strand to SEQ ID NO: 2346348
uaaccgcaagaugaagcga

SEQ ID NO: 2346350 - RNA, 19 nt, Artificial Sequence
  Description of Artificial Sequence: Synthetic oligonucleotide
  Sense strand starting at position 3410 of SEQ ID NO: 1885492
cuguaagcuccuuaaggau

SEQ ID NO: 2346351 - RNA, 19 nt, Artificial Sequence
  Description of Artificial Sequence: Synthetic oligonucleotide
  Antisense strand to SEQ ID NO: 2346350
auccuuaaggagcuuacag

SEQ ID NO: 2346352 - RNA, 19 nt, Artificial Sequence
  Description of Artificial Sequence: Synthetic oligonucleotide
  Sense strand starting at position 3429 of SEQ ID NO: 1885492
cugaguccugguuaucuuu

SEQ ID NO: 2346353 - RNA, 19 nt, Artificial Sequence
  Description of Artificial Sequence: Synthetic oligonucleotide
  Antisense strand to SEQ ID NO: 2346352
aaagauaaccaggacucag

SEQ ID NO: 2346354 - RNA, 19 nt, Artificial Sequence
  Description of Artificial Sequence: Synthetic oligonucleotide
  Sense strand starting at position 3467 of SEQ ID NO: 1885492
gauaguaggugcuuaauag

SEQ ID NO: 2346355 - RNA, 19 nt, Artificial Sequence
  Description of Artificial Sequence: Synthetic oligonucleotide
  Antisense strand to SEQ ID NO: 2346354
cuauuaagcaccuacuauc

SEQ ID NO: 2346356 - RNA, 19 nt, Artificial Sequence
  Description of Artificial Sequence: Synthetic oligonucleotide
  Sense strand starting at position 3579 of SEQ ID NO: 1885492
gagcauggcacugagaaug

SEQ ID NO: 2346357 - RNA, 19 nt, Artificial Sequence
  Description of Artificial Sequence: Synthetic oligonucleotide
  Antisense strand to SEQ ID NO: 2346356
cauucucagugccaugcuc

SEQ ID NO: 2346358 - RNA, 19 nt, Artificial Sequence
  Description of Artificial Sequence: Synthetic oligonucleotide
  Sense strand starting at position 3683 of SEQ ID NO: 1885492
aucauugcugcaugaauuu

SEQ ID NO: 2346359 - RNA, 19 nt, Artificial Sequence
  Description of Artificial Sequence: Synthetic oligonucleotide
  Antisense strand to SEQ ID NO: 2346358
aaauucaugcagcaaugau

SEQ ID NO: 2346360 - RNA, 19 nt, Artificial Sequence
  Description of Artificial Sequence: Synthetic oligonucleotide
  Sense strand starting at position 3744 of SEQ ID NO: 1885492
cauguauuagcguucgacu

SEQ ID NO: 2346361 - RNA, 19 nt, Artificial Sequence
  Description of Artificial Sequence: Synthetic oligonucleotide
  Antisense strand to SEQ ID NO: 2346360
agucgaacgcuaauacaug

SEQ ID NO: 2346362 - RNA, 19 nt, Artificial Sequence
  Description of Artificial Sequence: Synthetic oligonucleotide
  Sense strand starting at position 3751 of SEQ ID NO: 1885492
uagcguucgacuguugcua

SEQ ID NO: 2346363 - RNA, 19 nt, Artificial Sequence
  Description of Artificial Sequence: Synthetic oligonucleotide
  Antisense strand to SEQ ID NO: 2346362
uagcaacagucgaacgcua

SEQ ID NO: 2346364 - RNA, 19 nt, Artificial Sequence
  Description of Artificial Sequence: Synthetic oligonucleotide
  Sense strand starting at position 3752 of SEQ ID NO: 1885492
agcguucgacuguugcuau

SEQ ID NO: 2346365 - RNA, 19 nt, Artificial Sequence
  Description of Artificial Sequence: Synthetic oligonucleotide
  Antisense strand to SEQ ID NO: 2346364
auagcaacagucgaacgcu

SEQ ID NO: 2346366 - RNA, 19 nt, Artificial Sequence
  Description of Artificial Sequence: Synthetic oligonucleotide
  Sense strand starting at position 3816 of SEQ ID NO: 1885492
uauuuauggucuuacagag

SEQ ID NO: 2346367 - RNA, 19 nt, Artificial Sequence
  Description of Artificial Sequence: Synthetic oligonucleotide
  Antisense strand to SEQ ID NO: 2346366
cucuguaagaccauaaaua

SEQ ID NO: 2346368 - RNA, 19 nt, Artificial Sequence
  Description of Artificial Sequence: Synthetic oligonucleotide
  Sense strand starting at position 3873 of SEQ ID NO: 1885492
aagagauagucucugguuc

SEQ ID NO: 2346369 - RNA, 19 nt, Artificial Sequence
  Description of Artificial Sequence: Synthetic oligonucleotide
  Antisense strand to SEQ ID NO: 2346368
gaaccagagacuaucucuu

SEQ ID NO: 2346370 - RNA, 19 nt, Artificial Sequence
  Description of Artificial Sequence: Synthetic oligonucleotide
  Sense strand starting at position 992 of SEQ ID NO: 1885494
gcgaaucagccaggaggaa

SEQ ID NO: 2346371 - RNA, 19 nt, Artificial Sequence
  Description of Artificial Sequence: Synthetic oligonucleotide
  Antisense strand to SEQ ID NO: 2346370
uuccuccuggcugauucgc

SEQ ID NO: 2346372 - RNA, 19 nt, Artificial Sequence
  Description of Artificial Sequence: Synthetic oligonucleotide
  Sense strand starting at position 1219 of SEQ ID NO: 1885494
cgggaacucgcgugucaca

SEQ ID NO: 2346373 - RNA, 19 nt, Artificial Sequence
  Description of Artificial Sequence: Synthetic oligonucleotide
  Antisense strand to SEQ ID NO: 2346372
ugugacacgcgaguucccg

SEQ ID NO: 2346374 - RNA, 19 nt, Artificial Sequence
  Description of Artificial Sequence: Synthetic oligonucleotide
  Sense strand starting at position 1287 of SEQ ID NO: 1885494
agggaaugcgucgggacaa

SEQ ID NO: 2346375 - RNA, 19 nt, Artificial Sequence
  Description of Artificial Sequence: Synthetic oligonucleotide
  Antisense strand to SEQ ID NO: 2346374
uugucccgacgcauucccu

SEQ ID NO: 2346376 - RNA, 19 nt, Artificial Sequence
  Description of Artificial Sequence: Synthetic oligonucleotide
  Sense strand starting at position 1337 of SEQ ID NO: 1885494
uggacugaaucccgacaga

SEQ ID NO: 2346377 - RNA, 19 nt, Artificial Sequence
  Description of Artificial Sequence: Synthetic oligonucleotide
  Antisense strand to SEQ ID NO: 2346376
ucugucgggauucagucca

SEQ ID NO: 2346378 - RNA, 19 nt, Artificial Sequence
  Description of Artificial Sequence: Synthetic oligonucleotide
  Sense strand starting at position 3089 of SEQ ID NO: 1885493
ggagcuguguccuucauga

SEQ ID NO: 2346379 - RNA, 19 nt, Artificial Sequence
  Description of Artificial Sequence: Synthetic oligonucleotide
  Antisense strand to SEQ ID NO: 2346378
ucaugaaggacacagcucc

SEQ ID NO: 2346380 - RNA, 19 nt, Artificial Sequence
  Description of Artificial Sequence: Synthetic oligonucleotide
  Sense strand starting at position 3178 of SEQ ID NO: 1885493
ggaugcuggcugcagauua

SEQ ID NO: 2346381 - RNA, 19 nt, Artificial Sequence
  Description of Artificial Sequence: Synthetic oligonucleotide
  Antisense strand to SEQ ID NO: 2346380
uaaucugcagccagcaucc

SEQ ID NO: 2346382 - RNA, 19 nt, Artificial Sequence
  Description of Artificial Sequence: Synthetic oligonucleotide
  Sense strand starting at position 3345 of SEQ ID NO: 1885493
uuaucuuugucuccuggga

SEQ ID NO: 2346383 - RNA, 19 nt, Artificial Sequence
  Description of Artificial Sequence: Synthetic oligonucleotide
  Antisense strand to SEQ ID NO: 2346382
ucccaggagacaaagauaa

SEQ ID NO: 2346384 - RNA, 19 nt, Artificial Sequence
  Description of Artificial Sequence: Synthetic oligonucleotide
  Sense strand starting at position 3349 of SEQ ID NO: 1885493
cuuugucuccugggagaca

SEQ ID NO: 2346385 - RNA, 19 nt, Artificial Sequence
  Description of Artificial Sequence: Synthetic oligonucleotide
  Antisense strand to SEQ ID NO: 2346384
ugucucccaggagacaaag

SEQ ID NO: 2346386 - RNA, 19 nt, Artificial Sequence
  Description of Artificial Sequence: Synthetic oligonucleotide
  Sense strand starting at position 3386 of SEQ ID NO: 1885493
uuaauuccguggcugagau

SEQ ID NO: 2346387 - RNA, 19 nt, Artificial Sequence
  Description of Artificial Sequence: Synthetic oligonucleotide
  Antisense strand to SEQ ID NO: 2346386
aucucagccacggaauuaa

SEQ ID NO: 2346388 - RNA, 19 nt, Artificial Sequence
  Description of Artificial Sequence: Synthetic oligonucleotide
  Sense strand starting at position 3387 of SEQ ID NO: 1885493
uaauuccguggcugagauu

SEQ ID NO: 2346389 - RNA, 19 nt, Artificial Sequence
  Description of Artificial Sequence: Synthetic oligonucleotide
  Antisense strand to SEQ ID NO: 2346388
aaucucagccacggaauua

SEQ ID NO: 2346390 - RNA, 19 nt, Artificial Sequence
  Description of Artificial Sequence: Synthetic oligonucleotide
  Sense strand starting at position 3396 of SEQ ID NO: 1885493
ggcugagauuuccacauga

SEQ ID NO: 2346391 - RNA, 19 nt, Artificial Sequence
  Description of Artificial Sequence: Synthetic oligonucleotide
  Antisense strand to SEQ ID NO: 2346390
ucauguggaaaucucagcc

SEQ ID NO: 2346392 - RNA, 19 nt, Artificial Sequence
  Description of Artificial Sequence: Synthetic oligonucleotide
  Sense strand starting at position 3642 of SEQ ID NO: 1885493
caggauuucugagaaugug

SEQ ID NO: 2346393 - RNA, 19 nt, Artificial Sequence
  Description of Artificial Sequence: Synthetic oligonucleotide
  Antisense strand to SEQ ID NO: 2346392
cacauucucagaaauccug

SEQ ID NO: 2346394 - RNA, 19 nt, Artificial Sequence
  Description of Artificial Sequence: Synthetic oligonucleotide
  Sense strand starting at position 3650 of SEQ ID NO: 1885493
cugagaaugugcuugcaga

SEQ ID NO: 2346395 - RNA, 19 nt, Artificial Sequence
  Description of Artificial Sequence: Synthetic oligonucleotide
  Antisense strand to SEQ ID NO: 2346394
ucugcaagcacauucucag

SEQ ID NO: 2346396 - RNA, 19 nt, Artificial Sequence
  Description of Artificial Sequence: Synthetic oligonucleotide
  Sense strand starting at position 3651 of SEQ ID NO: 1885493
ugagaaugugcuugcagaa

SEQ ID NO: 2346397 - RNA, 19 nt, Artificial Sequence
  Description of Artificial Sequence: Synthetic oligonucleotide
  Antisense strand to SEQ ID NO: 2346396
uucugcaagcacauucuca

SEQ ID NO: 2346398 - RNA, 19 nt, Artificial Sequence
  Description of Artificial Sequence: Synthetic oligonucleotide
  Sense strand starting at position 3664 of SEQ ID NO: 1885493
gcagaaaucuaagcagauu

SEQ ID NO: 2346399 - RNA, 19 nt, Artificial Sequence
  Description of Artificial Sequence: Synthetic oligonucleotide
  Antisense strand to SEQ ID NO: 2346398
aaucugcuuagauuucugc

SEQ ID NO: 2346400 - RNA, 19 nt, Artificial Sequence
  Description of Artificial Sequence: Synthetic oligonucleotide
  Sense strand starting at position 3675 of SEQ ID NO: 1885493
agcagauucucacugugga

SEQ ID NO: 2346401 - RNA, 19 nt, Artificial Sequence
  Description of Artificial Sequence: Synthetic oligonucleotide
  Antisense strand to SEQ ID NO: 2346400
uccacagugagaaucugcu

SEQ ID NO: 2346402 - RNA, 19 nt, Artificial Sequence
  Description of Artificial Sequence: Synthetic oligonucleotide
  Sense strand starting at position 3676 of SEQ ID NO: 1885493
gcagauucucacuguggag

SEQ ID NO: 2346403 - RNA, 19 nt, Artificial Sequence
  Description of Artificial Sequence: Synthetic oligonucleotide
  Antisense strand to SEQ ID NO: 2346402
cuccacagugagaaucugc

SEQ ID NO: 2346404 - RNA, 19 nt, Artificial Sequence
  Description of Artificial Sequence: Synthetic oligonucleotide
  Sense strand starting at position 3714 of SEQ ID NO: 1885493
gccagagcucugggcagaa

SEQ ID NO: 2346405 - RNA, 19 nt, Artificial Sequence
  Description of Artificial Sequence: Synthetic oligonucleotide
  Antisense strand to SEQ ID NO: 2346404
uucugcccagagcucuggc

SEQ ID NO: 2346406 - RNA, 19 nt, Artificial Sequence
  Description of Artificial Sequence: Synthetic oligonucleotide
  Sense strand starting at position 851 of SEQ ID NO: 1885495
cccuuugucuggcagauau

SEQ ID NO: 2346407 - RNA, 19 nt, Artificial Sequence
  Description of Artificial Sequence: Synthetic oligonucleotide
  Antisense strand to SEQ ID NO: 2346406
auaucugccagacaaaggg

SEQ ID NO: 2346408 - RNA, 19 nt, Artificial Sequence
  Description of Artificial Sequence: Synthetic oligonucleotide
  Sense strand starting at position 962 of SEQ ID NO: 1885495
uagguagagggcugugaau

SEQ ID NO: 2346409 - RNA, 19 nt, Artificial Sequence
  Description of Artificial Sequence: Synthetic oligonucleotide
  Antisense strand to SEQ ID NO: 2346408
auucacagcccucuaccua

SEQ ID NO: 2346410 - RNA, 19 nt, Artificial Sequence
  Description of Artificial Sequence: Synthetic oligonucleotide
  Sense strand starting at position 964 of SEQ ID NO: 1885495
gguagagggcugugaauac

SEQ ID NO: 2346411 - RNA, 19 nt, Artificial Sequence
  Description of Artificial Sequence: Synthetic oligonucleotide
  Antisense strand to SEQ ID NO: 2346410
guauucacagcccucuacc

SEQ ID NO: 2346412 - RNA, 19 nt, Artificial Sequence
  Description of Artificial Sequence: Synthetic oligonucleotide
  Sense strand starting at position 2076 of SEQ ID NO: 1885495
gcgaaucagccaggaggaa

SEQ ID NO: 2346413 - RNA, 19 nt, Artificial Sequence
  Description of Artificial Sequence: Synthetic oligonucleotide
  Antisense strand to SEQ ID NO: 2346412
uuccuccuggcugauucgc

SEQ ID NO: 2346414 - RNA, 19 nt, Artificial Sequence
  Description of Artificial Sequence: Synthetic oligonucleotide
  Sense strand starting at position 2303 of SEQ ID NO: 1885495
cgggaacucgcgugucaca

SEQ ID NO: 2346415 - RNA, 19 nt, Artificial Sequence
  Description of Artificial Sequence: Synthetic oligonucleotide
  Antisense strand to SEQ ID NO: 2346414
ugugacacgcgaguucccg

SEQ ID NO: 2346416 - RNA, 19 nt, Artificial Sequence
  Description of Artificial Sequence: Synthetic oligonucleotide
  Sense strand starting at position 2371 of SEQ ID NO: 1885495
agggaaugcgucgggacaa

SEQ ID NO: 2346417 - RNA, 19 nt, Artificial Sequence
  Description of Artificial Sequence: Synthetic oligonucleotide
  Antisense strand to SEQ ID NO: 2346416
uugucccgacgcauucccu

SEQ ID NO: 2346418 - RNA, 19 nt, Artificial Sequence
  Description of Artificial Sequence: Synthetic oligonucleotide
  Sense strand starting at position 2421 of SEQ ID NO: 1885495
uggacugaaucccgacaga

SEQ ID NO: 2346419 - RNA, 19 nt, Artificial Sequence
  Description of Artificial Sequence: Synthetic oligonucleotide
  Antisense strand to SEQ ID NO: 2346418
ucugucgggauucagucca

SEQ ID NO: 2346420 - RNA, 19 nt, Artificial Sequence
  Description of Artificial Sequence: Synthetic oligonucleotide
  Sense strand starting at position 2238 of SEQ ID NO: 1885496
cccuuugucuggcagauau

SEQ ID NO: 2346421 - RNA, 19 nt, Artificial Sequence
  Description of Artificial Sequence: Synthetic oligonucleotide
  Antisense strand to SEQ ID NO: 2346420
auaucugccagacaaaggg

SEQ ID NO: 2346422 - RNA, 19 nt, Artificial Sequence
  Description of Artificial Sequence: Synthetic oligonucleotide
  Sense strand starting at position 2349 of SEQ ID NO: 1885496
uagguagagggcugugaau

SEQ ID NO: 2346423 - RNA, 19 nt, Artificial Sequence
  Description of Artificial Sequence: Synthetic oligonucleotide
  Antisense strand to SEQ ID NO: 2346422
auucacagcccucuaccua

SEQ ID NO: 2346424 - RNA, 19 nt, Artificial Sequence
  Description of Artificial Sequence: Synthetic oligonucleotide
  Sense strand starting at position 2351 of SEQ ID NO: 1885496
gguagagggcugugaauac

SEQ ID NO: 2346425 - RNA, 19 nt, Artificial Sequence
  Description of Artificial Sequence: Synthetic oligonucleotide
  Antisense strand to SEQ ID NO: 2346424
guauucacagcccucuacc

SEQ ID NO: 2346426 - RNA, 19 nt, Artificial Sequence
  Description of Artificial Sequence: Synthetic oligonucleotide
  Sense strand starting at position 3463 of SEQ ID NO: 1885496
gcgaaucagccaggaggaa

SEQ ID NO: 2346427 - RNA, 19 nt, Artificial Sequence
  Description of Artificial Sequence: Synthetic oligonucleotide
  Antisense strand to SEQ ID NO: 2346426
uuccuccuggcugauucgc

SEQ ID NO: 2346428 - RNA, 19 nt, Artificial Sequence
  Description of Artificial Sequence: Synthetic oligonucleotide
  Sense strand starting at position 3690 of SEQ ID NO: 1885496
cgggaacucgcgugucaca

SEQ ID NO: 2346429 - RNA, 19 nt, Artificial Sequence
  Description of Artificial Sequence: Synthetic oligonucleotide
  Antisense strand to SEQ ID NO: 2346428
ugugacacgcgaguucccg

SEQ ID NO: 2346430 - RNA, 19 nt, Artificial Sequence
  Description of Artificial Sequence: Synthetic oligonucleotide
  Sense strand starting at position 3758 of SEQ ID NO: 1885496
agggaaugcgucgggacaa

SEQ ID NO: 2346431 - RNA, 19 nt, Artificial Sequence
  Description of Artificial Sequence: Synthetic oligonucleotide
  Antisense strand to SEQ ID NO: 2346430
uugucccgacgcauucccu

SEQ ID NO: 2346432 - RNA, 19 nt, Artificial Sequence
  Description of Artificial Sequence: Synthetic oligonucleotide
  Sense strand starting at position 3808 of SEQ ID NO: 1885496
uggacugaaucccgacaga

SEQ ID NO: 2346433 - RNA, 19 nt, Artificial Sequence
  Description of Artificial Sequence: Synthetic oligonucleotide
  Antisense strand to SEQ ID NO: 2346432
ucugucgggauucagucca

SEQ ID NO: 2346434 - RNA, 19 nt, Artificial Sequence
  Description of Artificial Sequence: Synthetic oligonucleotide
  Sense strand starting at position 212 of SEQ ID NO: 1885497
cuggguggagucuauuauu

SEQ ID NO: 2346435 - RNA, 19 nt, Artificial Sequence
  Description of Artificial Sequence: Synthetic oligonucleotide
  Antisense strand to SEQ ID NO: 2346434
aauaauagacuccacccag

SEQ ID NO: 2346436 - RNA, 19 nt, Artificial Sequence
  Description of Artificial Sequence: Synthetic oligonucleotide
  Sense strand starting at position 245 of SEQ ID NO: 1885497
gucacacaucgacaacuau

SEQ ID NO: 2346437 - RNA, 19 nt, Artificial Sequence
  Description of Artificial Sequence: Synthetic oligonucleotide
  Antisense strand to SEQ ID NO: 2346436
auaguugucgaugugugac

SEQ ID NO: 2346438 - RNA, 19 nt, Artificial Sequence
  Description of Artificial Sequence: Synthetic oligonucleotide
  Sense strand starting at position 407 of SEQ ID NO: 1885497
ggcucauuaguccaaagca

SEQ ID NO: 2346439 - RNA, 19 nt, Artificial Sequence
  Description of Artificial Sequence: Synthetic oligonucleotide
  Antisense strand to SEQ ID NO: 2346438
ugcuuuggacuaaugagcc

SEQ ID NO: 2346440 - RNA, 19 nt, Artificial Sequence
  Description of Artificial Sequence: Synthetic oligonucleotide
  Sense strand starting at position 433 of SEQ ID NO: 1885497
ugccguaacagcuuguaua

SEQ ID NO: 2346441 - RNA, 19 nt, Artificial Sequence
  Description of Artificial Sequence: Synthetic oligonucleotide
  Antisense strand to SEQ ID NO: 2346440
uauacaagcuguuacggca

SEQ ID NO: 2346442 - RNA, 19 nt, Artificial Sequence
  Description of Artificial Sequence: Synthetic oligonucleotide
  Sense strand starting at position 443 of SEQ ID NO: 1885497
gcuuguauaucuccaugaa

SEQ ID NO: 2346443 - RNA, 19 nt, Artificial Sequence
  Description of Artificial Sequence: Synthetic oligonucleotide
  Antisense strand to SEQ ID NO: 2346442
uucauggagauauacaagc

SEQ ID NO: 2346444 - RNA, 19 nt, Artificial Sequence
  Description of Artificial Sequence: Synthetic oligonucleotide
  Sense strand starting at position 611 of SEQ ID NO: 1885497
acaaacucaggcugucaaa

SEQ ID NO: 2346445 - RNA, 19 nt, Artificial Sequence
  Description of Artificial Sequence: Synthetic oligonucleotide
  Antisense strand to SEQ ID NO: 2346444
uuugacagccugaguuugu

SEQ ID NO: 2346446 - RNA, 19 nt, Artificial Sequence
  Description of Artificial Sequence: Synthetic oligonucleotide
  Sense strand starting at position 762 of SEQ ID NO: 1885497
agucuaguugccuggauuu

SEQ ID NO: 2346447 - RNA, 19 nt, Artificial Sequence
  Description of Artificial Sequence: Synthetic oligonucleotide
  Antisense strand to SEQ ID NO: 2346446
aaauccaggcaacuagacu

SEQ ID NO: 2346448 - RNA, 19 nt, Artificial Sequence
  Description of Artificial Sequence: Synthetic oligonucleotide
  Sense strand starting at position 810 of SEQ ID NO: 1885497
gcagguauuccggaagcag

SEQ ID NO: 2346449 - RNA, 19 nt, Artificial Sequence
  Description of Artificial Sequence: Synthetic oligonucleotide
  Antisense strand to SEQ ID NO: 2346448
cugcuuccggaauaccugc

SEQ ID NO: 2346450 - RNA, 19 nt, Artificial Sequence
  Description of Artificial Sequence: Synthetic oligonucleotide
  Sense strand starting at position 928 of SEQ ID NO: 1885497
gguacuucuuccuccacua

SEQ ID NO: 2346451 - RNA, 19 nt, Artificial Sequence
  Description of Artificial Sequence: Synthetic oligonucleotide
  Antisense strand to SEQ ID NO: 2346450
uaguggaggaagaaguacc

SEQ ID NO: 2346452 - RNA, 19 nt, Artificial Sequence
  Description of Artificial Sequence: Synthetic oligonucleotide
  Sense strand starting at position 1109 of SEQ ID NO: 1885497
uaaaguugccagcaugaaa

SEQ ID NO: 2346453 - RNA, 19 nt, Artificial Sequence
  Description of Artificial Sequence: Synthetic oligonucleotide
  Antisense strand to SEQ ID NO: 2346452
uuucaugcuggcaacuuua

SEQ ID NO: 2346454 - RNA, 19 nt, Artificial Sequence
  Description of Artificial Sequence: Synthetic oligonucleotide
  Sense strand starting at position 1128 of SEQ ID NO: 1885497
aagagucuuggcugaauau

SEQ ID NO: 2346455 - RNA, 19 nt, Artificial Sequence
  Description of Artificial Sequence: Synthetic oligonucleotide
  Antisense strand to SEQ ID NO: 2346454
auauucagccaagacucuu

SEQ ID NO: 2346456 - RNA, 19 nt, Artificial Sequence
  Description of Artificial Sequence: Synthetic oligonucleotide
  Sense strand starting at position 1129 of SEQ ID NO: 1885497
agagucuuggcugaauaua

SEQ ID NO: 2346457 - RNA, 19 nt, Artificial Sequence
  Description of Artificial Sequence: Synthetic oligonucleotide
  Antisense strand to SEQ ID NO: 2346456
uauauucagccaagacucu

SEQ ID NO: 2346458 - RNA, 19 nt, Artificial Sequence
  Description of Artificial Sequence: Synthetic oligonucleotide
  Sense strand starting at position 1142 of SEQ ID NO: 1885497
aauauauuacagugguguu

SEQ ID NO: 2346459 - RNA, 19 nt, Artificial Sequence
  Description of Artificial Sequence: Synthetic oligonucleotide
  Antisense strand to SEQ ID NO: 2346458
aacaccacuguaauauauu

SEQ ID NO: 2346460 - RNA, 19 nt, Artificial Sequence
  Description of Artificial Sequence: Synthetic oligonucleotide
  Sense strand starting at position 1143 of SEQ ID NO: 1885497
auauauuacagugguguua

SEQ ID NO: 2346461 - RNA, 19 nt, Artificial Sequence
  Description of Artificial Sequence: Synthetic oligonucleotide
  Antisense strand to SEQ ID NO: 2346460
uaacaccacuguaauauau

SEQ ID NO: 2346462 - RNA, 19 nt, Artificial Sequence
  Description of Artificial Sequence: Synthetic oligonucleotide
  Sense strand starting at position 1158 of SEQ ID NO: 1885497
guuaacuuaugcuugaaga

SEQ ID NO: 2346463 - RNA, 19 nt, Artificial Sequence
  Description of Artificial Sequence: Synthetic oligonucleotide
  Antisense strand to SEQ ID NO: 2346462
ucuucaagcauaaguuaac

SEQ ID NO: 2346464 - RNA, 19 nt, Artificial Sequence
  Description of Artificial Sequence: Synthetic oligonucleotide
  Sense strand starting at position 1159 of SEQ ID NO: 1885497
uuaacuuaugcuugaagau

SEQ ID NO: 2346465 - RNA, 19 nt, Artificial Sequence
  Description of Artificial Sequence: Synthetic oligonucleotide
  Antisense strand to SEQ ID NO: 2346464
aucuucaagcauaaguuaa

SEQ ID NO: 2346466 - RNA, 19 nt, Artificial Sequence
  Description of Artificial Sequence: Synthetic oligonucleotide
  Sense strand starting at position 1174 of SEQ ID NO: 1885497
agaucuuuccugggcagag

SEQ ID NO: 2346467 - RNA, 19 nt, Artificial Sequence
  Description of Artificial Sequence: Synthetic oligonucleotide
  Antisense strand to SEQ ID NO: 2346466
cucugcccaggaaagaucu

SEQ ID NO: 2346468 - RNA, 19 nt, Artificial Sequence
  Description of Artificial Sequence: Synthetic oligonucleotide
  Sense strand starting at position 1192 of SEQ ID NO: 1885497
gccagaacaugucccucau

SEQ ID NO: 2346469 - RNA, 19 nt, Artificial Sequence
  Description of Artificial Sequence: Synthetic oligonucleotide
  Antisense strand to SEQ ID NO: 2346468
augagggacauguucuggc

SEQ ID NO: 2346470 - RNA, 19 nt, Artificial Sequence
  Description of Artificial Sequence: Synthetic oligonucleotide
  Sense strand starting at position 1265 of SEQ ID NO: 1885497
accaaagucugagcaucau

SEQ ID NO: 2346471 - RNA, 19 nt, Artificial Sequence
  Description of Artificial Sequence: Synthetic oligonucleotide
  Antisense strand to SEQ ID NO: 2346470
augaugcucagacuuuggu

SEQ ID NO: 2346472 - RNA, 19 nt, Artificial Sequence
  Description of Artificial Sequence: Synthetic oligonucleotide
  Sense strand starting at position 1271 of SEQ ID NO: 1885497
gucugagcaucauucuaca

SEQ ID NO: 2346473 - RNA, 19 nt, Artificial Sequence
  Description of Artificial Sequence: Synthetic oligonucleotide
  Antisense strand to SEQ ID NO: 2346472
uguagaaugaugcucagac

SEQ ID NO: 2346474 - RNA, 19 nt, Artificial Sequence
  Description of Artificial Sequence: Synthetic oligonucleotide
  Sense strand starting at position 1469 of SEQ ID NO: 1885497
auccuuugagcuggagaga

SEQ ID NO: 2346475 - RNA, 19 nt, Artificial Sequence
  Description of Artificial Sequence: Synthetic oligonucleotide
  Antisense strand to SEQ ID NO: 2346474
ucucuccagcucaaaggau

SEQ ID NO: 2346476 - RNA, 19 nt, Artificial Sequence
  Description of Artificial Sequence: Synthetic oligonucleotide
  Sense strand starting at position 1470 of SEQ ID NO: 1885497
uccuuugagcuggagagau

SEQ ID NO: 2346477 - RNA, 19 nt, Artificial Sequence
  Description of Artificial Sequence: Synthetic oligonucleotide
  Antisense strand to SEQ ID NO: 2346476
aucucuccagcucaaagga

SEQ ID NO: 2346478 - RNA, 19 nt, Artificial Sequence
  Description of Artificial Sequence: Synthetic oligonucleotide
  Sense strand starting at position 1768 of SEQ ID NO: 1885497
acagcaaauguuugacaau

SEQ ID NO: 2346479 - RNA, 19 nt, Artificial Sequence
  Description of Artificial Sequence: Synthetic oligonucleotide
  Antisense strand to SEQ ID NO: 2346478
auugucaaacauuugcugu

SEQ ID NO: 2346480 - RNA, 19 nt, Artificial Sequence
  Description of Artificial Sequence: Synthetic oligonucleotide
  Sense strand starting at position 1797 of SEQ ID NO: 1885497
uuugaaaggcuaugaaaca

SEQ ID NO: 2346481 - RNA, 19 nt, Artificial Sequence
  Description of Artificial Sequence: Synthetic oligonucleotide
  Antisense strand to SEQ ID NO: 2346480
uguuucauagccuuucaaa

SEQ ID NO: 2346482 - RNA, 19 nt, Artificial Sequence
  Description of Artificial Sequence: Synthetic oligonucleotide
  Sense strand starting at position 2050 of SEQ ID NO: 1885497
gucguaaucacugauuaag

SEQ ID NO: 2346483 - RNA, 19 nt, Artificial Sequence
  Description of Artificial Sequence: Synthetic oligonucleotide
  Antisense strand to SEQ ID NO: 2346482
cuuaaucagugauuacgac

SEQ ID NO: 2346484 - RNA, 19 nt, Artificial Sequence
  Description of Artificial Sequence: Synthetic oligonucleotide
  Sense strand starting at position 2052 of SEQ ID NO: 1885497
cguaaucacugauuaaggu

SEQ ID NO: 2346485 - RNA, 19 nt, Artificial Sequence
  Description of Artificial Sequence: Synthetic oligonucleotide
  Antisense strand to SEQ ID NO: 2346484
accuuaaucagugauuacg

SEQ ID NO: 2346486 - RNA, 19 nt, Artificial Sequence
  Description of Artificial Sequence: Synthetic oligonucleotide
  Sense strand starting at position 2069 of SEQ ID NO: 1885497
gugauuaagucuccaccag

SEQ ID NO: 2346487 - RNA, 19 nt, Artificial Sequence
  Description of Artificial Sequence: Synthetic oligonucleotide
  Antisense strand to SEQ ID NO: 2346486
cugguggagacuuaaucac

SEQ ID NO: 2346488 - RNA, 19 nt, Artificial Sequence
  Description of Artificial Sequence: Synthetic oligonucleotide
  Sense strand starting at position 2122 of SEQ ID NO: 1885497
accggucaucuuuacagau

SEQ ID NO: 2346489 - RNA, 19 nt, Artificial Sequence
  Description of Artificial Sequence: Synthetic oligonucleotide
  Antisense strand to SEQ ID NO: 2346488
aucuguaaagaugaccggu

SEQ ID NO: 2346490 - RNA, 19 nt, Artificial Sequence
  Description of Artificial Sequence: Synthetic oligonucleotide
  Sense strand starting at position 2978 of SEQ ID NO: 1885497
agacauuaguacuuucuua

SEQ ID NO: 2346491 - RNA, 19 nt, Artificial Sequence
  Description of Artificial Sequence: Synthetic oligonucleotide
  Antisense strand to SEQ ID NO: 2346490
uaagaaaguacuaaugucu

SEQ ID NO: 2346492 - RNA, 19 nt, Artificial Sequence
  Description of Artificial Sequence: Synthetic oligonucleotide
  Sense strand starting at position 3160 of SEQ ID NO: 1885497
cugggaauacaguggguaa

SEQ ID NO: 2346493 - RNA, 19 nt, Artificial Sequence
  Description of Artificial Sequence: Synthetic oligonucleotide
  Antisense strand to SEQ ID NO: 2346492
uuacccacuguauucccag

SEQ ID NO: 2346494 - RNA, 19 nt, Artificial Sequence
  Description of Artificial Sequence: Synthetic oligonucleotide
  Sense strand starting at position 3161 of SEQ ID NO: 1885497
ugggaauacaguggguaaa

SEQ ID NO: 2346495 - RNA, 19 nt, Artificial Sequence
  Description of Artificial Sequence: Synthetic oligonucleotide
  Antisense strand to SEQ ID NO: 2346494
uuuacccacuguauuccca

SEQ ID NO: 2346496 - RNA, 19 nt, Artificial Sequence
  Description of Artificial Sequence: Synthetic oligonucleotide
  Sense strand starting at position 3186 of SEQ ID NO: 1885497
agauauagucccuacguuc

SEQ ID NO: 2346497 - RNA, 19 nt, Artificial Sequence
  Description of Artificial Sequence: Synthetic oligonucleotide
  Antisense strand to SEQ ID NO: 2346496
gaacguagggacuauaucu

SEQ ID NO: 2346498 - RNA, 19 nt, Artificial Sequence
  Description of Artificial Sequence: Synthetic oligonucleotide
  Sense strand starting at position 3206 of SEQ ID NO: 1885497
cagagcuuauggucuagaa

SEQ ID NO: 2346499 - RNA, 19 nt, Artificial Sequence
  Description of Artificial Sequence: Synthetic oligonucleotide
  Antisense strand to SEQ ID NO: 2346498
uucuagaccauaagcucug

SEQ ID NO: 2346500 - RNA, 19 nt, Artificial Sequence
  Description of Artificial Sequence: Synthetic oligonucleotide
  Sense strand starting at position 3210 of SEQ ID NO: 1885497
gcuuauggucuagaaggua

SEQ ID NO: 2346501 - RNA, 19 nt, Artificial Sequence
  Description of Artificial Sequence: Synthetic oligonucleotide
  Antisense strand to SEQ ID NO: 2346500
uaccuucuagaccauaagc

SEQ ID NO: 2346502 - RNA, 19 nt, Artificial Sequence
  Description of Artificial Sequence: Synthetic oligonucleotide
  Sense strand starting at position 3286 of SEQ ID NO: 1885497
gugaaacuaucacaauuug

SEQ ID NO: 2346503 - RNA, 19 nt, Artificial Sequence
  Description of Artificial Sequence: Synthetic oligonucleotide
  Antisense strand to SEQ ID NO: 2346502
caaauugugauaguuucac

SEQ ID NO: 2346504 - RNA, 19 nt, Artificial Sequence
  Description of Artificial Sequence: Synthetic oligonucleotide
  Sense strand starting at position 3495 of SEQ ID NO: 1885497
ggaagauacuugcuguaua

SEQ ID NO: 2346505 - RNA, 19 nt, Artificial Sequence
  Description of Artificial Sequence: Synthetic oligonucleotide
  Antisense strand to SEQ ID NO: 2346504
uauacagcaaguaucuucc

SEQ ID NO: 2346506 - RNA, 19 nt, Artificial Sequence
  Description of Artificial Sequence: Synthetic oligonucleotide
  Sense strand starting at position 3498 of SEQ ID NO: 1885497
agauacuugcuguauagca

SEQ ID NO: 2346507 - RNA, 19 nt, Artificial Sequence
  Description of Artificial Sequence: Synthetic oligonucleotide
  Antisense strand to SEQ ID NO: 2346506
ugcuauacagcaaguaucu

SEQ ID NO: 2346508 - RNA, 19 nt, Artificial Sequence
  Description of Artificial Sequence: Synthetic oligonucleotide
  Sense strand starting at position 3500 of SEQ ID NO: 1885497
auacuugcuguauagcaaa

SEQ ID NO: 2346509 - RNA, 19 nt, Artificial Sequence
  Description of Artificial Sequence: Synthetic oligonucleotide
  Antisense strand to SEQ ID NO: 2346508
uuugcuauacagcaaguau

SEQ ID NO: 2346510 - RNA, 19 nt, Artificial Sequence
  Description of Artificial Sequence: Synthetic oligonucleotide
  Sense strand starting at position 3558 of SEQ ID NO: 1885497
gaguaacuaguacauguaa

SEQ ID NO: 2346511 - RNA, 19 nt, Artificial Sequence
  Description of Artificial Sequence: Synthetic oligonucleotide
  Antisense strand to SEQ ID NO: 2346510
uuacauguacuaguuacuc

SEQ ID NO: 2346512 - RNA, 19 nt, Artificial Sequence
  Description of Artificial Sequence: Synthetic oligonucleotide
  Sense strand starting at position 3755 of SEQ ID NO: 1885497
gugggagagcccuagauua

SEQ ID NO: 2346513 - RNA, 19 nt, Artificial Sequence
  Description of Artificial Sequence: Synthetic oligonucleotide
  Antisense strand to SEQ ID NO: 2346512
uaaucuagggcucucccac

SEQ ID NO: 2346514 - RNA, 19 nt, Artificial Sequence
  Description of Artificial Sequence: Synthetic oligonucleotide
  Sense strand starting at position 261 of SEQ ID NO: 1885498
ucaagaauauguccuaugu

SEQ ID NO: 2346515 - RNA, 19 nt, Artificial Sequence
  Description of Artificial Sequence: Synthetic oligonucleotide
  Antisense strand to SEQ ID NO: 2346514
acauaggacauauucuuga

SEQ ID NO: 2346516 - RNA, 19 nt, Artificial Sequence
  Description of Artificial Sequence: Synthetic oligonucleotide
  Sense strand starting at position 504 of SEQ ID NO: 1885498
cuauaaucuuaggugagau

SEQ ID NO: 2346517 - RNA, 19 nt, Artificial Sequence
  Description of Artificial Sequence: Synthetic oligonucleotide
  Antisense strand to SEQ ID NO: 2346516
aucucaccuaagauuauag

SEQ ID NO: 2346518 - RNA, 19 nt, Artificial Sequence
  Description of Artificial Sequence: Synthetic oligonucleotide
  Sense strand starting at position 535 of SEQ ID NO: 1885498
ugucuuggccugcagaguu

SEQ ID NO: 2346519 - RNA, 19 nt, Artificial Sequence
  Description of Artificial Sequence: Synthetic oligonucleotide
  Antisense strand to SEQ ID NO: 2346518
aacucugcaggccaagaca

SEQ ID NO: 2346520 - RNA, 19 nt, Artificial Sequence
  Description of Artificial Sequence: Synthetic oligonucleotide
  Sense strand starting at position 596 of SEQ ID NO: 1885498
agccuuugaaagugagaaa

SEQ ID NO: 2346521 - RNA, 19 nt, Artificial Sequence
  Description of Artificial Sequence: Synthetic oligonucleotide
  Antisense strand to SEQ ID NO: 2346520
uuucucacuuucaaaggcu

SEQ ID NO: 2346522 - RNA, 19 nt, Artificial Sequence
  Description of Artificial Sequence: Synthetic oligonucleotide
  Sense strand starting at position 599 of SEQ ID NO: 1885498
cuuugaaagugagaaacua

SEQ ID NO: 2346523 - RNA, 19 nt, Artificial Sequence
  Description of Artificial Sequence: Synthetic oligonucleotide
  Antisense strand to SEQ ID NO: 2346522
uaguuucucacuuucaaag

SEQ ID NO: 2346524 - RNA, 19 nt, Artificial Sequence
  Description of Artificial Sequence: Synthetic oligonucleotide
  Sense strand starting at position 607 of SEQ ID NO: 1885498
gugagaaacuaauacuaau

SEQ ID NO: 2346525 - RNA, 19 nt, Artificial Sequence
  Description of Artificial Sequence: Synthetic oligonucleotide
  Antisense strand to SEQ ID NO: 2346524
auuaguauuaguuucucac

SEQ ID NO: 2346526 - RNA, 19 nt, Artificial Sequence
  Description of Artificial Sequence: Synthetic oligonucleotide
  Sense strand starting at position 627 of SEQ ID NO: 1885498
gccagugccaaguauaaug

SEQ ID NO: 2346527 - RNA, 19 nt, Artificial Sequence
  Description of Artificial Sequence: Synthetic oligonucleotide
  Antisense strand to SEQ ID NO: 2346526
cauuauacuuggcacuggc

SEQ ID NO: 2346528 - RNA, 19 nt, Artificial Sequence
  Description of Artificial Sequence: Synthetic oligonucleotide
  Sense strand starting at position 684 of SEQ ID NO: 1885498
ucgagauuugaacgccucu

SEQ ID NO: 2346529 - RNA, 19 nt, Artificial Sequence
  Description of Artificial Sequence: Synthetic oligonucleotide
  Antisense strand to SEQ ID NO: 2346528
agaggcguucaaaucucga

SEQ ID NO: 2346530 - RNA, 19 nt, Artificial Sequence
  Description of Artificial Sequence: Synthetic oligonucleotide
  Sense strand starting at position 702 of SEQ ID NO: 1885498
uggguuuccaaaggugaca

SEQ ID NO: 2346531 - RNA, 19 nt, Artificial Sequence
  Description of Artificial Sequence: Synthetic oligonucleotide
  Antisense strand to SEQ ID NO: 2346530
ugucaccuuuggaaaccca

SEQ ID NO: 2346532 - RNA, 19 nt, Artificial Sequence
  Description of Artificial Sequence: Synthetic oligonucleotide
  Sense strand starting at position 753 of SEQ ID NO: 1885498
ugcuuccuauugcuggaaa

SEQ ID NO: 2346533 - RNA, 19 nt, Artificial Sequence
  Description of Artificial Sequence: Synthetic oligonucleotide
  Antisense strand to SEQ ID NO: 2346532
uuuccagcaauaggaagca

SEQ ID NO: 2346534 - RNA, 19 nt, Artificial Sequence
  Description of Artificial Sequence: Synthetic oligonucleotide
  Sense strand starting at position 982 of SEQ ID NO: 1885498
agccauaaccagugagaac

SEQ ID NO: 2346535 - RNA, 19 nt, Artificial Sequence
  Description of Artificial Sequence: Synthetic oligonucleotide
  Antisense strand to SEQ ID NO: 2346534
guucucacugguuauggcu

SEQ ID NO: 2346536 - RNA, 19 nt, Artificial Sequence
  Description of Artificial Sequence: Synthetic oligonucleotide
  Sense strand starting at position 1002 of SEQ ID NO: 1885498
ggcucaaaugaauguuaca

SEQ ID NO: 2346537 - RNA, 19 nt, Artificial Sequence
  Description of Artificial Sequence: Synthetic oligonucleotide
  Antisense strand to SEQ ID NO: 2346536
uguaacauucauuugagcc

SEQ ID NO: 2346538 - RNA, 19 nt, Artificial Sequence
  Description of Artificial Sequence: Synthetic oligonucleotide
  Sense strand starting at position 1007 of SEQ ID NO: 1885498
aaaugaauguuacauagga

SEQ ID NO: 2346539 - RNA, 19 nt, Artificial Sequence
  Description of Artificial Sequence: Synthetic oligonucleotide
  Antisense strand to SEQ ID NO: 2346538
uccuauguaacauucauuu

SEQ ID NO: 2346540 - RNA, 19 nt, Artificial Sequence
  Description of Artificial Sequence: Synthetic oligonucleotide
  Sense strand starting at position 1020 of SEQ ID NO: 1885498
auaggaaucuggucuguga

SEQ ID NO: 2346541 - RNA, 19 nt, Artificial Sequence
  Description of Artificial Sequence: Synthetic oligonucleotide
  Antisense strand to SEQ ID NO: 2346540
ucacagaccagauuccuau

SEQ ID NO: 2346542 - RNA, 19 nt, Artificial Sequence
  Description of Artificial Sequence: Synthetic oligonucleotide
  Sense strand starting at position 1024 of SEQ ID NO: 1885498
gaaucuggucugugaccga

SEQ ID NO: 2346543 - RNA, 19 nt, Artificial Sequence
  Description of Artificial Sequence: Synthetic oligonucleotide
  Antisense strand to SEQ ID NO: 2346542
ucggucacagaccagauuc

SEQ ID NO: 2346544 - RNA, 19 nt, Artificial Sequence
  Description of Artificial Sequence: Synthetic oligonucleotide
  Sense strand starting at position 1155 of SEQ ID NO: 1885498
ggagacauaaauuguaugu

SEQ ID NO: 2346545 - RNA, 19 nt, Artificial Sequence
  Description of Artificial Sequence: Synthetic oligonucleotide
  Antisense strand to SEQ ID NO: 2346544
acauacaauuuaugucucc

SEQ ID NO: 2346546 - RNA, 19 nt, Artificial Sequence
  Description of Artificial Sequence: Synthetic oligonucleotide
  Sense strand starting at position 1347 of SEQ ID NO: 1885498
cuggcaugugucuaguuua

SEQ ID NO: 2346547 - RNA, 19 nt, Artificial Sequence
  Description of Artificial Sequence: Synthetic oligonucleotide
  Antisense strand to SEQ ID NO: 2346546
uaaacuagacacaugccag

SEQ ID NO: 2346548 - RNA, 19 nt, Artificial Sequence
  Description of Artificial Sequence: Synthetic oligonucleotide
  Sense strand starting at position 1370 of SEQ ID NO: 1885498
guaucacuuggucagguga

SEQ ID NO: 2346549 - RNA, 19 nt, Artificial Sequence
  Description of Artificial Sequence: Synthetic oligonucleotide
  Antisense strand to SEQ ID NO: 2346548
ucaccugaccaagugauac

SEQ ID NO: 2346550 - RNA, 19 nt, Artificial Sequence
  Description of Artificial Sequence: Synthetic oligonucleotide
  Sense strand starting at position 1433 of SEQ ID NO: 1885498
caaagcugucgccauuauu

SEQ ID NO: 2346551 - RNA, 19 nt, Artificial Sequence
  Description of Artificial Sequence: Synthetic oligonucleotide
  Antisense strand to SEQ ID NO: 2346550
aauaauggcgacagcuuug

SEQ ID NO: 2346552 - RNA, 19 nt, Artificial Sequence
  Description of Artificial Sequence: Synthetic oligonucleotide
  Sense strand starting at position 1563 of SEQ ID NO: 1885498
gauaaaugcuuaccgagag

SEQ ID NO: 2346553 - RNA, 19 nt, Artificial Sequence
  Description of Artificial Sequence: Synthetic oligonucleotide
  Antisense strand to SEQ ID NO: 2346552
cucucgguaagcauuuauc

SEQ ID NO: 2346554 - RNA, 19 nt, Artificial Sequence
  Description of Artificial Sequence: Synthetic oligonucleotide
  Sense strand starting at position 3245 of SEQ ID NO: 1885498
uugggcucuccggagaacu

SEQ ID NO: 2346555 - RNA, 19 nt, Artificial Sequence
  Description of Artificial Sequence: Synthetic oligonucleotide
  Antisense strand to SEQ ID NO: 2346554
aguucuccggagagcccaa

SEQ ID NO: 2346556 - RNA, 19 nt, Artificial Sequence
  Description of Artificial Sequence: Synthetic oligonucleotide
  Sense strand starting at position 3247 of SEQ ID NO: 1885498
gggcucuccggagaacuuu

SEQ ID NO: 2346557 - RNA, 19 nt, Artificial Sequence
  Description of Artificial Sequence: Synthetic oligonucleotide
  Antisense strand to SEQ ID NO: 2346556
aaaguucuccggagagccc

SEQ ID NO: 2346558 - RNA, 19 nt, Artificial Sequence
  Description of Artificial Sequence: Synthetic oligonucleotide
  Sense strand starting at position 3256 of SEQ ID NO: 1885498
ggagaacuuucugaaacuc

SEQ ID NO: 2346559 - RNA, 19 nt, Artificial Sequence
  Description of Artificial Sequence: Synthetic oligonucleotide
  Antisense strand to SEQ ID NO: 2346558
gaguuucagaaaguucucc

SEQ ID NO: 2346560 - RNA, 19 nt, Artificial Sequence
  Description of Artificial Sequence: Synthetic oligonucleotide
  Sense strand starting at position 3441 of SEQ ID NO: 1885498
agcacaaugcaguguucua

SEQ ID NO: 2346561 - RNA, 19 nt, Artificial Sequence
  Description of Artificial Sequence: Synthetic oligonucleotide
  Antisense strand to SEQ ID NO: 2346560
uagaacacugcauugugcu

SEQ ID NO: 2346562 - RNA, 19 nt, Artificial Sequence
  Description of Artificial Sequence: Synthetic oligonucleotide
  Sense strand starting at position 3531 of SEQ ID NO: 1885498
ggaggaugucguuguauag

SEQ ID NO: 2346563 - RNA, 19 nt, Artificial Sequence
  Description of Artificial Sequence: Synthetic oligonucleotide
  Antisense strand to SEQ ID NO: 2346562
cuauacaacgacauccucc

SEQ ID NO: 2346564 - RNA, 19 nt, Artificial Sequence
  Description of Artificial Sequence: Synthetic oligonucleotide
  Sense strand starting at position 3534 of SEQ ID NO: 1885498
ggaugucguuguauagcga

SEQ ID NO: 2346565 - RNA, 19 nt, Artificial Sequence
  Description of Artificial Sequence: Synthetic oligonucleotide
  Antisense strand to SEQ ID NO: 2346564
ucgcuauacaacgacaucc

SEQ ID NO: 2346566 - RNA, 19 nt, Artificial Sequence
  Description of Artificial Sequence: Synthetic oligonucleotide
  Sense strand starting at position 3540 of SEQ ID NO: 1885498
cguuguauagcgagagguu

SEQ ID NO: 2346567 - RNA, 19 nt, Artificial Sequence
  Description of Artificial Sequence: Synthetic oligonucleotide
  Antisense strand to SEQ ID NO: 2346566
aaccucucgcuauacaacg

SEQ ID NO: 2346568 - RNA, 19 nt, Artificial Sequence
  Description of Artificial Sequence: Synthetic oligonucleotide
  Sense strand starting at position 3541 of SEQ ID NO: 1885498
guuguauagcgagagguug

SEQ ID NO: 2346569 - RNA, 19 nt, Artificial Sequence
  Description of Artificial Sequence: Synthetic oligonucleotide
  Antisense strand to SEQ ID NO: 2346568
caaccucucgcuauacaac

SEQ ID NO: 2346570 - RNA, 19 nt, Artificial Sequence
  Description of Artificial Sequence: Synthetic oligonucleotide
  Sense strand starting at position 3638 of SEQ ID NO: 1885498
uuagucugcguuuacaaua

SEQ ID NO: 2346571 - RNA, 19 nt, Artificial Sequence
  Description of Artificial Sequence: Synthetic oligonucleotide
  Antisense strand to SEQ ID NO: 2346570
uauuguaaacgcagacuaa

SEQ ID NO: 2346572 - RNA, 19 nt, Artificial Sequence
  Description of Artificial Sequence: Synthetic oligonucleotide
  Sense strand starting at position 3672 of SEQ ID NO: 1885498
aaaucagacugucuggauu

SEQ ID NO: 2346573 - RNA, 19 nt, Artificial Sequence
  Description of Artificial Sequence: Synthetic oligonucleotide
  Antisense strand to SEQ ID NO: 2346572
aauccagacagucugauuu

SEQ ID NO: 2346574 - RNA, 19 nt, Artificial Sequence
  Description of Artificial Sequence: Synthetic oligonucleotide
  Sense strand starting at position 3686 of SEQ ID NO: 1885498
ggauuuguaucccaguuuc

SEQ ID NO: 2346575 - RNA, 19 nt, Artificial Sequence
  Description of Artificial Sequence: Synthetic oligonucleotide
  Antisense strand to SEQ ID NO: 2346574
gaaacugggauacaaaucc

SEQ ID NO: 2346576 - RNA, 19 nt, Artificial Sequence
  Description of Artificial Sequence: Synthetic oligonucleotide
  Sense strand starting at position 3785 of SEQ ID NO: 1885498
gaaccugcuguugaagaau

SEQ ID NO: 2346577 - RNA, 19 nt, Artificial Sequence
  Description of Artificial Sequence: Synthetic oligonucleotide
  Antisense strand to SEQ ID NO: 2346576
auucuucaacagcagguuc

SEQ ID NO: 2346578 - RNA, 19 nt, Artificial Sequence
  Description of Artificial Sequence: Synthetic oligonucleotide
  Sense strand starting at position 3788 of SEQ ID NO: 1885498
ccugcuguugaagaauuau

SEQ ID NO: 2346579 - RNA, 19 nt, Artificial Sequence
  Description of Artificial Sequence: Synthetic oligonucleotide
  Antisense strand to SEQ ID NO: 2346578
auaauucuucaacagcagg

SEQ ID NO: 2346580 - RNA, 19 nt, Artificial Sequence
  Description of Artificial Sequence: Synthetic oligonucleotide
  Sense strand starting at position 3879 of SEQ ID NO: 1885498
ggugauaugaguuguagcu

SEQ ID NO: 2346581 - RNA, 19 nt, Artificial Sequence
  Description of Artificial Sequence: Synthetic oligonucleotide
  Antisense strand to SEQ ID NO: 2346580
agcuacaacucauaucacc

SEQ ID NO: 2346582 - RNA, 19 nt, Artificial Sequence
  Description of Artificial Sequence: Synthetic oligonucleotide
  Sense strand starting at position 3919 of SEQ ID NO: 1885498
gucuucccucuugaaguau

SEQ ID NO: 2346583 - RNA, 19 nt, Artificial Sequence
  Description of Artificial Sequence: Synthetic oligonucleotide
  Antisense strand to SEQ ID NO: 2346582
auacuucaagagggaagac

SEQ ID NO: 2346584 - RNA, 19 nt, Artificial Sequence
  Description of Artificial Sequence: Synthetic oligonucleotide
  Sense strand starting at position 3930 of SEQ ID NO: 1885498
ugaaguaucauguauuggu

SEQ ID NO: 2346585 - RNA, 19 nt, Artificial Sequence
  Description of Artificial Sequence: Synthetic oligonucleotide
  Antisense strand to SEQ ID NO: 2346584
accaauacaugauacuuca

SEQ ID NO: 2346586 - RNA, 19 nt, Artificial Sequence
  Description of Artificial Sequence: Synthetic oligonucleotide
  Sense strand starting at position 3934 of SEQ ID NO: 1885498
guaucauguauuggucauc

SEQ ID NO: 2346587 - RNA, 19 nt, Artificial Sequence
  Description of Artificial Sequence: Synthetic oligonucleotide
  Antisense strand to SEQ ID NO: 2346586
gaugaccaauacaugauac

SEQ ID NO: 2346588 - RNA, 19 nt, Artificial Sequence
  Description of Artificial Sequence: Synthetic oligonucleotide
  Sense strand starting at position 3937 of SEQ ID NO: 1885498
ucauguauuggucaucucu

SEQ ID NO: 2346589 - RNA, 19 nt, Artificial Sequence
  Description of Artificial Sequence: Synthetic oligonucleotide
  Antisense strand to SEQ ID NO: 2346588
agagaugaccaauacauga

SEQ ID NO: 2346590 - RNA, 19 nt, Artificial Sequence
  Description of Artificial Sequence: Synthetic oligonucleotide
  Sense strand starting at position 3946 of SEQ ID NO: 1885498
ggucaucucugcuuggaac

SEQ ID NO: 2346591 - RNA, 19 nt, Artificial Sequence
  Description of Artificial Sequence: Synthetic oligonucleotide
  Antisense strand to SEQ ID NO: 2346590
guuccaagcagagaugacc

SEQ ID NO: 2346592 - RNA, 19 nt, Artificial Sequence
  Description of Artificial Sequence: Synthetic oligonucleotide
  Sense strand starting at position 3947 of SEQ ID NO: 1885498
gucaucucugcuuggaaca

SEQ ID NO: 2346593 - RNA, 19 nt, Artificial Sequence
  Description of Artificial Sequence: Synthetic oligonucleotide
  Antisense strand to SEQ ID NO: 2346592
uguuccaagcagagaugac

SEQ ID NO: 2346594 - RNA, 19 nt, Artificial Sequence
  Description of Artificial Sequence: Synthetic oligonucleotide
  Sense strand starting at position 215 of SEQ ID NO: 1885499
gagccucugccugagaagu

SEQ ID NO: 2346595 - RNA, 19 nt, Artificial Sequence
  Description of Artificial Sequence: Synthetic oligonucleotide
  Antisense strand to SEQ ID NO: 2346594
acuucucaggcagaggcuc

SEQ ID NO: 2346596 - RNA, 19 nt, Artificial Sequence
  Description of Artificial Sequence: Synthetic oligonucleotide
  Sense strand starting at position 223 of SEQ ID NO: 1885499
gccugagaaguccaccaca

SEQ ID NO: 2346597 - RNA, 19 nt, Artificial Sequence
  Description of Artificial Sequence: Synthetic oligonucleotide
  Antisense strand to SEQ ID NO: 2346596
ugugguggacuucucaggc

SEQ ID NO: 2346598 - RNA, 19 nt, Artificial Sequence
  Description of Artificial Sequence: Synthetic oligonucleotide
  Sense strand starting at position 338 of SEQ ID NO: 1885499
uggugugcacuugaucaca

SEQ ID NO: 2346599 - RNA, 19 nt, Artificial Sequence
  Description of Artificial Sequence: Synthetic oligonucleotide
  Antisense strand to SEQ ID NO: 2346598
ugugaucaagugcacacca

SEQ ID NO: 2346600 - RNA, 19 nt, Artificial Sequence
  Description of Artificial Sequence: Synthetic oligonucleotide
  Sense strand starting at position 389 of SEQ ID NO: 1885499
cacagugagcccugucuau

SEQ ID NO: 2346601 - RNA, 19 nt, Artificial Sequence
  Description of Artificial Sequence: Synthetic oligonucleotide
  Antisense strand to SEQ ID NO: 2346600
auagacagggcucacugug

SEQ ID NO: 2346602 - RNA, 19 nt, Artificial Sequence
  Description of Artificial Sequence: Synthetic oligonucleotide
  Sense strand starting at position 398 of SEQ ID NO: 1885499
cccugucuaugucuacuaa

SEQ ID NO: 2346603 - RNA, 19 nt, Artificial Sequence
  Description of Artificial Sequence: Synthetic oligonucleotide
  Antisense strand to SEQ ID NO: 2346602
uuaguagacauagacaggg

SEQ ID NO: 2346604 - RNA, 19 nt, Artificial Sequence
  Description of Artificial Sequence: Synthetic oligonucleotide
  Sense strand starting at position 399 of SEQ ID NO: 1885499
ccugucuaugucuacuaaa

SEQ ID NO: 2346605 - RNA, 19 nt, Artificial Sequence
  Description of Artificial Sequence: Synthetic oligonucleotide
  Antisense strand to SEQ ID NO: 2346604
uuuaguagacauagacagg

SEQ ID NO: 2346606 - RNA, 19 nt, Artificial Sequence
  Description of Artificial Sequence: Synthetic oligonucleotide
  Sense strand starting at position 445 of SEQ ID NO: 1885499
auacaauauucugaaggga

SEQ ID NO: 2346607 - RNA, 19 nt, Artificial Sequence
  Description of Artificial Sequence: Synthetic oligonucleotide
  Antisense strand to SEQ ID NO: 2346606
ucccuucagaauauuguau

SEQ ID NO: 2346608 - RNA, 19 nt, Artificial Sequence
  Description of Artificial Sequence: Synthetic oligonucleotide
  Sense strand starting at position 558 of SEQ ID NO: 1885499
aggcauucuuuccucaaga

SEQ ID NO: 2346609 - RNA, 19 nt, Artificial Sequence
  Description of Artificial Sequence: Synthetic oligonucleotide
  Antisense strand to SEQ ID NO: 2346608
ucuugaggaaagaaugccu

SEQ ID NO: 2346610 - RNA, 19 nt, Artificial Sequence
  Description of Artificial Sequence: Synthetic oligonucleotide
  Sense strand starting at position 559 of SEQ ID NO: 1885499
ggcauucuuuccucaagaa

SEQ ID NO: 2346611 - RNA, 19 nt, Artificial Sequence
  Description of Artificial Sequence: Synthetic oligonucleotide
  Antisense strand to SEQ ID NO: 2346610
uucuugaggaaagaaugcc

SEQ ID NO: 2346612 - RNA, 19 nt, Artificial Sequence
  Description of Artificial Sequence: Synthetic oligonucleotide
  Sense strand starting at position 630 of SEQ ID NO: 1885499
cucauaucaugugucaacu

SEQ ID NO: 2346613 - RNA, 19 nt, Artificial Sequence
  Description of Artificial Sequence: Synthetic oligonucleotide
  Antisense strand to SEQ ID NO: 2346612
aguugacacaugauaugag

SEQ ID NO: 2346614 - RNA, 19 nt, Artificial Sequence
  Description of Artificial Sequence: Synthetic oligonucleotide
  Sense strand starting at position 639 of SEQ ID NO: 1885499
ugugucaacugccuuacua

SEQ ID NO: 2346615 - RNA, 19 nt, Artificial Sequence
  Description of Artificial Sequence: Synthetic oligonucleotide
  Antisense strand to SEQ ID NO: 2346614
uaguaaggcaguugacaca

SEQ ID NO: 2346616 - RNA, 19 nt, Artificial Sequence
  Description of Artificial Sequence: Synthetic oligonucleotide
  Sense strand starting at position 764 of SEQ ID NO: 1885499
uguguagucacagagacag

SEQ ID NO: 2346617 - RNA, 19 nt, Artificial Sequence
  Description of Artificial Sequence: Synthetic oligonucleotide
  Antisense strand to SEQ ID NO: 2346616
cugucucugugacuacaca

SEQ ID NO: 2346618 - RNA, 19 nt, Artificial Sequence
  Description of Artificial Sequence: Synthetic oligonucleotide
  Sense strand starting at position 776 of SEQ ID NO: 1885499
gagacaggcucccuugaau

SEQ ID NO: 2346619 - RNA, 19 nt, Artificial Sequence
  Description of Artificial Sequence: Synthetic oligonucleotide
  Antisense strand to SEQ ID NO: 2346618
auucaagggagccugucuc

SEQ ID NO: 2346620 - RNA, 19 nt, Artificial Sequence
  Description of Artificial Sequence: Synthetic oligonucleotide
  Sense strand starting at position 828 of SEQ ID NO: 1885499
gacccucccuagguaagaa

SEQ ID NO: 2346621 - RNA, 19 nt, Artificial Sequence
  Description of Artificial Sequence: Synthetic oligonucleotide
  Antisense strand to SEQ ID NO: 2346620
uucuuaccuagggaggguc

SEQ ID NO: 2346622 - RNA, 19 nt, Artificial Sequence
  Description of Artificial Sequence: Synthetic oligonucleotide
  Sense strand starting at position 848 of SEQ ID NO: 1885499
cacucuuacuggguaugga

SEQ ID NO: 2346623 - RNA, 19 nt, Artificial Sequence
  Description of Artificial Sequence: Synthetic oligonucleotide
  Antisense strand to SEQ ID NO: 2346622
uccauacccaguaagagug

SEQ ID NO: 2346624 - RNA, 19 nt, Artificial Sequence
  Description of Artificial Sequence: Synthetic oligonucleotide
  Sense strand starting at position 916 of SEQ ID NO: 1885499
aacagcuguccugagcgaa

SEQ ID NO: 2346625 - RNA, 19 nt, Artificial Sequence
  Description of Artificial Sequence: Synthetic oligonucleotide
  Antisense strand to SEQ ID NO: 2346624
uucgcucaggacagcuguu

SEQ ID NO: 2346626 - RNA, 19 nt, Artificial Sequence
  Description of Artificial Sequence: Synthetic oligonucleotide
  Sense strand starting at position 975 of SEQ ID NO: 1885499
ggaucaaggcacuguggua

SEQ ID NO: 2346627 - RNA, 19 nt, Artificial Sequence
  Description of Artificial Sequence: Synthetic oligonucleotide
  Antisense strand to SEQ ID NO: 2346626
uaccacagugccuugaucc

SEQ ID NO: 2346628 - RNA, 19 nt, Artificial Sequence
  Description of Artificial Sequence: Synthetic oligonucleotide
  Sense strand starting at position 1020 of SEQ ID NO: 1885499
guaaguuaccugcggagga

SEQ ID NO: 2346629 - RNA, 19 nt, Artificial Sequence
  Description of Artificial Sequence: Synthetic oligonucleotide
  Antisense strand to SEQ ID NO: 2346628
uccuccgcagguaacuuac

SEQ ID NO: 2346630 - RNA, 19 nt, Artificial Sequence
  Description of Artificial Sequence: Synthetic oligonucleotide
  Sense strand starting at position 2229 of SEQ ID NO: 1885499
guucgcuaccgagagguau

SEQ ID NO: 2346631 - RNA, 19 nt, Artificial Sequence
  Description of Artificial Sequence: Synthetic oligonucleotide
  Antisense strand to SEQ ID NO: 2346630
auaccucucgguagcgaac

SEQ ID NO: 2346632 - RNA, 19 nt, Artificial Sequence
  Description of Artificial Sequence: Synthetic oligonucleotide
  Sense strand starting at position 2231 of SEQ ID NO: 1885499
ucgcuaccgagagguauuu

SEQ ID NO: 2346633 - RNA, 19 nt, Artificial Sequence
  Description of Artificial Sequence: Synthetic oligonucleotide
  Antisense strand to SEQ ID NO: 2346632
aaauaccucucgguagcga

SEQ ID NO: 2346634 - RNA, 19 nt, Artificial Sequence
  Description of Artificial Sequence: Synthetic oligonucleotide
  Sense strand starting at position 2265 of SEQ ID NO: 1885499
uuuacugucugucccuaaa

SEQ ID NO: 2346635 - RNA, 19 nt, Artificial Sequence
  Description of Artificial Sequence: Synthetic oligonucleotide
  Antisense strand to SEQ ID NO: 2346634
uuuagggacagacaguaaa

SEQ ID NO: 2346636 - RNA, 19 nt, Artificial Sequence
  Description of Artificial Sequence: Synthetic oligonucleotide
  Sense strand starting at position 2268 of SEQ ID NO: 1885499
acugucugucccuaaagau

SEQ ID NO: 2346637 - RNA, 19 nt, Artificial Sequence
  Description of Artificial Sequence: Synthetic oligonucleotide
  Antisense strand to SEQ ID NO: 2346636
aucuuuagggacagacagu

SEQ ID NO: 2346638 - RNA, 19 nt, Artificial Sequence
  Description of Artificial Sequence: Synthetic oligonucleotide
  Sense strand starting at position 2499 of SEQ ID NO: 1885499
cuuuauccggucugacaau

SEQ ID NO: 2346639 - RNA, 19 nt, Artificial Sequence
  Description of Artificial Sequence: Synthetic oligonucleotide
  Antisense strand to SEQ ID NO: 2346638
auugucagaccggauaaag

SEQ ID NO: 2346640 - RNA, 19 nt, Artificial Sequence
  Description of Artificial Sequence: Synthetic oligonucleotide
  Sense strand starting at position 2555 of SEQ ID NO: 1885499
gcagacguucccuaauaca

SEQ ID NO: 2346641 - RNA, 19 nt, Artificial Sequence
  Description of Artificial Sequence: Synthetic oligonucleotide
  Antisense strand to SEQ ID NO: 2346640
uguauuagggaacgucugc

SEQ ID NO: 2346642 - RNA, 19 nt, Artificial Sequence
  Description of Artificial Sequence: Synthetic oligonucleotide
  Sense strand starting at position 2745 of SEQ ID NO: 1885499
gcggguuuaugaguaacaa

SEQ ID NO: 2346643 - RNA, 19 nt, Artificial Sequence
  Description of Artificial Sequence: Synthetic oligonucleotide
  Antisense strand to SEQ ID NO: 2346642
uuguuacucauaaacccgc

SEQ ID NO: 2346644 - RNA, 19 nt, Artificial Sequence
  Description of Artificial Sequence: Synthetic oligonucleotide
  Sense strand starting at position 2746 of SEQ ID NO: 1885499
cggguuuaugaguaacaag

SEQ ID NO: 2346645 - RNA, 19 nt, Artificial Sequence
  Description of Artificial Sequence: Synthetic oligonucleotide
  Antisense strand to SEQ ID NO: 2346644
cuuguuacucauaaacccg

SEQ ID NO: 2346646 - RNA, 19 nt, Artificial Sequence
  Description of Artificial Sequence: Synthetic oligonucleotide
  Sense strand starting at position 2820 of SEQ ID NO: 1885499
ggacguguggguugaauga

SEQ ID NO: 2346647 - RNA, 19 nt, Artificial Sequence
  Description of Artificial Sequence: Synthetic oligonucleotide
  Antisense strand to SEQ ID NO: 2346646
ucauucaacccacacgucc

SEQ ID NO: 2346648 - RNA, 19 nt, Artificial Sequence
  Description of Artificial Sequence: Synthetic oligonucleotide
  Sense strand starting at position 2894 of SEQ ID NO: 1885499
gccugcacuuccuugggaa

SEQ ID NO: 2346649 - RNA, 19 nt, Artificial Sequence
  Description of Artificial Sequence: Synthetic oligonucleotide
  Antisense strand to SEQ ID NO: 2346648
uucccaaggaagugcaggc

SEQ ID NO: 2346650 - RNA, 19 nt, Artificial Sequence
  Description of Artificial Sequence: Synthetic oligonucleotide
  Sense strand starting at position 2895 of SEQ ID NO: 1885499
ccugcacuuccuugggaaa

SEQ ID NO: 2346651 - RNA, 19 nt, Artificial Sequence
  Description of Artificial Sequence: Synthetic oligonucleotide
  Antisense strand to SEQ ID NO: 2346650
uuucccaaggaagugcagg

SEQ ID NO: 2346652 - RNA, 19 nt, Artificial Sequence
  Description of Artificial Sequence: Synthetic oligonucleotide
  Sense strand starting at position 3111 of SEQ ID NO: 1885499
ccugaauguuugguuuaau

SEQ ID NO: 2346653 - RNA, 19 nt, Artificial Sequence
  Description of Artificial Sequence: Synthetic oligonucleotide
  Antisense strand to SEQ ID NO: 2346652
auuaaaccaaacauucagg

SEQ ID NO: 2346654 - RNA, 19 nt, Artificial Sequence
  Description of Artificial Sequence: Synthetic oligonucleotide
  Sense strand starting at position 3112 of SEQ ID NO: 1885499
cugaauguuugguuuaaug

SEQ ID NO: 2346655 - RNA, 19 nt, Artificial Sequence
  Description of Artificial Sequence: Synthetic oligonucleotide
  Antisense strand to SEQ ID NO: 2346654
cauuaaaccaaacauucag

SEQ ID NO: 2346656 - RNA, 19 nt, Artificial Sequence
  Description of Artificial Sequence: Synthetic oligonucleotide
  Sense strand starting at position 3114 of SEQ ID NO: 1885499
gaauguuugguuuaauguu

SEQ ID NO: 2346657 - RNA, 19 nt, Artificial Sequence
  Description of Artificial Sequence: Synthetic oligonucleotide
  Antisense strand to SEQ ID NO: 2346656
aacauuaaaccaaacauuc

SEQ ID NO: 2346658 - RNA, 19 nt, Artificial Sequence
  Description of Artificial Sequence: Synthetic oligonucleotide
  Sense strand starting at position 3138 of SEQ ID NO: 1885499
guuaacggucuugaaauua

SEQ ID NO: 2346659 - RNA, 19 nt, Artificial Sequence
  Description of Artificial Sequence: Synthetic oligonucleotide
  Antisense strand to SEQ ID NO: 2346658
uaauuucaagaccguuaac

SEQ ID NO: 2346660 - RNA, 19 nt, Artificial Sequence
  Description of Artificial Sequence: Synthetic oligonucleotide
  Sense strand starting at position 3143 of SEQ ID NO: 1885499
cggucuugaaauuauuagu

SEQ ID NO: 2346661 - RNA, 19 nt, Artificial Sequence
  Description of Artificial Sequence: Synthetic oligonucleotide
  Antisense strand to SEQ ID NO: 2346660
acuaauaauuucaagaccg

SEQ ID NO: 2346662 - RNA, 19 nt, Artificial Sequence
  Description of Artificial Sequence: Synthetic oligonucleotide
  Sense strand starting at position 3168 of SEQ ID NO: 1885499
aaagcaagugccugguauu

SEQ ID NO: 2346663 - RNA, 19 nt, Artificial Sequence
  Description of Artificial Sequence: Synthetic oligonucleotide
  Antisense strand to SEQ ID NO: 2346662
aauaccaggcacuugcuuu

SEQ ID NO: 2346664 - RNA, 19 nt, Artificial Sequence
  Description of Artificial Sequence: Synthetic oligonucleotide
  Sense strand starting at position 3169 of SEQ ID NO: 1885499
aagcaagugccugguauuu

SEQ ID NO: 2346665 - RNA, 19 nt, Artificial Sequence
  Description of Artificial Sequence: Synthetic oligonucleotide
  Antisense strand to SEQ ID NO: 2346664
aaauaccaggcacuugcuu

SEQ ID NO: 2346666 - RNA, 19 nt, Artificial Sequence
  Description of Artificial Sequence: Synthetic oligonucleotide
  Sense strand starting at position 3200 of SEQ ID NO: 1885499
cggcuccacugauuaugua

SEQ ID NO: 2346667 - RNA, 19 nt, Artificial Sequence
  Description of Artificial Sequence: Synthetic oligonucleotide
  Antisense strand to SEQ ID NO: 2346666
uacauaaucaguggagccg

SEQ ID NO: 2346668 - RNA, 19 nt, Artificial Sequence
  Description of Artificial Sequence: Synthetic oligonucleotide
  Sense strand starting at position 3256 of SEQ ID NO: 1885499
acuuacuaucugugcuuua

SEQ ID NO: 2346669 - RNA, 19 nt, Artificial Sequence
  Description of Artificial Sequence: Synthetic oligonucleotide
  Antisense strand to SEQ ID NO: 2346668
uaaagcacagauaguaagu

SEQ ID NO: 2346670 - RNA, 19 nt, Artificial Sequence
  Description of Artificial Sequence: Synthetic oligonucleotide
  Sense strand starting at position 3360 of SEQ ID NO: 1885499
ugcguucucccagaaugug

SEQ ID NO: 2346671 - RNA, 19 nt, Artificial Sequence
  Description of Artificial Sequence: Synthetic oligonucleotide
  Antisense strand to SEQ ID NO: 2346670
cacauucugggagaacgca

SEQ ID NO: 2346672 - RNA, 19 nt, Artificial Sequence
  Description of Artificial Sequence: Synthetic oligonucleotide
  Sense strand starting at position 3369 of SEQ ID NO: 1885499
ccagaaugugacggaauca

SEQ ID NO: 2346673 - RNA, 19 nt, Artificial Sequence
  Description of Artificial Sequence: Synthetic oligonucleotide
  Antisense strand to SEQ ID NO: 2346672
ugauuccgucacauucugg

SEQ ID NO: 2346674 - RNA, 19 nt, Artificial Sequence
  Description of Artificial Sequence: Synthetic oligonucleotide
  Sense strand starting at position 32 of SEQ ID NO: 1885500
ggagaaguuucauccuagg

SEQ ID NO: 2346675 - RNA, 19 nt, Artificial Sequence
  Description of Artificial Sequence: Synthetic oligonucleotide
  Antisense strand to SEQ ID NO: 2346674
ccuaggaugaaacuucucc

SEQ ID NO: 2346676 - RNA, 19 nt, Artificial Sequence
  Description of Artificial Sequence: Synthetic oligonucleotide
  Sense strand starting at position 425 of SEQ ID NO: 1885500
cagagucaauggcuaucua

SEQ ID NO: 2346677 - RNA, 19 nt, Artificial Sequence
  Description of Artificial Sequence: Synthetic oligonucleotide
  Antisense strand to SEQ ID NO: 2346676
uagauagccauugacucug

SEQ ID NO: 2346678 - RNA, 19 nt, Artificial Sequence
  Description of Artificial Sequence: Synthetic oligonucleotide
  Sense strand starting at position 472 of SEQ ID NO: 1885500
agguuugaggcugacuaga

SEQ ID NO: 2346679 - RNA, 19 nt, Artificial Sequence
  Description of Artificial Sequence: Synthetic oligonucleotide
  Antisense strand to SEQ ID NO: 2346678
ucuagucagccucaaaccu

SEQ ID NO: 2346680 - RNA, 19 nt, Artificial Sequence
  Description of Artificial Sequence: Synthetic oligonucleotide
  Sense strand starting at position 485 of SEQ ID NO: 1885500
acuagaccuuggcuguuau

SEQ ID NO: 2346681 - RNA, 19 nt, Artificial Sequence
  Description of Artificial Sequence: Synthetic oligonucleotide
  Antisense strand to SEQ ID NO: 2346680
auaacagccaaggucuagu

SEQ ID NO: 2346682 - RNA, 19 nt, Artificial Sequence
  Description of Artificial Sequence: Synthetic oligonucleotide
  Sense strand starting at position 486 of SEQ ID NO: 1885500
cuagaccuuggcuguuauu

SEQ ID NO: 2346683 - RNA, 19 nt, Artificial Sequence
  Description of Artificial Sequence: Synthetic oligonucleotide
  Antisense strand to SEQ ID NO: 2346682
aauaacagccaaggucuag

SEQ ID NO: 2346684 - RNA, 19 nt, Artificial Sequence
  Description of Artificial Sequence: Synthetic oligonucleotide
  Sense strand starting at position 721 of SEQ ID NO: 1885500
gagccucugccugagaagu

SEQ ID NO: 2346685 - RNA, 19 nt, Artificial Sequence
  Description of Artificial Sequence: Synthetic oligonucleotide
  Antisense strand to SEQ ID NO: 2346684
acuucucaggcagaggcuc

SEQ ID NO: 2346686 - RNA, 19 nt, Artificial Sequence
  Description of Artificial Sequence: Synthetic oligonucleotide
  Sense strand starting at position 729 of SEQ ID NO: 1885500
gccugagaaguccaccaca

SEQ ID NO: 2346687 - RNA, 19 nt, Artificial Sequence
  Description of Artificial Sequence: Synthetic oligonucleotide
  Antisense strand to SEQ ID NO: 2346686
ugugguggacuucucaggc

SEQ ID NO: 2346688 - RNA, 19 nt, Artificial Sequence
  Description of Artificial Sequence: Synthetic oligonucleotide
  Sense strand starting at position 844 of SEQ ID NO: 1885500
uggugugcacuugaucaca

SEQ ID NO: 2346689 - RNA, 19 nt, Artificial Sequence
  Description of Artificial Sequence: Synthetic oligonucleotide
  Antisense strand to SEQ ID NO: 2346688
ugugaucaagugcacacca

SEQ ID NO: 2346690 - RNA, 19 nt, Artificial Sequence
  Description of Artificial Sequence: Synthetic oligonucleotide
  Sense strand starting at position 904 of SEQ ID NO: 1885500
cccugucuaugucuacuaa

SEQ ID NO: 2346691 - RNA, 19 nt, Artificial Sequence
  Description of Artificial Sequence: Synthetic oligonucleotide
  Antisense strand to SEQ ID NO: 2346690
uuaguagacauagacaggg

SEQ ID NO: 2346692 - RNA, 19 nt, Artificial Sequence
  Description of Artificial Sequence: Synthetic oligonucleotide
  Sense strand starting at position 905 of SEQ ID NO: 1885500
ccugucuaugucuacuaaa

SEQ ID NO: 2346693 - RNA, 19 nt, Artificial Sequence
  Description of Artificial Sequence: Synthetic oligonucleotide
  Antisense strand to SEQ ID NO: 2346692
uuuaguagacauagacagg

SEQ ID NO: 2346694 - RNA, 19 nt, Artificial Sequence
  Description of Artificial Sequence: Synthetic oligonucleotide
  Sense strand starting at position 951 of SEQ ID NO: 1885500
auacaauauucugaaggga

SEQ ID NO: 2346695 - RNA, 19 nt, Artificial Sequence
  Description of Artificial Sequence: Synthetic oligonucleotide
  Antisense strand to SEQ ID NO: 2346694
ucccuucagaauauuguau

SEQ ID NO: 2346696 - RNA, 19 nt, Artificial Sequence
  Description of Artificial Sequence: Synthetic oligonucleotide
  Sense strand starting at position 1064 of SEQ ID NO: 1885500
aggcauucuuuccucaaga

SEQ ID NO: 2346697 - RNA, 19 nt, Artificial Sequence
  Description of Artificial Sequence: Synthetic oligonucleotide
  Antisense strand to SEQ ID NO: 2346696
ucuugaggaaagaaugccu

SEQ ID NO: 2346698 - RNA, 19 nt, Artificial Sequence
  Description of Artificial Sequence: Synthetic oligonucleotide
  Sense strand starting at position 1065 of SEQ ID NO: 1885500
ggcauucuuuccucaagaa

SEQ ID NO: 2346699 - RNA, 19 nt, Artificial Sequence
  Description of Artificial Sequence: Synthetic oligonucleotide
  Antisense strand to SEQ ID NO: 2346698
uucuugaggaaagaaugcc

SEQ ID NO: 2346700 - RNA, 19 nt, Artificial Sequence
  Description of Artificial Sequence: Synthetic oligonucleotide
  Sense strand starting at position 1136 of SEQ ID NO: 1885500
cucauaucaugugucaacu

SEQ ID NO: 2346701 - RNA, 19 nt, Artificial Sequence
  Description of Artificial Sequence: Synthetic oligonucleotide
  Antisense strand to SEQ ID NO: 2346700
aguugacacaugauaugag

SEQ ID NO: 2346702 - RNA, 19 nt, Artificial Sequence
  Description of Artificial Sequence: Synthetic oligonucleotide
  Sense strand starting at position 1270 of SEQ ID NO: 1885500
uguguagucacagagacag

SEQ ID NO: 2346703 - RNA, 19 nt, Artificial Sequence
  Description of Artificial Sequence: Synthetic oligonucleotide
  Antisense strand to SEQ ID NO: 2346702
cugucucugugacuacaca

SEQ ID NO: 2346704 - RNA, 19 nt, Artificial Sequence
  Description of Artificial Sequence: Synthetic oligonucleotide
  Sense strand starting at position 1282 of SEQ ID NO: 1885500
gagacaggcucccuugaau

SEQ ID NO: 2346705 - RNA, 19 nt, Artificial Sequence
  Description of Artificial Sequence: Synthetic oligonucleotide
  Antisense strand to SEQ ID NO: 2346704
auucaagggagccugucuc

SEQ ID NO: 2346706 - RNA, 19 nt, Artificial Sequence
  Description of Artificial Sequence: Synthetic oligonucleotide
  Sense strand starting at position 1334 of SEQ ID NO: 1885500
gacccucccuagguaagaa

SEQ ID NO: 2346707 - RNA, 19 nt, Artificial Sequence
  Description of Artificial Sequence: Synthetic oligonucleotide
  Antisense strand to SEQ ID NO: 2346706
uucuuaccuagggaggguc

SEQ ID NO: 2346708 - RNA, 19 nt, Artificial Sequence
  Description of Artificial Sequence: Synthetic oligonucleotide
  Sense strand starting at position 1354 of SEQ ID NO: 1885500
cacucuuacuggguaugga

SEQ ID NO: 2346709 - RNA, 19 nt, Artificial Sequence
  Description of Artificial Sequence: Synthetic oligonucleotide
  Antisense strand to SEQ ID NO: 2346708
uccauacccaguaagagug

SEQ ID NO: 2346710 - RNA, 19 nt, Artificial Sequence
  Description of Artificial Sequence: Synthetic oligonucleotide
  Sense strand starting at position 1422 of SEQ ID NO: 1885500
aacagcuguccugagcgaa

SEQ ID NO: 2346711 - RNA, 19 nt, Artificial Sequence
  Description of Artificial Sequence: Synthetic oligonucleotide
  Antisense strand to SEQ ID NO: 2346710
uucgcucaggacagcuguu

SEQ ID NO: 2346712 - RNA, 19 nt, Artificial Sequence
  Description of Artificial Sequence: Synthetic oligonucleotide
  Sense strand starting at position 1481 of SEQ ID NO: 1885500
ggaucaaggcacuguggua

SEQ ID NO: 2346713 - RNA, 19 nt, Artificial Sequence
  Description of Artificial Sequence: Synthetic oligonucleotide
  Antisense strand to SEQ ID NO: 2346712
uaccacagugccuugaucc

SEQ ID NO: 2346714 - RNA, 19 nt, Artificial Sequence
  Description of Artificial Sequence: Synthetic oligonucleotide
  Sense strand starting at position 1526 of SEQ ID NO: 1885500
guaaguuaccugcggagga

SEQ ID NO: 2346715 - RNA, 19 nt, Artificial Sequence
  Description of Artificial Sequence: Synthetic oligonucleotide
  Antisense strand to SEQ ID NO: 2346714
uccuccgcagguaacuuac

SEQ ID NO: 2346716 - RNA, 19 nt, Artificial Sequence
  Description of Artificial Sequence: Synthetic oligonucleotide
  Sense strand starting at position 2737 of SEQ ID NO: 1885500
ucgcuaccgagagguauuu

SEQ ID NO: 2346717 - RNA, 19 nt, Artificial Sequence
  Description of Artificial Sequence: Synthetic oligonucleotide
  Antisense strand to SEQ ID NO: 2346716
aaauaccucucgguagcga

SEQ ID NO: 2346718 - RNA, 19 nt, Artificial Sequence
  Description of Artificial Sequence: Synthetic oligonucleotide
  Sense strand starting at position 2771 of SEQ ID NO: 1885500
uuuacugucugucccuaaa

SEQ ID NO: 2346719 - RNA, 19 nt, Artificial Sequence
  Description of Artificial Sequence: Synthetic oligonucleotide
  Antisense strand to SEQ ID NO: 2346718
uuuagggacagacaguaaa

SEQ ID NO: 2346720 - RNA, 19 nt, Artificial Sequence
  Description of Artificial Sequence: Synthetic oligonucleotide
  Sense strand starting at position 2774 of SEQ ID NO: 1885500
acugucugucccuaaagau

SEQ ID NO: 2346721 - RNA, 19 nt, Artificial Sequence
  Description of Artificial Sequence: Synthetic oligonucleotide
  Antisense strand to SEQ ID NO: 2346720
aucuuuagggacagacagu

SEQ ID NO: 2346722 - RNA, 19 nt, Artificial Sequence
  Description of Artificial Sequence: Synthetic oligonucleotide
  Sense strand starting at position 3005 of SEQ ID NO: 1885500
cuuuauccggucugacaau

SEQ ID NO: 2346723 - RNA, 19 nt, Artificial Sequence
  Description of Artificial Sequence: Synthetic oligonucleotide
  Antisense strand to SEQ ID NO: 2346722
auugucagaccggauaaag

SEQ ID NO: 2346724 - RNA, 19 nt, Artificial Sequence
  Description of Artificial Sequence: Synthetic oligonucleotide
  Sense strand starting at position 3061 of SEQ ID NO: 1885500
gcagacguucccuaauaca

SEQ ID NO: 2346725 - RNA, 19 nt, Artificial Sequence
  Description of Artificial Sequence: Synthetic oligonucleotide
  Antisense strand to SEQ ID NO: 2346724
uguauuagggaacgucugc

SEQ ID NO: 2346726 - RNA, 19 nt, Artificial Sequence
  Description of Artificial Sequence: Synthetic oligonucleotide
  Sense strand starting at position 3251 of SEQ ID NO: 1885500
gcggguuuaugaguaacaa

SEQ ID NO: 2346727 - RNA, 19 nt, Artificial Sequence
  Description of Artificial Sequence: Synthetic oligonucleotide
  Antisense strand to SEQ ID NO: 2346726
uuguuacucauaaacccgc

SEQ ID NO: 2346728 - RNA, 19 nt, Artificial Sequence
  Description of Artificial Sequence: Synthetic oligonucleotide
  Sense strand starting at position 3252 of SEQ ID NO: 1885500
cggguuuaugaguaacaag

SEQ ID NO: 2346729 - RNA, 19 nt, Artificial Sequence
  Description of Artificial Sequence: Synthetic oligonucleotide
  Antisense strand to SEQ ID NO: 2346728
cuuguuacucauaaacccg

SEQ ID NO: 2346730 - RNA, 19 nt, Artificial Sequence
  Description of Artificial Sequence: Synthetic oligonucleotide
  Sense strand starting at position 3326 of SEQ ID NO: 1885500
ggacguguggguugaauga

SEQ ID NO: 2346731 - RNA, 19 nt, Artificial Sequence
  Description of Artificial Sequence: Synthetic oligonucleotide
  Antisense strand to SEQ ID NO: 2346730
ucauucaacccacacgucc

SEQ ID NO: 2346732 - RNA, 19 nt, Artificial Sequence
  Description of Artificial Sequence: Synthetic oligonucleotide
  Sense strand starting at position 3400 of SEQ ID NO: 1885500
gccugcacuuccuugggaa

SEQ ID NO: 2346733 - RNA, 19 nt, Artificial Sequence
  Description of Artificial Sequence: Synthetic oligonucleotide
  Antisense strand to SEQ ID NO: 2346732
uucccaaggaagugcaggc

SEQ ID NO: 2346734 - RNA, 19 nt, Artificial Sequence
  Description of Artificial Sequence: Synthetic oligonucleotide
  Sense strand starting at position 3401 of SEQ ID NO: 1885500
ccugcacuuccuugggaaa

SEQ ID NO: 2346735 - RNA, 19 nt, Artificial Sequence
  Description of Artificial Sequence: Synthetic oligonucleotide
  Antisense strand to SEQ ID NO: 2346734
uuucccaaggaagugcagg

SEQ ID NO: 2346736 - RNA, 19 nt, Artificial Sequence
  Description of Artificial Sequence: Synthetic oligonucleotide
  Sense strand starting at position 3617 of SEQ ID NO: 1885500
ccugaauguuugguuuaau

SEQ ID NO: 2346737 - RNA, 19 nt, Artificial Sequence
  Description of Artificial Sequence: Synthetic oligonucleotide
  Antisense strand to SEQ ID NO: 2346736
auuaaaccaaacauucagg

SEQ ID NO: 2346738 - RNA, 19 nt, Artificial Sequence
  Description of Artificial Sequence: Synthetic oligonucleotide
  Sense strand starting at position 3618 of SEQ ID NO: 1885500
cugaauguuugguuuaaug

SEQ ID NO: 2346739 - RNA, 19 nt, Artificial Sequence
  Description of Artificial Sequence: Synthetic oligonucleotide
  Antisense strand to SEQ ID NO: 2346738
cauuaaaccaaacauucag

SEQ ID NO: 2346740 - RNA, 19 nt, Artificial Sequence
  Description of Artificial Sequence: Synthetic oligonucleotide
  Sense strand starting at position 3620 of SEQ ID NO: 1885500
gaauguuugguuuaauguu

SEQ ID NO: 2346741 - RNA, 19 nt, Artificial Sequence
  Description of Artificial Sequence: Synthetic oligonucleotide
  Antisense strand to SEQ ID NO: 2346740
aacauuaaaccaaacauuc

SEQ ID NO: 2346742 - RNA, 19 nt, Artificial Sequence
  Description of Artificial Sequence: Synthetic oligonucleotide
  Sense strand starting at position 3644 of SEQ ID NO: 1885500
guuaacggucuugaaauua

SEQ ID NO: 2346743 - RNA, 19 nt, Artificial Sequence
  Description of Artificial Sequence: Synthetic oligonucleotide
  Antisense strand to SEQ ID NO: 2346742
uaauuucaagaccguuaac

SEQ ID NO: 2346744 - RNA, 19 nt, Artificial Sequence
  Description of Artificial Sequence: Synthetic oligonucleotide
  Sense strand starting at position 3649 of SEQ ID NO: 1885500
cggucuugaaauuauuagu

SEQ ID NO: 2346745 - RNA, 19 nt, Artificial Sequence
  Description of Artificial Sequence: Synthetic oligonucleotide
  Antisense strand to SEQ ID NO: 2346744
acuaauaauuucaagaccg

SEQ ID NO: 2346746 - RNA, 19 nt, Artificial Sequence
  Description of Artificial Sequence: Synthetic oligonucleotide
  Sense strand starting at position 3675 of SEQ ID NO: 1885500
aagcaagugccugguauuu

SEQ ID NO: 2346747 - RNA, 19 nt, Artificial Sequence
  Description of Artificial Sequence: Synthetic oligonucleotide
  Antisense strand to SEQ ID NO: 2346746
aaauaccaggcacuugcuu

SEQ ID NO: 2346748 - RNA, 19 nt, Artificial Sequence
  Description of Artificial Sequence: Synthetic oligonucleotide
  Sense strand starting at position 3762 of SEQ ID NO: 1885500
acuuacuaucugugcuuua

SEQ ID NO: 2346749 - RNA, 19 nt, Artificial Sequence
  Description of Artificial Sequence: Synthetic oligonucleotide
  Antisense strand to SEQ ID NO: 2346748
uaaagcacagauaguaagu

SEQ ID NO: 2346750 - RNA, 19 nt, Artificial Sequence
  Description of Artificial Sequence: Synthetic oligonucleotide
  Sense strand starting at position 3866 of SEQ ID NO: 1885500
ugcguucucccagaaugug

SEQ ID NO: 2346751 - RNA, 19 nt, Artificial Sequence
  Description of Artificial Sequence: Synthetic oligonucleotide
  Antisense strand to SEQ ID NO: 2346750
cacauucugggagaacgca

SEQ ID NO: 2346752 - RNA, 19 nt, Artificial Sequence
  Description of Artificial Sequence: Synthetic oligonucleotide
  Sense strand starting at position 3875 of SEQ ID NO: 1885500
ccagaaugugacggaauca

SEQ ID NO: 2346753 - RNA, 19 nt, Artificial Sequence
  Description of Artificial Sequence: Synthetic oligonucleotide
  Antisense strand to SEQ ID NO: 2346752
ugauuccgucacauucugg

SEQ ID NO: 2346754 - RNA, 19 nt, Artificial Sequence
  Description of Artificial Sequence: Synthetic oligonucleotide
  Sense strand starting at position 40 of SEQ ID NO: 1885501
agugcaggccguucuauua

SEQ ID NO: 2346755 - RNA, 19 nt, Artificial Sequence
  Description of Artificial Sequence: Synthetic oligonucleotide
  Antisense strand to SEQ ID NO: 2346754
uaauagaacggccugcacu

SEQ ID NO: 2346756 - RNA, 19 nt, Artificial Sequence
  Description of Artificial Sequence: Synthetic oligonucleotide
  Sense strand starting at position 950 of SEQ ID NO: 1885501
ucccuuugucaacggacau

SEQ ID NO: 2346757 - RNA, 19 nt, Artificial Sequence
  Description of Artificial Sequence: Synthetic oligonucleotide
  Antisense strand to SEQ ID NO: 2346756
auguccguugacaaaggga

SEQ ID NO: 2346758 - RNA, 19 nt, Artificial Sequence
  Description of Artificial Sequence: Synthetic oligonucleotide
  Sense strand starting at position 956 of SEQ ID NO: 1885501
ugucaacggacaugagaau

SEQ ID NO: 2346759 - RNA, 19 nt, Artificial Sequence
  Description of Artificial Sequence: Synthetic oligonucleotide
  Antisense strand to SEQ ID NO: 2346758
auucucauguccguugaca

SEQ ID NO: 2346760 - RNA, 19 nt, Artificial Sequence
  Description of Artificial Sequence: Synthetic oligonucleotide
  Sense strand starting at position 962 of SEQ ID NO: 1885501
cggacaugagaaugcuguu

SEQ ID NO: 2346761 - RNA, 19 nt, Artificial Sequence
  Description of Artificial Sequence: Synthetic oligonucleotide
  Antisense strand to SEQ ID NO: 2346760
aacagcauucucauguccg

SEQ ID NO: 2346762 - RNA, 19 nt, Artificial Sequence
  Description of Artificial Sequence: Synthetic oligonucleotide
  Sense strand starting at position 968 of SEQ ID NO: 1885501
ugagaaugcuguuuggcca

SEQ ID NO: 2346763 - RNA, 19 nt, Artificial Sequence
  Description of Artificial Sequence: Synthetic oligonucleotide
  Antisense strand to SEQ ID NO: 2346762
uggccaaacagcauucuca

SEQ ID NO: 2346764 - RNA, 19 nt, Artificial Sequence
  Description of Artificial Sequence: Synthetic oligonucleotide
  Sense strand starting at position 969 of SEQ ID NO: 1885501
gagaaugcuguuuggccaa

SEQ ID NO: 2346765 - RNA, 19 nt, Artificial Sequence
  Description of Artificial Sequence: Synthetic oligonucleotide
  Antisense strand to SEQ ID NO: 2346764
uuggccaaacagcauucuc

SEQ ID NO: 2346766 - RNA, 19 nt, Artificial Sequence
  Description of Artificial Sequence: Synthetic oligonucleotide
  Sense strand starting at position 972 of SEQ ID NO: 1885501
aaugcuguuuggccaauga

SEQ ID NO: 2346767 - RNA, 19 nt, Artificial Sequence
  Description of Artificial Sequence: Synthetic oligonucleotide
  Antisense strand to SEQ ID NO: 2346766
ucauuggccaaacagcauu

SEQ ID NO: 2346768 - RNA, 19 nt, Artificial Sequence
  Description of Artificial Sequence: Synthetic oligonucleotide
  Sense strand starting at position 2168 of SEQ ID NO: 1885501
agagccauaugucgagauu

SEQ ID NO: 2346769 - RNA, 19 nt, Artificial Sequence
  Description of Artificial Sequence: Synthetic oligonucleotide
  Antisense strand to SEQ ID NO: 2346768
aaucucgacauauggcucu

SEQ ID NO: 2346770 - RNA, 19 nt, Artificial Sequence
  Description of Artificial Sequence: Synthetic oligonucleotide
  Sense strand starting at position 2247 of SEQ ID NO: 1885501
ugucuauccugguccucau

SEQ ID NO: 2346771 - RNA, 19 nt, Artificial Sequence
  Description of Artificial Sequence: Synthetic oligonucleotide
  Antisense strand to SEQ ID NO: 2346770
augaggaccaggauagaca

SEQ ID NO: 2346772 - RNA, 19 nt, Artificial Sequence
  Description of Artificial Sequence: Synthetic oligonucleotide
  Sense strand starting at position 2326 of SEQ ID NO: 1885501
augcuaauagcugacaaau

SEQ ID NO: 2346773 - RNA, 19 nt, Artificial Sequence
  Description of Artificial Sequence: Synthetic oligonucleotide
  Antisense strand to SEQ ID NO: 2346772
auuugucagcuauuagcau

SEQ ID NO: 2346774 - RNA, 19 nt, Artificial Sequence
  Description of Artificial Sequence: Synthetic oligonucleotide
  Sense strand starting at position 2446 of SEQ ID NO: 1885501
gaaugauguagacgaguaa

SEQ ID NO: 2346775 - RNA, 19 nt, Artificial Sequence
  Description of Artificial Sequence: Synthetic oligonucleotide
  Antisense strand to SEQ ID NO: 2346774
uuacucgucuacaucauuc

SEQ ID NO: 2346776 - RNA, 19 nt, Artificial Sequence
  Description of Artificial Sequence: Synthetic oligonucleotide
  Sense strand starting at position 2632 of SEQ ID NO: 1885501
ugugguccaggucauaaua

SEQ ID NO: 2346777 - RNA, 19 nt, Artificial Sequence
  Description of Artificial Sequence: Synthetic oligonucleotide
  Antisense strand to SEQ ID NO: 2346776
uauuaugaccuggaccaca

SEQ ID NO: 2346778 - RNA, 19 nt, Artificial Sequence
  Description of Artificial Sequence: Synthetic oligonucleotide
  Sense strand starting at position 2634 of SEQ ID NO: 1885501
ugguccaggucauaauaaa

SEQ ID NO: 2346779 - RNA, 19 nt, Artificial Sequence
  Description of Artificial Sequence: Synthetic oligonucleotide
  Antisense strand to SEQ ID NO: 2346778
uuuauuaugaccuggacca

SEQ ID NO: 2346780 - RNA, 19 nt, Artificial Sequence
  Description of Artificial Sequence: Synthetic oligonucleotide
  Sense strand starting at position 3306 of SEQ ID NO: 1885501
uguucccacccaugaguua

SEQ ID NO: 2346781 - RNA, 19 nt, Artificial Sequence
  Description of Artificial Sequence: Synthetic oligonucleotide
  Antisense strand to SEQ ID NO: 2346780
uaacucaugggugggaaca

SEQ ID NO: 2346782 - RNA, 19 nt, Artificial Sequence
  Description of Artificial Sequence: Synthetic oligonucleotide
  Sense strand starting at position 3307 of SEQ ID NO: 1885501
guucccacccaugaguuaa

SEQ ID NO: 2346783 - RNA, 19 nt, Artificial Sequence
  Description of Artificial Sequence: Synthetic oligonucleotide
  Antisense strand to SEQ ID NO: 2346782
uuaacucaugggugggaac

SEQ ID NO: 2346784 - RNA, 19 nt, Artificial Sequence
  Description of Artificial Sequence: Synthetic oligonucleotide
  Sense strand starting at position 3633 of SEQ ID NO: 1885501
aguauauaagucgauguca

SEQ ID NO: 2346785 - RNA, 19 nt, Artificial Sequence
  Description of Artificial Sequence: Synthetic oligonucleotide
  Antisense strand to SEQ ID NO: 2346784
ugacaucgacuuauauacu

SEQ ID NO: 2346786 - RNA, 19 nt, Artificial Sequence
  Description of Artificial Sequence: Synthetic oligonucleotide
  Sense strand starting at position 3635 of SEQ ID NO: 1885501
uauauaagucgaugucaga

SEQ ID NO: 2346787 - RNA, 19 nt, Artificial Sequence
  Description of Artificial Sequence: Synthetic oligonucleotide
  Antisense strand to SEQ ID NO: 2346786
ucugacaucgacuuauaua

SEQ ID NO: 2346788 - RNA, 19 nt, Artificial Sequence
  Description of Artificial Sequence: Synthetic oligonucleotide
  Sense strand starting at position 3638 of SEQ ID NO: 1885501
auaagucgaugucagaauu

SEQ ID NO: 2346789 - RNA, 19 nt, Artificial Sequence
  Description of Artificial Sequence: Synthetic oligonucleotide
  Antisense strand to SEQ ID NO: 2346788
aauucugacaucgacuuau

SEQ ID NO: 2346790 - RNA, 19 nt, Artificial Sequence
  Description of Artificial Sequence: Synthetic oligonucleotide
  Sense strand starting at position 3644 of SEQ ID NO: 1885501
cgaugucagaauuaguagu

SEQ ID NO: 2346791 - RNA, 19 nt, Artificial Sequence
  Description of Artificial Sequence: Synthetic oligonucleotide
  Antisense strand to SEQ ID NO: 2346790
acuacuaauucugacaucg

SEQ ID NO: 2346792 - RNA, 19 nt, Artificial Sequence
  Description of Artificial Sequence: Synthetic oligonucleotide
  Sense strand starting at position 3868 of SEQ ID NO: 1885501
aguagacaguaguauggua

SEQ ID NO: 2346793 - RNA, 19 nt, Artificial Sequence
  Description of Artificial Sequence: Synthetic oligonucleotide
  Antisense strand to SEQ ID NO: 2346792
uaccauacuacugucuacu

SEQ ID NO: 2346794 - RNA, 19 nt, Artificial Sequence
  Description of Artificial Sequence: Synthetic oligonucleotide
  Sense strand starting at position 35 of SEQ ID NO: 1885502
ucccuuugucaacggacau

SEQ ID NO: 2346795 - RNA, 19 nt, Artificial Sequence
  Description of Artificial Sequence: Synthetic oligonucleotide
  Antisense strand to SEQ ID NO: 2346794
auguccguugacaaaggga

SEQ ID NO: 2346796 - RNA, 19 nt, Artificial Sequence
  Description of Artificial Sequence: Synthetic oligonucleotide
  Sense strand starting at position 41 of SEQ ID NO: 1885502
ugucaacggacaugagaau

SEQ ID NO: 2346797 - RNA, 19 nt, Artificial Sequence
  Description of Artificial Sequence: Synthetic oligonucleotide
  Antisense strand to SEQ ID NO: 2346796
auucucauguccguugaca

SEQ ID NO: 2346798 - RNA, 19 nt, Artificial Sequence
  Description of Artificial Sequence: Synthetic oligonucleotide
  Sense strand starting at position 47 of SEQ ID NO: 1885502
cggacaugagaaugcuguu

SEQ ID NO: 2346799 - RNA, 19 nt, Artificial Sequence
  Description of Artificial Sequence: Synthetic oligonucleotide
  Antisense strand to SEQ ID NO: 2346798
aacagcauucucauguccg

SEQ ID NO: 2346800 - RNA, 19 nt, Artificial Sequence
  Description of Artificial Sequence: Synthetic oligonucleotide
  Sense strand starting at position 53 of SEQ ID NO: 1885502
ugagaaugcuguuuggcca

SEQ ID NO: 2346801 - RNA, 19 nt, Artificial Sequence
  Description of Artificial Sequence: Synthetic oligonucleotide
  Antisense strand to SEQ ID NO: 2346800
uggccaaacagcauucuca

SEQ ID NO: 2346802 - RNA, 19 nt, Artificial Sequence
  Description of Artificial Sequence: Synthetic oligonucleotide
  Sense strand starting at position 54 of SEQ ID NO: 1885502
gagaaugcuguuuggccaa

SEQ ID NO: 2346803 - RNA, 19 nt, Artificial Sequence
  Description of Artificial Sequence: Synthetic oligonucleotide
  Antisense strand to SEQ ID NO: 2346802
uuggccaaacagcauucuc

SEQ ID NO: 2346804 - RNA, 19 nt, Artificial Sequence
  Description of Artificial Sequence: Synthetic oligonucleotide
  Sense strand starting at position 57 of SEQ ID NO: 1885502
aaugcuguuuggccaauga

SEQ ID NO: 2346805 - RNA, 19 nt, Artificial Sequence
  Description of Artificial Sequence: Synthetic oligonucleotide
  Antisense strand to SEQ ID NO: 2346804
ucauuggccaaacagcauu

SEQ ID NO: 2346806 - RNA, 19 nt, Artificial Sequence
  Description of Artificial Sequence: Synthetic oligonucleotide
  Sense strand starting at position 1253 of SEQ ID NO: 1885502
agagccauaugucgagauu

SEQ ID NO: 2346807 - RNA, 19 nt, Artificial Sequence
  Description of Artificial Sequence: Synthetic oligonucleotide
  Antisense strand to SEQ ID NO: 2346806
aaucucgacauauggcucu

SEQ ID NO: 2346808 - RNA, 19 nt, Artificial Sequence
  Description of Artificial Sequence: Synthetic oligonucleotide
  Sense strand starting at position 1332 of SEQ ID NO: 1885502
ugucuauccugguccucau

SEQ ID NO: 2346809 - RNA, 19 nt, Artificial Sequence
  Description of Artificial Sequence: Synthetic oligonucleotide
  Antisense strand to SEQ ID NO: 2346808
augaggaccaggauagaca

SEQ ID NO: 2346810 - RNA, 19 nt, Artificial Sequence
  Description of Artificial Sequence: Synthetic oligonucleotide
  Sense strand starting at position 1411 of SEQ ID NO: 1885502
augcuaauagcugacaaau

SEQ ID NO: 2346811 - RNA, 19 nt, Artificial Sequence
  Description of Artificial Sequence: Synthetic oligonucleotide
  Antisense strand to SEQ ID NO: 2346810
auuugucagcuauuagcau

SEQ ID NO: 2346812 - RNA, 19 nt, Artificial Sequence
  Description of Artificial Sequence: Synthetic oligonucleotide
  Sense strand starting at position 1531 of SEQ ID NO: 1885502
gaaugauguagacgaguaa

SEQ ID NO: 2346813 - RNA, 19 nt, Artificial Sequence
  Description of Artificial Sequence: Synthetic oligonucleotide
  Antisense strand to SEQ ID NO: 2346812
uuacucgucuacaucauuc

SEQ ID NO: 2346814 - RNA, 19 nt, Artificial Sequence
  Description of Artificial Sequence: Synthetic oligonucleotide
  Sense strand starting at position 1717 of SEQ ID NO: 1885502
ugugguccaggucauaaua

SEQ ID NO: 2346815 - RNA, 19 nt, Artificial Sequence
  Description of Artificial Sequence: Synthetic oligonucleotide
  Antisense strand to SEQ ID NO: 2346814
uauuaugaccuggaccaca

SEQ ID NO: 2346816 - RNA, 19 nt, Artificial Sequence
  Description of Artificial Sequence: Synthetic oligonucleotide
  Sense strand starting at position 1719 of SEQ ID NO: 1885502
ugguccaggucauaauaaa

SEQ ID NO: 2346817 - RNA, 19 nt, Artificial Sequence
  Description of Artificial Sequence: Synthetic oligonucleotide
  Antisense strand to SEQ ID NO: 2346816
uuuauuaugaccuggacca

SEQ ID NO: 2346818 - RNA, 19 nt, Artificial Sequence
  Description of Artificial Sequence: Synthetic oligonucleotide
  Sense strand starting at position 2391 of SEQ ID NO: 1885502
uguucccacccaugaguua

SEQ ID NO: 2346819 - RNA, 19 nt, Artificial Sequence
  Description of Artificial Sequence: Synthetic oligonucleotide
  Antisense strand to SEQ ID NO: 2346818
uaacucaugggugggaaca

SEQ ID NO: 2346820 - RNA, 19 nt, Artificial Sequence
  Description of Artificial Sequence: Synthetic oligonucleotide
  Sense strand starting at position 2392 of SEQ ID NO: 1885502
guucccacccaugaguuaa

SEQ ID NO: 2346821 - RNA, 19 nt, Artificial Sequence
  Description of Artificial Sequence: Synthetic oligonucleotide
  Antisense strand to SEQ ID NO: 2346820
uuaacucaugggugggaac

SEQ ID NO: 2346822 - RNA, 19 nt, Artificial Sequence
  Description of Artificial Sequence: Synthetic oligonucleotide
  Sense strand starting at position 2718 of SEQ ID NO: 1885502
aguauauaagucgauguca

SEQ ID NO: 2346823 - RNA, 19 nt, Artificial Sequence
  Description of Artificial Sequence: Synthetic oligonucleotide
  Antisense strand to SEQ ID NO: 2346822
ugacaucgacuuauauacu

SEQ ID NO: 2346824 - RNA, 19 nt, Artificial Sequence
  Description of Artificial Sequence: Synthetic oligonucleotide
  Sense strand starting at position 2720 of SEQ ID NO: 1885502
uauauaagucgaugucaga

SEQ ID NO: 2346825 - RNA, 19 nt, Artificial Sequence
  Description of Artificial Sequence: Synthetic oligonucleotide
  Antisense strand to SEQ ID NO: 2346824
ucugacaucgacuuauaua

SEQ ID NO: 2346826 - RNA, 19 nt, Artificial Sequence
  Description of Artificial Sequence: Synthetic oligonucleotide
  Sense strand starting at position 2723 of SEQ ID NO: 1885502
auaagucgaugucagaauu

SEQ ID NO: 2346827 - RNA, 19 nt, Artificial Sequence
  Description of Artificial Sequence: Synthetic oligonucleotide
  Antisense strand to SEQ ID NO: 2346826
aauucugacaucgacuuau

SEQ ID NO: 2346828 - RNA, 19 nt, Artificial Sequence
  Description of Artificial Sequence: Synthetic oligonucleotide
  Sense strand starting at position 2729 of SEQ ID NO: 1885502
cgaugucagaauuaguagu

SEQ ID NO: 2346829 - RNA, 19 nt, Artificial Sequence
  Description of Artificial Sequence: Synthetic oligonucleotide
  Antisense strand to SEQ ID NO: 2346828
acuacuaauucugacaucg

SEQ ID NO: 2346830 - RNA, 19 nt, Artificial Sequence
  Description of Artificial Sequence: Synthetic oligonucleotide
  Sense strand starting at position 2953 of SEQ ID NO: 1885502
aguagacaguaguauggua

SEQ ID NO: 2346831 - RNA, 19 nt, Artificial Sequence
  Description of Artificial Sequence: Synthetic oligonucleotide
  Antisense strand to SEQ ID NO: 2346830
uaccauacuacugucuacu

SEQ ID NO: 2346832 - RNA, 19 nt, Artificial Sequence
  Description of Artificial Sequence: Synthetic oligonucleotide
  Sense strand starting at position 3178 of SEQ ID NO: 1885502
uaugacauguagcaaugua

SEQ ID NO: 2346833 - RNA, 19 nt, Artificial Sequence
  Description of Artificial Sequence: Synthetic oligonucleotide
  Antisense strand to SEQ ID NO: 2346832
uacauugcuacaugucaua

SEQ ID NO: 2346834 - RNA, 19 nt, Artificial Sequence
  Description of Artificial Sequence: Synthetic oligonucleotide
  Sense strand starting at position 3319 of SEQ ID NO: 1885502
auggaauagugaugagguu

SEQ ID NO: 2346835 - RNA, 19 nt, Artificial Sequence
  Description of Artificial Sequence: Synthetic oligonucleotide
  Antisense strand to SEQ ID NO: 2346834
aaccucaucacuauuccau

SEQ ID NO: 2346836 - RNA, 19 nt, Artificial Sequence
  Description of Artificial Sequence: Synthetic oligonucleotide
  Sense strand starting at position 208 of SEQ ID NO: 1885503
uguugaauauuggucccga

SEQ ID NO: 2346837 - RNA, 19 nt, Artificial Sequence
  Description of Artificial Sequence: Synthetic oligonucleotide
  Antisense strand to SEQ ID NO: 2346836
ucgggaccaauauucaaca

SEQ ID NO: 2346838 - RNA, 19 nt, Artificial Sequence
  Description of Artificial Sequence: Synthetic oligonucleotide
  Sense strand starting at position 209 of SEQ ID NO: 1885503
guugaauauuggucccgac

SEQ ID NO: 2346839 - RNA, 19 nt, Artificial Sequence
  Description of Artificial Sequence: Synthetic oligonucleotide
  Antisense strand to SEQ ID NO: 2346838
gucgggaccaauauucaac

SEQ ID NO: 2346840 - RNA, 19 nt, Artificial Sequence
  Description of Artificial Sequence: Synthetic oligonucleotide
  Sense strand starting at position 212 of SEQ ID NO: 1885503
gaauauuggucccgacucu

SEQ ID NO: 2346841 - RNA, 19 nt, Artificial Sequence
  Description of Artificial Sequence: Synthetic oligonucleotide
  Antisense strand to SEQ ID NO: 2346840
agagucgggaccaauauuc

SEQ ID NO: 2346842 - RNA, 19 nt, Artificial Sequence
  Description of Artificial Sequence: Synthetic oligonucleotide
  Sense strand starting at position 317 of SEQ ID NO: 1885503
ugcccuuaaccuugcugaa

SEQ ID NO: 2346843 - RNA, 19 nt, Artificial Sequence
  Description of Artificial Sequence: Synthetic oligonucleotide
  Antisense strand to SEQ ID NO: 2346842
uucagcaagguuaagggca

SEQ ID NO: 2346844 - RNA, 19 nt, Artificial Sequence
  Description of Artificial Sequence: Synthetic oligonucleotide
  Sense strand starting at position 369 of SEQ ID NO: 1885503
caaggagugucuuugugau

SEQ ID NO: 2346845 - RNA, 19 nt, Artificial Sequence
  Description of Artificial Sequence: Synthetic oligonucleotide
  Antisense strand to SEQ ID NO: 2346844
aucacaaagacacuccuug

SEQ ID NO: 2346846 - RNA, 19 nt, Artificial Sequence
  Description of Artificial Sequence: Synthetic oligonucleotide
  Sense strand starting at position 435 of SEQ ID NO: 1885503
cucuaaucuuguguucuca

SEQ ID NO: 2346847 - RNA, 19 nt, Artificial Sequence
  Description of Artificial Sequence: Synthetic oligonucleotide
  Antisense strand to SEQ ID NO: 2346846
ugagaacacaagauuagag

SEQ ID NO: 2346848 - RNA, 19 nt, Artificial Sequence
  Description of Artificial Sequence: Synthetic oligonucleotide
  Sense strand starting at position 437 of SEQ ID NO: 1885503
cuaaucuuguguucucacu

SEQ ID NO: 2346849 - RNA, 19 nt, Artificial Sequence
  Description of Artificial Sequence: Synthetic oligonucleotide
  Antisense strand to SEQ ID NO: 2346848
agugagaacacaagauuag

SEQ ID NO: 2346850 - RNA, 19 nt, Artificial Sequence
  Description of Artificial Sequence: Synthetic oligonucleotide
  Sense strand starting at position 608 of SEQ ID NO: 1885503
guuagccauucguuuaaca

SEQ ID NO: 2346851 - RNA, 19 nt, Artificial Sequence
  Description of Artificial Sequence: Synthetic oligonucleotide
  Antisense strand to SEQ ID NO: 2346850
uguuaaacgaauggcuaac

SEQ ID NO: 2346852 - RNA, 19 nt, Artificial Sequence
  Description of Artificial Sequence: Synthetic oligonucleotide
  Sense strand starting at position 679 of SEQ ID NO: 1885503
cuggguguaguuuguuauu

SEQ ID NO: 2346853 - RNA, 19 nt, Artificial Sequence
  Description of Artificial Sequence: Synthetic oligonucleotide
  Antisense strand to SEQ ID NO: 2346852
aauaacaaacuacacccag

SEQ ID NO: 2346854 - RNA, 19 nt, Artificial Sequence
  Description of Artificial Sequence: Synthetic oligonucleotide
  Sense strand starting at position 681 of SEQ ID NO: 1885503
ggguguaguuuguuauuac

SEQ ID NO: 2346855 - RNA, 19 nt, Artificial Sequence
  Description of Artificial Sequence: Synthetic oligonucleotide
  Antisense strand to SEQ ID NO: 2346854
guaauaacaaacuacaccc

SEQ ID NO: 2346856 - RNA, 19 nt, Artificial Sequence
  Description of Artificial Sequence: Synthetic oligonucleotide
  Sense strand starting at position 682 of SEQ ID NO: 1885503
gguguaguuuguuauuacu

SEQ ID NO: 2346857 - RNA, 19 nt, Artificial Sequence
  Description of Artificial Sequence: Synthetic oligonucleotide
  Antisense strand to SEQ ID NO: 2346856
aguaauaacaaacuacacc

SEQ ID NO: 2346858 - RNA, 19 nt, Artificial Sequence
  Description of Artificial Sequence: Synthetic oligonucleotide
  Sense strand starting at position 684 of SEQ ID NO: 1885503
uguaguuuguuauuacuga

SEQ ID NO: 2346859 - RNA, 19 nt, Artificial Sequence
  Description of Artificial Sequence: Synthetic oligonucleotide
  Antisense strand to SEQ ID NO: 2346858
ucaguaauaacaaacuaca

SEQ ID NO: 2346860 - RNA, 19 nt, Artificial Sequence
  Description of Artificial Sequence: Synthetic oligonucleotide
  Sense strand starting at position 709 of SEQ ID NO: 1885503
gaagcuuacgucugucaag

SEQ ID NO: 2346861 - RNA, 19 nt, Artificial Sequence
  Description of Artificial Sequence: Synthetic oligonucleotide
  Antisense strand to SEQ ID NO: 2346860
cuugacagacguaagcuuc

SEQ ID NO: 2346862 - RNA, 19 nt, Artificial Sequence
  Description of Artificial Sequence: Synthetic oligonucleotide
  Sense strand starting at position 710 of SEQ ID NO: 1885503
aagcuuacgucugucaagu

SEQ ID NO: 2346863 - RNA, 19 nt, Artificial Sequence
  Description of Artificial Sequence: Synthetic oligonucleotide
  Antisense strand to SEQ ID NO: 2346862
acuugacagacguaagcuu

SEQ ID NO: 2346864 - RNA, 19 nt, Artificial Sequence
  Description of Artificial Sequence: Synthetic oligonucleotide
  Sense strand starting at position 712 of SEQ ID NO: 1885503
gcuuacgucugucaaguca

SEQ ID NO: 2346865 - RNA, 19 nt, Artificial Sequence
  Description of Artificial Sequence: Synthetic oligonucleotide
  Antisense strand to SEQ ID NO: 2346864
ugacuugacagacguaagc

SEQ ID NO: 2346866 - RNA, 19 nt, Artificial Sequence
  Description of Artificial Sequence: Synthetic oligonucleotide
  Sense strand starting at position 719 of SEQ ID NO: 1885503
ucugucaagucaucaaacu

SEQ ID NO: 2346867 - RNA, 19 nt, Artificial Sequence
  Description of Artificial Sequence: Synthetic oligonucleotide
  Antisense strand to SEQ ID NO: 2346866
aguuugaugacuugacaga

SEQ ID NO: 2346868 - RNA, 19 nt, Artificial Sequence
  Description of Artificial Sequence: Synthetic oligonucleotide
  Sense strand starting at position 720 of SEQ ID NO: 1885503
cugucaagucaucaaacuu

SEQ ID NO: 2346869 - RNA, 19 nt, Artificial Sequence
  Description of Artificial Sequence: Synthetic oligonucleotide
  Antisense strand to SEQ ID NO: 2346868
aaguuugaugacuugacag

SEQ ID NO: 2346870 - RNA, 19 nt, Artificial Sequence
  Description of Artificial Sequence: Synthetic oligonucleotide
  Sense strand starting at position 795 of SEQ ID NO: 1885503
aagagacguucugauuucu

SEQ ID NO: 2346871 - RNA, 19 nt, Artificial Sequence
  Description of Artificial Sequence: Synthetic oligonucleotide
  Antisense strand to SEQ ID NO: 2346870
agaaaucagaacgucucuu

SEQ ID NO: 2346872 - RNA, 19 nt, Artificial Sequence
  Description of Artificial Sequence: Synthetic oligonucleotide
  Sense strand starting at position 801 of SEQ ID NO: 1885503
cguucugauuucuggaagu

SEQ ID NO: 2346873 - RNA, 19 nt, Artificial Sequence
  Description of Artificial Sequence: Synthetic oligonucleotide
  Antisense strand to SEQ ID NO: 2346872
acuuccagaaaucagaacg

SEQ ID NO: 2346874 - RNA, 19 nt, Artificial Sequence
  Description of Artificial Sequence: Synthetic oligonucleotide
  Sense strand starting at position 916 of SEQ ID NO: 1885503
guccuuuccuguucugaug

SEQ ID NO: 2346875 - RNA, 19 nt, Artificial Sequence
  Description of Artificial Sequence: Synthetic oligonucleotide
  Antisense strand to SEQ ID NO: 2346874
caucagaacaggaaaggac

SEQ ID NO: 2346876 - RNA, 19 nt, Artificial Sequence
  Description of Artificial Sequence: Synthetic oligonucleotide
  Sense strand starting at position 155 of SEQ ID NO: 1885504
cuucucaucuguccaguua

SEQ ID NO: 2346877 - RNA, 19 nt, Artificial Sequence
  Description of Artificial Sequence: Synthetic oligonucleotide
  Antisense strand to SEQ ID NO: 2346876
uaacuggacagaugagaag

SEQ ID NO: 2346878 - RNA, 19 nt, Artificial Sequence
  Description of Artificial Sequence: Synthetic oligonucleotide
  Sense strand starting at position 163 of SEQ ID NO: 1885504
cuguccaguuagguugaaa

SEQ ID NO: 2346879 - RNA, 19 nt, Artificial Sequence
  Description of Artificial Sequence: Synthetic oligonucleotide
  Antisense strand to SEQ ID NO: 2346878
uuucaaccuaacuggacag

SEQ ID NO: 2346880 - RNA, 19 nt, Artificial Sequence
  Description of Artificial Sequence: Synthetic oligonucleotide
  Sense strand starting at position 265 of SEQ ID NO: 1885504
cucugauugggaugggauu

SEQ ID NO: 2346881 - RNA, 19 nt, Artificial Sequence
  Description of Artificial Sequence: Synthetic oligonucleotide
  Antisense strand to SEQ ID NO: 2346880
aaucccaucccaaucagag

SEQ ID NO: 2346882 - RNA, 19 nt, Artificial Sequence
  Description of Artificial Sequence: Synthetic oligonucleotide
  Sense strand starting at position 276 of SEQ ID NO: 1885504
augggauuauucuccaacu

SEQ ID NO: 2346883 - RNA, 19 nt, Artificial Sequence
  Description of Artificial Sequence: Synthetic oligonucleotide
  Antisense strand to SEQ ID NO: 2346882
aguuggagaauaaucccau

SEQ ID NO: 2346884 - RNA, 19 nt, Artificial Sequence
  Description of Artificial Sequence: Synthetic oligonucleotide
  Sense strand starting at position 277 of SEQ ID NO: 1885504
ugggauuauucuccaacuu

SEQ ID NO: 2346885 - RNA, 19 nt, Artificial Sequence
  Description of Artificial Sequence: Synthetic oligonucleotide
  Antisense strand to SEQ ID NO: 2346884
aaguuggagaauaauccca

SEQ ID NO: 2346886 - RNA, 19 nt, Artificial Sequence
  Description of Artificial Sequence: Synthetic oligonucleotide
  Sense strand starting at position 344 of SEQ ID NO: 1885504
gcugguuggguaugcagaa

SEQ ID NO: 2346887 - RNA, 19 nt, Artificial Sequence
  Description of Artificial Sequence: Synthetic oligonucleotide
  Antisense strand to SEQ ID NO: 2346886
uucugcauacccaaccagc

SEQ ID NO: 2346888 - RNA, 19 nt, Artificial Sequence
  Description of Artificial Sequence: Synthetic oligonucleotide
  Sense strand starting at position 359 of SEQ ID NO: 1885504
agaacacacuguuauguuu

SEQ ID NO: 2346889 - RNA, 19 nt, Artificial Sequence
  Description of Artificial Sequence: Synthetic oligonucleotide
  Antisense strand to SEQ ID NO: 2346888
aaacauaacaguguguucu

SEQ ID NO: 2346890 - RNA, 19 nt, Artificial Sequence
  Description of Artificial Sequence: Synthetic oligonucleotide
  Sense strand starting at position 378 of SEQ ID NO: 1885504
uaguuaacaucacugcguu

SEQ ID NO: 2346891 - RNA, 19 nt, Artificial Sequence
  Description of Artificial Sequence: Synthetic oligonucleotide
  Antisense strand to SEQ ID NO: 2346890
aacgcagugauguuaacua

SEQ ID NO: 2346892 - RNA, 19 nt, Artificial Sequence
  Description of Artificial Sequence: Synthetic oligonucleotide
  Sense strand starting at position 394 of SEQ ID NO: 1885504
guuggaucucaccaaugcu

SEQ ID NO: 2346893 - RNA, 19 nt, Artificial Sequence
  Description of Artificial Sequence: Synthetic oligonucleotide
  Antisense strand to SEQ ID NO: 2346892
agcauuggugagauccaac

SEQ ID NO: 2346894 - RNA, 19 nt, Artificial Sequence
  Description of Artificial Sequence: Synthetic oligonucleotide
  Sense strand starting at position 403 of SEQ ID NO: 1885504
caccaaugcuguccaggaa

SEQ ID NO: 2346895 - RNA, 19 nt, Artificial Sequence
  Description of Artificial Sequence: Synthetic oligonucleotide
  Antisense strand to SEQ ID NO: 2346894
uuccuggacagcauuggug

SEQ ID NO: 2346896 - RNA, 19 nt, Artificial Sequence
  Description of Artificial Sequence: Synthetic oligonucleotide
  Sense strand starting at position 761 of SEQ ID NO: 1885504
uggcucuuucucuauauga

SEQ ID NO: 2346897 - RNA, 19 nt, Artificial Sequence
  Description of Artificial Sequence: Synthetic oligonucleotide
  Antisense strand to SEQ ID NO: 2346896
ucauauagagaaagagcca

SEQ ID NO: 2346898 - RNA, 19 nt, Artificial Sequence
  Description of Artificial Sequence: Synthetic oligonucleotide
  Sense strand starting at position 772 of SEQ ID NO: 1885504
cuauaugaccuccaugugu

SEQ ID NO: 2346899 - RNA, 19 nt, Artificial Sequence
  Description of Artificial Sequence: Synthetic oligonucleotide
  Antisense strand to SEQ ID NO: 2346898
acacauggaggucauauag

SEQ ID NO: 2346900 - RNA, 19 nt, Artificial Sequence
  Description of Artificial Sequence: Synthetic oligonucleotide
  Sense strand starting at position 787 of SEQ ID NO: 1885504
gugucucuacuacguguaa

SEQ ID NO: 2346901 - RNA, 19 nt, Artificial Sequence
  Description of Artificial Sequence: Synthetic oligonucleotide
  Antisense strand to SEQ ID NO: 2346900
uuacacguaguagagacac

SEQ ID NO: 2346902 - RNA, 19 nt, Artificial Sequence
  Description of Artificial Sequence: Synthetic oligonucleotide
  Sense strand starting at position 788 of SEQ ID NO: 1885504
ugucucuacuacguguaaa

SEQ ID NO: 2346903 - RNA, 19 nt, Artificial Sequence
  Description of Artificial Sequence: Synthetic oligonucleotide
  Antisense strand to SEQ ID NO: 2346902
uuuacacguaguagagaca

SEQ ID NO: 2346904 - RNA, 19 nt, Artificial Sequence
  Description of Artificial Sequence: Synthetic oligonucleotide
  Sense strand starting at position 810 of SEQ ID NO: 1885504
ggcuuaauggcacagccau

SEQ ID NO: 2346905 - RNA, 19 nt, Artificial Sequence
  Description of Artificial Sequence: Synthetic oligonucleotide
  Antisense strand to SEQ ID NO: 2346904
auggcugugccauuaagcc

SEQ ID NO: 2346906 - RNA, 19 nt, Artificial Sequence
  Description of Artificial Sequence: Synthetic oligonucleotide
  Sense strand starting at position 833 of SEQ ID NO: 1885504
ggcguuccuuuacuuauuu

SEQ ID NO: 2346907 - RNA, 19 nt, Artificial Sequence
  Description of Artificial Sequence: Synthetic oligonucleotide
  Antisense strand to SEQ ID NO: 2346906
aaauaaguaaaggaacgcc

SEQ ID NO: 2346908 - RNA, 19 nt, Artificial Sequence
  Description of Artificial Sequence: Synthetic oligonucleotide
  Sense strand starting at position 1024 of SEQ ID NO: 1885504
ccuccagguuucuuucuua

SEQ ID NO: 2346909 - RNA, 19 nt, Artificial Sequence
  Description of Artificial Sequence: Synthetic oligonucleotide
  Antisense strand to SEQ ID NO: 2346908
uaagaaagaaaccuggagg

SEQ ID NO: 2346910 - RNA, 19 nt, Artificial Sequence
  Description of Artificial Sequence: Synthetic oligonucleotide
  Sense strand starting at position 1156 of SEQ ID NO: 1885504
uugcacuugucagccauua

SEQ ID NO: 2346911 - RNA, 19 nt, Artificial Sequence
  Description of Artificial Sequence: Synthetic oligonucleotide
  Antisense strand to SEQ ID NO: 2346910
uaauggcugacaagugcaa

SEQ ID NO: 2346912 - RNA, 19 nt, Artificial Sequence
  Description of Artificial Sequence: Synthetic oligonucleotide
  Sense strand starting at position 1204 of SEQ ID NO: 1885504
ugugaagaguuggcaucua

SEQ ID NO: 2346913 - RNA, 19 nt, Artificial Sequence
  Description of Artificial Sequence: Synthetic oligonucleotide
  Antisense strand to SEQ ID NO: 2346912
uagaugccaacucuucaca

SEQ ID NO: 2346914 - RNA, 19 nt, Artificial Sequence
  Description of Artificial Sequence: Synthetic oligonucleotide
  Sense strand starting at position 1209 of SEQ ID NO: 1885504
agaguuggcaucuagcaaa

SEQ ID NO: 2346915 - RNA, 19 nt, Artificial Sequence
  Description of Artificial Sequence: Synthetic oligonucleotide
  Antisense strand to SEQ ID NO: 2346914
uuugcuagaugccaacucu

SEQ ID NO: 2346916 - RNA, 19 nt, Artificial Sequence
  Description of Artificial Sequence: Synthetic oligonucleotide
  Sense strand starting at position 1371 of SEQ ID NO: 1885504
gagacuuuccggugcccaa

SEQ ID NO: 2346917 - RNA, 19 nt, Artificial Sequence
  Description of Artificial Sequence: Synthetic oligonucleotide
  Antisense strand to SEQ ID NO: 2346916
uugggcaccggaaagucuc

SEQ ID NO: 2346918 - RNA, 19 nt, Artificial Sequence
  Description of Artificial Sequence: Synthetic oligonucleotide
  Sense strand starting at position 1417 of SEQ ID NO: 1885504
gcuggaggccuugggauau

SEQ ID NO: 2346919 - RNA, 19 nt, Artificial Sequence
  Description of Artificial Sequence: Synthetic oligonucleotide
  Antisense strand to SEQ ID NO: 2346918
auaucccaaggccuccagc

SEQ ID NO: 2346920 - RNA, 19 nt, Artificial Sequence
  Description of Artificial Sequence: Synthetic oligonucleotide
  Sense strand starting at position 1530 of SEQ ID NO: 1885504
ggacuagaucgaugggacu

SEQ ID NO: 2346921 - RNA, 19 nt, Artificial Sequence
  Description of Artificial Sequence: Synthetic oligonucleotide
  Antisense strand to SEQ ID NO: 2346920
agucccaucgaucuagucc

SEQ ID NO: 2346922 - RNA, 19 nt, Artificial Sequence
  Description of Artificial Sequence: Synthetic oligonucleotide
  Sense strand starting at position 2826 of SEQ ID NO: 1885504
uggaguagaugaugaauaa

SEQ ID NO: 2346923 - RNA, 19 nt, Artificial Sequence
  Description of Artificial Sequence: Synthetic oligonucleotide
  Antisense strand to SEQ ID NO: 2346922
uuauucaucaucuacucca

SEQ ID NO: 2346924 - RNA, 19 nt, Artificial Sequence
  Description of Artificial Sequence: Synthetic oligonucleotide
  Sense strand starting at position 2993 of SEQ ID NO: 1885504
auguaagcaucugaauuag

SEQ ID NO: 2346925 - RNA, 19 nt, Artificial Sequence
  Description of Artificial Sequence: Synthetic oligonucleotide
  Antisense strand to SEQ ID NO: 2346924
cuaauucagaugcuuacau

SEQ ID NO: 2346926 - RNA, 19 nt, Artificial Sequence
  Description of Artificial Sequence: Synthetic oligonucleotide
  Sense strand starting at position 3222 of SEQ ID NO: 1885504
gguagguuuggagaugugu

SEQ ID NO: 2346927 - RNA, 19 nt, Artificial Sequence
  Description of Artificial Sequence: Synthetic oligonucleotide
  Antisense strand to SEQ ID NO: 2346926
acacaucuccaaaccuacc

SEQ ID NO: 2346928 - RNA, 19 nt, Artificial Sequence
  Description of Artificial Sequence: Synthetic oligonucleotide
  Sense strand starting at position 3231 of SEQ ID NO: 1885504
ggagauguguuguugguga

SEQ ID NO: 2346929 - RNA, 19 nt, Artificial Sequence
  Description of Artificial Sequence: Synthetic oligonucleotide
  Antisense strand to SEQ ID NO: 2346928
ucaccaacaacacaucucc

SEQ ID NO: 2346930 - RNA, 19 nt, Artificial Sequence
  Description of Artificial Sequence: Synthetic oligonucleotide
  Sense strand starting at position 3233 of SEQ ID NO: 1885504
agauguguuguuggugaaa

SEQ ID NO: 2346931 - RNA, 19 nt, Artificial Sequence
  Description of Artificial Sequence: Synthetic oligonucleotide
  Antisense strand to SEQ ID NO: 2346930
uuucaccaacaacacaucu

SEQ ID NO: 2346932 - RNA, 19 nt, Artificial Sequence
  Description of Artificial Sequence: Synthetic oligonucleotide
  Sense strand starting at position 3236 of SEQ ID NO: 1885504
uguguuguuggugaaauca

SEQ ID NO: 2346933 - RNA, 19 nt, Artificial Sequence
  Description of Artificial Sequence: Synthetic oligonucleotide
  Antisense strand to SEQ ID NO: 2346932
ugauuucaccaacaacaca

SEQ ID NO: 2346934 - RNA, 19 nt, Artificial Sequence
  Description of Artificial Sequence: Synthetic oligonucleotide
  Sense strand starting at position 3296 of SEQ ID NO: 1885504
aaagaauccugguuuguaa

SEQ ID NO: 2346935 - RNA, 19 nt, Artificial Sequence
  Description of Artificial Sequence: Synthetic oligonucleotide
  Antisense strand to SEQ ID NO: 2346934
uuacaaaccaggauucuuu

SEQ ID NO: 2346936 - RNA, 19 nt, Artificial Sequence
  Description of Artificial Sequence: Synthetic oligonucleotide
  Sense strand starting at position 3736 of SEQ ID NO: 1885504
uggcguauagugagcaagu

SEQ ID NO: 2346937 - RNA, 19 nt, Artificial Sequence
  Description of Artificial Sequence: Synthetic oligonucleotide
  Antisense strand to SEQ ID NO: 2346936
acuugcucacuauacgcca

SEQ ID NO: 2346938 - RNA, 19 nt, Artificial Sequence
  Description of Artificial Sequence: Synthetic oligonucleotide
  Sense strand starting at position 3737 of SEQ ID NO: 1885504
ggcguauagugagcaagua

SEQ ID NO: 2346939 - RNA, 19 nt, Artificial Sequence
  Description of Artificial Sequence: Synthetic oligonucleotide
  Antisense strand to SEQ ID NO: 2346938
uacuugcucacuauacgcc

SEQ ID NO: 2346940 - RNA, 19 nt, Artificial Sequence
  Description of Artificial Sequence: Synthetic oligonucleotide
  Sense strand starting at position 3738 of SEQ ID NO: 1885504
gcguauagugagcaaguaa

SEQ ID NO: 2346941 - RNA, 19 nt, Artificial Sequence
  Description of Artificial Sequence: Synthetic oligonucleotide
  Antisense strand to SEQ ID NO: 2346940
uuacuugcucacuauacgc

SEQ ID NO: 2346942 - RNA, 19 nt, Artificial Sequence
  Description of Artificial Sequence: Synthetic oligonucleotide
  Sense strand starting at position 3798 of SEQ ID NO: 1885504
agaaguuacagcugcagua

SEQ ID NO: 2346943 - RNA, 19 nt, Artificial Sequence
  Description of Artificial Sequence: Synthetic oligonucleotide
  Antisense strand to SEQ ID NO: 2346942
uacugcagcuguaacuucu

SEQ ID NO: 2346944 - RNA, 19 nt, Artificial Sequence
  Description of Artificial Sequence: Synthetic oligonucleotide
  Sense strand starting at position 3811 of SEQ ID NO: 1885504
gcaguacucugcuuugcua

SEQ ID NO: 2346945 - RNA, 19 nt, Artificial Sequence
  Description of Artificial Sequence: Synthetic oligonucleotide
  Antisense strand to SEQ ID NO: 2346944
uagcaaagcagaguacugc

SEQ ID NO: 2346946 - RNA, 19 nt, Artificial Sequence
  Description of Artificial Sequence: Synthetic oligonucleotide
  Sense strand starting at position 3851 of SEQ ID NO: 1885504
aggagagcuuaaguaucau

SEQ ID NO: 2346947 - RNA, 19 nt, Artificial Sequence
  Description of Artificial Sequence: Synthetic oligonucleotide
  Antisense strand to SEQ ID NO: 2346946
augauacuuaagcucuccu

SEQ ID NO: 2346948 - RNA, 19 nt, Artificial Sequence
  Description of Artificial Sequence: Synthetic oligonucleotide
  Sense strand starting at position 3908 of SEQ ID NO: 1885504
uccuuaguuugagccucau

SEQ ID NO: 2346949 - RNA, 19 nt, Artificial Sequence
  Description of Artificial Sequence: Synthetic oligonucleotide
  Antisense strand to SEQ ID NO: 2346948
augaggcucaaacuaagga

SEQ ID NO: 2346950 - RNA, 19 nt, Artificial Sequence
  Description of Artificial Sequence: Synthetic oligonucleotide
  Sense strand starting at position 3912 of SEQ ID NO: 1885504
uaguuugagccucaugaac

SEQ ID NO: 2346951 - RNA, 19 nt, Artificial Sequence
  Description of Artificial Sequence: Synthetic oligonucleotide
  Antisense strand to SEQ ID NO: 2346950
guucaugaggcucaaacua

SEQ ID NO: 2346952 - RNA, 19 nt, Artificial Sequence
  Description of Artificial Sequence: Synthetic oligonucleotide
  Sense strand starting at position 3914 of SEQ ID NO: 1885504
guuugagccucaugaacua

SEQ ID NO: 2346953 - RNA, 19 nt, Artificial Sequence
  Description of Artificial Sequence: Synthetic oligonucleotide
  Antisense strand to SEQ ID NO: 2346952
uaguucaugaggcucaaac

SEQ ID NO: 2346954 - RNA, 19 nt, Artificial Sequence
  Description of Artificial Sequence: Synthetic oligonucleotide
  Sense strand starting at position 3981 of SEQ ID NO: 1885504
gagcuaaugcacuguggga

SEQ ID NO: 2346955 - RNA, 19 nt, Artificial Sequence
  Description of Artificial Sequence: Synthetic oligonucleotide
  Antisense strand to SEQ ID NO: 2346954
ucccacagugcauuagcuc

SEQ ID NO: 2346956 - RNA, 19 nt, Artificial Sequence
  Description of Artificial Sequence: Synthetic oligonucleotide
  Sense strand starting at position 117 of SEQ ID NO: 1885505
gguauaccugcugauggaa

SEQ ID NO: 2346957 - RNA, 19 nt, Artificial Sequence
  Description of Artificial Sequence: Synthetic oligonucleotide
  Antisense strand to SEQ ID NO: 2346956
uuccaucagcagguauacc

SEQ ID NO: 2346958 - RNA, 19 nt, Artificial Sequence
  Description of Artificial Sequence: Synthetic oligonucleotide
  Sense strand starting at position 268 of SEQ ID NO: 1885505
aggcuuaucagggagucca

SEQ ID NO: 2346959 - RNA, 19 nt, Artificial Sequence
  Description of Artificial Sequence: Synthetic oligonucleotide
  Antisense strand to SEQ ID NO: 2346958
uggacucccugauaagccu

SEQ ID NO: 2346960 - RNA, 19 nt, Artificial Sequence
  Description of Artificial Sequence: Synthetic oligonucleotide
  Sense strand starting at position 313 of SEQ ID NO: 1885505
aaguuaagacgauguucuu

SEQ ID NO: 2346961 - RNA, 19 nt, Artificial Sequence
  Description of Artificial Sequence: Synthetic oligonucleotide
  Antisense strand to SEQ ID NO: 2346960
aagaacaucgucuuaacuu

SEQ ID NO: 2346962 - RNA, 19 nt, Artificial Sequence
  Description of Artificial Sequence: Synthetic oligonucleotide
  Sense strand starting at position 316 of SEQ ID NO: 1885505
uuaagacgauguucuuuaa

SEQ ID NO: 2346963 - RNA, 19 nt, Artificial Sequence
  Description of Artificial Sequence: Synthetic oligonucleotide
  Antisense strand to SEQ ID NO: 2346962
uuaaagaacaucgucuuaa

SEQ ID NO: 2346964 - RNA, 19 nt, Artificial Sequence
  Description of Artificial Sequence: Synthetic oligonucleotide
  Sense strand starting at position 320 of SEQ ID NO: 1885505
gacgauguucuuuaagcca

SEQ ID NO: 2346965 - RNA, 19 nt, Artificial Sequence
  Description of Artificial Sequence: Synthetic oligonucleotide
  Antisense strand to SEQ ID NO: 2346964
uggcuuaaagaacaucguc

SEQ ID NO: 2346966 - RNA, 19 nt, Artificial Sequence
  Description of Artificial Sequence: Synthetic oligonucleotide
  Sense strand starting at position 408 of SEQ ID NO: 1885505
gucuuaaagguaugacaug

SEQ ID NO: 2346967 - RNA, 19 nt, Artificial Sequence
  Description of Artificial Sequence: Synthetic oligonucleotide
  Antisense strand to SEQ ID NO: 2346966
caugucauaccuuuaagac

SEQ ID NO: 2346968 - RNA, 19 nt, Artificial Sequence
  Description of Artificial Sequence: Synthetic oligonucleotide
  Sense strand starting at position 431 of SEQ ID NO: 1885505
ccgugcuugacauauaaga

SEQ ID NO: 2346969 - RNA, 19 nt, Artificial Sequence
  Description of Artificial Sequence: Synthetic oligonucleotide
  Antisense strand to SEQ ID NO: 2346968
ucuuauaugucaagcacgg

SEQ ID NO: 2346970 - RNA, 19 nt, Artificial Sequence
  Description of Artificial Sequence: Synthetic oligonucleotide
  Sense strand starting at position 480 of SEQ ID NO: 1885505
ggagcauccuacuuccuaa

SEQ ID NO: 2346971 - RNA, 19 nt, Artificial Sequence
  Description of Artificial Sequence: Synthetic oligonucleotide
  Antisense strand to SEQ ID NO: 2346970
uuaggaaguaggaugcucc

SEQ ID NO: 2346972 - RNA, 19 nt, Artificial Sequence
  Description of Artificial Sequence: Synthetic oligonucleotide
  Sense strand starting at position 526 of SEQ ID NO: 1885505
gugaaaccuuaagccaauu

SEQ ID NO: 2346973 - RNA, 19 nt, Artificial Sequence
  Description of Artificial Sequence: Synthetic oligonucleotide
  Antisense strand to SEQ ID NO: 2346972
aauuggcuuaagguuucac

SEQ ID NO: 2346974 - RNA, 19 nt, Artificial Sequence
  Description of Artificial Sequence: Synthetic oligonucleotide
  Sense strand starting at position 645 of SEQ ID NO: 1885505
gcuacuuacuuguuggaag

SEQ ID NO: 2346975 - RNA, 19 nt, Artificial Sequence
  Description of Artificial Sequence: Synthetic oligonucleotide
  Antisense strand to SEQ ID NO: 2346974
cuuccaacaaguaaguagc

SEQ ID NO: 2346976 - RNA, 19 nt, Artificial Sequence
  Description of Artificial Sequence: Synthetic oligonucleotide
  Sense strand starting at position 647 of SEQ ID NO: 1885505
uacuuacuuguuggaaguu

SEQ ID NO: 2346977 - RNA, 19 nt, Artificial Sequence
  Description of Artificial Sequence: Synthetic oligonucleotide
  Antisense strand to SEQ ID NO: 2346976
aacuuccaacaaguaagua

SEQ ID NO: 2346978 - RNA, 19 nt, Artificial Sequence
  Description of Artificial Sequence: Synthetic oligonucleotide
  Sense strand starting at position 1110 of SEQ ID NO: 1885505
gcaugcaagcccuagauca

SEQ ID NO: 2346979 - RNA, 19 nt, Artificial Sequence
  Description of Artificial Sequence: Synthetic oligonucleotide
  Antisense strand to SEQ ID NO: 2346978
ugaucuagggcuugcaugc

SEQ ID NO: 2346980 - RNA, 19 nt, Artificial Sequence
  Description of Artificial Sequence: Synthetic oligonucleotide
  Sense strand starting at position 1265 of SEQ ID NO: 1885505
ugaacauuauuugguaaag

SEQ ID NO: 2346981 - RNA, 19 nt, Artificial Sequence
  Description of Artificial Sequence: Synthetic oligonucleotide
  Antisense strand to SEQ ID NO: 2346980
cuuuaccaaauaauguuca

SEQ ID NO: 2346982 - RNA, 19 nt, Artificial Sequence
  Description of Artificial Sequence: Synthetic oligonucleotide
  Sense strand starting at position 1274 of SEQ ID NO: 1885505
uuugguaaagaaugcauau

SEQ ID NO: 2346983 - RNA, 19 nt, Artificial Sequence
  Description of Artificial Sequence: Synthetic oligonucleotide
  Antisense strand to SEQ ID NO: 2346982
auaugcauucuuuaccaaa

SEQ ID NO: 2346984 - RNA, 19 nt, Artificial Sequence
  Description of Artificial Sequence: Synthetic oligonucleotide
  Sense strand starting at position 1301 of SEQ ID NO: 1885505
uccgacuagccauacuuua

SEQ ID NO: 2346985 - RNA, 19 nt, Artificial Sequence
  Description of Artificial Sequence: Synthetic oligonucleotide
  Antisense strand to SEQ ID NO: 2346984
uaaaguauggcuagucgga

SEQ ID NO: 2346986 - RNA, 19 nt, Artificial Sequence
  Description of Artificial Sequence: Synthetic oligonucleotide
  Sense strand starting at position 1403 of SEQ ID NO: 1885505
acgcccauggucugaaaga

SEQ ID NO: 2346987 - RNA, 19 nt, Artificial Sequence
  Description of Artificial Sequence: Synthetic oligonucleotide
  Antisense strand to SEQ ID NO: 2346986
ucuuucagaccaugggcgu

SEQ ID NO: 2346988 - RNA, 19 nt, Artificial Sequence
  Description of Artificial Sequence: Synthetic oligonucleotide
  Sense strand starting at position 1506 of SEQ ID NO: 1885505
gggauaaauuaagaagaug

SEQ ID NO: 2346989 - RNA, 19 nt, Artificial Sequence
  Description of Artificial Sequence: Synthetic oligonucleotide
  Antisense strand to SEQ ID NO: 2346988
caucuucuuaauuuauccc

SEQ ID NO: 2346990 - RNA, 19 nt, Artificial Sequence
  Description of Artificial Sequence: Synthetic oligonucleotide
  Sense strand starting at position 1518 of SEQ ID NO: 1885505
gaagauguucuuuaagcca

SEQ ID NO: 2346991 - RNA, 19 nt, Artificial Sequence
  Description of Artificial Sequence: Synthetic oligonucleotide
  Antisense strand to SEQ ID NO: 2346990
uggcuuaaagaacaucuuc

SEQ ID NO: 2346992 - RNA, 19 nt, Artificial Sequence
  Description of Artificial Sequence: Synthetic oligonucleotide
  Sense strand starting at position 1796 of SEQ ID NO: 1885505
cuaagcucuccgggaaaca

SEQ ID NO: 2346993 - RNA, 19 nt, Artificial Sequence
  Description of Artificial Sequence: Synthetic oligonucleotide
  Antisense strand to SEQ ID NO: 2346992
uguuucccggagagcuuag

SEQ ID NO: 2346994 - RNA, 19 nt, Artificial Sequence
  Description of Artificial Sequence: Synthetic oligonucleotide
  Sense strand starting at position 1797 of SEQ ID NO: 1885505
uaagcucuccgggaaacaa

SEQ ID NO: 2346995 - RNA, 19 nt, Artificial Sequence
  Description of Artificial Sequence: Synthetic oligonucleotide
  Antisense strand to SEQ ID NO: 2346994
uuguuucccggagagcuua

SEQ ID NO: 2346996 - RNA, 19 nt, Artificial Sequence
  Description of Artificial Sequence: Synthetic oligonucleotide
  Sense strand starting at position 3100 of SEQ ID NO: 1885505
gggaaaucaguguauguuu

SEQ ID NO: 2346997 - RNA, 19 nt, Artificial Sequence
  Description of Artificial Sequence: Synthetic oligonucleotide
  Antisense strand to SEQ ID NO: 2346996
aaacauacacugauuuccc

SEQ ID NO: 2346998 - RNA, 19 nt, Artificial Sequence
  Description of Artificial Sequence: Synthetic oligonucleotide
  Sense strand starting at position 3137 of SEQ ID NO: 1885505
uucuguagauuguccagaa

SEQ ID NO: 2346999 - RNA, 19 nt, Artificial Sequence
  Description of Artificial Sequence: Synthetic oligonucleotide
  Antisense strand to SEQ ID NO: 2346998
uucuggacaaucuacagaa

SEQ ID NO: 2347000 - RNA, 19 nt, Artificial Sequence
  Description of Artificial Sequence: Synthetic oligonucleotide
  Sense strand starting at position 3138 of SEQ ID NO: 1885505
ucuguagauuguccagaaa

SEQ ID NO: 2347001 - RNA, 19 nt, Artificial Sequence
  Description of Artificial Sequence: Synthetic oligonucleotide
  Antisense strand to SEQ ID NO: 2347000
uuucuggacaaucuacaga

SEQ ID NO: 2347002 - RNA, 19 nt, Artificial Sequence
  Description of Artificial Sequence: Synthetic oligonucleotide
  Sense strand starting at position 3224 of SEQ ID NO: 1885505
accugaagauccgcggaaa

SEQ ID NO: 2347003 - RNA, 19 nt, Artificial Sequence
  Description of Artificial Sequence: Synthetic oligonucleotide
  Antisense strand to SEQ ID NO: 2347002
uuuccgcggaucuucaggu

SEQ ID NO: 2347004 - RNA, 19 nt, Artificial Sequence
  Description of Artificial Sequence: Synthetic oligonucleotide
  Sense strand starting at position 3261 of SEQ ID NO: 1885505
gguccuauuuguguagugu

SEQ ID NO: 2347005 - RNA, 19 nt, Artificial Sequence
  Description of Artificial Sequence: Synthetic oligonucleotide
  Antisense strand to SEQ ID NO: 2347004
acacuacacaaauaggacc

SEQ ID NO: 2347006 - RNA, 19 nt, Artificial Sequence
  Description of Artificial Sequence: Synthetic oligonucleotide
  Sense strand starting at position 3262 of SEQ ID NO: 1885505
guccuauuuguguaguguu

SEQ ID NO: 2347007 - RNA, 19 nt, Artificial Sequence
  Description of Artificial Sequence: Synthetic oligonucleotide
  Antisense strand to SEQ ID NO: 2347006
aacacuacacaaauaggac

SEQ ID NO: 2347008 - RNA, 19 nt, Artificial Sequence
  Description of Artificial Sequence: Synthetic oligonucleotide
  Sense strand starting at position 3308 of SEQ ID NO: 1885505
ugguuaaagggacacguua

SEQ ID NO: 2347009 - RNA, 19 nt, Artificial Sequence
  Description of Artificial Sequence: Synthetic oligonucleotide
  Antisense strand to SEQ ID NO: 2347008
uaacgugucccuuuaacca

SEQ ID NO: 2347010 - RNA, 19 nt, Artificial Sequence
  Description of Artificial Sequence: Synthetic oligonucleotide
  Sense strand starting at position 3323 of SEQ ID NO: 1885505
guuacuggucuacacgaua

SEQ ID NO: 2347011 - RNA, 19 nt, Artificial Sequence
  Description of Artificial Sequence: Synthetic oligonucleotide
  Antisense strand to SEQ ID NO: 2347010
uaucguguagaccaguaac

SEQ ID NO: 2347012 - RNA, 19 nt, Artificial Sequence
  Description of Artificial Sequence: Synthetic oligonucleotide
  Sense strand starting at position 3326 of SEQ ID NO: 1885505
acuggucuacacgauaagu

SEQ ID NO: 2347013 - RNA, 19 nt, Artificial Sequence
  Description of Artificial Sequence: Synthetic oligonucleotide
  Antisense strand to SEQ ID NO: 2347012
acuuaucguguagaccagu

SEQ ID NO: 2347014 - RNA, 19 nt, Artificial Sequence
  Description of Artificial Sequence: Synthetic oligonucleotide
  Sense strand starting at position 3328 of SEQ ID NO: 1885505
uggucuacacgauaaguaa

SEQ ID NO: 2347015 - RNA, 19 nt, Artificial Sequence
  Description of Artificial Sequence: Synthetic oligonucleotide
  Antisense strand to SEQ ID NO: 2347014
uuacuuaucguguagacca

SEQ ID NO: 2347016 - RNA, 19 nt, Artificial Sequence
  Description of Artificial Sequence: Synthetic oligonucleotide
  Sense strand starting at position 3341 of SEQ ID NO: 1885505
aaguaaguguucuuaggac

SEQ ID NO: 2347017 - RNA, 19 nt, Artificial Sequence
  Description of Artificial Sequence: Synthetic oligonucleotide
  Antisense strand to SEQ ID NO: 2347016
guccuaagaacacuuacuu

SEQ ID NO: 2347018 - RNA, 19 nt, Artificial Sequence
  Description of Artificial Sequence: Synthetic oligonucleotide
  Sense strand starting at position 3419 of SEQ ID NO: 1885505
gucuucgaauauucugaau

SEQ ID NO: 2347019 - RNA, 19 nt, Artificial Sequence
  Description of Artificial Sequence: Synthetic oligonucleotide
  Antisense strand to SEQ ID NO: 2347018
auucagaauauucgaagac

SEQ ID NO: 2347020 - RNA, 19 nt, Artificial Sequence
  Description of Artificial Sequence: Synthetic oligonucleotide
  Sense strand starting at position 3440 of SEQ ID NO: 1885505
uuacaauccugauugucag

SEQ ID NO: 2347021 - RNA, 19 nt, Artificial Sequence
  Description of Artificial Sequence: Synthetic oligonucleotide
  Antisense strand to SEQ ID NO: 2347020
cugacaaucaggauuguaa

SEQ ID NO: 2347022 - RNA, 19 nt, Artificial Sequence
  Description of Artificial Sequence: Synthetic oligonucleotide
  Sense strand starting at position 3496 of SEQ ID NO: 1885505
gacucagguuaggauuuaa

SEQ ID NO: 2347023 - RNA, 19 nt, Artificial Sequence
  Description of Artificial Sequence: Synthetic oligonucleotide
  Antisense strand to SEQ ID NO: 2347022
uuaaauccuaaccugaguc

SEQ ID NO: 2347024 - RNA, 19 nt, Artificial Sequence
  Description of Artificial Sequence: Synthetic oligonucleotide
  Sense strand starting at position 3552 of SEQ ID NO: 1885505
acagguuagcuauauugaa

SEQ ID NO: 2347025 - RNA, 19 nt, Artificial Sequence
  Description of Artificial Sequence: Synthetic oligonucleotide
  Antisense strand to SEQ ID NO: 2347024
uucaauauagcuaaccugu

SEQ ID NO: 2347026 - RNA, 19 nt, Artificial Sequence
  Description of Artificial Sequence: Synthetic oligonucleotide
  Sense strand starting at position 3567 of SEQ ID NO: 1885505
ugaauauguauugguguaa

SEQ ID NO: 2347027 - RNA, 19 nt, Artificial Sequence
  Description of Artificial Sequence: Synthetic oligonucleotide
  Antisense strand to SEQ ID NO: 2347026
uuacaccaauacauauuca

SEQ ID NO: 2347028 - RNA, 19 nt, Artificial Sequence
  Description of Artificial Sequence: Synthetic oligonucleotide
  Sense strand starting at position 3568 of SEQ ID NO: 1885505
gaauauguauugguguaaa

SEQ ID NO: 2347029 - RNA, 19 nt, Artificial Sequence
  Description of Artificial Sequence: Synthetic oligonucleotide
  Antisense strand to SEQ ID NO: 2347028
uuuacaccaauacauauuc

SEQ ID NO: 2347030 - RNA, 19 nt, Artificial Sequence
  Description of Artificial Sequence: Synthetic oligonucleotide
  Sense strand starting at position 3737 of SEQ ID NO: 1885505
ugcaaagucuacuuuaaag

SEQ ID NO: 2347031 - RNA, 19 nt, Artificial Sequence
  Description of Artificial Sequence: Synthetic oligonucleotide
  Antisense strand to SEQ ID NO: 2347030
cuuuaaaguagacuuugca

SEQ ID NO: 2347032 - RNA, 19 nt, Artificial Sequence
  Description of Artificial Sequence: Synthetic oligonucleotide
  Sense strand starting at position 3920 of SEQ ID NO: 1885505
augguaacauagguuuaua

SEQ ID NO: 2347033 - RNA, 19 nt, Artificial Sequence
  Description of Artificial Sequence: Synthetic oligonucleotide
  Antisense strand to SEQ ID NO: 2347032
uauaaaccuauguuaccau

SEQ ID NO: 2347034 - RNA, 19 nt, Artificial Sequence
  Description of Artificial Sequence: Synthetic oligonucleotide
  Sense strand starting at position 3973 of SEQ ID NO: 1885505
agagaacaguuaguccauu

SEQ ID NO: 2347035 - RNA, 19 nt, Artificial Sequence
  Description of Artificial Sequence: Synthetic oligonucleotide
  Antisense strand to SEQ ID NO: 2347034
aauggacuaacuguucucu

SEQ ID NO: 2347036 - RNA, 19 nt, Artificial Sequence
  Description of Artificial Sequence: Synthetic oligonucleotide
  Sense strand starting at position 267 of SEQ ID NO: 1885506
gccaaugaacaauggucaa

SEQ ID NO: 2347037 - RNA, 19 nt, Artificial Sequence
  Description of Artificial Sequence: Synthetic oligonucleotide
  Antisense strand to SEQ ID NO: 2347036
uugaccauuguucauuggc

SEQ ID NO: 2347038 - RNA, 19 nt, Artificial Sequence
  Description of Artificial Sequence: Synthetic oligonucleotide
  Sense strand starting at position 573 of SEQ ID NO: 1885506
ucauuagaagcuuggguaa

SEQ ID NO: 2347039 - RNA, 19 nt, Artificial Sequence
  Description of Artificial Sequence: Synthetic oligonucleotide
  Antisense strand to SEQ ID NO: 2347038
uuacccaagcuucuaauga

SEQ ID NO: 2347040 - RNA, 19 nt, Artificial Sequence
  Description of Artificial Sequence: Synthetic oligonucleotide
  Sense strand starting at position 634 of SEQ ID NO: 1885506
aaagaaaugcugggauggu

SEQ ID NO: 2347041 - RNA, 19 nt, Artificial Sequence
  Description of Artificial Sequence: Synthetic oligonucleotide
  Antisense strand to SEQ ID NO: 2347040
accaucccagcauuucuuu

SEQ ID NO: 2347042 - RNA, 19 nt, Artificial Sequence
  Description of Artificial Sequence: Synthetic oligonucleotide
  Sense strand starting at position 643 of SEQ ID NO: 1885506
cugggaugguacucaaaua

SEQ ID NO: 2347043 - RNA, 19 nt, Artificial Sequence
  Description of Artificial Sequence: Synthetic oligonucleotide
  Antisense strand to SEQ ID NO: 2347042
uauuugaguaccaucccag

SEQ ID NO: 2347044 - RNA, 19 nt, Artificial Sequence
  Description of Artificial Sequence: Synthetic oligonucleotide
  Sense strand starting at position 651 of SEQ ID NO: 1885506
guacucaaauaguuuacaa

SEQ ID NO: 2347045 - RNA, 19 nt, Artificial Sequence
  Description of Artificial Sequence: Synthetic oligonucleotide
  Antisense strand to SEQ ID NO: 2347044
uuguaaacuauuugaguac

SEQ ID NO: 2347046 - RNA, 19 nt, Artificial Sequence
  Description of Artificial Sequence: Synthetic oligonucleotide
  Sense strand starting at position 756 of SEQ ID NO: 1885506
aaggguuggagucauggua

SEQ ID NO: 2347047 - RNA, 19 nt, Artificial Sequence
  Description of Artificial Sequence: Synthetic oligonucleotide
  Antisense strand to SEQ ID NO: 2347046
uaccaugacuccaacccuu

SEQ ID NO: 2347048 - RNA, 19 nt, Artificial Sequence
  Description of Artificial Sequence: Synthetic oligonucleotide
  Sense strand starting at position 925 of SEQ ID NO: 1885506
gagaguguuggccauauca

SEQ ID NO: 2347049 - RNA, 19 nt, Artificial Sequence
  Description of Artificial Sequence: Synthetic oligonucleotide
  Antisense strand to SEQ ID NO: 2347048
ugauauggccaacacucuc

SEQ ID NO: 2347050 - RNA, 19 nt, Artificial Sequence
  Description of Artificial Sequence: Synthetic oligonucleotide
  Sense strand starting at position 927 of SEQ ID NO: 1885506
gaguguuggccauaucaau

SEQ ID NO: 2347051 - RNA, 19 nt, Artificial Sequence
  Description of Artificial Sequence: Synthetic oligonucleotide
  Antisense strand to SEQ ID NO: 2347050
auugauauggccaacacuc

SEQ ID NO: 2347052 - RNA, 19 nt, Artificial Sequence
  Description of Artificial Sequence: Synthetic oligonucleotide
  Sense strand starting at position 1140 of SEQ ID NO: 1885506
ucucaaugacgucaagauc

SEQ ID NO: 2347053 - RNA, 19 nt, Artificial Sequence
  Description of Artificial Sequence: Synthetic oligonucleotide
  Antisense strand to SEQ ID NO: 2347052
gaucuugacgucauugaga

SEQ ID NO: 2347054 - RNA, 19 nt, Artificial Sequence
  Description of Artificial Sequence: Synthetic oligonucleotide
  Sense strand starting at position 1143 of SEQ ID NO: 1885506
caaugacgucaagaucuuu

SEQ ID NO: 2347055 - RNA, 19 nt, Artificial Sequence
  Description of Artificial Sequence: Synthetic oligonucleotide
  Antisense strand to SEQ ID NO: 2347054
aaagaucuugacgucauug

SEQ ID NO: 2347056 - RNA, 19 nt, Artificial Sequence
  Description of Artificial Sequence: Synthetic oligonucleotide
  Sense strand starting at position 1148 of SEQ ID NO: 1885506
acgucaagaucuuuaccaa

SEQ ID NO: 2347057 - RNA, 19 nt, Artificial Sequence
  Description of Artificial Sequence: Synthetic oligonucleotide
  Antisense strand to SEQ ID NO: 2347056
uugguaaagaucuugacgu

SEQ ID NO: 2347058 - RNA, 19 nt, Artificial Sequence
  Description of Artificial Sequence: Synthetic oligonucleotide
  Sense strand starting at position 1149 of SEQ ID NO: 1885506
cgucaagaucuuuaccaag

SEQ ID NO: 2347059 - RNA, 19 nt, Artificial Sequence
  Description of Artificial Sequence: Synthetic oligonucleotide
  Antisense strand to SEQ ID NO: 2347058
cuugguaaagaucuugacg

SEQ ID NO: 2347060 - RNA, 19 nt, Artificial Sequence
  Description of Artificial Sequence: Synthetic oligonucleotide
  Sense strand starting at position 1190 of SEQ ID NO: 1885506
gcagcaauuagccagggaa

SEQ ID NO: 2347061 - RNA, 19 nt, Artificial Sequence
  Description of Artificial Sequence: Synthetic oligonucleotide
  Antisense strand to SEQ ID NO: 2347060
uucccuggcuaauugcugc

SEQ ID NO: 2347062 - RNA, 19 nt, Artificial Sequence
  Description of Artificial Sequence: Synthetic oligonucleotide
  Sense strand starting at position 1192 of SEQ ID NO: 1885506
agcaauuagccagggaaug

SEQ ID NO: 2347063 - RNA, 19 nt, Artificial Sequence
  Description of Artificial Sequence: Synthetic oligonucleotide
  Antisense strand to SEQ ID NO: 2347062
cauucccuggcuaauugcu

SEQ ID NO: 2347064 - RNA, 19 nt, Artificial Sequence
  Description of Artificial Sequence: Synthetic oligonucleotide
  Sense strand starting at position 1197 of SEQ ID NO: 1885506
uuagccagggaauguauaa

SEQ ID NO: 2347065 - RNA, 19 nt, Artificial Sequence
  Description of Artificial Sequence: Synthetic oligonucleotide
  Antisense strand to SEQ ID NO: 2347064
uuauacauucccuggcuaa

SEQ ID NO: 2347066 - RNA, 19 nt, Artificial Sequence
  Description of Artificial Sequence: Synthetic oligonucleotide
  Sense strand starting at position 1458 of SEQ ID NO: 1885506
gaaacaggcuacguuuaaa

SEQ ID NO: 2347067 - RNA, 19 nt, Artificial Sequence
  Description of Artificial Sequence: Synthetic oligonucleotide
  Antisense strand to SEQ ID NO: 2347066
uuuaaacguagccuguuuc

SEQ ID NO: 2347068 - RNA, 19 nt, Artificial Sequence
  Description of Artificial Sequence: Synthetic oligonucleotide
  Sense strand starting at position 1536 of SEQ ID NO: 1885506
gugcuuggaaaugaaagua

SEQ ID NO: 2347069 - RNA, 19 nt, Artificial Sequence
  Description of Artificial Sequence: Synthetic oligonucleotide
  Antisense strand to SEQ ID NO: 2347068
uacuuucauuuccaagcac

SEQ ID NO: 2347070 - RNA, 19 nt, Artificial Sequence
  Description of Artificial Sequence: Synthetic oligonucleotide
  Sense strand starting at position 1694 of SEQ ID NO: 1885506
cuccgaauugaaugaauug

SEQ ID NO: 2347071 - RNA, 19 nt, Artificial Sequence
  Description of Artificial Sequence: Synthetic oligonucleotide
  Antisense strand to SEQ ID NO: 2347070
caauucauucaauucggag

SEQ ID NO: 2347072 - RNA, 19 nt, Artificial Sequence
  Description of Artificial Sequence: Synthetic oligonucleotide
  Sense strand starting at position 1735 of SEQ ID NO: 1885506
gcuggagagacuggacuua

SEQ ID NO: 2347073 - RNA, 19 nt, Artificial Sequence
  Description of Artificial Sequence: Synthetic oligonucleotide
  Antisense strand to SEQ ID NO: 2347072
uaaguccagucucuccagc

SEQ ID NO: 2347074 - RNA, 19 nt, Artificial Sequence
  Description of Artificial Sequence: Synthetic oligonucleotide
  Sense strand starting at position 2351 of SEQ ID NO: 1885506
gcuauuaagccauaaugac

SEQ ID NO: 2347075 - RNA, 19 nt, Artificial Sequence
  Description of Artificial Sequence: Synthetic oligonucleotide
  Antisense strand to SEQ ID NO: 2347074
gucauuauggcuuaauagc

SEQ ID NO: 2347076 - RNA, 19 nt, Artificial Sequence
  Description of Artificial Sequence: Synthetic oligonucleotide
  Sense strand starting at position 2629 of SEQ ID NO: 1885506
cucucagagaguugacaag

SEQ ID NO: 2347077 - RNA, 19 nt, Artificial Sequence
  Description of Artificial Sequence: Synthetic oligonucleotide
  Antisense strand to SEQ ID NO: 2347076
cuugucaacucucugagag

SEQ ID NO: 2347078 - RNA, 19 nt, Artificial Sequence
  Description of Artificial Sequence: Synthetic oligonucleotide
  Sense strand starting at position 2658 of SEQ ID NO: 1885506
ggucauagaaauugugauu

SEQ ID NO: 2347079 - RNA, 19 nt, Artificial Sequence
  Description of Artificial Sequence: Synthetic oligonucleotide
  Antisense strand to SEQ ID NO: 2347078
aaucacaauuucuaugacc

SEQ ID NO: 2347080 - RNA, 19 nt, Artificial Sequence
  Description of Artificial Sequence: Synthetic oligonucleotide
  Sense strand starting at position 2663 of SEQ ID NO: 1885506
uagaaauugugauugggca

SEQ ID NO: 2347081 - RNA, 19 nt, Artificial Sequence
  Description of Artificial Sequence: Synthetic oligonucleotide
  Antisense strand to SEQ ID NO: 2347080
ugcccaaucacaauuucua

SEQ ID NO: 2347082 - RNA, 19 nt, Artificial Sequence
  Description of Artificial Sequence: Synthetic oligonucleotide
  Sense strand starting at position 2664 of SEQ ID NO: 1885506
agaaauugugauugggcau

SEQ ID NO: 2347083 - RNA, 19 nt, Artificial Sequence
  Description of Artificial Sequence: Synthetic oligonucleotide
  Antisense strand to SEQ ID NO: 2347082
augcccaaucacaauuucu

SEQ ID NO: 2347084 - RNA, 19 nt, Artificial Sequence
  Description of Artificial Sequence: Synthetic oligonucleotide
  Sense strand starting at position 2679 of SEQ ID NO: 1885506
gcaucauagcugcuugguu

SEQ ID NO: 2347085 - RNA, 19 nt, Artificial Sequence
  Description of Artificial Sequence: Synthetic oligonucleotide
  Antisense strand to SEQ ID NO: 2347084
aaccaagcagcuaugaugc

SEQ ID NO: 2347086 - RNA, 19 nt, Artificial Sequence
  Description of Artificial Sequence: Synthetic oligonucleotide
  Sense strand starting at position 2693 of SEQ ID NO: 1885506
ugguuucugguagagguaa

SEQ ID NO: 2347087 - RNA, 19 nt, Artificial Sequence
  Description of Artificial Sequence: Synthetic oligonucleotide
  Antisense strand to SEQ ID NO: 2347086
uuaccucuaccagaaacca

SEQ ID NO: 2347088 - RNA, 19 nt, Artificial Sequence
  Description of Artificial Sequence: Synthetic oligonucleotide
  Sense strand starting at position 2793 of SEQ ID NO: 1885506
gugauccugaguuacuaga

SEQ ID NO: 2347089 - RNA, 19 nt, Artificial Sequence
  Description of Artificial Sequence: Synthetic oligonucleotide
  Antisense strand to SEQ ID NO: 2347088
ucuaguaacucaggaucac

SEQ ID NO: 2347090 - RNA, 19 nt, Artificial Sequence
  Description of Artificial Sequence: Synthetic oligonucleotide
  Sense strand starting at position 2795 of SEQ ID NO: 1885506
gauccugaguuacuagaua

SEQ ID NO: 2347091 - RNA, 19 nt, Artificial Sequence
  Description of Artificial Sequence: Synthetic oligonucleotide
  Antisense strand to SEQ ID NO: 2347090
uaucuaguaacucaggauc

SEQ ID NO: 2347092 - RNA, 19 nt, Artificial Sequence
  Description of Artificial Sequence: Synthetic oligonucleotide
  Sense strand starting at position 2868 of SEQ ID NO: 1885506
agggaagccuccuuuacuu

SEQ ID NO: 2347093 - RNA, 19 nt, Artificial Sequence
  Description of Artificial Sequence: Synthetic oligonucleotide
  Antisense strand to SEQ ID NO: 2347092
aaguaaaggaggcuucccu

SEQ ID NO: 2347094 - RNA, 19 nt, Artificial Sequence
  Description of Artificial Sequence: Synthetic oligonucleotide
  Sense strand starting at position 2922 of SEQ ID NO: 1885506
agaugaugggucugugauu

SEQ ID NO: 2347095 - RNA, 19 nt, Artificial Sequence
  Description of Artificial Sequence: Synthetic oligonucleotide
  Antisense strand to SEQ ID NO: 2347094
aaucacagacccaucaucu

SEQ ID NO: 2347096 - RNA, 19 nt, Artificial Sequence
  Description of Artificial Sequence: Synthetic oligonucleotide
  Sense strand starting at position 2954 of SEQ ID NO: 1885506
agcuguuaugagcauuaga

SEQ ID NO: 2347097 - RNA, 19 nt, Artificial Sequence
  Description of Artificial Sequence: Synthetic oligonucleotide
  Antisense strand to SEQ ID NO: 2347096
ucuaaugcucauaacagcu

SEQ ID NO: 2347098 - RNA, 19 nt, Artificial Sequence
  Description of Artificial Sequence: Synthetic oligonucleotide
  Sense strand starting at position 2957 of SEQ ID NO: 1885506
uguuaugagcauuagagca

SEQ ID NO: 2347099 - RNA, 19 nt, Artificial Sequence
  Description of Artificial Sequence: Synthetic oligonucleotide
  Antisense strand to SEQ ID NO: 2347098
ugcucuaaugcucauaaca

SEQ ID NO: 2347100 - RNA, 19 nt, Artificial Sequence
  Description of Artificial Sequence: Synthetic oligonucleotide
  Sense strand starting at position 3172 of SEQ ID NO: 1885506
accugcuaugcccauauga

SEQ ID NO: 2347101 - RNA, 19 nt, Artificial Sequence
  Description of Artificial Sequence: Synthetic oligonucleotide
  Antisense strand to SEQ ID NO: 2347100
ucauaugggcauagcaggu

SEQ ID NO: 2347102 - RNA, 19 nt, Artificial Sequence
  Description of Artificial Sequence: Synthetic oligonucleotide
  Sense strand starting at position 3443 of SEQ ID NO: 1885506
gggaaugcauccuccauaa

SEQ ID NO: 2347103 - RNA, 19 nt, Artificial Sequence
  Description of Artificial Sequence: Synthetic oligonucleotide
  Antisense strand to SEQ ID NO: 2347102
uuauggaggaugcauuccc

SEQ ID NO: 2347104 - RNA, 19 nt, Artificial Sequence
  Description of Artificial Sequence: Synthetic oligonucleotide
  Sense strand starting at position 3536 of SEQ ID NO: 1885506
acaggauuguucuucugaa

SEQ ID NO: 2347105 - RNA, 19 nt, Artificial Sequence
  Description of Artificial Sequence: Synthetic oligonucleotide
  Antisense strand to SEQ ID NO: 2347104
uucagaagaacaauccugu

SEQ ID NO: 2347106 - RNA, 19 nt, Artificial Sequence
  Description of Artificial Sequence: Synthetic oligonucleotide
  Sense strand starting at position 3537 of SEQ ID NO: 1885506
caggauuguucuucugaaa

SEQ ID NO: 2347107 - RNA, 19 nt, Artificial Sequence
  Description of Artificial Sequence: Synthetic oligonucleotide
  Antisense strand to SEQ ID NO: 2347106
uuucagaagaacaauccug

SEQ ID NO: 2347108 - RNA, 19 nt, Artificial Sequence
  Description of Artificial Sequence: Synthetic oligonucleotide
  Sense strand starting at position 3579 of SEQ ID NO: 1885506
ucuguugugaacuagggaa

SEQ ID NO: 2347109 - RNA, 19 nt, Artificial Sequence
  Description of Artificial Sequence: Synthetic oligonucleotide
  Antisense strand to SEQ ID NO: 2347108
uucccuaguucacaacaga

SEQ ID NO: 2347110 - RNA, 19 nt, Artificial Sequence
  Description of Artificial Sequence: Synthetic oligonucleotide
  Sense strand starting at position 3581 of SEQ ID NO: 1885506
uguugugaacuagggaaau

SEQ ID NO: 2347111 - RNA, 19 nt, Artificial Sequence
  Description of Artificial Sequence: Synthetic oligonucleotide
  Antisense strand to SEQ ID NO: 2347110
auuucccuaguucacaaca

SEQ ID NO: 2347112 - RNA, 19 nt, Artificial Sequence
  Description of Artificial Sequence: Synthetic oligonucleotide
  Sense strand starting at position 3715 of SEQ ID NO: 1885506
gaauaugaauuggugcuca

SEQ ID NO: 2347113 - RNA, 19 nt, Artificial Sequence
  Description of Artificial Sequence: Synthetic oligonucleotide
  Antisense strand to SEQ ID NO: 2347112
ugagcaccaauucauauuc

SEQ ID NO: 2347114 - RNA, 19 nt, Artificial Sequence
  Description of Artificial Sequence: Synthetic oligonucleotide
  Sense strand starting at position 3720 of SEQ ID NO: 1885506
ugaauuggugcucaaaguu

SEQ ID NO: 2347115 - RNA, 19 nt, Artificial Sequence
  Description of Artificial Sequence: Synthetic oligonucleotide
  Antisense strand to SEQ ID NO: 2347114
aacuuugagcaccaauuca

SEQ ID NO: 2347116 - RNA, 19 nt, Artificial Sequence
  Description of Artificial Sequence: Synthetic oligonucleotide
  Sense strand starting at position 26 of SEQ ID NO: 1885507
cgucauaacuucucaagaa

SEQ ID NO: 2347117 - RNA, 19 nt, Artificial Sequence
  Description of Artificial Sequence: Synthetic oligonucleotide
  Antisense strand to SEQ ID NO: 2347116
uucuugagaaguuaugacg

SEQ ID NO: 2347118 - RNA, 19 nt, Artificial Sequence
  Description of Artificial Sequence: Synthetic oligonucleotide
  Sense strand starting at position 140 of SEQ ID NO: 1885507
ugcucaguuucugugaaug

SEQ ID NO: 2347119 - RNA, 19 nt, Artificial Sequence
  Description of Artificial Sequence: Synthetic oligonucleotide
  Antisense strand to SEQ ID NO: 2347118
cauucacagaaacugagca

SEQ ID NO: 2347120 - RNA, 19 nt, Artificial Sequence
  Description of Artificial Sequence: Synthetic oligonucleotide
  Sense strand starting at position 236 of SEQ ID NO: 1885507
ccagauuucugccauggga

SEQ ID NO: 2347121 - RNA, 19 nt, Artificial Sequence
  Description of Artificial Sequence: Synthetic oligonucleotide
  Antisense strand to SEQ ID NO: 2347120
ucccauggcagaaaucugg

SEQ ID NO: 2347122 - RNA, 19 nt, Artificial Sequence
  Description of Artificial Sequence: Synthetic oligonucleotide
  Sense strand starting at position 251 of SEQ ID NO: 1885507
gggaaaugaugcuuucuca

SEQ ID NO: 2347123 - RNA, 19 nt, Artificial Sequence
  Description of Artificial Sequence: Synthetic oligonucleotide
  Antisense strand to SEQ ID NO: 2347122
ugagaaagcaucauuuccc

SEQ ID NO: 2347124 - RNA, 19 nt, Artificial Sequence
  Description of Artificial Sequence: Synthetic oligonucleotide
  Sense strand starting at position 420 of SEQ ID NO: 1885507
ccuguugagugccuggaua

SEQ ID NO: 2347125 - RNA, 19 nt, Artificial Sequence
  Description of Artificial Sequence: Synthetic oligonucleotide
  Antisense strand to SEQ ID NO: 2347124
uauccaggcacucaacagg

SEQ ID NO: 2347126 - RNA, 19 nt, Artificial Sequence
  Description of Artificial Sequence: Synthetic oligonucleotide
  Sense strand starting at position 422 of SEQ ID NO: 1885507
uguugagugccuggauaca

SEQ ID NO: 2347127 - RNA, 19 nt, Artificial Sequence
  Description of Artificial Sequence: Synthetic oligonucleotide
  Antisense strand to SEQ ID NO: 2347126
uguauccaggcacucaaca

SEQ ID NO: 2347128 - RNA, 19 nt, Artificial Sequence
  Description of Artificial Sequence: Synthetic oligonucleotide
  Sense strand starting at position 533 of SEQ ID NO: 1885507
guugguguggauuaaguuu

SEQ ID NO: 2347129 - RNA, 19 nt, Artificial Sequence
  Description of Artificial Sequence: Synthetic oligonucleotide
  Antisense strand to SEQ ID NO: 2347128
aaacuuaauccacaccaac

SEQ ID NO: 2347130 - RNA, 19 nt, Artificial Sequence
  Description of Artificial Sequence: Synthetic oligonucleotide
  Sense strand starting at position 540 of SEQ ID NO: 1885507
uggauuaaguuucugccau

SEQ ID NO: 2347131 - RNA, 19 nt, Artificial Sequence
  Description of Artificial Sequence: Synthetic oligonucleotide
  Antisense strand to SEQ ID NO: 2347130
auggcagaaacuuaaucca

SEQ ID NO: 2347132 - RNA, 19 nt, Artificial Sequence
  Description of Artificial Sequence: Synthetic oligonucleotide
  Sense strand starting at position 542 of SEQ ID NO: 1885507
gauuaaguuucugccaugu

SEQ ID NO: 2347133 - RNA, 19 nt, Artificial Sequence
  Description of Artificial Sequence: Synthetic oligonucleotide
  Antisense strand to SEQ ID NO: 2347132
acauggcagaaacuuaauc

SEQ ID NO: 2347134 - RNA, 19 nt, Artificial Sequence
  Description of Artificial Sequence: Synthetic oligonucleotide
  Sense strand starting at position 566 of SEQ ID NO: 1885507
ccuaaaggguccuaacaaa

SEQ ID NO: 2347135 - RNA, 19 nt, Artificial Sequence
  Description of Artificial Sequence: Synthetic oligonucleotide
  Antisense strand to SEQ ID NO: 2347134
uuuguuaggacccuuuagg

SEQ ID NO: 2347136 - RNA, 19 nt, Artificial Sequence
  Description of Artificial Sequence: Synthetic oligonucleotide
  Sense strand starting at position 689 of SEQ ID NO: 1885507
guaggaauucugugggaaa

SEQ ID NO: 2347137 - RNA, 19 nt, Artificial Sequence
  Description of Artificial Sequence: Synthetic oligonucleotide
  Antisense strand to SEQ ID NO: 2347136
uuucccacagaauuccuac

SEQ ID NO: 2347138 - RNA, 19 nt, Artificial Sequence
  Description of Artificial Sequence: Synthetic oligonucleotide
  Sense strand starting at position 692 of SEQ ID NO: 1885507
ggaauucugugggaaagga

SEQ ID NO: 2347139 - RNA, 19 nt, Artificial Sequence
  Description of Artificial Sequence: Synthetic oligonucleotide
  Antisense strand to SEQ ID NO: 2347138
uccuuucccacagaauucc

SEQ ID NO: 2347140 - RNA, 19 nt, Artificial Sequence
  Description of Artificial Sequence: Synthetic oligonucleotide
  Sense strand starting at position 1250 of SEQ ID NO: 1885507
ugagaugccucccaauuug

SEQ ID NO: 2347141 - RNA, 19 nt, Artificial Sequence
  Description of Artificial Sequence: Synthetic oligonucleotide
  Antisense strand to SEQ ID NO: 2347140
caaauugggaggcaucuca

SEQ ID NO: 2347142 - RNA, 19 nt, Artificial Sequence
  Description of Artificial Sequence: Synthetic oligonucleotide
  Sense strand starting at position 1502 of SEQ ID NO: 1885507
aguguagcaucaucaguga

SEQ ID NO: 2347143 - RNA, 19 nt, Artificial Sequence
  Description of Artificial Sequence: Synthetic oligonucleotide
  Antisense strand to SEQ ID NO: 2347142
ucacugaugaugcuacacu

SEQ ID NO: 2347144 - RNA, 19 nt, Artificial Sequence
  Description of Artificial Sequence: Synthetic oligonucleotide
  Sense strand starting at position 1505 of SEQ ID NO: 1885507
guagcaucaucagugaaca

SEQ ID NO: 2347145 - RNA, 19 nt, Artificial Sequence
  Description of Artificial Sequence: Synthetic oligonucleotide
  Antisense strand to SEQ ID NO: 2347144
uguucacugaugaugcuac

SEQ ID NO: 2347146 - RNA, 19 nt, Artificial Sequence
  Description of Artificial Sequence: Synthetic oligonucleotide
  Sense strand starting at position 1779 of SEQ ID NO: 1885507
ccguguuuaucuucuggac

SEQ ID NO: 2347147 - RNA, 19 nt, Artificial Sequence
  Description of Artificial Sequence: Synthetic oligonucleotide
  Antisense strand to SEQ ID NO: 2347146
guccagaagauaaacacgg

SEQ ID NO: 2347148 - RNA, 19 nt, Artificial Sequence
  Description of Artificial Sequence: Synthetic oligonucleotide
  Sense strand starting at position 1800 of SEQ ID NO: 1885507
cgggaaucauagccaauca

SEQ ID NO: 2347149 - RNA, 19 nt, Artificial Sequence
  Description of Artificial Sequence: Synthetic oligonucleotide
  Antisense strand to SEQ ID NO: 2347148
ugauuggcuaugauucccg

SEQ ID NO: 2347150 - RNA, 19 nt, Artificial Sequence
  Description of Artificial Sequence: Synthetic oligonucleotide
  Sense strand starting at position 1820 of SEQ ID NO: 1885507
acuuuaccaccaggguaau

SEQ ID NO: 2347151 - RNA, 19 nt, Artificial Sequence
  Description of Artificial Sequence: Synthetic oligonucleotide
  Antisense strand to SEQ ID NO: 2347150
auuacccuggugguaaagu

SEQ ID NO: 2347152 - RNA, 19 nt, Artificial Sequence
  Description of Artificial Sequence: Synthetic oligonucleotide
  Sense strand starting at position 1908 of SEQ ID NO: 1885507
ggaaguauauccuuccucu

SEQ ID NO: 2347153 - RNA, 19 nt, Artificial Sequence
  Description of Artificial Sequence: Synthetic oligonucleotide
  Antisense strand to SEQ ID NO: 2347152
agaggaaggauauacuucc

SEQ ID NO: 2347154 - RNA, 19 nt, Artificial Sequence
  Description of Artificial Sequence: Synthetic oligonucleotide
  Sense strand starting at position 2003 of SEQ ID NO: 1885507
ggaacaaggcuggguuuaa

SEQ ID NO: 2347155 - RNA, 19 nt, Artificial Sequence
  Description of Artificial Sequence: Synthetic oligonucleotide
  Antisense strand to SEQ ID NO: 2347154
uuaaacccagccuuguucc

SEQ ID NO: 2347156 - RNA, 19 nt, Artificial Sequence
  Description of Artificial Sequence: Synthetic oligonucleotide
  Sense strand starting at position 2007 of SEQ ID NO: 1885507
caaggcuggguuuaaguaa

SEQ ID NO: 2347157 - RNA, 19 nt, Artificial Sequence
  Description of Artificial Sequence: Synthetic oligonucleotide
  Antisense strand to SEQ ID NO: 2347156
uuacuuaaacccagccuug

SEQ ID NO: 2347158 - RNA, 19 nt, Artificial Sequence
  Description of Artificial Sequence: Synthetic oligonucleotide
  Sense strand starting at position 2305 of SEQ ID NO: 1885507
cccucaugucauggugaac

SEQ ID NO: 2347159 - RNA, 19 nt, Artificial Sequence
  Description of Artificial Sequence: Synthetic oligonucleotide
  Antisense strand to SEQ ID NO: 2347158
guucaccaugacaugaggg

SEQ ID NO: 2347160 - RNA, 19 nt, Artificial Sequence
  Description of Artificial Sequence: Synthetic oligonucleotide
  Sense strand starting at position 2308 of SEQ ID NO: 1885507
ucaugucauggugaacaca

SEQ ID NO: 2347161 - RNA, 19 nt, Artificial Sequence
  Description of Artificial Sequence: Synthetic oligonucleotide
  Antisense strand to SEQ ID NO: 2347160
uguguucaccaugacauga

SEQ ID NO: 2347162 - RNA, 19 nt, Artificial Sequence
  Description of Artificial Sequence: Synthetic oligonucleotide
  Sense strand starting at position 2346 of SEQ ID NO: 1885507
ccgccucuccagugaagaa

SEQ ID NO: 2347163 - RNA, 19 nt, Artificial Sequence
  Description of Artificial Sequence: Synthetic oligonucleotide
  Antisense strand to SEQ ID NO: 2347162
uucuucacuggagaggcgg

SEQ ID NO: 2347164 - RNA, 19 nt, Artificial Sequence
  Description of Artificial Sequence: Synthetic oligonucleotide
  Sense strand starting at position 2347 of SEQ ID NO: 1885507
cgccucuccagugaagaaa

SEQ ID NO: 2347165 - RNA, 19 nt, Artificial Sequence
  Description of Artificial Sequence: Synthetic oligonucleotide
  Antisense strand to SEQ ID NO: 2347164
uuucuucacuggagaggcg

SEQ ID NO: 2347166 - RNA, 19 nt, Artificial Sequence
  Description of Artificial Sequence: Synthetic oligonucleotide
  Sense strand starting at position 2511 of SEQ ID NO: 1885507
aagaucugucuuggcacaa

SEQ ID NO: 2347167 - RNA, 19 nt, Artificial Sequence
  Description of Artificial Sequence: Synthetic oligonucleotide
  Antisense strand to SEQ ID NO: 2347166
uugugccaagacagaucuu

SEQ ID NO: 2347168 - RNA, 19 nt, Artificial Sequence
  Description of Artificial Sequence: Synthetic oligonucleotide
  Sense strand starting at position 2512 of SEQ ID NO: 1885507
agaucugucuuggcacaag

SEQ ID NO: 2347169 - RNA, 19 nt, Artificial Sequence
  Description of Artificial Sequence: Synthetic oligonucleotide
  Antisense strand to SEQ ID NO: 2347168
cuugugccaagacagaucu

SEQ ID NO: 2347170 - RNA, 19 nt, Artificial Sequence
  Description of Artificial Sequence: Synthetic oligonucleotide
  Sense strand starting at position 2649 of SEQ ID NO: 1885507
gcacucaugccaggaacaa

SEQ ID NO: 2347171 - RNA, 19 nt, Artificial Sequence
  Description of Artificial Sequence: Synthetic oligonucleotide
  Antisense strand to SEQ ID NO: 2347170
uuguuccuggcaugagugc

SEQ ID NO: 2347172 - RNA, 19 nt, Artificial Sequence
  Description of Artificial Sequence: Synthetic oligonucleotide
  Sense strand starting at position 2834 of SEQ ID NO: 1885507
agaauagcgucuccuagaa

SEQ ID NO: 2347173 - RNA, 19 nt, Artificial Sequence
  Description of Artificial Sequence: Synthetic oligonucleotide
  Antisense strand to SEQ ID NO: 2347172
uucuaggagacgcuauucu

SEQ ID NO: 2347174 - RNA, 19 nt, Artificial Sequence
  Description of Artificial Sequence: Synthetic oligonucleotide
  Sense strand starting at position 2861 of SEQ ID NO: 1885507
gaccuucuggcgugcagaa

SEQ ID NO: 2347175 - RNA, 19 nt, Artificial Sequence
  Description of Artificial Sequence: Synthetic oligonucleotide
  Antisense strand to SEQ ID NO: 2347174
uucugcacgccagaagguc

SEQ ID NO: 2347176 - RNA, 19 nt, Artificial Sequence
  Description of Artificial Sequence: Synthetic oligonucleotide
  Sense strand starting at position 3056 of SEQ ID NO: 1885507
gccaaacaccucugcuaga

SEQ ID NO: 2347177 - RNA, 19 nt, Artificial Sequence
  Description of Artificial Sequence: Synthetic oligonucleotide
  Antisense strand to SEQ ID NO: 2347176
ucuagcagagguguuuggc

SEQ ID NO: 2347178 - RNA, 19 nt, Artificial Sequence
  Description of Artificial Sequence: Synthetic oligonucleotide
  Sense strand starting at position 3183 of SEQ ID NO: 1885507
ggaggucugccauguugag

SEQ ID NO: 2347179 - RNA, 19 nt, Artificial Sequence
  Description of Artificial Sequence: Synthetic oligonucleotide
  Antisense strand to SEQ ID NO: 2347178
cucaacauggcagaccucc

SEQ ID NO: 2347180 - RNA, 19 nt, Artificial Sequence
  Description of Artificial Sequence: Synthetic oligonucleotide
  Sense strand starting at position 3279 of SEQ ID NO: 1885507
cuagccaaguguuuggaua

SEQ ID NO: 2347181 - RNA, 19 nt, Artificial Sequence
  Description of Artificial Sequence: Synthetic oligonucleotide
  Antisense strand to SEQ ID NO: 2347180
uauccaaacacuuggcuag

SEQ ID NO: 2347182 - RNA, 19 nt, Artificial Sequence
  Description of Artificial Sequence: Synthetic oligonucleotide
  Sense strand starting at position 3328 of SEQ ID NO: 1885507
gguaaauaccuccguggga

SEQ ID NO: 2347183 - RNA, 19 nt, Artificial Sequence
  Description of Artificial Sequence: Synthetic oligonucleotide
  Antisense strand to SEQ ID NO: 2347182
ucccacggagguauuuacc

SEQ ID NO: 2347184 - RNA, 19 nt, Artificial Sequence
  Description of Artificial Sequence: Synthetic oligonucleotide
  Sense strand starting at position 3367 of SEQ ID NO: 1885507
agaccuguuuagcccagaa

SEQ ID NO: 2347185 - RNA, 19 nt, Artificial Sequence
  Description of Artificial Sequence: Synthetic oligonucleotide
  Antisense strand to SEQ ID NO: 2347184
uucugggcuaaacaggucu

SEQ ID NO: 2347186 - RNA, 19 nt, Artificial Sequence
  Description of Artificial Sequence: Synthetic oligonucleotide
  Sense strand starting at position 3448 of SEQ ID NO: 1885507
gggacuucccaggaagugu

SEQ ID NO: 2347187 - RNA, 19 nt, Artificial Sequence
  Description of Artificial Sequence: Synthetic oligonucleotide
  Antisense strand to SEQ ID NO: 2347186
acacuuccugggaaguccc

SEQ ID NO: 2347188 - RNA, 19 nt, Artificial Sequence
  Description of Artificial Sequence: Synthetic oligonucleotide
  Sense strand starting at position 3562 of SEQ ID NO: 1885507
agugaaauacccugaguuu

SEQ ID NO: 2347189 - RNA, 19 nt, Artificial Sequence
  Description of Artificial Sequence: Synthetic oligonucleotide
  Antisense strand to SEQ ID NO: 2347188
aaacucaggguauuucacu

SEQ ID NO: 2347190 - RNA, 19 nt, Artificial Sequence
  Description of Artificial Sequence: Synthetic oligonucleotide
  Sense strand starting at position 3669 of SEQ ID NO: 1885507
uuggguuagucacuguaga

SEQ ID NO: 2347191 - RNA, 19 nt, Artificial Sequence
  Description of Artificial Sequence: Synthetic oligonucleotide
  Antisense strand to SEQ ID NO: 2347190
ucuacagugacuaacccaa

SEQ ID NO: 2347192 - RNA, 19 nt, Artificial Sequence
  Description of Artificial Sequence: Synthetic oligonucleotide
  Sense strand starting at position 3670 of SEQ ID NO: 1885507
uggguuagucacuguagag

SEQ ID NO: 2347193 - RNA, 19 nt, Artificial Sequence
  Description of Artificial Sequence: Synthetic oligonucleotide
  Antisense strand to SEQ ID NO: 2347192
cucuacagugacuaaccca

SEQ ID NO: 2347194 - RNA, 19 nt, Artificial Sequence
  Description of Artificial Sequence: Synthetic oligonucleotide
  Sense strand starting at position 3978 of SEQ ID NO: 1885507
gggucucugugcuucaaga

SEQ ID NO: 2347195 - RNA, 19 nt, Artificial Sequence
  Description of Artificial Sequence: Synthetic oligonucleotide
  Antisense strand to SEQ ID NO: 2347194
ucuugaagcacagagaccc

SEQ ID NO: 2347196 - RNA, 19 nt, Artificial Sequence
  Description of Artificial Sequence: Synthetic oligonucleotide
  Sense strand starting at position 3 of SEQ ID NO: 1885508
cccuguuaccuagaacagu

SEQ ID NO: 2347197 - RNA, 19 nt, Artificial Sequence
  Description of Artificial Sequence: Synthetic oligonucleotide
  Antisense strand to SEQ ID NO: 2347196
acuguucuagguaacaggg

SEQ ID NO: 2347198 - RNA, 19 nt, Artificial Sequence
  Description of Artificial Sequence: Synthetic oligonucleotide
  Sense strand starting at position 44 of SEQ ID NO: 1885508
aauaaaugaucuguugagu

SEQ ID NO: 2347199 - RNA, 19 nt, Artificial Sequence
  Description of Artificial Sequence: Synthetic oligonucleotide
  Antisense strand to SEQ ID NO: 2347198
acucaacagaucauuuauu

SEQ ID NO: 2347200 - RNA, 19 nt, Artificial Sequence
  Description of Artificial Sequence: Synthetic oligonucleotide
  Sense strand starting at position 47 of SEQ ID NO: 1885508
aaaugaucuguugagucca

SEQ ID NO: 2347201 - RNA, 19 nt, Artificial Sequence
  Description of Artificial Sequence: Synthetic oligonucleotide
  Antisense strand to SEQ ID NO: 2347200
uggacucaacagaucauuu

SEQ ID NO: 2347202 - RNA, 19 nt, Artificial Sequence
  Description of Artificial Sequence: Synthetic oligonucleotide
  Sense strand starting at position 52 of SEQ ID NO: 1885508
aucuguugaguccaugagu

SEQ ID NO: 2347203 - RNA, 19 nt, Artificial Sequence
  Description of Artificial Sequence: Synthetic oligonucleotide
  Antisense strand to SEQ ID NO: 2347202
acucauggacucaacagau

SEQ ID NO: 2347204 - RNA, 19 nt, Artificial Sequence
  Description of Artificial Sequence: Synthetic oligonucleotide
  Sense strand starting at position 55 of SEQ ID NO: 1885508
uguugaguccaugaguaaa

SEQ ID NO: 2347205 - RNA, 19 nt, Artificial Sequence
  Description of Artificial Sequence: Synthetic oligonucleotide
  Antisense strand to SEQ ID NO: 2347204
uuuacucauggacucaaca

SEQ ID NO: 2347206 - RNA, 19 nt, Artificial Sequence
  Description of Artificial Sequence: Synthetic oligonucleotide
  Sense strand starting at position 57 of SEQ ID NO: 1885508
uugaguccaugaguaaaug

SEQ ID NO: 2347207 - RNA, 19 nt, Artificial Sequence
  Description of Artificial Sequence: Synthetic oligonucleotide
  Antisense strand to SEQ ID NO: 2347206
cauuuacucauggacucaa

SEQ ID NO: 2347208 - RNA, 19 nt, Artificial Sequence
  Description of Artificial Sequence: Synthetic oligonucleotide
  Sense strand starting at position 107 of SEQ ID NO: 1885508
ucagguagaccuggcuuau

SEQ ID NO: 2347209 - RNA, 19 nt, Artificial Sequence
  Description of Artificial Sequence: Synthetic oligonucleotide
  Antisense strand to SEQ ID NO: 2347208
auaagccaggucuaccuga

SEQ ID NO: 2347210 - RNA, 19 nt, Artificial Sequence
  Description of Artificial Sequence: Synthetic oligonucleotide
  Sense strand starting at position 168 of SEQ ID NO: 1885508
cuugucuuggguuaugcau

SEQ ID NO: 2347211 - RNA, 19 nt, Artificial Sequence
  Description of Artificial Sequence: Synthetic oligonucleotide
  Antisense strand to SEQ ID NO: 2347210
augcauaacccaagacaag

SEQ ID NO: 2347212 - RNA, 19 nt, Artificial Sequence
  Description of Artificial Sequence: Synthetic oligonucleotide
  Sense strand starting at position 255 of SEQ ID NO: 1885508
auauaaaugcuuggcacaa

SEQ ID NO: 2347213 - RNA, 19 nt, Artificial Sequence
  Description of Artificial Sequence: Synthetic oligonucleotide
  Antisense strand to SEQ ID NO: 2347212
uugugccaagcauuuauau

SEQ ID NO: 2347214 - RNA, 19 nt, Artificial Sequence
  Description of Artificial Sequence: Synthetic oligonucleotide
  Sense strand starting at position 308 of SEQ ID NO: 1885508
auacuuaggcuaggcauau

SEQ ID NO: 2347215 - RNA, 19 nt, Artificial Sequence
  Description of Artificial Sequence: Synthetic oligonucleotide
  Antisense strand to SEQ ID NO: 2347214
auaugccuagccuaaguau

SEQ ID NO: 2347216 - RNA, 19 nt, Artificial Sequence
  Description of Artificial Sequence: Synthetic oligonucleotide
  Sense strand starting at position 309 of SEQ ID NO: 1885508
uacuuaggcuaggcauaua

SEQ ID NO: 2347217 - RNA, 19 nt, Artificial Sequence
  Description of Artificial Sequence: Synthetic oligonucleotide
  Antisense strand to SEQ ID NO: 2347216
uauaugccuagccuaagua

SEQ ID NO: 2347218 - RNA, 19 nt, Artificial Sequence
  Description of Artificial Sequence: Synthetic oligonucleotide
  Sense strand starting at position 312 of SEQ ID NO: 1885508
uuaggcuaggcauauaaca

SEQ ID NO: 2347219 - RNA, 19 nt, Artificial Sequence
  Description of Artificial Sequence: Synthetic oligonucleotide
  Antisense strand to SEQ ID NO: 2347218
uguuauaugccuagccuaa

SEQ ID NO: 2347220 - RNA, 19 nt, Artificial Sequence
  Description of Artificial Sequence: Synthetic oligonucleotide
  Sense strand starting at position 498 of SEQ ID NO: 1885508
uccucagggucuuugugaa

SEQ ID NO: 2347221 - RNA, 19 nt, Artificial Sequence
  Description of Artificial Sequence: Synthetic oligonucleotide
  Antisense strand to SEQ ID NO: 2347220
uucacaaagacccugagga

SEQ ID NO: 2347222 - RNA, 19 nt, Artificial Sequence
  Description of Artificial Sequence: Synthetic oligonucleotide
  Sense strand starting at position 875 of SEQ ID NO: 1885508
cggccauggccauaacuuu

SEQ ID NO: 2347223 - RNA, 19 nt, Artificial Sequence
  Description of Artificial Sequence: Synthetic oligonucleotide
  Antisense strand to SEQ ID NO: 2347222
aaaguuauggccauggccg

SEQ ID NO: 2347224 - RNA, 19 nt, Artificial Sequence
  Description of Artificial Sequence: Synthetic oligonucleotide
  Sense strand starting at position 961 of SEQ ID NO: 1885508
gccuuuguuggcuuguuua

SEQ ID NO: 2347225 - RNA, 19 nt, Artificial Sequence
  Description of Artificial Sequence: Synthetic oligonucleotide
  Antisense strand to SEQ ID NO: 2347224
uaaacaagccaacaaaggc

SEQ ID NO: 2347226 - RNA, 19 nt, Artificial Sequence
  Description of Artificial Sequence: Synthetic oligonucleotide
  Sense strand starting at position 1018 of SEQ ID NO: 1885508
gggcaagaacuguacacuu

SEQ ID NO: 2347227 - RNA, 19 nt, Artificial Sequence
  Description of Artificial Sequence: Synthetic oligonucleotide
  Antisense strand to SEQ ID NO: 2347226
aaguguacaguucuugccc

SEQ ID NO: 2347228 - RNA, 19 nt, Artificial Sequence
  Description of Artificial Sequence: Synthetic oligonucleotide
  Sense strand starting at position 1100 of SEQ ID NO: 1885508
gagcuaaaugaauaagcga

SEQ ID NO: 2347229 - RNA, 19 nt, Artificial Sequence
  Description of Artificial Sequence: Synthetic oligonucleotide
  Antisense strand to SEQ ID NO: 2347228
ucgcuuauucauuuagcuc

SEQ ID NO: 2347230 - RNA, 19 nt, Artificial Sequence
  Description of Artificial Sequence: Synthetic oligonucleotide
  Sense strand starting at position 1132 of SEQ ID NO: 1885508
uguagcauugcgucucacu

SEQ ID NO: 2347231 - RNA, 19 nt, Artificial Sequence
  Description of Artificial Sequence: Synthetic oligonucleotide
  Antisense strand to SEQ ID NO: 2347230
agugagacgcaaugcuaca

SEQ ID NO: 2347232 - RNA, 19 nt, Artificial Sequence
  Description of Artificial Sequence: Synthetic oligonucleotide
  Sense strand starting at position 1133 of SEQ ID NO: 1885508
guagcauugcgucucacua

SEQ ID NO: 2347233 - RNA, 19 nt, Artificial Sequence
  Description of Artificial Sequence: Synthetic oligonucleotide
  Antisense strand to SEQ ID NO: 2347232
uagugagacgcaaugcuac

SEQ ID NO: 2347234 - RNA, 19 nt, Artificial Sequence
  Description of Artificial Sequence: Synthetic oligonucleotide
  Sense strand starting at position 1392 of SEQ ID NO: 1885508
gguggugacaggugaaucu

SEQ ID NO: 2347235 - RNA, 19 nt, Artificial Sequence
  Description of Artificial Sequence: Synthetic oligonucleotide
  Antisense strand to SEQ ID NO: 2347234
agauucaccugucaccacc

SEQ ID NO: 2347236 - RNA, 19 nt, Artificial Sequence
  Description of Artificial Sequence: Synthetic oligonucleotide
  Sense strand starting at position 1411 of SEQ ID NO: 1885508
cguaacuccgaagguaaau

SEQ ID NO: 2347237 - RNA, 19 nt, Artificial Sequence
  Description of Artificial Sequence: Synthetic oligonucleotide
  Antisense strand to SEQ ID NO: 2347236
auuuaccuucggaguuacg

SEQ ID NO: 2347238 - RNA, 19 nt, Artificial Sequence
  Description of Artificial Sequence: Synthetic oligonucleotide
  Sense strand starting at position 1579 of SEQ ID NO: 1885508
cccuaacucugagucaagu

SEQ ID NO: 2347239 - RNA, 19 nt, Artificial Sequence
  Description of Artificial Sequence: Synthetic oligonucleotide
  Antisense strand to SEQ ID NO: 2347238
acuugacucagaguuaggg

SEQ ID NO: 2347240 - RNA, 19 nt, Artificial Sequence
  Description of Artificial Sequence: Synthetic oligonucleotide
  Sense strand starting at position 2355 of SEQ ID NO: 1885508
acugaaaccuuggcagaca

SEQ ID NO: 2347241 - RNA, 19 nt, Artificial Sequence
  Description of Artificial Sequence: Synthetic oligonucleotide
  Antisense strand to SEQ ID NO: 2347240
ugucugccaagguuucagu

SEQ ID NO: 2347242 - RNA, 19 nt, Artificial Sequence
  Description of Artificial Sequence: Synthetic oligonucleotide
  Sense strand starting at position 2371 of SEQ ID NO: 1885508
acaugcaugccugaucuua

SEQ ID NO: 2347243 - RNA, 19 nt, Artificial Sequence
  Description of Artificial Sequence: Synthetic oligonucleotide
  Antisense strand to SEQ ID NO: 2347242
uaagaucaggcaugcaugu

SEQ ID NO: 2347244 - RNA, 19 nt, Artificial Sequence
  Description of Artificial Sequence: Synthetic oligonucleotide
  Sense strand starting at position 2373 of SEQ ID NO: 1885508
augcaugccugaucuuaca

SEQ ID NO: 2347245 - RNA, 19 nt, Artificial Sequence
  Description of Artificial Sequence: Synthetic oligonucleotide
  Antisense strand to SEQ ID NO: 2347244
uguaagaucaggcaugcau

SEQ ID NO: 2347246 - RNA, 19 nt, Artificial Sequence
  Description of Artificial Sequence: Synthetic oligonucleotide
  Sense strand starting at position 2548 of SEQ ID NO: 1885508
uuacgagucggauaucuuc

SEQ ID NO: 2347247 - RNA, 19 nt, Artificial Sequence
  Description of Artificial Sequence: Synthetic oligonucleotide
  Antisense strand to SEQ ID NO: 2347246
gaagauauccgacucguaa

SEQ ID NO: 2347248 - RNA, 19 nt, Artificial Sequence
  Description of Artificial Sequence: Synthetic oligonucleotide
  Sense strand starting at position 2961 of SEQ ID NO: 1885508
uuaaaccucuggcugaauu

SEQ ID NO: 2347249 - RNA, 19 nt, Artificial Sequence
  Description of Artificial Sequence: Synthetic oligonucleotide
  Antisense strand to SEQ ID NO: 2347248
aauucagccagagguuuaa

SEQ ID NO: 2347250 - RNA, 19 nt, Artificial Sequence
  Description of Artificial Sequence: Synthetic oligonucleotide
  Sense strand starting at position 3374 of SEQ ID NO: 1885508
uccuuuauaucugugucaa

SEQ ID NO: 2347251 - RNA, 19 nt, Artificial Sequence
  Description of Artificial Sequence: Synthetic oligonucleotide
  Antisense strand to SEQ ID NO: 2347250
uugacacagauauaaagga

SEQ ID NO: 2347252 - RNA, 19 nt, Artificial Sequence
  Description of Artificial Sequence: Synthetic oligonucleotide
  Sense strand starting at position 3375 of SEQ ID NO: 1885508
ccuuuauaucugugucaaa

SEQ ID NO: 2347253 - RNA, 19 nt, Artificial Sequence
  Description of Artificial Sequence: Synthetic oligonucleotide
  Antisense strand to SEQ ID NO: 2347252
uuugacacagauauaaagg

SEQ ID NO: 2347254 - RNA, 19 nt, Artificial Sequence
  Description of Artificial Sequence: Synthetic oligonucleotide
  Sense strand starting at position 3376 of SEQ ID NO: 1885508
cuuuauaucugugucaaag

SEQ ID NO: 2347255 - RNA, 19 nt, Artificial Sequence
  Description of Artificial Sequence: Synthetic oligonucleotide
  Antisense strand to SEQ ID NO: 2347254
cuuugacacagauauaaag

SEQ ID NO: 2347256 - RNA, 19 nt, Artificial Sequence
  Description of Artificial Sequence: Synthetic oligonucleotide
  Sense strand starting at position 3387 of SEQ ID NO: 1885508
ugucaaagauccuucugag

SEQ ID NO: 2347257 - RNA, 19 nt, Artificial Sequence
  Description of Artificial Sequence: Synthetic oligonucleotide
  Antisense strand to SEQ ID NO: 2347256
cucagaaggaucuuugaca

SEQ ID NO: 2347258 - RNA, 19 nt, Artificial Sequence
  Description of Artificial Sequence: Synthetic oligonucleotide
  Sense strand starting at position 3747 of SEQ ID NO: 1885508
uccugucacuccucugauu

SEQ ID NO: 2347259 - RNA, 19 nt, Artificial Sequence
  Description of Artificial Sequence: Synthetic oligonucleotide
  Antisense strand to SEQ ID NO: 2347258
aaucagaggagugacagga

SEQ ID NO: 2347260 - RNA, 19 nt, Artificial Sequence
  Description of Artificial Sequence: Synthetic oligonucleotide
  Sense strand starting at position 3780 of SEQ ID NO: 1885508
cuucuccuggucggauaaa

SEQ ID NO: 2347261 - RNA, 19 nt, Artificial Sequence
  Description of Artificial Sequence: Synthetic oligonucleotide
  Antisense strand to SEQ ID NO: 2347260
uuuauccgaccaggagaag

SEQ ID NO: 2347262 - RNA, 19 nt, Artificial Sequence
  Description of Artificial Sequence: Synthetic oligonucleotide
  Sense strand starting at position 3813 of SEQ ID NO: 1885508
guuuaucucccuuguagga

SEQ ID NO: 2347263 - RNA, 19 nt, Artificial Sequence
  Description of Artificial Sequence: Synthetic oligonucleotide
  Antisense strand to SEQ ID NO: 2347262
uccuacaagggagauaaac

SEQ ID NO: 2347264 - RNA, 19 nt, Artificial Sequence
  Description of Artificial Sequence: Synthetic oligonucleotide
  Sense strand starting at position 3820 of SEQ ID NO: 1885508
ucccuuguaggauaaagua

SEQ ID NO: 2347265 - RNA, 19 nt, Artificial Sequence
  Description of Artificial Sequence: Synthetic oligonucleotide
  Antisense strand to SEQ ID NO: 2347264
uacuuuauccuacaaggga

SEQ ID NO: 2347266 - RNA, 19 nt, Artificial Sequence
  Description of Artificial Sequence: Synthetic oligonucleotide
  Sense strand starting at position 3853 of SEQ ID NO: 1885508
uggccaggcaccugauaau

SEQ ID NO: 2347267 - RNA, 19 nt, Artificial Sequence
  Description of Artificial Sequence: Synthetic oligonucleotide
  Antisense strand to SEQ ID NO: 2347266
auuaucaggugccuggcca

SEQ ID NO: 2347268 - RNA, 19 nt, Artificial Sequence
  Description of Artificial Sequence: Synthetic oligonucleotide
  Sense strand starting at position 3877 of SEQ ID NO: 1885508
cucugauuauguucugauu

SEQ ID NO: 2347269 - RNA, 19 nt, Artificial Sequence
  Description of Artificial Sequence: Synthetic oligonucleotide
  Antisense strand to SEQ ID NO: 2347268
aaucagaacauaaucagag

SEQ ID NO: 2347270 - RNA, 19 nt, Artificial Sequence
  Description of Artificial Sequence: Synthetic oligonucleotide
  Sense strand starting at position 3911 of SEQ ID NO: 1885508
cacagauugugagcuuuag

SEQ ID NO: 2347271 - RNA, 19 nt, Artificial Sequence
  Description of Artificial Sequence: Synthetic oligonucleotide
  Antisense strand to SEQ ID NO: 2347270
cuaaagcucacaaucugug

SEQ ID NO: 2347272 - RNA, 19 nt, Artificial Sequence
  Description of Artificial Sequence: Synthetic oligonucleotide
  Sense strand starting at position 3915 of SEQ ID NO: 1885508
gauugugagcuuuagucaa

SEQ ID NO: 2347273 - RNA, 19 nt, Artificial Sequence
  Description of Artificial Sequence: Synthetic oligonucleotide
  Antisense strand to SEQ ID NO: 2347272
uugacuaaagcucacaauc

SEQ ID NO: 2347274 - RNA, 19 nt, Artificial Sequence
  Description of Artificial Sequence: Synthetic oligonucleotide
  Sense strand starting at position 3950 of SEQ ID NO: 1885508
uagccuugcugagcuauuu

SEQ ID NO: 2347275 - RNA, 19 nt, Artificial Sequence
  Description of Artificial Sequence: Synthetic oligonucleotide
  Antisense strand to SEQ ID NO: 2347274
aaauagcucagcaaggcua

SEQ ID NO: 2347276 - RNA, 19 nt, Artificial Sequence
  Description of Artificial Sequence: Synthetic oligonucleotide
  Sense strand starting at position 1444 of SEQ ID NO: 1885509
uaggaaugcggguaugguu

SEQ ID NO: 2347277 - RNA, 19 nt, Artificial Sequence
  Description of Artificial Sequence: Synthetic oligonucleotide
  Antisense strand to SEQ ID NO: 2347276
aaccauacccgcauuccua

SEQ ID NO: 2347278 - RNA, 19 nt, Artificial Sequence
  Description of Artificial Sequence: Synthetic oligonucleotide
  Sense strand starting at position 181 of SEQ ID NO: 1885510
ggaccuuuauguugugaaa

SEQ ID NO: 2347279 - RNA, 19 nt, Artificial Sequence
  Description of Artificial Sequence: Synthetic oligonucleotide
  Antisense strand to SEQ ID NO: 2347278
uuucacaacauaaaggucc

SEQ ID NO: 2347280 - RNA, 19 nt, Artificial Sequence
  Description of Artificial Sequence: Synthetic oligonucleotide
  Sense strand starting at position 325 of SEQ ID NO: 1885510
ccaaguuguaguuauacag

SEQ ID NO: 2347281 - RNA, 19 nt, Artificial Sequence
  Description of Artificial Sequence: Synthetic oligonucleotide
  Antisense strand to SEQ ID NO: 2347280
cuguauaacuacaacuugg

SEQ ID NO: 2347282 - RNA, 19 nt, Artificial Sequence
  Description of Artificial Sequence: Synthetic oligonucleotide
  Sense strand starting at position 334 of SEQ ID NO: 1885510
aguuauacagcugauauau

SEQ ID NO: 2347283 - RNA, 19 nt, Artificial Sequence
  Description of Artificial Sequence: Synthetic oligonucleotide
  Antisense strand to SEQ ID NO: 2347282
auauaucagcuguauaacu

SEQ ID NO: 2347284 - RNA, 19 nt, Artificial Sequence
  Description of Artificial Sequence: Synthetic oligonucleotide
  Sense strand starting at position 336 of SEQ ID NO: 1885510
uuauacagcugauauauga

SEQ ID NO: 2347285 - RNA, 19 nt, Artificial Sequence
  Description of Artificial Sequence: Synthetic oligonucleotide
  Antisense strand to SEQ ID NO: 2347284
ucauauaucagcuguauaa

SEQ ID NO: 2347286 - RNA, 19 nt, Artificial Sequence
  Description of Artificial Sequence: Synthetic oligonucleotide
  Sense strand starting at position 358 of SEQ ID NO: 1885510
uugcauaaacuauggacaa

SEQ ID NO: 2347287 - RNA, 19 nt, Artificial Sequence
  Description of Artificial Sequence: Synthetic oligonucleotide
  Antisense strand to SEQ ID NO: 2347286
uuguccauaguuuaugcaa

SEQ ID NO: 2347288 - RNA, 19 nt, Artificial Sequence
  Description of Artificial Sequence: Synthetic oligonucleotide
  Sense strand starting at position 359 of SEQ ID NO: 1885510
ugcauaaacuauggacaaa

SEQ ID NO: 2347289 - RNA, 19 nt, Artificial Sequence
  Description of Artificial Sequence: Synthetic oligonucleotide
  Antisense strand to SEQ ID NO: 2347288
uuuguccauaguuuaugca

SEQ ID NO: 2347290 - RNA, 19 nt, Artificial Sequence
  Description of Artificial Sequence: Synthetic oligonucleotide
  Sense strand starting at position 707 of SEQ ID NO: 1885510
uuaaaugcuuugucacuga

SEQ ID NO: 2347291 - RNA, 19 nt, Artificial Sequence
  Description of Artificial Sequence: Synthetic oligonucleotide
  Antisense strand to SEQ ID NO: 2347290
ucagugacaaagcauuuaa

SEQ ID NO: 2347292 - RNA, 19 nt, Artificial Sequence
  Description of Artificial Sequence: Synthetic oligonucleotide
  Sense strand starting at position 711 of SEQ ID NO: 1885510
augcuuugucacugauaua

SEQ ID NO: 2347293 - RNA, 19 nt, Artificial Sequence
  Description of Artificial Sequence: Synthetic oligonucleotide
  Antisense strand to SEQ ID NO: 2347292
uauaucagugacaaagcau

SEQ ID NO: 2347294 - RNA, 19 nt, Artificial Sequence
  Description of Artificial Sequence: Synthetic oligonucleotide
  Sense strand starting at position 733 of SEQ ID NO: 1885510
uuucuuauaugggugacaa

SEQ ID NO: 2347295 - RNA, 19 nt, Artificial Sequence
  Description of Artificial Sequence: Synthetic oligonucleotide
  Antisense strand to SEQ ID NO: 2347294
uugucacccauauaagaaa

SEQ ID NO: 2347296 - RNA, 19 nt, Artificial Sequence
  Description of Artificial Sequence: Synthetic oligonucleotide
  Sense strand starting at position 734 of SEQ ID NO: 1885510
uucuuauaugggugacaaa

SEQ ID NO: 2347297 - RNA, 19 nt, Artificial Sequence
  Description of Artificial Sequence: Synthetic oligonucleotide
  Antisense strand to SEQ ID NO: 2347296
uuugucacccauauaagaa

SEQ ID NO: 2347298 - RNA, 19 nt, Artificial Sequence
  Description of Artificial Sequence: Synthetic oligonucleotide
  Sense strand starting at position 895 of SEQ ID NO: 1885510
ggaguugucaucuaacaug

SEQ ID NO: 2347299 - RNA, 19 nt, Artificial Sequence
  Description of Artificial Sequence: Synthetic oligonucleotide
  Antisense strand to SEQ ID NO: 2347298
cauguuagaugacaacucc

SEQ ID NO: 2347300 - RNA, 19 nt, Artificial Sequence
  Description of Artificial Sequence: Synthetic oligonucleotide
  Sense strand starting at position 1343 of SEQ ID NO: 1885510
gcugcagucugccgagaug

SEQ ID NO: 2347301 - RNA, 19 nt, Artificial Sequence
  Description of Artificial Sequence: Synthetic oligonucleotide
  Antisense strand to SEQ ID NO: 2347300
caucucggcagacugcagc

SEQ ID NO: 2347302 - RNA, 19 nt, Artificial Sequence
  Description of Artificial Sequence: Synthetic oligonucleotide
  Sense strand starting at position 1443 of SEQ ID NO: 1885510
uaggaaugcggguaugguu

SEQ ID NO: 2347303 - RNA, 19 nt, Artificial Sequence
  Description of Artificial Sequence: Synthetic oligonucleotide
  Antisense strand to SEQ ID NO: 2347302
aaccauacccgcauuccua

SEQ ID NO: 2347304 - RNA, 19 nt, Artificial Sequence
  Description of Artificial Sequence: Synthetic oligonucleotide
  Sense strand starting at position 1527 of SEQ ID NO: 1885510
agcuaaauagcuggagacu

SEQ ID NO: 2347305 - RNA, 19 nt, Artificial Sequence
  Description of Artificial Sequence: Synthetic oligonucleotide
  Antisense strand to SEQ ID NO: 2347304
agucuccagcuauuuagcu

SEQ ID NO: 2347306 - RNA, 19 nt, Artificial Sequence
  Description of Artificial Sequence: Synthetic oligonucleotide
  Sense strand starting at position 1536 of SEQ ID NO: 1885510
gcuggagacuccucaaaga

SEQ ID NO: 2347307 - RNA, 19 nt, Artificial Sequence
  Description of Artificial Sequence: Synthetic oligonucleotide
  Antisense strand to SEQ ID NO: 2347306
ucuuugaggagucuccagc

SEQ ID NO: 2347308 - RNA, 19 nt, Artificial Sequence
  Description of Artificial Sequence: Synthetic oligonucleotide
  Sense strand starting at position 2193 of SEQ ID NO: 1885510
gcuuucgggcccuagaagu

SEQ ID NO: 2347309 - RNA, 19 nt, Artificial Sequence
  Description of Artificial Sequence: Synthetic oligonucleotide
  Antisense strand to SEQ ID NO: 2347308
acuucuagggcccgaaagc

SEQ ID NO: 2347310 - RNA, 19 nt, Artificial Sequence
  Description of Artificial Sequence: Synthetic oligonucleotide
  Sense strand starting at position 2481 of SEQ ID NO: 1885510
ccgcaucuguccuguggga

SEQ ID NO: 2347311 - RNA, 19 nt, Artificial Sequence
  Description of Artificial Sequence: Synthetic oligonucleotide
  Antisense strand to SEQ ID NO: 2347310
ucccacaggacagaugcgg

SEQ ID NO: 2347312 - RNA, 19 nt, Artificial Sequence
  Description of Artificial Sequence: Synthetic oligonucleotide
  Sense strand starting at position 2678 of SEQ ID NO: 1885510
gggagaggcuauuaauuau

SEQ ID NO: 2347313 - RNA, 19 nt, Artificial Sequence
  Description of Artificial Sequence: Synthetic oligonucleotide
  Antisense strand to SEQ ID NO: 2347312
auaauuaauagccucuccc

SEQ ID NO: 2347314 - RNA, 19 nt, Artificial Sequence
  Description of Artificial Sequence: Synthetic oligonucleotide
  Sense strand starting at position 2712 of SEQ ID NO: 1885510
gccuguuaucggucucuuc

SEQ ID NO: 2347315 - RNA, 19 nt, Artificial Sequence
  Description of Artificial Sequence: Synthetic oligonucleotide
  Antisense strand to SEQ ID NO: 2347314
gaagagaccgauaacaggc

SEQ ID NO: 2347316 - RNA, 19 nt, Artificial Sequence
  Description of Artificial Sequence: Synthetic oligonucleotide
  Sense strand starting at position 2840 of SEQ ID NO: 1885510
cucugaugauagcugguau

SEQ ID NO: 2347317 - RNA, 19 nt, Artificial Sequence
  Description of Artificial Sequence: Synthetic oligonucleotide
  Antisense strand to SEQ ID NO: 2347316
auaccagcuaucaucagag

SEQ ID NO: 2347318 - RNA, 19 nt, Artificial Sequence
  Description of Artificial Sequence: Synthetic oligonucleotide
  Sense strand starting at position 2841 of SEQ ID NO: 1885510
ucugaugauagcugguauu

SEQ ID NO: 2347319 - RNA, 19 nt, Artificial Sequence
  Description of Artificial Sequence: Synthetic oligonucleotide
  Antisense strand to SEQ ID NO: 2347318
aauaccagcuaucaucaga

SEQ ID NO: 2347320 - RNA, 19 nt, Artificial Sequence
  Description of Artificial Sequence: Synthetic oligonucleotide
  Sense strand starting at position 2844 of SEQ ID NO: 1885510
gaugauagcugguauuucu

SEQ ID NO: 2347321 - RNA, 19 nt, Artificial Sequence
  Description of Artificial Sequence: Synthetic oligonucleotide
  Antisense strand to SEQ ID NO: 2347320
agaaauaccagcuaucauc

SEQ ID NO: 2347322 - RNA, 19 nt, Artificial Sequence
  Description of Artificial Sequence: Synthetic oligonucleotide
  Sense strand starting at position 3265 of SEQ ID NO: 1885510
cuuuauuucugucuucguu

SEQ ID NO: 2347323 - RNA, 19 nt, Artificial Sequence
  Description of Artificial Sequence: Synthetic oligonucleotide
  Antisense strand to SEQ ID NO: 2347322
aacgaagacagaaauaaag

SEQ ID NO: 2347324 - RNA, 19 nt, Artificial Sequence
  Description of Artificial Sequence: Synthetic oligonucleotide
  Sense strand starting at position 3271 of SEQ ID NO: 1885510
uucugucuucguuucguua

SEQ ID NO: 2347325 - RNA, 19 nt, Artificial Sequence
  Description of Artificial Sequence: Synthetic oligonucleotide
  Antisense strand to SEQ ID NO: 2347324
uaacgaaacgaagacagaa

SEQ ID NO: 2347326 - RNA, 19 nt, Artificial Sequence
  Description of Artificial Sequence: Synthetic oligonucleotide
  Sense strand starting at position 3272 of SEQ ID NO: 1885510
ucugucuucguuucguuau

SEQ ID NO: 2347327 - RNA, 19 nt, Artificial Sequence
  Description of Artificial Sequence: Synthetic oligonucleotide
  Antisense strand to SEQ ID NO: 2347326
auaacgaaacgaagacaga

SEQ ID NO: 2347328 - RNA, 19 nt, Artificial Sequence
  Description of Artificial Sequence: Synthetic oligonucleotide
  Sense strand starting at position 3275 of SEQ ID NO: 1885510
gucuucguuucguuaugua

SEQ ID NO: 2347329 - RNA, 19 nt, Artificial Sequence
  Description of Artificial Sequence: Synthetic oligonucleotide
  Antisense strand to SEQ ID NO: 2347328
uacauaacgaaacgaagac

SEQ ID NO: 2347330 - RNA, 19 nt, Artificial Sequence
  Description of Artificial Sequence: Synthetic oligonucleotide
  Sense strand starting at position 3674 of SEQ ID NO: 1885510
uuugguugaaguugaguuu

SEQ ID NO: 2347331 - RNA, 19 nt, Artificial Sequence
  Description of Artificial Sequence: Synthetic oligonucleotide
  Antisense strand to SEQ ID NO: 2347330
aaacucaacuucaaccaaa

SEQ ID NO: 2347332 - RNA, 19 nt, Artificial Sequence
  Description of Artificial Sequence: Synthetic oligonucleotide
  Sense strand starting at position 3677 of SEQ ID NO: 1885510
gguugaaguugaguuucua

SEQ ID NO: 2347333 - RNA, 19 nt, Artificial Sequence
  Description of Artificial Sequence: Synthetic oligonucleotide
  Antisense strand to SEQ ID NO: 2347332
uagaaacucaacuucaacc

SEQ ID NO: 2347334 - RNA, 19 nt, Artificial Sequence
  Description of Artificial Sequence: Synthetic oligonucleotide
  Sense strand starting at position 3681 of SEQ ID NO: 1885510
gaaguugaguuucuaguca

SEQ ID NO: 2347335 - RNA, 19 nt, Artificial Sequence
  Description of Artificial Sequence: Synthetic oligonucleotide
  Antisense strand to SEQ ID NO: 2347334
ugacuagaaacucaacuuc

SEQ ID NO: 2347336 - RNA, 19 nt, Artificial Sequence
  Description of Artificial Sequence: Synthetic oligonucleotide
  Sense strand starting at position 3685 of SEQ ID NO: 1885510
uugaguuucuagucaaaga

SEQ ID NO: 2347337 - RNA, 19 nt, Artificial Sequence
  Description of Artificial Sequence: Synthetic oligonucleotide
  Antisense strand to SEQ ID NO: 2347336
ucuuugacuagaaacucaa

SEQ ID NO: 2347338 - RNA, 19 nt, Artificial Sequence
  Description of Artificial Sequence: Synthetic oligonucleotide
  Sense strand starting at position 3720 of SEQ ID NO: 1885510
gcauucguguuuccaggaa

SEQ ID NO: 2347339 - RNA, 19 nt, Artificial Sequence
  Description of Artificial Sequence: Synthetic oligonucleotide
  Antisense strand to SEQ ID NO: 2347338
uuccuggaaacacgaaugc

SEQ ID NO: 2347340 - RNA, 19 nt, Artificial Sequence
  Description of Artificial Sequence: Synthetic oligonucleotide
  Sense strand starting at position 3724 of SEQ ID NO: 1885510
ucguguuuccaggaacaga

SEQ ID NO: 2347341 - RNA, 19 nt, Artificial Sequence
  Description of Artificial Sequence: Synthetic oligonucleotide
  Antisense strand to SEQ ID NO: 2347340
ucuguuccuggaaacacga

SEQ ID NO: 2347342 - RNA, 19 nt, Artificial Sequence
  Description of Artificial Sequence: Synthetic oligonucleotide
  Sense strand starting at position 3741 of SEQ ID NO: 1885510
gaagcauccugucugguuu

SEQ ID NO: 2347343 - RNA, 19 nt, Artificial Sequence
  Description of Artificial Sequence: Synthetic oligonucleotide
  Antisense strand to SEQ ID NO: 2347342
aaaccagacaggaugcuuc

SEQ ID NO: 2347344 - RNA, 19 nt, Artificial Sequence
  Description of Artificial Sequence: Synthetic oligonucleotide
  Sense strand starting at position 3792 of SEQ ID NO: 1885510
auggcauacgugugucuau

SEQ ID NO: 2347345 - RNA, 19 nt, Artificial Sequence
  Description of Artificial Sequence: Synthetic oligonucleotide
  Antisense strand to SEQ ID NO: 2347344
auagacacacguaugccau

SEQ ID NO: 2347346 - RNA, 19 nt, Artificial Sequence
  Description of Artificial Sequence: Synthetic oligonucleotide
  Sense strand starting at position 3793 of SEQ ID NO: 1885510
uggcauacgugugucuaua

SEQ ID NO: 2347347 - RNA, 19 nt, Artificial Sequence
  Description of Artificial Sequence: Synthetic oligonucleotide
  Antisense strand to SEQ ID NO: 2347346
uauagacacacguaugcca

SEQ ID NO: 2347348 - RNA, 19 nt, Artificial Sequence
  Description of Artificial Sequence: Synthetic oligonucleotide
  Sense strand starting at position 3795 of SEQ ID NO: 1885510
gcauacgugugucuauaau

SEQ ID NO: 2347349 - RNA, 19 nt, Artificial Sequence
  Description of Artificial Sequence: Synthetic oligonucleotide
  Antisense strand to SEQ ID NO: 2347348
auuauagacacacguaugc

SEQ ID NO: 2347350 - RNA, 19 nt, Artificial Sequence
  Description of Artificial Sequence: Synthetic oligonucleotide
  Sense strand starting at position 25 of SEQ ID NO: 1885511
gccucuauaucucuuagga

SEQ ID NO: 2347351 - RNA, 19 nt, Artificial Sequence
  Description of Artificial Sequence: Synthetic oligonucleotide
  Antisense strand to SEQ ID NO: 2347350
uccuaagagauauagaggc

SEQ ID NO: 2347352 - RNA, 19 nt, Artificial Sequence
  Description of Artificial Sequence: Synthetic oligonucleotide
  Sense strand starting at position 338 of SEQ ID NO: 1885511
gagggugaauauuaaugau

SEQ ID NO: 2347353 - RNA, 19 nt, Artificial Sequence
  Description of Artificial Sequence: Synthetic oligonucleotide
  Antisense strand to SEQ ID NO: 2347352
aucauuaauauucacccuc

SEQ ID NO: 2347354 - RNA, 19 nt, Artificial Sequence
  Description of Artificial Sequence: Synthetic oligonucleotide
  Sense strand starting at position 832 of SEQ ID NO: 1885511
acaguugguagguaucagu

SEQ ID NO: 2347355 - RNA, 19 nt, Artificial Sequence
  Description of Artificial Sequence: Synthetic oligonucleotide
  Antisense strand to SEQ ID NO: 2347354
acugauaccuaccaacugu

SEQ ID NO: 2347356 - RNA, 19 nt, Artificial Sequence
  Description of Artificial Sequence: Synthetic oligonucleotide
  Sense strand starting at position 839 of SEQ ID NO: 1885511
guagguaucaguugagacc

SEQ ID NO: 2347357 - RNA, 19 nt, Artificial Sequence
  Description of Artificial Sequence: Synthetic oligonucleotide
  Antisense strand to SEQ ID NO: 2347356
ggucucaacugauaccuac

SEQ ID NO: 2347358 - RNA, 19 nt, Artificial Sequence
  Description of Artificial Sequence: Synthetic oligonucleotide
  Sense strand starting at position 857 of SEQ ID NO: 1885511
cucggcuucucagccuaaa

SEQ ID NO: 2347359 - RNA, 19 nt, Artificial Sequence
  Description of Artificial Sequence: Synthetic oligonucleotide
  Antisense strand to SEQ ID NO: 2347358
uuuaggcugagaagccgag

SEQ ID NO: 2347360 - RNA, 19 nt, Artificial Sequence
  Description of Artificial Sequence: Synthetic oligonucleotide
  Sense strand starting at position 860 of SEQ ID NO: 1885511
ggcuucucagccuaaagca

SEQ ID NO: 2347361 - RNA, 19 nt, Artificial Sequence
  Description of Artificial Sequence: Synthetic oligonucleotide
  Antisense strand to SEQ ID NO: 2347360
ugcuuuaggcugagaagcc

SEQ ID NO: 2347362 - RNA, 19 nt, Artificial Sequence
  Description of Artificial Sequence: Synthetic oligonucleotide
  Sense strand starting at position 883 of SEQ ID NO: 1885511
gagggauaagucugugcug

SEQ ID NO: 2347363 - RNA, 19 nt, Artificial Sequence
  Description of Artificial Sequence: Synthetic oligonucleotide
  Antisense strand to SEQ ID NO: 2347362
cagcacagacuuaucccuc

SEQ ID NO: 2347364 - RNA, 19 nt, Artificial Sequence
  Description of Artificial Sequence: Synthetic oligonucleotide
  Sense strand starting at position 885 of SEQ ID NO: 1885511
gggauaagucugugcugcu

SEQ ID NO: 2347365 - RNA, 19 nt, Artificial Sequence
  Description of Artificial Sequence: Synthetic oligonucleotide
  Antisense strand to SEQ ID NO: 2347364
agcagcacagacuuauccc

SEQ ID NO: 2347366 - RNA, 19 nt, Artificial Sequence
  Description of Artificial Sequence: Synthetic oligonucleotide
  Sense strand starting at position 980 of SEQ ID NO: 1885511
uagaguagauugucacuca

SEQ ID NO: 2347367 - RNA, 19 nt, Artificial Sequence
  Description of Artificial Sequence: Synthetic oligonucleotide
  Antisense strand to SEQ ID NO: 2347366
ugagugacaaucuacucua

SEQ ID NO: 2347368 - RNA, 19 nt, Artificial Sequence
  Description of Artificial Sequence: Synthetic oligonucleotide
  Sense strand starting at position 983 of SEQ ID NO: 1885511
aguagauugucacucaaug

SEQ ID NO: 2347369 - RNA, 19 nt, Artificial Sequence
  Description of Artificial Sequence: Synthetic oligonucleotide
  Antisense strand to SEQ ID NO: 2347368
cauugagugacaaucuacu

SEQ ID NO: 2347370 - RNA, 19 nt, Artificial Sequence
  Description of Artificial Sequence: Synthetic oligonucleotide
  Sense strand starting at position 1694 of SEQ ID NO: 1885511
ggaaccauguuuccuguga

SEQ ID NO: 2347371 - RNA, 19 nt, Artificial Sequence
  Description of Artificial Sequence: Synthetic oligonucleotide
  Antisense strand to SEQ ID NO: 2347370
ucacaggaaacaugguucc

SEQ ID NO: 2347372 - RNA, 19 nt, Artificial Sequence
  Description of Artificial Sequence: Synthetic oligonucleotide
  Sense strand starting at position 1698 of SEQ ID NO: 1885511
ccauguuuccugugagaaa

SEQ ID NO: 2347373 - RNA, 19 nt, Artificial Sequence
  Description of Artificial Sequence: Synthetic oligonucleotide
  Antisense strand to SEQ ID NO: 2347372
uuucucacaggaaacaugg

SEQ ID NO: 2347374 - RNA, 19 nt, Artificial Sequence
  Description of Artificial Sequence: Synthetic oligonucleotide
  Sense strand starting at position 1739 of SEQ ID NO: 1885511
gauucugucucgguuguga

SEQ ID NO: 2347375 - RNA, 19 nt, Artificial Sequence
  Description of Artificial Sequence: Synthetic oligonucleotide
  Antisense strand to SEQ ID NO: 2347374
ucacaaccgagacagaauc

SEQ ID NO: 2347376 - RNA, 19 nt, Artificial Sequence
  Description of Artificial Sequence: Synthetic oligonucleotide
  Sense strand starting at position 2118 of SEQ ID NO: 1885511
gguccacuugcgcaaucau

SEQ ID NO: 2347377 - RNA, 19 nt, Artificial Sequence
  Description of Artificial Sequence: Synthetic oligonucleotide
  Antisense strand to SEQ ID NO: 2347376
augauugcgcaaguggacc

SEQ ID NO: 2347378 - RNA, 19 nt, Artificial Sequence
  Description of Artificial Sequence: Synthetic oligonucleotide
  Sense strand starting at position 2275 of SEQ ID NO: 1885511
cuauaugcugccggcagaa

SEQ ID NO: 2347379 - RNA, 19 nt, Artificial Sequence
  Description of Artificial Sequence: Synthetic oligonucleotide
  Antisense strand to SEQ ID NO: 2347378
uucugccggcagcauauag

SEQ ID NO: 2347380 - RNA, 19 nt, Artificial Sequence
  Description of Artificial Sequence: Synthetic oligonucleotide
  Sense strand starting at position 2549 of SEQ ID NO: 1885511
cuccauacauuugagggau

SEQ ID NO: 2347381 - RNA, 19 nt, Artificial Sequence
  Description of Artificial Sequence: Synthetic oligonucleotide
  Antisense strand to SEQ ID NO: 2347380
aucccucaaauguauggag

SEQ ID NO: 2347382 - RNA, 19 nt, Artificial Sequence
  Description of Artificial Sequence: Synthetic oligonucleotide
  Sense strand starting at position 2965 of SEQ ID NO: 1885511
acaggaaaguaauuguagu

SEQ ID NO: 2347383 - RNA, 19 nt, Artificial Sequence
  Description of Artificial Sequence: Synthetic oligonucleotide
  Antisense strand to SEQ ID NO: 2347382
acuacaauuacuuuccugu

SEQ ID NO: 2347384 - RNA, 19 nt, Artificial Sequence
  Description of Artificial Sequence: Synthetic oligonucleotide
  Sense strand starting at position 2979 of SEQ ID NO: 1885511
guagucacauaauuguauu

SEQ ID NO: 2347385 - RNA, 19 nt, Artificial Sequence
  Description of Artificial Sequence: Synthetic oligonucleotide
  Antisense strand to SEQ ID NO: 2347384
aauacaauuaugugacuac

SEQ ID NO: 2347386 - RNA, 19 nt, Artificial Sequence
  Description of Artificial Sequence: Synthetic oligonucleotide
  Sense strand starting at position 2992 of SEQ ID NO: 1885511
uguauuacaguaugauaga

SEQ ID NO: 2347387 - RNA, 19 nt, Artificial Sequence
  Description of Artificial Sequence: Synthetic oligonucleotide
  Antisense strand to SEQ ID NO: 2347386
ucuaucauacuguaauaca

SEQ ID NO: 2347388 - RNA, 19 nt, Artificial Sequence
  Description of Artificial Sequence: Synthetic oligonucleotide
  Sense strand starting at position 2995 of SEQ ID NO: 1885511
auuacaguaugauagagau

SEQ ID NO: 2347389 - RNA, 19 nt, Artificial Sequence
  Description of Artificial Sequence: Synthetic oligonucleotide
  Antisense strand to SEQ ID NO: 2347388
aucucuaucauacuguaau

SEQ ID NO: 2347390 - RNA, 19 nt, Artificial Sequence
  Description of Artificial Sequence: Synthetic oligonucleotide
  Sense strand starting at position 3007 of SEQ ID NO: 1885511
uagagauaauagcauuugu

SEQ ID NO: 2347391 - RNA, 19 nt, Artificial Sequence
  Description of Artificial Sequence: Synthetic oligonucleotide
  Antisense strand to SEQ ID NO: 2347390
acaaaugcuauuaucucua

SEQ ID NO: 2347392 - RNA, 19 nt, Artificial Sequence
  Description of Artificial Sequence: Synthetic oligonucleotide
  Sense strand starting at position 3059 of SEQ ID NO: 1885511
aggaaaucacuucgcuuga

SEQ ID NO: 2347393 - RNA, 19 nt, Artificial Sequence
  Description of Artificial Sequence: Synthetic oligonucleotide
  Antisense strand to SEQ ID NO: 2347392
ucaagcgaagugauuuccu

SEQ ID NO: 2347394 - RNA, 19 nt, Artificial Sequence
  Description of Artificial Sequence: Synthetic oligonucleotide
  Sense strand starting at position 3063 of SEQ ID NO: 1885511
aaucacuucgcuugaggga

SEQ ID NO: 2347395 - RNA, 19 nt, Artificial Sequence
  Description of Artificial Sequence: Synthetic oligonucleotide
  Antisense strand to SEQ ID NO: 2347394
ucccucaagcgaagugauu

SEQ ID NO: 2347396 - RNA, 19 nt, Artificial Sequence
  Description of Artificial Sequence: Synthetic oligonucleotide
  Sense strand starting at position 3231 of SEQ ID NO: 1885511
ggguaagaccuagguacaa

SEQ ID NO: 2347397 - RNA, 19 nt, Artificial Sequence
  Description of Artificial Sequence: Synthetic oligonucleotide
  Antisense strand to SEQ ID NO: 2347396
uuguaccuaggucuuaccc

SEQ ID NO: 2347398 - RNA, 19 nt, Artificial Sequence
  Description of Artificial Sequence: Synthetic oligonucleotide
  Sense strand starting at position 3253 of SEQ ID NO: 1885511
gauguuaaaucucuggucu

SEQ ID NO: 2347399 - RNA, 19 nt, Artificial Sequence
  Description of Artificial Sequence: Synthetic oligonucleotide
  Antisense strand to SEQ ID NO: 2347398
agaccagagauuuaacauc

SEQ ID NO: 2347400 - RNA, 19 nt, Artificial Sequence
  Description of Artificial Sequence: Synthetic oligonucleotide
  Sense strand starting at position 3254 of SEQ ID NO: 1885511
auguuaaaucucuggucua

SEQ ID NO: 2347401 - RNA, 19 nt, Artificial Sequence
  Description of Artificial Sequence: Synthetic oligonucleotide
  Antisense strand to SEQ ID NO: 2347400
uagaccagagauuuaacau

SEQ ID NO: 2347402 - RNA, 19 nt, Artificial Sequence
  Description of Artificial Sequence: Synthetic oligonucleotide
  Sense strand starting at position 3273 of SEQ ID NO: 1885511
gcuucuagauuaguaaaug

SEQ ID NO: 2347403 - RNA, 19 nt, Artificial Sequence
  Description of Artificial Sequence: Synthetic oligonucleotide
  Antisense strand to SEQ ID NO: 2347402
cauuuacuaaucuagaagc

SEQ ID NO: 2347404 - RNA, 19 nt, Artificial Sequence
  Description of Artificial Sequence: Synthetic oligonucleotide
  Sense strand starting at position 3365 of SEQ ID NO: 1885511
uggaguccuuagguaaaug

SEQ ID NO: 2347405 - RNA, 19 nt, Artificial Sequence
  Description of Artificial Sequence: Synthetic oligonucleotide
  Antisense strand to SEQ ID NO: 2347404
cauuuaccuaaggacucca

SEQ ID NO: 2347406 - RNA, 19 nt, Artificial Sequence
  Description of Artificial Sequence: Synthetic oligonucleotide
  Sense strand starting at position 3366 of SEQ ID NO: 1885511
ggaguccuuagguaaaugu

SEQ ID NO: 2347407 - RNA, 19 nt, Artificial Sequence
  Description of Artificial Sequence: Synthetic oligonucleotide
  Antisense strand to SEQ ID NO: 2347406
acauuuaccuaaggacucc

SEQ ID NO: 2347408 - RNA, 19 nt, Artificial Sequence
  Description of Artificial Sequence: Synthetic oligonucleotide
  Sense strand starting at position 3392 of SEQ ID NO: 1885511
auggucaucaggugaggau

SEQ ID NO: 2347409 - RNA, 19 nt, Artificial Sequence
  Description of Artificial Sequence: Synthetic oligonucleotide
  Antisense strand to SEQ ID NO: 2347408
auccucaccugaugaccau

SEQ ID NO: 2347410 - RNA, 19 nt, Artificial Sequence
  Description of Artificial Sequence: Synthetic oligonucleotide
  Sense strand starting at position 3393 of SEQ ID NO: 1885511
uggucaucaggugaggauu

SEQ ID NO: 2347411 - RNA, 19 nt, Artificial Sequence
  Description of Artificial Sequence: Synthetic oligonucleotide
  Antisense strand to SEQ ID NO: 2347410
aauccucaccugaugacca

SEQ ID NO: 2347412 - RNA, 19 nt, Artificial Sequence
  Description of Artificial Sequence: Synthetic oligonucleotide
  Sense strand starting at position 3425 of SEQ ID NO: 1885511
acaguacucugccuugaag

SEQ ID NO: 2347413 - RNA, 19 nt, Artificial Sequence
  Description of Artificial Sequence: Synthetic oligonucleotide
  Antisense strand to SEQ ID NO: 2347412
cuucaaggcagaguacugu

SEQ ID NO: 2347414 - RNA, 19 nt, Artificial Sequence
  Description of Artificial Sequence: Synthetic oligonucleotide
  Sense strand starting at position 3427 of SEQ ID NO: 1885511
aguacucugccuugaaguc

SEQ ID NO: 2347415 - RNA, 19 nt, Artificial Sequence
  Description of Artificial Sequence: Synthetic oligonucleotide
  Antisense strand to SEQ ID NO: 2347414
gacuucaaggcagaguacu

SEQ ID NO: 2347416 - RNA, 19 nt, Artificial Sequence
  Description of Artificial Sequence: Synthetic oligonucleotide
  Sense strand starting at position 3615 of SEQ ID NO: 1885511
gugucuauagugugaggca

SEQ ID NO: 2347417 - RNA, 19 nt, Artificial Sequence
  Description of Artificial Sequence: Synthetic oligonucleotide
  Antisense strand to SEQ ID NO: 2347416
ugccucacacuauagacac

SEQ ID NO: 2347418 - RNA, 19 nt, Artificial Sequence
  Description of Artificial Sequence: Synthetic oligonucleotide
  Sense strand starting at position 3947 of SEQ ID NO: 1885511
cuggcuucuggagaaaucu

SEQ ID NO: 2347419 - RNA, 19 nt, Artificial Sequence
  Description of Artificial Sequence: Synthetic oligonucleotide
  Antisense strand to SEQ ID NO: 2347418
agauuucuccagaagccag

SEQ ID NO: 2347420 - RNA, 19 nt, Artificial Sequence
  Description of Artificial Sequence: Synthetic oligonucleotide
  Sense strand starting at position 3953 of SEQ ID NO: 1885511
ucuggagaaaucugugauu

SEQ ID NO: 2347421 - RNA, 19 nt, Artificial Sequence
  Description of Artificial Sequence: Synthetic oligonucleotide
  Antisense strand to SEQ ID NO: 2347420
aaucacagauuucuccaga

SEQ ID NO: 2347422 - RNA, 19 nt, Artificial Sequence
  Description of Artificial Sequence: Synthetic oligonucleotide
  Sense strand starting at position 3955 of SEQ ID NO: 1885511
uggagaaaucugugauuau

SEQ ID NO: 2347423 - RNA, 19 nt, Artificial Sequence
  Description of Artificial Sequence: Synthetic oligonucleotide
  Antisense strand to SEQ ID NO: 2347422
auaaucacagauuucucca

SEQ ID NO: 2347424 - RNA, 19 nt, Artificial Sequence
  Description of Artificial Sequence: Synthetic oligonucleotide
  Sense strand starting at position 3956 of SEQ ID NO: 1885511
ggagaaaucugugauuaug

SEQ ID NO: 2347425 - RNA, 19 nt, Artificial Sequence
  Description of Artificial Sequence: Synthetic oligonucleotide
  Antisense strand to SEQ ID NO: 2347424
cauaaucacagauuucucc

SEQ ID NO: 2347426 - RNA, 19 nt, Artificial Sequence
  Description of Artificial Sequence: Synthetic oligonucleotide
  Sense strand starting at position 3958 of SEQ ID NO: 1885511
agaaaucugugauuaugac

SEQ ID NO: 2347427 - RNA, 19 nt, Artificial Sequence
  Description of Artificial Sequence: Synthetic oligonucleotide
  Antisense strand to SEQ ID NO: 2347426
gucauaaucacagauuucu

SEQ ID NO: 2347428 - RNA, 19 nt, Artificial Sequence
  Description of Artificial Sequence: Synthetic oligonucleotide
  Sense strand starting at position 3966 of SEQ ID NO: 1885511
gugauuaugacgcgucaga

SEQ ID NO: 2347429 - RNA, 19 nt, Artificial Sequence
  Description of Artificial Sequence: Synthetic oligonucleotide
  Antisense strand to SEQ ID NO: 2347428
ucugacgcgucauaaucac

SEQ ID NO: 2347430 - RNA, 19 nt, Artificial Sequence
  Description of Artificial Sequence: Synthetic oligonucleotide
  Sense strand starting at position 22 of SEQ ID NO: 1885512
cuggaaugcugggacuaca

SEQ ID NO: 2347431 - RNA, 19 nt, Artificial Sequence
  Description of Artificial Sequence: Synthetic oligonucleotide
  Antisense strand to SEQ ID NO: 2347430
uguagucccagcauuccag

SEQ ID NO: 2347432 - RNA, 19 nt, Artificial Sequence
  Description of Artificial Sequence: Synthetic oligonucleotide
  Sense strand starting at position 135 of SEQ ID NO: 1885512
ggucuucucuguuaaagug

SEQ ID NO: 2347433 - RNA, 19 nt, Artificial Sequence
  Description of Artificial Sequence: Synthetic oligonucleotide
  Antisense strand to SEQ ID NO: 2347432
cacuuuaacagagaagacc

SEQ ID NO: 2347434 - RNA, 19 nt, Artificial Sequence
  Description of Artificial Sequence: Synthetic oligonucleotide
  Sense strand starting at position 141 of SEQ ID NO: 1885512
cucuguuaaagugacaguu

SEQ ID NO: 2347435 - RNA, 19 nt, Artificial Sequence
  Description of Artificial Sequence: Synthetic oligonucleotide
  Antisense strand to SEQ ID NO: 2347434
aacugucacuuuaacagag

SEQ ID NO: 2347436 - RNA, 19 nt, Artificial Sequence
  Description of Artificial Sequence: Synthetic oligonucleotide
  Sense strand starting at position 164 of SEQ ID NO: 1885512
ggaauauuggucugcucuu

SEQ ID NO: 2347437 - RNA, 19 nt, Artificial Sequence
  Description of Artificial Sequence: Synthetic oligonucleotide
  Antisense strand to SEQ ID NO: 2347436
aagagcagaccaauauucc

SEQ ID NO: 2347438 - RNA, 19 nt, Artificial Sequence
  Description of Artificial Sequence: Synthetic oligonucleotide
  Sense strand starting at position 490 of SEQ ID NO: 1885512
uguaccuaccuguaggaaa

SEQ ID NO: 2347439 - RNA, 19 nt, Artificial Sequence
  Description of Artificial Sequence: Synthetic oligonucleotide
  Antisense strand to SEQ ID NO: 2347438
uuuccuacagguagguaca

SEQ ID NO: 2347440 - RNA, 19 nt, Artificial Sequence
  Description of Artificial Sequence: Synthetic oligonucleotide
  Sense strand starting at position 1111 of SEQ ID NO: 1885512
aaaggucguucucaaguca

SEQ ID NO: 2347441 - RNA, 19 nt, Artificial Sequence
  Description of Artificial Sequence: Synthetic oligonucleotide
  Antisense strand to SEQ ID NO: 2347440
ugacuugagaacgaccuuu

SEQ ID NO: 2347442 - RNA, 19 nt, Artificial Sequence
  Description of Artificial Sequence: Synthetic oligonucleotide
  Sense strand starting at position 2779 of SEQ ID NO: 1885512
ggaucaaacggcuacauua

SEQ ID NO: 2347443 - RNA, 19 nt, Artificial Sequence
  Description of Artificial Sequence: Synthetic oligonucleotide
  Antisense strand to SEQ ID NO: 2347442
uaauguagccguuugaucc

SEQ ID NO: 2347444 - RNA, 19 nt, Artificial Sequence
  Description of Artificial Sequence: Synthetic oligonucleotide
  Sense strand starting at position 2891 of SEQ ID NO: 1885512
uuuauaaauucuggugcau

SEQ ID NO: 2347445 - RNA, 19 nt, Artificial Sequence
  Description of Artificial Sequence: Synthetic oligonucleotide
  Antisense strand to SEQ ID NO: 2347444
augcaccagaauuuauaaa

SEQ ID NO: 2347446 - RNA, 19 nt, Artificial Sequence
  Description of Artificial Sequence: Synthetic oligonucleotide
  Sense strand starting at position 2911 of SEQ ID NO: 1885512
gcagaugggucuugcugau

SEQ ID NO: 2347447 - RNA, 19 nt, Artificial Sequence
  Description of Artificial Sequence: Synthetic oligonucleotide
  Antisense strand to SEQ ID NO: 2347446
aucagcaagacccaucugc

SEQ ID NO: 2347448 - RNA, 19 nt, Artificial Sequence
  Description of Artificial Sequence: Synthetic oligonucleotide
  Sense strand starting at position 3047 of SEQ ID NO: 1885512
gguguuuacugaugguucu

SEQ ID NO: 2347449 - RNA, 19 nt, Artificial Sequence
  Description of Artificial Sequence: Synthetic oligonucleotide
  Antisense strand to SEQ ID NO: 2347448
agaaccaucaguaaacacc

SEQ ID NO: 2347450 - RNA, 19 nt, Artificial Sequence
  Description of Artificial Sequence: Synthetic oligonucleotide
  Sense strand starting at position 3048 of SEQ ID NO: 1885512
guguuuacugaugguucua

SEQ ID NO: 2347451 - RNA, 19 nt, Artificial Sequence
  Description of Artificial Sequence: Synthetic oligonucleotide
  Antisense strand to SEQ ID NO: 2347450
uagaaccaucaguaaacac

SEQ ID NO: 2347452 - RNA, 19 nt, Artificial Sequence
  Description of Artificial Sequence: Synthetic oligonucleotide
  Sense strand starting at position 3053 of SEQ ID NO: 1885512
uacugaugguucuagcaau

SEQ ID NO: 2347453 - RNA, 19 nt, Artificial Sequence
  Description of Artificial Sequence: Synthetic oligonucleotide
  Antisense strand to SEQ ID NO: 2347452
auugcuagaaccaucagua

SEQ ID NO: 2347454 - RNA, 19 nt, Artificial Sequence
  Description of Artificial Sequence: Synthetic oligonucleotide
  Sense strand starting at position 3184 of SEQ ID NO: 1885512
cuauuagcauuguaucaga

SEQ ID NO: 2347455 - RNA, 19 nt, Artificial Sequence
  Description of Artificial Sequence: Synthetic oligonucleotide
  Antisense strand to SEQ ID NO: 2347454
ucugauacaaugcuaauag

SEQ ID NO: 2347456 - RNA, 19 nt, Artificial Sequence
  Description of Artificial Sequence: Synthetic oligonucleotide
  Sense strand starting at position 3187 of SEQ ID NO: 1885512
uuagcauuguaucagauuc

SEQ ID NO: 2347457 - RNA, 19 nt, Artificial Sequence
  Description of Artificial Sequence: Synthetic oligonucleotide
  Antisense strand to SEQ ID NO: 2347456
gaaucugauacaaugcuaa

SEQ ID NO: 2347458 - RNA, 19 nt, Artificial Sequence
  Description of Artificial Sequence: Synthetic oligonucleotide
  Sense strand starting at position 3338 of SEQ ID NO: 1885512
ucaauucgagcgcauacua

SEQ ID NO: 2347459 - RNA, 19 nt, Artificial Sequence
  Description of Artificial Sequence: Synthetic oligonucleotide
  Antisense strand to SEQ ID NO: 2347458
uaguaugcgcucgaauuga

SEQ ID NO: 2347460 - RNA, 19 nt, Artificial Sequence
  Description of Artificial Sequence: Synthetic oligonucleotide
  Sense strand starting at position 3393 of SEQ ID NO: 1885512
cugacuugcuagugucauc

SEQ ID NO: 2347461 - RNA, 19 nt, Artificial Sequence
  Description of Artificial Sequence: Synthetic oligonucleotide
  Antisense strand to SEQ ID NO: 2347460
gaugacacuagcaagucag

SEQ ID NO: 2347462 - RNA, 19 nt, Artificial Sequence
  Description of Artificial Sequence: Synthetic oligonucleotide
  Sense strand starting at position 3480 of SEQ ID NO: 1885512
uugguaucacauggaaaca

SEQ ID NO: 2347463 - RNA, 19 nt, Artificial Sequence
  Description of Artificial Sequence: Synthetic oligonucleotide
  Antisense strand to SEQ ID NO: 2347462
uguuuccaugugauaccaa

SEQ ID NO: 2347464 - RNA, 19 nt, Artificial Sequence
  Description of Artificial Sequence: Synthetic oligonucleotide
  Sense strand starting at position 3559 of SEQ ID NO: 1885512
ggcagaaguuaaucccaga

SEQ ID NO: 2347465 - RNA, 19 nt, Artificial Sequence
  Description of Artificial Sequence: Synthetic oligonucleotide
  Antisense strand to SEQ ID NO: 2347464
ucugggauuaacuucugcc

SEQ ID NO: 2347466 - RNA, 19 nt, Artificial Sequence
  Description of Artificial Sequence: Synthetic oligonucleotide
  Sense strand starting at position 3562 of SEQ ID NO: 1885512
agaaguuaaucccagaggu

SEQ ID NO: 2347467 - RNA, 19 nt, Artificial Sequence
  Description of Artificial Sequence: Synthetic oligonucleotide
  Antisense strand to SEQ ID NO: 2347466
accucugggauuaacuucu

SEQ ID NO: 2347468 - RNA, 19 nt, Artificial Sequence
  Description of Artificial Sequence: Synthetic oligonucleotide
  Sense strand starting at position 3564 of SEQ ID NO: 1885512
aaguuaaucccagaggucu

SEQ ID NO: 2347469 - RNA, 19 nt, Artificial Sequence
  Description of Artificial Sequence: Synthetic oligonucleotide
  Antisense strand to SEQ ID NO: 2347468
agaccucugggauuaacuu

SEQ ID NO: 2347470 - RNA, 19 nt, Artificial Sequence
  Description of Artificial Sequence: Synthetic oligonucleotide
  Sense strand starting at position 3851 of SEQ ID NO: 1885512
ccuguauaauucccaagga

SEQ ID NO: 2347471 - RNA, 19 nt, Artificial Sequence
  Description of Artificial Sequence: Synthetic oligonucleotide
  Antisense strand to SEQ ID NO: 2347470
uccuugggaauuauacagg

SEQ ID NO: 2347472 - RNA, 19 nt, Artificial Sequence
  Description of Artificial Sequence: Synthetic oligonucleotide
  Sense strand starting at position 3852 of SEQ ID NO: 1885512
cuguauaauucccaaggac

SEQ ID NO: 2347473 - RNA, 19 nt, Artificial Sequence
  Description of Artificial Sequence: Synthetic oligonucleotide
  Antisense strand to SEQ ID NO: 2347472
guccuugggaauuauacag

SEQ ID NO: 2347474 - RNA, 19 nt, Artificial Sequence
  Description of Artificial Sequence: Synthetic oligonucleotide
  Sense strand starting at position 70 of SEQ ID NO: 1885514
guccuaggcaucgguauuu

SEQ ID NO: 2347475 - RNA, 19 nt, Artificial Sequence
  Description of Artificial Sequence: Synthetic oligonucleotide
  Antisense strand to SEQ ID NO: 2347474
aaauaccgaugccuaggac

SEQ ID NO: 2347476 - RNA, 19 nt, Artificial Sequence
  Description of Artificial Sequence: Synthetic oligonucleotide
  Sense strand starting at position 86 of SEQ ID NO: 1885514
uuugguugucuccaccuaa

SEQ ID NO: 2347477 - RNA, 19 nt, Artificial Sequence
  Description of Artificial Sequence: Synthetic oligonucleotide
  Antisense strand to SEQ ID NO: 2347476
uuagguggagacaaccaaa

SEQ ID NO: 2347478 - RNA, 19 nt, Artificial Sequence
  Description of Artificial Sequence: Synthetic oligonucleotide
  Sense strand starting at position 437 of SEQ ID NO: 1885514
uucuuuacuugaucauugu

SEQ ID NO: 2347479 - RNA, 19 nt, Artificial Sequence
  Description of Artificial Sequence: Synthetic oligonucleotide
  Antisense strand to SEQ ID NO: 2347478
acaaugaucaaguaaagaa

SEQ ID NO: 2347480 - RNA, 19 nt, Artificial Sequence
  Description of Artificial Sequence: Synthetic oligonucleotide
  Sense strand starting at position 485 of SEQ ID NO: 1885514
ggaacaguucacuacggua

SEQ ID NO: 2347481 - RNA, 19 nt, Artificial Sequence
  Description of Artificial Sequence: Synthetic oligonucleotide
  Antisense strand to SEQ ID NO: 2347480
uaccguagugaacuguucc

SEQ ID NO: 2347482 - RNA, 19 nt, Artificial Sequence
  Description of Artificial Sequence: Synthetic oligonucleotide
  Sense strand starting at position 552 of SEQ ID NO: 1885514
aguggcacucaauaauuau

SEQ ID NO: 2347483 - RNA, 19 nt, Artificial Sequence
  Description of Artificial Sequence: Synthetic oligonucleotide
  Antisense strand to SEQ ID NO: 2347482
auaauuauugagugccacu

SEQ ID NO: 2347484 - RNA, 19 nt, Artificial Sequence
  Description of Artificial Sequence: Synthetic oligonucleotide
  Sense strand starting at position 580 of SEQ ID NO: 1885514
aaaugaauggcuuguacug

SEQ ID NO: 2347485 - RNA, 19 nt, Artificial Sequence
  Description of Artificial Sequence: Synthetic oligonucleotide
  Antisense strand to SEQ ID NO: 2347484
caguacaagccauucauuu

SEQ ID NO: 2347486 - RNA, 19 nt, Artificial Sequence
  Description of Artificial Sequence: Synthetic oligonucleotide
  Sense strand starting at position 606 of SEQ ID NO: 1885514
ucaucaguaccaugguuga

SEQ ID NO: 2347487 - RNA, 19 nt, Artificial Sequence
  Description of Artificial Sequence: Synthetic oligonucleotide
  Antisense strand to SEQ ID NO: 2347486
ucaaccaugguacugauga

SEQ ID NO: 2347488 - RNA, 19 nt, Artificial Sequence
  Description of Artificial Sequence: Synthetic oligonucleotide
  Sense strand starting at position 650 of SEQ ID NO: 1885514
guaacaaauugagagauaa

SEQ ID NO: 2347489 - RNA, 19 nt, Artificial Sequence
  Description of Artificial Sequence: Synthetic oligonucleotide
  Antisense strand to SEQ ID NO: 2347488
uuaucucucaauuuguuac

SEQ ID NO: 2347490 - RNA, 19 nt, Artificial Sequence
  Description of Artificial Sequence: Synthetic oligonucleotide
  Sense strand starting at position 797 of SEQ ID NO: 1885514
gucaauaucuacuugguau

SEQ ID NO: 2347491 - RNA, 19 nt, Artificial Sequence
  Description of Artificial Sequence: Synthetic oligonucleotide
  Antisense strand to SEQ ID NO: 2347490
auaccaaguagauauugac

SEQ ID NO: 2347492 - RNA, 19 nt, Artificial Sequence
  Description of Artificial Sequence: Synthetic oligonucleotide
  Sense strand starting at position 1085 of SEQ ID NO: 1885514
augggugaacguuauggua

SEQ ID NO: 2347493 - RNA, 19 nt, Artificial Sequence
  Description of Artificial Sequence: Synthetic oligonucleotide
  Antisense strand to SEQ ID NO: 2347492
uaccauaacguucacccau

SEQ ID NO: 2347494 - RNA, 19 nt, Artificial Sequence
  Description of Artificial Sequence: Synthetic oligonucleotide
  Sense strand starting at position 1092 of SEQ ID NO: 1885514
aacguuaugguauguacau

SEQ ID NO: 2347495 - RNA, 19 nt, Artificial Sequence
  Description of Artificial Sequence: Synthetic oligonucleotide
  Antisense strand to SEQ ID NO: 2347494
auguacauaccauaacguu

SEQ ID NO: 2347496 - RNA, 19 nt, Artificial Sequence
  Description of Artificial Sequence: Synthetic oligonucleotide
  Sense strand starting at position 1093 of SEQ ID NO: 1885514
acguuaugguauguacauu

SEQ ID NO: 2347497 - RNA, 19 nt, Artificial Sequence
  Description of Artificial Sequence: Synthetic oligonucleotide
  Antisense strand to SEQ ID NO: 2347496
aauguacauaccauaacgu

SEQ ID NO: 2347498 - RNA, 19 nt, Artificial Sequence
  Description of Artificial Sequence: Synthetic oligonucleotide
  Sense strand starting at position 1094 of SEQ ID NO: 1885514
cguuaugguauguacauua

SEQ ID NO: 2347499 - RNA, 19 nt, Artificial Sequence
  Description of Artificial Sequence: Synthetic oligonucleotide
  Antisense strand to SEQ ID NO: 2347498
uaauguacauaccauaacg

SEQ ID NO: 2347500 - RNA, 19 nt, Artificial Sequence
  Description of Artificial Sequence: Synthetic oligonucleotide
  Sense strand starting at position 1099 of SEQ ID NO: 1885514
ugguauguacauuauacuu

SEQ ID NO: 2347501 - RNA, 19 nt, Artificial Sequence
  Description of Artificial Sequence: Synthetic oligonucleotide
  Antisense strand to SEQ ID NO: 2347500
aaguauaauguacauacca

SEQ ID NO: 2347502 - RNA, 19 nt, Artificial Sequence
  Description of Artificial Sequence: Synthetic oligonucleotide
  Sense strand starting at position 1253 of SEQ ID NO: 1885514
gagcucugccaguaguuga

SEQ ID NO: 2347503 - RNA, 19 nt, Artificial Sequence
  Description of Artificial Sequence: Synthetic oligonucleotide
  Antisense strand to SEQ ID NO: 2347502
ucaacuacuggcagagcuc

SEQ ID NO: 2347504 - RNA, 19 nt, Artificial Sequence
  Description of Artificial Sequence: Synthetic oligonucleotide
  Sense strand starting at position 1353 of SEQ ID NO: 1885514
gaaccauauugggaugacu

SEQ ID NO: 2347505 - RNA, 19 nt, Artificial Sequence
  Description of Artificial Sequence: Synthetic oligonucleotide
  Antisense strand to SEQ ID NO: 2347504
agucaucccaauaugguuc

SEQ ID NO: 2347506 - RNA, 19 nt, Artificial Sequence
  Description of Artificial Sequence: Synthetic oligonucleotide
  Sense strand starting at position 1355 of SEQ ID NO: 1885514
accauauugggaugacugu

SEQ ID NO: 2347507 - RNA, 19 nt, Artificial Sequence
  Description of Artificial Sequence: Synthetic oligonucleotide
  Antisense strand to SEQ ID NO: 2347506
acagucaucccaauauggu

SEQ ID NO: 2347508 - RNA, 19 nt, Artificial Sequence
  Description of Artificial Sequence: Synthetic oligonucleotide
  Sense strand starting at position 2181 of SEQ ID NO: 1885514
cucccugauuggcucgaau

SEQ ID NO: 2347509 - RNA, 19 nt, Artificial Sequence
  Description of Artificial Sequence: Synthetic oligonucleotide
  Antisense strand to SEQ ID NO: 2347508
auucgagccaaucagggag

SEQ ID NO: 2347510 - RNA, 19 nt, Artificial Sequence
  Description of Artificial Sequence: Synthetic oligonucleotide
  Sense strand starting at position 2240 of SEQ ID NO: 1885514
gguuucuagccacaugcaa

SEQ ID NO: 2347511 - RNA, 19 nt, Artificial Sequence
  Description of Artificial Sequence: Synthetic oligonucleotide
  Antisense strand to SEQ ID NO: 2347510
uugcauguggcuagaaacc

SEQ ID NO: 2347512 - RNA, 19 nt, Artificial Sequence
  Description of Artificial Sequence: Synthetic oligonucleotide
  Sense strand starting at position 2625 of SEQ ID NO: 1885514
cccuaauggucccucugua

SEQ ID NO: 2347513 - RNA, 19 nt, Artificial Sequence
  Description of Artificial Sequence: Synthetic oligonucleotide
  Antisense strand to SEQ ID NO: 2347512
uacagagggaccauuaggg

SEQ ID NO: 2347514 - RNA, 19 nt, Artificial Sequence
  Description of Artificial Sequence: Synthetic oligonucleotide
  Sense strand starting at position 2730 of SEQ ID NO: 1885514
guaccuugcagcugaggaa

SEQ ID NO: 2347515 - RNA, 19 nt, Artificial Sequence
  Description of Artificial Sequence: Synthetic oligonucleotide
  Antisense strand to SEQ ID NO: 2347514
uuccucagcugcaagguac

SEQ ID NO: 2347516 - RNA, 19 nt, Artificial Sequence
  Description of Artificial Sequence: Synthetic oligonucleotide
  Sense strand starting at position 2925 of SEQ ID NO: 1885514
aguuuagugaggugacaag

SEQ ID NO: 2347517 - RNA, 19 nt, Artificial Sequence
  Description of Artificial Sequence: Synthetic oligonucleotide
  Antisense strand to SEQ ID NO: 2347516
cuugucaccucacuaaacu

SEQ ID NO: 2347518 - RNA, 19 nt, Artificial Sequence
  Description of Artificial Sequence: Synthetic oligonucleotide
  Sense strand starting at position 2946 of SEQ ID NO: 1885514
uugaucaaggguugcaaga

SEQ ID NO: 2347519 - RNA, 19 nt, Artificial Sequence
  Description of Artificial Sequence: Synthetic oligonucleotide
  Antisense strand to SEQ ID NO: 2347518
ucuugcaacccuugaucaa

SEQ ID NO: 2347520 - RNA, 19 nt, Artificial Sequence
  Description of Artificial Sequence: Synthetic oligonucleotide
  Sense strand starting at position 2955 of SEQ ID NO: 1885514
gguugcaagacugauuagu

SEQ ID NO: 2347521 - RNA, 19 nt, Artificial Sequence
  Description of Artificial Sequence: Synthetic oligonucleotide
  Antisense strand to SEQ ID NO: 2347520
acuaaucagucuugcaacc

SEQ ID NO: 2347522 - RNA, 19 nt, Artificial Sequence
  Description of Artificial Sequence: Synthetic oligonucleotide
  Sense strand starting at position 2957 of SEQ ID NO: 1885514
uugcaagacugauuaguga

SEQ ID NO: 2347523 - RNA, 19 nt, Artificial Sequence
  Description of Artificial Sequence: Synthetic oligonucleotide
  Antisense strand to SEQ ID NO: 2347522
ucacuaaucagucuugcaa

SEQ ID NO: 2347524 - RNA, 19 nt, Artificial Sequence
  Description of Artificial Sequence: Synthetic oligonucleotide
  Sense strand starting at position 2965 of SEQ ID NO: 1885514
cugauuagugacggauguu

SEQ ID NO: 2347525 - RNA, 19 nt, Artificial Sequence
  Description of Artificial Sequence: Synthetic oligonucleotide
  Antisense strand to SEQ ID NO: 2347524
aacauccgucacuaaucag

SEQ ID NO: 2347526 - RNA, 19 nt, Artificial Sequence
  Description of Artificial Sequence: Synthetic oligonucleotide
  Sense strand starting at position 2966 of SEQ ID NO: 1885514
ugauuagugacggauguuc

SEQ ID NO: 2347527 - RNA, 19 nt, Artificial Sequence
  Description of Artificial Sequence: Synthetic oligonucleotide
  Antisense strand to SEQ ID NO: 2347526
gaacauccgucacuaauca

SEQ ID NO: 2347528 - RNA, 19 nt, Artificial Sequence
  Description of Artificial Sequence: Synthetic oligonucleotide
  Sense strand starting at position 2968 of SEQ ID NO: 1885514
auuagugacggauguucaa

SEQ ID NO: 2347529 - RNA, 19 nt, Artificial Sequence
  Description of Artificial Sequence: Synthetic oligonucleotide
  Antisense strand to SEQ ID NO: 2347528
uugaacauccgucacuaau

SEQ ID NO: 2347530 - RNA, 19 nt, Artificial Sequence
  Description of Artificial Sequence: Synthetic oligonucleotide
  Sense strand starting at position 3251 of SEQ ID NO: 1885514
ccagguugcugagauuuac

SEQ ID NO: 2347531 - RNA, 19 nt, Artificial Sequence
  Description of Artificial Sequence: Synthetic oligonucleotide
  Antisense strand to SEQ ID NO: 2347530
guaaaucucagcaaccugg

SEQ ID NO: 2347532 - RNA, 19 nt, Artificial Sequence
  Description of Artificial Sequence: Synthetic oligonucleotide
  Sense strand starting at position 3427 of SEQ ID NO: 1885514
cuccuagaguuacuuucua

SEQ ID NO: 2347533 - RNA, 19 nt, Artificial Sequence
  Description of Artificial Sequence: Synthetic oligonucleotide
  Antisense strand to SEQ ID NO: 2347532
uagaaaguaacucuaggag

SEQ ID NO: 2347534 - RNA, 19 nt, Artificial Sequence
  Description of Artificial Sequence: Synthetic oligonucleotide
  Sense strand starting at position 3440 of SEQ ID NO: 1885514
uuucuaguuuggccucaga

SEQ ID NO: 2347535 - RNA, 19 nt, Artificial Sequence
  Description of Artificial Sequence: Synthetic oligonucleotide
  Antisense strand to SEQ ID NO: 2347534
ucugaggccaaacuagaaa

SEQ ID NO: 2347536 - RNA, 19 nt, Artificial Sequence
  Description of Artificial Sequence: Synthetic oligonucleotide
  Sense strand starting at position 3503 of SEQ ID NO: 1885514
gagaucgaaugcuuaacua

SEQ ID NO: 2347537 - RNA, 19 nt, Artificial Sequence
  Description of Artificial Sequence: Synthetic oligonucleotide
  Antisense strand to SEQ ID NO: 2347536
uaguuaagcauucgaucuc

SEQ ID NO: 2347538 - RNA, 19 nt, Artificial Sequence
  Description of Artificial Sequence: Synthetic oligonucleotide
  Sense strand starting at position 3570 of SEQ ID NO: 1885514
uccaguuuccggcaauaau

SEQ ID NO: 2347539 - RNA, 19 nt, Artificial Sequence
  Description of Artificial Sequence: Synthetic oligonucleotide
  Antisense strand to SEQ ID NO: 2347538
auuauugccggaaacugga

SEQ ID NO: 2347540 - RNA, 19 nt, Artificial Sequence
  Description of Artificial Sequence: Synthetic oligonucleotide
  Sense strand starting at position 3573 of SEQ ID NO: 1885514
aguuuccggcaauaaugaa

SEQ ID NO: 2347541 - RNA, 19 nt, Artificial Sequence
  Description of Artificial Sequence: Synthetic oligonucleotide
  Antisense strand to SEQ ID NO: 2347540
uucauuauugccggaaacu

SEQ ID NO: 2347542 - RNA, 19 nt, Artificial Sequence
  Description of Artificial Sequence: Synthetic oligonucleotide
  Sense strand starting at position 3592 of SEQ ID NO: 1885514
caaugccaccguuaguaau

SEQ ID NO: 2347543 - RNA, 19 nt, Artificial Sequence
  Description of Artificial Sequence: Synthetic oligonucleotide
  Antisense strand to SEQ ID NO: 2347542
auuacuaacgguggcauug

SEQ ID NO: 2347544 - RNA, 19 nt, Artificial Sequence
  Description of Artificial Sequence: Synthetic oligonucleotide
  Sense strand starting at position 3613 of SEQ ID NO: 1885514
uguaaaugucuuuguauag

SEQ ID NO: 2347545 - RNA, 19 nt, Artificial Sequence
  Description of Artificial Sequence: Synthetic oligonucleotide
  Antisense strand to SEQ ID NO: 2347544
cuauacaaagacauuuaca

SEQ ID NO: 2347546 - RNA, 19 nt, Artificial Sequence
  Description of Artificial Sequence: Synthetic oligonucleotide
  Sense strand starting at position 3614 of SEQ ID NO: 1885514
guaaaugucuuuguauaga

SEQ ID NO: 2347547 - RNA, 19 nt, Artificial Sequence
  Description of Artificial Sequence: Synthetic oligonucleotide
  Antisense strand to SEQ ID NO: 2347546
ucuauacaaagacauuuac

SEQ ID NO: 2347548 - RNA, 19 nt, Artificial Sequence
  Description of Artificial Sequence: Synthetic oligonucleotide
  Sense strand starting at position 3716 of SEQ ID NO: 1885514
aguucgggaguucgagaaa

SEQ ID NO: 2347549 - RNA, 19 nt, Artificial Sequence
  Description of Artificial Sequence: Synthetic oligonucleotide
  Antisense strand to SEQ ID NO: 2347548
uuucucgaacucccgaacu

SEQ ID NO: 2347550 - RNA, 19 nt, Artificial Sequence
  Description of Artificial Sequence: Synthetic oligonucleotide
  Sense strand starting at position 3719 of SEQ ID NO: 1885514
ucgggaguucgagaaauca

SEQ ID NO: 2347551 - RNA, 19 nt, Artificial Sequence
  Description of Artificial Sequence: Synthetic oligonucleotide
  Antisense strand to SEQ ID NO: 2347550
ugauuucucgaacucccga

SEQ ID NO: 2347552 - RNA, 19 nt, Artificial Sequence
  Description of Artificial Sequence: Synthetic oligonucleotide
  Sense strand starting at position 3728 of SEQ ID NO: 1885514
cgagaaaucagccggacca

SEQ ID NO: 2347553 - RNA, 19 nt, Artificial Sequence
  Description of Artificial Sequence: Synthetic oligonucleotide
  Antisense strand to SEQ ID NO: 2347552
ugguccggcugauuucucg

SEQ ID NO: 2347554 - RNA, 19 nt, Artificial Sequence
  Description of Artificial Sequence: Synthetic oligonucleotide
  Sense strand starting at position 240 of SEQ ID NO: 1885513
gggaaugguaaagguauua

SEQ ID NO: 2347555 - RNA, 19 nt, Artificial Sequence
  Description of Artificial Sequence: Synthetic oligonucleotide
  Antisense strand to SEQ ID NO: 2347554
uaauaccuuuaccauuccc

SEQ ID NO: 2347556 - RNA, 19 nt, Artificial Sequence
  Description of Artificial Sequence: Synthetic oligonucleotide
  Sense strand starting at position 308 of SEQ ID NO: 1885513
uuagcagaacuuugauuau

SEQ ID NO: 2347557 - RNA, 19 nt, Artificial Sequence
  Description of Artificial Sequence: Synthetic oligonucleotide
  Antisense strand to SEQ ID NO: 2347556
auaaucaaaguucugcuaa

SEQ ID NO: 2347558 - RNA, 19 nt, Artificial Sequence
  Description of Artificial Sequence: Synthetic oligonucleotide
  Sense strand starting at position 311 of SEQ ID NO: 1885513
gcagaacuuugauuauaau

SEQ ID NO: 2347559 - RNA, 19 nt, Artificial Sequence
  Description of Artificial Sequence: Synthetic oligonucleotide
  Antisense strand to SEQ ID NO: 2347558
auuauaaucaaaguucugc

SEQ ID NO: 2347560 - RNA, 19 nt, Artificial Sequence
  Description of Artificial Sequence: Synthetic oligonucleotide
  Sense strand starting at position 404 of SEQ ID NO: 1885513
aguuauccacaauguuuau

SEQ ID NO: 2347561 - RNA, 19 nt, Artificial Sequence
  Description of Artificial Sequence: Synthetic oligonucleotide
  Antisense strand to SEQ ID NO: 2347560
auaaacauuguggauaacu

SEQ ID NO: 2347562 - RNA, 19 nt, Artificial Sequence
  Description of Artificial Sequence: Synthetic oligonucleotide
  Sense strand starting at position 960 of SEQ ID NO: 1885513
cuccauuaagagugacuua

SEQ ID NO: 2347563 - RNA, 19 nt, Artificial Sequence
  Description of Artificial Sequence: Synthetic oligonucleotide
  Antisense strand to SEQ ID NO: 2347562
uaagucacucuuaauggag

SEQ ID NO: 2347564 - RNA, 19 nt, Artificial Sequence
  Description of Artificial Sequence: Synthetic oligonucleotide
  Sense strand starting at position 963 of SEQ ID NO: 1885513
cauuaagagugacuuaagu

SEQ ID NO: 2347565 - RNA, 19 nt, Artificial Sequence
  Description of Artificial Sequence: Synthetic oligonucleotide
  Antisense strand to SEQ ID NO: 2347564
acuuaagucacucuuaaug

SEQ ID NO: 2347566 - RNA, 19 nt, Artificial Sequence
  Description of Artificial Sequence: Synthetic oligonucleotide
  Sense strand starting at position 1215 of SEQ ID NO: 1885513
agccgcaaucgugccauua

SEQ ID NO: 2347567 - RNA, 19 nt, Artificial Sequence
  Description of Artificial Sequence: Synthetic oligonucleotide
  Antisense strand to SEQ ID NO: 2347566
uaauggcacgauugcggcu

SEQ ID NO: 2347568 - RNA, 19 nt, Artificial Sequence
  Description of Artificial Sequence: Synthetic oligonucleotide
  Sense strand starting at position 1216 of SEQ ID NO: 1885513
gccgcaaucgugccauuau

SEQ ID NO: 2347569 - RNA, 19 nt, Artificial Sequence
  Description of Artificial Sequence: Synthetic oligonucleotide
  Antisense strand to SEQ ID NO: 2347568
auaauggcacgauugcggc

SEQ ID NO: 2347570 - RNA, 19 nt, Artificial Sequence
  Description of Artificial Sequence: Synthetic oligonucleotide
  Sense strand starting at position 1418 of SEQ ID NO: 1885513
gggugcuguaaguaaacua

SEQ ID NO: 2347571 - RNA, 19 nt, Artificial Sequence
  Description of Artificial Sequence: Synthetic oligonucleotide
  Antisense strand to SEQ ID NO: 2347570
uaguuuacuuacagcaccc

SEQ ID NO: 2347572 - RNA, 19 nt, Artificial Sequence
  Description of Artificial Sequence: Synthetic oligonucleotide
  Sense strand starting at position 1502 of SEQ ID NO: 1885513
uugagaaauggcuagcaac

SEQ ID NO: 2347573 - RNA, 19 nt, Artificial Sequence
  Description of Artificial Sequence: Synthetic oligonucleotide
  Antisense strand to SEQ ID NO: 2347572
guugcuagccauuucucaa

SEQ ID NO: 2347574 - RNA, 19 nt, Artificial Sequence
  Description of Artificial Sequence: Synthetic oligonucleotide
  Sense strand starting at position 1566 of SEQ ID NO: 1885513
guguucuagcgaucuugcu

SEQ ID NO: 2347575 - RNA, 19 nt, Artificial Sequence
  Description of Artificial Sequence: Synthetic oligonucleotide
  Antisense strand to SEQ ID NO: 2347574
agcaagaucgcuagaacac

SEQ ID NO: 2347576 - RNA, 19 nt, Artificial Sequence
  Description of Artificial Sequence: Synthetic oligonucleotide
  Sense strand starting at position 1603 of SEQ ID NO: 1885513
ugagguuccgcauacagau

SEQ ID NO: 2347577 - RNA, 19 nt, Artificial Sequence
  Description of Artificial Sequence: Synthetic oligonucleotide
  Antisense strand to SEQ ID NO: 2347576
aucuguaugcggaaccuca

SEQ ID NO: 2347578 - RNA, 19 nt, Artificial Sequence
  Description of Artificial Sequence: Synthetic oligonucleotide
  Sense strand starting at position 1609 of SEQ ID NO: 1885513
uccgcauacagaugugaua

SEQ ID NO: 2347579 - RNA, 19 nt, Artificial Sequence
  Description of Artificial Sequence: Synthetic oligonucleotide
  Antisense strand to SEQ ID NO: 2347578
uaucacaucuguaugcgga

SEQ ID NO: 2347580 - RNA, 19 nt, Artificial Sequence
  Description of Artificial Sequence: Synthetic oligonucleotide
  Sense strand starting at position 1611 of SEQ ID NO: 1885513
cgcauacagaugugauaac

SEQ ID NO: 2347581 - RNA, 19 nt, Artificial Sequence
  Description of Artificial Sequence: Synthetic oligonucleotide
  Antisense strand to SEQ ID NO: 2347580
guuaucacaucuguaugcg

SEQ ID NO: 2347582 - RNA, 19 nt, Artificial Sequence
  Description of Artificial Sequence: Synthetic oligonucleotide
  Sense strand starting at position 1618 of SEQ ID NO: 1885513
agaugugauaacuggcgau

SEQ ID NO: 2347583 - RNA, 19 nt, Artificial Sequence
  Description of Artificial Sequence: Synthetic oligonucleotide
  Antisense strand to SEQ ID NO: 2347582
aucgccaguuaucacaucu

SEQ ID NO: 2347584 - RNA, 19 nt, Artificial Sequence
  Description of Artificial Sequence: Synthetic oligonucleotide
  Sense strand starting at position 1660 of SEQ ID NO: 1885513
ccagguguuggccacaaca

SEQ ID NO: 2347585 - RNA, 19 nt, Artificial Sequence
  Description of Artificial Sequence: Synthetic oligonucleotide
  Antisense strand to SEQ ID NO: 2347584
uguuguggccaacaccugg

SEQ ID NO: 2347586 - RNA, 19 nt, Artificial Sequence
  Description of Artificial Sequence: Synthetic oligonucleotide
  Sense strand starting at position 1662 of SEQ ID NO: 1885513
agguguuggccacaacaca

SEQ ID NO: 2347587 - RNA, 19 nt, Artificial Sequence
  Description of Artificial Sequence: Synthetic oligonucleotide
  Antisense strand to SEQ ID NO: 2347586
uguguuguggccaacaccu

SEQ ID NO: 2347588 - RNA, 19 nt, Artificial Sequence
  Description of Artificial Sequence: Synthetic oligonucleotide
  Sense strand starting at position 1764 of SEQ ID NO: 1885513
auagaaugucauggcugga

SEQ ID NO: 2347589 - RNA, 19 nt, Artificial Sequence
  Description of Artificial Sequence: Synthetic oligonucleotide
  Antisense strand to SEQ ID NO: 2347588
uccagccaugacauucuau

SEQ ID NO: 2347590 - RNA, 19 nt, Artificial Sequence
  Description of Artificial Sequence: Synthetic oligonucleotide
  Sense strand starting at position 1767 of SEQ ID NO: 1885513
gaaugucauggcuggauau

SEQ ID NO: 2347591 - RNA, 19 nt, Artificial Sequence
  Description of Artificial Sequence: Synthetic oligonucleotide
  Antisense strand to SEQ ID NO: 2347590
auauccagccaugacauuc

SEQ ID NO: 2347592 - RNA, 19 nt, Artificial Sequence
  Description of Artificial Sequence: Synthetic oligonucleotide
  Sense strand starting at position 1768 of SEQ ID NO: 1885513
aaugucauggcuggauauu

SEQ ID NO: 2347593 - RNA, 19 nt, Artificial Sequence
  Description of Artificial Sequence: Synthetic oligonucleotide
  Antisense strand to SEQ ID NO: 2347592
aauauccagccaugacauu

SEQ ID NO: 2347594 - RNA, 19 nt, Artificial Sequence
  Description of Artificial Sequence: Synthetic oligonucleotide
  Sense strand starting at position 1806 of SEQ ID NO: 1885513
ggaggaagguauguauaug

SEQ ID NO: 2347595 - RNA, 19 nt, Artificial Sequence
  Description of Artificial Sequence: Synthetic oligonucleotide
  Antisense strand to SEQ ID NO: 2347594
cauauacauaccuuccucc

SEQ ID NO: 2347596 - RNA, 19 nt, Artificial Sequence
  Description of Artificial Sequence: Synthetic oligonucleotide
  Sense strand starting at position 1901 of SEQ ID NO: 1885513
uuauauccaugucuugaga

SEQ ID NO: 2347597 - RNA, 19 nt, Artificial Sequence
  Description of Artificial Sequence: Synthetic oligonucleotide
  Antisense strand to SEQ ID NO: 2347596
ucucaagacauggauauaa

SEQ ID NO: 2347598 - RNA, 19 nt, Artificial Sequence
  Description of Artificial Sequence: Synthetic oligonucleotide
  Sense strand starting at position 1951 of SEQ ID NO: 1885513
gcacaaaggucauuauaau

SEQ ID NO: 2347599 - RNA, 19 nt, Artificial Sequence
  Description of Artificial Sequence: Synthetic oligonucleotide
  Antisense strand to SEQ ID NO: 2347598
auuauaaugaccuuugugc

SEQ ID NO: 2347600 - RNA, 19 nt, Artificial Sequence
  Description of Artificial Sequence: Synthetic oligonucleotide
  Sense strand starting at position 1976 of SEQ ID NO: 1885513
aaagauucgugggcaagua

SEQ ID NO: 2347601 - RNA, 19 nt, Artificial Sequence
  Description of Artificial Sequence: Synthetic oligonucleotide
  Antisense strand to SEQ ID NO: 2347600
uacuugcccacgaaucuuu

SEQ ID NO: 2347602 - RNA, 19 nt, Artificial Sequence
  Description of Artificial Sequence: Synthetic oligonucleotide
  Sense strand starting at position 1977 of SEQ ID NO: 1885513
aagauucgugggcaaguau

SEQ ID NO: 2347603 - RNA, 19 nt, Artificial Sequence
  Description of Artificial Sequence: Synthetic oligonucleotide
  Antisense strand to SEQ ID NO: 2347602
auacuugcccacgaaucuu

SEQ ID NO: 2347604 - RNA, 19 nt, Artificial Sequence
  Description of Artificial Sequence: Synthetic oligonucleotide
  Sense strand starting at position 1989 of SEQ ID NO: 1885513
caaguauaauggcuguaaa

SEQ ID NO: 2347605 - RNA, 19 nt, Artificial Sequence
  Description of Artificial Sequence: Synthetic oligonucleotide
  Antisense strand to SEQ ID NO: 2347604
uuuacagccauuauacuug

SEQ ID NO: 2347606 - RNA, 19 nt, Artificial Sequence
  Description of Artificial Sequence: Synthetic oligonucleotide
  Sense strand starting at position 1990 of SEQ ID NO: 1885513
aaguauaauggcuguaaag

SEQ ID NO: 2347607 - RNA, 19 nt, Artificial Sequence
  Description of Artificial Sequence: Synthetic oligonucleotide
  Antisense strand to SEQ ID NO: 2347606
cuuuacagccauuauacuu

SEQ ID NO: 2347608 - RNA, 19 nt, Artificial Sequence
  Description of Artificial Sequence: Synthetic oligonucleotide
  Sense strand starting at position 1992 of SEQ ID NO: 1885513
guauaauggcuguaaagaa

SEQ ID NO: 2347609 - RNA, 19 nt, Artificial Sequence
  Description of Artificial Sequence: Synthetic oligonucleotide
  Antisense strand to SEQ ID NO: 2347608
uucuuuacagccauuauac

SEQ ID NO: 2347610 - RNA, 19 nt, Artificial Sequence
  Description of Artificial Sequence: Synthetic oligonucleotide
  Sense strand starting at position 2080 of SEQ ID NO: 1885513
aauacauacguuuguauga

SEQ ID NO: 2347611 - RNA, 19 nt, Artificial Sequence
  Description of Artificial Sequence: Synthetic oligonucleotide
  Antisense strand to SEQ ID NO: 2347610
ucauacaaacguauguauu

SEQ ID NO: 2347612 - RNA, 19 nt, Artificial Sequence
  Description of Artificial Sequence: Synthetic oligonucleotide
  Sense strand starting at position 2154 of SEQ ID NO: 1885513
gaaugugaggcaugaaacu

SEQ ID NO: 2347613 - RNA, 19 nt, Artificial Sequence
  Description of Artificial Sequence: Synthetic oligonucleotide
  Antisense strand to SEQ ID NO: 2347612
aguuucaugccucacauuc

SEQ ID NO: 2347614 - RNA, 19 nt, Artificial Sequence
  Description of Artificial Sequence: Synthetic oligonucleotide
  Sense strand starting at position 2205 of SEQ ID NO: 1885513
uuguuuguuuaaucaagag

SEQ ID NO: 2347615 - RNA, 19 nt, Artificial Sequence
  Description of Artificial Sequence: Synthetic oligonucleotide
  Antisense strand to SEQ ID NO: 2347614
cucuugauuaaacaaacaa

SEQ ID NO: 2347616 - RNA, 19 nt, Artificial Sequence
  Description of Artificial Sequence: Synthetic oligonucleotide
  Sense strand starting at position 2220 of SEQ ID NO: 1885513
agaguuuaagcacaagagu

SEQ ID NO: 2347617 - RNA, 19 nt, Artificial Sequence
  Description of Artificial Sequence: Synthetic oligonucleotide
  Antisense strand to SEQ ID NO: 2347616
acucuugugcuuaaacucu

SEQ ID NO: 2347618 - RNA, 19 nt, Artificial Sequence
  Description of Artificial Sequence: Synthetic oligonucleotide
  Sense strand starting at position 2223 of SEQ ID NO: 1885513
guuuaagcacaagaguuua

SEQ ID NO: 2347619 - RNA, 19 nt, Artificial Sequence
  Description of Artificial Sequence: Synthetic oligonucleotide
  Antisense strand to SEQ ID NO: 2347618
uaaacucuugugcuuaaac

SEQ ID NO: 2347620 - RNA, 19 nt, Artificial Sequence
  Description of Artificial Sequence: Synthetic oligonucleotide
  Sense strand starting at position 2231 of SEQ ID NO: 1885513
acaagaguuuaaucacgaa

SEQ ID NO: 2347621 - RNA, 19 nt, Artificial Sequence
  Description of Artificial Sequence: Synthetic oligonucleotide
  Antisense strand to SEQ ID NO: 2347620
uucgugauuaaacucuugu

SEQ ID NO: 2347622 - RNA, 19 nt, Artificial Sequence
  Description of Artificial Sequence: Synthetic oligonucleotide
  Sense strand starting at position 2335 of SEQ ID NO: 1885513
ccaaguaaacgcuaagaga

SEQ ID NO: 2347623 - RNA, 19 nt, Artificial Sequence
  Description of Artificial Sequence: Synthetic oligonucleotide
  Antisense strand to SEQ ID NO: 2347622
ucucuuagcguuuacuugg

SEQ ID NO: 2347624 - RNA, 19 nt, Artificial Sequence
  Description of Artificial Sequence: Synthetic oligonucleotide
  Sense strand starting at position 2773 of SEQ ID NO: 1885513
auggguauuagcugaagag

SEQ ID NO: 2347625 - RNA, 19 nt, Artificial Sequence
  Description of Artificial Sequence: Synthetic oligonucleotide
  Antisense strand to SEQ ID NO: 2347624
cucuucagcuaauacccau

SEQ ID NO: 2347626 - RNA, 19 nt, Artificial Sequence
  Description of Artificial Sequence: Synthetic oligonucleotide
  Sense strand starting at position 2789 of SEQ ID NO: 1885513
gagacugaccaguguaacu

SEQ ID NO: 2347627 - RNA, 19 nt, Artificial Sequence
  Description of Artificial Sequence: Synthetic oligonucleotide
  Antisense strand to SEQ ID NO: 2347626
aguuacacuggucagucuc

SEQ ID NO: 2347628 - RNA, 19 nt, Artificial Sequence
  Description of Artificial Sequence: Synthetic oligonucleotide
  Sense strand starting at position 2806 of SEQ ID NO: 1885513
cugugucacuuaucaaucu

SEQ ID NO: 2347629 - RNA, 19 nt, Artificial Sequence
  Description of Artificial Sequence: Synthetic oligonucleotide
  Antisense strand to SEQ ID NO: 2347628
agauugauaagugacacag

SEQ ID NO: 2347630 - RNA, 19 nt, Artificial Sequence
  Description of Artificial Sequence: Synthetic oligonucleotide
  Sense strand starting at position 3640 of SEQ ID NO: 1885513
ccaucauaguuaccuuuga

SEQ ID NO: 2347631 - RNA, 19 nt, Artificial Sequence
  Description of Artificial Sequence: Synthetic oligonucleotide
  Antisense strand to SEQ ID NO: 2347630
ucaaagguaacuaugaugg

SEQ ID NO: 2347632 - RNA, 19 nt, Artificial Sequence
  Description of Artificial Sequence: Synthetic oligonucleotide
  Sense strand starting at position 3738 of SEQ ID NO: 1885513
ugcugccaucuugaaguaa

SEQ ID NO: 2347633 - RNA, 19 nt, Artificial Sequence
  Description of Artificial Sequence: Synthetic oligonucleotide
  Antisense strand to SEQ ID NO: 2347632
uuacuucaagauggcagca

SEQ ID NO: 2347634 - RNA, 19 nt, Artificial Sequence
  Description of Artificial Sequence: Synthetic oligonucleotide
  Sense strand starting at position 174 of SEQ ID NO: 1885515
ggcggaucacucgaguuua

SEQ ID NO: 2347635 - RNA, 19 nt, Artificial Sequence
  Description of Artificial Sequence: Synthetic oligonucleotide
  Antisense strand to SEQ ID NO: 2347634
uaaacucgagugauccgcc

SEQ ID NO: 2347636 - RNA, 19 nt, Artificial Sequence
  Description of Artificial Sequence: Synthetic oligonucleotide
  Sense strand starting at position 433 of SEQ ID NO: 1885515
ggaaauuauuauccaccgu

SEQ ID NO: 2347637 - RNA, 19 nt, Artificial Sequence
  Description of Artificial Sequence: Synthetic oligonucleotide
  Antisense strand to SEQ ID NO: 2347636
acgguggauaauaauuucc

SEQ ID NO: 2347638 - RNA, 19 nt, Artificial Sequence
  Description of Artificial Sequence: Synthetic oligonucleotide
  Sense strand starting at position 510 of SEQ ID NO: 1885515
agguacccauccuugagaa

SEQ ID NO: 2347639 - RNA, 19 nt, Artificial Sequence
  Description of Artificial Sequence: Synthetic oligonucleotide
  Antisense strand to SEQ ID NO: 2347638
uucucaaggauggguaccu

SEQ ID NO: 2347640 - RNA, 19 nt, Artificial Sequence
  Description of Artificial Sequence: Synthetic oligonucleotide
  Sense strand starting at position 511 of SEQ ID NO: 1885515
gguacccauccuugagaaa

SEQ ID NO: 2347641 - RNA, 19 nt, Artificial Sequence
  Description of Artificial Sequence: Synthetic oligonucleotide
  Antisense strand to SEQ ID NO: 2347640
uuucucaaggauggguacc

SEQ ID NO: 2347642 - RNA, 19 nt, Artificial Sequence
  Description of Artificial Sequence: Synthetic oligonucleotide
  Sense strand starting at position 577 of SEQ ID NO: 1885515
gccauacugugucuaacaa

SEQ ID NO: 2347643 - RNA, 19 nt, Artificial Sequence
  Description of Artificial Sequence: Synthetic oligonucleotide
  Antisense strand to SEQ ID NO: 2347642
uuguuagacacaguauggc

SEQ ID NO: 2347644 - RNA, 19 nt, Artificial Sequence
  Description of Artificial Sequence: Synthetic oligonucleotide
  Sense strand starting at position 578 of SEQ ID NO: 1885515
ccauacugugucuaacaau

SEQ ID NO: 2347645 - RNA, 19 nt, Artificial Sequence
  Description of Artificial Sequence: Synthetic oligonucleotide
  Antisense strand to SEQ ID NO: 2347644
auuguuagacacaguaugg

SEQ ID NO: 2347646 - RNA, 19 nt, Artificial Sequence
  Description of Artificial Sequence: Synthetic oligonucleotide
  Sense strand starting at position 661 of SEQ ID NO: 1885515
auagguagaucucuaggua

SEQ ID NO: 2347647 - RNA, 19 nt, Artificial Sequence
  Description of Artificial Sequence: Synthetic oligonucleotide
  Antisense strand to SEQ ID NO: 2347646
uaccuagagaucuaccuau

SEQ ID NO: 2347648 - RNA, 19 nt, Artificial Sequence
  Description of Artificial Sequence: Synthetic oligonucleotide
  Sense strand starting at position 662 of SEQ ID NO: 1885515
uagguagaucucuagguac

SEQ ID NO: 2347649 - RNA, 19 nt, Artificial Sequence
  Description of Artificial Sequence: Synthetic oligonucleotide
  Antisense strand to SEQ ID NO: 2347648
guaccuagagaucuaccua

SEQ ID NO: 2347650 - RNA, 19 nt, Artificial Sequence
  Description of Artificial Sequence: Synthetic oligonucleotide
  Sense strand starting at position 664 of SEQ ID NO: 1885515
gguagaucucuagguacug

SEQ ID NO: 2347651 - RNA, 19 nt, Artificial Sequence
  Description of Artificial Sequence: Synthetic oligonucleotide
  Antisense strand to SEQ ID NO: 2347650
caguaccuagagaucuacc

SEQ ID NO: 2347652 - RNA, 19 nt, Artificial Sequence
  Description of Artificial Sequence: Synthetic oligonucleotide
  Sense strand starting at position 665 of SEQ ID NO: 1885515
guagaucucuagguacuga

SEQ ID NO: 2347653 - RNA, 19 nt, Artificial Sequence
  Description of Artificial Sequence: Synthetic oligonucleotide
  Antisense strand to SEQ ID NO: 2347652
ucaguaccuagagaucuac

SEQ ID NO: 2347654 - RNA, 19 nt, Artificial Sequence
  Description of Artificial Sequence: Synthetic oligonucleotide
  Sense strand starting at position 963 of SEQ ID NO: 1885515
uaagaaagaucuguguuua

SEQ ID NO: 2347655 - RNA, 19 nt, Artificial Sequence
  Description of Artificial Sequence: Synthetic oligonucleotide
  Antisense strand to SEQ ID NO: 2347654
uaaacacagaucuuucuua

SEQ ID NO: 2347656 - RNA, 19 nt, Artificial Sequence
  Description of Artificial Sequence: Synthetic oligonucleotide
  Sense strand starting at position 964 of SEQ ID NO: 1885515
aagaaagaucuguguuuaa

SEQ ID NO: 2347657 - RNA, 19 nt, Artificial Sequence
  Description of Artificial Sequence: Synthetic oligonucleotide
  Antisense strand to SEQ ID NO: 2347656
uuaaacacagaucuuucuu

SEQ ID NO: 2347658 - RNA, 19 nt, Artificial Sequence
  Description of Artificial Sequence: Synthetic oligonucleotide
  Sense strand starting at position 1008 of SEQ ID NO: 1885515
gcuuuaugcacggacuaua

SEQ ID NO: 2347659 - RNA, 19 nt, Artificial Sequence
  Description of Artificial Sequence: Synthetic oligonucleotide
  Antisense strand to SEQ ID NO: 2347658
uauaguccgugcauaaagc

SEQ ID NO: 2347660 - RNA, 19 nt, Artificial Sequence
  Description of Artificial Sequence: Synthetic oligonucleotide
  Sense strand starting at position 1212 of SEQ ID NO: 1885515
aggguauauaaaggaguuu

SEQ ID NO: 2347661 - RNA, 19 nt, Artificial Sequence
  Description of Artificial Sequence: Synthetic oligonucleotide
  Antisense strand to SEQ ID NO: 2347660
aaacuccuuuauauacccu

SEQ ID NO: 2347662 - RNA, 19 nt, Artificial Sequence
  Description of Artificial Sequence: Synthetic oligonucleotide
  Sense strand starting at position 1218 of SEQ ID NO: 1885515
uauaaaggaguuugaaugu

SEQ ID NO: 2347663 - RNA, 19 nt, Artificial Sequence
  Description of Artificial Sequence: Synthetic oligonucleotide
  Antisense strand to SEQ ID NO: 2347662
acauucaaacuccuuuaua

SEQ ID NO: 2347664 - RNA, 19 nt, Artificial Sequence
  Description of Artificial Sequence: Synthetic oligonucleotide
  Sense strand starting at position 1315 of SEQ ID NO: 1885515
ugauuaagguucuuaguuu

SEQ ID NO: 2347665 - RNA, 19 nt, Artificial Sequence
  Description of Artificial Sequence: Synthetic oligonucleotide
  Antisense strand to SEQ ID NO: 2347664
aaacuaagaaccuuaauca

SEQ ID NO: 2347666 - RNA, 19 nt, Artificial Sequence
  Description of Artificial Sequence: Synthetic oligonucleotide
  Sense strand starting at position 1338 of SEQ ID NO: 1885515
ccaucccagggaugugaaa

SEQ ID NO: 2347667 - RNA, 19 nt, Artificial Sequence
  Description of Artificial Sequence: Synthetic oligonucleotide
  Antisense strand to SEQ ID NO: 2347666
uuucacaucccugggaugg

SEQ ID NO: 2347668 - RNA, 19 nt, Artificial Sequence
  Description of Artificial Sequence: Synthetic oligonucleotide
  Sense strand starting at position 2167 of SEQ ID NO: 1885515
acgcauuuguuacugggau

SEQ ID NO: 2347669 - RNA, 19 nt, Artificial Sequence
  Description of Artificial Sequence: Synthetic oligonucleotide
  Antisense strand to SEQ ID NO: 2347668
aucccaguaacaaaugcgu

SEQ ID NO: 2347670 - RNA, 19 nt, Artificial Sequence
  Description of Artificial Sequence: Synthetic oligonucleotide
  Sense strand starting at position 2171 of SEQ ID NO: 1885515
auuuguuacugggauggua

SEQ ID NO: 2347671 - RNA, 19 nt, Artificial Sequence
  Description of Artificial Sequence: Synthetic oligonucleotide
  Antisense strand to SEQ ID NO: 2347670
uaccaucccaguaacaaau

SEQ ID NO: 2347672 - RNA, 19 nt, Artificial Sequence
  Description of Artificial Sequence: Synthetic oligonucleotide
  Sense strand starting at position 2206 of SEQ ID NO: 1885515
uuggcuuugaagggagaaa

SEQ ID NO: 2347673 - RNA, 19 nt, Artificial Sequence
  Description of Artificial Sequence: Synthetic oligonucleotide
  Antisense strand to SEQ ID NO: 2347672
uuucucccuucaaagccaa

SEQ ID NO: 2347674 - RNA, 19 nt, Artificial Sequence
  Description of Artificial Sequence: Synthetic oligonucleotide
  Sense strand starting at position 2295 of SEQ ID NO: 1885515
ucugcuaaacgauaacagu

SEQ ID NO: 2347675 - RNA, 19 nt, Artificial Sequence
  Description of Artificial Sequence: Synthetic oligonucleotide
  Antisense strand to SEQ ID NO: 2347674
acuguuaucguuuagcaga

SEQ ID NO: 2347676 - RNA, 19 nt, Artificial Sequence
  Description of Artificial Sequence: Synthetic oligonucleotide
  Sense strand starting at position 2430 of SEQ ID NO: 1885515
uguagauacugucucccua

SEQ ID NO: 2347677 - RNA, 19 nt, Artificial Sequence
  Description of Artificial Sequence: Synthetic oligonucleotide
  Antisense strand to SEQ ID NO: 2347676
uagggagacaguaucuaca

SEQ ID NO: 2347678 - RNA, 19 nt, Artificial Sequence
  Description of Artificial Sequence: Synthetic oligonucleotide
  Sense strand starting at position 2617 of SEQ ID NO: 1885515
agcaauuauaugugaggca

SEQ ID NO: 2347679 - RNA, 19 nt, Artificial Sequence
  Description of Artificial Sequence: Synthetic oligonucleotide
  Antisense strand to SEQ ID NO: 2347678
ugccucacauauaauugcu

SEQ ID NO: 2347680 - RNA, 19 nt, Artificial Sequence
  Description of Artificial Sequence: Synthetic oligonucleotide
  Sense strand starting at position 2622 of SEQ ID NO: 1885515
uuauaugugaggcaguuaa

SEQ ID NO: 2347681 - RNA, 19 nt, Artificial Sequence
  Description of Artificial Sequence: Synthetic oligonucleotide
  Antisense strand to SEQ ID NO: 2347680
uuaacugccucacauauaa

SEQ ID NO: 2347682 - RNA, 19 nt, Artificial Sequence
  Description of Artificial Sequence: Synthetic oligonucleotide
  Sense strand starting at position 2661 of SEQ ID NO: 1885515
uuccuuucucauggaaugu

SEQ ID NO: 2347683 - RNA, 19 nt, Artificial Sequence
  Description of Artificial Sequence: Synthetic oligonucleotide
  Antisense strand to SEQ ID NO: 2347682
acauuccaugagaaaggaa

SEQ ID NO: 2347684 - RNA, 19 nt, Artificial Sequence
  Description of Artificial Sequence: Synthetic oligonucleotide
  Sense strand starting at position 2665 of SEQ ID NO: 1885515
uuucucauggaauguguaa

SEQ ID NO: 2347685 - RNA, 19 nt, Artificial Sequence
  Description of Artificial Sequence: Synthetic oligonucleotide
  Antisense strand to SEQ ID NO: 2347684
uuacacauuccaugagaaa

SEQ ID NO: 2347686 - RNA, 19 nt, Artificial Sequence
  Description of Artificial Sequence: Synthetic oligonucleotide
  Sense strand starting at position 2691 of SEQ ID NO: 1885515
ggagaaaugagaugugcau

SEQ ID NO: 2347687 - RNA, 19 nt, Artificial Sequence
  Description of Artificial Sequence: Synthetic oligonucleotide
  Antisense strand to SEQ ID NO: 2347686
augcacaucucauuucucc

SEQ ID NO: 2347688 - RNA, 19 nt, Artificial Sequence
  Description of Artificial Sequence: Synthetic oligonucleotide
  Sense strand starting at position 2693 of SEQ ID NO: 1885515
agaaaugagaugugcauaa

SEQ ID NO: 2347689 - RNA, 19 nt, Artificial Sequence
  Description of Artificial Sequence: Synthetic oligonucleotide
  Antisense strand to SEQ ID NO: 2347688
uuaugcacaucucauuucu

SEQ ID NO: 2347690 - RNA, 19 nt, Artificial Sequence
  Description of Artificial Sequence: Synthetic oligonucleotide
  Sense strand starting at position 3170 of SEQ ID NO: 1885515
ugucaaguauuggcaagau

SEQ ID NO: 2347691 - RNA, 19 nt, Artificial Sequence
  Description of Artificial Sequence: Synthetic oligonucleotide
  Antisense strand to SEQ ID NO: 2347690
aucuugccaauacuugaca

SEQ ID NO: 2347692 - RNA, 19 nt, Artificial Sequence
  Description of Artificial Sequence: Synthetic oligonucleotide
  Sense strand starting at position 3255 of SEQ ID NO: 1885515
acuguuuggcgguaucaac

SEQ ID NO: 2347693 - RNA, 19 nt, Artificial Sequence
  Description of Artificial Sequence: Synthetic oligonucleotide
  Antisense strand to SEQ ID NO: 2347692
guugauaccgccaaacagu

SEQ ID NO: 2347694 - RNA, 19 nt, Artificial Sequence
  Description of Artificial Sequence: Synthetic oligonucleotide
  Sense strand starting at position 3262 of SEQ ID NO: 1885515
ggcgguaucaacugaaucu

SEQ ID NO: 2347695 - RNA, 19 nt, Artificial Sequence
  Description of Artificial Sequence: Synthetic oligonucleotide
  Antisense strand to SEQ ID NO: 2347694
agauucaguugauaccgcc

SEQ ID NO: 2347696 - RNA, 19 nt, Artificial Sequence
  Description of Artificial Sequence: Synthetic oligonucleotide
  Sense strand starting at position 3499 of SEQ ID NO: 1885515
ucuugaucccuggaguuug

SEQ ID NO: 2347697 - RNA, 19 nt, Artificial Sequence
  Description of Artificial Sequence: Synthetic oligonucleotide
  Antisense strand to SEQ ID NO: 2347696
caaacuccagggaucaaga

SEQ ID NO: 2347698 - RNA, 19 nt, Artificial Sequence
  Description of Artificial Sequence: Synthetic oligonucleotide
  Sense strand starting at position 3632 of SEQ ID NO: 1885515
aacugaaaugucugcaugu

SEQ ID NO: 2347699 - RNA, 19 nt, Artificial Sequence
  Description of Artificial Sequence: Synthetic oligonucleotide
  Antisense strand to SEQ ID NO: 2347698
acaugcagacauuucaguu

SEQ ID NO: 2347700 - RNA, 19 nt, Artificial Sequence
  Description of Artificial Sequence: Synthetic oligonucleotide
  Sense strand starting at position 3633 of SEQ ID NO: 1885515
acugaaaugucugcaugua

SEQ ID NO: 2347701 - RNA, 19 nt, Artificial Sequence
  Description of Artificial Sequence: Synthetic oligonucleotide
  Antisense strand to SEQ ID NO: 2347700
uacaugcagacauuucagu

SEQ ID NO: 2347702 - RNA, 19 nt, Artificial Sequence
  Description of Artificial Sequence: Synthetic oligonucleotide
  Sense strand starting at position 3634 of SEQ ID NO: 1885515
cugaaaugucugcauguau

SEQ ID NO: 2347703 - RNA, 19 nt, Artificial Sequence
  Description of Artificial Sequence: Synthetic oligonucleotide
  Antisense strand to SEQ ID NO: 2347702
auacaugcagacauuucag

SEQ ID NO: 2347704 - RNA, 19 nt, Artificial Sequence
  Description of Artificial Sequence: Synthetic oligonucleotide
  Sense strand starting at position 3736 of SEQ ID NO: 1885515
auuagaagucacuguauau

SEQ ID NO: 2347705 - RNA, 19 nt, Artificial Sequence
  Description of Artificial Sequence: Synthetic oligonucleotide
  Antisense strand to SEQ ID NO: 2347704
auauacagugacuucuaau

SEQ ID NO: 2347706 - RNA, 19 nt, Artificial Sequence
  Description of Artificial Sequence: Synthetic oligonucleotide
  Sense strand starting at position 3760 of SEQ ID NO: 1885515
uuaaucuuaggguaguaau

SEQ ID NO: 2347707 - RNA, 19 nt, Artificial Sequence
  Description of Artificial Sequence: Synthetic oligonucleotide
  Antisense strand to SEQ ID NO: 2347706
auuacuacccuaagauuaa

SEQ ID NO: 2347708 - RNA, 19 nt, Artificial Sequence
  Description of Artificial Sequence: Synthetic oligonucleotide
  Sense strand starting at position 3803 of SEQ ID NO: 1885515
ucacgaagugcugauaaug

SEQ ID NO: 2347709 - RNA, 19 nt, Artificial Sequence
  Description of Artificial Sequence: Synthetic oligonucleotide
  Antisense strand to SEQ ID NO: 2347708
cauuaucagcacuucguga

SEQ ID NO: 2347710 - RNA, 19 nt, Artificial Sequence
  Description of Artificial Sequence: Synthetic oligonucleotide
  Sense strand starting at position 3854 of SEQ ID NO: 1885515
guguguucagguuauauuu

SEQ ID NO: 2347711 - RNA, 19 nt, Artificial Sequence
  Description of Artificial Sequence: Synthetic oligonucleotide
  Antisense strand to SEQ ID NO: 2347710
aaauauaaccugaacacac

SEQ ID NO: 2347712 - RNA, 19 nt, Artificial Sequence
  Description of Artificial Sequence: Synthetic oligonucleotide
  Sense strand starting at position 3865 of SEQ ID NO: 1885515
uuauauuugugagcacuuu

SEQ ID NO: 2347713 - RNA, 19 nt, Artificial Sequence
  Description of Artificial Sequence: Synthetic oligonucleotide
  Antisense strand to SEQ ID NO: 2347712
aaagugcucacaaauauaa

SEQ ID NO: 2347714 - RNA, 19 nt, Artificial Sequence
  Description of Artificial Sequence: Synthetic oligonucleotide
  Sense strand starting at position 135 of SEQ ID NO: 1885516
gggaguaaauauuauaaac

SEQ ID NO: 2347715 - RNA, 19 nt, Artificial Sequence
  Description of Artificial Sequence: Synthetic oligonucleotide
  Antisense strand to SEQ ID NO: 2347714
guuuauaauauuuacuccc

SEQ ID NO: 2347716 - RNA, 19 nt, Artificial Sequence
  Description of Artificial Sequence: Synthetic oligonucleotide
  Sense strand starting at position 463 of SEQ ID NO: 1885516
ggcggaucacucgaguuua

SEQ ID NO: 2347717 - RNA, 19 nt, Artificial Sequence
  Description of Artificial Sequence: Synthetic oligonucleotide
  Antisense strand to SEQ ID NO: 2347716
uaaacucgagugauccgcc

SEQ ID NO: 2347718 - RNA, 19 nt, Artificial Sequence
  Description of Artificial Sequence: Synthetic oligonucleotide
  Sense strand starting at position 719 of SEQ ID NO: 1885516
ggaggaaauuauuauccac

SEQ ID NO: 2347719 - RNA, 19 nt, Artificial Sequence
  Description of Artificial Sequence: Synthetic oligonucleotide
  Antisense strand to SEQ ID NO: 2347718
guggauaauaauuuccucc

SEQ ID NO: 2347720 - RNA, 19 nt, Artificial Sequence
  Description of Artificial Sequence: Synthetic oligonucleotide
  Sense strand starting at position 722 of SEQ ID NO: 1885516
ggaaauuauuauccaccgu

SEQ ID NO: 2347721 - RNA, 19 nt, Artificial Sequence
  Description of Artificial Sequence: Synthetic oligonucleotide
  Antisense strand to SEQ ID NO: 2347720
acgguggauaauaauuucc

SEQ ID NO: 2347722 - RNA, 19 nt, Artificial Sequence
  Description of Artificial Sequence: Synthetic oligonucleotide
  Sense strand starting at position 799 of SEQ ID NO: 1885516
agguacccauccuugagaa

SEQ ID NO: 2347723 - RNA, 19 nt, Artificial Sequence
  Description of Artificial Sequence: Synthetic oligonucleotide
  Antisense strand to SEQ ID NO: 2347722
uucucaaggauggguaccu

SEQ ID NO: 2347724 - RNA, 19 nt, Artificial Sequence
  Description of Artificial Sequence: Synthetic oligonucleotide
  Sense strand starting at position 800 of SEQ ID NO: 1885516
gguacccauccuugagaaa

SEQ ID NO: 2347725 - RNA, 19 nt, Artificial Sequence
  Description of Artificial Sequence: Synthetic oligonucleotide
  Antisense strand to SEQ ID NO: 2347724
uuucucaaggauggguacc

SEQ ID NO: 2347726 - RNA, 19 nt, Artificial Sequence
  Description of Artificial Sequence: Synthetic oligonucleotide
  Sense strand starting at position 852 of SEQ ID NO: 1885516
gaaggauguucuccgccau

SEQ ID NO: 2347727 - RNA, 19 nt, Artificial Sequence
  Description of Artificial Sequence: Synthetic oligonucleotide
  Antisense strand to SEQ ID NO: 2347726
auggcggagaacauccuuc

SEQ ID NO: 2347728 - RNA, 19 nt, Artificial Sequence
  Description of Artificial Sequence: Synthetic oligonucleotide
  Sense strand starting at position 853 of SEQ ID NO: 1885516
aaggauguucuccgccaua

SEQ ID NO: 2347729 - RNA, 19 nt, Artificial Sequence
  Description of Artificial Sequence: Synthetic oligonucleotide
  Antisense strand to SEQ ID NO: 2347728
uauggcggagaacauccuu

SEQ ID NO: 2347730 - RNA, 19 nt, Artificial Sequence
  Description of Artificial Sequence: Synthetic oligonucleotide
  Sense strand starting at position 866 of SEQ ID NO: 1885516
gccauacugugucuaacaa

SEQ ID NO: 2347731 - RNA, 19 nt, Artificial Sequence
  Description of Artificial Sequence: Synthetic oligonucleotide
  Antisense strand to SEQ ID NO: 2347730
uuguuagacacaguauggc

SEQ ID NO: 2347732 - RNA, 19 nt, Artificial Sequence
  Description of Artificial Sequence: Synthetic oligonucleotide
  Sense strand starting at position 867 of SEQ ID NO: 1885516
ccauacugugucuaacaau

SEQ ID NO: 2347733 - RNA, 19 nt, Artificial Sequence
  Description of Artificial Sequence: Synthetic oligonucleotide
  Antisense strand to SEQ ID NO: 2347732
auuguuagacacaguaugg

SEQ ID NO: 2347734 - RNA, 19 nt, Artificial Sequence
  Description of Artificial Sequence: Synthetic oligonucleotide
  Sense strand starting at position 950 of SEQ ID NO: 1885516
auagguagaucucuaggua

SEQ ID NO: 2347735 - RNA, 19 nt, Artificial Sequence
  Description of Artificial Sequence: Synthetic oligonucleotide
  Antisense strand to SEQ ID NO: 2347734
uaccuagagaucuaccuau

SEQ ID NO: 2347736 - RNA, 19 nt, Artificial Sequence
  Description of Artificial Sequence: Synthetic oligonucleotide
  Sense strand starting at position 951 of SEQ ID NO: 1885516
uagguagaucucuagguac

SEQ ID NO: 2347737 - RNA, 19 nt, Artificial Sequence
  Description of Artificial Sequence: Synthetic oligonucleotide
  Antisense strand to SEQ ID NO: 2347736
guaccuagagaucuaccua

SEQ ID NO: 2347738 - RNA, 19 nt, Artificial Sequence
  Description of Artificial Sequence: Synthetic oligonucleotide
  Sense strand starting at position 953 of SEQ ID NO: 1885516
gguagaucucuagguacug

SEQ ID NO: 2347739 - RNA, 19 nt, Artificial Sequence
  Description of Artificial Sequence: Synthetic oligonucleotide
  Antisense strand to SEQ ID NO: 2347738
caguaccuagagaucuacc

SEQ ID NO: 2347740 - RNA, 19 nt, Artificial Sequence
  Description of Artificial Sequence: Synthetic oligonucleotide
  Sense strand starting at position 954 of SEQ ID NO: 1885516
guagaucucuagguacuga

SEQ ID NO: 2347741 - RNA, 19 nt, Artificial Sequence
  Description of Artificial Sequence: Synthetic oligonucleotide
  Antisense strand to SEQ ID NO: 2347740
ucaguaccuagagaucuac

SEQ ID NO: 2347742 - RNA, 19 nt, Artificial Sequence
  Description of Artificial Sequence: Synthetic oligonucleotide
  Sense strand starting at position 1252 of SEQ ID NO: 1885516
uaagaaagaucuguguuua

SEQ ID NO: 2347743 - RNA, 19 nt, Artificial Sequence
  Description of Artificial Sequence: Synthetic oligonucleotide
  Antisense strand to SEQ ID NO: 2347742
uaaacacagaucuuucuua

SEQ ID NO: 2347744 - RNA, 19 nt, Artificial Sequence
  Description of Artificial Sequence: Synthetic oligonucleotide
  Sense strand starting at position 1253 of SEQ ID NO: 1885516
aagaaagaucuguguuuaa

SEQ ID NO: 2347745 - RNA, 19 nt, Artificial Sequence
  Description of Artificial Sequence: Synthetic oligonucleotide
  Antisense strand to SEQ ID NO: 2347744
uuaaacacagaucuuucuu

SEQ ID NO: 2347746 - RNA, 19 nt, Artificial Sequence
  Description of Artificial Sequence: Synthetic oligonucleotide
  Sense strand starting at position 1295 of SEQ ID NO: 1885516
aggcuuuaugcacggacua

SEQ ID NO: 2347747 - RNA, 19 nt, Artificial Sequence
  Description of Artificial Sequence: Synthetic oligonucleotide
  Antisense strand to SEQ ID NO: 2347746
uaguccgugcauaaagccu

SEQ ID NO: 2347748 - RNA, 19 nt, Artificial Sequence
  Description of Artificial Sequence: Synthetic oligonucleotide
  Sense strand starting at position 1297 of SEQ ID NO: 1885516
gcuuuaugcacggacuaua

SEQ ID NO: 2347749 - RNA, 19 nt, Artificial Sequence
  Description of Artificial Sequence: Synthetic oligonucleotide
  Antisense strand to SEQ ID NO: 2347748
uauaguccgugcauaaagc

SEQ ID NO: 2347750 - RNA, 19 nt, Artificial Sequence
  Description of Artificial Sequence: Synthetic oligonucleotide
  Sense strand starting at position 1501 of SEQ ID NO: 1885516
aggguauauaaaggaguuu

SEQ ID NO: 2347751 - RNA, 19 nt, Artificial Sequence
  Description of Artificial Sequence: Synthetic oligonucleotide
  Antisense strand to SEQ ID NO: 2347750
aaacuccuuuauauacccu

SEQ ID NO: 2347752 - RNA, 19 nt, Artificial Sequence
  Description of Artificial Sequence: Synthetic oligonucleotide
  Sense strand starting at position 1507 of SEQ ID NO: 1885516
uauaaaggaguuugaaugu

SEQ ID NO: 2347753 - RNA, 19 nt, Artificial Sequence
  Description of Artificial Sequence: Synthetic oligonucleotide
  Antisense strand to SEQ ID NO: 2347752
acauucaaacuccuuuaua

SEQ ID NO: 2347754 - RNA, 19 nt, Artificial Sequence
  Description of Artificial Sequence: Synthetic oligonucleotide
  Sense strand starting at position 1604 of SEQ ID NO: 1885516
ugauuaagguucuuaguuu

SEQ ID NO: 2347755 - RNA, 19 nt, Artificial Sequence
  Description of Artificial Sequence: Synthetic oligonucleotide
  Antisense strand to SEQ ID NO: 2347754
aaacuaagaaccuuaauca

SEQ ID NO: 2347756 - RNA, 19 nt, Artificial Sequence
  Description of Artificial Sequence: Synthetic oligonucleotide
  Sense strand starting at position 1627 of SEQ ID NO: 1885516
ccaucccagggaugugaaa

SEQ ID NO: 2347757 - RNA, 19 nt, Artificial Sequence
  Description of Artificial Sequence: Synthetic oligonucleotide
  Antisense strand to SEQ ID NO: 2347756
uuucacaucccugggaugg

SEQ ID NO: 2347758 - RNA, 19 nt, Artificial Sequence
  Description of Artificial Sequence: Synthetic oligonucleotide
  Sense strand starting at position 2456 of SEQ ID NO: 1885516
acgcauuuguuacugggau

SEQ ID NO: 2347759 - RNA, 19 nt, Artificial Sequence
  Description of Artificial Sequence: Synthetic oligonucleotide
  Antisense strand to SEQ ID NO: 2347758
aucccaguaacaaaugcgu

SEQ ID NO: 2347760 - RNA, 19 nt, Artificial Sequence
  Description of Artificial Sequence: Synthetic oligonucleotide
  Sense strand starting at position 2460 of SEQ ID NO: 1885516
auuuguuacugggauggua

SEQ ID NO: 2347761 - RNA, 19 nt, Artificial Sequence
  Description of Artificial Sequence: Synthetic oligonucleotide
  Antisense strand to SEQ ID NO: 2347760
uaccaucccaguaacaaau

SEQ ID NO: 2347762 - RNA, 19 nt, Artificial Sequence
  Description of Artificial Sequence: Synthetic oligonucleotide
  Sense strand starting at position 2495 of SEQ ID NO: 1885516
uuggcuuugaagggagaaa

SEQ ID NO: 2347763 - RNA, 19 nt, Artificial Sequence
  Description of Artificial Sequence: Synthetic oligonucleotide
  Antisense strand to SEQ ID NO: 2347762
uuucucccuucaaagccaa

SEQ ID NO: 2347764 - RNA, 19 nt, Artificial Sequence
  Description of Artificial Sequence: Synthetic oligonucleotide
  Sense strand starting at position 2584 of SEQ ID NO: 1885516
ucugcuaaacgauaacagu

SEQ ID NO: 2347765 - RNA, 19 nt, Artificial Sequence
  Description of Artificial Sequence: Synthetic oligonucleotide
  Antisense strand to SEQ ID NO: 2347764
acuguuaucguuuagcaga

SEQ ID NO: 2347766 - RNA, 19 nt, Artificial Sequence
  Description of Artificial Sequence: Synthetic oligonucleotide
  Sense strand starting at position 2719 of SEQ ID NO: 1885516
uguagauacugucucccua

SEQ ID NO: 2347767 - RNA, 19 nt, Artificial Sequence
  Description of Artificial Sequence: Synthetic oligonucleotide
  Antisense strand to SEQ ID NO: 2347766
uagggagacaguaucuaca

SEQ ID NO: 2347768 - RNA, 19 nt, Artificial Sequence
  Description of Artificial Sequence: Synthetic oligonucleotide
  Sense strand starting at position 2906 of SEQ ID NO: 1885516
agcaauuauaugugaggca

SEQ ID NO: 2347769 - RNA, 19 nt, Artificial Sequence
  Description of Artificial Sequence: Synthetic oligonucleotide
  Antisense strand to SEQ ID NO: 2347768
ugccucacauauaauugcu

SEQ ID NO: 2347770 - RNA, 19 nt, Artificial Sequence
  Description of Artificial Sequence: Synthetic oligonucleotide
  Sense strand starting at position 2911 of SEQ ID NO: 1885516
uuauaugugaggcaguuaa

SEQ ID NO: 2347771 - RNA, 19 nt, Artificial Sequence
  Description of Artificial Sequence: Synthetic oligonucleotide
  Antisense strand to SEQ ID NO: 2347770
uuaacugccucacauauaa

SEQ ID NO: 2347772 - RNA, 19 nt, Artificial Sequence
  Description of Artificial Sequence: Synthetic oligonucleotide
  Sense strand starting at position 2950 of SEQ ID NO: 1885516
uuccuuucucauggaaugu

SEQ ID NO: 2347773 - RNA, 19 nt, Artificial Sequence
  Description of Artificial Sequence: Synthetic oligonucleotide
  Antisense strand to SEQ ID NO: 2347772
acauuccaugagaaaggaa

SEQ ID NO: 2347774 - RNA, 19 nt, Artificial Sequence
  Description of Artificial Sequence: Synthetic oligonucleotide
  Sense strand starting at position 2954 of SEQ ID NO: 1885516
uuucucauggaauguguaa

SEQ ID NO: 2347775 - RNA, 19 nt, Artificial Sequence
  Description of Artificial Sequence: Synthetic oligonucleotide
  Antisense strand to SEQ ID NO: 2347774
uuacacauuccaugagaaa

SEQ ID NO: 2347776 - RNA, 19 nt, Artificial Sequence
  Description of Artificial Sequence: Synthetic oligonucleotide
  Sense strand starting at position 2980 of SEQ ID NO: 1885516
ggagaaaugagaugugcau

SEQ ID NO: 2347777 - RNA, 19 nt, Artificial Sequence
  Description of Artificial Sequence: Synthetic oligonucleotide
  Antisense strand to SEQ ID NO: 2347776
augcacaucucauuucucc

SEQ ID NO: 2347778 - RNA, 19 nt, Artificial Sequence
  Description of Artificial Sequence: Synthetic oligonucleotide
  Sense strand starting at position 2982 of SEQ ID NO: 1885516
agaaaugagaugugcauaa

SEQ ID NO: 2347779 - RNA, 19 nt, Artificial Sequence
  Description of Artificial Sequence: Synthetic oligonucleotide
  Antisense strand to SEQ ID NO: 2347778
uuaugcacaucucauuucu

SEQ ID NO: 2347780 - RNA, 19 nt, Artificial Sequence
  Description of Artificial Sequence: Synthetic oligonucleotide
  Sense strand starting at position 3459 of SEQ ID NO: 1885516
ugucaaguauuggcaagau

SEQ ID NO: 2347781 - RNA, 19 nt, Artificial Sequence
  Description of Artificial Sequence: Synthetic oligonucleotide
  Antisense strand to SEQ ID NO: 2347780
aucuugccaauacuugaca

SEQ ID NO: 2347782 - RNA, 19 nt, Artificial Sequence
  Description of Artificial Sequence: Synthetic oligonucleotide
  Sense strand starting at position 3544 of SEQ ID NO: 1885516
acuguuuggcgguaucaac

SEQ ID NO: 2347783 - RNA, 19 nt, Artificial Sequence
  Description of Artificial Sequence: Synthetic oligonucleotide
  Antisense strand to SEQ ID NO: 2347782
guugauaccgccaaacagu

SEQ ID NO: 2347784 - RNA, 19 nt, Artificial Sequence
  Description of Artificial Sequence: Synthetic oligonucleotide
  Sense strand starting at position 3551 of SEQ ID NO: 1885516
ggcgguaucaacugaaucu

SEQ ID NO: 2347785 - RNA, 19 nt, Artificial Sequence
  Description of Artificial Sequence: Synthetic oligonucleotide
  Antisense strand to SEQ ID NO: 2347784
agauucaguugauaccgcc

SEQ ID NO: 2347786 - RNA, 19 nt, Artificial Sequence
  Description of Artificial Sequence: Synthetic oligonucleotide
  Sense strand starting at position 3788 of SEQ ID NO: 1885516
ucuugaucccuggaguuug

SEQ ID NO: 2347787 - RNA, 19 nt, Artificial Sequence
  Description of Artificial Sequence: Synthetic oligonucleotide
  Antisense strand to SEQ ID NO: 2347786
caaacuccagggaucaaga

SEQ ID NO: 2347788 - RNA, 19 nt, Artificial Sequence
  Description of Artificial Sequence: Synthetic oligonucleotide
  Sense strand starting at position 3921 of SEQ ID NO: 1885516
aacugaaaugucugcaugu

SEQ ID NO: 2347789 - RNA, 19 nt, Artificial Sequence
  Description of Artificial Sequence: Synthetic oligonucleotide
  Antisense strand to SEQ ID NO: 2347788
acaugcagacauuucaguu

SEQ ID NO: 2347790 - RNA, 19 nt, Artificial Sequence
  Description of Artificial Sequence: Synthetic oligonucleotide
  Sense strand starting at position 3922 of SEQ ID NO: 1885516
acugaaaugucugcaugua

SEQ ID NO: 2347791 - RNA, 19 nt, Artificial Sequence
  Description of Artificial Sequence: Synthetic oligonucleotide
  Antisense strand to SEQ ID NO: 2347790
uacaugcagacauuucagu

SEQ ID NO: 2347792 - RNA, 19 nt, Artificial Sequence
  Description of Artificial Sequence: Synthetic oligonucleotide
  Sense strand starting at position 3923 of SEQ ID NO: 1885516
cugaaaugucugcauguau

SEQ ID NO: 2347793 - RNA, 19 nt, Artificial Sequence
  Description of Artificial Sequence: Synthetic oligonucleotide
  Antisense strand to SEQ ID NO: 2347792
auacaugcagacauuucag

SEQ ID NO: 2347794 - RNA, 19 nt, Artificial Sequence
  Description of Artificial Sequence: Synthetic oligonucleotide
  Sense strand starting at position 54 of SEQ ID NO: 1885517
ggacaauaaugagagaaca

SEQ ID NO: 2347795 - RNA, 19 nt, Artificial Sequence
  Description of Artificial Sequence: Synthetic oligonucleotide
  Antisense strand to SEQ ID NO: 2347794
uguucucucauuauugucc

SEQ ID NO: 2347796 - RNA, 19 nt, Artificial Sequence
  Description of Artificial Sequence: Synthetic oligonucleotide
  Sense strand starting at position 73 of SEQ ID NO: 1885517
cugggagagucuuaugacu

SEQ ID NO: 2347797 - RNA, 19 nt, Artificial Sequence
  Description of Artificial Sequence: Synthetic oligonucleotide
  Antisense strand to SEQ ID NO: 2347796
agucauaagacucucccag

SEQ ID NO: 2347798 - RNA, 19 nt, Artificial Sequence
  Description of Artificial Sequence: Synthetic oligonucleotide
  Sense strand starting at position 80 of SEQ ID NO: 1885517
agucuuaugacugguguga

SEQ ID NO: 2347799 - RNA, 19 nt, Artificial Sequence
  Description of Artificial Sequence: Synthetic oligonucleotide
  Antisense strand to SEQ ID NO: 2347798
ucacaccagucauaagacu

SEQ ID NO: 2347800 - RNA, 19 nt, Artificial Sequence
  Description of Artificial Sequence: Synthetic oligonucleotide
  Sense strand starting at position 84 of SEQ ID NO: 1885517
uuaugacuggugugauuac

SEQ ID NO: 2347801 - RNA, 19 nt, Artificial Sequence
  Description of Artificial Sequence: Synthetic oligonucleotide
  Antisense strand to SEQ ID NO: 2347800
guaaucacaccagucauaa

SEQ ID NO: 2347802 - RNA, 19 nt, Artificial Sequence
  Description of Artificial Sequence: Synthetic oligonucleotide
  Sense strand starting at position 153 of SEQ ID NO: 1885517
uucccuugugugggucaga

SEQ ID NO: 2347803 - RNA, 19 nt, Artificial Sequence
  Description of Artificial Sequence: Synthetic oligonucleotide
  Antisense strand to SEQ ID NO: 2347802
ucugacccacacaagggaa

SEQ ID NO: 2347804 - RNA, 19 nt, Artificial Sequence
  Description of Artificial Sequence: Synthetic oligonucleotide
  Sense strand starting at position 240 of SEQ ID NO: 1885517
gcucccauauuccugaguu

SEQ ID NO: 2347805 - RNA, 19 nt, Artificial Sequence
  Description of Artificial Sequence: Synthetic oligonucleotide
  Antisense strand to SEQ ID NO: 2347804
aacucaggaauaugggagc

SEQ ID NO: 2347806 - RNA, 19 nt, Artificial Sequence
  Description of Artificial Sequence: Synthetic oligonucleotide
  Sense strand starting at position 244 of SEQ ID NO: 1885517
ccauauuccugaguuggga

SEQ ID NO: 2347807 - RNA, 19 nt, Artificial Sequence
  Description of Artificial Sequence: Synthetic oligonucleotide
  Antisense strand to SEQ ID NO: 2347806
ucccaacucaggaauaugg

SEQ ID NO: 2347808 - RNA, 19 nt, Artificial Sequence
  Description of Artificial Sequence: Synthetic oligonucleotide
  Sense strand starting at position 265 of SEQ ID NO: 1885517
guccaacauugugcuagaa

SEQ ID NO: 2347809 - RNA, 19 nt, Artificial Sequence
  Description of Artificial Sequence: Synthetic oligonucleotide
  Antisense strand to SEQ ID NO: 2347808
uucuagcacaauguuggac

SEQ ID NO: 2347810 - RNA, 19 nt, Artificial Sequence
  Description of Artificial Sequence: Synthetic oligonucleotide
  Sense strand starting at position 267 of SEQ ID NO: 1885517
ccaacauugugcuagaaga

SEQ ID NO: 2347811 - RNA, 19 nt, Artificial Sequence
  Description of Artificial Sequence: Synthetic oligonucleotide
  Antisense strand to SEQ ID NO: 2347810
ucuucuagcacaauguugg

SEQ ID NO: 2347812 - RNA, 19 nt, Artificial Sequence
  Description of Artificial Sequence: Synthetic oligonucleotide
  Sense strand starting at position 269 of SEQ ID NO: 1885517
aacauugugcuagaagagu

SEQ ID NO: 2347813 - RNA, 19 nt, Artificial Sequence
  Description of Artificial Sequence: Synthetic oligonucleotide
  Antisense strand to SEQ ID NO: 2347812
acucuucuagcacaauguu

SEQ ID NO: 2347814 - RNA, 19 nt, Artificial Sequence
  Description of Artificial Sequence: Synthetic oligonucleotide
  Sense strand starting at position 441 of SEQ ID NO: 1885517
cugguuaacagcugugaag

SEQ ID NO: 2347815 - RNA, 19 nt, Artificial Sequence
  Description of Artificial Sequence: Synthetic oligonucleotide
  Antisense strand to SEQ ID NO: 2347814
cuucacagcuguuaaccag

SEQ ID NO: 2347816 - RNA, 19 nt, Artificial Sequence
  Description of Artificial Sequence: Synthetic oligonucleotide
  Sense strand starting at position 452 of SEQ ID NO: 1885517
cugugaagccuugggaaag

SEQ ID NO: 2347817 - RNA, 19 nt, Artificial Sequence
  Description of Artificial Sequence: Synthetic oligonucleotide
  Antisense strand to SEQ ID NO: 2347816
cuuucccaaggcuucacag

SEQ ID NO: 2347818 - RNA, 19 nt, Artificial Sequence
  Description of Artificial Sequence: Synthetic oligonucleotide
  Sense strand starting at position 546 of SEQ ID NO: 1885517
ucuucaugugguuguggaa

SEQ ID NO: 2347819 - RNA, 19 nt, Artificial Sequence
  Description of Artificial Sequence: Synthetic oligonucleotide
  Antisense strand to SEQ ID NO: 2347818
uuccacaaccacaugaaga

SEQ ID NO: 2347820 - RNA, 19 nt, Artificial Sequence
  Description of Artificial Sequence: Synthetic oligonucleotide
  Sense strand starting at position 999 of SEQ ID NO: 1885517
gugguuacguagucagaug

SEQ ID NO: 2347821 - RNA, 19 nt, Artificial Sequence
  Description of Artificial Sequence: Synthetic oligonucleotide
  Antisense strand to SEQ ID NO: 2347820
caucugacuacguaaccac

SEQ ID NO: 2347822 - RNA, 19 nt, Artificial Sequence
  Description of Artificial Sequence: Synthetic oligonucleotide
  Sense strand starting at position 1297 of SEQ ID NO: 1885517
gcacguaguggccaacaau

SEQ ID NO: 2347823 - RNA, 19 nt, Artificial Sequence
  Description of Artificial Sequence: Synthetic oligonucleotide
  Antisense strand to SEQ ID NO: 2347822
auuguuggccacuacgugc

SEQ ID NO: 2347824 - RNA, 19 nt, Artificial Sequence
  Description of Artificial Sequence: Synthetic oligonucleotide
  Sense strand starting at position 1300 of SEQ ID NO: 1885517
cguaguggccaacaaucua

SEQ ID NO: 2347825 - RNA, 19 nt, Artificial Sequence
  Description of Artificial Sequence: Synthetic oligonucleotide
  Antisense strand to SEQ ID NO: 2347824
uagauuguuggccacuacg

SEQ ID NO: 2347826 - RNA, 19 nt, Artificial Sequence
  Description of Artificial Sequence: Synthetic oligonucleotide
  Sense strand starting at position 1501 of SEQ ID NO: 1885517
gggagauggcuuggaguca

SEQ ID NO: 2347827 - RNA, 19 nt, Artificial Sequence
  Description of Artificial Sequence: Synthetic oligonucleotide
  Antisense strand to SEQ ID NO: 2347826
ugacuccaagccaucuccc

SEQ ID NO: 2347828 - RNA, 19 nt, Artificial Sequence
  Description of Artificial Sequence: Synthetic oligonucleotide
  Sense strand starting at position 1630 of SEQ ID NO: 1885517
ggaggaguccugcaaccua

SEQ ID NO: 2347829 - RNA, 19 nt, Artificial Sequence
  Description of Artificial Sequence: Synthetic oligonucleotide
  Antisense strand to SEQ ID NO: 2347828
uagguugcaggacuccucc

SEQ ID NO: 2347830 - RNA, 19 nt, Artificial Sequence
  Description of Artificial Sequence: Synthetic oligonucleotide
  Sense strand starting at position 1653 of SEQ ID NO: 1885517
gccaaaucuuagguuguag

SEQ ID NO: 2347831 - RNA, 19 nt, Artificial Sequence
  Description of Artificial Sequence: Synthetic oligonucleotide
  Antisense strand to SEQ ID NO: 2347830
cuacaaccuaagauuuggc

SEQ ID NO: 2347832 - RNA, 19 nt, Artificial Sequence
  Description of Artificial Sequence: Synthetic oligonucleotide
  Sense strand starting at position 1655 of SEQ ID NO: 1885517
caaaucuuagguuguagua

SEQ ID NO: 2347833 - RNA, 19 nt, Artificial Sequence
  Description of Artificial Sequence: Synthetic oligonucleotide
  Antisense strand to SEQ ID NO: 2347832
uacuacaaccuaagauuug

SEQ ID NO: 2347834 - RNA, 19 nt, Artificial Sequence
  Description of Artificial Sequence: Synthetic oligonucleotide
  Sense strand starting at position 1791 of SEQ ID NO: 1885517
ggcugagucugggcagaaa

SEQ ID NO: 2347835 - RNA, 19 nt, Artificial Sequence
  Description of Artificial Sequence: Synthetic oligonucleotide
  Antisense strand to SEQ ID NO: 2347834
uuucugcccagacucagcc

SEQ ID NO: 2347836 - RNA, 19 nt, Artificial Sequence
  Description of Artificial Sequence: Synthetic oligonucleotide
  Sense strand starting at position 2017 of SEQ ID NO: 1885517
ugugcaaacuugucccauu

SEQ ID NO: 2347837 - RNA, 19 nt, Artificial Sequence
  Description of Artificial Sequence: Synthetic oligonucleotide
  Antisense strand to SEQ ID NO: 2347836
aaugggacaaguuugcaca

SEQ ID NO: 2347838 - RNA, 19 nt, Artificial Sequence
  Description of Artificial Sequence: Synthetic oligonucleotide
  Sense strand starting at position 2086 of SEQ ID NO: 1885517
auguuugcugauggcaauu

SEQ ID NO: 2347839 - RNA, 19 nt, Artificial Sequence
  Description of Artificial Sequence: Synthetic oligonucleotide
  Antisense strand to SEQ ID NO: 2347838
aauugccaucagcaaacau

SEQ ID NO: 2347840 - RNA, 19 nt, Artificial Sequence
  Description of Artificial Sequence: Synthetic oligonucleotide
  Sense strand starting at position 2152 of SEQ ID NO: 1885517
gucccuaacuguuugacua

SEQ ID NO: 2347841 - RNA, 19 nt, Artificial Sequence
  Description of Artificial Sequence: Synthetic oligonucleotide
  Antisense strand to SEQ ID NO: 2347840
uagucaaacaguuagggac

SEQ ID NO: 2347842 - RNA, 19 nt, Artificial Sequence
  Description of Artificial Sequence: Synthetic oligonucleotide
  Sense strand starting at position 2232 of SEQ ID NO: 1885517
ggcuuugugcagcucaauu

SEQ ID NO: 2347843 - RNA, 19 nt, Artificial Sequence
  Description of Artificial Sequence: Synthetic oligonucleotide
  Antisense strand to SEQ ID NO: 2347842
aauugagcugcacaaagcc

SEQ ID NO: 2347844 - RNA, 19 nt, Artificial Sequence
  Description of Artificial Sequence: Synthetic oligonucleotide
  Sense strand starting at position 2267 of SEQ ID NO: 1885517
agacaagauuccugagagc

SEQ ID NO: 2347845 - RNA, 19 nt, Artificial Sequence
  Description of Artificial Sequence: Synthetic oligonucleotide
  Antisense strand to SEQ ID NO: 2347844
gcucucaggaaucuugucu

SEQ ID NO: 2347846 - RNA, 19 nt, Artificial Sequence
  Description of Artificial Sequence: Synthetic oligonucleotide
  Sense strand starting at position 2290 of SEQ ID NO: 1885517
gcucccuucccauggauau

SEQ ID NO: 2347847 - RNA, 19 nt, Artificial Sequence
  Description of Artificial Sequence: Synthetic oligonucleotide
  Antisense strand to SEQ ID NO: 2347846
auauccaugggaagggagc

SEQ ID NO: 2347848 - RNA, 19 nt, Artificial Sequence
  Description of Artificial Sequence: Synthetic oligonucleotide
  Sense strand starting at position 2309 of SEQ ID NO: 1885517
cccagcaccucguuagaga

SEQ ID NO: 2347849 - RNA, 19 nt, Artificial Sequence
  Description of Artificial Sequence: Synthetic oligonucleotide
  Antisense strand to SEQ ID NO: 2347848
ucucuaacgaggugcuggg

SEQ ID NO: 2347850 - RNA, 19 nt, Artificial Sequence
  Description of Artificial Sequence: Synthetic oligonucleotide
  Sense strand starting at position 2767 of SEQ ID NO: 1885517
guagaaauuuaccgggaaa

SEQ ID NO: 2347851 - RNA, 19 nt, Artificial Sequence
  Description of Artificial Sequence: Synthetic oligonucleotide
  Antisense strand to SEQ ID NO: 2347850
uuucccgguaaauuucuac

SEQ ID NO: 2347852 - RNA, 19 nt, Artificial Sequence
  Description of Artificial Sequence: Synthetic oligonucleotide
  Sense strand starting at position 2791 of SEQ ID NO: 1885517
gcauuugggagcugucuuu

SEQ ID NO: 2347853 - RNA, 19 nt, Artificial Sequence
  Description of Artificial Sequence: Synthetic oligonucleotide
  Antisense strand to SEQ ID NO: 2347852
aaagacagcucccaaaugc

SEQ ID NO: 2347854 - RNA, 19 nt, Artificial Sequence
  Description of Artificial Sequence: Synthetic oligonucleotide
  Sense strand starting at position 2828 of SEQ ID NO: 1885517
gugacaauuugugacggca

SEQ ID NO: 2347855 - RNA, 19 nt, Artificial Sequence
  Description of Artificial Sequence: Synthetic oligonucleotide
  Antisense strand to SEQ ID NO: 2347854
ugccgucacaaauugucac

SEQ ID NO: 2347856 - RNA, 19 nt, Artificial Sequence
  Description of Artificial Sequence: Synthetic oligonucleotide
  Sense strand starting at position 2830 of SEQ ID NO: 1885517
gacaauuugugacggcaaa

SEQ ID NO: 2347857 - RNA, 19 nt, Artificial Sequence
  Description of Artificial Sequence: Synthetic oligonucleotide
  Antisense strand to SEQ ID NO: 2347856
uuugccgucacaaauuguc

SEQ ID NO: 2347858 - RNA, 19 nt, Artificial Sequence
  Description of Artificial Sequence: Synthetic oligonucleotide
  Sense strand starting at position 2882 of SEQ ID NO: 1885517
gaugcuuuguaucuggaga

SEQ ID NO: 2347859 - RNA, 19 nt, Artificial Sequence
  Description of Artificial Sequence: Synthetic oligonucleotide
  Antisense strand to SEQ ID NO: 2347858
ucuccagauacaaagcauc

SEQ ID NO: 2347860 - RNA, 19 nt, Artificial Sequence
  Description of Artificial Sequence: Synthetic oligonucleotide
  Sense strand starting at position 2883 of SEQ ID NO: 1885517
augcuuuguaucuggagag

SEQ ID NO: 2347861 - RNA, 19 nt, Artificial Sequence
  Description of Artificial Sequence: Synthetic oligonucleotide
  Antisense strand to SEQ ID NO: 2347860
cucuccagauacaaagcau

SEQ ID NO: 2347862 - RNA, 19 nt, Artificial Sequence
  Description of Artificial Sequence: Synthetic oligonucleotide
  Sense strand starting at position 3252 of SEQ ID NO: 1885517
aaggcaggucucgauuaag

SEQ ID NO: 2347863 - RNA, 19 nt, Artificial Sequence
  Description of Artificial Sequence: Synthetic oligonucleotide
  Antisense strand to SEQ ID NO: 2347862
cuuaaucgagaccugccuu

SEQ ID NO: 2347864 - RNA, 19 nt, Artificial Sequence
  Description of Artificial Sequence: Synthetic oligonucleotide
  Sense strand starting at position 3560 of SEQ ID NO: 1885517
gggcgacuugcuugaccuu

SEQ ID NO: 2347865 - RNA, 19 nt, Artificial Sequence
  Description of Artificial Sequence: Synthetic oligonucleotide
  Antisense strand to SEQ ID NO: 2347864
aaggucaagcaagucgccc

SEQ ID NO: 2347866 - RNA, 19 nt, Artificial Sequence
  Description of Artificial Sequence: Synthetic oligonucleotide
  Sense strand starting at position 3736 of SEQ ID NO: 1885517
gggagacuguuuguagaca

SEQ ID NO: 2347867 - RNA, 19 nt, Artificial Sequence
  Description of Artificial Sequence: Synthetic oligonucleotide
  Antisense strand to SEQ ID NO: 2347866
ugucuacaaacagucuccc

SEQ ID NO: 2347868 - RNA, 19 nt, Artificial Sequence
  Description of Artificial Sequence: Synthetic oligonucleotide
  Sense strand starting at position 3780 of SEQ ID NO: 1885517
gggugugguugcuuggaga

SEQ ID NO: 2347869 - RNA, 19 nt, Artificial Sequence
  Description of Artificial Sequence: Synthetic oligonucleotide
  Antisense strand to SEQ ID NO: 2347868
ucuccaagcaaccacaccc

SEQ ID NO: 2347870 - RNA, 19 nt, Artificial Sequence
  Description of Artificial Sequence: Synthetic oligonucleotide
  Sense strand starting at position 3782 of SEQ ID NO: 1885517
gugugguugcuuggagaga

SEQ ID NO: 2347871 - RNA, 19 nt, Artificial Sequence
  Description of Artificial Sequence: Synthetic oligonucleotide
  Antisense strand to SEQ ID NO: 2347870
ucucuccaagcaaccacac

SEQ ID NO: 2347872 - RNA, 19 nt, Artificial Sequence
  Description of Artificial Sequence: Synthetic oligonucleotide
  Sense strand starting at position 3784 of SEQ ID NO: 1885517
gugguugcuuggagagacu

SEQ ID NO: 2347873 - RNA, 19 nt, Artificial Sequence
  Description of Artificial Sequence: Synthetic oligonucleotide
  Antisense strand to SEQ ID NO: 2347872
agucucuccaagcaaccac

SEQ ID NO: 2347874 - RNA, 19 nt, Artificial Sequence
  Description of Artificial Sequence: Synthetic oligonucleotide
  Sense strand starting at position 5 of SEQ ID NO: 1885518
cucagugauucuguaagga

SEQ ID NO: 2347875 - RNA, 19 nt, Artificial Sequence
  Description of Artificial Sequence: Synthetic oligonucleotide
  Antisense strand to SEQ ID NO: 2347874
uccuuacagaaucacugag

SEQ ID NO: 2347876 - RNA, 19 nt, Artificial Sequence
  Description of Artificial Sequence: Synthetic oligonucleotide
  Sense strand starting at position 18 of SEQ ID NO: 1885518
uaaggaugaaggugaugua

SEQ ID NO: 2347877 - RNA, 19 nt, Artificial Sequence
  Description of Artificial Sequence: Synthetic oligonucleotide
  Antisense strand to SEQ ID NO: 2347876
uacaucaccuucauccuua

SEQ ID NO: 2347878 - RNA, 19 nt, Artificial Sequence
  Description of Artificial Sequence: Synthetic oligonucleotide
  Sense strand starting at position 25 of SEQ ID NO: 1885518
gaaggugauguagaguagu

SEQ ID NO: 2347879 - RNA, 19 nt, Artificial Sequence
  Description of Artificial Sequence: Synthetic oligonucleotide
  Antisense strand to SEQ ID NO: 2347878
acuacucuacaucaccuuc

SEQ ID NO: 2347880 - RNA, 19 nt, Artificial Sequence
  Description of Artificial Sequence: Synthetic oligonucleotide
  Sense strand starting at position 28 of SEQ ID NO: 1885518
ggugauguagaguaguaga

SEQ ID NO: 2347881 - RNA, 19 nt, Artificial Sequence
  Description of Artificial Sequence: Synthetic oligonucleotide
  Antisense strand to SEQ ID NO: 2347880
ucuacuacucuacaucacc

SEQ ID NO: 2347882 - RNA, 19 nt, Artificial Sequence
  Description of Artificial Sequence: Synthetic oligonucleotide
  Sense strand starting at position 68 of SEQ ID NO: 1885518
ccagaauacugcucugauu

SEQ ID NO: 2347883 - RNA, 19 nt, Artificial Sequence
  Description of Artificial Sequence: Synthetic oligonucleotide
  Antisense strand to SEQ ID NO: 2347882
aaucagagcaguauucugg

SEQ ID NO: 2347884 - RNA, 19 nt, Artificial Sequence
  Description of Artificial Sequence: Synthetic oligonucleotide
  Sense strand starting at position 97 of SEQ ID NO: 1885518
agccuuauuggucaaugac

SEQ ID NO: 2347885 - RNA, 19 nt, Artificial Sequence
  Description of Artificial Sequence: Synthetic oligonucleotide
  Antisense strand to SEQ ID NO: 2347884
gucauugaccaauaaggcu

SEQ ID NO: 2347886 - RNA, 19 nt, Artificial Sequence
  Description of Artificial Sequence: Synthetic oligonucleotide
  Sense strand starting at position 100 of SEQ ID NO: 1885518
cuuauuggucaaugacuac

SEQ ID NO: 2347887 - RNA, 19 nt, Artificial Sequence
  Description of Artificial Sequence: Synthetic oligonucleotide
  Antisense strand to SEQ ID NO: 2347886
guagucauugaccaauaag

SEQ ID NO: 2347888 - RNA, 19 nt, Artificial Sequence
  Description of Artificial Sequence: Synthetic oligonucleotide
  Sense strand starting at position 141 of SEQ ID NO: 1885518
acugcuuucggagaagcau

SEQ ID NO: 2347889 - RNA, 19 nt, Artificial Sequence
  Description of Artificial Sequence: Synthetic oligonucleotide
  Antisense strand to SEQ ID NO: 2347888
augcuucuccgaaagcagu

SEQ ID NO: 2347890 - RNA, 19 nt, Artificial Sequence
  Description of Artificial Sequence: Synthetic oligonucleotide
  Sense strand starting at position 523 of SEQ ID NO: 1885518
gccuaagagcucguugguu

SEQ ID NO: 2347891 - RNA, 19 nt, Artificial Sequence
  Description of Artificial Sequence: Synthetic oligonucleotide
  Antisense strand to SEQ ID NO: 2347890
aaccaacgagcucuuaggc

SEQ ID NO: 2347892 - RNA, 19 nt, Artificial Sequence
  Description of Artificial Sequence: Synthetic oligonucleotide
  Sense strand starting at position 557 of SEQ ID NO: 1885518
aaggacugcuacuuagaga

SEQ ID NO: 2347893 - RNA, 19 nt, Artificial Sequence
  Description of Artificial Sequence: Synthetic oligonucleotide
  Antisense strand to SEQ ID NO: 2347892
ucucuaaguagcaguccuu

SEQ ID NO: 2347894 - RNA, 19 nt, Artificial Sequence
  Description of Artificial Sequence: Synthetic oligonucleotide
  Sense strand starting at position 572 of SEQ ID NO: 1885518
gagacuacugucuagguca

SEQ ID NO: 2347895 - RNA, 19 nt, Artificial Sequence
  Description of Artificial Sequence: Synthetic oligonucleotide
  Antisense strand to SEQ ID NO: 2347894
ugaccuagacaguagucuc

SEQ ID NO: 2347896 - RNA, 19 nt, Artificial Sequence
  Description of Artificial Sequence: Synthetic oligonucleotide
  Sense strand starting at position 591 of SEQ ID NO: 1885518
acccaacuggcauaaguaa

SEQ ID NO: 2347897 - RNA, 19 nt, Artificial Sequence
  Description of Artificial Sequence: Synthetic oligonucleotide
  Antisense strand to SEQ ID NO: 2347896
uuacuuaugccaguugggu

SEQ ID NO: 2347898 - RNA, 19 nt, Artificial Sequence
  Description of Artificial Sequence: Synthetic oligonucleotide
  Sense strand starting at position 671 of SEQ ID NO: 1885518
acugaucuaucuguguaga

SEQ ID NO: 2347899 - RNA, 19 nt, Artificial Sequence
  Description of Artificial Sequence: Synthetic oligonucleotide
  Antisense strand to SEQ ID NO: 2347898
ucuacacagauagaucagu

SEQ ID NO: 2347900 - RNA, 19 nt, Artificial Sequence
  Description of Artificial Sequence: Synthetic oligonucleotide
  Sense strand starting at position 673 of SEQ ID NO: 1885518
ugaucuaucuguguagaca

SEQ ID NO: 2347901 - RNA, 19 nt, Artificial Sequence
  Description of Artificial Sequence: Synthetic oligonucleotide
  Antisense strand to SEQ ID NO: 2347900
ugucuacacagauagauca

SEQ ID NO: 2347902 - RNA, 19 nt, Artificial Sequence
  Description of Artificial Sequence: Synthetic oligonucleotide
  Sense strand starting at position 674 of SEQ ID NO: 1885518
gaucuaucuguguagacag

SEQ ID NO: 2347903 - RNA, 19 nt, Artificial Sequence
  Description of Artificial Sequence: Synthetic oligonucleotide
  Antisense strand to SEQ ID NO: 2347902
cugucuacacagauagauc

SEQ ID NO: 2347904 - RNA, 19 nt, Artificial Sequence
  Description of Artificial Sequence: Synthetic oligonucleotide
  Sense strand starting at position 682 of SEQ ID NO: 1885518
uguguagacaggcaagaau

SEQ ID NO: 2347905 - RNA, 19 nt, Artificial Sequence
  Description of Artificial Sequence: Synthetic oligonucleotide
  Antisense strand to SEQ ID NO: 2347904
auucuugccugucuacaca

SEQ ID NO: 2347906 - RNA, 19 nt, Artificial Sequence
  Description of Artificial Sequence: Synthetic oligonucleotide
  Sense strand starting at position 735 of SEQ ID NO: 1885518
aaagaagagcgugauggua

SEQ ID NO: 2347907 - RNA, 19 nt, Artificial Sequence
  Description of Artificial Sequence: Synthetic oligonucleotide
  Antisense strand to SEQ ID NO: 2347906
uaccaucacgcucuucuuu

SEQ ID NO: 2347908 - RNA, 19 nt, Artificial Sequence
  Description of Artificial Sequence: Synthetic oligonucleotide
  Sense strand starting at position 753 of SEQ ID NO: 1885518
augguagacuacuccagaa

SEQ ID NO: 2347909 - RNA, 19 nt, Artificial Sequence
  Description of Artificial Sequence: Synthetic oligonucleotide
  Antisense strand to SEQ ID NO: 2347908
uucuggaguagucuaccau

SEQ ID NO: 2347910 - RNA, 19 nt, Artificial Sequence
  Description of Artificial Sequence: Synthetic oligonucleotide
  Sense strand starting at position 785 of SEQ ID NO: 1885518
cugcauuaaggaugagauc

SEQ ID NO: 2347911 - RNA, 19 nt, Artificial Sequence
  Description of Artificial Sequence: Synthetic oligonucleotide
  Antisense strand to SEQ ID NO: 2347910
gaucucauccuuaaugcag

SEQ ID NO: 2347912 - RNA, 19 nt, Artificial Sequence
  Description of Artificial Sequence: Synthetic oligonucleotide
  Sense strand starting at position 823 of SEQ ID NO: 1885518
caggaagucuucuuggaga

SEQ ID NO: 2347913 - RNA, 19 nt, Artificial Sequence
  Description of Artificial Sequence: Synthetic oligonucleotide
  Antisense strand to SEQ ID NO: 2347912
ucuccaagaagacuuccug

SEQ ID NO: 2347914 - RNA, 19 nt, Artificial Sequence
  Description of Artificial Sequence: Synthetic oligonucleotide
  Sense strand starting at position 825 of SEQ ID NO: 1885518
ggaagucuucuuggagaag

SEQ ID NO: 2347915 - RNA, 19 nt, Artificial Sequence
  Description of Artificial Sequence: Synthetic oligonucleotide
  Antisense strand to SEQ ID NO: 2347914
cuucuccaagaagacuucc

SEQ ID NO: 2347916 - RNA, 19 nt, Artificial Sequence
  Description of Artificial Sequence: Synthetic oligonucleotide
  Sense strand starting at position 868 of SEQ ID NO: 1885518
aaaguuggauuggcaaaga

SEQ ID NO: 2347917 - RNA, 19 nt, Artificial Sequence
  Description of Artificial Sequence: Synthetic oligonucleotide
  Antisense strand to SEQ ID NO: 2347916
ucuuugccaauccaacuuu

SEQ ID NO: 2347918 - RNA, 19 nt, Artificial Sequence
  Description of Artificial Sequence: Synthetic oligonucleotide
  Sense strand starting at position 929 of SEQ ID NO: 1885518
ggagcugggaguuaugcua

SEQ ID NO: 2347919 - RNA, 19 nt, Artificial Sequence
  Description of Artificial Sequence: Synthetic oligonucleotide
  Antisense strand to SEQ ID NO: 2347918
uagcauaacucccagcucc

SEQ ID NO: 2347920 - RNA, 19 nt, Artificial Sequence
  Description of Artificial Sequence: Synthetic oligonucleotide
  Sense strand starting at position 961 of SEQ ID NO: 1885518
uugggaugccucuaauuaa

SEQ ID NO: 2347921 - RNA, 19 nt, Artificial Sequence
  Description of Artificial Sequence: Synthetic oligonucleotide
  Antisense strand to SEQ ID NO: 2347920
uuaauuagaggcaucccaa

SEQ ID NO: 2347922 - RNA, 19 nt, Artificial Sequence
  Description of Artificial Sequence: Synthetic oligonucleotide
  Sense strand starting at position 964 of SEQ ID NO: 1885518
ggaugccucuaauuaacca

SEQ ID NO: 2347923 - RNA, 19 nt, Artificial Sequence
  Description of Artificial Sequence: Synthetic oligonucleotide
  Antisense strand to SEQ ID NO: 2347922
ugguuaauuagaggcaucc

SEQ ID NO: 2347924 - RNA, 19 nt, Artificial Sequence
  Description of Artificial Sequence: Synthetic oligonucleotide
  Sense strand starting at position 1083 of SEQ ID NO: 1885518
gugauaacacuagguaauc

SEQ ID NO: 2347925 - RNA, 19 nt, Artificial Sequence
  Description of Artificial Sequence: Synthetic oligonucleotide
  Antisense strand to SEQ ID NO: 2347924
gauuaccuaguguuaucac

SEQ ID NO: 2347926 - RNA, 19 nt, Artificial Sequence
  Description of Artificial Sequence: Synthetic oligonucleotide
  Sense strand starting at position 1084 of SEQ ID NO: 1885518
ugauaacacuagguaaucu

SEQ ID NO: 2347927 - RNA, 19 nt, Artificial Sequence
  Description of Artificial Sequence: Synthetic oligonucleotide
  Antisense strand to SEQ ID NO: 2347926
agauuaccuaguguuauca

SEQ ID NO: 2347928 - RNA, 19 nt, Artificial Sequence
  Description of Artificial Sequence: Synthetic oligonucleotide
  Sense strand starting at position 1094 of SEQ ID NO: 1885518
agguaaucucagcaucuuu

SEQ ID NO: 2347929 - RNA, 19 nt, Artificial Sequence
  Description of Artificial Sequence: Synthetic oligonucleotide
  Antisense strand to SEQ ID NO: 2347928
aaagaugcugagauuaccu

SEQ ID NO: 2347930 - RNA, 19 nt, Artificial Sequence
  Description of Artificial Sequence: Synthetic oligonucleotide
  Sense strand starting at position 1122 of SEQ ID NO: 1885518
uugcuaauccaggauucua

SEQ ID NO: 2347931 - RNA, 19 nt, Artificial Sequence
  Description of Artificial Sequence: Synthetic oligonucleotide
  Antisense strand to SEQ ID NO: 2347930
uagaauccuggauuagcaa

SEQ ID NO: 2347932 - RNA, 19 nt, Artificial Sequence
  Description of Artificial Sequence: Synthetic oligonucleotide
  Sense strand starting at position 1271 of SEQ ID NO: 1885518
uguccaccgagguaaagau

SEQ ID NO: 2347933 - RNA, 19 nt, Artificial Sequence
  Description of Artificial Sequence: Synthetic oligonucleotide
  Antisense strand to SEQ ID NO: 2347932
aucuuuaccucgguggaca

SEQ ID NO: 2347934 - RNA, 19 nt, Artificial Sequence
  Description of Artificial Sequence: Synthetic oligonucleotide
  Sense strand starting at position 1614 of SEQ ID NO: 1885518
ccgagacauuucuacagaa

SEQ ID NO: 2347935 - RNA, 19 nt, Artificial Sequence
  Description of Artificial Sequence: Synthetic oligonucleotide
  Antisense strand to SEQ ID NO: 2347934
uucuguagaaaugucucgg

SEQ ID NO: 2347936 - RNA, 19 nt, Artificial Sequence
  Description of Artificial Sequence: Synthetic oligonucleotide
  Sense strand starting at position 2078 of SEQ ID NO: 1885518
gggugaggucucuaguuga

SEQ ID NO: 2347937 - RNA, 19 nt, Artificial Sequence
  Description of Artificial Sequence: Synthetic oligonucleotide
  Antisense strand to SEQ ID NO: 2347936
ucaacuagagaccucaccc

SEQ ID NO: 2347938 - RNA, 19 nt, Artificial Sequence
  Description of Artificial Sequence: Synthetic oligonucleotide
  Sense strand starting at position 2146 of SEQ ID NO: 1885518
aggaauuuguucuauuugu

SEQ ID NO: 2347939 - RNA, 19 nt, Artificial Sequence
  Description of Artificial Sequence: Synthetic oligonucleotide
  Antisense strand to SEQ ID NO: 2347938
acaaauagaacaaauuccu

SEQ ID NO: 2347940 - RNA, 19 nt, Artificial Sequence
  Description of Artificial Sequence: Synthetic oligonucleotide
  Sense strand starting at position 2229 of SEQ ID NO: 1885518
ggauuaggccucugaaacu

SEQ ID NO: 2347941 - RNA, 19 nt, Artificial Sequence
  Description of Artificial Sequence: Synthetic oligonucleotide
  Antisense strand to SEQ ID NO: 2347940
aguuucagaggccuaaucc

SEQ ID NO: 2347942 - RNA, 19 nt, Artificial Sequence
  Description of Artificial Sequence: Synthetic oligonucleotide
  Sense strand starting at position 2480 of SEQ ID NO: 1885518
ugaaucauccauuguuaga

SEQ ID NO: 2347943 - RNA, 19 nt, Artificial Sequence
  Description of Artificial Sequence: Synthetic oligonucleotide
  Antisense strand to SEQ ID NO: 2347942
ucuaacaauggaugauuca

SEQ ID NO: 2347944 - RNA, 19 nt, Artificial Sequence
  Description of Artificial Sequence: Synthetic oligonucleotide
  Sense strand starting at position 2558 of SEQ ID NO: 1885518
gcccauuugccaggcaaua

SEQ ID NO: 2347945 - RNA, 19 nt, Artificial Sequence
  Description of Artificial Sequence: Synthetic oligonucleotide
  Antisense strand to SEQ ID NO: 2347944
uauugccuggcaaaugggc

SEQ ID NO: 2347946 - RNA, 19 nt, Artificial Sequence
  Description of Artificial Sequence: Synthetic oligonucleotide
  Sense strand starting at position 2655 of SEQ ID NO: 1885518
aguuguacaguuuauguga

SEQ ID NO: 2347947 - RNA, 19 nt, Artificial Sequence
  Description of Artificial Sequence: Synthetic oligonucleotide
  Antisense strand to SEQ ID NO: 2347946
ucacauaaacuguacaacu

SEQ ID NO: 2347948 - RNA, 19 nt, Artificial Sequence
  Description of Artificial Sequence: Synthetic oligonucleotide
  Sense strand starting at position 3167 of SEQ ID NO: 1885518
cagauuguccuagagucaa

SEQ ID NO: 2347949 - RNA, 19 nt, Artificial Sequence
  Description of Artificial Sequence: Synthetic oligonucleotide
  Antisense strand to SEQ ID NO: 2347948
uugacucuaggacaaucug

SEQ ID NO: 2347950 - RNA, 19 nt, Artificial Sequence
  Description of Artificial Sequence: Synthetic oligonucleotide
  Sense strand starting at position 3395 of SEQ ID NO: 1885518
agccgagcugcagucaauu

SEQ ID NO: 2347951 - RNA, 19 nt, Artificial Sequence
  Description of Artificial Sequence: Synthetic oligonucleotide
  Antisense strand to SEQ ID NO: 2347950
aauugacugcagcucggcu

SEQ ID NO: 2347952 - RNA, 19 nt, Artificial Sequence
  Description of Artificial Sequence: Synthetic oligonucleotide
  Sense strand starting at position 3910 of SEQ ID NO: 1885518
cugccuuggccgaguguga

SEQ ID NO: 2347953 - RNA, 19 nt, Artificial Sequence
  Description of Artificial Sequence: Synthetic oligonucleotide
  Antisense strand to SEQ ID NO: 2347952
ucacacucggccaaggcag

SEQ ID NO: 2347954 - RNA, 19 nt, Artificial Sequence
  Description of Artificial Sequence: Synthetic oligonucleotide
  Sense strand starting at position 66 of SEQ ID NO: 1885519
cgacauaaagugcaauuga

SEQ ID NO: 2347955 - RNA, 19 nt, Artificial Sequence
  Description of Artificial Sequence: Synthetic oligonucleotide
  Antisense strand to SEQ ID NO: 2347954
ucaauugcacuuuaugucg

SEQ ID NO: 2347956 - RNA, 19 nt, Artificial Sequence
  Description of Artificial Sequence: Synthetic oligonucleotide
  Sense strand starting at position 312 of SEQ ID NO: 1885519
agauuauuacagugcucau

SEQ ID NO: 2347957 - RNA, 19 nt, Artificial Sequence
  Description of Artificial Sequence: Synthetic oligonucleotide
  Antisense strand to SEQ ID NO: 2347956
augagcacuguaauaaucu

SEQ ID NO: 2347958 - RNA, 19 nt, Artificial Sequence
  Description of Artificial Sequence: Synthetic oligonucleotide
  Sense strand starting at position 315 of SEQ ID NO: 1885519
uuauuacagugcucauuag

SEQ ID NO: 2347959 - RNA, 19 nt, Artificial Sequence
  Description of Artificial Sequence: Synthetic oligonucleotide
  Antisense strand to SEQ ID NO: 2347958
cuaaugagcacuguaauaa

SEQ ID NO: 2347960 - RNA, 19 nt, Artificial Sequence
  Description of Artificial Sequence: Synthetic oligonucleotide
  Sense strand starting at position 479 of SEQ ID NO: 1885519
ugguguuguauugaaggaa

SEQ ID NO: 2347961 - RNA, 19 nt, Artificial Sequence
  Description of Artificial Sequence: Synthetic oligonucleotide
  Antisense strand to SEQ ID NO: 2347960
uuccuucaauacaacacca

SEQ ID NO: 2347962 - RNA, 19 nt, Artificial Sequence
  Description of Artificial Sequence: Synthetic oligonucleotide
  Sense strand starting at position 483 of SEQ ID NO: 1885519
guuguauugaaggaaagcu

SEQ ID NO: 2347963 - RNA, 19 nt, Artificial Sequence
  Description of Artificial Sequence: Synthetic oligonucleotide
  Antisense strand to SEQ ID NO: 2347962
agcuuuccuucaauacaac

SEQ ID NO: 2347964 - RNA, 19 nt, Artificial Sequence
  Description of Artificial Sequence: Synthetic oligonucleotide
  Sense strand starting at position 492 of SEQ ID NO: 1885519
aaggaaagcuccuccaguu

SEQ ID NO: 2347965 - RNA, 19 nt, Artificial Sequence
  Description of Artificial Sequence: Synthetic oligonucleotide
  Antisense strand to SEQ ID NO: 2347964
aacuggaggagcuuuccuu

SEQ ID NO: 2347966 - RNA, 19 nt, Artificial Sequence
  Description of Artificial Sequence: Synthetic oligonucleotide
  Sense strand starting at position 518 of SEQ ID NO: 1885519
gagcucggauuugaauaaa

SEQ ID NO: 2347967 - RNA, 19 nt, Artificial Sequence
  Description of Artificial Sequence: Synthetic oligonucleotide
  Antisense strand to SEQ ID NO: 2347966
uuuauucaaauccgagcuc

SEQ ID NO: 2347968 - RNA, 19 nt, Artificial Sequence
  Description of Artificial Sequence: Synthetic oligonucleotide
  Sense strand starting at position 563 of SEQ ID NO: 1885519
acguuuggcacuuugugua

SEQ ID NO: 2347969 - RNA, 19 nt, Artificial Sequence
  Description of Artificial Sequence: Synthetic oligonucleotide
  Antisense strand to SEQ ID NO: 2347968
uacacaaagugccaaacgu

SEQ ID NO: 2347970 - RNA, 19 nt, Artificial Sequence
  Description of Artificial Sequence: Synthetic oligonucleotide
  Sense strand starting at position 568 of SEQ ID NO: 1885519
uggcacuuuguguauuaaa

SEQ ID NO: 2347971 - RNA, 19 nt, Artificial Sequence
  Description of Artificial Sequence: Synthetic oligonucleotide
  Antisense strand to SEQ ID NO: 2347970
uuuaauacacaaagugcca

SEQ ID NO: 2347972 - RNA, 19 nt, Artificial Sequence
  Description of Artificial Sequence: Synthetic oligonucleotide
  Sense strand starting at position 626 of SEQ ID NO: 1885519
uacagaccugauugaguua

SEQ ID NO: 2347973 - RNA, 19 nt, Artificial Sequence
  Description of Artificial Sequence: Synthetic oligonucleotide
  Antisense strand to SEQ ID NO: 2347972
uaacucaaucaggucugua

SEQ ID NO: 2347974 - RNA, 19 nt, Artificial Sequence
  Description of Artificial Sequence: Synthetic oligonucleotide
  Sense strand starting at position 629 of SEQ ID NO: 1885519
agaccugauugaguuaaua

SEQ ID NO: 2347975 - RNA, 19 nt, Artificial Sequence
  Description of Artificial Sequence: Synthetic oligonucleotide
  Antisense strand to SEQ ID NO: 2347974
uauuaacucaaucaggucu

SEQ ID NO: 2347976 - RNA, 19 nt, Artificial Sequence
  Description of Artificial Sequence: Synthetic oligonucleotide
  Sense strand starting at position 669 of SEQ ID NO: 1885519
cgaaaugauucuguuucuu

SEQ ID NO: 2347977 - RNA, 19 nt, Artificial Sequence
  Description of Artificial Sequence: Synthetic oligonucleotide
  Antisense strand to SEQ ID NO: 2347976
aagaaacagaaucauuucg

SEQ ID NO: 2347978 - RNA, 19 nt, Artificial Sequence
  Description of Artificial Sequence: Synthetic oligonucleotide
  Sense strand starting at position 845 of SEQ ID NO: 1885519
ugcacuuaugagcaugcaa

SEQ ID NO: 2347979 - RNA, 19 nt, Artificial Sequence
  Description of Artificial Sequence: Synthetic oligonucleotide
  Antisense strand to SEQ ID NO: 2347978
uugcaugcucauaagugca

SEQ ID NO: 2347980 - RNA, 19 nt, Artificial Sequence
  Description of Artificial Sequence: Synthetic oligonucleotide
  Sense strand starting at position 915 of SEQ ID NO: 1885519
ugcauaucagaguacaaau

SEQ ID NO: 2347981 - RNA, 19 nt, Artificial Sequence
  Description of Artificial Sequence: Synthetic oligonucleotide
  Antisense strand to SEQ ID NO: 2347980
auuuguacucugauaugca

SEQ ID NO: 2347982 - RNA, 19 nt, Artificial Sequence
  Description of Artificial Sequence: Synthetic oligonucleotide
  Sense strand starting at position 932 of SEQ ID NO: 1885519
auaguauaguuacuccaca

SEQ ID NO: 2347983 - RNA, 19 nt, Artificial Sequence
  Description of Artificial Sequence: Synthetic oligonucleotide
  Antisense strand to SEQ ID NO: 2347982
uguggaguaacuauacuau

SEQ ID NO: 2347984 - RNA, 19 nt, Artificial Sequence
  Description of Artificial Sequence: Synthetic oligonucleotide
  Sense strand starting at position 937 of SEQ ID NO: 1885519
auaguuacuccacaucagu

SEQ ID NO: 2347985 - RNA, 19 nt, Artificial Sequence
  Description of Artificial Sequence: Synthetic oligonucleotide
  Antisense strand to SEQ ID NO: 2347984
acugauguggaguaacuau

SEQ ID NO: 2347986 - RNA, 19 nt, Artificial Sequence
  Description of Artificial Sequence: Synthetic oligonucleotide
  Sense strand starting at position 940 of SEQ ID NO: 1885519
guuacuccacaucaguaaa

SEQ ID NO: 2347987 - RNA, 19 nt, Artificial Sequence
  Description of Artificial Sequence: Synthetic oligonucleotide
  Antisense strand to SEQ ID NO: 2347986
uuuacugauguggaguaac

SEQ ID NO: 2347988 - RNA, 19 nt, Artificial Sequence
  Description of Artificial Sequence: Synthetic oligonucleotide
  Sense strand starting at position 943 of SEQ ID NO: 1885519
acuccacaucaguaaaugu

SEQ ID NO: 2347989 - RNA, 19 nt, Artificial Sequence
  Description of Artificial Sequence: Synthetic oligonucleotide
  Antisense strand to SEQ ID NO: 2347988
acauuuacugauguggagu

SEQ ID NO: 2347990 - RNA, 19 nt, Artificial Sequence
  Description of Artificial Sequence: Synthetic oligonucleotide
  Sense strand starting at position 950 of SEQ ID NO: 1885519
aucaguaaauguuuacgua

SEQ ID NO: 2347991 - RNA, 19 nt, Artificial Sequence
  Description of Artificial Sequence: Synthetic oligonucleotide
  Antisense strand to SEQ ID NO: 2347990
uacguaaacauuuacugau

SEQ ID NO: 2347992 - RNA, 19 nt, Artificial Sequence
  Description of Artificial Sequence: Synthetic oligonucleotide
  Sense strand starting at position 951 of SEQ ID NO: 1885519
ucaguaaauguuuacguaa

SEQ ID NO: 2347993 - RNA, 19 nt, Artificial Sequence
  Description of Artificial Sequence: Synthetic oligonucleotide
  Antisense strand to SEQ ID NO: 2347992
uuacguaaacauuuacuga

SEQ ID NO: 2347994 - RNA, 19 nt, Artificial Sequence
  Description of Artificial Sequence: Synthetic oligonucleotide
  Sense strand starting at position 988 of SEQ ID NO: 1885519
uccgguuacaccgaaucau

SEQ ID NO: 2347995 - RNA, 19 nt, Artificial Sequence
  Description of Artificial Sequence: Synthetic oligonucleotide
  Antisense strand to SEQ ID NO: 2347994
augauucgguguaaccgga

SEQ ID NO: 2347996 - RNA, 19 nt, Artificial Sequence
  Description of Artificial Sequence: Synthetic oligonucleotide
  Sense strand starting at position 1070 of SEQ ID NO: 1885519
auuauaagugguggugaga

SEQ ID NO: 2347997 - RNA, 19 nt, Artificial Sequence
  Description of Artificial Sequence: Synthetic oligonucleotide
  Antisense strand to SEQ ID NO: 2347996
ucucaccaccacuuauaau

SEQ ID NO: 2347998 - RNA, 19 nt, Artificial Sequence
  Description of Artificial Sequence: Synthetic oligonucleotide
  Sense strand starting at position 1103 of SEQ ID NO: 1885519
aggagaaauugggaggagu

SEQ ID NO: 2347999 - RNA, 19 nt, Artificial Sequence
  Description of Artificial Sequence: Synthetic oligonucleotide
  Antisense strand to SEQ ID NO: 2347998
acuccucccaauuucuccu

SEQ ID NO: 2348000 - RNA, 19 nt, Artificial Sequence
  Description of Artificial Sequence: Synthetic oligonucleotide
  Sense strand starting at position 1340 of SEQ ID NO: 1885519
gcgagaaauccagagcuug

SEQ ID NO: 2348001 - RNA, 19 nt, Artificial Sequence
  Description of Artificial Sequence: Synthetic oligonucleotide
  Antisense strand to SEQ ID NO: 2348000
caagcucuggauuucucgc

SEQ ID NO: 2348002 - RNA, 19 nt, Artificial Sequence
  Description of Artificial Sequence: Synthetic oligonucleotide
  Sense strand starting at position 1372 of SEQ ID NO: 1885519
gggaccaugucacuaucaa

SEQ ID NO: 2348003 - RNA, 19 nt, Artificial Sequence
  Description of Artificial Sequence: Synthetic oligonucleotide
  Antisense strand to SEQ ID NO: 2348002
uugauagugacaugguccc

SEQ ID NO: 2348004 - RNA, 19 nt, Artificial Sequence
  Description of Artificial Sequence: Synthetic oligonucleotide
  Sense strand starting at position 1670 of SEQ ID NO: 1885519
cccuauuauccugaguauu

SEQ ID NO: 2348005 - RNA, 19 nt, Artificial Sequence
  Description of Artificial Sequence: Synthetic oligonucleotide
  Antisense strand to SEQ ID NO: 2348004
aauacucaggauaauaggg

SEQ ID NO: 2348006 - RNA, 19 nt, Artificial Sequence
  Description of Artificial Sequence: Synthetic oligonucleotide
  Sense strand starting at position 1792 of SEQ ID NO: 1885519
augaaaguuuauccaagug

SEQ ID NO: 2348007 - RNA, 19 nt, Artificial Sequence
  Description of Artificial Sequence: Synthetic oligonucleotide
  Antisense strand to SEQ ID NO: 2348006
cacuuggauaaacuuucau

SEQ ID NO: 2348008 - RNA, 19 nt, Artificial Sequence
  Description of Artificial Sequence: Synthetic oligonucleotide
  Sense strand starting at position 1833 of SEQ ID NO: 1885519
uuauuuaccuucuagagga

SEQ ID NO: 2348009 - RNA, 19 nt, Artificial Sequence
  Description of Artificial Sequence: Synthetic oligonucleotide
  Antisense strand to SEQ ID NO: 2348008
uccucuagaagguaaauaa

SEQ ID NO: 2348010 - RNA, 19 nt, Artificial Sequence
  Description of Artificial Sequence: Synthetic oligonucleotide
  Sense strand starting at position 1923 of SEQ ID NO: 1885519
guauguuucgugcccaugu

SEQ ID NO: 2348011 - RNA, 19 nt, Artificial Sequence
  Description of Artificial Sequence: Synthetic oligonucleotide
  Antisense strand to SEQ ID NO: 2348010
acaugggcacgaaacauac

SEQ ID NO: 2348012 - RNA, 19 nt, Artificial Sequence
  Description of Artificial Sequence: Synthetic oligonucleotide
  Sense strand starting at position 1946 of SEQ ID NO: 1885519
ugaaacagccuuugaucaa

SEQ ID NO: 2348013 - RNA, 19 nt, Artificial Sequence
  Description of Artificial Sequence: Synthetic oligonucleotide
  Antisense strand to SEQ ID NO: 2348012
uugaucaaaggcuguuuca

SEQ ID NO: 2348014 - RNA, 19 nt, Artificial Sequence
  Description of Artificial Sequence: Synthetic oligonucleotide
  Sense strand starting at position 1980 of SEQ ID NO: 1885519
auuccaaucccugggaaau

SEQ ID NO: 2348015 - RNA, 19 nt, Artificial Sequence
  Description of Artificial Sequence: Synthetic oligonucleotide
  Antisense strand to SEQ ID NO: 2348014
auuucccagggauuggaau

SEQ ID NO: 2348016 - RNA, 19 nt, Artificial Sequence
  Description of Artificial Sequence: Synthetic oligonucleotide
  Sense strand starting at position 1981 of SEQ ID NO: 1885519
uuccaaucccugggaaaug

SEQ ID NO: 2348017 - RNA, 19 nt, Artificial Sequence
  Description of Artificial Sequence: Synthetic oligonucleotide
  Antisense strand to SEQ ID NO: 2348016
cauuucccagggauuggaa

SEQ ID NO: 2348018 - RNA, 19 nt, Artificial Sequence
  Description of Artificial Sequence: Synthetic oligonucleotide
  Sense strand starting at position 1991 of SEQ ID NO: 1885519
ugggaaaugcugggccuua

SEQ ID NO: 2348019 - RNA, 19 nt, Artificial Sequence
  Description of Artificial Sequence: Synthetic oligonucleotide
  Antisense strand to SEQ ID NO: 2348018
uaaggcccagcauuuccca

SEQ ID NO: 2348020 - RNA, 19 nt, Artificial Sequence
  Description of Artificial Sequence: Synthetic oligonucleotide
  Sense strand starting at position 2358 of SEQ ID NO: 1885519
gggugaucgcucgcagcua

SEQ ID NO: 2348021 - RNA, 19 nt, Artificial Sequence
  Description of Artificial Sequence: Synthetic oligonucleotide
  Antisense strand to SEQ ID NO: 2348020
uagcugcgagcgaucaccc

SEQ ID NO: 2348022 - RNA, 19 nt, Artificial Sequence
  Description of Artificial Sequence: Synthetic oligonucleotide
  Sense strand starting at position 2482 of SEQ ID NO: 1885519
ggaagagacacacguauau

SEQ ID NO: 2348023 - RNA, 19 nt, Artificial Sequence
  Description of Artificial Sequence: Synthetic oligonucleotide
  Antisense strand to SEQ ID NO: 2348022
auauacgugugucucuucc

SEQ ID NO: 2348024 - RNA, 19 nt, Artificial Sequence
  Description of Artificial Sequence: Synthetic oligonucleotide
  Sense strand starting at position 2512 of SEQ ID NO: 1885519
ccugauuuauuucgagauu

SEQ ID NO: 2348025 - RNA, 19 nt, Artificial Sequence
  Description of Artificial Sequence: Synthetic oligonucleotide
  Antisense strand to SEQ ID NO: 2348024
aaucucgaaauaaaucagg

SEQ ID NO: 2348026 - RNA, 19 nt, Artificial Sequence
  Description of Artificial Sequence: Synthetic oligonucleotide
  Sense strand starting at position 2680 of SEQ ID NO: 1885519
ggccucaggaaucgaguaa

SEQ ID NO: 2348027 - RNA, 19 nt, Artificial Sequence
  Description of Artificial Sequence: Synthetic oligonucleotide
  Antisense strand to SEQ ID NO: 2348026
uuacucgauuccugaggcc

SEQ ID NO: 2348028 - RNA, 19 nt, Artificial Sequence
  Description of Artificial Sequence: Synthetic oligonucleotide
  Sense strand starting at position 3068 of SEQ ID NO: 1885519
aauauugacgcuuaaacga

SEQ ID NO: 2348029 - RNA, 19 nt, Artificial Sequence
  Description of Artificial Sequence: Synthetic oligonucleotide
  Antisense strand to SEQ ID NO: 2348028
ucguuuaagcgucaauauu

SEQ ID NO: 2348030 - RNA, 19 nt, Artificial Sequence
  Description of Artificial Sequence: Synthetic oligonucleotide
  Sense strand starting at position 3114 of SEQ ID NO: 1885519
ccggaaaugugagcuauug

SEQ ID NO: 2348031 - RNA, 19 nt, Artificial Sequence
  Description of Artificial Sequence: Synthetic oligonucleotide
  Antisense strand to SEQ ID NO: 2348030
caauagcucacauuuccgg

SEQ ID NO: 2348032 - RNA, 19 nt, Artificial Sequence
  Description of Artificial Sequence: Synthetic oligonucleotide
  Sense strand starting at position 3401 of SEQ ID NO: 1885519
agcgguaggaaagguuaaa

SEQ ID NO: 2348033 - RNA, 19 nt, Artificial Sequence
  Description of Artificial Sequence: Synthetic oligonucleotide
  Antisense strand to SEQ ID NO: 2348032
uuuaaccuuuccuaccgcu

SEQ ID NO: 2348034 - RNA, 19 nt, Artificial Sequence
  Description of Artificial Sequence: Synthetic oligonucleotide
  Sense strand starting at position 192 of SEQ ID NO: 1885520
gcaacuguaaugggagaga

SEQ ID NO: 2348035 - RNA, 19 nt, Artificial Sequence
  Description of Artificial Sequence: Synthetic oligonucleotide
  Antisense strand to SEQ ID NO: 2348034
ucucucccauuacaguugc

SEQ ID NO: 2348036 - RNA, 19 nt, Artificial Sequence
  Description of Artificial Sequence: Synthetic oligonucleotide
  Sense strand starting at position 223 of SEQ ID NO: 1885520
uauguuugagaaugcaaga

SEQ ID NO: 2348037 - RNA, 19 nt, Artificial Sequence
  Description of Artificial Sequence: Synthetic oligonucleotide
  Antisense strand to SEQ ID NO: 2348036
ucuugcauucucaaacaua

SEQ ID NO: 2348038 - RNA, 19 nt, Artificial Sequence
  Description of Artificial Sequence: Synthetic oligonucleotide
  Sense strand starting at position 384 of SEQ ID NO: 1885520
ggcuauugugugaguguag

SEQ ID NO: 2348039 - RNA, 19 nt, Artificial Sequence
  Description of Artificial Sequence: Synthetic oligonucleotide
  Antisense strand to SEQ ID NO: 2348038
cuacacucacacaauagcc

SEQ ID NO: 2348040 - RNA, 19 nt, Artificial Sequence
  Description of Artificial Sequence: Synthetic oligonucleotide
  Sense strand starting at position 513 of SEQ ID NO: 1885520
gguuccucuggcggagaau

SEQ ID NO: 2348041 - RNA, 19 nt, Artificial Sequence
  Description of Artificial Sequence: Synthetic oligonucleotide
  Antisense strand to SEQ ID NO: 2348040
auucuccgccagaggaacc

SEQ ID NO: 2348042 - RNA, 19 nt, Artificial Sequence
  Description of Artificial Sequence: Synthetic oligonucleotide
  Sense strand starting at position 514 of SEQ ID NO: 1885520
guuccucuggcggagaaua

SEQ ID NO: 2348043 - RNA, 19 nt, Artificial Sequence
  Description of Artificial Sequence: Synthetic oligonucleotide
  Antisense strand to SEQ ID NO: 2348042
uauucuccgccagaggaac

SEQ ID NO: 2348044 - RNA, 19 nt, Artificial Sequence
  Description of Artificial Sequence: Synthetic oligonucleotide
  Sense strand starting at position 645 of SEQ ID NO: 1885520
gaaucucuggcgugagacu

SEQ ID NO: 2348045 - RNA, 19 nt, Artificial Sequence
  Description of Artificial Sequence: Synthetic oligonucleotide
  Antisense strand to SEQ ID NO: 2348044
agucucacgccagagauuc

SEQ ID NO: 2348046 - RNA, 19 nt, Artificial Sequence
  Description of Artificial Sequence: Synthetic oligonucleotide
  Sense strand starting at position 727 of SEQ ID NO: 1885520
gcaucaagugcucaguaau

SEQ ID NO: 2348047 - RNA, 19 nt, Artificial Sequence
  Description of Artificial Sequence: Synthetic oligonucleotide
  Antisense strand to SEQ ID NO: 2348046
auuacugagcacuugaugc

SEQ ID NO: 2348048 - RNA, 19 nt, Artificial Sequence
  Description of Artificial Sequence: Synthetic oligonucleotide
  Sense strand starting at position 730 of SEQ ID NO: 1885520
ucaagugcucaguaaucaa

SEQ ID NO: 2348049 - RNA, 19 nt, Artificial Sequence
  Description of Artificial Sequence: Synthetic oligonucleotide
  Antisense strand to SEQ ID NO: 2348048
uugauuacugagcacuuga

SEQ ID NO: 2348050 - RNA, 19 nt, Artificial Sequence
  Description of Artificial Sequence: Synthetic oligonucleotide
  Sense strand starting at position 758 of SEQ ID NO: 1885520
gcuggaugaccucaggcua

SEQ ID NO: 2348051 - RNA, 19 nt, Artificial Sequence
  Description of Artificial Sequence: Synthetic oligonucleotide
  Antisense strand to SEQ ID NO: 2348050
uagccugaggucauccagc

SEQ ID NO: 2348052 - RNA, 19 nt, Artificial Sequence
  Description of Artificial Sequence: Synthetic oligonucleotide
  Sense strand starting at position 793 of SEQ ID NO: 1885520
uccuaauugucuccagaug

SEQ ID NO: 2348053 - RNA, 19 nt, Artificial Sequence
  Description of Artificial Sequence: Synthetic oligonucleotide
  Antisense strand to SEQ ID NO: 2348052
caucuggagacaauuagga

SEQ ID NO: 2348054 - RNA, 19 nt, Artificial Sequence
  Description of Artificial Sequence: Synthetic oligonucleotide
  Sense strand starting at position 854 of SEQ ID NO: 1885520
gucugaaaggcacaucuuu

SEQ ID NO: 2348055 - RNA, 19 nt, Artificial Sequence
  Description of Artificial Sequence: Synthetic oligonucleotide
  Antisense strand to SEQ ID NO: 2348054
aaagaugugccuuucagac

SEQ ID NO: 2348056 - RNA, 19 nt, Artificial Sequence
  Description of Artificial Sequence: Synthetic oligonucleotide
  Sense strand starting at position 862 of SEQ ID NO: 1885520
ggcacaucuuugcugaaga

SEQ ID NO: 2348057 - RNA, 19 nt, Artificial Sequence
  Description of Artificial Sequence: Synthetic oligonucleotide
  Antisense strand to SEQ ID NO: 2348056
ucuucagcaaagaugugcc

SEQ ID NO: 2348058 - RNA, 19 nt, Artificial Sequence
  Description of Artificial Sequence: Synthetic oligonucleotide
  Sense strand starting at position 873 of SEQ ID NO: 1885520
gcugaagacuugucaccug

SEQ ID NO: 2348059 - RNA, 19 nt, Artificial Sequence
  Description of Artificial Sequence: Synthetic oligonucleotide
  Antisense strand to SEQ ID NO: 2348058
caggugacaagucuucagc

SEQ ID NO: 2348060 - RNA, 19 nt, Artificial Sequence
  Description of Artificial Sequence: Synthetic oligonucleotide
  Sense strand starting at position 1033 of SEQ ID NO: 1885520
uagaaagcuuucuccaggu

SEQ ID NO: 2348061 - RNA, 19 nt, Artificial Sequence
  Description of Artificial Sequence: Synthetic oligonucleotide
  Antisense strand to SEQ ID NO: 2348060
accuggagaaagcuuucua

SEQ ID NO: 2348062 - RNA, 19 nt, Artificial Sequence
  Description of Artificial Sequence: Synthetic oligonucleotide
  Sense strand starting at position 1035 of SEQ ID NO: 1885520
gaaagcuuucuccaggucu

SEQ ID NO: 2348063 - RNA, 19 nt, Artificial Sequence
  Description of Artificial Sequence: Synthetic oligonucleotide
  Antisense strand to SEQ ID NO: 2348062
agaccuggagaaagcuuuc

SEQ ID NO: 2348064 - RNA, 19 nt, Artificial Sequence
  Description of Artificial Sequence: Synthetic oligonucleotide
  Sense strand starting at position 1138 of SEQ ID NO: 1885520
gggcuucuccucuguagag

SEQ ID NO: 2348065 - RNA, 19 nt, Artificial Sequence
  Description of Artificial Sequence: Synthetic oligonucleotide
  Antisense strand to SEQ ID NO: 2348064
cucuacagaggagaagccc

SEQ ID NO: 2348066 - RNA, 19 nt, Artificial Sequence
  Description of Artificial Sequence: Synthetic oligonucleotide
  Sense strand starting at position 1177 of SEQ ID NO: 1885520
cugggaguaaugugcaauc

SEQ ID NO: 2348067 - RNA, 19 nt, Artificial Sequence
  Description of Artificial Sequence: Synthetic oligonucleotide
  Antisense strand to SEQ ID NO: 2348066
gauugcacauuacucccag

SEQ ID NO: 2348068 - RNA, 19 nt, Artificial Sequence
  Description of Artificial Sequence: Synthetic oligonucleotide
  Sense strand starting at position 1179 of SEQ ID NO: 1885520
gggaguaaugugcaaucac

SEQ ID NO: 2348069 - RNA, 19 nt, Artificial Sequence
  Description of Artificial Sequence: Synthetic oligonucleotide
  Antisense strand to SEQ ID NO: 2348068
gugauugcacauuacuccc

SEQ ID NO: 2348070 - RNA, 19 nt, Artificial Sequence
  Description of Artificial Sequence: Synthetic oligonucleotide
  Sense strand starting at position 1288 of SEQ ID NO: 1885520
ggugcuauuauuuggaggu

SEQ ID NO: 2348071 - RNA, 19 nt, Artificial Sequence
  Description of Artificial Sequence: Synthetic oligonucleotide
  Antisense strand to SEQ ID NO: 2348070
accuccaaauaauagcacc

SEQ ID NO: 2348072 - RNA, 19 nt, Artificial Sequence
  Description of Artificial Sequence: Synthetic oligonucleotide
  Sense strand starting at position 1480 of SEQ ID NO: 1885520
gugccucuugucuuguaau

SEQ ID NO: 2348073 - RNA, 19 nt, Artificial Sequence
  Description of Artificial Sequence: Synthetic oligonucleotide
  Antisense strand to SEQ ID NO: 2348072
auuacaagacaagaggcac

SEQ ID NO: 2348074 - RNA, 19 nt, Artificial Sequence
  Description of Artificial Sequence: Synthetic oligonucleotide
  Sense strand starting at position 2136 of SEQ ID NO: 1885520
uuuguuugcaguggaaaca

SEQ ID NO: 2348075 - RNA, 19 nt, Artificial Sequence
  Description of Artificial Sequence: Synthetic oligonucleotide
  Antisense strand to SEQ ID NO: 2348074
uguuuccacugcaaacaaa

SEQ ID NO: 2348076 - RNA, 19 nt, Artificial Sequence
  Description of Artificial Sequence: Synthetic oligonucleotide
  Sense strand starting at position 2737 of SEQ ID NO: 1885520
ggaacagaguugguauugu

SEQ ID NO: 2348077 - RNA, 19 nt, Artificial Sequence
  Description of Artificial Sequence: Synthetic oligonucleotide
  Antisense strand to SEQ ID NO: 2348076
acaauaccaacucuguucc

SEQ ID NO: 2348078 - RNA, 19 nt, Artificial Sequence
  Description of Artificial Sequence: Synthetic oligonucleotide
  Sense strand starting at position 2946 of SEQ ID NO: 1885520
cuccuugggcccuggauaa

SEQ ID NO: 2348079 - RNA, 19 nt, Artificial Sequence
  Description of Artificial Sequence: Synthetic oligonucleotide
  Antisense strand to SEQ ID NO: 2348078
uuauccagggcccaaggag

SEQ ID NO: 2348080 - RNA, 19 nt, Artificial Sequence
  Description of Artificial Sequence: Synthetic oligonucleotide
  Sense strand starting at position 3337 of SEQ ID NO: 1885520
ccaguaaugucuuugucag

SEQ ID NO: 2348081 - RNA, 19 nt, Artificial Sequence
  Description of Artificial Sequence: Synthetic oligonucleotide
  Antisense strand to SEQ ID NO: 2348080
cugacaaagacauuacugg

SEQ ID NO: 2348082 - RNA, 19 nt, Artificial Sequence
  Description of Artificial Sequence: Synthetic oligonucleotide
  Sense strand starting at position 3343 of SEQ ID NO: 1885520
augucuuugucaguuauuu

SEQ ID NO: 2348083 - RNA, 19 nt, Artificial Sequence
  Description of Artificial Sequence: Synthetic oligonucleotide
  Antisense strand to SEQ ID NO: 2348082
aaauaacugacaaagacau

SEQ ID NO: 2348084 - RNA, 19 nt, Artificial Sequence
  Description of Artificial Sequence: Synthetic oligonucleotide
  Sense strand starting at position 3351 of SEQ ID NO: 1885520
gucaguuauuuggagaccu

SEQ ID NO: 2348085 - RNA, 19 nt, Artificial Sequence
  Description of Artificial Sequence: Synthetic oligonucleotide
  Antisense strand to SEQ ID NO: 2348084
aggucuccaaauaacugac

SEQ ID NO: 2348086 - RNA, 19 nt, Artificial Sequence
  Description of Artificial Sequence: Synthetic oligonucleotide
  Sense strand starting at position 3361 of SEQ ID NO: 1885520
uggagaccuucuguuuacu

SEQ ID NO: 2348087 - RNA, 19 nt, Artificial Sequence
  Description of Artificial Sequence: Synthetic oligonucleotide
  Antisense strand to SEQ ID NO: 2348086
aguaaacagaaggucucca

SEQ ID NO: 2348088 - RNA, 19 nt, Artificial Sequence
  Description of Artificial Sequence: Synthetic oligonucleotide
  Sense strand starting at position 3370 of SEQ ID NO: 1885520
ucuguuuacuaggcgagaa

SEQ ID NO: 2348089 - RNA, 19 nt, Artificial Sequence
  Description of Artificial Sequence: Synthetic oligonucleotide
  Antisense strand to SEQ ID NO: 2348088
uucucgccuaguaaacaga

SEQ ID NO: 2348090 - RNA, 19 nt, Artificial Sequence
  Description of Artificial Sequence: Synthetic oligonucleotide
  Sense strand starting at position 3371 of SEQ ID NO: 1885520
cuguuuacuaggcgagaaa

SEQ ID NO: 2348091 - RNA, 19 nt, Artificial Sequence
  Description of Artificial Sequence: Synthetic oligonucleotide
  Antisense strand to SEQ ID NO: 2348090
uuucucgccuaguaaacag

SEQ ID NO: 2348092 - RNA, 19 nt, Artificial Sequence
  Description of Artificial Sequence: Synthetic oligonucleotide
  Sense strand starting at position 3372 of SEQ ID NO: 1885520
uguuuacuaggcgagaaac

SEQ ID NO: 2348093 - RNA, 19 nt, Artificial Sequence
  Description of Artificial Sequence: Synthetic oligonucleotide
  Antisense strand to SEQ ID NO: 2348092
guuucucgccuaguaaaca

SEQ ID NO: 2348094 - RNA, 19 nt, Artificial Sequence
  Description of Artificial Sequence: Synthetic oligonucleotide
  Sense strand starting at position 3374 of SEQ ID NO: 1885520
uuuacuaggcgagaaacua

SEQ ID NO: 2348095 - RNA, 19 nt, Artificial Sequence
  Description of Artificial Sequence: Synthetic oligonucleotide
  Antisense strand to SEQ ID NO: 2348094
uaguuucucgccuaguaaa

SEQ ID NO: 2348096 - RNA, 19 nt, Artificial Sequence
  Description of Artificial Sequence: Synthetic oligonucleotide
  Sense strand starting at position 3382 of SEQ ID NO: 1885520
gcgagaaacuaagcuuucu

SEQ ID NO: 2348097 - RNA, 19 nt, Artificial Sequence
  Description of Artificial Sequence: Synthetic oligonucleotide
  Antisense strand to SEQ ID NO: 2348096
agaaagcuuaguuucucgc

SEQ ID NO: 2348098 - RNA, 19 nt, Artificial Sequence
  Description of Artificial Sequence: Synthetic oligonucleotide
  Sense strand starting at position 3523 of SEQ ID NO: 1885520
ggaggucaccagugaauaa

SEQ ID NO: 2348099 - RNA, 19 nt, Artificial Sequence
  Description of Artificial Sequence: Synthetic oligonucleotide
  Antisense strand to SEQ ID NO: 2348098
uuauucacuggugaccucc

SEQ ID NO: 2348100 - RNA, 19 nt, Artificial Sequence
  Description of Artificial Sequence: Synthetic oligonucleotide
  Sense strand starting at position 3534 of SEQ ID NO: 1885520
gugaauaacuauuugcgua

SEQ ID NO: 2348101 - RNA, 19 nt, Artificial Sequence
  Description of Artificial Sequence: Synthetic oligonucleotide
  Antisense strand to SEQ ID NO: 2348100
uacgcaaauaguuauucac

SEQ ID NO: 2348102 - RNA, 19 nt, Artificial Sequence
  Description of Artificial Sequence: Synthetic oligonucleotide
  Sense strand starting at position 3566 of SEQ ID NO: 1885520
ccuuguuggcagcagauua

SEQ ID NO: 2348103 - RNA, 19 nt, Artificial Sequence
  Description of Artificial Sequence: Synthetic oligonucleotide
  Antisense strand to SEQ ID NO: 2348102
uaaucugcugccaacaagg

SEQ ID NO: 2348104 - RNA, 19 nt, Artificial Sequence
  Description of Artificial Sequence: Synthetic oligonucleotide
  Sense strand starting at position 3661 of SEQ ID NO: 1885520
uggcgaaaucuguaguuag

SEQ ID NO: 2348105 - RNA, 19 nt, Artificial Sequence
  Description of Artificial Sequence: Synthetic oligonucleotide
  Antisense strand to SEQ ID NO: 2348104
cuaacuacagauuucgcca

SEQ ID NO: 2348106 - RNA, 19 nt, Artificial Sequence
  Description of Artificial Sequence: Synthetic oligonucleotide
  Sense strand starting at position 3664 of SEQ ID NO: 1885520
cgaaaucuguaguuagagu

SEQ ID NO: 2348107 - RNA, 19 nt, Artificial Sequence
  Description of Artificial Sequence: Synthetic oligonucleotide
  Antisense strand to SEQ ID NO: 2348106
acucuaacuacagauuucg

SEQ ID NO: 2348108 - RNA, 19 nt, Artificial Sequence
  Description of Artificial Sequence: Synthetic oligonucleotide
  Sense strand starting at position 3841 of SEQ ID NO: 1885520
ugcagugagugguuggaga

SEQ ID NO: 2348109 - RNA, 19 nt, Artificial Sequence
  Description of Artificial Sequence: Synthetic oligonucleotide
  Antisense strand to SEQ ID NO: 2348108
ucuccaaccacucacugca

SEQ ID NO: 2348110 - RNA, 19 nt, Artificial Sequence
  Description of Artificial Sequence: Synthetic oligonucleotide
  Sense strand starting at position 3843 of SEQ ID NO: 1885520
cagugagugguuggagagu

SEQ ID NO: 2348111 - RNA, 19 nt, Artificial Sequence
  Description of Artificial Sequence: Synthetic oligonucleotide
  Antisense strand to SEQ ID NO: 2348110
acucuccaaccacucacug

SEQ ID NO: 2348112 - RNA, 19 nt, Artificial Sequence
  Description of Artificial Sequence: Synthetic oligonucleotide
  Sense strand starting at position 3916 of SEQ ID NO: 1885520
cccucucuucgugacaaug

SEQ ID NO: 2348113 - RNA, 19 nt, Artificial Sequence
  Description of Artificial Sequence: Synthetic oligonucleotide
  Antisense strand to SEQ ID NO: 2348112
cauugucacgaagagaggg

SEQ ID NO: 2348114 - RNA, 19 nt, Artificial Sequence
  Description of Artificial Sequence: Synthetic oligonucleotide
  Sense strand starting at position 6 of SEQ ID NO: 1885521
caaagagaguuaguuucuu

SEQ ID NO: 2348115 - RNA, 19 nt, Artificial Sequence
  Description of Artificial Sequence: Synthetic oligonucleotide
  Antisense strand to SEQ ID NO: 2348114
aagaaacuaacucucuuug

SEQ ID NO: 2348116 - RNA, 19 nt, Artificial Sequence
  Description of Artificial Sequence: Synthetic oligonucleotide
  Sense strand starting at position 10 of SEQ ID NO: 1885521
gagaguuaguuucuucuuu

SEQ ID NO: 2348117 - RNA, 19 nt, Artificial Sequence
  Description of Artificial Sequence: Synthetic oligonucleotide
  Antisense strand to SEQ ID NO: 2348116
aaagaagaaacuaacucuc

SEQ ID NO: 2348118 - RNA, 19 nt, Artificial Sequence
  Description of Artificial Sequence: Synthetic oligonucleotide
  Sense strand starting at position 175 of SEQ ID NO: 1885521
uuggucaccucucuucgaa

SEQ ID NO: 2348119 - RNA, 19 nt, Artificial Sequence
  Description of Artificial Sequence: Synthetic oligonucleotide
  Antisense strand to SEQ ID NO: 2348118
uucgaagagaggugaccaa

SEQ ID NO: 2348120 - RNA, 19 nt, Artificial Sequence
  Description of Artificial Sequence: Synthetic oligonucleotide
  Sense strand starting at position 177 of SEQ ID NO: 1885521
ggucaccucucuucgaaag

SEQ ID NO: 2348121 - RNA, 19 nt, Artificial Sequence
  Description of Artificial Sequence: Synthetic oligonucleotide
  Antisense strand to SEQ ID NO: 2348120
cuuucgaagagaggugacc

SEQ ID NO: 2348122 - RNA, 19 nt, Artificial Sequence
  Description of Artificial Sequence: Synthetic oligonucleotide
  Sense strand starting at position 198 of SEQ ID NO: 1885521
ugcauuugcuagguugcaa

SEQ ID NO: 2348123 - RNA, 19 nt, Artificial Sequence
  Description of Artificial Sequence: Synthetic oligonucleotide
  Antisense strand to SEQ ID NO: 2348122
uugcaaccuagcaaaugca

SEQ ID NO: 2348124 - RNA, 19 nt, Artificial Sequence
  Description of Artificial Sequence: Synthetic oligonucleotide
  Sense strand starting at position 365 of SEQ ID NO: 1885521
auuaaucaccguugugauu

SEQ ID NO: 2348125 - RNA, 19 nt, Artificial Sequence
  Description of Artificial Sequence: Synthetic oligonucleotide
  Antisense strand to SEQ ID NO: 2348124
aaucacaacggugauuaau

SEQ ID NO: 2348126 - RNA, 19 nt, Artificial Sequence
  Description of Artificial Sequence: Synthetic oligonucleotide
  Sense strand starting at position 384 of SEQ ID NO: 1885521
gcacgugugaauuaugaag

SEQ ID NO: 2348127 - RNA, 19 nt, Artificial Sequence
  Description of Artificial Sequence: Synthetic oligonucleotide
  Antisense strand to SEQ ID NO: 2348126
cuucauaauucacacgugc

SEQ ID NO: 2348128 - RNA, 19 nt, Artificial Sequence
  Description of Artificial Sequence: Synthetic oligonucleotide
  Sense strand starting at position 390 of SEQ ID NO: 1885521
gugaauuaugaaggaguua

SEQ ID NO: 2348129 - RNA, 19 nt, Artificial Sequence
  Description of Artificial Sequence: Synthetic oligonucleotide
  Antisense strand to SEQ ID NO: 2348128
uaacuccuucauaauucac

SEQ ID NO: 2348130 - RNA, 19 nt, Artificial Sequence
  Description of Artificial Sequence: Synthetic oligonucleotide
  Sense strand starting at position 523 of SEQ ID NO: 1885521
ccacauuauccaggguaag

SEQ ID NO: 2348131 - RNA, 19 nt, Artificial Sequence
  Description of Artificial Sequence: Synthetic oligonucleotide
  Antisense strand to SEQ ID NO: 2348130
cuuacccuggauaaugugg

SEQ ID NO: 2348132 - RNA, 19 nt, Artificial Sequence
  Description of Artificial Sequence: Synthetic oligonucleotide
  Sense strand starting at position 524 of SEQ ID NO: 1885521
cacauuauccaggguaaga

SEQ ID NO: 2348133 - RNA, 19 nt, Artificial Sequence
  Description of Artificial Sequence: Synthetic oligonucleotide
  Antisense strand to SEQ ID NO: 2348132
ucuuacccuggauaaugug

SEQ ID NO: 2348134 - RNA, 19 nt, Artificial Sequence
  Description of Artificial Sequence: Synthetic oligonucleotide
  Sense strand starting at position 535 of SEQ ID NO: 1885521
ggguaagaaugacuuccua

SEQ ID NO: 2348135 - RNA, 19 nt, Artificial Sequence
  Description of Artificial Sequence: Synthetic oligonucleotide
  Antisense strand to SEQ ID NO: 2348134
uaggaagucauucuuaccc

SEQ ID NO: 2348136 - RNA, 19 nt, Artificial Sequence
  Description of Artificial Sequence: Synthetic oligonucleotide
  Sense strand starting at position 563 of SEQ ID NO: 1885521
aggagugugagguguuuga

SEQ ID NO: 2348137 - RNA, 19 nt, Artificial Sequence
  Description of Artificial Sequence: Synthetic oligonucleotide
  Antisense strand to SEQ ID NO: 2348136
ucaaacaccucacacuccu

SEQ ID NO: 2348138 - RNA, 19 nt, Artificial Sequence
  Description of Artificial Sequence: Synthetic oligonucleotide
  Sense strand starting at position 2032 of SEQ ID NO: 1885521
guucuacaaugugcuaaau

SEQ ID NO: 2348139 - RNA, 19 nt, Artificial Sequence
  Description of Artificial Sequence: Synthetic oligonucleotide
  Antisense strand to SEQ ID NO: 2348138
auuuagcacauuguagaac

SEQ ID NO: 2348140 - RNA, 19 nt, Artificial Sequence
  Description of Artificial Sequence: Synthetic oligonucleotide
  Sense strand starting at position 2185 of SEQ ID NO: 1885521
uacgaugucagcgauggaa

SEQ ID NO: 2348141 - RNA, 19 nt, Artificial Sequence
  Description of Artificial Sequence: Synthetic oligonucleotide
  Antisense strand to SEQ ID NO: 2348140
uuccaucgcugacaucgua

SEQ ID NO: 2348142 - RNA, 19 nt, Artificial Sequence
  Description of Artificial Sequence: Synthetic oligonucleotide
  Sense strand starting at position 2201 of SEQ ID NO: 1885521
gaauuugcuuccgugagac

SEQ ID NO: 2348143 - RNA, 19 nt, Artificial Sequence
  Description of Artificial Sequence: Synthetic oligonucleotide
  Antisense strand to SEQ ID NO: 2348142
gucucacggaagcaaauuc

SEQ ID NO: 2348144 - RNA, 19 nt, Artificial Sequence
  Description of Artificial Sequence: Synthetic oligonucleotide
  Sense strand starting at position 2261 of SEQ ID NO: 1885521
acuucagagcgaggaguuu

SEQ ID NO: 2348145 - RNA, 19 nt, Artificial Sequence
  Description of Artificial Sequence: Synthetic oligonucleotide
  Antisense strand to SEQ ID NO: 2348144
aaacuccucgcucugaagu

SEQ ID NO: 2348146 - RNA, 19 nt, Artificial Sequence
  Description of Artificial Sequence: Synthetic oligonucleotide
  Sense strand starting at position 2307 of SEQ ID NO: 1885521
cccaguucugcugaaugaa

SEQ ID NO: 2348147 - RNA, 19 nt, Artificial Sequence
  Description of Artificial Sequence: Synthetic oligonucleotide
  Antisense strand to SEQ ID NO: 2348146
uucauucagcagaacuggg

SEQ ID NO: 2348148 - RNA, 19 nt, Artificial Sequence
  Description of Artificial Sequence: Synthetic oligonucleotide
  Sense strand starting at position 2477 of SEQ ID NO: 1885521
guuagagaccaucgguauc

SEQ ID NO: 2348149 - RNA, 19 nt, Artificial Sequence
  Description of Artificial Sequence: Synthetic oligonucleotide
  Antisense strand to SEQ ID NO: 2348148
gauaccgauggucucuaac

SEQ ID NO: 2348150 - RNA, 19 nt, Artificial Sequence
  Description of Artificial Sequence: Synthetic oligonucleotide
  Sense strand starting at position 2612 of SEQ ID NO: 1885521
ugcugacuuguacauacuu

SEQ ID NO: 2348151 - RNA, 19 nt, Artificial Sequence
  Description of Artificial Sequence: Synthetic oligonucleotide
  Antisense strand to SEQ ID NO: 2348150
aaguauguacaagucagca

SEQ ID NO: 2348152 - RNA, 19 nt, Artificial Sequence
  Description of Artificial Sequence: Synthetic oligonucleotide
  Sense strand starting at position 2660 of SEQ ID NO: 1885521
uguguuuggcuauaacaau

SEQ ID NO: 2348153 - RNA, 19 nt, Artificial Sequence
  Description of Artificial Sequence: Synthetic oligonucleotide
  Antisense strand to SEQ ID NO: 2348152
auuguuauagccaaacaca

SEQ ID NO: 2348154 - RNA, 19 nt, Artificial Sequence
  Description of Artificial Sequence: Synthetic oligonucleotide
  Sense strand starting at position 2666 of SEQ ID NO: 1885521
uggcuauaacaaugaguug

SEQ ID NO: 2348155 - RNA, 19 nt, Artificial Sequence
  Description of Artificial Sequence: Synthetic oligonucleotide
  Antisense strand to SEQ ID NO: 2348154
caacucauuguuauagcca

SEQ ID NO: 2348156 - RNA, 19 nt, Artificial Sequence
  Description of Artificial Sequence: Synthetic oligonucleotide
  Sense strand starting at position 2728 of SEQ ID NO: 1885521
aggaccugccuuugguaaa

SEQ ID NO: 2348157 - RNA, 19 nt, Artificial Sequence
  Description of Artificial Sequence: Synthetic oligonucleotide
  Antisense strand to SEQ ID NO: 2348156
uuuaccaaaggcagguccu

SEQ ID NO: 2348158 - RNA, 19 nt, Artificial Sequence
  Description of Artificial Sequence: Synthetic oligonucleotide
  Sense strand starting at position 2776 of SEQ ID NO: 1885521
cgucgcuugaguuuauuau

SEQ ID NO: 2348159 - RNA, 19 nt, Artificial Sequence
  Description of Artificial Sequence: Synthetic oligonucleotide
  Antisense strand to SEQ ID NO: 2348158
auaauaaacucaagcgacg

SEQ ID NO: 2348160 - RNA, 19 nt, Artificial Sequence
  Description of Artificial Sequence: Synthetic oligonucleotide
  Sense strand starting at position 2923 of SEQ ID NO: 1885521
cugugagccuacccagaua

SEQ ID NO: 2348161 - RNA, 19 nt, Artificial Sequence
  Description of Artificial Sequence: Synthetic oligonucleotide
  Antisense strand to SEQ ID NO: 2348160
uaucuggguaggcucacag

SEQ ID NO: 2348162 - RNA, 19 nt, Artificial Sequence
  Description of Artificial Sequence: Synthetic oligonucleotide
  Sense strand starting at position 2957 of SEQ ID NO: 1885521
gucaucuuagagugaucuu

SEQ ID NO: 2348163 - RNA, 19 nt, Artificial Sequence
  Description of Artificial Sequence: Synthetic oligonucleotide
  Antisense strand to SEQ ID NO: 2348162
aagaucacucuaagaugac

SEQ ID NO: 2348164 - RNA, 19 nt, Artificial Sequence
  Description of Artificial Sequence: Synthetic oligonucleotide
  Sense strand starting at position 2960 of SEQ ID NO: 1885521
aucuuagagugaucuuaac

SEQ ID NO: 2348165 - RNA, 19 nt, Artificial Sequence
  Description of Artificial Sequence: Synthetic oligonucleotide
  Antisense strand to SEQ ID NO: 2348164
guuaagaucacucuaagau

SEQ ID NO: 2348166 - RNA, 19 nt, Artificial Sequence
  Description of Artificial Sequence: Synthetic oligonucleotide
  Sense strand starting at position 2966 of SEQ ID NO: 1885521
gagugaucuuaacuaugau

SEQ ID NO: 2348167 - RNA, 19 nt, Artificial Sequence
  Description of Artificial Sequence: Synthetic oligonucleotide
  Antisense strand to SEQ ID NO: 2348166
aucauaguuaagaucacuc

SEQ ID NO: 2348168 - RNA, 19 nt, Artificial Sequence
  Description of Artificial Sequence: Synthetic oligonucleotide
  Sense strand starting at position 3076 of SEQ ID NO: 1885521
gcaguuuaugaaggagaaa

SEQ ID NO: 2348169 - RNA, 19 nt, Artificial Sequence
  Description of Artificial Sequence: Synthetic oligonucleotide
  Antisense strand to SEQ ID NO: 2348168
uuucuccuucauaaacugc

SEQ ID NO: 2348170 - RNA, 19 nt, Artificial Sequence
  Description of Artificial Sequence: Synthetic oligonucleotide
  Sense strand starting at position 3092 of SEQ ID NO: 1885521
aaacuuugagucugaguua

SEQ ID NO: 2348171 - RNA, 19 nt, Artificial Sequence
  Description of Artificial Sequence: Synthetic oligonucleotide
  Antisense strand to SEQ ID NO: 2348170
uaacucagacucaaaguuu

SEQ ID NO: 2348172 - RNA, 19 nt, Artificial Sequence
  Description of Artificial Sequence: Synthetic oligonucleotide
  Sense strand starting at position 3097 of SEQ ID NO: 1885521
uugagucugaguuagcuuu

SEQ ID NO: 2348173 - RNA, 19 nt, Artificial Sequence
  Description of Artificial Sequence: Synthetic oligonucleotide
  Antisense strand to SEQ ID NO: 2348172
aaagcuaacucagacucaa

SEQ ID NO: 2348174 - RNA, 19 nt, Artificial Sequence
  Description of Artificial Sequence: Synthetic oligonucleotide
  Sense strand starting at position 3115 of SEQ ID NO: 1885521
ucaucagagucaguauaga

SEQ ID NO: 2348175 - RNA, 19 nt, Artificial Sequence
  Description of Artificial Sequence: Synthetic oligonucleotide
  Antisense strand to SEQ ID NO: 2348174
ucuauacugacucugauga

SEQ ID NO: 2348176 - RNA, 19 nt, Artificial Sequence
  Description of Artificial Sequence: Synthetic oligonucleotide
  Sense strand starting at position 3417 of SEQ ID NO: 1885521
cuagauaagcuuggagguu

SEQ ID NO: 2348177 - RNA, 19 nt, Artificial Sequence
  Description of Artificial Sequence: Synthetic oligonucleotide
  Antisense strand to SEQ ID NO: 2348176
aaccuccaagcuuaucuag

SEQ ID NO: 2348178 - RNA, 19 nt, Artificial Sequence
  Description of Artificial Sequence: Synthetic oligonucleotide
  Sense strand starting at position 3539 of SEQ ID NO: 1885521
uguaaagugguaggaaauc

SEQ ID NO: 2348179 - RNA, 19 nt, Artificial Sequence
  Description of Artificial Sequence: Synthetic oligonucleotide
  Antisense strand to SEQ ID NO: 2348178
gauuuccuaccacuuuaca

SEQ ID NO: 2348180 - RNA, 19 nt, Artificial Sequence
  Description of Artificial Sequence: Synthetic oligonucleotide
  Sense strand starting at position 3551 of SEQ ID NO: 1885521
ggaaauccuucugcuaaga

SEQ ID NO: 2348181 - RNA, 19 nt, Artificial Sequence
  Description of Artificial Sequence: Synthetic oligonucleotide
  Antisense strand to SEQ ID NO: 2348180
ucuuagcagaaggauuucc

SEQ ID NO: 2348182 - RNA, 19 nt, Artificial Sequence
  Description of Artificial Sequence: Synthetic oligonucleotide
  Sense strand starting at position 3561 of SEQ ID NO: 1885521
cugcuaagagcugauaaca

SEQ ID NO: 2348183 - RNA, 19 nt, Artificial Sequence
  Description of Artificial Sequence: Synthetic oligonucleotide
  Antisense strand to SEQ ID NO: 2348182
uguuaucagcucuuagcag

SEQ ID NO: 2348184 - RNA, 19 nt, Artificial Sequence
  Description of Artificial Sequence: Synthetic oligonucleotide
  Sense strand starting at position 3614 of SEQ ID NO: 1885521
uugagaugguggagugaaa

SEQ ID NO: 2348185 - RNA, 19 nt, Artificial Sequence
  Description of Artificial Sequence: Synthetic oligonucleotide
  Antisense strand to SEQ ID NO: 2348184
uuucacuccaccaucucaa

SEQ ID NO: 2348186 - RNA, 19 nt, Artificial Sequence
  Description of Artificial Sequence: Synthetic oligonucleotide
  Sense strand starting at position 3712 of SEQ ID NO: 1885521
cccuguuuccuggguagaa

SEQ ID NO: 2348187 - RNA, 19 nt, Artificial Sequence
  Description of Artificial Sequence: Synthetic oligonucleotide
  Antisense strand to SEQ ID NO: 2348186
uucuacccaggaaacaggg

SEQ ID NO: 2348188 - RNA, 19 nt, Artificial Sequence
  Description of Artificial Sequence: Synthetic oligonucleotide
  Sense strand starting at position 3713 of SEQ ID NO: 1885521
ccuguuuccuggguagaag

SEQ ID NO: 2348189 - RNA, 19 nt, Artificial Sequence
  Description of Artificial Sequence: Synthetic oligonucleotide
  Antisense strand to SEQ ID NO: 2348188
cuucuacccaggaaacagg

SEQ ID NO: 2348190 - RNA, 19 nt, Artificial Sequence
  Description of Artificial Sequence: Synthetic oligonucleotide
  Sense strand starting at position 3863 of SEQ ID NO: 1885521
acgaauauguccuuauuag

SEQ ID NO: 2348191 - RNA, 19 nt, Artificial Sequence
  Description of Artificial Sequence: Synthetic oligonucleotide
  Antisense strand to SEQ ID NO: 2348190
cuaauaaggacauauucgu

SEQ ID NO: 2348192 - RNA, 19 nt, Artificial Sequence
  Description of Artificial Sequence: Synthetic oligonucleotide
  Sense strand starting at position 3864 of SEQ ID NO: 1885521
cgaauauguccuuauuaga

SEQ ID NO: 2348193 - RNA, 19 nt, Artificial Sequence
  Description of Artificial Sequence: Synthetic oligonucleotide
  Antisense strand to SEQ ID NO: 2348192
ucuaauaaggacauauucg

SEQ ID NO: 2348194 - RNA, 19 nt, Artificial Sequence
  Description of Artificial Sequence: Synthetic oligonucleotide
  Sense strand starting at position 65 of SEQ ID NO: 1885522
agucccgugguguaaucau

SEQ ID NO: 2348195 - RNA, 19 nt, Artificial Sequence
  Description of Artificial Sequence: Synthetic oligonucleotide
  Antisense strand to SEQ ID NO: 2348194
augauuacaccacgggacu

SEQ ID NO: 2348196 - RNA, 19 nt, Artificial Sequence
  Description of Artificial Sequence: Synthetic oligonucleotide
  Sense strand starting at position 306 of SEQ ID NO: 1885522
aaaggcagucauugaaaca

SEQ ID NO: 2348197 - RNA, 19 nt, Artificial Sequence
  Description of Artificial Sequence: Synthetic oligonucleotide
  Antisense strand to SEQ ID NO: 2348196
uguuucaaugacugccuuu

SEQ ID NO: 2348198 - RNA, 19 nt, Artificial Sequence
  Description of Artificial Sequence: Synthetic oligonucleotide
  Sense strand starting at position 343 of SEQ ID NO: 1885522
gcaucauggaguuaugacu

SEQ ID NO: 2348199 - RNA, 19 nt, Artificial Sequence
  Description of Artificial Sequence: Synthetic oligonucleotide
  Antisense strand to SEQ ID NO: 2348198
agucauaacuccaugaugc

SEQ ID NO: 2348200 - RNA, 19 nt, Artificial Sequence
  Description of Artificial Sequence: Synthetic oligonucleotide
  Sense strand starting at position 372 of SEQ ID NO: 1885522
aguacaguauccuuagaaa

SEQ ID NO: 2348201 - RNA, 19 nt, Artificial Sequence
  Description of Artificial Sequence: Synthetic oligonucleotide
  Antisense strand to SEQ ID NO: 2348200
uuucuaaggauacuguacu

SEQ ID NO: 2348202 - RNA, 19 nt, Artificial Sequence
  Description of Artificial Sequence: Synthetic oligonucleotide
  Sense strand starting at position 375 of SEQ ID NO: 1885522
acaguauccuuagaaacug

SEQ ID NO: 2348203 - RNA, 19 nt, Artificial Sequence
  Description of Artificial Sequence: Synthetic oligonucleotide
  Antisense strand to SEQ ID NO: 2348202
caguuucuaaggauacugu

SEQ ID NO: 2348204 - RNA, 19 nt, Artificial Sequence
  Description of Artificial Sequence: Synthetic oligonucleotide
  Sense strand starting at position 407 of SEQ ID NO: 1885522
gaaauaaguucugaaugua

SEQ ID NO: 2348205 - RNA, 19 nt, Artificial Sequence
  Description of Artificial Sequence: Synthetic oligonucleotide
  Antisense strand to SEQ ID NO: 2348204
uacauucagaacuuauuuc

SEQ ID NO: 2348206 - RNA, 19 nt, Artificial Sequence
  Description of Artificial Sequence: Synthetic oligonucleotide
  Sense strand starting at position 410 of SEQ ID NO: 1885522
auaaguucugaauguauug

SEQ ID NO: 2348207 - RNA, 19 nt, Artificial Sequence
  Description of Artificial Sequence: Synthetic oligonucleotide
  Antisense strand to SEQ ID NO: 2348206
caauacauucagaacuuau

SEQ ID NO: 2348208 - RNA, 19 nt, Artificial Sequence
  Description of Artificial Sequence: Synthetic oligonucleotide
  Sense strand starting at position 417 of SEQ ID NO: 1885522
cugaauguauugucaauug

SEQ ID NO: 2348209 - RNA, 19 nt, Artificial Sequence
  Description of Artificial Sequence: Synthetic oligonucleotide
  Antisense strand to SEQ ID NO: 2348208
caauugacaauacauucag

SEQ ID NO: 2348210 - RNA, 19 nt, Artificial Sequence
  Description of Artificial Sequence: Synthetic oligonucleotide
  Sense strand starting at position 555 of SEQ ID NO: 1885522
acugaauuccuuugccaug

SEQ ID NO: 2348211 - RNA, 19 nt, Artificial Sequence
  Description of Artificial Sequence: Synthetic oligonucleotide
  Antisense strand to SEQ ID NO: 2348210
cauggcaaaggaauucagu

SEQ ID NO: 2348212 - RNA, 19 nt, Artificial Sequence
  Description of Artificial Sequence: Synthetic oligonucleotide
  Sense strand starting at position 987 of SEQ ID NO: 1885522
uggauaguguccuuucuca

SEQ ID NO: 2348213 - RNA, 19 nt, Artificial Sequence
  Description of Artificial Sequence: Synthetic oligonucleotide
  Antisense strand to SEQ ID NO: 2348212
ugagaaaggacacuaucca

SEQ ID NO: 2348214 - RNA, 19 nt, Artificial Sequence
  Description of Artificial Sequence: Synthetic oligonucleotide
  Sense strand starting at position 1058 of SEQ ID NO: 1885522
ccggcacuccuuuagcgaa

SEQ ID NO: 2348215 - RNA, 19 nt, Artificial Sequence
  Description of Artificial Sequence: Synthetic oligonucleotide
  Antisense strand to SEQ ID NO: 2348214
uucgcuaaaggagugccgg

SEQ ID NO: 2348216 - RNA, 19 nt, Artificial Sequence
  Description of Artificial Sequence: Synthetic oligonucleotide
  Sense strand starting at position 1113 of SEQ ID NO: 1885522
gggucauugggucagcaaa

SEQ ID NO: 2348217 - RNA, 19 nt, Artificial Sequence
  Description of Artificial Sequence: Synthetic oligonucleotide
  Antisense strand to SEQ ID NO: 2348216
uuugcugacccaaugaccc

SEQ ID NO: 2348218 - RNA, 19 nt, Artificial Sequence
  Description of Artificial Sequence: Synthetic oligonucleotide
  Sense strand starting at position 1115 of SEQ ID NO: 1885522
gucauugggucagcaaagu

SEQ ID NO: 2348219 - RNA, 19 nt, Artificial Sequence
  Description of Artificial Sequence: Synthetic oligonucleotide
  Antisense strand to SEQ ID NO: 2348218
acuuugcugacccaaugac

SEQ ID NO: 2348220 - RNA, 19 nt, Artificial Sequence
  Description of Artificial Sequence: Synthetic oligonucleotide
  Sense strand starting at position 1124 of SEQ ID NO: 1885522
ucagcaaagucagaggaaa

SEQ ID NO: 2348221 - RNA, 19 nt, Artificial Sequence
  Description of Artificial Sequence: Synthetic oligonucleotide
  Antisense strand to SEQ ID NO: 2348220
uuuccucugacuuugcuga

SEQ ID NO: 2348222 - RNA, 19 nt, Artificial Sequence
  Description of Artificial Sequence: Synthetic oligonucleotide
  Sense strand starting at position 1310 of SEQ ID NO: 1885522
uccaucuccuggcuugauu

SEQ ID NO: 2348223 - RNA, 19 nt, Artificial Sequence
  Description of Artificial Sequence: Synthetic oligonucleotide
  Antisense strand to SEQ ID NO: 2348222
aaucaagccaggagaugga

SEQ ID NO: 2348224 - RNA, 19 nt, Artificial Sequence
  Description of Artificial Sequence: Synthetic oligonucleotide
  Sense strand starting at position 1323 of SEQ ID NO: 1885522
uugauuccuugugcuauaa

SEQ ID NO: 2348225 - RNA, 19 nt, Artificial Sequence
  Description of Artificial Sequence: Synthetic oligonucleotide
  Antisense strand to SEQ ID NO: 2348224
uuauagcacaaggaaucaa

SEQ ID NO: 2348226 - RNA, 19 nt, Artificial Sequence
  Description of Artificial Sequence: Synthetic oligonucleotide
  Sense strand starting at position 1456 of SEQ ID NO: 1885522
ggcugugucuaccugagga

SEQ ID NO: 2348227 - RNA, 19 nt, Artificial Sequence
  Description of Artificial Sequence: Synthetic oligonucleotide
  Antisense strand to SEQ ID NO: 2348226
uccucagguagacacagcc

SEQ ID NO: 2348228 - RNA, 19 nt, Artificial Sequence
  Description of Artificial Sequence: Synthetic oligonucleotide
  Sense strand starting at position 1524 of SEQ ID NO: 1885522
cccuccauccagcgugaaa

SEQ ID NO: 2348229 - RNA, 19 nt, Artificial Sequence
  Description of Artificial Sequence: Synthetic oligonucleotide
  Antisense strand to SEQ ID NO: 2348228
uuucacgcuggauggaggg

SEQ ID NO: 2348230 - RNA, 19 nt, Artificial Sequence
  Description of Artificial Sequence: Synthetic oligonucleotide
  Sense strand starting at position 1645 of SEQ ID NO: 1885522
cggcguuccgcuuuaguaa

SEQ ID NO: 2348231 - RNA, 19 nt, Artificial Sequence
  Description of Artificial Sequence: Synthetic oligonucleotide
  Antisense strand to SEQ ID NO: 2348230
uuacuaaagcggaacgccg

SEQ ID NO: 2348232 - RNA, 19 nt, Artificial Sequence
  Description of Artificial Sequence: Synthetic oligonucleotide
  Sense strand starting at position 1654 of SEQ ID NO: 1885522
gcuuuaguaagacgacacu

SEQ ID NO: 2348233 - RNA, 19 nt, Artificial Sequence
  Description of Artificial Sequence: Synthetic oligonucleotide
  Antisense strand to SEQ ID NO: 2348232
agugucgucuuacuaaagc

SEQ ID NO: 2348234 - RNA, 19 nt, Artificial Sequence
  Description of Artificial Sequence: Synthetic oligonucleotide
  Sense strand starting at position 2242 of SEQ ID NO: 1885522
cuuucuccgagguaugaac

SEQ ID NO: 2348235 - RNA, 19 nt, Artificial Sequence
  Description of Artificial Sequence: Synthetic oligonucleotide
  Antisense strand to SEQ ID NO: 2348234
guucauaccucggagaaag

SEQ ID NO: 2348236 - RNA, 19 nt, Artificial Sequence
  Description of Artificial Sequence: Synthetic oligonucleotide
  Sense strand starting at position 2958 of SEQ ID NO: 1885522
ggguuucuggaggagcuua

SEQ ID NO: 2348237 - RNA, 19 nt, Artificial Sequence
  Description of Artificial Sequence: Synthetic oligonucleotide
  Antisense strand to SEQ ID NO: 2348236
uaagcuccuccagaaaccc

SEQ ID NO: 2348238 - RNA, 19 nt, Artificial Sequence
  Description of Artificial Sequence: Synthetic oligonucleotide
  Sense strand starting at position 3076 of SEQ ID NO: 1885522
guguaaagucuacagagau

SEQ ID NO: 2348239 - RNA, 19 nt, Artificial Sequence
  Description of Artificial Sequence: Synthetic oligonucleotide
  Antisense strand to SEQ ID NO: 2348238
aucucuguagacuuuacac

SEQ ID NO: 2348240 - RNA, 19 nt, Artificial Sequence
  Description of Artificial Sequence: Synthetic oligonucleotide
  Sense strand starting at position 3197 of SEQ ID NO: 1885522
guugaaagcuggcagauuu

SEQ ID NO: 2348241 - RNA, 19 nt, Artificial Sequence
  Description of Artificial Sequence: Synthetic oligonucleotide
  Antisense strand to SEQ ID NO: 2348240
aaaucugccagcuuucaac

SEQ ID NO: 2348242 - RNA, 19 nt, Artificial Sequence
  Description of Artificial Sequence: Synthetic oligonucleotide
  Sense strand starting at position 3232 of SEQ ID NO: 1885522
uguagcuaguguccaaaga

SEQ ID NO: 2348243 - RNA, 19 nt, Artificial Sequence
  Description of Artificial Sequence: Synthetic oligonucleotide
  Antisense strand to SEQ ID NO: 2348242
ucuuuggacacuagcuaca

SEQ ID NO: 2348244 - RNA, 19 nt, Artificial Sequence
  Description of Artificial Sequence: Synthetic oligonucleotide
  Sense strand starting at position 3233 of SEQ ID NO: 1885522
guagcuaguguccaaagaa

SEQ ID NO: 2348245 - RNA, 19 nt, Artificial Sequence
  Description of Artificial Sequence: Synthetic oligonucleotide
  Antisense strand to SEQ ID NO: 2348244
uucuuuggacacuagcuac

SEQ ID NO: 2348246 - RNA, 19 nt, Artificial Sequence
  Description of Artificial Sequence: Synthetic oligonucleotide
  Sense strand starting at position 3246 of SEQ ID NO: 1885522
aaagaaauauuagcucguu

SEQ ID NO: 2348247 - RNA, 19 nt, Artificial Sequence
  Description of Artificial Sequence: Synthetic oligonucleotide
  Antisense strand to SEQ ID NO: 2348246
aacgagcuaauauuucuuu

SEQ ID NO: 2348248 - RNA, 19 nt, Artificial Sequence
  Description of Artificial Sequence: Synthetic oligonucleotide
  Sense strand starting at position 3247 of SEQ ID NO: 1885522
aagaaauauuagcucguuu

SEQ ID NO: 2348249 - RNA, 19 nt, Artificial Sequence
  Description of Artificial Sequence: Synthetic oligonucleotide
  Antisense strand to SEQ ID NO: 2348248
aaacgagcuaauauuucuu

SEQ ID NO: 2348250 - RNA, 19 nt, Artificial Sequence
  Description of Artificial Sequence: Synthetic oligonucleotide
  Sense strand starting at position 3417 of SEQ ID NO: 1885522
auuucugaauguggagaaa

SEQ ID NO: 2348251 - RNA, 19 nt, Artificial Sequence
  Description of Artificial Sequence: Synthetic oligonucleotide
  Antisense strand to SEQ ID NO: 2348250
uuucuccacauucagaaau

SEQ ID NO: 2348252 - RNA, 19 nt, Artificial Sequence
  Description of Artificial Sequence: Synthetic oligonucleotide
  Sense strand starting at position 3436 of SEQ ID NO: 1885522
aaguaucucuugcuggauu

SEQ ID NO: 2348253 - RNA, 19 nt, Artificial Sequence
  Description of Artificial Sequence: Synthetic oligonucleotide
  Antisense strand to SEQ ID NO: 2348252
aauccagcaagagauacuu

SEQ ID NO: 2348254 - RNA, 19 nt, Artificial Sequence
  Description of Artificial Sequence: Synthetic oligonucleotide
  Sense strand starting at position 3455 of SEQ ID NO: 1885522
uuccgaguaugauucccuu

SEQ ID NO: 2348255 - RNA, 19 nt, Artificial Sequence
  Description of Artificial Sequence: Synthetic oligonucleotide
  Antisense strand to SEQ ID NO: 2348254
aagggaaucauacucggaa

SEQ ID NO: 2348256 - RNA, 19 nt, Artificial Sequence
  Description of Artificial Sequence: Synthetic oligonucleotide
  Sense strand starting at position 3459 of SEQ ID NO: 1885522
gaguaugauucccuucugu

SEQ ID NO: 2348257 - RNA, 19 nt, Artificial Sequence
  Description of Artificial Sequence: Synthetic oligonucleotide
  Antisense strand to SEQ ID NO: 2348256
acagaagggaaucauacuc

SEQ ID NO: 2348258 - RNA, 19 nt, Artificial Sequence
  Description of Artificial Sequence: Synthetic oligonucleotide
  Sense strand starting at position 3491 of SEQ ID NO: 1885522
cgggcaauguuuguuuaug

SEQ ID NO: 2348259 - RNA, 19 nt, Artificial Sequence
  Description of Artificial Sequence: Synthetic oligonucleotide
  Antisense strand to SEQ ID NO: 2348258
cauaaacaaacauugcccg

SEQ ID NO: 2348260 - RNA, 19 nt, Artificial Sequence
  Description of Artificial Sequence: Synthetic oligonucleotide
  Sense strand starting at position 3638 of SEQ ID NO: 1885522
gucauuuccuuucugugau

SEQ ID NO: 2348261 - RNA, 19 nt, Artificial Sequence
  Description of Artificial Sequence: Synthetic oligonucleotide
  Antisense strand to SEQ ID NO: 2348260
aucacagaaaggaaaugac

SEQ ID NO: 2348262 - RNA, 19 nt, Artificial Sequence
  Description of Artificial Sequence: Synthetic oligonucleotide
  Sense strand starting at position 3707 of SEQ ID NO: 1885522
cguaauacaucugucauua

SEQ ID NO: 2348263 - RNA, 19 nt, Artificial Sequence
  Description of Artificial Sequence: Synthetic oligonucleotide
  Antisense strand to SEQ ID NO: 2348262
uaaugacagauguauuacg

SEQ ID NO: 2348264 - RNA, 19 nt, Artificial Sequence
  Description of Artificial Sequence: Synthetic oligonucleotide
  Sense strand starting at position 3754 of SEQ ID NO: 1885522
cuuagagcagugcaugaau

SEQ ID NO: 2348265 - RNA, 19 nt, Artificial Sequence
  Description of Artificial Sequence: Synthetic oligonucleotide
  Antisense strand to SEQ ID NO: 2348264
auucaugcacugcucuaag

SEQ ID NO: 2348266 - RNA, 19 nt, Artificial Sequence
  Description of Artificial Sequence: Synthetic oligonucleotide
  Sense strand starting at position 3787 of SEQ ID NO: 1885522
guuaaaggaugagaaauuu

SEQ ID NO: 2348267 - RNA, 19 nt, Artificial Sequence
  Description of Artificial Sequence: Synthetic oligonucleotide
  Antisense strand to SEQ ID NO: 2348266
aaauuucucauccuuuaac

SEQ ID NO: 2348268 - RNA, 19 nt, Artificial Sequence
  Description of Artificial Sequence: Synthetic oligonucleotide
  Sense strand starting at position 3819 of SEQ ID NO: 1885522
agagcauuaugagacuauu

SEQ ID NO: 2348269 - RNA, 19 nt, Artificial Sequence
  Description of Artificial Sequence: Synthetic oligonucleotide
  Antisense strand to SEQ ID NO: 2348268
aauagucucauaaugcucu

SEQ ID NO: 2348270 - RNA, 19 nt, Artificial Sequence
  Description of Artificial Sequence: Synthetic oligonucleotide
  Sense strand starting at position 3822 of SEQ ID NO: 1885522
gcauuaugagacuauugua

SEQ ID NO: 2348271 - RNA, 19 nt, Artificial Sequence
  Description of Artificial Sequence: Synthetic oligonucleotide
  Antisense strand to SEQ ID NO: 2348270
uacaauagucucauaaugc

SEQ ID NO: 2348272 - RNA, 19 nt, Artificial Sequence
  Description of Artificial Sequence: Synthetic oligonucleotide
  Sense strand starting at position 3827 of SEQ ID NO: 1885522
augagacuauuguagaaau

SEQ ID NO: 2348273 - RNA, 19 nt, Artificial Sequence
  Description of Artificial Sequence: Synthetic oligonucleotide
  Antisense strand to SEQ ID NO: 2348272
auuucuacaauagucucau

SEQ ID NO: 2348274 - RNA, 19 nt, Artificial Sequence
  Description of Artificial Sequence: Synthetic oligonucleotide
  Sense strand starting at position 196 of SEQ ID NO: 1885523
agcuuugcuccagagagga

SEQ ID NO: 2348275 - RNA, 19 nt, Artificial Sequence
  Description of Artificial Sequence: Synthetic oligonucleotide
  Antisense strand to SEQ ID NO: 2348274
uccucucuggagcaaagcu

SEQ ID NO: 2348276 - RNA, 19 nt, Artificial Sequence
  Description of Artificial Sequence: Synthetic oligonucleotide
  Sense strand starting at position 397 of SEQ ID NO: 1885523
gggugaauaucagucugac

SEQ ID NO: 2348277 - RNA, 19 nt, Artificial Sequence
  Description of Artificial Sequence: Synthetic oligonucleotide
  Antisense strand to SEQ ID NO: 2348276
gucagacugauauucaccc

SEQ ID NO: 2348278 - RNA, 19 nt, Artificial Sequence
  Description of Artificial Sequence: Synthetic oligonucleotide
  Sense strand starting at position 963 of SEQ ID NO: 1885523
augguauuacagggucaaa

SEQ ID NO: 2348279 - RNA, 19 nt, Artificial Sequence
  Description of Artificial Sequence: Synthetic oligonucleotide
  Antisense strand to SEQ ID NO: 2348278
uuugacccuguaauaccau

SEQ ID NO: 2348280 - RNA, 19 nt, Artificial Sequence
  Description of Artificial Sequence: Synthetic oligonucleotide
  Sense strand starting at position 966 of SEQ ID NO: 1885523
guauuacagggucaaaugu

SEQ ID NO: 2348281 - RNA, 19 nt, Artificial Sequence
  Description of Artificial Sequence: Synthetic oligonucleotide
  Antisense strand to SEQ ID NO: 2348280
acauuugacccuguaauac

SEQ ID NO: 2348282 - RNA, 19 nt, Artificial Sequence
  Description of Artificial Sequence: Synthetic oligonucleotide
  Sense strand starting at position 1200 of SEQ ID NO: 1885523
uauuaugauguugagcauu

SEQ ID NO: 2348283 - RNA, 19 nt, Artificial Sequence
  Description of Artificial Sequence: Synthetic oligonucleotide
  Antisense strand to SEQ ID NO: 2348282
aaugcucaacaucauaaua

SEQ ID NO: 2348284 - RNA, 19 nt, Artificial Sequence
  Description of Artificial Sequence: Synthetic oligonucleotide
  Sense strand starting at position 1318 of SEQ ID NO: 1885523
gggauagcuagcuauccau

SEQ ID NO: 2348285 - RNA, 19 nt, Artificial Sequence
  Description of Artificial Sequence: Synthetic oligonucleotide
  Antisense strand to SEQ ID NO: 2348284
auggauagcuagcuauccc

SEQ ID NO: 2348286 - RNA, 19 nt, Artificial Sequence
  Description of Artificial Sequence: Synthetic oligonucleotide
  Sense strand starting at position 1456 of SEQ ID NO: 1885523
acaccauucugggcauuga

SEQ ID NO: 2348287 - RNA, 19 nt, Artificial Sequence
  Description of Artificial Sequence: Synthetic oligonucleotide
  Antisense strand to SEQ ID NO: 2348286
ucaaugcccagaauggugu

SEQ ID NO: 2348288 - RNA, 19 nt, Artificial Sequence
  Description of Artificial Sequence: Synthetic oligonucleotide
  Sense strand starting at position 1466 of SEQ ID NO: 1885523
gggcauugaccuugggaaa

SEQ ID NO: 2348289 - RNA, 19 nt, Artificial Sequence
  Description of Artificial Sequence: Synthetic oligonucleotide
  Antisense strand to SEQ ID NO: 2348288
uuucccaaggucaaugccc

SEQ ID NO: 2348290 - RNA, 19 nt, Artificial Sequence
  Description of Artificial Sequence: Synthetic oligonucleotide
  Sense strand starting at position 1467 of SEQ ID NO: 1885523
ggcauugaccuugggaaag

SEQ ID NO: 2348291 - RNA, 19 nt, Artificial Sequence
  Description of Artificial Sequence: Synthetic oligonucleotide
  Antisense strand to SEQ ID NO: 2348290
cuuucccaaggucaaugcc

SEQ ID NO: 2348292 - RNA, 19 nt, Artificial Sequence
  Description of Artificial Sequence: Synthetic oligonucleotide
  Sense strand starting at position 1555 of SEQ ID NO: 1885523
ugaagaacuucugcacaac

SEQ ID NO: 2348293 - RNA, 19 nt, Artificial Sequence
  Description of Artificial Sequence: Synthetic oligonucleotide
  Antisense strand to SEQ ID NO: 2348292
guugugcagaaguucuuca

SEQ ID NO: 2348294 - RNA, 19 nt, Artificial Sequence
  Description of Artificial Sequence: Synthetic oligonucleotide
  Sense strand starting at position 1634 of SEQ ID NO: 1885523
cuauauauccagcaaaggu

SEQ ID NO: 2348295 - RNA, 19 nt, Artificial Sequence
  Description of Artificial Sequence: Synthetic oligonucleotide
  Antisense strand to SEQ ID NO: 2348294
accuuugcuggauauauag

SEQ ID NO: 2348296 - RNA, 19 nt, Artificial Sequence
  Description of Artificial Sequence: Synthetic oligonucleotide
  Sense strand starting at position 1813 of SEQ ID NO: 1885523
ccagguucugaaugaauac

SEQ ID NO: 2348297 - RNA, 19 nt, Artificial Sequence
  Description of Artificial Sequence: Synthetic oligonucleotide
  Antisense strand to SEQ ID NO: 2348296
guauucauucagaaccugg

SEQ ID NO: 2348298 - RNA, 19 nt, Artificial Sequence
  Description of Artificial Sequence: Synthetic oligonucleotide
  Sense strand starting at position 1852 of SEQ ID NO: 1885523
uuguuaaaugcugaaacac

SEQ ID NO: 2348299 - RNA, 19 nt, Artificial Sequence
  Description of Artificial Sequence: Synthetic oligonucleotide
  Antisense strand to SEQ ID NO: 2348298
guguuucagcauuuaacaa

SEQ ID NO: 2348300 - RNA, 19 nt, Artificial Sequence
  Description of Artificial Sequence: Synthetic oligonucleotide
  Sense strand starting at position 2096 of SEQ ID NO: 1885523
ugagaacuccugcacuuug

SEQ ID NO: 2348301 - RNA, 19 nt, Artificial Sequence
  Description of Artificial Sequence: Synthetic oligonucleotide
  Antisense strand to SEQ ID NO: 2348300
caaagugcaggaguucuca

SEQ ID NO: 2348302 - RNA, 19 nt, Artificial Sequence
  Description of Artificial Sequence: Synthetic oligonucleotide
  Sense strand starting at position 2207 of SEQ ID NO: 1885523
uugacuuguuuaccuaaag

SEQ ID NO: 2348303 - RNA, 19 nt, Artificial Sequence
  Description of Artificial Sequence: Synthetic oligonucleotide
  Antisense strand to SEQ ID NO: 2348302
cuuuagguaaacaagucaa

SEQ ID NO: 2348304 - RNA, 19 nt, Artificial Sequence
  Description of Artificial Sequence: Synthetic oligonucleotide
  Sense strand starting at position 2233 of SEQ ID NO: 1885523
uugaguugccaagaggagu

SEQ ID NO: 2348305 - RNA, 19 nt, Artificial Sequence
  Description of Artificial Sequence: Synthetic oligonucleotide
  Antisense strand to SEQ ID NO: 2348304
acuccucuuggcaacucaa

SEQ ID NO: 2348306 - RNA, 19 nt, Artificial Sequence
  Description of Artificial Sequence: Synthetic oligonucleotide
  Sense strand starting at position 2246 of SEQ ID NO: 1885523
aggaguuaguuacuugaac

SEQ ID NO: 2348307 - RNA, 19 nt, Artificial Sequence
  Description of Artificial Sequence: Synthetic oligonucleotide
  Antisense strand to SEQ ID NO: 2348306
guucaaguaacuaacuccu

SEQ ID NO: 2348308 - RNA, 19 nt, Artificial Sequence
  Description of Artificial Sequence: Synthetic oligonucleotide
  Sense strand starting at position 2247 of SEQ ID NO: 1885523
ggaguuaguuacuugaaca

SEQ ID NO: 2348309 - RNA, 19 nt, Artificial Sequence
  Description of Artificial Sequence: Synthetic oligonucleotide
  Antisense strand to SEQ ID NO: 2348308
uguucaaguaacuaacucc

SEQ ID NO: 2348310 - RNA, 19 nt, Artificial Sequence
  Description of Artificial Sequence: Synthetic oligonucleotide
  Sense strand starting at position 2273 of SEQ ID NO: 1885523
agaaauacggucgauagca

SEQ ID NO: 2348311 - RNA, 19 nt, Artificial Sequence
  Description of Artificial Sequence: Synthetic oligonucleotide
  Antisense strand to SEQ ID NO: 2348310
ugcuaucgaccguauuucu

SEQ ID NO: 2348312 - RNA, 19 nt, Artificial Sequence
  Description of Artificial Sequence: Synthetic oligonucleotide
  Sense strand starting at position 2275 of SEQ ID NO: 1885523
aaauacggucgauagcaaa

SEQ ID NO: 2348313 - RNA, 19 nt, Artificial Sequence
  Description of Artificial Sequence: Synthetic oligonucleotide
  Antisense strand to SEQ ID NO: 2348312
uuugcuaucgaccguauuu

SEQ ID NO: 2348314 - RNA, 19 nt, Artificial Sequence
  Description of Artificial Sequence: Synthetic oligonucleotide
  Sense strand starting at position 2294 of SEQ ID NO: 1885523
auaagauaugcugagcuca

SEQ ID NO: 2348315 - RNA, 19 nt, Artificial Sequence
  Description of Artificial Sequence: Synthetic oligonucleotide
  Antisense strand to SEQ ID NO: 2348314
ugagcucagcauaucuuau

SEQ ID NO: 2348316 - RNA, 19 nt, Artificial Sequence
  Description of Artificial Sequence: Synthetic oligonucleotide
  Sense strand starting at position 2441 of SEQ ID NO: 1885523
agcagagugcuauaaccaa

SEQ ID NO: 2348317 - RNA, 19 nt, Artificial Sequence
  Description of Artificial Sequence: Synthetic oligonucleotide
  Antisense strand to SEQ ID NO: 2348316
uugguuauagcacucugcu

SEQ ID NO: 2348318 - RNA, 19 nt, Artificial Sequence
  Description of Artificial Sequence: Synthetic oligonucleotide
  Sense strand starting at position 2470 of SEQ ID NO: 1885523
gcuagaaacagacguagaa

SEQ ID NO: 2348319 - RNA, 19 nt, Artificial Sequence
  Description of Artificial Sequence: Synthetic oligonucleotide
  Antisense strand to SEQ ID NO: 2348318
uucuacgucuguuucuagc

SEQ ID NO: 2348320 - RNA, 19 nt, Artificial Sequence
  Description of Artificial Sequence: Synthetic oligonucleotide
  Sense strand starting at position 2599 of SEQ ID NO: 1885523
ggagguuaauaaucccuuu

SEQ ID NO: 2348321 - RNA, 19 nt, Artificial Sequence
  Description of Artificial Sequence: Synthetic oligonucleotide
  Antisense strand to SEQ ID NO: 2348320
aaagggauuauuaaccucc

SEQ ID NO: 2348322 - RNA, 19 nt, Artificial Sequence
  Description of Artificial Sequence: Synthetic oligonucleotide
  Sense strand starting at position 2892 of SEQ ID NO: 1885523
gcagaaccaugguuagaua

SEQ ID NO: 2348323 - RNA, 19 nt, Artificial Sequence
  Description of Artificial Sequence: Synthetic oligonucleotide
  Antisense strand to SEQ ID NO: 2348322
uaucuaaccaugguucugc

SEQ ID NO: 2348324 - RNA, 19 nt, Artificial Sequence
  Description of Artificial Sequence: Synthetic oligonucleotide
  Sense strand starting at position 3115 of SEQ ID NO: 1885523
cccagauguugaccuuuaa

SEQ ID NO: 2348325 - RNA, 19 nt, Artificial Sequence
  Description of Artificial Sequence: Synthetic oligonucleotide
  Antisense strand to SEQ ID NO: 2348324
uuaaaggucaacaucuggg

SEQ ID NO: 2348326 - RNA, 19 nt, Artificial Sequence
  Description of Artificial Sequence: Synthetic oligonucleotide
  Sense strand starting at position 3119 of SEQ ID NO: 1885523
gauguugaccuuuaagcua

SEQ ID NO: 2348327 - RNA, 19 nt, Artificial Sequence
  Description of Artificial Sequence: Synthetic oligonucleotide
  Antisense strand to SEQ ID NO: 2348326
uagcuuaaaggucaacauc

SEQ ID NO: 2348328 - RNA, 19 nt, Artificial Sequence
  Description of Artificial Sequence: Synthetic oligonucleotide
  Sense strand starting at position 3458 of SEQ ID NO: 1885523
agaggauaccuuugcagga

SEQ ID NO: 2348329 - RNA, 19 nt, Artificial Sequence
  Description of Artificial Sequence: Synthetic oligonucleotide
  Antisense strand to SEQ ID NO: 2348328
uccugcaaagguauccucu

SEQ ID NO: 2348330 - RNA, 19 nt, Artificial Sequence
  Description of Artificial Sequence: Synthetic oligonucleotide
  Sense strand starting at position 3459 of SEQ ID NO: 1885523
gaggauaccuuugcaggaa

SEQ ID NO: 2348331 - RNA, 19 nt, Artificial Sequence
  Description of Artificial Sequence: Synthetic oligonucleotide
  Antisense strand to SEQ ID NO: 2348330
uuccugcaaagguauccuc

SEQ ID NO: 2348332 - RNA, 19 nt, Artificial Sequence
  Description of Artificial Sequence: Synthetic oligonucleotide
  Sense strand starting at position 3462 of SEQ ID NO: 1885523
gauaccuuugcaggaaaug

SEQ ID NO: 2348333 - RNA, 19 nt, Artificial Sequence
  Description of Artificial Sequence: Synthetic oligonucleotide
  Antisense strand to SEQ ID NO: 2348332
cauuuccugcaaagguauc

SEQ ID NO: 2348334 - RNA, 19 nt, Artificial Sequence
  Description of Artificial Sequence: Synthetic oligonucleotide
  Sense strand starting at position 3525 of SEQ ID NO: 1885523
aaggguuaccuuggaauua

SEQ ID NO: 2348335 - RNA, 19 nt, Artificial Sequence
  Description of Artificial Sequence: Synthetic oligonucleotide
  Antisense strand to SEQ ID NO: 2348334
uaauuccaagguaacccuu

SEQ ID NO: 2348336 - RNA, 19 nt, Artificial Sequence
  Description of Artificial Sequence: Synthetic oligonucleotide
  Sense strand starting at position 3534 of SEQ ID NO: 1885523
cuuggaauuaguggugaaa

SEQ ID NO: 2348337 - RNA, 19 nt, Artificial Sequence
  Description of Artificial Sequence: Synthetic oligonucleotide
  Antisense strand to SEQ ID NO: 2348336
uuucaccacuaauuccaag

SEQ ID NO: 2348338 - RNA, 19 nt, Artificial Sequence
  Description of Artificial Sequence: Synthetic oligonucleotide
  Sense strand starting at position 3624 of SEQ ID NO: 1885523
uuuaguaaauggcucaaga

SEQ ID NO: 2348339 - RNA, 19 nt, Artificial Sequence
  Description of Artificial Sequence: Synthetic oligonucleotide
  Antisense strand to SEQ ID NO: 2348338
ucuugagccauuuacuaaa

SEQ ID NO: 2348340 - RNA, 19 nt, Artificial Sequence
  Description of Artificial Sequence: Synthetic oligonucleotide
  Sense strand starting at position 3737 of SEQ ID NO: 1885523
ggcuuaagacccugaggau

SEQ ID NO: 2348341 - RNA, 19 nt, Artificial Sequence
  Description of Artificial Sequence: Synthetic oligonucleotide
  Antisense strand to SEQ ID NO: 2348340
auccucagggucuuaagcc

SEQ ID NO: 2348342 - RNA, 19 nt, Artificial Sequence
  Description of Artificial Sequence: Synthetic oligonucleotide
  Sense strand starting at position 3757 of SEQ ID NO: 1885523
uugugaagccauuauccau

SEQ ID NO: 2348343 - RNA, 19 nt, Artificial Sequence
  Description of Artificial Sequence: Synthetic oligonucleotide
  Antisense strand to SEQ ID NO: 2348342
auggauaauggcuucacaa

SEQ ID NO: 2348344 - RNA, 19 nt, Artificial Sequence
  Description of Artificial Sequence: Synthetic oligonucleotide
  Sense strand starting at position 3763 of SEQ ID NO: 1885523
agccauuauccaugagagg

SEQ ID NO: 2348345 - RNA, 19 nt, Artificial Sequence
  Description of Artificial Sequence: Synthetic oligonucleotide
  Antisense strand to SEQ ID NO: 2348344
ccucucauggauaauggcu

SEQ ID NO: 2348346 - RNA, 19 nt, Artificial Sequence
  Description of Artificial Sequence: Synthetic oligonucleotide
  Sense strand starting at position 3814 of SEQ ID NO: 1885523
agacaaaugucccugacug

SEQ ID NO: 2348347 - RNA, 19 nt, Artificial Sequence
  Description of Artificial Sequence: Synthetic oligonucleotide
  Antisense strand to SEQ ID NO: 2348346
cagucagggacauuugucu

SEQ ID NO: 2348348 - RNA, 19 nt, Artificial Sequence
  Description of Artificial Sequence: Synthetic oligonucleotide
  Sense strand starting at position 3841 of SEQ ID NO: 1885523
ugguaacauugagcaauua

SEQ ID NO: 2348349 - RNA, 19 nt, Artificial Sequence
  Description of Artificial Sequence: Synthetic oligonucleotide
  Antisense strand to SEQ ID NO: 2348348
uaauugcucaauguuacca

SEQ ID NO: 2348350 - RNA, 19 nt, Artificial Sequence
  Description of Artificial Sequence: Synthetic oligonucleotide
  Sense strand starting at position 3842 of SEQ ID NO: 1885523
gguaacauugagcaauuau

SEQ ID NO: 2348351 - RNA, 19 nt, Artificial Sequence
  Description of Artificial Sequence: Synthetic oligonucleotide
  Antisense strand to SEQ ID NO: 2348350
auaauugcucaauguuacc

SEQ ID NO: 2348352 - RNA, 19 nt, Artificial Sequence
  Description of Artificial Sequence: Synthetic oligonucleotide
  Sense strand starting at position 3978 of SEQ ID NO: 1885523
gauuguaagcaccaguaga

SEQ ID NO: 2348353 - RNA, 19 nt, Artificial Sequence
  Description of Artificial Sequence: Synthetic oligonucleotide
  Antisense strand to SEQ ID NO: 2348352
ucuacuggugcuuacaauc

SEQ ID NO: 2348354 - RNA, 19 nt, Artificial Sequence
  Description of Artificial Sequence: Synthetic oligonucleotide
  Sense strand starting at position 169 of SEQ ID NO: 1885524
gagacucgccuccagagaa

SEQ ID NO: 2348355 - RNA, 19 nt, Artificial Sequence
  Description of Artificial Sequence: Synthetic oligonucleotide
  Antisense strand to SEQ ID NO: 2348354
uucucuggaggcgagucuc

SEQ ID NO: 2348356 - RNA, 19 nt, Artificial Sequence
  Description of Artificial Sequence: Synthetic oligonucleotide
  Sense strand starting at position 524 of SEQ ID NO: 1885524
ggcggaaguuuauuuagua

SEQ ID NO: 2348357 - RNA, 19 nt, Artificial Sequence
  Description of Artificial Sequence: Synthetic oligonucleotide
  Antisense strand to SEQ ID NO: 2348356
uacuaaauaaacuuccgcc

SEQ ID NO: 2348358 - RNA, 19 nt, Artificial Sequence
  Description of Artificial Sequence: Synthetic oligonucleotide
  Sense strand starting at position 525 of SEQ ID NO: 1885524
gcggaaguuuauuuaguac

SEQ ID NO: 2348359 - RNA, 19 nt, Artificial Sequence
  Description of Artificial Sequence: Synthetic oligonucleotide
  Antisense strand to SEQ ID NO: 2348358
guacuaaauaaacuuccgc

SEQ ID NO: 2348360 - RNA, 19 nt, Artificial Sequence
  Description of Artificial Sequence: Synthetic oligonucleotide
  Sense strand starting at position 529 of SEQ ID NO: 1885524
aaguuuauuuaguacggga

SEQ ID NO: 2348361 - RNA, 19 nt, Artificial Sequence
  Description of Artificial Sequence: Synthetic oligonucleotide
  Antisense strand to SEQ ID NO: 2348360
ucccguacuaaauaaacuu

SEQ ID NO: 2348362 - RNA, 19 nt, Artificial Sequence
  Description of Artificial Sequence: Synthetic oligonucleotide
  Sense strand starting at position 532 of SEQ ID NO: 1885524
uuuauuuaguacgggaaag

SEQ ID NO: 2348363 - RNA, 19 nt, Artificial Sequence
  Description of Artificial Sequence: Synthetic oligonucleotide
  Antisense strand to SEQ ID NO: 2348362
cuuucccguacuaaauaaa

SEQ ID NO: 2348364 - RNA, 19 nt, Artificial Sequence
  Description of Artificial Sequence: Synthetic oligonucleotide
  Sense strand starting at position 573 of SEQ ID NO: 1885524
gaggcuuugcccuaggaug

SEQ ID NO: 2348365 - RNA, 19 nt, Artificial Sequence
  Description of Artificial Sequence: Synthetic oligonucleotide
  Antisense strand to SEQ ID NO: 2348364
cauccuagggcaaagccuc

SEQ ID NO: 2348366 - RNA, 19 nt, Artificial Sequence
  Description of Artificial Sequence: Synthetic oligonucleotide
  Sense strand starting at position 2015 of SEQ ID NO: 1885524
aaaccuguccuaggaaugu

SEQ ID NO: 2348367 - RNA, 19 nt, Artificial Sequence
  Description of Artificial Sequence: Synthetic oligonucleotide
  Antisense strand to SEQ ID NO: 2348366
acauuccuaggacagguuu

SEQ ID NO: 2348368 - RNA, 19 nt, Artificial Sequence
  Description of Artificial Sequence: Synthetic oligonucleotide
  Sense strand starting at position 2045 of SEQ ID NO: 1885524
uuuggugcauuuguauaga

SEQ ID NO: 2348369 - RNA, 19 nt, Artificial Sequence
  Description of Artificial Sequence: Synthetic oligonucleotide
  Antisense strand to SEQ ID NO: 2348368
ucuauacaaaugcaccaaa

SEQ ID NO: 2348370 - RNA, 19 nt, Artificial Sequence
  Description of Artificial Sequence: Synthetic oligonucleotide
  Sense strand starting at position 2097 of SEQ ID NO: 1885524
uugguaucucuugaauaca

SEQ ID NO: 2348371 - RNA, 19 nt, Artificial Sequence
  Description of Artificial Sequence: Synthetic oligonucleotide
  Antisense strand to SEQ ID NO: 2348370
uguauucaagagauaccaa

SEQ ID NO: 2348372 - RNA, 19 nt, Artificial Sequence
  Description of Artificial Sequence: Synthetic oligonucleotide
  Sense strand starting at position 2142 of SEQ ID NO: 1885524
ugaagucugcuuuguugaa

SEQ ID NO: 2348373 - RNA, 19 nt, Artificial Sequence
  Description of Artificial Sequence: Synthetic oligonucleotide
  Antisense strand to SEQ ID NO: 2348372
uucaacaaagcagacuuca

SEQ ID NO: 2348374 - RNA, 19 nt, Artificial Sequence
  Description of Artificial Sequence: Synthetic oligonucleotide
  Sense strand starting at position 2143 of SEQ ID NO: 1885524
gaagucugcuuuguugaau

SEQ ID NO: 2348375 - RNA, 19 nt, Artificial Sequence
  Description of Artificial Sequence: Synthetic oligonucleotide
  Antisense strand to SEQ ID NO: 2348374
auucaacaaagcagacuuc

SEQ ID NO: 2348376 - RNA, 19 nt, Artificial Sequence
  Description of Artificial Sequence: Synthetic oligonucleotide
  Sense strand starting at position 2146 of SEQ ID NO: 1885524
gucugcuuuguugaaucaa

SEQ ID NO: 2348377 - RNA, 19 nt, Artificial Sequence
  Description of Artificial Sequence: Synthetic oligonucleotide
  Antisense strand to SEQ ID NO: 2348376
uugauucaacaaagcagac

SEQ ID NO: 2348378 - RNA, 19 nt, Artificial Sequence
  Description of Artificial Sequence: Synthetic oligonucleotide
  Sense strand starting at position 2244 of SEQ ID NO: 1885524
acuggaggucucugucaaa

SEQ ID NO: 2348379 - RNA, 19 nt, Artificial Sequence
  Description of Artificial Sequence: Synthetic oligonucleotide
  Antisense strand to SEQ ID NO: 2348378
uuugacagagaccuccagu

SEQ ID NO: 2348380 - RNA, 19 nt, Artificial Sequence
  Description of Artificial Sequence: Synthetic oligonucleotide
  Sense strand starting at position 2359 of SEQ ID NO: 1885524
cucuucucaguguggauaa

SEQ ID NO: 2348381 - RNA, 19 nt, Artificial Sequence
  Description of Artificial Sequence: Synthetic oligonucleotide
  Antisense strand to SEQ ID NO: 2348380
uuauccacacugagaagag

SEQ ID NO: 2348382 - RNA, 19 nt, Artificial Sequence
  Description of Artificial Sequence: Synthetic oligonucleotide
  Sense strand starting at position 2457 of SEQ ID NO: 1885524
agguuaaauucugagagag

SEQ ID NO: 2348383 - RNA, 19 nt, Artificial Sequence
  Description of Artificial Sequence: Synthetic oligonucleotide
  Antisense strand to SEQ ID NO: 2348382
cucucucagaauuuaaccu

SEQ ID NO: 2348384 - RNA, 19 nt, Artificial Sequence
  Description of Artificial Sequence: Synthetic oligonucleotide
  Sense strand starting at position 2513 of SEQ ID NO: 1885524
ucagaaaguaucuguguca

SEQ ID NO: 2348385 - RNA, 19 nt, Artificial Sequence
  Description of Artificial Sequence: Synthetic oligonucleotide
  Antisense strand to SEQ ID NO: 2348384
ugacacagauacuuucuga

SEQ ID NO: 2348386 - RNA, 19 nt, Artificial Sequence
  Description of Artificial Sequence: Synthetic oligonucleotide
  Sense strand starting at position 2514 of SEQ ID NO: 1885524
cagaaaguaucugugucaa

SEQ ID NO: 2348387 - RNA, 19 nt, Artificial Sequence
  Description of Artificial Sequence: Synthetic oligonucleotide
  Antisense strand to SEQ ID NO: 2348386
uugacacagauacuuucug

SEQ ID NO: 2348388 - RNA, 19 nt, Artificial Sequence
  Description of Artificial Sequence: Synthetic oligonucleotide
  Sense strand starting at position 2629 of SEQ ID NO: 1885524
uguaauaguugcuuaagua

SEQ ID NO: 2348389 - RNA, 19 nt, Artificial Sequence
  Description of Artificial Sequence: Synthetic oligonucleotide
  Antisense strand to SEQ ID NO: 2348388
uacuuaagcaacuauuaca

SEQ ID NO: 2348390 - RNA, 19 nt, Artificial Sequence
  Description of Artificial Sequence: Synthetic oligonucleotide
  Sense strand starting at position 2630 of SEQ ID NO: 1885524
guaauaguugcuuaaguaa

SEQ ID NO: 2348391 - RNA, 19 nt, Artificial Sequence
  Description of Artificial Sequence: Synthetic oligonucleotide
  Antisense strand to SEQ ID NO: 2348390
uuacuuaagcaacuauuac

SEQ ID NO: 2348392 - RNA, 19 nt, Artificial Sequence
  Description of Artificial Sequence: Synthetic oligonucleotide
  Sense strand starting at position 2633 of SEQ ID NO: 1885524
auaguugcuuaaguaagua

SEQ ID NO: 2348393 - RNA, 19 nt, Artificial Sequence
  Description of Artificial Sequence: Synthetic oligonucleotide
  Antisense strand to SEQ ID NO: 2348392
uacuuacuuaagcaacuau

SEQ ID NO: 2348394 - RNA, 19 nt, Artificial Sequence
  Description of Artificial Sequence: Synthetic oligonucleotide
  Sense strand starting at position 2758 of SEQ ID NO: 1885524
acagaacaaucguuaugau

SEQ ID NO: 2348395 - RNA, 19 nt, Artificial Sequence
  Description of Artificial Sequence: Synthetic oligonucleotide
  Antisense strand to SEQ ID NO: 2348394
aucauaacgauuguucugu

SEQ ID NO: 2348396 - RNA, 19 nt, Artificial Sequence
  Description of Artificial Sequence: Synthetic oligonucleotide
  Sense strand starting at position 2759 of SEQ ID NO: 1885524
cagaacaaucguuaugauc

SEQ ID NO: 2348397 - RNA, 19 nt, Artificial Sequence
  Description of Artificial Sequence: Synthetic oligonucleotide
  Antisense strand to SEQ ID NO: 2348396
gaucauaacgauuguucug

SEQ ID NO: 2348398 - RNA, 19 nt, Artificial Sequence
  Description of Artificial Sequence: Synthetic oligonucleotide
  Sense strand starting at position 2767 of SEQ ID NO: 1885524
ucguuaugaucuguuauac

SEQ ID NO: 2348399 - RNA, 19 nt, Artificial Sequence
  Description of Artificial Sequence: Synthetic oligonucleotide
  Antisense strand to SEQ ID NO: 2348398
guauaacagaucauaacga

SEQ ID NO: 2348400 - RNA, 19 nt, Artificial Sequence
  Description of Artificial Sequence: Synthetic oligonucleotide
  Sense strand starting at position 2824 of SEQ ID NO: 1885524
uauauagccucggucaaau

SEQ ID NO: 2348401 - RNA, 19 nt, Artificial Sequence
  Description of Artificial Sequence: Synthetic oligonucleotide
  Antisense strand to SEQ ID NO: 2348400
auuugaccgaggcuauaua

SEQ ID NO: 2348402 - RNA, 19 nt, Artificial Sequence
  Description of Artificial Sequence: Synthetic oligonucleotide
  Sense strand starting at position 2833 of SEQ ID NO: 1885524
ucggucaaauucuuaacca

SEQ ID NO: 2348403 - RNA, 19 nt, Artificial Sequence
  Description of Artificial Sequence: Synthetic oligonucleotide
  Antisense strand to SEQ ID NO: 2348402
ugguuaagaauuugaccga

SEQ ID NO: 2348404 - RNA, 19 nt, Artificial Sequence
  Description of Artificial Sequence: Synthetic oligonucleotide
  Sense strand starting at position 2962 of SEQ ID NO: 1885524
uugagagauuagcuagauc

SEQ ID NO: 2348405 - RNA, 19 nt, Artificial Sequence
  Description of Artificial Sequence: Synthetic oligonucleotide
  Antisense strand to SEQ ID NO: 2348404
gaucuagcuaaucucucaa

SEQ ID NO: 2348406 - RNA, 19 nt, Artificial Sequence
  Description of Artificial Sequence: Synthetic oligonucleotide
  Sense strand starting at position 2981 of SEQ ID NO: 1885524
aaaguuaaugaacgugaau

SEQ ID NO: 2348407 - RNA, 19 nt, Artificial Sequence
  Description of Artificial Sequence: Synthetic oligonucleotide
  Antisense strand to SEQ ID NO: 2348406
auucacguucauuaacuuu

SEQ ID NO: 2348408 - RNA, 19 nt, Artificial Sequence
  Description of Artificial Sequence: Synthetic oligonucleotide
  Sense strand starting at position 3033 of SEQ ID NO: 1885524
uagaaacugguuugaaauu

SEQ ID NO: 2348409 - RNA, 19 nt, Artificial Sequence
  Description of Artificial Sequence: Synthetic oligonucleotide
  Antisense strand to SEQ ID NO: 2348408
aauuucaaaccaguuucua

SEQ ID NO: 2348410 - RNA, 19 nt, Artificial Sequence
  Description of Artificial Sequence: Synthetic oligonucleotide
  Sense strand starting at position 3034 of SEQ ID NO: 1885524
agaaacugguuugaaauuu

SEQ ID NO: 2348411 - RNA, 19 nt, Artificial Sequence
  Description of Artificial Sequence: Synthetic oligonucleotide
  Antisense strand to SEQ ID NO: 2348410
aaauuucaaaccaguuucu

SEQ ID NO: 2348412 - RNA, 19 nt, Artificial Sequence
  Description of Artificial Sequence: Synthetic oligonucleotide
  Sense strand starting at position 3232 of SEQ ID NO: 1885524
gaaggcuuagcauaagcua

SEQ ID NO: 2348413 - RNA, 19 nt, Artificial Sequence
  Description of Artificial Sequence: Synthetic oligonucleotide
  Antisense strand to SEQ ID NO: 2348412
uagcuuaugcuaagccuuc

SEQ ID NO: 2348414 - RNA, 19 nt, Artificial Sequence
  Description of Artificial Sequence: Synthetic oligonucleotide
  Sense strand starting at position 3299 of SEQ ID NO: 1885524
cugacugucagccauggaa

SEQ ID NO: 2348415 - RNA, 19 nt, Artificial Sequence
  Description of Artificial Sequence: Synthetic oligonucleotide
  Antisense strand to SEQ ID NO: 2348414
uuccauggcugacagucag

SEQ ID NO: 2348416 - RNA, 19 nt, Artificial Sequence
  Description of Artificial Sequence: Synthetic oligonucleotide
  Sense strand starting at position 3334 of SEQ ID NO: 1885524
uuaauuguucucguuguuu

SEQ ID NO: 2348417 - RNA, 19 nt, Artificial Sequence
  Description of Artificial Sequence: Synthetic oligonucleotide
  Antisense strand to SEQ ID NO: 2348416
aaacaacgagaacaauuaa

SEQ ID NO: 2348418 - RNA, 19 nt, Artificial Sequence
  Description of Artificial Sequence: Synthetic oligonucleotide
  Sense strand starting at position 3424 of SEQ ID NO: 1885524
uguuauugccaagagcaag

SEQ ID NO: 2348419 - RNA, 19 nt, Artificial Sequence
  Description of Artificial Sequence: Synthetic oligonucleotide
  Antisense strand to SEQ ID NO: 2348418
cuugcucuuggcaauaaca

SEQ ID NO: 2348420 - RNA, 19 nt, Artificial Sequence
  Description of Artificial Sequence: Synthetic oligonucleotide
  Sense strand starting at position 3769 of SEQ ID NO: 1885524
ugagccagcuccuuaaaca

SEQ ID NO: 2348421 - RNA, 19 nt, Artificial Sequence
  Description of Artificial Sequence: Synthetic oligonucleotide
  Antisense strand to SEQ ID NO: 2348420
uguuuaaggagcuggcuca

SEQ ID NO: 2348422 - RNA, 19 nt, Artificial Sequence
  Description of Artificial Sequence: Synthetic oligonucleotide
  Sense strand starting at position 3866 of SEQ ID NO: 1885524
ugaugaaacuagccagacu

SEQ ID NO: 2348423 - RNA, 19 nt, Artificial Sequence
  Description of Artificial Sequence: Synthetic oligonucleotide
  Antisense strand to SEQ ID NO: 2348422
agucuggcuaguuucauca

SEQ ID NO: 2348424 - RNA, 19 nt, Artificial Sequence
  Description of Artificial Sequence: Synthetic oligonucleotide
  Sense strand starting at position 3901 of SEQ ID NO: 1885524
ugccuccauggcugaaauu

SEQ ID NO: 2348425 - RNA, 19 nt, Artificial Sequence
  Description of Artificial Sequence: Synthetic oligonucleotide
  Antisense strand to SEQ ID NO: 2348424
aauuucagccauggaggca

SEQ ID NO: 2348426 - RNA, 19 nt, Artificial Sequence
  Description of Artificial Sequence: Synthetic oligonucleotide
  Sense strand starting at position 3911 of SEQ ID NO: 1885524
gcugaaauuucugucuucu

SEQ ID NO: 2348427 - RNA, 19 nt, Artificial Sequence
  Description of Artificial Sequence: Synthetic oligonucleotide
  Antisense strand to SEQ ID NO: 2348426
agaagacagaaauuucagc

SEQ ID NO: 2348428 - RNA, 19 nt, Artificial Sequence
  Description of Artificial Sequence: Synthetic oligonucleotide
  Sense strand starting at position 3922 of SEQ ID NO: 1885524
ugucuucuccacugggaua

SEQ ID NO: 2348429 - RNA, 19 nt, Artificial Sequence
  Description of Artificial Sequence: Synthetic oligonucleotide
  Antisense strand to SEQ ID NO: 2348428
uaucccaguggagaagaca

SEQ ID NO: 2348430 - RNA, 19 nt, Artificial Sequence
  Description of Artificial Sequence: Synthetic oligonucleotide
  Sense strand starting at position 3924 of SEQ ID NO: 1885524
ucuucuccacugggauaaa

SEQ ID NO: 2348431 - RNA, 19 nt, Artificial Sequence
  Description of Artificial Sequence: Synthetic oligonucleotide
  Antisense strand to SEQ ID NO: 2348430
uuuaucccaguggagaaga

SEQ ID NO: 2348432 - RNA, 19 nt, Artificial Sequence
  Description of Artificial Sequence: Synthetic oligonucleotide
  Sense strand starting at position 3937 of SEQ ID NO: 1885524
gauaaagcagcauauaguu

SEQ ID NO: 2348433 - RNA, 19 nt, Artificial Sequence
  Description of Artificial Sequence: Synthetic oligonucleotide
  Antisense strand to SEQ ID NO: 2348432
aacuauaugcugcuuuauc

SEQ ID NO: 2348434 - RNA, 19 nt, Artificial Sequence
  Description of Artificial Sequence: Synthetic oligonucleotide
  Sense strand starting at position 35 of SEQ ID NO: 1885525
cuuuguacgugucuuauag

SEQ ID NO: 2348435 - RNA, 19 nt, Artificial Sequence
  Description of Artificial Sequence: Synthetic oligonucleotide
  Antisense strand to SEQ ID NO: 2348434
cuauaagacacguacaaag

SEQ ID NO: 2348436 - RNA, 19 nt, Artificial Sequence
  Description of Artificial Sequence: Synthetic oligonucleotide
  Sense strand starting at position 39 of SEQ ID NO: 1885525
guacgugucuuauagccua

SEQ ID NO: 2348437 - RNA, 19 nt, Artificial Sequence
  Description of Artificial Sequence: Synthetic oligonucleotide
  Antisense strand to SEQ ID NO: 2348436
uaggcuauaagacacguac

SEQ ID NO: 2348438 - RNA, 19 nt, Artificial Sequence
  Description of Artificial Sequence: Synthetic oligonucleotide
  Sense strand starting at position 135 of SEQ ID NO: 1885525
ucaauacuacuguaguauu

SEQ ID NO: 2348439 - RNA, 19 nt, Artificial Sequence
  Description of Artificial Sequence: Synthetic oligonucleotide
  Antisense strand to SEQ ID NO: 2348438
aauacuacaguaguauuga

SEQ ID NO: 2348440 - RNA, 19 nt, Artificial Sequence
  Description of Artificial Sequence: Synthetic oligonucleotide
  Sense strand starting at position 211 of SEQ ID NO: 1885525
gguacagggccuuauuauu

SEQ ID NO: 2348441 - RNA, 19 nt, Artificial Sequence
  Description of Artificial Sequence: Synthetic oligonucleotide
  Antisense strand to SEQ ID NO: 2348440
aauaauaaggcccuguacc

SEQ ID NO: 2348442 - RNA, 19 nt, Artificial Sequence
  Description of Artificial Sequence: Synthetic oligonucleotide
  Sense strand starting at position 219 of SEQ ID NO: 1885525
gccuuauuauuuggcauag

SEQ ID NO: 2348443 - RNA, 19 nt, Artificial Sequence
  Description of Artificial Sequence: Synthetic oligonucleotide
  Antisense strand to SEQ ID NO: 2348442
cuaugccaaauaauaaggc

SEQ ID NO: 2348444 - RNA, 19 nt, Artificial Sequence
  Description of Artificial Sequence: Synthetic oligonucleotide
  Sense strand starting at position 306 of SEQ ID NO: 1885525
gauauacuguagugcuuaa

SEQ ID NO: 2348445 - RNA, 19 nt, Artificial Sequence
  Description of Artificial Sequence: Synthetic oligonucleotide
  Antisense strand to SEQ ID NO: 2348444
uuaagcacuacaguauauc

SEQ ID NO: 2348446 - RNA, 19 nt, Artificial Sequence
  Description of Artificial Sequence: Synthetic oligonucleotide
  Sense strand starting at position 423 of SEQ ID NO: 1885525
gcaccuaaccgccggaaua

SEQ ID NO: 2348447 - RNA, 19 nt, Artificial Sequence
  Description of Artificial Sequence: Synthetic oligonucleotide
  Antisense strand to SEQ ID NO: 2348446
uauuccggcgguuaggugc

SEQ ID NO: 2348448 - RNA, 19 nt, Artificial Sequence
  Description of Artificial Sequence: Synthetic oligonucleotide
  Sense strand starting at position 463 of SEQ ID NO: 1885525
augaaaccugccuacaguu

SEQ ID NO: 2348449 - RNA, 19 nt, Artificial Sequence
  Description of Artificial Sequence: Synthetic oligonucleotide
  Antisense strand to SEQ ID NO: 2348448
aacuguaggcagguuucau

SEQ ID NO: 2348450 - RNA, 19 nt, Artificial Sequence
  Description of Artificial Sequence: Synthetic oligonucleotide
  Sense strand starting at position 496 of SEQ ID NO: 1885525
ccaguuaagucaguuacuu

SEQ ID NO: 2348451 - RNA, 19 nt, Artificial Sequence
  Description of Artificial Sequence: Synthetic oligonucleotide
  Antisense strand to SEQ ID NO: 2348450
aaguaacugacuuaacugg

SEQ ID NO: 2348452 - RNA, 19 nt, Artificial Sequence
  Description of Artificial Sequence: Synthetic oligonucleotide
  Sense strand starting at position 498 of SEQ ID NO: 1885525
aguuaagucaguuacuuga

SEQ ID NO: 2348453 - RNA, 19 nt, Artificial Sequence
  Description of Artificial Sequence: Synthetic oligonucleotide
  Antisense strand to SEQ ID NO: 2348452
ucaaguaacugacuuaacu

SEQ ID NO: 2348454 - RNA, 19 nt, Artificial Sequence
  Description of Artificial Sequence: Synthetic oligonucleotide
  Sense strand starting at position 500 of SEQ ID NO: 1885525
uuaagucaguuacuugaga

SEQ ID NO: 2348455 - RNA, 19 nt, Artificial Sequence
  Description of Artificial Sequence: Synthetic oligonucleotide
  Antisense strand to SEQ ID NO: 2348454
ucucaaguaacugacuuaa

SEQ ID NO: 2348456 - RNA, 19 nt, Artificial Sequence
  Description of Artificial Sequence: Synthetic oligonucleotide
  Sense strand starting at position 501 of SEQ ID NO: 1885525
uaagucaguuacuugagau

SEQ ID NO: 2348457 - RNA, 19 nt, Artificial Sequence
  Description of Artificial Sequence: Synthetic oligonucleotide
  Antisense strand to SEQ ID NO: 2348456
aucucaaguaacugacuua

SEQ ID NO: 2348458 - RNA, 19 nt, Artificial Sequence
  Description of Artificial Sequence: Synthetic oligonucleotide
  Sense strand starting at position 509 of SEQ ID NO: 1885525
uuacuugagaugcguuuaa

SEQ ID NO: 2348459 - RNA, 19 nt, Artificial Sequence
  Description of Artificial Sequence: Synthetic oligonucleotide
  Antisense strand to SEQ ID NO: 2348458
uuaaacgcaucucaaguaa

SEQ ID NO: 2348460 - RNA, 19 nt, Artificial Sequence
  Description of Artificial Sequence: Synthetic oligonucleotide
  Sense strand starting at position 513 of SEQ ID NO: 1885525
uugagaugcguuuaacucu

SEQ ID NO: 2348461 - RNA, 19 nt, Artificial Sequence
  Description of Artificial Sequence: Synthetic oligonucleotide
  Antisense strand to SEQ ID NO: 2348460
agaguuaaacgcaucucaa

SEQ ID NO: 2348462 - RNA, 19 nt, Artificial Sequence
  Description of Artificial Sequence: Synthetic oligonucleotide
  Sense strand starting at position 516 of SEQ ID NO: 1885525
agaugcguuuaacucuaaa

SEQ ID NO: 2348463 - RNA, 19 nt, Artificial Sequence
  Description of Artificial Sequence: Synthetic oligonucleotide
  Antisense strand to SEQ ID NO: 2348462
uuuagaguuaaacgcaucu

SEQ ID NO: 2348464 - RNA, 19 nt, Artificial Sequence
  Description of Artificial Sequence: Synthetic oligonucleotide
  Sense strand starting at position 519 of SEQ ID NO: 1885525
ugcguuuaacucuaaacug

SEQ ID NO: 2348465 - RNA, 19 nt, Artificial Sequence
  Description of Artificial Sequence: Synthetic oligonucleotide
  Antisense strand to SEQ ID NO: 2348464
caguuuagaguuaaacgca

SEQ ID NO: 2348466 - RNA, 19 nt, Artificial Sequence
  Description of Artificial Sequence: Synthetic oligonucleotide
  Sense strand starting at position 550 of SEQ ID NO: 1885525
uguugaauuuguuccgcaa

SEQ ID NO: 2348467 - RNA, 19 nt, Artificial Sequence
  Description of Artificial Sequence: Synthetic oligonucleotide
  Antisense strand to SEQ ID NO: 2348466
uugcggaacaaauucaaca

SEQ ID NO: 2348468 - RNA, 19 nt, Artificial Sequence
  Description of Artificial Sequence: Synthetic oligonucleotide
  Sense strand starting at position 584 of SEQ ID NO: 1885525
gguuauguacuacagaauu

SEQ ID NO: 2348469 - RNA, 19 nt, Artificial Sequence
  Description of Artificial Sequence: Synthetic oligonucleotide
  Antisense strand to SEQ ID NO: 2348468
aauucuguaguacauaacc

SEQ ID NO: 2348470 - RNA, 19 nt, Artificial Sequence
  Description of Artificial Sequence: Synthetic oligonucleotide
  Sense strand starting at position 621 of SEQ ID NO: 1885525
cuuccugaguggguuuaaa

SEQ ID NO: 2348471 - RNA, 19 nt, Artificial Sequence
  Description of Artificial Sequence: Synthetic oligonucleotide
  Antisense strand to SEQ ID NO: 2348470
uuuaaacccacucaggaag

SEQ ID NO: 2348472 - RNA, 19 nt, Artificial Sequence
  Description of Artificial Sequence: Synthetic oligonucleotide
  Sense strand starting at position 742 of SEQ ID NO: 1885525
aaagcucauccgggacaaa

SEQ ID NO: 2348473 - RNA, 19 nt, Artificial Sequence
  Description of Artificial Sequence: Synthetic oligonucleotide
  Antisense strand to SEQ ID NO: 2348472
uuugucccggaugagcuuu

SEQ ID NO: 2348474 - RNA, 19 nt, Artificial Sequence
  Description of Artificial Sequence: Synthetic oligonucleotide
  Sense strand starting at position 767 of SEQ ID NO: 1885525
gcaugacacugccacuuaa

SEQ ID NO: 2348475 - RNA, 19 nt, Artificial Sequence
  Description of Artificial Sequence: Synthetic oligonucleotide
  Antisense strand to SEQ ID NO: 2348474
uuaaguggcagugucaugc

SEQ ID NO: 2348476 - RNA, 19 nt, Artificial Sequence
  Description of Artificial Sequence: Synthetic oligonucleotide
  Sense strand starting at position 790 of SEQ ID NO: 1885525
uacacugcgucucugaaga

SEQ ID NO: 2348477 - RNA, 19 nt, Artificial Sequence
  Description of Artificial Sequence: Synthetic oligonucleotide
  Antisense strand to SEQ ID NO: 2348476
ucuucagagacgcagugua

SEQ ID NO: 2348478 - RNA, 19 nt, Artificial Sequence
  Description of Artificial Sequence: Synthetic oligonucleotide
  Sense strand starting at position 792 of SEQ ID NO: 1885525
cacugcgucucugaagauu

SEQ ID NO: 2348479 - RNA, 19 nt, Artificial Sequence
  Description of Artificial Sequence: Synthetic oligonucleotide
  Antisense strand to SEQ ID NO: 2348478
aaucuucagagacgcagug

SEQ ID NO: 2348480 - RNA, 19 nt, Artificial Sequence
  Description of Artificial Sequence: Synthetic oligonucleotide
  Sense strand starting at position 798 of SEQ ID NO: 1885525
gucucugaagauugcaauc

SEQ ID NO: 2348481 - RNA, 19 nt, Artificial Sequence
  Description of Artificial Sequence: Synthetic oligonucleotide
  Antisense strand to SEQ ID NO: 2348480
gauugcaaucuucagagac

SEQ ID NO: 2348482 - RNA, 19 nt, Artificial Sequence
  Description of Artificial Sequence: Synthetic oligonucleotide
  Sense strand starting at position 858 of SEQ ID NO: 1885525
cucaauccugcaggacaaa

SEQ ID NO: 2348483 - RNA, 19 nt, Artificial Sequence
  Description of Artificial Sequence: Synthetic oligonucleotide
  Antisense strand to SEQ ID NO: 2348482
uuuguccugcaggauugag

SEQ ID NO: 2348484 - RNA, 19 nt, Artificial Sequence
  Description of Artificial Sequence: Synthetic oligonucleotide
  Sense strand starting at position 870 of SEQ ID NO: 1885525
ggacaaaccuccuagaacu

SEQ ID NO: 2348485 - RNA, 19 nt, Artificial Sequence
  Description of Artificial Sequence: Synthetic oligonucleotide
  Antisense strand to SEQ ID NO: 2348484
aguucuaggagguuugucc

SEQ ID NO: 2348486 - RNA, 19 nt, Artificial Sequence
  Description of Artificial Sequence: Synthetic oligonucleotide
  Sense strand starting at position 1001 of SEQ ID NO: 1885525
gcaucagucccucgcggau

SEQ ID NO: 2348487 - RNA, 19 nt, Artificial Sequence
  Description of Artificial Sequence: Synthetic oligonucleotide
  Antisense strand to SEQ ID NO: 2348486
auccgcgagggacugaugc

SEQ ID NO: 2348488 - RNA, 19 nt, Artificial Sequence
  Description of Artificial Sequence: Synthetic oligonucleotide
  Sense strand starting at position 1013 of SEQ ID NO: 1885525
cgcggaucuuugugagggu

SEQ ID NO: 2348489 - RNA, 19 nt, Artificial Sequence
  Description of Artificial Sequence: Synthetic oligonucleotide
  Antisense strand to SEQ ID NO: 2348488
acccucacaaagauccgcg

SEQ ID NO: 2348490 - RNA, 19 nt, Artificial Sequence
  Description of Artificial Sequence: Synthetic oligonucleotide
  Sense strand starting at position 1016 of SEQ ID NO: 1885525
ggaucuuugugagggucca

SEQ ID NO: 2348491 - RNA, 19 nt, Artificial Sequence
  Description of Artificial Sequence: Synthetic oligonucleotide
  Antisense strand to SEQ ID NO: 2348490
uggacccucacaaagaucc

SEQ ID NO: 2348492 - RNA, 19 nt, Artificial Sequence
  Description of Artificial Sequence: Synthetic oligonucleotide
  Sense strand starting at position 2022 of SEQ ID NO: 1885525
guuccuggcuucugggaga

SEQ ID NO: 2348493 - RNA, 19 nt, Artificial Sequence
  Description of Artificial Sequence: Synthetic oligonucleotide
  Antisense strand to SEQ ID NO: 2348492
ucucccagaagccaggaac

SEQ ID NO: 2348494 - RNA, 19 nt, Artificial Sequence
  Description of Artificial Sequence: Synthetic oligonucleotide
  Sense strand starting at position 2307 of SEQ ID NO: 1885525
gagacucgccuccagagaa

SEQ ID NO: 2348495 - RNA, 19 nt, Artificial Sequence
  Description of Artificial Sequence: Synthetic oligonucleotide
  Antisense strand to SEQ ID NO: 2348494
uucucuggaggcgagucuc

SEQ ID NO: 2348496 - RNA, 19 nt, Artificial Sequence
  Description of Artificial Sequence: Synthetic oligonucleotide
  Sense strand starting at position 2662 of SEQ ID NO: 1885525
ggcggaaguuuauuuagua

SEQ ID NO: 2348497 - RNA, 19 nt, Artificial Sequence
  Description of Artificial Sequence: Synthetic oligonucleotide
  Antisense strand to SEQ ID NO: 2348496
uacuaaauaaacuuccgcc

SEQ ID NO: 2348498 - RNA, 19 nt, Artificial Sequence
  Description of Artificial Sequence: Synthetic oligonucleotide
  Sense strand starting at position 2663 of SEQ ID NO: 1885525
gcggaaguuuauuuaguac

SEQ ID NO: 2348499 - RNA, 19 nt, Artificial Sequence
  Description of Artificial Sequence: Synthetic oligonucleotide
  Antisense strand to SEQ ID NO: 2348498
guacuaaauaaacuuccgc

SEQ ID NO: 2348500 - RNA, 19 nt, Artificial Sequence
  Description of Artificial Sequence: Synthetic oligonucleotide
  Sense strand starting at position 2667 of SEQ ID NO: 1885525
aaguuuauuuaguacggga

SEQ ID NO: 2348501 - RNA, 19 nt, Artificial Sequence
  Description of Artificial Sequence: Synthetic oligonucleotide
  Antisense strand to SEQ ID NO: 2348500
ucccguacuaaauaaacuu

SEQ ID NO: 2348502 - RNA, 19 nt, Artificial Sequence
  Description of Artificial Sequence: Synthetic oligonucleotide
  Sense strand starting at position 2670 of SEQ ID NO: 1885525
uuuauuuaguacgggaaag

SEQ ID NO: 2348503 - RNA, 19 nt, Artificial Sequence
  Description of Artificial Sequence: Synthetic oligonucleotide
  Antisense strand to SEQ ID NO: 2348502
cuuucccguacuaaauaaa

SEQ ID NO: 2348504 - RNA, 19 nt, Artificial Sequence
  Description of Artificial Sequence: Synthetic oligonucleotide
  Sense strand starting at position 2711 of SEQ ID NO: 1885525
gaggcuuugcccuaggaug

SEQ ID NO: 2348505 - RNA, 19 nt, Artificial Sequence
  Description of Artificial Sequence: Synthetic oligonucleotide
  Antisense strand to SEQ ID NO: 2348504
cauccuagggcaaagccuc

SEQ ID NO: 2348506 - RNA, 19 nt, Artificial Sequence
  Description of Artificial Sequence: Synthetic oligonucleotide
  Sense strand starting at position 1380 of SEQ ID NO: 1885526
ggacgcauccuagggcaaa

SEQ ID NO: 2348507 - RNA, 19 nt, Artificial Sequence
  Description of Artificial Sequence: Synthetic oligonucleotide
  Antisense strand to SEQ ID NO: 2348506
uuugcccuaggaugcgucc

SEQ ID NO: 2348508 - RNA, 19 nt, Artificial Sequence
  Description of Artificial Sequence: Synthetic oligonucleotide
  Sense strand starting at position 1518 of SEQ ID NO: 1885526
gggucuuucucuucgagug

SEQ ID NO: 2348509 - RNA, 19 nt, Artificial Sequence
  Description of Artificial Sequence: Synthetic oligonucleotide
  Antisense strand to SEQ ID NO: 2348508
cacucgaagagaaagaccc

SEQ ID NO: 2348510 - RNA, 19 nt, Artificial Sequence
  Description of Artificial Sequence: Synthetic oligonucleotide
  Sense strand starting at position 1519 of SEQ ID NO: 1885526
ggucuuucucuucgaguga

SEQ ID NO: 2348511 - RNA, 19 nt, Artificial Sequence
  Description of Artificial Sequence: Synthetic oligonucleotide
  Antisense strand to SEQ ID NO: 2348510
ucacucgaagagaaagacc

SEQ ID NO: 2348512 - RNA, 19 nt, Artificial Sequence
  Description of Artificial Sequence: Synthetic oligonucleotide
  Sense strand starting at position 1523 of SEQ ID NO: 1885526
uuucucuucgagugaaugu

SEQ ID NO: 2348513 - RNA, 19 nt, Artificial Sequence
  Description of Artificial Sequence: Synthetic oligonucleotide
  Antisense strand to SEQ ID NO: 2348512
acauucacucgaagagaaa

SEQ ID NO: 2348514 - RNA, 19 nt, Artificial Sequence
  Description of Artificial Sequence: Synthetic oligonucleotide
  Sense strand starting at position 1530 of SEQ ID NO: 1885526
ucgagugaauguggaaaca

SEQ ID NO: 2348515 - RNA, 19 nt, Artificial Sequence
  Description of Artificial Sequence: Synthetic oligonucleotide
  Antisense strand to SEQ ID NO: 2348514
uguuuccacauucacucga

SEQ ID NO: 2348516 - RNA, 19 nt, Artificial Sequence
  Description of Artificial Sequence: Synthetic oligonucleotide
  Sense strand starting at position 1542 of SEQ ID NO: 1885526
ggaaacagcucuuacaaga

SEQ ID NO: 2348517 - RNA, 19 nt, Artificial Sequence
  Description of Artificial Sequence: Synthetic oligonucleotide
  Antisense strand to SEQ ID NO: 2348516
ucuuguaagagcuguuucc

SEQ ID NO: 2348518 - RNA, 19 nt, Artificial Sequence
  Description of Artificial Sequence: Synthetic oligonucleotide
  Sense strand starting at position 1591 of SEQ ID NO: 1885526
gagcgaugccauuguagga

SEQ ID NO: 2348519 - RNA, 19 nt, Artificial Sequence
  Description of Artificial Sequence: Synthetic oligonucleotide
  Antisense strand to SEQ ID NO: 2348518
uccuacaauggcaucgcuc

SEQ ID NO: 2348520 - RNA, 19 nt, Artificial Sequence
  Description of Artificial Sequence: Synthetic oligonucleotide
  Sense strand starting at position 2012 of SEQ ID NO: 1885526
gggagaaucccuggcacau

SEQ ID NO: 2348521 - RNA, 19 nt, Artificial Sequence
  Description of Artificial Sequence: Synthetic oligonucleotide
  Antisense strand to SEQ ID NO: 2348520
augugccagggauucuccc

SEQ ID NO: 2348522 - RNA, 19 nt, Artificial Sequence
  Description of Artificial Sequence: Synthetic oligonucleotide
  Sense strand starting at position 3020 of SEQ ID NO: 1885526
ggaagaugcccgugcguua

SEQ ID NO: 2348523 - RNA, 19 nt, Artificial Sequence
  Description of Artificial Sequence: Synthetic oligonucleotide
  Antisense strand to SEQ ID NO: 2348522
uaacgcacgggcaucuucc

SEQ ID NO: 2348524 - RNA, 19 nt, Artificial Sequence
  Description of Artificial Sequence: Synthetic oligonucleotide
  Sense strand starting at position 3021 of SEQ ID NO: 1885526
gaagaugcccgugcguuau

SEQ ID NO: 2348525 - RNA, 19 nt, Artificial Sequence
  Description of Artificial Sequence: Synthetic oligonucleotide
  Antisense strand to SEQ ID NO: 2348524
auaacgcacgggcaucuuc

SEQ ID NO: 2348526 - RNA, 19 nt, Artificial Sequence
  Description of Artificial Sequence: Synthetic oligonucleotide
  Sense strand starting at position 3078 of SEQ ID NO: 1885526
aguggacccucacaaagau

SEQ ID NO: 2348527 - RNA, 19 nt, Artificial Sequence
  Description of Artificial Sequence: Synthetic oligonucleotide
  Antisense strand to SEQ ID NO: 2348526
aucuuugugaggguccacu

SEQ ID NO: 2348528 - RNA, 19 nt, Artificial Sequence
  Description of Artificial Sequence: Synthetic oligonucleotide
  Sense strand starting at position 3187 of SEQ ID NO: 1885526
ucaacuuauuugggaaggu

SEQ ID NO: 2348529 - RNA, 19 nt, Artificial Sequence
  Description of Artificial Sequence: Synthetic oligonucleotide
  Antisense strand to SEQ ID NO: 2348528
accuucccaaauaaguuga

SEQ ID NO: 2348530 - RNA, 19 nt, Artificial Sequence
  Description of Artificial Sequence: Synthetic oligonucleotide
  Sense strand starting at position 3188 of SEQ ID NO: 1885526
caacuuauuugggaagguu

SEQ ID NO: 2348531 - RNA, 19 nt, Artificial Sequence
  Description of Artificial Sequence: Synthetic oligonucleotide
  Antisense strand to SEQ ID NO: 2348530
aaccuucccaaauaaguug

SEQ ID NO: 2348532 - RNA, 19 nt, Artificial Sequence
  Description of Artificial Sequence: Synthetic oligonucleotide
  Sense strand starting at position 3201 of SEQ ID NO: 1885526
aagguuaaaugaguccaua

SEQ ID NO: 2348533 - RNA, 19 nt, Artificial Sequence
  Description of Artificial Sequence: Synthetic oligonucleotide
  Antisense strand to SEQ ID NO: 2348532
uauggacucauuuaaccuu

SEQ ID NO: 2348534 - RNA, 19 nt, Artificial Sequence
  Description of Artificial Sequence: Synthetic oligonucleotide
  Sense strand starting at position 3237 of SEQ ID NO: 1885526
guuuguccugcaggauuga

SEQ ID NO: 2348535 - RNA, 19 nt, Artificial Sequence
  Description of Artificial Sequence: Synthetic oligonucleotide
  Antisense strand to SEQ ID NO: 2348534
ucaauccugcaggacaaac

SEQ ID NO: 2348536 - RNA, 19 nt, Artificial Sequence
  Description of Artificial Sequence: Synthetic oligonucleotide
  Sense strand starting at position 3246 of SEQ ID NO: 1885526
gcaggauugaguggguugu

SEQ ID NO: 2348537 - RNA, 19 nt, Artificial Sequence
  Description of Artificial Sequence: Synthetic oligonucleotide
  Antisense strand to SEQ ID NO: 2348536
acaacccacucaauccugc

SEQ ID NO: 2348538 - RNA, 19 nt, Artificial Sequence
  Description of Artificial Sequence: Synthetic oligonucleotide
  Sense strand starting at position 3314 of SEQ ID NO: 1885526
gacgcaguguauuucuuaa

SEQ ID NO: 2348539 - RNA, 19 nt, Artificial Sequence
  Description of Artificial Sequence: Synthetic oligonucleotide
  Antisense strand to SEQ ID NO: 2348538
uuaagaaauacacugcguc

SEQ ID NO: 2348540 - RNA, 19 nt, Artificial Sequence
  Description of Artificial Sequence: Synthetic oligonucleotide
  Sense strand starting at position 3316 of SEQ ID NO: 1885526
cgcaguguauuucuuaagu

SEQ ID NO: 2348541 - RNA, 19 nt, Artificial Sequence
  Description of Artificial Sequence: Synthetic oligonucleotide
  Antisense strand to SEQ ID NO: 2348540
acuuaagaaauacacugcg

SEQ ID NO: 2348542 - RNA, 19 nt, Artificial Sequence
  Description of Artificial Sequence: Synthetic oligonucleotide
  Sense strand starting at position 3322 of SEQ ID NO: 1885526
guauuucuuaaguggcagu

SEQ ID NO: 2348543 - RNA, 19 nt, Artificial Sequence
  Description of Artificial Sequence: Synthetic oligonucleotide
  Antisense strand to SEQ ID NO: 2348542
acugccacuuaagaaauac

SEQ ID NO: 2348544 - RNA, 19 nt, Artificial Sequence
  Description of Artificial Sequence: Synthetic oligonucleotide
  Sense strand starting at position 3337 of SEQ ID NO: 1885526
cagugucaugcuuaggguu

SEQ ID NO: 2348545 - RNA, 19 nt, Artificial Sequence
  Description of Artificial Sequence: Synthetic oligonucleotide
  Antisense strand to SEQ ID NO: 2348544
aacccuaagcaugacacug

SEQ ID NO: 2348546 - RNA, 19 nt, Artificial Sequence
  Description of Artificial Sequence: Synthetic oligonucleotide
  Sense strand starting at position 3350 of SEQ ID NO: 1885526
aggguuugucccggaugag

SEQ ID NO: 2348547 - RNA, 19 nt, Artificial Sequence
  Description of Artificial Sequence: Synthetic oligonucleotide
  Antisense strand to SEQ ID NO: 2348546
cucauccgggacaaacccu

SEQ ID NO: 2348548 - RNA, 19 nt, Artificial Sequence
  Description of Artificial Sequence: Synthetic oligonucleotide
  Sense strand starting at position 3353 of SEQ ID NO: 1885526
guuugucccggaugagcuu

SEQ ID NO: 2348549 - RNA, 19 nt, Artificial Sequence
  Description of Artificial Sequence: Synthetic oligonucleotide
  Antisense strand to SEQ ID NO: 2348548
aagcucauccgggacaaac

SEQ ID NO: 2348550 - RNA, 19 nt, Artificial Sequence
  Description of Artificial Sequence: Synthetic oligonucleotide
  Sense strand starting at position 3402 of SEQ ID NO: 1885526
gauugaggccuugguuaaa

SEQ ID NO: 2348551 - RNA, 19 nt, Artificial Sequence
  Description of Artificial Sequence: Synthetic oligonucleotide
  Antisense strand to SEQ ID NO: 2348550
uuuaaccaaggccucaauc

SEQ ID NO: 2348552 - RNA, 19 nt, Artificial Sequence
  Description of Artificial Sequence: Synthetic oligonucleotide
  Sense strand starting at position 3507 of SEQ ID NO: 1885526
agccaaauucuguaguaca

SEQ ID NO: 2348553 - RNA, 19 nt, Artificial Sequence
  Description of Artificial Sequence: Synthetic oligonucleotide
  Antisense strand to SEQ ID NO: 2348552
uguacuacagaauuuggcu

SEQ ID NO: 2348554 - RNA, 19 nt, Artificial Sequence
  Description of Artificial Sequence: Synthetic oligonucleotide
  Sense strand starting at position 3615 of SEQ ID NO: 1885526
cuggcuugccucuaugaaa

SEQ ID NO: 2348555 - RNA, 19 nt, Artificial Sequence
  Description of Artificial Sequence: Synthetic oligonucleotide
  Antisense strand to SEQ ID NO: 2348554
uuucauagaggcaagccag

SEQ ID NO: 2348556 - RNA, 19 nt, Artificial Sequence
  Description of Artificial Sequence: Synthetic oligonucleotide
  Sense strand starting at position 3668 of SEQ ID NO: 1885526
cuuguuauuccggcgguua

SEQ ID NO: 2348557 - RNA, 19 nt, Artificial Sequence
  Description of Artificial Sequence: Synthetic oligonucleotide
  Antisense strand to SEQ ID NO: 2348556
uaaccgccggaauaacaag

SEQ ID NO: 2348558 - RNA, 19 nt, Artificial Sequence
  Description of Artificial Sequence: Synthetic oligonucleotide
  Sense strand starting at position 3669 of SEQ ID NO: 1885526
uuguuauuccggcgguuag

SEQ ID NO: 2348559 - RNA, 19 nt, Artificial Sequence
  Description of Artificial Sequence: Synthetic oligonucleotide
  Antisense strand to SEQ ID NO: 2348558
cuaaccgccggaauaacaa

SEQ ID NO: 2348560 - RNA, 19 nt, Artificial Sequence
  Description of Artificial Sequence: Synthetic oligonucleotide
  Sense strand starting at position 3680 of SEQ ID NO: 1885526
gcgguuaggugcauguuua

SEQ ID NO: 2348561 - RNA, 19 nt, Artificial Sequence
  Description of Artificial Sequence: Synthetic oligonucleotide
  Antisense strand to SEQ ID NO: 2348560
uaaacaugcaccuaaccgc

SEQ ID NO: 2348562 - RNA, 19 nt, Artificial Sequence
  Description of Artificial Sequence: Synthetic oligonucleotide
  Sense strand starting at position 3681 of SEQ ID NO: 1885526
cgguuaggugcauguuuau

SEQ ID NO: 2348563 - RNA, 19 nt, Artificial Sequence
  Description of Artificial Sequence: Synthetic oligonucleotide
  Antisense strand to SEQ ID NO: 2348562
auaaacaugcaccuaaccg

SEQ ID NO: 2348564 - RNA, 19 nt, Artificial Sequence
  Description of Artificial Sequence: Synthetic oligonucleotide
  Sense strand starting at position 3741 of SEQ ID NO: 1885526
uuuaaauaggugcaucaua

SEQ ID NO: 2348565 - RNA, 19 nt, Artificial Sequence
  Description of Artificial Sequence: Synthetic oligonucleotide
  Antisense strand to SEQ ID NO: 2348564
uaugaugcaccuauuuaaa

SEQ ID NO: 2348566 - RNA, 19 nt, Artificial Sequence
  Description of Artificial Sequence: Synthetic oligonucleotide
  Sense strand starting at position 3746 of SEQ ID NO: 1885526
auaggugcaucauauagaa

SEQ ID NO: 2348567 - RNA, 19 nt, Artificial Sequence
  Description of Artificial Sequence: Synthetic oligonucleotide
  Antisense strand to SEQ ID NO: 2348566
uucuauaugaugcaccuau

SEQ ID NO: 2348568 - RNA, 19 nt, Artificial Sequence
  Description of Artificial Sequence: Synthetic oligonucleotide
  Sense strand starting at position 3796 of SEQ ID NO: 1885526
acuacaguauaucagauau

SEQ ID NO: 2348569 - RNA, 19 nt, Artificial Sequence
  Description of Artificial Sequence: Synthetic oligonucleotide
  Antisense strand to SEQ ID NO: 2348568
auaucugauauacuguagu

SEQ ID NO: 2348570 - RNA, 19 nt, Artificial Sequence
  Description of Artificial Sequence: Synthetic oligonucleotide
  Sense strand starting at position 3830 of SEQ ID NO: 1885526
guuguagucucugcucuuu

SEQ ID NO: 2348571 - RNA, 19 nt, Artificial Sequence
  Description of Artificial Sequence: Synthetic oligonucleotide
  Antisense strand to SEQ ID NO: 2348570
aaagagcagagacuacaac

SEQ ID NO: 2348572 - RNA, 19 nt, Artificial Sequence
  Description of Artificial Sequence: Synthetic oligonucleotide
  Sense strand starting at position 3832 of SEQ ID NO: 1885526
uguagucucugcucuuuaa

SEQ ID NO: 2348573 - RNA, 19 nt, Artificial Sequence
  Description of Artificial Sequence: Synthetic oligonucleotide
  Antisense strand to SEQ ID NO: 2348572
uuaaagagcagagacuaca

SEQ ID NO: 2348574 - RNA, 19 nt, Artificial Sequence
  Description of Artificial Sequence: Synthetic oligonucleotide
  Sense strand starting at position 3902 of SEQ ID NO: 1885526
ccuugcuguccuugugaaa

SEQ ID NO: 2348575 - RNA, 19 nt, Artificial Sequence
  Description of Artificial Sequence: Synthetic oligonucleotide
  Antisense strand to SEQ ID NO: 2348574
uuucacaaggacagcaagg

SEQ ID NO: 2348576 - RNA, 19 nt, Artificial Sequence
  Description of Artificial Sequence: Synthetic oligonucleotide
  Sense strand starting at position 3911 of SEQ ID NO: 1885526
ccuugugaaaucugguaug

SEQ ID NO: 2348577 - RNA, 19 nt, Artificial Sequence
  Description of Artificial Sequence: Synthetic oligonucleotide
  Antisense strand to SEQ ID NO: 2348576
cauaccagauuucacaagg

SEQ ID NO: 2348578 - RNA, 19 nt, Artificial Sequence
  Description of Artificial Sequence: Synthetic oligonucleotide
  Sense strand starting at position 3916 of SEQ ID NO: 1885526
ugaaaucugguauguguau

SEQ ID NO: 2348579 - RNA, 19 nt, Artificial Sequence
  Description of Artificial Sequence: Synthetic oligonucleotide
  Antisense strand to SEQ ID NO: 2348578
auacacauaccagauuuca

SEQ ID NO: 2348580 - RNA, 19 nt, Artificial Sequence
  Description of Artificial Sequence: Synthetic oligonucleotide
  Sense strand starting at position 3917 of SEQ ID NO: 1885526
gaaaucugguauguguaua

SEQ ID NO: 2348581 - RNA, 19 nt, Artificial Sequence
  Description of Artificial Sequence: Synthetic oligonucleotide
  Antisense strand to SEQ ID NO: 2348580
uauacacauaccagauuuc

SEQ ID NO: 2348582 - RNA, 19 nt, Artificial Sequence
  Description of Artificial Sequence: Synthetic oligonucleotide
  Sense strand starting at position 3956 of SEQ ID NO: 1885526
uuguaaauacuacaguagu

SEQ ID NO: 2348583 - RNA, 19 nt, Artificial Sequence
  Description of Artificial Sequence: Synthetic oligonucleotide
  Antisense strand to SEQ ID NO: 2348582
acuacuguaguauuuacaa

SEQ ID NO: 2348584 - RNA, 19 nt, Artificial Sequence
  Description of Artificial Sequence: Synthetic oligonucleotide
  Sense strand starting at position 3962 of SEQ ID NO: 1885526
auacuacaguaguauugaa

SEQ ID NO: 2348585 - RNA, 19 nt, Artificial Sequence
  Description of Artificial Sequence: Synthetic oligonucleotide
  Antisense strand to SEQ ID NO: 2348584
uucaauacuacuguaguau

SEQ ID NO: 2348586 - RNA, 19 nt, Artificial Sequence
  Description of Artificial Sequence: Synthetic oligonucleotide
  Sense strand starting at position 69 of SEQ ID NO: 1885527
ugaaguccuuaagacuaau

SEQ ID NO: 2348587 - RNA, 19 nt, Artificial Sequence
  Description of Artificial Sequence: Synthetic oligonucleotide
  Antisense strand to SEQ ID NO: 2348586
auuagucuuaaggacuuca

SEQ ID NO: 2348588 - RNA, 19 nt, Artificial Sequence
  Description of Artificial Sequence: Synthetic oligonucleotide
  Sense strand starting at position 143 of SEQ ID NO: 1885527
gagugcauauguucucaaa

SEQ ID NO: 2348589 - RNA, 19 nt, Artificial Sequence
  Description of Artificial Sequence: Synthetic oligonucleotide
  Antisense strand to SEQ ID NO: 2348588
uuugagaacauaugcacuc

SEQ ID NO: 2348590 - RNA, 19 nt, Artificial Sequence
  Description of Artificial Sequence: Synthetic oligonucleotide
  Sense strand starting at position 145 of SEQ ID NO: 1885527
gugcauauguucucaaagu

SEQ ID NO: 2348591 - RNA, 19 nt, Artificial Sequence
  Description of Artificial Sequence: Synthetic oligonucleotide
  Antisense strand to SEQ ID NO: 2348590
acuuugagaacauaugcac

SEQ ID NO: 2348592 - RNA, 19 nt, Artificial Sequence
  Description of Artificial Sequence: Synthetic oligonucleotide
  Sense strand starting at position 154 of SEQ ID NO: 1885527
uucucaaagugcccagaua

SEQ ID NO: 2348593 - RNA, 19 nt, Artificial Sequence
  Description of Artificial Sequence: Synthetic oligonucleotide
  Antisense strand to SEQ ID NO: 2348592
uaucugggcacuuugagaa

SEQ ID NO: 2348594 - RNA, 19 nt, Artificial Sequence
  Description of Artificial Sequence: Synthetic oligonucleotide
  Sense strand starting at position 155 of SEQ ID NO: 1885527
ucucaaagugcccagauaa

SEQ ID NO: 2348595 - RNA, 19 nt, Artificial Sequence
  Description of Artificial Sequence: Synthetic oligonucleotide
  Antisense strand to SEQ ID NO: 2348594
uuaucugggcacuuugaga

SEQ ID NO: 2348596 - RNA, 19 nt, Artificial Sequence
  Description of Artificial Sequence: Synthetic oligonucleotide
  Sense strand starting at position 406 of SEQ ID NO: 1885527
cuccuaggaucuucuaguu

SEQ ID NO: 2348597 - RNA, 19 nt, Artificial Sequence
  Description of Artificial Sequence: Synthetic oligonucleotide
  Antisense strand to SEQ ID NO: 2348596
aacuagaagauccuaggag

SEQ ID NO: 2348598 - RNA, 19 nt, Artificial Sequence
  Description of Artificial Sequence: Synthetic oligonucleotide
  Sense strand starting at position 411 of SEQ ID NO: 1885527
aggaucuucuaguuaggau

SEQ ID NO: 2348599 - RNA, 19 nt, Artificial Sequence
  Description of Artificial Sequence: Synthetic oligonucleotide
  Antisense strand to SEQ ID NO: 2348598
auccuaacuagaagauccu

SEQ ID NO: 2348600 - RNA, 19 nt, Artificial Sequence
  Description of Artificial Sequence: Synthetic oligonucleotide
  Sense strand starting at position 463 of SEQ ID NO: 1885527
aacagugaaugcuuaaugu

SEQ ID NO: 2348601 - RNA, 19 nt, Artificial Sequence
  Description of Artificial Sequence: Synthetic oligonucleotide
  Antisense strand to SEQ ID NO: 2348600
acauuaagcauucacuguu

SEQ ID NO: 2348602 - RNA, 19 nt, Artificial Sequence
  Description of Artificial Sequence: Synthetic oligonucleotide
  Sense strand starting at position 481 of SEQ ID NO: 1885527
uggacaaucgcauaacuga

SEQ ID NO: 2348603 - RNA, 19 nt, Artificial Sequence
  Description of Artificial Sequence: Synthetic oligonucleotide
  Antisense strand to SEQ ID NO: 2348602
ucaguuaugcgauugucca

SEQ ID NO: 2348604 - RNA, 19 nt, Artificial Sequence
  Description of Artificial Sequence: Synthetic oligonucleotide
  Sense strand starting at position 601 of SEQ ID NO: 1885527
ucagaaauaucggagcaga

SEQ ID NO: 2348605 - RNA, 19 nt, Artificial Sequence
  Description of Artificial Sequence: Synthetic oligonucleotide
  Antisense strand to SEQ ID NO: 2348604
ucugcuccgauauuucuga

SEQ ID NO: 2348606 - RNA, 19 nt, Artificial Sequence
  Description of Artificial Sequence: Synthetic oligonucleotide
  Sense strand starting at position 614 of SEQ ID NO: 1885527
agcagaacuuagcuuugaa

SEQ ID NO: 2348607 - RNA, 19 nt, Artificial Sequence
  Description of Artificial Sequence: Synthetic oligonucleotide
  Antisense strand to SEQ ID NO: 2348606
uucaaagcuaaguucugcu

SEQ ID NO: 2348608 - RNA, 19 nt, Artificial Sequence
  Description of Artificial Sequence: Synthetic oligonucleotide
  Sense strand starting at position 617 of SEQ ID NO: 1885527
agaacuuagcuuugaaucu

SEQ ID NO: 2348609 - RNA, 19 nt, Artificial Sequence
  Description of Artificial Sequence: Synthetic oligonucleotide
  Antisense strand to SEQ ID NO: 2348608
agauucaaagcuaaguucu

SEQ ID NO: 2348610 - RNA, 19 nt, Artificial Sequence
  Description of Artificial Sequence: Synthetic oligonucleotide
  Sense strand starting at position 655 of SEQ ID NO: 1885527
uugaacuuaucagauaaag

SEQ ID NO: 2348611 - RNA, 19 nt, Artificial Sequence
  Description of Artificial Sequence: Synthetic oligonucleotide
  Antisense strand to SEQ ID NO: 2348610
cuuuaucugauaaguucaa

SEQ ID NO: 2348612 - RNA, 19 nt, Artificial Sequence
  Description of Artificial Sequence: Synthetic oligonucleotide
  Sense strand starting at position 703 of SEQ ID NO: 1885527
agagcauccugacugcuaa

SEQ ID NO: 2348613 - RNA, 19 nt, Artificial Sequence
  Description of Artificial Sequence: Synthetic oligonucleotide
  Antisense strand to SEQ ID NO: 2348612
uuagcagucaggaugcucu

SEQ ID NO: 2348614 - RNA, 19 nt, Artificial Sequence
  Description of Artificial Sequence: Synthetic oligonucleotide
  Sense strand starting at position 714 of SEQ ID NO: 1885527
acugcuaacugccagagaa

SEQ ID NO: 2348615 - RNA, 19 nt, Artificial Sequence
  Description of Artificial Sequence: Synthetic oligonucleotide
  Antisense strand to SEQ ID NO: 2348614
uucucuggcaguuagcagu

SEQ ID NO: 2348616 - RNA, 19 nt, Artificial Sequence
  Description of Artificial Sequence: Synthetic oligonucleotide
  Sense strand starting at position 716 of SEQ ID NO: 1885527
ugcuaacugccagagaacu

SEQ ID NO: 2348617 - RNA, 19 nt, Artificial Sequence
  Description of Artificial Sequence: Synthetic oligonucleotide
  Antisense strand to SEQ ID NO: 2348616
aguucucuggcaguuagca

SEQ ID NO: 2348618 - RNA, 19 nt, Artificial Sequence
  Description of Artificial Sequence: Synthetic oligonucleotide
  Sense strand starting at position 726 of SEQ ID NO: 1885527
cagagaacugacugggcau

SEQ ID NO: 2348619 - RNA, 19 nt, Artificial Sequence
  Description of Artificial Sequence: Synthetic oligonucleotide
  Antisense strand to SEQ ID NO: 2348618
augcccagucaguucucug

SEQ ID NO: 2348620 - RNA, 19 nt, Artificial Sequence
  Description of Artificial Sequence: Synthetic oligonucleotide
  Sense strand starting at position 1545 of SEQ ID NO: 1885527
cauaacuaguuuccggaau

SEQ ID NO: 2348621 - RNA, 19 nt, Artificial Sequence
  Description of Artificial Sequence: Synthetic oligonucleotide
  Antisense strand to SEQ ID NO: 2348620
auuccggaaacuaguuaug

SEQ ID NO: 2348622 - RNA, 19 nt, Artificial Sequence
  Description of Artificial Sequence: Synthetic oligonucleotide
  Sense strand starting at position 1546 of SEQ ID NO: 1885527
auaacuaguuuccggaaua

SEQ ID NO: 2348623 - RNA, 19 nt, Artificial Sequence
  Description of Artificial Sequence: Synthetic oligonucleotide
  Antisense strand to SEQ ID NO: 2348622
uauuccggaaacuaguuau

SEQ ID NO: 2348624 - RNA, 19 nt, Artificial Sequence
  Description of Artificial Sequence: Synthetic oligonucleotide
  Sense strand starting at position 1547 of SEQ ID NO: 1885527
uaacuaguuuccggaauag

SEQ ID NO: 2348625 - RNA, 19 nt, Artificial Sequence
  Description of Artificial Sequence: Synthetic oligonucleotide
  Antisense strand to SEQ ID NO: 2348624
cuauuccggaaacuaguua

SEQ ID NO: 2348626 - RNA, 19 nt, Artificial Sequence
  Description of Artificial Sequence: Synthetic oligonucleotide
  Sense strand starting at position 2118 of SEQ ID NO: 1885527
agcaauuuauccgugugca

SEQ ID NO: 2348627 - RNA, 19 nt, Artificial Sequence
  Description of Artificial Sequence: Synthetic oligonucleotide
  Antisense strand to SEQ ID NO: 2348626
ugcacacggauaaauugcu

SEQ ID NO: 2348628 - RNA, 19 nt, Artificial Sequence
  Description of Artificial Sequence: Synthetic oligonucleotide
  Sense strand starting at position 2119 of SEQ ID NO: 1885527
gcaauuuauccgugugcag

SEQ ID NO: 2348629 - RNA, 19 nt, Artificial Sequence
  Description of Artificial Sequence: Synthetic oligonucleotide
  Antisense strand to SEQ ID NO: 2348628
cugcacacggauaaauugc

SEQ ID NO: 2348630 - RNA, 19 nt, Artificial Sequence
  Description of Artificial Sequence: Synthetic oligonucleotide
  Sense strand starting at position 2151 of SEQ ID NO: 1885527
agaagaugcuaauuaaagu

SEQ ID NO: 2348631 - RNA, 19 nt, Artificial Sequence
  Description of Artificial Sequence: Synthetic oligonucleotide
  Antisense strand to SEQ ID NO: 2348630
acuuuaauuagcaucuucu

SEQ ID NO: 2348632 - RNA, 19 nt, Artificial Sequence
  Description of Artificial Sequence: Synthetic oligonucleotide
  Sense strand starting at position 2157 of SEQ ID NO: 1885527
ugcuaauuaaagugaaggu

SEQ ID NO: 2348633 - RNA, 19 nt, Artificial Sequence
  Description of Artificial Sequence: Synthetic oligonucleotide
  Antisense strand to SEQ ID NO: 2348632
accuucacuuuaauuagca

SEQ ID NO: 2348634 - RNA, 19 nt, Artificial Sequence
  Description of Artificial Sequence: Synthetic oligonucleotide
  Sense strand starting at position 2511 of SEQ ID NO: 1885527
cucagauucuuggaguaag

SEQ ID NO: 2348635 - RNA, 19 nt, Artificial Sequence
  Description of Artificial Sequence: Synthetic oligonucleotide
  Antisense strand to SEQ ID NO: 2348634
cuuacuccaagaaucugag

SEQ ID NO: 2348636 - RNA, 19 nt, Artificial Sequence
  Description of Artificial Sequence: Synthetic oligonucleotide
  Sense strand starting at position 2627 of SEQ ID NO: 1885527
gcuagacuaugagccuuua

SEQ ID NO: 2348637 - RNA, 19 nt, Artificial Sequence
  Description of Artificial Sequence: Synthetic oligonucleotide
  Antisense strand to SEQ ID NO: 2348636
uaaaggcucauagucuagc

SEQ ID NO: 2348638 - RNA, 19 nt, Artificial Sequence
  Description of Artificial Sequence: Synthetic oligonucleotide
  Sense strand starting at position 2772 of SEQ ID NO: 1885527
guuaguuaccgcugcccua

SEQ ID NO: 2348639 - RNA, 19 nt, Artificial Sequence
  Description of Artificial Sequence: Synthetic oligonucleotide
  Antisense strand to SEQ ID NO: 2348638
uagggcagcgguaacuaac

SEQ ID NO: 2348640 - RNA, 19 nt, Artificial Sequence
  Description of Artificial Sequence: Synthetic oligonucleotide
  Sense strand starting at position 2838 of SEQ ID NO: 1885527
cguggugguucuucaccaa

SEQ ID NO: 2348641 - RNA, 19 nt, Artificial Sequence
  Description of Artificial Sequence: Synthetic oligonucleotide
  Antisense strand to SEQ ID NO: 2348640
uuggugaagaaccaccacg

SEQ ID NO: 2348642 - RNA, 19 nt, Artificial Sequence
  Description of Artificial Sequence: Synthetic oligonucleotide
  Sense strand starting at position 2958 of SEQ ID NO: 1885527
acaagugaagucuaaugcu

SEQ ID NO: 2348643 - RNA, 19 nt, Artificial Sequence
  Description of Artificial Sequence: Synthetic oligonucleotide
  Antisense strand to SEQ ID NO: 2348642
agcauuagacuucacuugu

SEQ ID NO: 2348644 - RNA, 19 nt, Artificial Sequence
  Description of Artificial Sequence: Synthetic oligonucleotide
  Sense strand starting at position 2999 of SEQ ID NO: 1885527
guaaaucuaucguuauuuc

SEQ ID NO: 2348645 - RNA, 19 nt, Artificial Sequence
  Description of Artificial Sequence: Synthetic oligonucleotide
  Antisense strand to SEQ ID NO: 2348644
gaaauaacgauagauuuac

SEQ ID NO: 2348646 - RNA, 19 nt, Artificial Sequence
  Description of Artificial Sequence: Synthetic oligonucleotide
  Sense strand starting at position 3090 of SEQ ID NO: 1885527
cuucuuagcuaagauuuga

SEQ ID NO: 2348647 - RNA, 19 nt, Artificial Sequence
  Description of Artificial Sequence: Synthetic oligonucleotide
  Antisense strand to SEQ ID NO: 2348646
ucaaaucuuagcuaagaag

SEQ ID NO: 2348648 - RNA, 19 nt, Artificial Sequence
  Description of Artificial Sequence: Synthetic oligonucleotide
  Sense strand starting at position 3151 of SEQ ID NO: 1885527
cguugaguagcggccuaua

SEQ ID NO: 2348649 - RNA, 19 nt, Artificial Sequence
  Description of Artificial Sequence: Synthetic oligonucleotide
  Antisense strand to SEQ ID NO: 2348648
uauaggccgcuacucaacg

SEQ ID NO: 2348650 - RNA, 19 nt, Artificial Sequence
  Description of Artificial Sequence: Synthetic oligonucleotide
  Sense strand starting at position 3154 of SEQ ID NO: 1885527
ugaguagcggccuauauaa

SEQ ID NO: 2348651 - RNA, 19 nt, Artificial Sequence
  Description of Artificial Sequence: Synthetic oligonucleotide
  Antisense strand to SEQ ID NO: 2348650
uuauauaggccgcuacuca

SEQ ID NO: 2348652 - RNA, 19 nt, Artificial Sequence
  Description of Artificial Sequence: Synthetic oligonucleotide
  Sense strand starting at position 3156 of SEQ ID NO: 1885527
aguagcggccuauauaaga

SEQ ID NO: 2348653 - RNA, 19 nt, Artificial Sequence
  Description of Artificial Sequence: Synthetic oligonucleotide
  Antisense strand to SEQ ID NO: 2348652
ucuuauauaggccgcuacu

SEQ ID NO: 2348654 - RNA, 19 nt, Artificial Sequence
  Description of Artificial Sequence: Synthetic oligonucleotide
  Sense strand starting at position 3167 of SEQ ID NO: 1885527
auauaagagucguaacauc

SEQ ID NO: 2348655 - RNA, 19 nt, Artificial Sequence
  Description of Artificial Sequence: Synthetic oligonucleotide
  Antisense strand to SEQ ID NO: 2348654
gauguuacgacucuuauau

SEQ ID NO: 2348656 - RNA, 19 nt, Artificial Sequence
  Description of Artificial Sequence: Synthetic oligonucleotide
  Sense strand starting at position 3203 of SEQ ID NO: 1885527
ggucacuggcgccauuaaa

SEQ ID NO: 2348657 - RNA, 19 nt, Artificial Sequence
  Description of Artificial Sequence: Synthetic oligonucleotide
  Antisense strand to SEQ ID NO: 2348656
uuuaauggcgccagugacc

SEQ ID NO: 2348658 - RNA, 19 nt, Artificial Sequence
  Description of Artificial Sequence: Synthetic oligonucleotide
  Sense strand starting at position 3428 of SEQ ID NO: 1885527
auugauugauccugggaug

SEQ ID NO: 2348659 - RNA, 19 nt, Artificial Sequence
  Description of Artificial Sequence: Synthetic oligonucleotide
  Antisense strand to SEQ ID NO: 2348658
caucccaggaucaaucaau

SEQ ID NO: 2348660 - RNA, 19 nt, Artificial Sequence
  Description of Artificial Sequence: Synthetic oligonucleotide
  Sense strand starting at position 3429 of SEQ ID NO: 1885527
uugauugauccugggaugu

SEQ ID NO: 2348661 - RNA, 19 nt, Artificial Sequence
  Description of Artificial Sequence: Synthetic oligonucleotide
  Antisense strand to SEQ ID NO: 2348660
acaucccaggaucaaucaa

SEQ ID NO: 2348662 - RNA, 19 nt, Artificial Sequence
  Description of Artificial Sequence: Synthetic oligonucleotide
  Sense strand starting at position 3834 of SEQ ID NO: 1885527
auaauauagugcuagguaa

SEQ ID NO: 2348663 - RNA, 19 nt, Artificial Sequence
  Description of Artificial Sequence: Synthetic oligonucleotide
  Antisense strand to SEQ ID NO: 2348662
uuaccuagcacuauauuau

SEQ ID NO: 2348664 - RNA, 19 nt, Artificial Sequence
  Description of Artificial Sequence: Synthetic oligonucleotide
  Sense strand starting at position 3838 of SEQ ID NO: 1885527
uauagugcuagguaaggau

SEQ ID NO: 2348665 - RNA, 19 nt, Artificial Sequence
  Description of Artificial Sequence: Synthetic oligonucleotide
  Antisense strand to SEQ ID NO: 2348664
auccuuaccuagcacuaua

SEQ ID NO: 2348666 - RNA, 19 nt, Artificial Sequence
  Description of Artificial Sequence: Synthetic oligonucleotide
  Sense strand starting at position 47 of SEQ ID NO: 1885528
accucaguguuccuaagau

SEQ ID NO: 2348667 - RNA, 19 nt, Artificial Sequence
  Description of Artificial Sequence: Synthetic oligonucleotide
  Antisense strand to SEQ ID NO: 2348666
aucuuaggaacacugaggu

SEQ ID NO: 2348668 - RNA, 19 nt, Artificial Sequence
  Description of Artificial Sequence: Synthetic oligonucleotide
  Sense strand starting at position 105 of SEQ ID NO: 1885528
auguucuacaguugggaaa

SEQ ID NO: 2348669 - RNA, 19 nt, Artificial Sequence
  Description of Artificial Sequence: Synthetic oligonucleotide
  Antisense strand to SEQ ID NO: 2348668
uuucccaacuguagaacau

SEQ ID NO: 2348670 - RNA, 19 nt, Artificial Sequence
  Description of Artificial Sequence: Synthetic oligonucleotide
  Sense strand starting at position 157 of SEQ ID NO: 1885528
acaacauggugguuaagaa

SEQ ID NO: 2348671 - RNA, 19 nt, Artificial Sequence
  Description of Artificial Sequence: Synthetic oligonucleotide
  Antisense strand to SEQ ID NO: 2348670
uucuuaaccaccauguugu

SEQ ID NO: 2348672 - RNA, 19 nt, Artificial Sequence
  Description of Artificial Sequence: Synthetic oligonucleotide
  Sense strand starting at position 165 of SEQ ID NO: 1885528
gugguuaagaaugagcuuu

SEQ ID NO: 2348673 - RNA, 19 nt, Artificial Sequence
  Description of Artificial Sequence: Synthetic oligonucleotide
  Antisense strand to SEQ ID NO: 2348672
aaagcucauucuuaaccac

SEQ ID NO: 2348674 - RNA, 19 nt, Artificial Sequence
  Description of Artificial Sequence: Synthetic oligonucleotide
  Sense strand starting at position 171 of SEQ ID NO: 1885528
aagaaugagcuuuggaauc

SEQ ID NO: 2348675 - RNA, 19 nt, Artificial Sequence
  Description of Artificial Sequence: Synthetic oligonucleotide
  Antisense strand to SEQ ID NO: 2348674
gauuccaaagcucauucuu

SEQ ID NO: 2348676 - RNA, 19 nt, Artificial Sequence
  Description of Artificial Sequence: Synthetic oligonucleotide
  Sense strand starting at position 278 of SEQ ID NO: 1885528
agugguauccaccauauag

SEQ ID NO: 2348677 - RNA, 19 nt, Artificial Sequence
  Description of Artificial Sequence: Synthetic oligonucleotide
  Antisense strand to SEQ ID NO: 2348676
cuauaugguggauaccacu

SEQ ID NO: 2348678 - RNA, 19 nt, Artificial Sequence
  Description of Artificial Sequence: Synthetic oligonucleotide
  Sense strand starting at position 315 of SEQ ID NO: 1885528
auaagaguauaugcuaagu

SEQ ID NO: 2348679 - RNA, 19 nt, Artificial Sequence
  Description of Artificial Sequence: Synthetic oligonucleotide
  Antisense strand to SEQ ID NO: 2348678
acuuagcauauacucuuau

SEQ ID NO: 2348680 - RNA, 19 nt, Artificial Sequence
  Description of Artificial Sequence: Synthetic oligonucleotide
  Sense strand starting at position 323 of SEQ ID NO: 1885528
auaugcuaaguccauagua

SEQ ID NO: 2348681 - RNA, 19 nt, Artificial Sequence
  Description of Artificial Sequence: Synthetic oligonucleotide
  Antisense strand to SEQ ID NO: 2348680
uacuauggacuuagcauau

SEQ ID NO: 2348682 - RNA, 19 nt, Artificial Sequence
  Description of Artificial Sequence: Synthetic oligonucleotide
  Sense strand starting at position 325 of SEQ ID NO: 1885528
augcuaaguccauaguaca

SEQ ID NO: 2348683 - RNA, 19 nt, Artificial Sequence
  Description of Artificial Sequence: Synthetic oligonucleotide
  Antisense strand to SEQ ID NO: 2348682
uguacuauggacuuagcau

SEQ ID NO: 2348684 - RNA, 19 nt, Artificial Sequence
  Description of Artificial Sequence: Synthetic oligonucleotide
  Sense strand starting at position 355 of SEQ ID NO: 1885528
auaguugagugcuuaauaa

SEQ ID NO: 2348685 - RNA, 19 nt, Artificial Sequence
  Description of Artificial Sequence: Synthetic oligonucleotide
  Antisense strand to SEQ ID NO: 2348684
uuauuaagcacucaacuau

SEQ ID NO: 2348686 - RNA, 19 nt, Artificial Sequence
  Description of Artificial Sequence: Synthetic oligonucleotide
  Sense strand starting at position 398 of SEQ ID NO: 1885528
agaauacacugguucucaa

SEQ ID NO: 2348687 - RNA, 19 nt, Artificial Sequence
  Description of Artificial Sequence: Synthetic oligonucleotide
  Antisense strand to SEQ ID NO: 2348686
uugagaaccaguguauucu

SEQ ID NO: 2348688 - RNA, 19 nt, Artificial Sequence
  Description of Artificial Sequence: Synthetic oligonucleotide
  Sense strand starting at position 407 of SEQ ID NO: 1885528
ugguucucaacugggagua

SEQ ID NO: 2348689 - RNA, 19 nt, Artificial Sequence
  Description of Artificial Sequence: Synthetic oligonucleotide
  Antisense strand to SEQ ID NO: 2348688
uacucccaguugagaacca

SEQ ID NO: 2348690 - RNA, 19 nt, Artificial Sequence
  Description of Artificial Sequence: Synthetic oligonucleotide
  Sense strand starting at position 451 of SEQ ID NO: 1885528
ggaggccuuuggguugaua

SEQ ID NO: 2348691 - RNA, 19 nt, Artificial Sequence
  Description of Artificial Sequence: Synthetic oligonucleotide
  Antisense strand to SEQ ID NO: 2348690
uaucaacccaaaggccucc

SEQ ID NO: 2348692 - RNA, 19 nt, Artificial Sequence
  Description of Artificial Sequence: Synthetic oligonucleotide
  Sense strand starting at position 453 of SEQ ID NO: 1885528
aggccuuuggguugauaca

SEQ ID NO: 2348693 - RNA, 19 nt, Artificial Sequence
  Description of Artificial Sequence: Synthetic oligonucleotide
  Antisense strand to SEQ ID NO: 2348692
uguaucaacccaaaggccu

SEQ ID NO: 2348694 - RNA, 19 nt, Artificial Sequence
  Description of Artificial Sequence: Synthetic oligonucleotide
  Sense strand starting at position 454 of SEQ ID NO: 1885528
ggccuuuggguugauacaa

SEQ ID NO: 2348695 - RNA, 19 nt, Artificial Sequence
  Description of Artificial Sequence: Synthetic oligonucleotide
  Antisense strand to SEQ ID NO: 2348694
uuguaucaacccaaaggcc

SEQ ID NO: 2348696 - RNA, 19 nt, Artificial Sequence
  Description of Artificial Sequence: Synthetic oligonucleotide
  Sense strand starting at position 553 of SEQ ID NO: 1885528
uggcauccucacuauuaag

SEQ ID NO: 2348697 - RNA, 19 nt, Artificial Sequence
  Description of Artificial Sequence: Synthetic oligonucleotide
  Antisense strand to SEQ ID NO: 2348696
cuuaauagugaggaugcca

SEQ ID NO: 2348698 - RNA, 19 nt, Artificial Sequence
  Description of Artificial Sequence: Synthetic oligonucleotide
  Sense strand starting at position 624 of SEQ ID NO: 1885528
guaucaauguuccuaggac

SEQ ID NO: 2348699 - RNA, 19 nt, Artificial Sequence
  Description of Artificial Sequence: Synthetic oligonucleotide
  Antisense strand to SEQ ID NO: 2348698
guccuaggaacauugauac

SEQ ID NO: 2348700 - RNA, 19 nt, Artificial Sequence
  Description of Artificial Sequence: Synthetic oligonucleotide
  Sense strand starting at position 1226 of SEQ ID NO: 1885528
uagaguggcugguuugaaa

SEQ ID NO: 2348701 - RNA, 19 nt, Artificial Sequence
  Description of Artificial Sequence: Synthetic oligonucleotide
  Antisense strand to SEQ ID NO: 2348700
uuucaaaccagccacucua

SEQ ID NO: 2348702 - RNA, 19 nt, Artificial Sequence
  Description of Artificial Sequence: Synthetic oligonucleotide
  Sense strand starting at position 1256 of SEQ ID NO: 1885528
ccacuaagaccauggaugu

SEQ ID NO: 2348703 - RNA, 19 nt, Artificial Sequence
  Description of Artificial Sequence: Synthetic oligonucleotide
  Antisense strand to SEQ ID NO: 2348702
acauccauggucuuagugg

SEQ ID NO: 2348704 - RNA, 19 nt, Artificial Sequence
  Description of Artificial Sequence: Synthetic oligonucleotide
  Sense strand starting at position 1269 of SEQ ID NO: 1885528
ggaugugcacuuugggaaa

SEQ ID NO: 2348705 - RNA, 19 nt, Artificial Sequence
  Description of Artificial Sequence: Synthetic oligonucleotide
  Antisense strand to SEQ ID NO: 2348704
uuucccaaagugcacaucc

SEQ ID NO: 2348706 - RNA, 19 nt, Artificial Sequence
  Description of Artificial Sequence: Synthetic oligonucleotide
  Sense strand starting at position 2082 of SEQ ID NO: 1885528
ggaauaauuugaugaaaca

SEQ ID NO: 2348707 - RNA, 19 nt, Artificial Sequence
  Description of Artificial Sequence: Synthetic oligonucleotide
  Antisense strand to SEQ ID NO: 2348706
uguuucaucaaauuauucc

SEQ ID NO: 2348708 - RNA, 19 nt, Artificial Sequence
  Description of Artificial Sequence: Synthetic oligonucleotide
  Sense strand starting at position 2219 of SEQ ID NO: 1885528
uguuaaaugccugaaguca

SEQ ID NO: 2348709 - RNA, 19 nt, Artificial Sequence
  Description of Artificial Sequence: Synthetic oligonucleotide
  Antisense strand to SEQ ID NO: 2348708
ugacuucaggcauuuaaca

SEQ ID NO: 2348710 - RNA, 19 nt, Artificial Sequence
  Description of Artificial Sequence: Synthetic oligonucleotide
  Sense strand starting at position 2227 of SEQ ID NO: 1885528
gccugaagucaacauauuc

SEQ ID NO: 2348711 - RNA, 19 nt, Artificial Sequence
  Description of Artificial Sequence: Synthetic oligonucleotide
  Antisense strand to SEQ ID NO: 2348710
gaauauguugacuucaggc

SEQ ID NO: 2348712 - RNA, 19 nt, Artificial Sequence
  Description of Artificial Sequence: Synthetic oligonucleotide
  Sense strand starting at position 2373 of SEQ ID NO: 1885528
aagauuagagacugucuca

SEQ ID NO: 2348713 - RNA, 19 nt, Artificial Sequence
  Description of Artificial Sequence: Synthetic oligonucleotide
  Antisense strand to SEQ ID NO: 2348712
ugagacagucucuaaucuu

SEQ ID NO: 2348714 - RNA, 19 nt, Artificial Sequence
  Description of Artificial Sequence: Synthetic oligonucleotide
  Sense strand starting at position 2376 of SEQ ID NO: 1885528
auuagagacugucucacua

SEQ ID NO: 2348715 - RNA, 19 nt, Artificial Sequence
  Description of Artificial Sequence: Synthetic oligonucleotide
  Antisense strand to SEQ ID NO: 2348714
uagugagacagucucuaau

SEQ ID NO: 2348716 - RNA, 19 nt, Artificial Sequence
  Description of Artificial Sequence: Synthetic oligonucleotide
  Sense strand starting at position 2380 of SEQ ID NO: 1885528
gagacugucucacuagaca

SEQ ID NO: 2348717 - RNA, 19 nt, Artificial Sequence
  Description of Artificial Sequence: Synthetic oligonucleotide
  Antisense strand to SEQ ID NO: 2348716
ugucuagugagacagucuc

SEQ ID NO: 2348718 - RNA, 19 nt, Artificial Sequence
  Description of Artificial Sequence: Synthetic oligonucleotide
  Sense strand starting at position 2426 of SEQ ID NO: 1885528
ucacacuagaguuguggaa

SEQ ID NO: 2348719 - RNA, 19 nt, Artificial Sequence
  Description of Artificial Sequence: Synthetic oligonucleotide
  Antisense strand to SEQ ID NO: 2348718
uuccacaacucuaguguga

SEQ ID NO: 2348720 - RNA, 19 nt, Artificial Sequence
  Description of Artificial Sequence: Synthetic oligonucleotide
  Sense strand starting at position 2458 of SEQ ID NO: 1885528
cauggucucaucgagguau

SEQ ID NO: 2348721 - RNA, 19 nt, Artificial Sequence
  Description of Artificial Sequence: Synthetic oligonucleotide
  Antisense strand to SEQ ID NO: 2348720
auaccucgaugagaccaug

SEQ ID NO: 2348722 - RNA, 19 nt, Artificial Sequence
  Description of Artificial Sequence: Synthetic oligonucleotide
  Sense strand starting at position 2462 of SEQ ID NO: 1885528
gucucaucgagguauugag

SEQ ID NO: 2348723 - RNA, 19 nt, Artificial Sequence
  Description of Artificial Sequence: Synthetic oligonucleotide
  Antisense strand to SEQ ID NO: 2348722
cucaauaccucgaugagac

SEQ ID NO: 2348724 - RNA, 19 nt, Artificial Sequence
  Description of Artificial Sequence: Synthetic oligonucleotide
  Sense strand starting at position 2519 of SEQ ID NO: 1885528
ugacaaugaccauggcaga

SEQ ID NO: 2348725 - RNA, 19 nt, Artificial Sequence
  Description of Artificial Sequence: Synthetic oligonucleotide
  Antisense strand to SEQ ID NO: 2348724
ucugccauggucauuguca

SEQ ID NO: 2348726 - RNA, 19 nt, Artificial Sequence
  Description of Artificial Sequence: Synthetic oligonucleotide
  Sense strand starting at position 2602 of SEQ ID NO: 1885528
auuguagugacccagguuu

SEQ ID NO: 2348727 - RNA, 19 nt, Artificial Sequence
  Description of Artificial Sequence: Synthetic oligonucleotide
  Antisense strand to SEQ ID NO: 2348726
aaaccugggucacuacaau

SEQ ID NO: 2348728 - RNA, 19 nt, Artificial Sequence
  Description of Artificial Sequence: Synthetic oligonucleotide
  Sense strand starting at position 2698 of SEQ ID NO: 1885528
ccuuauacaguaugucaua

SEQ ID NO: 2348729 - RNA, 19 nt, Artificial Sequence
  Description of Artificial Sequence: Synthetic oligonucleotide
  Antisense strand to SEQ ID NO: 2348728
uaugacauacuguauaagg

SEQ ID NO: 2348730 - RNA, 19 nt, Artificial Sequence
  Description of Artificial Sequence: Synthetic oligonucleotide
  Sense strand starting at position 2699 of SEQ ID NO: 1885528
cuuauacaguaugucauau

SEQ ID NO: 2348731 - RNA, 19 nt, Artificial Sequence
  Description of Artificial Sequence: Synthetic oligonucleotide
  Antisense strand to SEQ ID NO: 2348730
auaugacauacuguauaag

SEQ ID NO: 2348732 - RNA, 19 nt, Artificial Sequence
  Description of Artificial Sequence: Synthetic oligonucleotide
  Sense strand starting at position 3354 of SEQ ID NO: 1885528
agcauuaagaagugguuua

SEQ ID NO: 2348733 - RNA, 19 nt, Artificial Sequence
  Description of Artificial Sequence: Synthetic oligonucleotide
  Antisense strand to SEQ ID NO: 2348732
uaaaccacuucuuaaugcu

SEQ ID NO: 2348734 - RNA, 19 nt, Artificial Sequence
  Description of Artificial Sequence: Synthetic oligonucleotide
  Sense strand starting at position 3361 of SEQ ID NO: 1885528
agaagugguuuaucaacac

SEQ ID NO: 2348735 - RNA, 19 nt, Artificial Sequence
  Description of Artificial Sequence: Synthetic oligonucleotide
  Antisense strand to SEQ ID NO: 2348734
guguugauaaaccacuucu

SEQ ID NO: 2348736 - RNA, 19 nt, Artificial Sequence
  Description of Artificial Sequence: Synthetic oligonucleotide
  Sense strand starting at position 3365 of SEQ ID NO: 1885528
gugguuuaucaacaccugu

SEQ ID NO: 2348737 - RNA, 19 nt, Artificial Sequence
  Description of Artificial Sequence: Synthetic oligonucleotide
  Antisense strand to SEQ ID NO: 2348736
acagguguugauaaaccac

SEQ ID NO: 2348738 - RNA, 19 nt, Artificial Sequence
  Description of Artificial Sequence: Synthetic oligonucleotide
  Sense strand starting at position 3447 of SEQ ID NO: 1885528
agacaacugucccuaagac

SEQ ID NO: 2348739 - RNA, 19 nt, Artificial Sequence
  Description of Artificial Sequence: Synthetic oligonucleotide
  Antisense strand to SEQ ID NO: 2348738
gucuuagggacaguugucu

SEQ ID NO: 2348740 - RNA, 19 nt, Artificial Sequence
  Description of Artificial Sequence: Synthetic oligonucleotide
  Sense strand starting at position 3482 of SEQ ID NO: 1885528
gugggaacagcaugucaaa

SEQ ID NO: 2348741 - RNA, 19 nt, Artificial Sequence
  Description of Artificial Sequence: Synthetic oligonucleotide
  Antisense strand to SEQ ID NO: 2348740
uuugacaugcuguucccac

SEQ ID NO: 2348742 - RNA, 19 nt, Artificial Sequence
  Description of Artificial Sequence: Synthetic oligonucleotide
  Sense strand starting at position 3679 of SEQ ID NO: 1885528
cuguaauuccaacaguagu

SEQ ID NO: 2348743 - RNA, 19 nt, Artificial Sequence
  Description of Artificial Sequence: Synthetic oligonucleotide
  Antisense strand to SEQ ID NO: 2348742
acuacuguuggaauuacag

SEQ ID NO: 2348744 - RNA, 19 nt, Artificial Sequence
  Description of Artificial Sequence: Synthetic oligonucleotide
  Sense strand starting at position 3780 of SEQ ID NO: 1885528
cagagaugaggcugaguca

SEQ ID NO: 2348745 - RNA, 19 nt, Artificial Sequence
  Description of Artificial Sequence: Synthetic oligonucleotide
  Antisense strand to SEQ ID NO: 2348744
ugacucagccucaucucug

SEQ ID NO: 2348746 - RNA, 19 nt, Artificial Sequence
  Description of Artificial Sequence: Synthetic oligonucleotide
  Sense strand starting at position 21 of SEQ ID NO: 1885529
agagucauaucagcaaauu

SEQ ID NO: 2348747 - RNA, 19 nt, Artificial Sequence
  Description of Artificial Sequence: Synthetic oligonucleotide
  Antisense strand to SEQ ID NO: 2348746
aauuugcugauaugacucu

SEQ ID NO: 2348748 - RNA, 19 nt, Artificial Sequence
  Description of Artificial Sequence: Synthetic oligonucleotide
  Sense strand starting at position 22 of SEQ ID NO: 1885529
gagucauaucagcaaauug

SEQ ID NO: 2348749 - RNA, 19 nt, Artificial Sequence
  Description of Artificial Sequence: Synthetic oligonucleotide
  Antisense strand to SEQ ID NO: 2348748
caauuugcugauaugacuc

SEQ ID NO: 2348750 - RNA, 19 nt, Artificial Sequence
  Description of Artificial Sequence: Synthetic oligonucleotide
  Sense strand starting at position 560 of SEQ ID NO: 1885529
aguagucuucuuugggaau

SEQ ID NO: 2348751 - RNA, 19 nt, Artificial Sequence
  Description of Artificial Sequence: Synthetic oligonucleotide
  Antisense strand to SEQ ID NO: 2348750
auucccaaagaagacuacu

SEQ ID NO: 2348752 - RNA, 19 nt, Artificial Sequence
  Description of Artificial Sequence: Synthetic oligonucleotide
  Sense strand starting at position 589 of SEQ ID NO: 1885529
gucugaagcauaugaaaug

SEQ ID NO: 2348753 - RNA, 19 nt, Artificial Sequence
  Description of Artificial Sequence: Synthetic oligonucleotide
  Antisense strand to SEQ ID NO: 2348752
cauuucauaugcuucagac

SEQ ID NO: 2348754 - RNA, 19 nt, Artificial Sequence
  Description of Artificial Sequence: Synthetic oligonucleotide
  Sense strand starting at position 982 of SEQ ID NO: 1885529
uguguaucucaguguauuu

SEQ ID NO: 2348755 - RNA, 19 nt, Artificial Sequence
  Description of Artificial Sequence: Synthetic oligonucleotide
  Antisense strand to SEQ ID NO: 2348754
aaauacacugagauacaca

SEQ ID NO: 2348756 - RNA, 19 nt, Artificial Sequence
  Description of Artificial Sequence: Synthetic oligonucleotide
  Sense strand starting at position 989 of SEQ ID NO: 1885529
cucaguguauuugugugau

SEQ ID NO: 2348757 - RNA, 19 nt, Artificial Sequence
  Description of Artificial Sequence: Synthetic oligonucleotide
  Antisense strand to SEQ ID NO: 2348756
aucacacaaauacacugag

SEQ ID NO: 2348758 - RNA, 19 nt, Artificial Sequence
  Description of Artificial Sequence: Synthetic oligonucleotide
  Sense strand starting at position 991 of SEQ ID NO: 1885529
caguguauuugugugaucu

SEQ ID NO: 2348759 - RNA, 19 nt, Artificial Sequence
  Description of Artificial Sequence: Synthetic oligonucleotide
  Antisense strand to SEQ ID NO: 2348758
agaucacacaaauacacug

SEQ ID NO: 2348760 - RNA, 19 nt, Artificial Sequence
  Description of Artificial Sequence: Synthetic oligonucleotide
  Sense strand starting at position 992 of SEQ ID NO: 1885529
aguguauuugugugaucuc

SEQ ID NO: 2348761 - RNA, 19 nt, Artificial Sequence
  Description of Artificial Sequence: Synthetic oligonucleotide
  Antisense strand to SEQ ID NO: 2348760
gagaucacacaaauacacu

SEQ ID NO: 2348762 - RNA, 19 nt, Artificial Sequence
  Description of Artificial Sequence: Synthetic oligonucleotide
  Sense strand starting at position 995 of SEQ ID NO: 1885529
guauuugugugaucucugu

SEQ ID NO: 2348763 - RNA, 19 nt, Artificial Sequence
  Description of Artificial Sequence: Synthetic oligonucleotide
  Antisense strand to SEQ ID NO: 2348762
acagagaucacacaaauac

SEQ ID NO: 2348764 - RNA, 19 nt, Artificial Sequence
  Description of Artificial Sequence: Synthetic oligonucleotide
  Sense strand starting at position 1021 of SEQ ID NO: 1885529
ugugucuguggucuuugua

SEQ ID NO: 2348765 - RNA, 19 nt, Artificial Sequence
  Description of Artificial Sequence: Synthetic oligonucleotide
  Antisense strand to SEQ ID NO: 2348764
uacaaagaccacagacaca

SEQ ID NO: 2348766 - RNA, 19 nt, Artificial Sequence
  Description of Artificial Sequence: Synthetic oligonucleotide
  Sense strand starting at position 1022 of SEQ ID NO: 1885529
gugucuguggucuuuguau

SEQ ID NO: 2348767 - RNA, 19 nt, Artificial Sequence
  Description of Artificial Sequence: Synthetic oligonucleotide
  Antisense strand to SEQ ID NO: 2348766
auacaaagaccacagacac

SEQ ID NO: 2348768 - RNA, 19 nt, Artificial Sequence
  Description of Artificial Sequence: Synthetic oligonucleotide
  Sense strand starting at position 1050 of SEQ ID NO: 1885529
uggaauguguguaugugua

SEQ ID NO: 2348769 - RNA, 19 nt, Artificial Sequence
  Description of Artificial Sequence: Synthetic oligonucleotide
  Antisense strand to SEQ ID NO: 2348768
uacacauacacacauucca

SEQ ID NO: 2348770 - RNA, 19 nt, Artificial Sequence
  Description of Artificial Sequence: Synthetic oligonucleotide
  Sense strand starting at position 1090 of SEQ ID NO: 1885529
augcguguggucucuuuau

SEQ ID NO: 2348771 - RNA, 19 nt, Artificial Sequence
  Description of Artificial Sequence: Synthetic oligonucleotide
  Antisense strand to SEQ ID NO: 2348770
auaaagagaccacacgcau

SEQ ID NO: 2348772 - RNA, 19 nt, Artificial Sequence
  Description of Artificial Sequence: Synthetic oligonucleotide
  Sense strand starting at position 1092 of SEQ ID NO: 1885529
gcguguggucucuuuaugu

SEQ ID NO: 2348773 - RNA, 19 nt, Artificial Sequence
  Description of Artificial Sequence: Synthetic oligonucleotide
  Antisense strand to SEQ ID NO: 2348772
acauaaagagaccacacgc

SEQ ID NO: 2348774 - RNA, 19 nt, Artificial Sequence
  Description of Artificial Sequence: Synthetic oligonucleotide
  Sense strand starting at position 1235 of SEQ ID NO: 1885529
ugaucaauguugguaguga

SEQ ID NO: 2348775 - RNA, 19 nt, Artificial Sequence
  Description of Artificial Sequence: Synthetic oligonucleotide
  Antisense strand to SEQ ID NO: 2348774
ucacuaccaacauugauca

SEQ ID NO: 2348776 - RNA, 19 nt, Artificial Sequence
  Description of Artificial Sequence: Synthetic oligonucleotide
  Sense strand starting at position 1295 of SEQ ID NO: 1885529
ugcacauaaccaggagauu

SEQ ID NO: 2348777 - RNA, 19 nt, Artificial Sequence
  Description of Artificial Sequence: Synthetic oligonucleotide
  Antisense strand to SEQ ID NO: 2348776
aaucuccugguuaugugca

SEQ ID NO: 2348778 - RNA, 19 nt, Artificial Sequence
  Description of Artificial Sequence: Synthetic oligonucleotide
  Sense strand starting at position 1445 of SEQ ID NO: 1885529
ucagauaacuuguugagac

SEQ ID NO: 2348779 - RNA, 19 nt, Artificial Sequence
  Description of Artificial Sequence: Synthetic oligonucleotide
  Antisense strand to SEQ ID NO: 2348778
gucucaacaaguuaucuga

SEQ ID NO: 2348780 - RNA, 19 nt, Artificial Sequence
  Description of Artificial Sequence: Synthetic oligonucleotide
  Sense strand starting at position 1872 of SEQ ID NO: 1885529
ggaagcuaaugugcaauaa

SEQ ID NO: 2348781 - RNA, 19 nt, Artificial Sequence
  Description of Artificial Sequence: Synthetic oligonucleotide
  Antisense strand to SEQ ID NO: 2348780
uuauugcacauuagcuucc

SEQ ID NO: 2348782 - RNA, 19 nt, Artificial Sequence
  Description of Artificial Sequence: Synthetic oligonucleotide
  Sense strand starting at position 1900 of SEQ ID NO: 1885529
gucaauucggaugauagcu

SEQ ID NO: 2348783 - RNA, 19 nt, Artificial Sequence
  Description of Artificial Sequence: Synthetic oligonucleotide
  Antisense strand to SEQ ID NO: 2348782
agcuaucauccgaauugac

SEQ ID NO: 2348784 - RNA, 19 nt, Artificial Sequence
  Description of Artificial Sequence: Synthetic oligonucleotide
  Sense strand starting at position 1910 of SEQ ID NO: 1885529
augauagcucuaggauaaa

SEQ ID NO: 2348785 - RNA, 19 nt, Artificial Sequence
  Description of Artificial Sequence: Synthetic oligonucleotide
  Antisense strand to SEQ ID NO: 2348784
uuuauccuagagcuaucau

SEQ ID NO: 2348786 - RNA, 19 nt, Artificial Sequence
  Description of Artificial Sequence: Synthetic oligonucleotide
  Sense strand starting at position 2118 of SEQ ID NO: 1885529
uuuaaauacucagugaggu

SEQ ID NO: 2348787 - RNA, 19 nt, Artificial Sequence
  Description of Artificial Sequence: Synthetic oligonucleotide
  Antisense strand to SEQ ID NO: 2348786
accucacugaguauuuaaa

SEQ ID NO: 2348788 - RNA, 19 nt, Artificial Sequence
  Description of Artificial Sequence: Synthetic oligonucleotide
  Sense strand starting at position 2119 of SEQ ID NO: 1885529
uuaaauacucagugagguc

SEQ ID NO: 2348789 - RNA, 19 nt, Artificial Sequence
  Description of Artificial Sequence: Synthetic oligonucleotide
  Antisense strand to SEQ ID NO: 2348788
gaccucacugaguauuuaa

SEQ ID NO: 2348790 - RNA, 19 nt, Artificial Sequence
  Description of Artificial Sequence: Synthetic oligonucleotide
  Sense strand starting at position 2168 of SEQ ID NO: 1885529
ggaauuuacugcuauagag

SEQ ID NO: 2348791 - RNA, 19 nt, Artificial Sequence
  Description of Artificial Sequence: Synthetic oligonucleotide
  Antisense strand to SEQ ID NO: 2348790
cucuauagcaguaaauucc

SEQ ID NO: 2348792 - RNA, 19 nt, Artificial Sequence
  Description of Artificial Sequence: Synthetic oligonucleotide
  Sense strand starting at position 2469 of SEQ ID NO: 1885529
uaugaucaugguggugaau

SEQ ID NO: 2348793 - RNA, 19 nt, Artificial Sequence
  Description of Artificial Sequence: Synthetic oligonucleotide
  Antisense strand to SEQ ID NO: 2348792
auucaccaccaugaucaua

SEQ ID NO: 2348794 - RNA, 19 nt, Artificial Sequence
  Description of Artificial Sequence: Synthetic oligonucleotide
  Sense strand starting at position 2562 of SEQ ID NO: 1885529
ugcauaagcuaagucauuu

SEQ ID NO: 2348795 - RNA, 19 nt, Artificial Sequence
  Description of Artificial Sequence: Synthetic oligonucleotide
  Antisense strand to SEQ ID NO: 2348794
aaaugacuuagcuuaugca

SEQ ID NO: 2348796 - RNA, 19 nt, Artificial Sequence
  Description of Artificial Sequence: Synthetic oligonucleotide
  Sense strand starting at position 2610 of SEQ ID NO: 1885529
guguuaauucccuucucgu

SEQ ID NO: 2348797 - RNA, 19 nt, Artificial Sequence
  Description of Artificial Sequence: Synthetic oligonucleotide
  Antisense strand to SEQ ID NO: 2348796
acgagaagggaauuaacac

SEQ ID NO: 2348798 - RNA, 19 nt, Artificial Sequence
  Description of Artificial Sequence: Synthetic oligonucleotide
  Sense strand starting at position 2673 of SEQ ID NO: 1885529
uguuuauuagcagauggau

SEQ ID NO: 2348799 - RNA, 19 nt, Artificial Sequence
  Description of Artificial Sequence: Synthetic oligonucleotide
  Antisense strand to SEQ ID NO: 2348798
auccaucugcuaauaaaca

SEQ ID NO: 2348800 - RNA, 19 nt, Artificial Sequence
  Description of Artificial Sequence: Synthetic oligonucleotide
  Sense strand starting at position 2693 of SEQ ID NO: 1885529
gaugguguuggguacauaa

SEQ ID NO: 2348801 - RNA, 19 nt, Artificial Sequence
  Description of Artificial Sequence: Synthetic oligonucleotide
  Antisense strand to SEQ ID NO: 2348800
uuauguacccaacaccauc

SEQ ID NO: 2348802 - RNA, 19 nt, Artificial Sequence
  Description of Artificial Sequence: Synthetic oligonucleotide
  Sense strand starting at position 2759 of SEQ ID NO: 1885529
gcuaucuaaucuuucugga

SEQ ID NO: 2348803 - RNA, 19 nt, Artificial Sequence
  Description of Artificial Sequence: Synthetic oligonucleotide
  Antisense strand to SEQ ID NO: 2348802
uccagaaagauuagauagc

SEQ ID NO: 2348804 - RNA, 19 nt, Artificial Sequence
  Description of Artificial Sequence: Synthetic oligonucleotide
  Sense strand starting at position 2862 of SEQ ID NO: 1885529
uucaguuuggguugaugaa

SEQ ID NO: 2348805 - RNA, 19 nt, Artificial Sequence
  Description of Artificial Sequence: Synthetic oligonucleotide
  Antisense strand to SEQ ID NO: 2348804
uucaucaacccaaacugaa

SEQ ID NO: 2348806 - RNA, 19 nt, Artificial Sequence
  Description of Artificial Sequence: Synthetic oligonucleotide
  Sense strand starting at position 2899 of SEQ ID NO: 1885529
ucugcauuuguaugauggu

SEQ ID NO: 2348807 - RNA, 19 nt, Artificial Sequence
  Description of Artificial Sequence: Synthetic oligonucleotide
  Antisense strand to SEQ ID NO: 2348806
accaucauacaaaugcaga

SEQ ID NO: 2348808 - RNA, 19 nt, Artificial Sequence
  Description of Artificial Sequence: Synthetic oligonucleotide
  Sense strand starting at position 2906 of SEQ ID NO: 1885529
uuguaugaugguuguagaa

SEQ ID NO: 2348809 - RNA, 19 nt, Artificial Sequence
  Description of Artificial Sequence: Synthetic oligonucleotide
  Antisense strand to SEQ ID NO: 2348808
uucuacaaccaucauacaa

SEQ ID NO: 2348810 - RNA, 19 nt, Artificial Sequence
  Description of Artificial Sequence: Synthetic oligonucleotide
  Sense strand starting at position 3027 of SEQ ID NO: 1885529
guucuacauuuccuauguu

SEQ ID NO: 2348811 - RNA, 19 nt, Artificial Sequence
  Description of Artificial Sequence: Synthetic oligonucleotide
  Antisense strand to SEQ ID NO: 2348810
aacauaggaaauguagaac

SEQ ID NO: 2348812 - RNA, 19 nt, Artificial Sequence
  Description of Artificial Sequence: Synthetic oligonucleotide
  Sense strand starting at position 3179 of SEQ ID NO: 1885529
gcagcguugguggucaaga

SEQ ID NO: 2348813 - RNA, 19 nt, Artificial Sequence
  Description of Artificial Sequence: Synthetic oligonucleotide
  Antisense strand to SEQ ID NO: 2348812
ucuugaccaccaacgcugc

SEQ ID NO: 2348814 - RNA, 19 nt, Artificial Sequence
  Description of Artificial Sequence: Synthetic oligonucleotide
  Sense strand starting at position 3184 of SEQ ID NO: 1885529
guugguggucaagaguuua

SEQ ID NO: 2348815 - RNA, 19 nt, Artificial Sequence
  Description of Artificial Sequence: Synthetic oligonucleotide
  Antisense strand to SEQ ID NO: 2348814
uaaacucuugaccaccaac

SEQ ID NO: 2348816 - RNA, 19 nt, Artificial Sequence
  Description of Artificial Sequence: Synthetic oligonucleotide
  Sense strand starting at position 3250 of SEQ ID NO: 1885529
cuuuaacugcuagauugua

SEQ ID NO: 2348817 - RNA, 19 nt, Artificial Sequence
  Description of Artificial Sequence: Synthetic oligonucleotide
  Antisense strand to SEQ ID NO: 2348816
uacaaucuagcaguuaaag

SEQ ID NO: 2348818 - RNA, 19 nt, Artificial Sequence
  Description of Artificial Sequence: Synthetic oligonucleotide
  Sense strand starting at position 3333 of SEQ ID NO: 1885529
agaacugaucuuugcaggu

SEQ ID NO: 2348819 - RNA, 19 nt, Artificial Sequence
  Description of Artificial Sequence: Synthetic oligonucleotide
  Antisense strand to SEQ ID NO: 2348818
accugcaaagaucaguucu

SEQ ID NO: 2348820 - RNA, 19 nt, Artificial Sequence
  Description of Artificial Sequence: Synthetic oligonucleotide
  Sense strand starting at position 3340 of SEQ ID NO: 1885529
aucuuugcagguuaaggau

SEQ ID NO: 2348821 - RNA, 19 nt, Artificial Sequence
  Description of Artificial Sequence: Synthetic oligonucleotide
  Antisense strand to SEQ ID NO: 2348820
auccuuaaccugcaaagau

SEQ ID NO: 2348822 - RNA, 19 nt, Artificial Sequence
  Description of Artificial Sequence: Synthetic oligonucleotide
  Sense strand starting at position 3487 of SEQ ID NO: 1885529
uucugaagauuagcaaacu

SEQ ID NO: 2348823 - RNA, 19 nt, Artificial Sequence
  Description of Artificial Sequence: Synthetic oligonucleotide
  Antisense strand to SEQ ID NO: 2348822
aguuugcuaaucuucagaa

SEQ ID NO: 2348824 - RNA, 19 nt, Artificial Sequence
  Description of Artificial Sequence: Synthetic oligonucleotide
  Sense strand starting at position 3683 of SEQ ID NO: 1885529
agggacuaguucuuaacuu

SEQ ID NO: 2348825 - RNA, 19 nt, Artificial Sequence
  Description of Artificial Sequence: Synthetic oligonucleotide
  Antisense strand to SEQ ID NO: 2348824
aaguuaagaacuagucccu

SEQ ID NO: 2348826 - RNA, 19 nt, Artificial Sequence
  Description of Artificial Sequence: Synthetic oligonucleotide
  Sense strand starting at position 38 of SEQ ID NO: 1885530
cagauaccuuccucuggga

SEQ ID NO: 2348827 - RNA, 19 nt, Artificial Sequence
  Description of Artificial Sequence: Synthetic oligonucleotide
  Antisense strand to SEQ ID NO: 2348826
ucccagaggaagguaucug

SEQ ID NO: 2348828 - RNA, 19 nt, Artificial Sequence
  Description of Artificial Sequence: Synthetic oligonucleotide
  Sense strand starting at position 40 of SEQ ID NO: 1885530
gauaccuuccucugggaga

SEQ ID NO: 2348829 - RNA, 19 nt, Artificial Sequence
  Description of Artificial Sequence: Synthetic oligonucleotide
  Antisense strand to SEQ ID NO: 2348828
ucucccagaggaagguauc

SEQ ID NO: 2348830 - RNA, 19 nt, Artificial Sequence
  Description of Artificial Sequence: Synthetic oligonucleotide
  Sense strand starting at position 57 of SEQ ID NO: 1885530
gaaaguuccugcuucugac

SEQ ID NO: 2348831 - RNA, 19 nt, Artificial Sequence
  Description of Artificial Sequence: Synthetic oligonucleotide
  Antisense strand to SEQ ID NO: 2348830
gucagaagcaggaacuuuc

SEQ ID NO: 2348832 - RNA, 19 nt, Artificial Sequence
  Description of Artificial Sequence: Synthetic oligonucleotide
  Sense strand starting at position 67 of SEQ ID NO: 1885530
gcuucugaccugugagaac

SEQ ID NO: 2348833 - RNA, 19 nt, Artificial Sequence
  Description of Artificial Sequence: Synthetic oligonucleotide
  Antisense strand to SEQ ID NO: 2348832
guucucacaggucagaagc

SEQ ID NO: 2348834 - RNA, 19 nt, Artificial Sequence
  Description of Artificial Sequence: Synthetic oligonucleotide
  Sense strand starting at position 130 of SEQ ID NO: 1885530
agagcugaucucuagugga

SEQ ID NO: 2348835 - RNA, 19 nt, Artificial Sequence
  Description of Artificial Sequence: Synthetic oligonucleotide
  Antisense strand to SEQ ID NO: 2348834
uccacuagagaucagcucu

SEQ ID NO: 2348836 - RNA, 19 nt, Artificial Sequence
  Description of Artificial Sequence: Synthetic oligonucleotide
  Sense strand starting at position 535 of SEQ ID NO: 1885530
ggcugaagagaugguguga

SEQ ID NO: 2348837 - RNA, 19 nt, Artificial Sequence
  Description of Artificial Sequence: Synthetic oligonucleotide
  Antisense strand to SEQ ID NO: 2348836
ucacaccaucucuucagcc

SEQ ID NO: 2348838 - RNA, 19 nt, Artificial Sequence
  Description of Artificial Sequence: Synthetic oligonucleotide
  Sense strand starting at position 589 of SEQ ID NO: 1885530
gaaagaggguuugcuacuu

SEQ ID NO: 2348839 - RNA, 19 nt, Artificial Sequence
  Description of Artificial Sequence: Synthetic oligonucleotide
  Antisense strand to SEQ ID NO: 2348838
aaguagcaaacccucuuuc

SEQ ID NO: 2348840 - RNA, 19 nt, Artificial Sequence
  Description of Artificial Sequence: Synthetic oligonucleotide
  Sense strand starting at position 848 of SEQ ID NO: 1885530
aagagaacucgaggugugu

SEQ ID NO: 2348841 - RNA, 19 nt, Artificial Sequence
  Description of Artificial Sequence: Synthetic oligonucleotide
  Antisense strand to SEQ ID NO: 2348840
acacaccucgaguucucuu

SEQ ID NO: 2348842 - RNA, 19 nt, Artificial Sequence
  Description of Artificial Sequence: Synthetic oligonucleotide
  Sense strand starting at position 899 of SEQ ID NO: 1885530
aucagaaauaggugcaugu

SEQ ID NO: 2348843 - RNA, 19 nt, Artificial Sequence
  Description of Artificial Sequence: Synthetic oligonucleotide
  Antisense strand to SEQ ID NO: 2348842
acaugcaccuauuucugau

SEQ ID NO: 2348844 - RNA, 19 nt, Artificial Sequence
  Description of Artificial Sequence: Synthetic oligonucleotide
  Sense strand starting at position 901 of SEQ ID NO: 1885530
cagaaauaggugcauguaa

SEQ ID NO: 2348845 - RNA, 19 nt, Artificial Sequence
  Description of Artificial Sequence: Synthetic oligonucleotide
  Antisense strand to SEQ ID NO: 2348844
uuacaugcaccuauuucug

SEQ ID NO: 2348846 - RNA, 19 nt, Artificial Sequence
  Description of Artificial Sequence: Synthetic oligonucleotide
  Sense strand starting at position 903 of SEQ ID NO: 1885530
gaaauaggugcauguaaug

SEQ ID NO: 2348847 - RNA, 19 nt, Artificial Sequence
  Description of Artificial Sequence: Synthetic oligonucleotide
  Antisense strand to SEQ ID NO: 2348846
cauuacaugcaccuauuuc

SEQ ID NO: 2348848 - RNA, 19 nt, Artificial Sequence
  Description of Artificial Sequence: Synthetic oligonucleotide
  Sense strand starting at position 1028 of SEQ ID NO: 1885530
cuugcauuugcauaguacu

SEQ ID NO: 2348849 - RNA, 19 nt, Artificial Sequence
  Description of Artificial Sequence: Synthetic oligonucleotide
  Antisense strand to SEQ ID NO: 2348848
aguacuaugcaaaugcaag

SEQ ID NO: 2348850 - RNA, 19 nt, Artificial Sequence
  Description of Artificial Sequence: Synthetic oligonucleotide
  Sense strand starting at position 1359 of SEQ ID NO: 1885530
gcccucauggaguaauaua

SEQ ID NO: 2348851 - RNA, 19 nt, Artificial Sequence
  Description of Artificial Sequence: Synthetic oligonucleotide
  Antisense strand to SEQ ID NO: 2348850
uauauuacuccaugagggc

SEQ ID NO: 2348852 - RNA, 19 nt, Artificial Sequence
  Description of Artificial Sequence: Synthetic oligonucleotide
  Sense strand starting at position 1412 of SEQ ID NO: 1885530
cucaguguuuaaucuuaaa

SEQ ID NO: 2348853 - RNA, 19 nt, Artificial Sequence
  Description of Artificial Sequence: Synthetic oligonucleotide
  Antisense strand to SEQ ID NO: 2348852
uuuaagauuaaacacugag

SEQ ID NO: 2348854 - RNA, 19 nt, Artificial Sequence
  Description of Artificial Sequence: Synthetic oligonucleotide
  Sense strand starting at position 2070 of SEQ ID NO: 1885530
gggccaauuugauaucuau

SEQ ID NO: 2348855 - RNA, 19 nt, Artificial Sequence
  Description of Artificial Sequence: Synthetic oligonucleotide
  Antisense strand to SEQ ID NO: 2348854
auagauaucaaauuggccc

SEQ ID NO: 2348856 - RNA, 19 nt, Artificial Sequence
  Description of Artificial Sequence: Synthetic oligonucleotide
  Sense strand starting at position 2240 of SEQ ID NO: 1885530
gagugucaaucucugaauu

SEQ ID NO: 2348857 - RNA, 19 nt, Artificial Sequence
  Description of Artificial Sequence: Synthetic oligonucleotide
  Antisense strand to SEQ ID NO: 2348856
aauucagagauugacacuc

SEQ ID NO: 2348858 - RNA, 19 nt, Artificial Sequence
  Description of Artificial Sequence: Synthetic oligonucleotide
  Sense strand starting at position 2241 of SEQ ID NO: 1885530
agugucaaucucugaauug

SEQ ID NO: 2348859 - RNA, 19 nt, Artificial Sequence
  Description of Artificial Sequence: Synthetic oligonucleotide
  Antisense strand to SEQ ID NO: 2348858
caauucagagauugacacu

SEQ ID NO: 2348860 - RNA, 19 nt, Artificial Sequence
  Description of Artificial Sequence: Synthetic oligonucleotide
  Sense strand starting at position 2313 of SEQ ID NO: 1885530
gccuccuauccaugggacu

SEQ ID NO: 2348861 - RNA, 19 nt, Artificial Sequence
  Description of Artificial Sequence: Synthetic oligonucleotide
  Antisense strand to SEQ ID NO: 2348860
agucccauggauaggaggc

SEQ ID NO: 2348862 - RNA, 19 nt, Artificial Sequence
  Description of Artificial Sequence: Synthetic oligonucleotide
  Sense strand starting at position 2379 of SEQ ID NO: 1885530
guugcuuuccaccaggaca

SEQ ID NO: 2348863 - RNA, 19 nt, Artificial Sequence
  Description of Artificial Sequence: Synthetic oligonucleotide
  Antisense strand to SEQ ID NO: 2348862
uguccugguggaaagcaac

SEQ ID NO: 2348864 - RNA, 19 nt, Artificial Sequence
  Description of Artificial Sequence: Synthetic oligonucleotide
  Sense strand starting at position 2381 of SEQ ID NO: 1885530
ugcuuuccaccaggacaaa

SEQ ID NO: 2348865 - RNA, 19 nt, Artificial Sequence
  Description of Artificial Sequence: Synthetic oligonucleotide
  Antisense strand to SEQ ID NO: 2348864
uuuguccugguggaaagca

SEQ ID NO: 2348866 - RNA, 19 nt, Artificial Sequence
  Description of Artificial Sequence: Synthetic oligonucleotide
  Sense strand starting at position 2485 of SEQ ID NO: 1885530
agacaaaguuguguuuauc

SEQ ID NO: 2348867 - RNA, 19 nt, Artificial Sequence
  Description of Artificial Sequence: Synthetic oligonucleotide
  Antisense strand to SEQ ID NO: 2348866
gauaaacacaacuuugucu

SEQ ID NO: 2348868 - RNA, 19 nt, Artificial Sequence
  Description of Artificial Sequence: Synthetic oligonucleotide
  Sense strand starting at position 2491 of SEQ ID NO: 1885530
aguuguguuuaucuugaaa

SEQ ID NO: 2348869 - RNA, 19 nt, Artificial Sequence
  Description of Artificial Sequence: Synthetic oligonucleotide
  Antisense strand to SEQ ID NO: 2348868
uuucaagauaaacacaacu

SEQ ID NO: 2348870 - RNA, 19 nt, Artificial Sequence
  Description of Artificial Sequence: Synthetic oligonucleotide
  Sense strand starting at position 2528 of SEQ ID NO: 1885530
gccacuuguccuggagaac

SEQ ID NO: 2348871 - RNA, 19 nt, Artificial Sequence
  Description of Artificial Sequence: Synthetic oligonucleotide
  Antisense strand to SEQ ID NO: 2348870
guucuccaggacaaguggc

SEQ ID NO: 2348872 - RNA, 19 nt, Artificial Sequence
  Description of Artificial Sequence: Synthetic oligonucleotide
  Sense strand starting at position 2941 of SEQ ID NO: 1885530
ccgccaacucaacaaguua

SEQ ID NO: 2348873 - RNA, 19 nt, Artificial Sequence
  Description of Artificial Sequence: Synthetic oligonucleotide
  Antisense strand to SEQ ID NO: 2348872
uaacuuguugaguuggcgg

SEQ ID NO: 2348874 - RNA, 19 nt, Artificial Sequence
  Description of Artificial Sequence: Synthetic oligonucleotide
  Sense strand starting at position 3010 of SEQ ID NO: 1885530
uugaccuagcuuugggauu

SEQ ID NO: 2348875 - RNA, 19 nt, Artificial Sequence
  Description of Artificial Sequence: Synthetic oligonucleotide
  Antisense strand to SEQ ID NO: 2348874
aaucccaaagcuaggucaa

SEQ ID NO: 2348876 - RNA, 19 nt, Artificial Sequence
  Description of Artificial Sequence: Synthetic oligonucleotide
  Sense strand starting at position 3055 of SEQ ID NO: 1885530
aaauguuuacuaggguguu

SEQ ID NO: 2348877 - RNA, 19 nt, Artificial Sequence
  Description of Artificial Sequence: Synthetic oligonucleotide
  Antisense strand to SEQ ID NO: 2348876
aacacccuaguaaacauuu

SEQ ID NO: 2348878 - RNA, 19 nt, Artificial Sequence
  Description of Artificial Sequence: Synthetic oligonucleotide
  Sense strand starting at position 3082 of SEQ ID NO: 1885530
ggcacauccauugggaacu

SEQ ID NO: 2348879 - RNA, 19 nt, Artificial Sequence
  Description of Artificial Sequence: Synthetic oligonucleotide
  Antisense strand to SEQ ID NO: 2348878
aguucccaauggaugugcc

SEQ ID NO: 2348880 - RNA, 19 nt, Artificial Sequence
  Description of Artificial Sequence: Synthetic oligonucleotide
  Sense strand starting at position 3095 of SEQ ID NO: 1885530
ggaacugucuccuuggaac

SEQ ID NO: 2348881 - RNA, 19 nt, Artificial Sequence
  Description of Artificial Sequence: Synthetic oligonucleotide
  Antisense strand to SEQ ID NO: 2348880
guuccaaggagacaguucc

SEQ ID NO: 2348882 - RNA, 19 nt, Artificial Sequence
  Description of Artificial Sequence: Synthetic oligonucleotide
  Sense strand starting at position 3136 of SEQ ID NO: 1885530
gcagcuggucuugagaauc

SEQ ID NO: 2348883 - RNA, 19 nt, Artificial Sequence
  Description of Artificial Sequence: Synthetic oligonucleotide
  Antisense strand to SEQ ID NO: 2348882
gauucucaagaccagcugc

SEQ ID NO: 2348884 - RNA, 19 nt, Artificial Sequence
  Description of Artificial Sequence: Synthetic oligonucleotide
  Sense strand starting at position 3144 of SEQ ID NO: 1885530
ucuugagaaucugauuugu

SEQ ID NO: 2348885 - RNA, 19 nt, Artificial Sequence
  Description of Artificial Sequence: Synthetic oligonucleotide
  Antisense strand to SEQ ID NO: 2348884
acaaaucagauucucaaga

SEQ ID NO: 2348886 - RNA, 19 nt, Artificial Sequence
  Description of Artificial Sequence: Synthetic oligonucleotide
  Sense strand starting at position 3154 of SEQ ID NO: 1885530
cugauuuguugagaugaga

SEQ ID NO: 2348887 - RNA, 19 nt, Artificial Sequence
  Description of Artificial Sequence: Synthetic oligonucleotide
  Antisense strand to SEQ ID NO: 2348886
ucucaucucaacaaaucag

SEQ ID NO: 2348888 - RNA, 19 nt, Artificial Sequence
  Description of Artificial Sequence: Synthetic oligonucleotide
  Sense strand starting at position 3406 of SEQ ID NO: 1885530
aggacuuggcacugauagu

SEQ ID NO: 2348889 - RNA, 19 nt, Artificial Sequence
  Description of Artificial Sequence: Synthetic oligonucleotide
  Antisense strand to SEQ ID NO: 2348888
acuaucagugccaaguccu

SEQ ID NO: 2348890 - RNA, 19 nt, Artificial Sequence
  Description of Artificial Sequence: Synthetic oligonucleotide
  Sense strand starting at position 3407 of SEQ ID NO: 1885530
ggacuuggcacugauagug

SEQ ID NO: 2348891 - RNA, 19 nt, Artificial Sequence
  Description of Artificial Sequence: Synthetic oligonucleotide
  Antisense strand to SEQ ID NO: 2348890
cacuaucagugccaagucc

SEQ ID NO: 2348892 - RNA, 19 nt, Artificial Sequence
  Description of Artificial Sequence: Synthetic oligonucleotide
  Sense strand starting at position 3433 of SEQ ID NO: 1885530
cuguaacuugccggauuua

SEQ ID NO: 2348893 - RNA, 19 nt, Artificial Sequence
  Description of Artificial Sequence: Synthetic oligonucleotide
  Antisense strand to SEQ ID NO: 2348892
uaaauccggcaaguuacag

SEQ ID NO: 2348894 - RNA, 19 nt, Artificial Sequence
  Description of Artificial Sequence: Synthetic oligonucleotide
  Sense strand starting at position 3442 of SEQ ID NO: 1885530
gccggauuuaugugcauac

SEQ ID NO: 2348895 - RNA, 19 nt, Artificial Sequence
  Description of Artificial Sequence: Synthetic oligonucleotide
  Antisense strand to SEQ ID NO: 2348894
guaugcacauaaauccggc

SEQ ID NO: 2348896 - RNA, 19 nt, Artificial Sequence
  Description of Artificial Sequence: Synthetic oligonucleotide
  Sense strand starting at position 3777 of SEQ ID NO: 1885530
uauggcuuucugugggaca

SEQ ID NO: 2348897 - RNA, 19 nt, Artificial Sequence
  Description of Artificial Sequence: Synthetic oligonucleotide
  Antisense strand to SEQ ID NO: 2348896
ugucccacagaaagccaua

SEQ ID NO: 2348898 - RNA, 19 nt, Artificial Sequence
  Description of Artificial Sequence: Synthetic oligonucleotide
  Sense strand starting at position 3862 of SEQ ID NO: 1885530
gcaaaugagaauuguuugu

SEQ ID NO: 2348899 - RNA, 19 nt, Artificial Sequence
  Description of Artificial Sequence: Synthetic oligonucleotide
  Antisense strand to SEQ ID NO: 2348898
acaaacaauucucauuugc

SEQ ID NO: 2348900 - RNA, 19 nt, Artificial Sequence
  Description of Artificial Sequence: Synthetic oligonucleotide
  Sense strand starting at position 3864 of SEQ ID NO: 1885530
aaaugagaauuguuuguag

SEQ ID NO: 2348901 - RNA, 19 nt, Artificial Sequence
  Description of Artificial Sequence: Synthetic oligonucleotide
  Antisense strand to SEQ ID NO: 2348900
cuacaaacaauucucauuu

SEQ ID NO: 2348902 - RNA, 19 nt, Artificial Sequence
  Description of Artificial Sequence: Synthetic oligonucleotide
  Sense strand starting at position 3866 of SEQ ID NO: 1885530
augagaauuguuuguagga

SEQ ID NO: 2348903 - RNA, 19 nt, Artificial Sequence
  Description of Artificial Sequence: Synthetic oligonucleotide
  Antisense strand to SEQ ID NO: 2348902
uccuacaaacaauucucau

SEQ ID NO: 2348904 - RNA, 19 nt, Artificial Sequence
  Description of Artificial Sequence: Synthetic oligonucleotide
  Sense strand starting at position 3867 of SEQ ID NO: 1885530
ugagaauuguuuguaggaa

SEQ ID NO: 2348905 - RNA, 19 nt, Artificial Sequence
  Description of Artificial Sequence: Synthetic oligonucleotide
  Antisense strand to SEQ ID NO: 2348904
uuccuacaaacaauucuca

SEQ ID NO: 2348906 - RNA, 19 nt, Artificial Sequence
  Description of Artificial Sequence: Synthetic oligonucleotide
  Sense strand starting at position 5 of SEQ ID NO: 1885531
uccauaauacugugguaua

SEQ ID NO: 2348907 - RNA, 19 nt, Artificial Sequence
  Description of Artificial Sequence: Synthetic oligonucleotide
  Antisense strand to SEQ ID NO: 2348906
uauaccacaguauuaugga

SEQ ID NO: 2348908 - RNA, 19 nt, Artificial Sequence
  Description of Artificial Sequence: Synthetic oligonucleotide
  Sense strand starting at position 77 of SEQ ID NO: 1885531
acgacuugccaguaagauu

SEQ ID NO: 2348909 - RNA, 19 nt, Artificial Sequence
  Description of Artificial Sequence: Synthetic oligonucleotide
  Antisense strand to SEQ ID NO: 2348908
aaucuuacuggcaagucgu

SEQ ID NO: 2348910 - RNA, 19 nt, Artificial Sequence
  Description of Artificial Sequence: Synthetic oligonucleotide
  Sense strand starting at position 149 of SEQ ID NO: 1885531
guaucuugagaauguuaaa

SEQ ID NO: 2348911 - RNA, 19 nt, Artificial Sequence
  Description of Artificial Sequence: Synthetic oligonucleotide
  Antisense strand to SEQ ID NO: 2348910
uuuaacauucucaagauac

SEQ ID NO: 2348912 - RNA, 19 nt, Artificial Sequence
  Description of Artificial Sequence: Synthetic oligonucleotide
  Sense strand starting at position 251 of SEQ ID NO: 1885531
aggcauuucccaugguucu

SEQ ID NO: 2348913 - RNA, 19 nt, Artificial Sequence
  Description of Artificial Sequence: Synthetic oligonucleotide
  Antisense strand to SEQ ID NO: 2348912
agaaccaugggaaaugccu

SEQ ID NO: 2348914 - RNA, 19 nt, Artificial Sequence
  Description of Artificial Sequence: Synthetic oligonucleotide
  Sense strand starting at position 252 of SEQ ID NO: 1885531
ggcauuucccaugguucuu

SEQ ID NO: 2348915 - RNA, 19 nt, Artificial Sequence
  Description of Artificial Sequence: Synthetic oligonucleotide
  Antisense strand to SEQ ID NO: 2348914
aagaaccaugggaaaugcc

SEQ ID NO: 2348916 - RNA, 19 nt, Artificial Sequence
  Description of Artificial Sequence: Synthetic oligonucleotide
  Sense strand starting at position 292 of SEQ ID NO: 1885531
uuuaguguuguagaucuga

SEQ ID NO: 2348917 - RNA, 19 nt, Artificial Sequence
  Description of Artificial Sequence: Synthetic oligonucleotide
  Antisense strand to SEQ ID NO: 2348916
ucagaucuacaacacuaaa

SEQ ID NO: 2348918 - RNA, 19 nt, Artificial Sequence
  Description of Artificial Sequence: Synthetic oligonucleotide
  Sense strand starting at position 464 of SEQ ID NO: 1885531
uaggucuacugaccaguua

SEQ ID NO: 2348919 - RNA, 19 nt, Artificial Sequence
  Description of Artificial Sequence: Synthetic oligonucleotide
  Antisense strand to SEQ ID NO: 2348918
uaacuggucaguagaccua

SEQ ID NO: 2348920 - RNA, 19 nt, Artificial Sequence
  Description of Artificial Sequence: Synthetic oligonucleotide
  Sense strand starting at position 465 of SEQ ID NO: 1885531
aggucuacugaccaguuaa

SEQ ID NO: 2348921 - RNA, 19 nt, Artificial Sequence
  Description of Artificial Sequence: Synthetic oligonucleotide
  Antisense strand to SEQ ID NO: 2348920
uuaacuggucaguagaccu

SEQ ID NO: 2348922 - RNA, 19 nt, Artificial Sequence
  Description of Artificial Sequence: Synthetic oligonucleotide
  Sense strand starting at position 664 of SEQ ID NO: 1885531
aguggagauauaugugcaa

SEQ ID NO: 2348923 - RNA, 19 nt, Artificial Sequence
  Description of Artificial Sequence: Synthetic oligonucleotide
  Antisense strand to SEQ ID NO: 2348922
uugcacauauaucuccacu

SEQ ID NO: 2348924 - RNA, 19 nt, Artificial Sequence
  Description of Artificial Sequence: Synthetic oligonucleotide
  Sense strand starting at position 666 of SEQ ID NO: 1885531
uggagauauaugugcaaug

SEQ ID NO: 2348925 - RNA, 19 nt, Artificial Sequence
  Description of Artificial Sequence: Synthetic oligonucleotide
  Antisense strand to SEQ ID NO: 2348924
cauugcacauauaucucca

SEQ ID NO: 2348926 - RNA, 19 nt, Artificial Sequence
  Description of Artificial Sequence: Synthetic oligonucleotide
  Sense strand starting at position 668 of SEQ ID NO: 1885531
gagauauaugugcaaugcu

SEQ ID NO: 2348927 - RNA, 19 nt, Artificial Sequence
  Description of Artificial Sequence: Synthetic oligonucleotide
  Antisense strand to SEQ ID NO: 2348926
agcauugcacauauaucuc

SEQ ID NO: 2348928 - RNA, 19 nt, Artificial Sequence
  Description of Artificial Sequence: Synthetic oligonucleotide
  Sense strand starting at position 723 of SEQ ID NO: 1885531
gacugacaggcuugaaguu

SEQ ID NO: 2348929 - RNA, 19 nt, Artificial Sequence
  Description of Artificial Sequence: Synthetic oligonucleotide
  Antisense strand to SEQ ID NO: 2348928
aacuucaagccugucaguc

SEQ ID NO: 2348930 - RNA, 19 nt, Artificial Sequence
  Description of Artificial Sequence: Synthetic oligonucleotide
  Sense strand starting at position 738 of SEQ ID NO: 1885531
aguuuaugccuccaaagac

SEQ ID NO: 2348931 - RNA, 19 nt, Artificial Sequence
  Description of Artificial Sequence: Synthetic oligonucleotide
  Antisense strand to SEQ ID NO: 2348930
gucuuuggaggcauaaacu

SEQ ID NO: 2348932 - RNA, 19 nt, Artificial Sequence
  Description of Artificial Sequence: Synthetic oligonucleotide
  Sense strand starting at position 820 of SEQ ID NO: 1885531
cccugaaauugguuuauau

SEQ ID NO: 2348933 - RNA, 19 nt, Artificial Sequence
  Description of Artificial Sequence: Synthetic oligonucleotide
  Antisense strand to SEQ ID NO: 2348932
auauaaaccaauuucaggg

SEQ ID NO: 2348934 - RNA, 19 nt, Artificial Sequence
  Description of Artificial Sequence: Synthetic oligonucleotide
  Sense strand starting at position 975 of SEQ ID NO: 1885531
aguaaacuccgccacagaa

SEQ ID NO: 2348935 - RNA, 19 nt, Artificial Sequence
  Description of Artificial Sequence: Synthetic oligonucleotide
  Antisense strand to SEQ ID NO: 2348934
uucuguggcggaguuuacu

SEQ ID NO: 2348936 - RNA, 19 nt, Artificial Sequence
  Description of Artificial Sequence: Synthetic oligonucleotide
  Sense strand starting at position 1048 of SEQ ID NO: 1885531
gugacauugacccaugguu

SEQ ID NO: 2348937 - RNA, 19 nt, Artificial Sequence
  Description of Artificial Sequence: Synthetic oligonucleotide
  Antisense strand to SEQ ID NO: 2348936
aaccaugggucaaugucac

SEQ ID NO: 2348938 - RNA, 19 nt, Artificial Sequence
  Description of Artificial Sequence: Synthetic oligonucleotide
  Sense strand starting at position 1050 of SEQ ID NO: 1885531
gacauugacccaugguuag

SEQ ID NO: 2348939 - RNA, 19 nt, Artificial Sequence
  Description of Artificial Sequence: Synthetic oligonucleotide
  Antisense strand to SEQ ID NO: 2348938
cuaaccaugggucaauguc

SEQ ID NO: 2348940 - RNA, 19 nt, Artificial Sequence
  Description of Artificial Sequence: Synthetic oligonucleotide
  Sense strand starting at position 1227 of SEQ ID NO: 1885531
ggagcauuacauuacugca

SEQ ID NO: 2348941 - RNA, 19 nt, Artificial Sequence
  Description of Artificial Sequence: Synthetic oligonucleotide
  Antisense strand to SEQ ID NO: 2348940
ugcaguaauguaaugcucc

SEQ ID NO: 2348942 - RNA, 19 nt, Artificial Sequence
  Description of Artificial Sequence: Synthetic oligonucleotide
  Sense strand starting at position 1235 of SEQ ID NO: 1885531
acauuacugcaccaagagu

SEQ ID NO: 2348943 - RNA, 19 nt, Artificial Sequence
  Description of Artificial Sequence: Synthetic oligonucleotide
  Antisense strand to SEQ ID NO: 2348942
acucuuggugcaguaaugu

SEQ ID NO: 2348944 - RNA, 19 nt, Artificial Sequence
  Description of Artificial Sequence: Synthetic oligonucleotide
  Sense strand starting at position 2526 of SEQ ID NO: 1885531
ccuugaguucccgacugag

SEQ ID NO: 2348945 - RNA, 19 nt, Artificial Sequence
  Description of Artificial Sequence: Synthetic oligonucleotide
  Antisense strand to SEQ ID NO: 2348944
cucagucgggaacucaagg

SEQ ID NO: 2348946 - RNA, 19 nt, Artificial Sequence
  Description of Artificial Sequence: Synthetic oligonucleotide
  Sense strand starting at position 2529 of SEQ ID NO: 1885531
ugaguucccgacugaggga

SEQ ID NO: 2348947 - RNA, 19 nt, Artificial Sequence
  Description of Artificial Sequence: Synthetic oligonucleotide
  Antisense strand to SEQ ID NO: 2348946
ucccucagucgggaacuca

SEQ ID NO: 2348948 - RNA, 19 nt, Artificial Sequence
  Description of Artificial Sequence: Synthetic oligonucleotide
  Sense strand starting at position 2562 of SEQ ID NO: 1885531
ugcgaucuuguccuguagu

SEQ ID NO: 2348949 - RNA, 19 nt, Artificial Sequence
  Description of Artificial Sequence: Synthetic oligonucleotide
  Antisense strand to SEQ ID NO: 2348948
acuacaggacaagaucgca

SEQ ID NO: 2348950 - RNA, 19 nt, Artificial Sequence
  Description of Artificial Sequence: Synthetic oligonucleotide
  Sense strand starting at position 2597 of SEQ ID NO: 1885531
gugucuuugccuuugugca

SEQ ID NO: 2348951 - RNA, 19 nt, Artificial Sequence
  Description of Artificial Sequence: Synthetic oligonucleotide
  Antisense strand to SEQ ID NO: 2348950
ugcacaaaggcaaagacac

SEQ ID NO: 2348952 - RNA, 19 nt, Artificial Sequence
  Description of Artificial Sequence: Synthetic oligonucleotide
  Sense strand starting at position 2726 of SEQ ID NO: 1885531
augggaauuuagggaaaug

SEQ ID NO: 2348953 - RNA, 19 nt, Artificial Sequence
  Description of Artificial Sequence: Synthetic oligonucleotide
  Antisense strand to SEQ ID NO: 2348952
cauuucccuaaauucccau

SEQ ID NO: 2348954 - RNA, 19 nt, Artificial Sequence
  Description of Artificial Sequence: Synthetic oligonucleotide
  Sense strand starting at position 2767 of SEQ ID NO: 1885531
agaauuggauacuugaguu

SEQ ID NO: 2348955 - RNA, 19 nt, Artificial Sequence
  Description of Artificial Sequence: Synthetic oligonucleotide
  Antisense strand to SEQ ID NO: 2348954
aacucaaguauccaauucu

SEQ ID NO: 2348956 - RNA, 19 nt, Artificial Sequence
  Description of Artificial Sequence: Synthetic oligonucleotide
  Sense strand starting at position 2800 of SEQ ID NO: 1885531
cgagaacgcagauauuaua

SEQ ID NO: 2348957 - RNA, 19 nt, Artificial Sequence
  Description of Artificial Sequence: Synthetic oligonucleotide
  Antisense strand to SEQ ID NO: 2348956
uauaauaucugcguucucg

SEQ ID NO: 2348958 - RNA, 19 nt, Artificial Sequence
  Description of Artificial Sequence: Synthetic oligonucleotide
  Sense strand starting at position 2904 of SEQ ID NO: 1885531
guauaugaugagugaauga

SEQ ID NO: 2348959 - RNA, 19 nt, Artificial Sequence
  Description of Artificial Sequence: Synthetic oligonucleotide
  Antisense strand to SEQ ID NO: 2348958
ucauucacucaucauauac

SEQ ID NO: 2348960 - RNA, 19 nt, Artificial Sequence
  Description of Artificial Sequence: Synthetic oligonucleotide
  Sense strand starting at position 2918 of SEQ ID NO: 1885531
aaugaaaugcggcacuaaa

SEQ ID NO: 2348961 - RNA, 19 nt, Artificial Sequence
  Description of Artificial Sequence: Synthetic oligonucleotide
  Antisense strand to SEQ ID NO: 2348960
uuuagugccgcauuucauu

SEQ ID NO: 2348962 - RNA, 19 nt, Artificial Sequence
  Description of Artificial Sequence: Synthetic oligonucleotide
  Sense strand starting at position 2951 of SEQ ID NO: 1885531
uucgaacucugucucauuu

SEQ ID NO: 2348963 - RNA, 19 nt, Artificial Sequence
  Description of Artificial Sequence: Synthetic oligonucleotide
  Antisense strand to SEQ ID NO: 2348962
aaaugagacagaguucgaa

SEQ ID NO: 2348964 - RNA, 19 nt, Artificial Sequence
  Description of Artificial Sequence: Synthetic oligonucleotide
  Sense strand starting at position 3001 of SEQ ID NO: 1885531
gucaacauauaucuaaagu

SEQ ID NO: 2348965 - RNA, 19 nt, Artificial Sequence
  Description of Artificial Sequence: Synthetic oligonucleotide
  Antisense strand to SEQ ID NO: 2348964
acuuuagauauauguugac

SEQ ID NO: 2348966 - RNA, 19 nt, Artificial Sequence
  Description of Artificial Sequence: Synthetic oligonucleotide
  Sense strand starting at position 3020 of SEQ ID NO: 1885531
aaguaaucacucgguuaga

SEQ ID NO: 2348967 - RNA, 19 nt, Artificial Sequence
  Description of Artificial Sequence: Synthetic oligonucleotide
  Antisense strand to SEQ ID NO: 2348966
ucuaaccgagugauuacuu

SEQ ID NO: 2348968 - RNA, 19 nt, Artificial Sequence
  Description of Artificial Sequence: Synthetic oligonucleotide
  Sense strand starting at position 3021 of SEQ ID NO: 1885531
aguaaucacucgguuagaa

SEQ ID NO: 2348969 - RNA, 19 nt, Artificial Sequence
  Description of Artificial Sequence: Synthetic oligonucleotide
  Antisense strand to SEQ ID NO: 2348968
uucuaaccgagugauuacu

SEQ ID NO: 2348970 - RNA, 19 nt, Artificial Sequence
  Description of Artificial Sequence: Synthetic oligonucleotide
  Sense strand starting at position 3023 of SEQ ID NO: 1885531
uaaucacucgguuagaacu

SEQ ID NO: 2348971 - RNA, 19 nt, Artificial Sequence
  Description of Artificial Sequence: Synthetic oligonucleotide
  Antisense strand to SEQ ID NO: 2348970
aguucuaaccgagugauua

SEQ ID NO: 2348972 - RNA, 19 nt, Artificial Sequence
  Description of Artificial Sequence: Synthetic oligonucleotide
  Sense strand starting at position 3030 of SEQ ID NO: 1885531
ucgguuagaacuuaaugca

SEQ ID NO: 2348973 - RNA, 19 nt, Artificial Sequence
  Description of Artificial Sequence: Synthetic oligonucleotide
  Antisense strand to SEQ ID NO: 2348972
ugcauuaaguucuaaccga

SEQ ID NO: 2348974 - RNA, 19 nt, Artificial Sequence
  Description of Artificial Sequence: Synthetic oligonucleotide
  Sense strand starting at position 3064 of SEQ ID NO: 1885531
cuugaaguuugagucuaag

SEQ ID NO: 2348975 - RNA, 19 nt, Artificial Sequence
  Description of Artificial Sequence: Synthetic oligonucleotide
  Antisense strand to SEQ ID NO: 2348974
cuuagacucaaacuucaag

SEQ ID NO: 2348976 - RNA, 19 nt, Artificial Sequence
  Description of Artificial Sequence: Synthetic oligonucleotide
  Sense strand starting at position 3098 of SEQ ID NO: 1885531
uaagaauugugaguuggac

SEQ ID NO: 2348977 - RNA, 19 nt, Artificial Sequence
  Description of Artificial Sequence: Synthetic oligonucleotide
  Antisense strand to SEQ ID NO: 2348976
guccaacucacaauucuua

SEQ ID NO: 2348978 - RNA, 19 nt, Artificial Sequence
  Description of Artificial Sequence: Synthetic oligonucleotide
  Sense strand starting at position 3100 of SEQ ID NO: 1885531
agaauugugaguuggacca

SEQ ID NO: 2348979 - RNA, 19 nt, Artificial Sequence
  Description of Artificial Sequence: Synthetic oligonucleotide
  Antisense strand to SEQ ID NO: 2348978
ugguccaacucacaauucu

SEQ ID NO: 2348980 - RNA, 19 nt, Artificial Sequence
  Description of Artificial Sequence: Synthetic oligonucleotide
  Sense strand starting at position 3296 of SEQ ID NO: 1885531
uaaucaguaucagcagaag

SEQ ID NO: 2348981 - RNA, 19 nt, Artificial Sequence
  Description of Artificial Sequence: Synthetic oligonucleotide
  Antisense strand to SEQ ID NO: 2348980
cuucugcugauacugauua

SEQ ID NO: 2348982 - RNA, 19 nt, Artificial Sequence
  Description of Artificial Sequence: Synthetic oligonucleotide
  Sense strand starting at position 3442 of SEQ ID NO: 1885531
ggucuagauuaauuccaag

SEQ ID NO: 2348983 - RNA, 19 nt, Artificial Sequence
  Description of Artificial Sequence: Synthetic oligonucleotide
  Antisense strand to SEQ ID NO: 2348982
cuuggaauuaaucuagacc

SEQ ID NO: 2348984 - RNA, 19 nt, Artificial Sequence
  Description of Artificial Sequence: Synthetic oligonucleotide
  Sense strand starting at position 3454 of SEQ ID NO: 1885531
uuccaagaguuaccaggaa

SEQ ID NO: 2348985 - RNA, 19 nt, Artificial Sequence
  Description of Artificial Sequence: Synthetic oligonucleotide
  Antisense strand to SEQ ID NO: 2348984
uuccugguaacucuuggaa

SEQ ID NO: 2348986 - RNA, 19 nt, Artificial Sequence
  Description of Artificial Sequence: Synthetic oligonucleotide
  Sense strand starting at position 1277 of SEQ ID NO: 1885532
acugguuauuucuacauuu

SEQ ID NO: 2348987 - RNA, 19 nt, Artificial Sequence
  Description of Artificial Sequence: Synthetic oligonucleotide
  Antisense strand to SEQ ID NO: 2348986
aaauguagaaauaaccagu

SEQ ID NO: 2348988 - RNA, 19 nt, Artificial Sequence
  Description of Artificial Sequence: Synthetic oligonucleotide
  Sense strand starting at position 1302 of SEQ ID NO: 1885532
gugccaucaccuuaaugua

SEQ ID NO: 2348989 - RNA, 19 nt, Artificial Sequence
  Description of Artificial Sequence: Synthetic oligonucleotide
  Antisense strand to SEQ ID NO: 2348988
uacauuaaggugauggcac

SEQ ID NO: 2348990 - RNA, 19 nt, Artificial Sequence
  Description of Artificial Sequence: Synthetic oligonucleotide
  Sense strand starting at position 1310 of SEQ ID NO: 1885532
accuuaauguauguugagu

SEQ ID NO: 2348991 - RNA, 19 nt, Artificial Sequence
  Description of Artificial Sequence: Synthetic oligonucleotide
  Antisense strand to SEQ ID NO: 2348990
acucaacauacauuaaggu

SEQ ID NO: 2348992 - RNA, 19 nt, Artificial Sequence
  Description of Artificial Sequence: Synthetic oligonucleotide
  Sense strand starting at position 1410 of SEQ ID NO: 1885532
aguuucugagccuauuaaa

SEQ ID NO: 2348993 - RNA, 19 nt, Artificial Sequence
  Description of Artificial Sequence: Synthetic oligonucleotide
  Antisense strand to SEQ ID NO: 2348992
uuuaauaggcucagaaacu

SEQ ID NO: 2348994 - RNA, 19 nt, Artificial Sequence
  Description of Artificial Sequence: Synthetic oligonucleotide
  Sense strand starting at position 1459 of SEQ ID NO: 1885532
aaauaugaaugggaugagu

SEQ ID NO: 2348995 - RNA, 19 nt, Artificial Sequence
  Description of Artificial Sequence: Synthetic oligonucleotide
  Antisense strand to SEQ ID NO: 2348994
acucaucccauucauauuu

SEQ ID NO: 2348996 - RNA, 19 nt, Artificial Sequence
  Description of Artificial Sequence: Synthetic oligonucleotide
  Sense strand starting at position 1480 of SEQ ID NO: 1885532
agcaguucucagcauuaua

SEQ ID NO: 2348997 - RNA, 19 nt, Artificial Sequence
  Description of Artificial Sequence: Synthetic oligonucleotide
  Antisense strand to SEQ ID NO: 2348996
uauaaugcugagaacugcu

SEQ ID NO: 2348998 - RNA, 19 nt, Artificial Sequence
  Description of Artificial Sequence: Synthetic oligonucleotide
  Sense strand starting at position 1516 of SEQ ID NO: 1885532
gcuagagcuucucugaaga

SEQ ID NO: 2348999 - RNA, 19 nt, Artificial Sequence
  Description of Artificial Sequence: Synthetic oligonucleotide
  Antisense strand to SEQ ID NO: 2348998
ucuucagagaagcucuagc

SEQ ID NO: 2349000 - RNA, 19 nt, Artificial Sequence
  Description of Artificial Sequence: Synthetic oligonucleotide
  Sense strand starting at position 1527 of SEQ ID NO: 1885532
ucugaagauuucuaaucug

SEQ ID NO: 2349001 - RNA, 19 nt, Artificial Sequence
  Description of Artificial Sequence: Synthetic oligonucleotide
  Antisense strand to SEQ ID NO: 2349000
cagauuagaaaucuucaga

SEQ ID NO: 2349002 - RNA, 19 nt, Artificial Sequence
  Description of Artificial Sequence: Synthetic oligonucleotide
  Sense strand starting at position 1912 of SEQ ID NO: 1885532
gguccuuuacccugaggua

SEQ ID NO: 2349003 - RNA, 19 nt, Artificial Sequence
  Description of Artificial Sequence: Synthetic oligonucleotide
  Antisense strand to SEQ ID NO: 2349002
uaccucaggguaaaggacc

SEQ ID NO: 2349004 - RNA, 19 nt, Artificial Sequence
  Description of Artificial Sequence: Synthetic oligonucleotide
  Sense strand starting at position 1913 of SEQ ID NO: 1885532
guccuuuacccugagguau

SEQ ID NO: 2349005 - RNA, 19 nt, Artificial Sequence
  Description of Artificial Sequence: Synthetic oligonucleotide
  Antisense strand to SEQ ID NO: 2349004
auaccucaggguaaaggac

SEQ ID NO: 2349006 - RNA, 19 nt, Artificial Sequence
  Description of Artificial Sequence: Synthetic oligonucleotide
  Sense strand starting at position 2080 of SEQ ID NO: 1885532
agguauacuuaagcacaaa

SEQ ID NO: 2349007 - RNA, 19 nt, Artificial Sequence
  Description of Artificial Sequence: Synthetic oligonucleotide
  Antisense strand to SEQ ID NO: 2349006
uuugugcuuaaguauaccu

SEQ ID NO: 2349008 - RNA, 19 nt, Artificial Sequence
  Description of Artificial Sequence: Synthetic oligonucleotide
  Sense strand starting at position 2124 of SEQ ID NO: 1885532
uuuaguuacagauaguagu

SEQ ID NO: 2349009 - RNA, 19 nt, Artificial Sequence
  Description of Artificial Sequence: Synthetic oligonucleotide
  Antisense strand to SEQ ID NO: 2349008
acuacuaucuguaacuaaa

SEQ ID NO: 2349010 - RNA, 19 nt, Artificial Sequence
  Description of Artificial Sequence: Synthetic oligonucleotide
  Sense strand starting at position 2141 of SEQ ID NO: 1885532
guauacuagaagugguauu

SEQ ID NO: 2349011 - RNA, 19 nt, Artificial Sequence
  Description of Artificial Sequence: Synthetic oligonucleotide
  Antisense strand to SEQ ID NO: 2349010
aauaccacuucuaguauac

SEQ ID NO: 2349012 - RNA, 19 nt, Artificial Sequence
  Description of Artificial Sequence: Synthetic oligonucleotide
  Sense strand starting at position 2162 of SEQ ID NO: 1885532
agaauaaagugguugcuua

SEQ ID NO: 2349013 - RNA, 19 nt, Artificial Sequence
  Description of Artificial Sequence: Synthetic oligonucleotide
  Antisense strand to SEQ ID NO: 2349012
uaagcaaccacuuuauucu

SEQ ID NO: 2349014 - RNA, 19 nt, Artificial Sequence
  Description of Artificial Sequence: Synthetic oligonucleotide
  Sense strand starting at position 2251 of SEQ ID NO: 1885532
aaagcagauuauguaauga

SEQ ID NO: 2349015 - RNA, 19 nt, Artificial Sequence
  Description of Artificial Sequence: Synthetic oligonucleotide
  Antisense strand to SEQ ID NO: 2349014
ucauuacauaaucugcuuu

SEQ ID NO: 2349016 - RNA, 19 nt, Artificial Sequence
  Description of Artificial Sequence: Synthetic oligonucleotide
  Sense strand starting at position 2261 of SEQ ID NO: 1885532
auguaaugaccaggaguuc

SEQ ID NO: 2349017 - RNA, 19 nt, Artificial Sequence
  Description of Artificial Sequence: Synthetic oligonucleotide
  Antisense strand to SEQ ID NO: 2349016
gaacuccuggucauuacau

SEQ ID NO: 2349018 - RNA, 19 nt, Artificial Sequence
  Description of Artificial Sequence: Synthetic oligonucleotide
  Sense strand starting at position 2291 of SEQ ID NO: 1885532
uucugaaagcauugagaag

SEQ ID NO: 2349019 - RNA, 19 nt, Artificial Sequence
  Description of Artificial Sequence: Synthetic oligonucleotide
  Antisense strand to SEQ ID NO: 2349018
cuucucaaugcuuucagaa

SEQ ID NO: 2349020 - RNA, 19 nt, Artificial Sequence
  Description of Artificial Sequence: Synthetic oligonucleotide
  Sense strand starting at position 2307 of SEQ ID NO: 1885532
aagggaaagccacguuaaa

SEQ ID NO: 2349021 - RNA, 19 nt, Artificial Sequence
  Description of Artificial Sequence: Synthetic oligonucleotide
  Antisense strand to SEQ ID NO: 2349020
uuuaacguggcuuucccuu

SEQ ID NO: 2349022 - RNA, 19 nt, Artificial Sequence
  Description of Artificial Sequence: Synthetic oligonucleotide
  Sense strand starting at position 2362 of SEQ ID NO: 1885532
cugcucagucacuaagaca

SEQ ID NO: 2349023 - RNA, 19 nt, Artificial Sequence
  Description of Artificial Sequence: Synthetic oligonucleotide
  Antisense strand to SEQ ID NO: 2349022
ugucuuagugacugagcag

SEQ ID NO: 2349024 - RNA, 19 nt, Artificial Sequence
  Description of Artificial Sequence: Synthetic oligonucleotide
  Sense strand starting at position 2389 of SEQ ID NO: 1885532
cuuggagugcuuuaagcua

SEQ ID NO: 2349025 - RNA, 19 nt, Artificial Sequence
  Description of Artificial Sequence: Synthetic oligonucleotide
  Antisense strand to SEQ ID NO: 2349024
uagcuuaaagcacuccaag

SEQ ID NO: 2349026 - RNA, 19 nt, Artificial Sequence
  Description of Artificial Sequence: Synthetic oligonucleotide
  Sense strand starting at position 2394 of SEQ ID NO: 1885532
agugcuuuaagcuacggaa

SEQ ID NO: 2349027 - RNA, 19 nt, Artificial Sequence
  Description of Artificial Sequence: Synthetic oligonucleotide
  Antisense strand to SEQ ID NO: 2349026
uuccguagcuuaaagcacu

SEQ ID NO: 2349028 - RNA, 19 nt, Artificial Sequence
  Description of Artificial Sequence: Synthetic oligonucleotide
  Sense strand starting at position 2396 of SEQ ID NO: 1885532
ugcuuuaagcuacggaaua

SEQ ID NO: 2349029 - RNA, 19 nt, Artificial Sequence
  Description of Artificial Sequence: Synthetic oligonucleotide
  Antisense strand to SEQ ID NO: 2349028
uauuccguagcuuaaagca

SEQ ID NO: 2349030 - RNA, 19 nt, Artificial Sequence
  Description of Artificial Sequence: Synthetic oligonucleotide
  Sense strand starting at position 2560 of SEQ ID NO: 1885532
gagaauguauguucugagu

SEQ ID NO: 2349031 - RNA, 19 nt, Artificial Sequence
  Description of Artificial Sequence: Synthetic oligonucleotide
  Antisense strand to SEQ ID NO: 2349030
acucagaacauacauucuc

SEQ ID NO: 2349032 - RNA, 19 nt, Artificial Sequence
  Description of Artificial Sequence: Synthetic oligonucleotide
  Sense strand starting at position 2741 of SEQ ID NO: 1885532
uuuagagcuuggguaaauc

SEQ ID NO: 2349033 - RNA, 19 nt, Artificial Sequence
  Description of Artificial Sequence: Synthetic oligonucleotide
  Antisense strand to SEQ ID NO: 2349032
gauuuacccaagcucuaaa

SEQ ID NO: 2349034 - RNA, 19 nt, Artificial Sequence
  Description of Artificial Sequence: Synthetic oligonucleotide
  Sense strand starting at position 2879 of SEQ ID NO: 1885532
ggccaugagugacuccaaa

SEQ ID NO: 2349035 - RNA, 19 nt, Artificial Sequence
  Description of Artificial Sequence: Synthetic oligonucleotide
  Antisense strand to SEQ ID NO: 2349034
uuuggagucacucauggcc

SEQ ID NO: 2349036 - RNA, 19 nt, Artificial Sequence
  Description of Artificial Sequence: Synthetic oligonucleotide
  Sense strand starting at position 2928 of SEQ ID NO: 1885532
gccaauccaguugaacaua

SEQ ID NO: 2349037 - RNA, 19 nt, Artificial Sequence
  Description of Artificial Sequence: Synthetic oligonucleotide
  Antisense strand to SEQ ID NO: 2349036
uauguucaacuggauuggc

SEQ ID NO: 2349038 - RNA, 19 nt, Artificial Sequence
  Description of Artificial Sequence: Synthetic oligonucleotide
  Sense strand starting at position 3021 of SEQ ID NO: 1885532
uccgaugucacuugaaagu

SEQ ID NO: 2349039 - RNA, 19 nt, Artificial Sequence
  Description of Artificial Sequence: Synthetic oligonucleotide
  Antisense strand to SEQ ID NO: 2349038
acuuucaagugacaucgga

SEQ ID NO: 2349040 - RNA, 19 nt, Artificial Sequence
  Description of Artificial Sequence: Synthetic oligonucleotide
  Sense strand starting at position 3059 of SEQ ID NO: 1885532
gagggaauguccuaagagg

SEQ ID NO: 2349041 - RNA, 19 nt, Artificial Sequence
  Description of Artificial Sequence: Synthetic oligonucleotide
  Antisense strand to SEQ ID NO: 2349040
ccucuuaggacauucccuc

SEQ ID NO: 2349042 - RNA, 19 nt, Artificial Sequence
  Description of Artificial Sequence: Synthetic oligonucleotide
  Sense strand starting at position 3121 of SEQ ID NO: 1885532
gccauuuaguggguucuga

SEQ ID NO: 2349043 - RNA, 19 nt, Artificial Sequence
  Description of Artificial Sequence: Synthetic oligonucleotide
  Antisense strand to SEQ ID NO: 2349042
ucagaacccacuaaauggc

SEQ ID NO: 2349044 - RNA, 19 nt, Artificial Sequence
  Description of Artificial Sequence: Synthetic oligonucleotide
  Sense strand starting at position 3227 of SEQ ID NO: 1885532
acuguaucaauguauggua

SEQ ID NO: 2349045 - RNA, 19 nt, Artificial Sequence
  Description of Artificial Sequence: Synthetic oligonucleotide
  Antisense strand to SEQ ID NO: 2349044
uaccauacauugauacagu

SEQ ID NO: 2349046 - RNA, 19 nt, Artificial Sequence
  Description of Artificial Sequence: Synthetic oligonucleotide
  Sense strand starting at position 3229 of SEQ ID NO: 1885532
uguaucaauguaugguauu

SEQ ID NO: 2349047 - RNA, 19 nt, Artificial Sequence
  Description of Artificial Sequence: Synthetic oligonucleotide
  Antisense strand to SEQ ID NO: 2349046
aauaccauacauugauaca

SEQ ID NO: 2349048 - RNA, 19 nt, Artificial Sequence
  Description of Artificial Sequence: Synthetic oligonucleotide
  Sense strand starting at position 3338 of SEQ ID NO: 1885532
cuagaagccucuguacaga

SEQ ID NO: 2349049 - RNA, 19 nt, Artificial Sequence
  Description of Artificial Sequence: Synthetic oligonucleotide
  Antisense strand to SEQ ID NO: 2349048
ucuguacagaggcuucuag

SEQ ID NO: 2349050 - RNA, 19 nt, Artificial Sequence
  Description of Artificial Sequence: Synthetic oligonucleotide
  Sense strand starting at position 3371 of SEQ ID NO: 1885532
aauuacucgcuuuguagaa

SEQ ID NO: 2349051 - RNA, 19 nt, Artificial Sequence
  Description of Artificial Sequence: Synthetic oligonucleotide
  Antisense strand to SEQ ID NO: 2349050
uucuacaaagcgaguaauu

SEQ ID NO: 2349052 - RNA, 19 nt, Artificial Sequence
  Description of Artificial Sequence: Synthetic oligonucleotide
  Sense strand starting at position 3372 of SEQ ID NO: 1885532
auuacucgcuuuguagaaa

SEQ ID NO: 2349053 - RNA, 19 nt, Artificial Sequence
  Description of Artificial Sequence: Synthetic oligonucleotide
  Antisense strand to SEQ ID NO: 2349052
uuucuacaaagcgaguaau

SEQ ID NO: 2349054 - RNA, 19 nt, Artificial Sequence
  Description of Artificial Sequence: Synthetic oligonucleotide
  Sense strand starting at position 3375 of SEQ ID NO: 1885532
acucgcuuuguagaaacuu

SEQ ID NO: 2349055 - RNA, 19 nt, Artificial Sequence
  Description of Artificial Sequence: Synthetic oligonucleotide
  Antisense strand to SEQ ID NO: 2349054
aaguuucuacaaagcgagu

SEQ ID NO: 2349056 - RNA, 19 nt, Artificial Sequence
  Description of Artificial Sequence: Synthetic oligonucleotide
  Sense strand starting at position 3622 of SEQ ID NO: 1885532
ccugucgucccagauuauu

SEQ ID NO: 2349057 - RNA, 19 nt, Artificial Sequence
  Description of Artificial Sequence: Synthetic oligonucleotide
  Antisense strand to SEQ ID NO: 2349056
aauaaucugggacgacagg

SEQ ID NO: 2349058 - RNA, 19 nt, Artificial Sequence
  Description of Artificial Sequence: Synthetic oligonucleotide
  Sense strand starting at position 3653 of SEQ ID NO: 1885532
agugaaauuaguggaauuc

SEQ ID NO: 2349059 - RNA, 19 nt, Artificial Sequence
  Description of Artificial Sequence: Synthetic oligonucleotide
  Antisense strand to SEQ ID NO: 2349058
gaauuccacuaauuucacu

SEQ ID NO: 2349060 - RNA, 19 nt, Artificial Sequence
  Description of Artificial Sequence: Synthetic oligonucleotide
  Sense strand starting at position 3659 of SEQ ID NO: 1885532
auuaguggaauucgauaca

SEQ ID NO: 2349061 - RNA, 19 nt, Artificial Sequence
  Description of Artificial Sequence: Synthetic oligonucleotide
  Antisense strand to SEQ ID NO: 2349060
uguaucgaauuccacuaau

SEQ ID NO: 2349062 - RNA, 19 nt, Artificial Sequence
  Description of Artificial Sequence: Synthetic oligonucleotide
  Sense strand starting at position 3681 of SEQ ID NO: 1885532
auagucucccuguaggaua

SEQ ID NO: 2349063 - RNA, 19 nt, Artificial Sequence
  Description of Artificial Sequence: Synthetic oligonucleotide
  Antisense strand to SEQ ID NO: 2349062
uauccuacagggagacuau

SEQ ID NO: 2349064 - RNA, 19 nt, Artificial Sequence
  Description of Artificial Sequence: Synthetic oligonucleotide
  Sense strand starting at position 3787 of SEQ ID NO: 1885532
uauucuuaccuguagugga

SEQ ID NO: 2349065 - RNA, 19 nt, Artificial Sequence
  Description of Artificial Sequence: Synthetic oligonucleotide
  Antisense strand to SEQ ID NO: 2349064
uccacuacagguaagaaua

SEQ ID NO: 2349066 - RNA, 19 nt, Artificial Sequence
  Description of Artificial Sequence: Synthetic oligonucleotide
  Sense strand starting at position 40 of SEQ ID NO: 1885533
cagacucuugggugcugaa

SEQ ID NO: 2349067 - RNA, 19 nt, Artificial Sequence
  Description of Artificial Sequence: Synthetic oligonucleotide
  Antisense strand to SEQ ID NO: 2349066
uucagcacccaagagucug

SEQ ID NO: 2349068 - RNA, 19 nt, Artificial Sequence
  Description of Artificial Sequence: Synthetic oligonucleotide
  Sense strand starting at position 214 of SEQ ID NO: 1885533
ugaugaaguggcugacaua

SEQ ID NO: 2349069 - RNA, 19 nt, Artificial Sequence
  Description of Artificial Sequence: Synthetic oligonucleotide
  Antisense strand to SEQ ID NO: 2349068
uaugucagccacuucauca

SEQ ID NO: 2349070 - RNA, 19 nt, Artificial Sequence
  Description of Artificial Sequence: Synthetic oligonucleotide
  Sense strand starting at position 400 of SEQ ID NO: 1885533
auuguagugucauuuaggu

SEQ ID NO: 2349071 - RNA, 19 nt, Artificial Sequence
  Description of Artificial Sequence: Synthetic oligonucleotide
  Antisense strand to SEQ ID NO: 2349070
accuaaaugacacuacaau

SEQ ID NO: 2349072 - RNA, 19 nt, Artificial Sequence
  Description of Artificial Sequence: Synthetic oligonucleotide
  Sense strand starting at position 402 of SEQ ID NO: 1885533
uguagugucauuuagguuu

SEQ ID NO: 2349073 - RNA, 19 nt, Artificial Sequence
  Description of Artificial Sequence: Synthetic oligonucleotide
  Antisense strand to SEQ ID NO: 2349072
aaaccuaaaugacacuaca

SEQ ID NO: 2349074 - RNA, 19 nt, Artificial Sequence
  Description of Artificial Sequence: Synthetic oligonucleotide
  Sense strand starting at position 523 of SEQ ID NO: 1885533
agcacugaguaucugaaua

SEQ ID NO: 2349075 - RNA, 19 nt, Artificial Sequence
  Description of Artificial Sequence: Synthetic oligonucleotide
  Antisense strand to SEQ ID NO: 2349074
uauucagauacucagugcu

SEQ ID NO: 2349076 - RNA, 19 nt, Artificial Sequence
  Description of Artificial Sequence: Synthetic oligonucleotide
  Sense strand starting at position 528 of SEQ ID NO: 1885533
ugaguaucugaauacagca

SEQ ID NO: 2349077 - RNA, 19 nt, Artificial Sequence
  Description of Artificial Sequence: Synthetic oligonucleotide
  Antisense strand to SEQ ID NO: 2349076
ugcuguauucagauacuca

SEQ ID NO: 2349078 - RNA, 19 nt, Artificial Sequence
  Description of Artificial Sequence: Synthetic oligonucleotide
  Sense strand starting at position 715 of SEQ ID NO: 1885533
guauguuaaauguagucua

SEQ ID NO: 2349079 - RNA, 19 nt, Artificial Sequence
  Description of Artificial Sequence: Synthetic oligonucleotide
  Antisense strand to SEQ ID NO: 2349078
uagacuacauuuaacauac

SEQ ID NO: 2349080 - RNA, 19 nt, Artificial Sequence
  Description of Artificial Sequence: Synthetic oligonucleotide
  Sense strand starting at position 816 of SEQ ID NO: 1885533
uaggacacugccugauaca

SEQ ID NO: 2349081 - RNA, 19 nt, Artificial Sequence
  Description of Artificial Sequence: Synthetic oligonucleotide
  Antisense strand to SEQ ID NO: 2349080
uguaucaggcaguguccua

SEQ ID NO: 2349082 - RNA, 19 nt, Artificial Sequence
  Description of Artificial Sequence: Synthetic oligonucleotide
  Sense strand starting at position 1100 of SEQ ID NO: 1885533
uaacuauaacgcuggguaa

SEQ ID NO: 2349083 - RNA, 19 nt, Artificial Sequence
  Description of Artificial Sequence: Synthetic oligonucleotide
  Antisense strand to SEQ ID NO: 2349082
uuacccagcguuauaguua

SEQ ID NO: 2349084 - RNA, 19 nt, Artificial Sequence
  Description of Artificial Sequence: Synthetic oligonucleotide
  Sense strand starting at position 1101 of SEQ ID NO: 1885533
aacuauaacgcuggguaaa

SEQ ID NO: 2349085 - RNA, 19 nt, Artificial Sequence
  Description of Artificial Sequence: Synthetic oligonucleotide
  Antisense strand to SEQ ID NO: 2349084
uuuacccagcguuauaguu

SEQ ID NO: 2349086 - RNA, 19 nt, Artificial Sequence
  Description of Artificial Sequence: Synthetic oligonucleotide
  Sense strand starting at position 1156 of SEQ ID NO: 1885533
gaccucuuccgugauaaca

SEQ ID NO: 2349087 - RNA, 19 nt, Artificial Sequence
  Description of Artificial Sequence: Synthetic oligonucleotide
  Antisense strand to SEQ ID NO: 2349086
uguuaucacggaagagguc

SEQ ID NO: 2349088 - RNA, 19 nt, Artificial Sequence
  Description of Artificial Sequence: Synthetic oligonucleotide
  Sense strand starting at position 1236 of SEQ ID NO: 1885533
ccuccauucuaggcauaag

SEQ ID NO: 2349089 - RNA, 19 nt, Artificial Sequence
  Description of Artificial Sequence: Synthetic oligonucleotide
  Antisense strand to SEQ ID NO: 2349088
cuuaugccuagaauggagg

SEQ ID NO: 2349090 - RNA, 19 nt, Artificial Sequence
  Description of Artificial Sequence: Synthetic oligonucleotide
  Sense strand starting at position 1637 of SEQ ID NO: 1885533
cggagaaaggcucggaaau

SEQ ID NO: 2349091 - RNA, 19 nt, Artificial Sequence
  Description of Artificial Sequence: Synthetic oligonucleotide
  Antisense strand to SEQ ID NO: 2349090
auuuccgagccuuucuccg

SEQ ID NO: 2349092 - RNA, 19 nt, Artificial Sequence
  Description of Artificial Sequence: Synthetic oligonucleotide
  Sense strand starting at position 1638 of SEQ ID NO: 1885533
ggagaaaggcucggaaauu

SEQ ID NO: 2349093 - RNA, 19 nt, Artificial Sequence
  Description of Artificial Sequence: Synthetic oligonucleotide
  Antisense strand to SEQ ID NO: 2349092
aauuuccgagccuuucucc

SEQ ID NO: 2349094 - RNA, 19 nt, Artificial Sequence
  Description of Artificial Sequence: Synthetic oligonucleotide
  Sense strand starting at position 2129 of SEQ ID NO: 1885533
gcuugacaucuggaagcaa

SEQ ID NO: 2349095 - RNA, 19 nt, Artificial Sequence
  Description of Artificial Sequence: Synthetic oligonucleotide
  Antisense strand to SEQ ID NO: 2349094
uugcuuccagaugucaagc

SEQ ID NO: 2349096 - RNA, 19 nt, Artificial Sequence
  Description of Artificial Sequence: Synthetic oligonucleotide
  Sense strand starting at position 2144 of SEQ ID NO: 1885533
gcaaccuccgguuauuaaa

SEQ ID NO: 2349097 - RNA, 19 nt, Artificial Sequence
  Description of Artificial Sequence: Synthetic oligonucleotide
  Antisense strand to SEQ ID NO: 2349096
uuuaauaaccggagguugc

SEQ ID NO: 2349098 - RNA, 19 nt, Artificial Sequence
  Description of Artificial Sequence: Synthetic oligonucleotide
  Sense strand starting at position 2222 of SEQ ID NO: 1885533
auuuguagcucuguuuaaa

SEQ ID NO: 2349099 - RNA, 19 nt, Artificial Sequence
  Description of Artificial Sequence: Synthetic oligonucleotide
  Antisense strand to SEQ ID NO: 2349098
uuuaaacagagcuacaaau

SEQ ID NO: 2349100 - RNA, 19 nt, Artificial Sequence
  Description of Artificial Sequence: Synthetic oligonucleotide
  Sense strand starting at position 2225 of SEQ ID NO: 1885533
uguagcucuguuuaaauau

SEQ ID NO: 2349101 - RNA, 19 nt, Artificial Sequence
  Description of Artificial Sequence: Synthetic oligonucleotide
  Antisense strand to SEQ ID NO: 2349100
auauuuaaacagagcuaca

SEQ ID NO: 2349102 - RNA, 19 nt, Artificial Sequence
  Description of Artificial Sequence: Synthetic oligonucleotide
  Sense strand starting at position 2365 of SEQ ID NO: 1885533
uugugugggaagcaagaua

SEQ ID NO: 2349103 - RNA, 19 nt, Artificial Sequence
  Description of Artificial Sequence: Synthetic oligonucleotide
  Antisense strand to SEQ ID NO: 2349102
uaucuugcuucccacacaa

SEQ ID NO: 2349104 - RNA, 19 nt, Artificial Sequence
  Description of Artificial Sequence: Synthetic oligonucleotide
  Sense strand starting at position 2373 of SEQ ID NO: 1885533
gaagcaagauaagugguau

SEQ ID NO: 2349105 - RNA, 19 nt, Artificial Sequence
  Description of Artificial Sequence: Synthetic oligonucleotide
  Antisense strand to SEQ ID NO: 2349104
auaccacuuaucuugcuuc

SEQ ID NO: 2349106 - RNA, 19 nt, Artificial Sequence
  Description of Artificial Sequence: Synthetic oligonucleotide
  Sense strand starting at position 2385 of SEQ ID NO: 1885533
gugguauuguuuccauuug

SEQ ID NO: 2349107 - RNA, 19 nt, Artificial Sequence
  Description of Artificial Sequence: Synthetic oligonucleotide
  Antisense strand to SEQ ID NO: 2349106
caaauggaaacaauaccac

SEQ ID NO: 2349108 - RNA, 19 nt, Artificial Sequence
  Description of Artificial Sequence: Synthetic oligonucleotide
  Sense strand starting at position 2426 of SEQ ID NO: 1885533
agguguaauaaaugguuua

SEQ ID NO: 2349109 - RNA, 19 nt, Artificial Sequence
  Description of Artificial Sequence: Synthetic oligonucleotide
  Antisense strand to SEQ ID NO: 2349108
uaaaccauuuauuacaccu

SEQ ID NO: 2349110 - RNA, 19 nt, Artificial Sequence
  Description of Artificial Sequence: Synthetic oligonucleotide
  Sense strand starting at position 2427 of SEQ ID NO: 1885533
gguguaauaaaugguuuac

SEQ ID NO: 2349111 - RNA, 19 nt, Artificial Sequence
  Description of Artificial Sequence: Synthetic oligonucleotide
  Antisense strand to SEQ ID NO: 2349110
guaaaccauuuauuacacc

SEQ ID NO: 2349112 - RNA, 19 nt, Artificial Sequence
  Description of Artificial Sequence: Synthetic oligonucleotide
  Sense strand starting at position 2518 of SEQ ID NO: 1885533
ucaaauagcugaguaguaa

SEQ ID NO: 2349113 - RNA, 19 nt, Artificial Sequence
  Description of Artificial Sequence: Synthetic oligonucleotide
  Antisense strand to SEQ ID NO: 2349112
uuacuacucagcuauuuga

SEQ ID NO: 2349114 - RNA, 19 nt, Artificial Sequence
  Description of Artificial Sequence: Synthetic oligonucleotide
  Sense strand starting at position 2519 of SEQ ID NO: 1885533
caaauagcugaguaguaau

SEQ ID NO: 2349115 - RNA, 19 nt, Artificial Sequence
  Description of Artificial Sequence: Synthetic oligonucleotide
  Antisense strand to SEQ ID NO: 2349114
auuacuacucagcuauuug

SEQ ID NO: 2349116 - RNA, 19 nt, Artificial Sequence
  Description of Artificial Sequence: Synthetic oligonucleotide
  Sense strand starting at position 2577 of SEQ ID NO: 1885533
ccaauaaucccgcaaagug

SEQ ID NO: 2349117 - RNA, 19 nt, Artificial Sequence
  Description of Artificial Sequence: Synthetic oligonucleotide
  Antisense strand to SEQ ID NO: 2349116
cacuuugcgggauuauugg

SEQ ID NO: 2349118 - RNA, 19 nt, Artificial Sequence
  Description of Artificial Sequence: Synthetic oligonucleotide
  Sense strand starting at position 2877 of SEQ ID NO: 1885533
gacacugguuggcugagau

SEQ ID NO: 2349119 - RNA, 19 nt, Artificial Sequence
  Description of Artificial Sequence: Synthetic oligonucleotide
  Antisense strand to SEQ ID NO: 2349118
aucucagccaaccaguguc

SEQ ID NO: 2349120 - RNA, 19 nt, Artificial Sequence
  Description of Artificial Sequence: Synthetic oligonucleotide
  Sense strand starting at position 2909 of SEQ ID NO: 1885533
gcugauagcccugaaagca

SEQ ID NO: 2349121 - RNA, 19 nt, Artificial Sequence
  Description of Artificial Sequence: Synthetic oligonucleotide
  Antisense strand to SEQ ID NO: 2349120
ugcuuucagggcuaucagc

SEQ ID NO: 2349122 - RNA, 19 nt, Artificial Sequence
  Description of Artificial Sequence: Synthetic oligonucleotide
  Sense strand starting at position 3010 of SEQ ID NO: 1885533
ccugaaaccucauugcaag

SEQ ID NO: 2349123 - RNA, 19 nt, Artificial Sequence
  Description of Artificial Sequence: Synthetic oligonucleotide
  Antisense strand to SEQ ID NO: 2349122
cuugcaaugagguuucagg

SEQ ID NO: 2349124 - RNA, 19 nt, Artificial Sequence
  Description of Artificial Sequence: Synthetic oligonucleotide
  Sense strand starting at position 3064 of SEQ ID NO: 1885533
ucacacauguuacuggaua

SEQ ID NO: 2349125 - RNA, 19 nt, Artificial Sequence
  Description of Artificial Sequence: Synthetic oligonucleotide
  Antisense strand to SEQ ID NO: 2349124
uauccaguaacauguguga

SEQ ID NO: 2349126 - RNA, 19 nt, Artificial Sequence
  Description of Artificial Sequence: Synthetic oligonucleotide
  Sense strand starting at position 3077 of SEQ ID NO: 1885533
uggauaggacuguguguua

SEQ ID NO: 2349127 - RNA, 19 nt, Artificial Sequence
  Description of Artificial Sequence: Synthetic oligonucleotide
  Antisense strand to SEQ ID NO: 2349126
uaacacacaguccuaucca

SEQ ID NO: 2349128 - RNA, 19 nt, Artificial Sequence
  Description of Artificial Sequence: Synthetic oligonucleotide
  Sense strand starting at position 3089 of SEQ ID NO: 1885533
uguguuagcaugccuguga

SEQ ID NO: 2349129 - RNA, 19 nt, Artificial Sequence
  Description of Artificial Sequence: Synthetic oligonucleotide
  Antisense strand to SEQ ID NO: 2349128
ucacaggcaugcuaacaca

SEQ ID NO: 2349130 - RNA, 19 nt, Artificial Sequence
  Description of Artificial Sequence: Synthetic oligonucleotide
  Sense strand starting at position 3113 of SEQ ID NO: 1885533
agagcacuggccuggauau

SEQ ID NO: 2349131 - RNA, 19 nt, Artificial Sequence
  Description of Artificial Sequence: Synthetic oligonucleotide
  Antisense strand to SEQ ID NO: 2349130
auauccaggccagugcucu

SEQ ID NO: 2349132 - RNA, 19 nt, Artificial Sequence
  Description of Artificial Sequence: Synthetic oligonucleotide
  Sense strand starting at position 3215 of SEQ ID NO: 1885533
ccuuguaauuacuuuagag

SEQ ID NO: 2349133 - RNA, 19 nt, Artificial Sequence
  Description of Artificial Sequence: Synthetic oligonucleotide
  Antisense strand to SEQ ID NO: 2349132
cucuaaaguaauuacaagg

SEQ ID NO: 2349134 - RNA, 19 nt, Artificial Sequence
  Description of Artificial Sequence: Synthetic oligonucleotide
  Sense strand starting at position 3257 of SEQ ID NO: 1885533
acuugcuucucagugagaa

SEQ ID NO: 2349135 - RNA, 19 nt, Artificial Sequence
  Description of Artificial Sequence: Synthetic oligonucleotide
  Antisense strand to SEQ ID NO: 2349134
uucucacugagaagcaagu

SEQ ID NO: 2349136 - RNA, 19 nt, Artificial Sequence
  Description of Artificial Sequence: Synthetic oligonucleotide
  Sense strand starting at position 3267 of SEQ ID NO: 1885533
cagugagaauacuuuguua

SEQ ID NO: 2349137 - RNA, 19 nt, Artificial Sequence
  Description of Artificial Sequence: Synthetic oligonucleotide
  Antisense strand to SEQ ID NO: 2349136
uaacaaaguauucucacug

SEQ ID NO: 2349138 - RNA, 19 nt, Artificial Sequence
  Description of Artificial Sequence: Synthetic oligonucleotide
  Sense strand starting at position 3269 of SEQ ID NO: 1885533
gugagaauacuuuguuaga

SEQ ID NO: 2349139 - RNA, 19 nt, Artificial Sequence
  Description of Artificial Sequence: Synthetic oligonucleotide
  Antisense strand to SEQ ID NO: 2349138
ucuaacaaaguauucucac

SEQ ID NO: 2349140 - RNA, 19 nt, Artificial Sequence
  Description of Artificial Sequence: Synthetic oligonucleotide
  Sense strand starting at position 3270 of SEQ ID NO: 1885533
ugagaauacuuuguuagau

SEQ ID NO: 2349141 - RNA, 19 nt, Artificial Sequence
  Description of Artificial Sequence: Synthetic oligonucleotide
  Antisense strand to SEQ ID NO: 2349140
aucuaacaaaguauucuca

SEQ ID NO: 2349142 - RNA, 19 nt, Artificial Sequence
  Description of Artificial Sequence: Synthetic oligonucleotide
  Sense strand starting at position 3271 of SEQ ID NO: 1885533
gagaauacuuuguuagauu

SEQ ID NO: 2349143 - RNA, 19 nt, Artificial Sequence
  Description of Artificial Sequence: Synthetic oligonucleotide
  Antisense strand to SEQ ID NO: 2349142
aaucuaacaaaguauucuc

SEQ ID NO: 2349144 - RNA, 19 nt, Artificial Sequence
  Description of Artificial Sequence: Synthetic oligonucleotide
  Sense strand starting at position 3446 of SEQ ID NO: 1885533
accuuauagucaguuucca

SEQ ID NO: 2349145 - RNA, 19 nt, Artificial Sequence
  Description of Artificial Sequence: Synthetic oligonucleotide
  Antisense strand to SEQ ID NO: 2349144
uggaaacugacuauaaggu

SEQ ID NO: 2349146 - RNA, 19 nt, Artificial Sequence
  Description of Artificial Sequence: Synthetic oligonucleotide
  Sense strand starting at position 14 of SEQ ID NO: 1885534
uuauaaguuggaggaaucu

SEQ ID NO: 2349147 - RNA, 19 nt, Artificial Sequence
  Description of Artificial Sequence: Synthetic oligonucleotide
  Antisense strand to SEQ ID NO: 2349146
agauuccuccaacuuauaa

SEQ ID NO: 2349148 - RNA, 19 nt, Artificial Sequence
  Description of Artificial Sequence: Synthetic oligonucleotide
  Sense strand starting at position 89 of SEQ ID NO: 1885534
augauacuuuaccaagaug

SEQ ID NO: 2349149 - RNA, 19 nt, Artificial Sequence
  Description of Artificial Sequence: Synthetic oligonucleotide
  Antisense strand to SEQ ID NO: 2349148
caucuugguaaaguaucau

SEQ ID NO: 2349150 - RNA, 19 nt, Artificial Sequence
  Description of Artificial Sequence: Synthetic oligonucleotide
  Sense strand starting at position 97 of SEQ ID NO: 1885534
uuaccaagauguuguacua

SEQ ID NO: 2349151 - RNA, 19 nt, Artificial Sequence
  Description of Artificial Sequence: Synthetic oligonucleotide
  Antisense strand to SEQ ID NO: 2349150
uaguacaacaucuugguaa

SEQ ID NO: 2349152 - RNA, 19 nt, Artificial Sequence
  Description of Artificial Sequence: Synthetic oligonucleotide
  Sense strand starting at position 124 of SEQ ID NO: 1885534
uuaagcaacuuagguaaua

SEQ ID NO: 2349153 - RNA, 19 nt, Artificial Sequence
  Description of Artificial Sequence: Synthetic oligonucleotide
  Antisense strand to SEQ ID NO: 2349152
uauuaccuaaguugcuuaa

SEQ ID NO: 2349154 - RNA, 19 nt, Artificial Sequence
  Description of Artificial Sequence: Synthetic oligonucleotide
  Sense strand starting at position 529 of SEQ ID NO: 1885534
uggccuaaaugcuuauuau

SEQ ID NO: 2349155 - RNA, 19 nt, Artificial Sequence
  Description of Artificial Sequence: Synthetic oligonucleotide
  Antisense strand to SEQ ID NO: 2349154
auaauaagcauuuaggcca

SEQ ID NO: 2349156 - RNA, 19 nt, Artificial Sequence
  Description of Artificial Sequence: Synthetic oligonucleotide
  Sense strand starting at position 530 of SEQ ID NO: 1885534
ggccuaaaugcuuauuauu

SEQ ID NO: 2349157 - RNA, 19 nt, Artificial Sequence
  Description of Artificial Sequence: Synthetic oligonucleotide
  Antisense strand to SEQ ID NO: 2349156
aauaauaagcauuuaggcc

SEQ ID NO: 2349158 - RNA, 19 nt, Artificial Sequence
  Description of Artificial Sequence: Synthetic oligonucleotide
  Sense strand starting at position 1331 of SEQ ID NO: 1885534
gccaguaguuacuccaaug

SEQ ID NO: 2349159 - RNA, 19 nt, Artificial Sequence
  Description of Artificial Sequence: Synthetic oligonucleotide
  Antisense strand to SEQ ID NO: 2349158
cauuggaguaacuacuggc

SEQ ID NO: 2349160 - RNA, 19 nt, Artificial Sequence
  Description of Artificial Sequence: Synthetic oligonucleotide
  Sense strand starting at position 2181 of SEQ ID NO: 1885534
agaaauuagcagugugauu

SEQ ID NO: 2349161 - RNA, 19 nt, Artificial Sequence
  Description of Artificial Sequence: Synthetic oligonucleotide
  Antisense strand to SEQ ID NO: 2349160
aaucacacugcuaauuucu

SEQ ID NO: 2349162 - RNA, 19 nt, Artificial Sequence
  Description of Artificial Sequence: Synthetic oligonucleotide
  Sense strand starting at position 2202 of SEQ ID NO: 1885534
ucagcugaguucuugguuu

SEQ ID NO: 2349163 - RNA, 19 nt, Artificial Sequence
  Description of Artificial Sequence: Synthetic oligonucleotide
  Antisense strand to SEQ ID NO: 2349162
aaaccaagaacucagcuga

SEQ ID NO: 2349164 - RNA, 19 nt, Artificial Sequence
  Description of Artificial Sequence: Synthetic oligonucleotide
  Sense strand starting at position 2241 of SEQ ID NO: 1885534
accugauagcaauggcaca

SEQ ID NO: 2349165 - RNA, 19 nt, Artificial Sequence
  Description of Artificial Sequence: Synthetic oligonucleotide
  Antisense strand to SEQ ID NO: 2349164
ugugccauugcuaucaggu

SEQ ID NO: 2349166 - RNA, 19 nt, Artificial Sequence
  Description of Artificial Sequence: Synthetic oligonucleotide
  Sense strand starting at position 2246 of SEQ ID NO: 1885534
auagcaauggcacaguuaa

SEQ ID NO: 2349167 - RNA, 19 nt, Artificial Sequence
  Description of Artificial Sequence: Synthetic oligonucleotide
  Antisense strand to SEQ ID NO: 2349166
uuaacugugccauugcuau

SEQ ID NO: 2349168 - RNA, 19 nt, Artificial Sequence
  Description of Artificial Sequence: Synthetic oligonucleotide
  Sense strand starting at position 2267 of SEQ ID NO: 1885534
aguuuauagugcucuugag

SEQ ID NO: 2349169 - RNA, 19 nt, Artificial Sequence
  Description of Artificial Sequence: Synthetic oligonucleotide
  Antisense strand to SEQ ID NO: 2349168
cucaagagcacuauaaacu

SEQ ID NO: 2349170 - RNA, 19 nt, Artificial Sequence
  Description of Artificial Sequence: Synthetic oligonucleotide
  Sense strand starting at position 2279 of SEQ ID NO: 1885534
ucuugagcccacugcaaau

SEQ ID NO: 2349171 - RNA, 19 nt, Artificial Sequence
  Description of Artificial Sequence: Synthetic oligonucleotide
  Antisense strand to SEQ ID NO: 2349170
auuugcagugggcucaaga

SEQ ID NO: 2349172 - RNA, 19 nt, Artificial Sequence
  Description of Artificial Sequence: Synthetic oligonucleotide
  Sense strand starting at position 2660 of SEQ ID NO: 1885534
uauaucuucuccugggagu

SEQ ID NO: 2349173 - RNA, 19 nt, Artificial Sequence
  Description of Artificial Sequence: Synthetic oligonucleotide
  Antisense strand to SEQ ID NO: 2349172
acucccaggagaagauaua

SEQ ID NO: 2349174 - RNA, 19 nt, Artificial Sequence
  Description of Artificial Sequence: Synthetic oligonucleotide
  Sense strand starting at position 2661 of SEQ ID NO: 1885534
auaucuucuccugggagua

SEQ ID NO: 2349175 - RNA, 19 nt, Artificial Sequence
  Description of Artificial Sequence: Synthetic oligonucleotide
  Antisense strand to SEQ ID NO: 2349174
uacucccaggagaagauau

SEQ ID NO: 2349176 - RNA, 19 nt, Artificial Sequence
  Description of Artificial Sequence: Synthetic oligonucleotide
  Sense strand starting at position 2698 of SEQ ID NO: 1885534
ucagaugaguuaucucaca

SEQ ID NO: 2349177 - RNA, 19 nt, Artificial Sequence
  Description of Artificial Sequence: Synthetic oligonucleotide
  Antisense strand to SEQ ID NO: 2349176
ugugagauaacucaucuga

SEQ ID NO: 2349178 - RNA, 19 nt, Artificial Sequence
  Description of Artificial Sequence: Synthetic oligonucleotide
  Sense strand starting at position 2853 of SEQ ID NO: 1885534
accuaagaguuucuuguca

SEQ ID NO: 2349179 - RNA, 19 nt, Artificial Sequence
  Description of Artificial Sequence: Synthetic oligonucleotide
  Antisense strand to SEQ ID NO: 2349178
ugacaagaaacucuuaggu

SEQ ID NO: 2349180 - RNA, 19 nt, Artificial Sequence
  Description of Artificial Sequence: Synthetic oligonucleotide
  Sense strand starting at position 2855 of SEQ ID NO: 1885534
cuaagaguuucuugucagc

SEQ ID NO: 2349181 - RNA, 19 nt, Artificial Sequence
  Description of Artificial Sequence: Synthetic oligonucleotide
  Antisense strand to SEQ ID NO: 2349180
gcugacaagaaacucuuag

SEQ ID NO: 2349182 - RNA, 19 nt, Artificial Sequence
  Description of Artificial Sequence: Synthetic oligonucleotide
  Sense strand starting at position 2857 of SEQ ID NO: 1885534
aagaguuucuugucagcac

SEQ ID NO: 2349183 - RNA, 19 nt, Artificial Sequence
  Description of Artificial Sequence: Synthetic oligonucleotide
  Antisense strand to SEQ ID NO: 2349182
gugcugacaagaaacucuu

SEQ ID NO: 2349184 - RNA, 19 nt, Artificial Sequence
  Description of Artificial Sequence: Synthetic oligonucleotide
  Sense strand starting at position 2858 of SEQ ID NO: 1885534
agaguuucuugucagcacu

SEQ ID NO: 2349185 - RNA, 19 nt, Artificial Sequence
  Description of Artificial Sequence: Synthetic oligonucleotide
  Antisense strand to SEQ ID NO: 2349184
agugcugacaagaaacucu

SEQ ID NO: 2349186 - RNA, 19 nt, Artificial Sequence
  Description of Artificial Sequence: Synthetic oligonucleotide
  Sense strand starting at position 2963 of SEQ ID NO: 1885534
uggguacagaugugguuau

SEQ ID NO: 2349187 - RNA, 19 nt, Artificial Sequence
  Description of Artificial Sequence: Synthetic oligonucleotide
  Antisense strand to SEQ ID NO: 2349186
auaaccacaucuguaccca

SEQ ID NO: 2349188 - RNA, 19 nt, Artificial Sequence
  Description of Artificial Sequence: Synthetic oligonucleotide
  Sense strand starting at position 2967 of SEQ ID NO: 1885534
uacagaugugguuaucauc

SEQ ID NO: 2349189 - RNA, 19 nt, Artificial Sequence
  Description of Artificial Sequence: Synthetic oligonucleotide
  Antisense strand to SEQ ID NO: 2349188
gaugauaaccacaucugua

SEQ ID NO: 2349190 - RNA, 19 nt, Artificial Sequence
  Description of Artificial Sequence: Synthetic oligonucleotide
  Sense strand starting at position 2975 of SEQ ID NO: 1885534
ugguuaucaucuuccacua

SEQ ID NO: 2349191 - RNA, 19 nt, Artificial Sequence
  Description of Artificial Sequence: Synthetic oligonucleotide
  Antisense strand to SEQ ID NO: 2349190
uaguggaagaugauaacca

SEQ ID NO: 2349192 - RNA, 19 nt, Artificial Sequence
  Description of Artificial Sequence: Synthetic oligonucleotide
  Sense strand starting at position 3031 of SEQ ID NO: 1885534
ggcuaaaugggaugguuac

SEQ ID NO: 2349193 - RNA, 19 nt, Artificial Sequence
  Description of Artificial Sequence: Synthetic oligonucleotide
  Antisense strand to SEQ ID NO: 2349192
guaaccaucccauuuagcc

SEQ ID NO: 2349194 - RNA, 19 nt, Artificial Sequence
  Description of Artificial Sequence: Synthetic oligonucleotide
  Sense strand starting at position 3032 of SEQ ID NO: 1885534
gcuaaaugggaugguuacu

SEQ ID NO: 2349195 - RNA, 19 nt, Artificial Sequence
  Description of Artificial Sequence: Synthetic oligonucleotide
  Antisense strand to SEQ ID NO: 2349194
aguaaccaucccauuuagc

SEQ ID NO: 2349196 - RNA, 19 nt, Artificial Sequence
  Description of Artificial Sequence: Synthetic oligonucleotide
  Sense strand starting at position 3041 of SEQ ID NO: 1885534
gaugguuacuaagugggaa

SEQ ID NO: 2349197 - RNA, 19 nt, Artificial Sequence
  Description of Artificial Sequence: Synthetic oligonucleotide
  Antisense strand to SEQ ID NO: 2349196
uucccacuuaguaaccauc

SEQ ID NO: 2349198 - RNA, 19 nt, Artificial Sequence
  Description of Artificial Sequence: Synthetic oligonucleotide
  Sense strand starting at position 3045 of SEQ ID NO: 1885534
guuacuaagugggaaggau

SEQ ID NO: 2349199 - RNA, 19 nt, Artificial Sequence
  Description of Artificial Sequence: Synthetic oligonucleotide
  Antisense strand to SEQ ID NO: 2349198
auccuucccacuuaguaac

SEQ ID NO: 2349200 - RNA, 19 nt, Artificial Sequence
  Description of Artificial Sequence: Synthetic oligonucleotide
  Sense strand starting at position 3060 of SEQ ID NO: 1885534
ggaugugcuuuccuaauac

SEQ ID NO: 2349201 - RNA, 19 nt, Artificial Sequence
  Description of Artificial Sequence: Synthetic oligonucleotide
  Antisense strand to SEQ ID NO: 2349200
guauuaggaaagcacaucc

SEQ ID NO: 2349202 - RNA, 19 nt, Artificial Sequence
  Description of Artificial Sequence: Synthetic oligonucleotide
  Sense strand starting at position 3064 of SEQ ID NO: 1885534
gugcuuuccuaauacagca

SEQ ID NO: 2349203 - RNA, 19 nt, Artificial Sequence
  Description of Artificial Sequence: Synthetic oligonucleotide
  Antisense strand to SEQ ID NO: 2349202
ugcuguauuaggaaagcac

SEQ ID NO: 2349204 - RNA, 19 nt, Artificial Sequence
  Description of Artificial Sequence: Synthetic oligonucleotide
  Sense strand starting at position 3734 of SEQ ID NO: 1885534
cugaucuuauuauguaaag

SEQ ID NO: 2349205 - RNA, 19 nt, Artificial Sequence
  Description of Artificial Sequence: Synthetic oligonucleotide
  Antisense strand to SEQ ID NO: 2349204
cuuuacauaauaagaucag

SEQ ID NO: 2349206 - RNA, 19 nt, Artificial Sequence
  Description of Artificial Sequence: Synthetic oligonucleotide
  Sense strand starting at position 3768 of SEQ ID NO: 1885534
gcaaguuuaucucaauaug

SEQ ID NO: 2349207 - RNA, 19 nt, Artificial Sequence
  Description of Artificial Sequence: Synthetic oligonucleotide
  Antisense strand to SEQ ID NO: 2349206
cauauugagauaaacuugc

SEQ ID NO: 2349208 - RNA, 19 nt, Artificial Sequence
  Description of Artificial Sequence: Synthetic oligonucleotide
  Sense strand starting at position 3771 of SEQ ID NO: 1885534
aguuuaucucaauauggua

SEQ ID NO: 2349209 - RNA, 19 nt, Artificial Sequence
  Description of Artificial Sequence: Synthetic oligonucleotide
  Antisense strand to SEQ ID NO: 2349208
uaccauauugagauaaacu

SEQ ID NO: 2349210 - RNA, 19 nt, Artificial Sequence
  Description of Artificial Sequence: Synthetic oligonucleotide
  Sense strand starting at position 51 of SEQ ID NO: 1885535
caggccuuugccugacaga

SEQ ID NO: 2349211 - RNA, 19 nt, Artificial Sequence
  Description of Artificial Sequence: Synthetic oligonucleotide
  Antisense strand to SEQ ID NO: 2349210
ucugucaggcaaaggccug

SEQ ID NO: 2349212 - RNA, 19 nt, Artificial Sequence
  Description of Artificial Sequence: Synthetic oligonucleotide
  Sense strand starting at position 357 of SEQ ID NO: 1885535
cccucucaauugucaggaa

SEQ ID NO: 2349213 - RNA, 19 nt, Artificial Sequence
  Description of Artificial Sequence: Synthetic oligonucleotide
  Antisense strand to SEQ ID NO: 2349212
uuccugacaauugagaggg

SEQ ID NO: 2349214 - RNA, 19 nt, Artificial Sequence
  Description of Artificial Sequence: Synthetic oligonucleotide
  Sense strand starting at position 505 of SEQ ID NO: 1885535
gagccaugguggucagagu

SEQ ID NO: 2349215 - RNA, 19 nt, Artificial Sequence
  Description of Artificial Sequence: Synthetic oligonucleotide
  Antisense strand to SEQ ID NO: 2349214
acucugaccaccauggcuc

SEQ ID NO: 2349216 - RNA, 19 nt, Artificial Sequence
  Description of Artificial Sequence: Synthetic oligonucleotide
  Sense strand starting at position 687 of SEQ ID NO: 1885535
gcaagcuuacaaggucuau

SEQ ID NO: 2349217 - RNA, 19 nt, Artificial Sequence
  Description of Artificial Sequence: Synthetic oligonucleotide
  Antisense strand to SEQ ID NO: 2349216
auagaccuuguaagcuugc

SEQ ID NO: 2349218 - RNA, 19 nt, Artificial Sequence
  Description of Artificial Sequence: Synthetic oligonucleotide
  Sense strand starting at position 1047 of SEQ ID NO: 1885535
gugggcauguaaucuggua

SEQ ID NO: 2349219 - RNA, 19 nt, Artificial Sequence
  Description of Artificial Sequence: Synthetic oligonucleotide
  Antisense strand to SEQ ID NO: 2349218
uaccagauuacaugcccac

SEQ ID NO: 2349220 - RNA, 19 nt, Artificial Sequence
  Description of Artificial Sequence: Synthetic oligonucleotide
  Sense strand starting at position 1049 of SEQ ID NO: 1885535
gggcauguaaucugguaag

SEQ ID NO: 2349221 - RNA, 19 nt, Artificial Sequence
  Description of Artificial Sequence: Synthetic oligonucleotide
  Antisense strand to SEQ ID NO: 2349220
cuuaccagauuacaugccc

SEQ ID NO: 2349222 - RNA, 19 nt, Artificial Sequence
  Description of Artificial Sequence: Synthetic oligonucleotide
  Sense strand starting at position 1055 of SEQ ID NO: 1885535
guaaucugguaaguucagu

SEQ ID NO: 2349223 - RNA, 19 nt, Artificial Sequence
  Description of Artificial Sequence: Synthetic oligonucleotide
  Antisense strand to SEQ ID NO: 2349222
acugaacuuaccagauuac

SEQ ID NO: 2349224 - RNA, 19 nt, Artificial Sequence
  Description of Artificial Sequence: Synthetic oligonucleotide
  Sense strand starting at position 1071 of SEQ ID NO: 1885535
agucuaacuuagccugaau

SEQ ID NO: 2349225 - RNA, 19 nt, Artificial Sequence
  Description of Artificial Sequence: Synthetic oligonucleotide
  Antisense strand to SEQ ID NO: 2349224
auucaggcuaaguuagacu

SEQ ID NO: 2349226 - RNA, 19 nt, Artificial Sequence
  Description of Artificial Sequence: Synthetic oligonucleotide
  Sense strand starting at position 1110 of SEQ ID NO: 1885535
uuggguuuggcagaucauc

SEQ ID NO: 2349227 - RNA, 19 nt, Artificial Sequence
  Description of Artificial Sequence: Synthetic oligonucleotide
  Antisense strand to SEQ ID NO: 2349226
gaugaucugccaaacccaa

SEQ ID NO: 2349228 - RNA, 19 nt, Artificial Sequence
  Description of Artificial Sequence: Synthetic oligonucleotide
  Sense strand starting at position 1181 of SEQ ID NO: 1885535
ccaccuugcgucuagaacu

SEQ ID NO: 2349229 - RNA, 19 nt, Artificial Sequence
  Description of Artificial Sequence: Synthetic oligonucleotide
  Antisense strand to SEQ ID NO: 2349228
aguucuagacgcaaggugg

SEQ ID NO: 2349230 - RNA, 19 nt, Artificial Sequence
  Description of Artificial Sequence: Synthetic oligonucleotide
  Sense strand starting at position 1253 of SEQ ID NO: 1885535
uagacaaagucgucaagau

SEQ ID NO: 2349231 - RNA, 19 nt, Artificial Sequence
  Description of Artificial Sequence: Synthetic oligonucleotide
  Antisense strand to SEQ ID NO: 2349230
aucuugacgacuuugucua

SEQ ID NO: 2349232 - RNA, 19 nt, Artificial Sequence
  Description of Artificial Sequence: Synthetic oligonucleotide
  Sense strand starting at position 1254 of SEQ ID NO: 1885535
agacaaagucgucaagauc

SEQ ID NO: 2349233 - RNA, 19 nt, Artificial Sequence
  Description of Artificial Sequence: Synthetic oligonucleotide
  Antisense strand to SEQ ID NO: 2349232
gaucuugacgacuuugucu

SEQ ID NO: 2349234 - RNA, 19 nt, Artificial Sequence
  Description of Artificial Sequence: Synthetic oligonucleotide
  Sense strand starting at position 1263 of SEQ ID NO: 1885535
cgucaagaucccgagagaa

SEQ ID NO: 2349235 - RNA, 19 nt, Artificial Sequence
  Description of Artificial Sequence: Synthetic oligonucleotide
  Antisense strand to SEQ ID NO: 2349234
uucucucgggaucuugacg

SEQ ID NO: 2349236 - RNA, 19 nt, Artificial Sequence
  Description of Artificial Sequence: Synthetic oligonucleotide
  Sense strand starting at position 2143 of SEQ ID NO: 1885535
uggccagcucggcuuuaua

SEQ ID NO: 2349237 - RNA, 19 nt, Artificial Sequence
  Description of Artificial Sequence: Synthetic oligonucleotide
  Antisense strand to SEQ ID NO: 2349236
uauaaagccgagcuggcca

SEQ ID NO: 2349238 - RNA, 19 nt, Artificial Sequence
  Description of Artificial Sequence: Synthetic oligonucleotide
  Sense strand starting at position 2146 of SEQ ID NO: 1885535
ccagcucggcuuuauaaag

SEQ ID NO: 2349239 - RNA, 19 nt, Artificial Sequence
  Description of Artificial Sequence: Synthetic oligonucleotide
  Antisense strand to SEQ ID NO: 2349238
cuuuauaaagccgagcugg

SEQ ID NO: 2349240 - RNA, 19 nt, Artificial Sequence
  Description of Artificial Sequence: Synthetic oligonucleotide
  Sense strand starting at position 2477 of SEQ ID NO: 1885535
auaguucugccauacagaa

SEQ ID NO: 2349241 - RNA, 19 nt, Artificial Sequence
  Description of Artificial Sequence: Synthetic oligonucleotide
  Antisense strand to SEQ ID NO: 2349240
uucuguauggcagaacuau

SEQ ID NO: 2349242 - RNA, 19 nt, Artificial Sequence
  Description of Artificial Sequence: Synthetic oligonucleotide
  Sense strand starting at position 2520 of SEQ ID NO: 1885535
agauauaccggaugaacuu

SEQ ID NO: 2349243 - RNA, 19 nt, Artificial Sequence
  Description of Artificial Sequence: Synthetic oligonucleotide
  Antisense strand to SEQ ID NO: 2349242
aaguucauccgguauaucu

SEQ ID NO: 2349244 - RNA, 19 nt, Artificial Sequence
  Description of Artificial Sequence: Synthetic oligonucleotide
  Sense strand starting at position 2529 of SEQ ID NO: 1885535
ggaugaacuuuagggaaga

SEQ ID NO: 2349245 - RNA, 19 nt, Artificial Sequence
  Description of Artificial Sequence: Synthetic oligonucleotide
  Antisense strand to SEQ ID NO: 2349244
ucuucccuaaaguucaucc

SEQ ID NO: 2349246 - RNA, 19 nt, Artificial Sequence
  Description of Artificial Sequence: Synthetic oligonucleotide
  Sense strand starting at position 2530 of SEQ ID NO: 1885535
gaugaacuuuagggaagaa

SEQ ID NO: 2349247 - RNA, 19 nt, Artificial Sequence
  Description of Artificial Sequence: Synthetic oligonucleotide
  Antisense strand to SEQ ID NO: 2349246
uucuucccuaaaguucauc

SEQ ID NO: 2349248 - RNA, 19 nt, Artificial Sequence
  Description of Artificial Sequence: Synthetic oligonucleotide
  Sense strand starting at position 2580 of SEQ ID NO: 1885535
agacauaaccagugaguaa

SEQ ID NO: 2349249 - RNA, 19 nt, Artificial Sequence
  Description of Artificial Sequence: Synthetic oligonucleotide
  Antisense strand to SEQ ID NO: 2349248
uuacucacugguuaugucu

SEQ ID NO: 2349250 - RNA, 19 nt, Artificial Sequence
  Description of Artificial Sequence: Synthetic oligonucleotide
  Sense strand starting at position 2751 of SEQ ID NO: 1885535
ggaaguaggugagugcaau

SEQ ID NO: 2349251 - RNA, 19 nt, Artificial Sequence
  Description of Artificial Sequence: Synthetic oligonucleotide
  Antisense strand to SEQ ID NO: 2349250
auugcacucaccuacuucc

SEQ ID NO: 2349252 - RNA, 19 nt, Artificial Sequence
  Description of Artificial Sequence: Synthetic oligonucleotide
  Sense strand starting at position 2757 of SEQ ID NO: 1885535
aggugagugcaauggagau

SEQ ID NO: 2349253 - RNA, 19 nt, Artificial Sequence
  Description of Artificial Sequence: Synthetic oligonucleotide
  Antisense strand to SEQ ID NO: 2349252
aucuccauugcacucaccu

SEQ ID NO: 2349254 - RNA, 19 nt, Artificial Sequence
  Description of Artificial Sequence: Synthetic oligonucleotide
  Sense strand starting at position 2868 of SEQ ID NO: 1885535
aguacagcuccacagagau

SEQ ID NO: 2349255 - RNA, 19 nt, Artificial Sequence
  Description of Artificial Sequence: Synthetic oligonucleotide
  Antisense strand to SEQ ID NO: 2349254
aucucuguggagcuguacu

SEQ ID NO: 2349256 - RNA, 19 nt, Artificial Sequence
  Description of Artificial Sequence: Synthetic oligonucleotide
  Sense strand starting at position 2880 of SEQ ID NO: 1885535
cagagauggcacugugaag

SEQ ID NO: 2349257 - RNA, 19 nt, Artificial Sequence
  Description of Artificial Sequence: Synthetic oligonucleotide
  Antisense strand to SEQ ID NO: 2349256
cuucacagugccaucucug

SEQ ID NO: 2349258 - RNA, 19 nt, Artificial Sequence
  Description of Artificial Sequence: Synthetic oligonucleotide
  Sense strand starting at position 3136 of SEQ ID NO: 1885535
uuauucuuugccuggcaca

SEQ ID NO: 2349259 - RNA, 19 nt, Artificial Sequence
  Description of Artificial Sequence: Synthetic oligonucleotide
  Antisense strand to SEQ ID NO: 2349258
ugugccaggcaaagaauaa

SEQ ID NO: 2349260 - RNA, 19 nt, Artificial Sequence
  Description of Artificial Sequence: Synthetic oligonucleotide
  Sense strand starting at position 3168 of SEQ ID NO: 1885535
caaaguaaaugggucauca

SEQ ID NO: 2349261 - RNA, 19 nt, Artificial Sequence
  Description of Artificial Sequence: Synthetic oligonucleotide
  Antisense strand to SEQ ID NO: 2349260
ugaugacccauuuacuuug

SEQ ID NO: 2349262 - RNA, 19 nt, Artificial Sequence
  Description of Artificial Sequence: Synthetic oligonucleotide
  Sense strand starting at position 3172 of SEQ ID NO: 1885535
guaaaugggucaucaaaug

SEQ ID NO: 2349263 - RNA, 19 nt, Artificial Sequence
  Description of Artificial Sequence: Synthetic oligonucleotide
  Antisense strand to SEQ ID NO: 2349262
cauuugaugacccauuuac

SEQ ID NO: 2349264 - RNA, 19 nt, Artificial Sequence
  Description of Artificial Sequence: Synthetic oligonucleotide
  Sense strand starting at position 3180 of SEQ ID NO: 1885535
gucaucaaaugggcuuuaa

SEQ ID NO: 2349265 - RNA, 19 nt, Artificial Sequence
  Description of Artificial Sequence: Synthetic oligonucleotide
  Antisense strand to SEQ ID NO: 2349264
uuaaagcccauuugaugac

SEQ ID NO: 2349266 - RNA, 19 nt, Artificial Sequence
  Description of Artificial Sequence: Synthetic oligonucleotide
  Sense strand starting at position 3204 of SEQ ID NO: 1885535
acaugauguccauaggcau

SEQ ID NO: 2349267 - RNA, 19 nt, Artificial Sequence
  Description of Artificial Sequence: Synthetic oligonucleotide
  Antisense strand to SEQ ID NO: 2349266
augccuauggacaucaugu

SEQ ID NO: 2349268 - RNA, 19 nt, Artificial Sequence
  Description of Artificial Sequence: Synthetic oligonucleotide
  Sense strand starting at position 3207 of SEQ ID NO: 1885535
ugauguccauaggcauuaa

SEQ ID NO: 2349269 - RNA, 19 nt, Artificial Sequence
  Description of Artificial Sequence: Synthetic oligonucleotide
  Antisense strand to SEQ ID NO: 2349268
uuaaugccuauggacauca

SEQ ID NO: 2349270 - RNA, 19 nt, Artificial Sequence
  Description of Artificial Sequence: Synthetic oligonucleotide
  Sense strand starting at position 3250 of SEQ ID NO: 1885535
gggaaaugucuccggagag

SEQ ID NO: 2349271 - RNA, 19 nt, Artificial Sequence
  Description of Artificial Sequence: Synthetic oligonucleotide
  Antisense strand to SEQ ID NO: 2349270
cucuccggagacauuuccc

SEQ ID NO: 2349272 - RNA, 19 nt, Artificial Sequence
  Description of Artificial Sequence: Synthetic oligonucleotide
  Sense strand starting at position 3260 of SEQ ID NO: 1885535
uccggagagcuuuauaagu

SEQ ID NO: 2349273 - RNA, 19 nt, Artificial Sequence
  Description of Artificial Sequence: Synthetic oligonucleotide
  Antisense strand to SEQ ID NO: 2349272
acuuauaaagcucuccgga

SEQ ID NO: 2349274 - RNA, 19 nt, Artificial Sequence
  Description of Artificial Sequence: Synthetic oligonucleotide
  Sense strand starting at position 3431 of SEQ ID NO: 1885535
caguaauagccauggaaua

SEQ ID NO: 2349275 - RNA, 19 nt, Artificial Sequence
  Description of Artificial Sequence: Synthetic oligonucleotide
  Antisense strand to SEQ ID NO: 2349274
uauuccauggcuauuacug

SEQ ID NO: 2349276 - RNA, 19 nt, Artificial Sequence
  Description of Artificial Sequence: Synthetic oligonucleotide
  Sense strand starting at position 3469 of SEQ ID NO: 1885535
gcaggaagccuccaacagu

SEQ ID NO: 2349277 - RNA, 19 nt, Artificial Sequence
  Description of Artificial Sequence: Synthetic oligonucleotide
  Antisense strand to SEQ ID NO: 2349276
acuguuggaggcuuccugc

SEQ ID NO: 2349278 - RNA, 19 nt, Artificial Sequence
  Description of Artificial Sequence: Synthetic oligonucleotide
  Sense strand starting at position 3480 of SEQ ID NO: 1885535
ccaacagucauguggauga

SEQ ID NO: 2349279 - RNA, 19 nt, Artificial Sequence
  Description of Artificial Sequence: Synthetic oligonucleotide
  Antisense strand to SEQ ID NO: 2349278
ucauccacaugacuguugg

SEQ ID NO: 2349280 - RNA, 19 nt, Artificial Sequence
  Description of Artificial Sequence: Synthetic oligonucleotide
  Sense strand starting at position 3484 of SEQ ID NO: 1885535
cagucauguggaugacagu

SEQ ID NO: 2349281 - RNA, 19 nt, Artificial Sequence
  Description of Artificial Sequence: Synthetic oligonucleotide
  Antisense strand to SEQ ID NO: 2349280
acugucauccacaugacug

SEQ ID NO: 2349282 - RNA, 19 nt, Artificial Sequence
  Description of Artificial Sequence: Synthetic oligonucleotide
  Sense strand starting at position 3485 of SEQ ID NO: 1885535
agucauguggaugacagua

SEQ ID NO: 2349283 - RNA, 19 nt, Artificial Sequence
  Description of Artificial Sequence: Synthetic oligonucleotide
  Antisense strand to SEQ ID NO: 2349282
uacugucauccacaugacu

SEQ ID NO: 2349284 - RNA, 19 nt, Artificial Sequence
  Description of Artificial Sequence: Synthetic oligonucleotide
  Sense strand starting at position 3490 of SEQ ID NO: 1885535
uguggaugacaguagacuu

SEQ ID NO: 2349285 - RNA, 19 nt, Artificial Sequence
  Description of Artificial Sequence: Synthetic oligonucleotide
  Antisense strand to SEQ ID NO: 2349284
aagucuacugucauccaca

SEQ ID NO: 2349286 - RNA, 19 nt, Artificial Sequence
  Description of Artificial Sequence: Synthetic oligonucleotide
  Sense strand starting at position 3653 of SEQ ID NO: 1885535
gaugguuguggcuggcaga

SEQ ID NO: 2349287 - RNA, 19 nt, Artificial Sequence
  Description of Artificial Sequence: Synthetic oligonucleotide
  Antisense strand to SEQ ID NO: 2349286
ucugccagccacaaccauc

SEQ ID NO: 2349288 - RNA, 19 nt, Artificial Sequence
  Description of Artificial Sequence: Synthetic oligonucleotide
  Sense strand starting at position 3914 of SEQ ID NO: 1885535
ccauuauucuuuguucugu

SEQ ID NO: 2349289 - RNA, 19 nt, Artificial Sequence
  Description of Artificial Sequence: Synthetic oligonucleotide
  Antisense strand to SEQ ID NO: 2349288
acagaacaaagaauaaugg

SEQ ID NO: 2349290 - RNA, 19 nt, Artificial Sequence
  Description of Artificial Sequence: Synthetic oligonucleotide
  Sense strand starting at position 2217 of SEQ ID NO: 1885536
ucaagaauuccguggccuc

SEQ ID NO: 2349291 - RNA, 19 nt, Artificial Sequence
  Description of Artificial Sequence: Synthetic oligonucleotide
  Antisense strand to SEQ ID NO: 2349290
gaggccacggaauucuuga

SEQ ID NO: 2349292 - RNA, 19 nt, Artificial Sequence
  Description of Artificial Sequence: Synthetic oligonucleotide
  Sense strand starting at position 2218 of SEQ ID NO: 1885536
caagaauuccguggccuca

SEQ ID NO: 2349293 - RNA, 19 nt, Artificial Sequence
  Description of Artificial Sequence: Synthetic oligonucleotide
  Antisense strand to SEQ ID NO: 2349292
ugaggccacggaauucuug

SEQ ID NO: 2349294 - RNA, 19 nt, Artificial Sequence
  Description of Artificial Sequence: Synthetic oligonucleotide
  Sense strand starting at position 2346 of SEQ ID NO: 1885536
gcaagauucugcucuuaaa

SEQ ID NO: 2349295 - RNA, 19 nt, Artificial Sequence
  Description of Artificial Sequence: Synthetic oligonucleotide
  Antisense strand to SEQ ID NO: 2349294
uuuaagagcagaaucuugc

SEQ ID NO: 2349296 - RNA, 19 nt, Artificial Sequence
  Description of Artificial Sequence: Synthetic oligonucleotide
  Sense strand starting at position 2349 of SEQ ID NO: 1885536
agauucugcucuuaaagua

SEQ ID NO: 2349297 - RNA, 19 nt, Artificial Sequence
  Description of Artificial Sequence: Synthetic oligonucleotide
  Antisense strand to SEQ ID NO: 2349296
uacuuuaagagcagaaucu

SEQ ID NO: 2349298 - RNA, 19 nt, Artificial Sequence
  Description of Artificial Sequence: Synthetic oligonucleotide
  Sense strand starting at position 2390 of SEQ ID NO: 1885536
ggugaagguauccauagca

SEQ ID NO: 2349299 - RNA, 19 nt, Artificial Sequence
  Description of Artificial Sequence: Synthetic oligonucleotide
  Antisense strand to SEQ ID NO: 2349298
ugcuauggauaccuucacc

SEQ ID NO: 2349300 - RNA, 19 nt, Artificial Sequence
  Description of Artificial Sequence: Synthetic oligonucleotide
  Sense strand starting at position 2404 of SEQ ID NO: 1885536
uagcauugcuacucagagu

SEQ ID NO: 2349301 - RNA, 19 nt, Artificial Sequence
  Description of Artificial Sequence: Synthetic oligonucleotide
  Antisense strand to SEQ ID NO: 2349300
acucugaguagcaaugcua

SEQ ID NO: 2349302 - RNA, 19 nt, Artificial Sequence
  Description of Artificial Sequence: Synthetic oligonucleotide
  Sense strand starting at position 2413 of SEQ ID NO: 1885536
uacucagagugugauccua

SEQ ID NO: 2349303 - RNA, 19 nt, Artificial Sequence
  Description of Artificial Sequence: Synthetic oligonucleotide
  Antisense strand to SEQ ID NO: 2349302
uaggaucacacucugagua

SEQ ID NO: 2349304 - RNA, 19 nt, Artificial Sequence
  Description of Artificial Sequence: Synthetic oligonucleotide
  Sense strand starting at position 2430 of SEQ ID NO: 1885536
uagggaaucugggugcaga

SEQ ID NO: 2349305 - RNA, 19 nt, Artificial Sequence
  Description of Artificial Sequence: Synthetic oligonucleotide
  Antisense strand to SEQ ID NO: 2349304
ucugcacccagauucccua

SEQ ID NO: 2349306 - RNA, 19 nt, Artificial Sequence
  Description of Artificial Sequence: Synthetic oligonucleotide
  Sense strand starting at position 2431 of SEQ ID NO: 1885536
agggaaucugggugcagau

SEQ ID NO: 2349307 - RNA, 19 nt, Artificial Sequence
  Description of Artificial Sequence: Synthetic oligonucleotide
  Antisense strand to SEQ ID NO: 2349306
aucugcacccagauucccu

SEQ ID NO: 2349308 - RNA, 19 nt, Artificial Sequence
  Description of Artificial Sequence: Synthetic oligonucleotide
  Sense strand starting at position 2449 of SEQ ID NO: 1885536
uggagaaacucggaugcaa

SEQ ID NO: 2349309 - RNA, 19 nt, Artificial Sequence
  Description of Artificial Sequence: Synthetic oligonucleotide
  Antisense strand to SEQ ID NO: 2349308
uugcauccgaguuucucca

SEQ ID NO: 2349310 - RNA, 19 nt, Artificial Sequence
  Description of Artificial Sequence: Synthetic oligonucleotide
  Sense strand starting at position 2612 of SEQ ID NO: 1885536
gaugcauugccucagguca

SEQ ID NO: 2349311 - RNA, 19 nt, Artificial Sequence
  Description of Artificial Sequence: Synthetic oligonucleotide
  Antisense strand to SEQ ID NO: 2349310
ugaccugaggcaaugcauc

SEQ ID NO: 2349312 - RNA, 19 nt, Artificial Sequence
  Description of Artificial Sequence: Synthetic oligonucleotide
  Sense strand starting at position 2642 of SEQ ID NO: 1885536
caggaagcgucccugagua

SEQ ID NO: 2349313 - RNA, 19 nt, Artificial Sequence
  Description of Artificial Sequence: Synthetic oligonucleotide
  Antisense strand to SEQ ID NO: 2349312
uacucagggacgcuuccug

SEQ ID NO: 2349314 - RNA, 19 nt, Artificial Sequence
  Description of Artificial Sequence: Synthetic oligonucleotide
  Sense strand starting at position 2644 of SEQ ID NO: 1885536
ggaagcgucccugaguauu

SEQ ID NO: 2349315 - RNA, 19 nt, Artificial Sequence
  Description of Artificial Sequence: Synthetic oligonucleotide
  Antisense strand to SEQ ID NO: 2349314
aauacucagggacgcuucc

SEQ ID NO: 2349316 - RNA, 19 nt, Artificial Sequence
  Description of Artificial Sequence: Synthetic oligonucleotide
  Sense strand starting at position 2993 of SEQ ID NO: 1885536
ugaacucuagccugugaca

SEQ ID NO: 2349317 - RNA, 19 nt, Artificial Sequence
  Description of Artificial Sequence: Synthetic oligonucleotide
  Antisense strand to SEQ ID NO: 2349316
ugucacaggcuagaguuca

SEQ ID NO: 2349318 - RNA, 19 nt, Artificial Sequence
  Description of Artificial Sequence: Synthetic oligonucleotide
  Sense strand starting at position 2995 of SEQ ID NO: 1885536
aacucuagccugugacaga

SEQ ID NO: 2349319 - RNA, 19 nt, Artificial Sequence
  Description of Artificial Sequence: Synthetic oligonucleotide
  Antisense strand to SEQ ID NO: 2349318
ucugucacaggcuagaguu

SEQ ID NO: 2349320 - RNA, 19 nt, Artificial Sequence
  Description of Artificial Sequence: Synthetic oligonucleotide
  Sense strand starting at position 3209 of SEQ ID NO: 1885536
gggacuugcuggucucuga

SEQ ID NO: 2349321 - RNA, 19 nt, Artificial Sequence
  Description of Artificial Sequence: Synthetic oligonucleotide
  Antisense strand to SEQ ID NO: 2349320
ucagagaccagcaaguccc

SEQ ID NO: 2349322 - RNA, 19 nt, Artificial Sequence
  Description of Artificial Sequence: Synthetic oligonucleotide
  Sense strand starting at position 3258 of SEQ ID NO: 1885536
gugucuacugggugaguga

SEQ ID NO: 2349323 - RNA, 19 nt, Artificial Sequence
  Description of Artificial Sequence: Synthetic oligonucleotide
  Antisense strand to SEQ ID NO: 2349322
ucacucacccaguagacac

SEQ ID NO: 2349324 - RNA, 19 nt, Artificial Sequence
  Description of Artificial Sequence: Synthetic oligonucleotide
  Sense strand starting at position 3259 of SEQ ID NO: 1885536
ugucuacugggugagugaa

SEQ ID NO: 2349325 - RNA, 19 nt, Artificial Sequence
  Description of Artificial Sequence: Synthetic oligonucleotide
  Antisense strand to SEQ ID NO: 2349324
uucacucacccaguagaca

SEQ ID NO: 2349326 - RNA, 19 nt, Artificial Sequence
  Description of Artificial Sequence: Synthetic oligonucleotide
  Sense strand starting at position 3261 of SEQ ID NO: 1885536
ucuacugggugagugaauu

SEQ ID NO: 2349327 - RNA, 19 nt, Artificial Sequence
  Description of Artificial Sequence: Synthetic oligonucleotide
  Antisense strand to SEQ ID NO: 2349326
aauucacucacccaguaga

SEQ ID NO: 2349328 - RNA, 19 nt, Artificial Sequence
  Description of Artificial Sequence: Synthetic oligonucleotide
  Sense strand starting at position 3289 of SEQ ID NO: 1885536
gguauugugcuacacagga

SEQ ID NO: 2349329 - RNA, 19 nt, Artificial Sequence
  Description of Artificial Sequence: Synthetic oligonucleotide
  Antisense strand to SEQ ID NO: 2349328
uccuguguagcacaauacc

SEQ ID NO: 2349330 - RNA, 19 nt, Artificial Sequence
  Description of Artificial Sequence: Synthetic oligonucleotide
  Sense strand starting at position 3322 of SEQ ID NO: 1885536
gagggucugugcuugcuaa

SEQ ID NO: 2349331 - RNA, 19 nt, Artificial Sequence
  Description of Artificial Sequence: Synthetic oligonucleotide
  Antisense strand to SEQ ID NO: 2349330
uuagcaagcacagacccuc

SEQ ID NO: 2349332 - RNA, 19 nt, Artificial Sequence
  Description of Artificial Sequence: Synthetic oligonucleotide
  Sense strand starting at position 3323 of SEQ ID NO: 1885536
agggucugugcuugcuaaa

SEQ ID NO: 2349333 - RNA, 19 nt, Artificial Sequence
  Description of Artificial Sequence: Synthetic oligonucleotide
  Antisense strand to SEQ ID NO: 2349332
uuuagcaagcacagacccu

SEQ ID NO: 2349334 - RNA, 19 nt, Artificial Sequence
  Description of Artificial Sequence: Synthetic oligonucleotide
  Sense strand starting at position 3372 of SEQ ID NO: 1885536
aguaauauguacuugugga

SEQ ID NO: 2349335 - RNA, 19 nt, Artificial Sequence
  Description of Artificial Sequence: Synthetic oligonucleotide
  Antisense strand to SEQ ID NO: 2349334
uccacaaguacauauuacu

SEQ ID NO: 2349336 - RNA, 19 nt, Artificial Sequence
  Description of Artificial Sequence: Synthetic oligonucleotide
  Sense strand starting at position 3373 of SEQ ID NO: 1885536
guaauauguacuuguggaa

SEQ ID NO: 2349337 - RNA, 19 nt, Artificial Sequence
  Description of Artificial Sequence: Synthetic oligonucleotide
  Antisense strand to SEQ ID NO: 2349336
uuccacaaguacauauuac

SEQ ID NO: 2349338 - RNA, 19 nt, Artificial Sequence
  Description of Artificial Sequence: Synthetic oligonucleotide
  Sense strand starting at position 3377 of SEQ ID NO: 1885536
uauguacuuguggaaaucu

SEQ ID NO: 2349339 - RNA, 19 nt, Artificial Sequence
  Description of Artificial Sequence: Synthetic oligonucleotide
  Antisense strand to SEQ ID NO: 2349338
agauuuccacaaguacaua

SEQ ID NO: 2349340 - RNA, 19 nt, Artificial Sequence
  Description of Artificial Sequence: Synthetic oligonucleotide
  Sense strand starting at position 3387 of SEQ ID NO: 1885536
uggaaaucuugggaaguca

SEQ ID NO: 2349341 - RNA, 19 nt, Artificial Sequence
  Description of Artificial Sequence: Synthetic oligonucleotide
  Antisense strand to SEQ ID NO: 2349340
ugacuucccaagauuucca

SEQ ID NO: 2349342 - RNA, 19 nt, Artificial Sequence
  Description of Artificial Sequence: Synthetic oligonucleotide
  Sense strand starting at position 3430 of SEQ ID NO: 1885536
agagauaauuauugaagca

SEQ ID NO: 2349343 - RNA, 19 nt, Artificial Sequence
  Description of Artificial Sequence: Synthetic oligonucleotide
  Antisense strand to SEQ ID NO: 2349342
ugcuucaauaauuaucucu

SEQ ID NO: 2349344 - RNA, 19 nt, Artificial Sequence
  Description of Artificial Sequence: Synthetic oligonucleotide
  Sense strand starting at position 3546 of SEQ ID NO: 1885536
ugagcauuugccugugcca

SEQ ID NO: 2349345 - RNA, 19 nt, Artificial Sequence
  Description of Artificial Sequence: Synthetic oligonucleotide
  Antisense strand to SEQ ID NO: 2349344
uggcacaggcaaaugcuca

SEQ ID NO: 2349346 - RNA, 19 nt, Artificial Sequence
  Description of Artificial Sequence: Synthetic oligonucleotide
  Sense strand starting at position 3548 of SEQ ID NO: 1885536
agcauuugccugugccauu

SEQ ID NO: 2349347 - RNA, 19 nt, Artificial Sequence
  Description of Artificial Sequence: Synthetic oligonucleotide
  Antisense strand to SEQ ID NO: 2349346
aauggcacaggcaaaugcu

SEQ ID NO: 2349348 - RNA, 19 nt, Artificial Sequence
  Description of Artificial Sequence: Synthetic oligonucleotide
  Sense strand starting at position 3549 of SEQ ID NO: 1885536
gcauuugccugugccauuu

SEQ ID NO: 2349349 - RNA, 19 nt, Artificial Sequence
  Description of Artificial Sequence: Synthetic oligonucleotide
  Antisense strand to SEQ ID NO: 2349348
aaauggcacaggcaaaugc

SEQ ID NO: 2349350 - RNA, 19 nt, Artificial Sequence
  Description of Artificial Sequence: Synthetic oligonucleotide
  Sense strand starting at position 3551 of SEQ ID NO: 1885536
auuugccugugccauuuaa

SEQ ID NO: 2349351 - RNA, 19 nt, Artificial Sequence
  Description of Artificial Sequence: Synthetic oligonucleotide
  Antisense strand to SEQ ID NO: 2349350
uuaaauggcacaggcaaau

SEQ ID NO: 2349352 - RNA, 19 nt, Artificial Sequence
  Description of Artificial Sequence: Synthetic oligonucleotide
  Sense strand starting at position 3658 of SEQ ID NO: 1885536
ucucaaguucuagguuauu

SEQ ID NO: 2349353 - RNA, 19 nt, Artificial Sequence
  Description of Artificial Sequence: Synthetic oligonucleotide
  Antisense strand to SEQ ID NO: 2349352
aauaaccuagaacuugaga

SEQ ID NO: 2349354 - RNA, 19 nt, Artificial Sequence
  Description of Artificial Sequence: Synthetic oligonucleotide
  Sense strand starting at position 3670 of SEQ ID NO: 1885536
gguuauuucugguuugcug

SEQ ID NO: 2349355 - RNA, 19 nt, Artificial Sequence
  Description of Artificial Sequence: Synthetic oligonucleotide
  Antisense strand to SEQ ID NO: 2349354
cagcaaaccagaaauaacc

SEQ ID NO: 2349356 - RNA, 19 nt, Artificial Sequence
  Description of Artificial Sequence: Synthetic oligonucleotide
  Sense strand starting at position 3734 of SEQ ID NO: 1885536
ggaccuaagucacaucuca

SEQ ID NO: 2349357 - RNA, 19 nt, Artificial Sequence
  Description of Artificial Sequence: Synthetic oligonucleotide
  Antisense strand to SEQ ID NO: 2349356
ugagaugugacuuaggucc

SEQ ID NO: 2349358 - RNA, 19 nt, Artificial Sequence
  Description of Artificial Sequence: Synthetic oligonucleotide
  Sense strand starting at position 3764 of SEQ ID NO: 1885536
uggguuauggucuagaagu

SEQ ID NO: 2349359 - RNA, 19 nt, Artificial Sequence
  Description of Artificial Sequence: Synthetic oligonucleotide
  Antisense strand to SEQ ID NO: 2349358
acuucuagaccauaaccca

SEQ ID NO: 2349360 - RNA, 19 nt, Artificial Sequence
  Description of Artificial Sequence: Synthetic oligonucleotide
  Sense strand starting at position 3765 of SEQ ID NO: 1885536
ggguuauggucuagaagug

SEQ ID NO: 2349361 - RNA, 19 nt, Artificial Sequence
  Description of Artificial Sequence: Synthetic oligonucleotide
  Antisense strand to SEQ ID NO: 2349360
cacuucuagaccauaaccc

SEQ ID NO: 2349362 - RNA, 19 nt, Artificial Sequence
  Description of Artificial Sequence: Synthetic oligonucleotide
  Sense strand starting at position 3766 of SEQ ID NO: 1885536
gguuauggucuagaaguga

SEQ ID NO: 2349363 - RNA, 19 nt, Artificial Sequence
  Description of Artificial Sequence: Synthetic oligonucleotide
  Antisense strand to SEQ ID NO: 2349362
ucacuucuagaccauaacc

SEQ ID NO: 2349364 - RNA, 19 nt, Artificial Sequence
  Description of Artificial Sequence: Synthetic oligonucleotide
  Sense strand starting at position 3948 of SEQ ID NO: 1885536
gacccagucucauagaguu

SEQ ID NO: 2349365 - RNA, 19 nt, Artificial Sequence
  Description of Artificial Sequence: Synthetic oligonucleotide
  Antisense strand to SEQ ID NO: 2349364
aacucuaugagacuggguc

SEQ ID NO: 2349366 - RNA, 19 nt, Artificial Sequence
  Description of Artificial Sequence: Synthetic oligonucleotide
  Sense strand starting at position 3956 of SEQ ID NO: 1885536
cucauagaguuccaggagu

SEQ ID NO: 2349367 - RNA, 19 nt, Artificial Sequence
  Description of Artificial Sequence: Synthetic oligonucleotide
  Antisense strand to SEQ ID NO: 2349366
acuccuggaacucuaugag

SEQ ID NO: 2349368 - RNA, 19 nt, Artificial Sequence
  Description of Artificial Sequence: Synthetic oligonucleotide
  Sense strand starting at position 3958 of SEQ ID NO: 1885536
cauagaguuccaggaguga

SEQ ID NO: 2349369 - RNA, 19 nt, Artificial Sequence
  Description of Artificial Sequence: Synthetic oligonucleotide
  Antisense strand to SEQ ID NO: 2349368
ucacuccuggaacucuaug

SEQ ID NO: 2349370 - RNA, 19 nt, Artificial Sequence
  Description of Artificial Sequence: Synthetic oligonucleotide
  Sense strand starting at position 165 of SEQ ID NO: 1885537
ggagaugaauccuauuaac

SEQ ID NO: 2349371 - RNA, 19 nt, Artificial Sequence
  Description of Artificial Sequence: Synthetic oligonucleotide
  Antisense strand to SEQ ID NO: 2349370
guuaauaggauucaucucc

SEQ ID NO: 2349372 - RNA, 19 nt, Artificial Sequence
  Description of Artificial Sequence: Synthetic oligonucleotide
  Sense strand starting at position 2113 of SEQ ID NO: 1885537
gccagagccucaguuucua

SEQ ID NO: 2349373 - RNA, 19 nt, Artificial Sequence
  Description of Artificial Sequence: Synthetic oligonucleotide
  Antisense strand to SEQ ID NO: 2349372
uagaaacugaggcucuggc

SEQ ID NO: 2349374 - RNA, 19 nt, Artificial Sequence
  Description of Artificial Sequence: Synthetic oligonucleotide
  Sense strand starting at position 2526 of SEQ ID NO: 1885537
gcagcaacaucaugggaga

SEQ ID NO: 2349375 - RNA, 19 nt, Artificial Sequence
  Description of Artificial Sequence: Synthetic oligonucleotide
  Antisense strand to SEQ ID NO: 2349374
ucucccaugauguugcugc

SEQ ID NO: 2349376 - RNA, 19 nt, Artificial Sequence
  Description of Artificial Sequence: Synthetic oligonucleotide
  Sense strand starting at position 2529 of SEQ ID NO: 1885537
gcaacaucaugggagaaug

SEQ ID NO: 2349377 - RNA, 19 nt, Artificial Sequence
  Description of Artificial Sequence: Synthetic oligonucleotide
  Antisense strand to SEQ ID NO: 2349376
cauucucccaugauguugc

SEQ ID NO: 2349378 - RNA, 19 nt, Artificial Sequence
  Description of Artificial Sequence: Synthetic oligonucleotide
  Sense strand starting at position 3029 of SEQ ID NO: 1885537
auaguaucagcaggagaac

SEQ ID NO: 2349379 - RNA, 19 nt, Artificial Sequence
  Description of Artificial Sequence: Synthetic oligonucleotide
  Antisense strand to SEQ ID NO: 2349378
guucuccugcugauacuau

SEQ ID NO: 2349380 - RNA, 19 nt, Artificial Sequence
  Description of Artificial Sequence: Synthetic oligonucleotide
  Sense strand starting at position 3119 of SEQ ID NO: 1885537
cugugaggauauuguagua

SEQ ID NO: 2349381 - RNA, 19 nt, Artificial Sequence
  Description of Artificial Sequence: Synthetic oligonucleotide
  Antisense strand to SEQ ID NO: 2349380
uacuacaauauccucacag

SEQ ID NO: 2349382 - RNA, 19 nt, Artificial Sequence
  Description of Artificial Sequence: Synthetic oligonucleotide
  Sense strand starting at position 3431 of SEQ ID NO: 1885537
ucugcuuuccugugcagau

SEQ ID NO: 2349383 - RNA, 19 nt, Artificial Sequence
  Description of Artificial Sequence: Synthetic oligonucleotide
  Antisense strand to SEQ ID NO: 2349382
aucugcacaggaaagcaga

SEQ ID NO: 2349384 - RNA, 19 nt, Artificial Sequence
  Description of Artificial Sequence: Synthetic oligonucleotide
  Sense strand starting at position 3432 of SEQ ID NO: 1885537
cugcuuuccugugcagaua

SEQ ID NO: 2349385 - RNA, 19 nt, Artificial Sequence
  Description of Artificial Sequence: Synthetic oligonucleotide
  Antisense strand to SEQ ID NO: 2349384
uaucugcacaggaaagcag

SEQ ID NO: 2349386 - RNA, 19 nt, Artificial Sequence
  Description of Artificial Sequence: Synthetic oligonucleotide
  Sense strand starting at position 3440 of SEQ ID NO: 1885537
cugugcagauaguuccaua

SEQ ID NO: 2349387 - RNA, 19 nt, Artificial Sequence
  Description of Artificial Sequence: Synthetic oligonucleotide
  Antisense strand to SEQ ID NO: 2349386
uauggaacuaucugcacag

SEQ ID NO: 2349388 - RNA, 19 nt, Artificial Sequence
  Description of Artificial Sequence: Synthetic oligonucleotide
  Sense strand starting at position 3443 of SEQ ID NO: 1885537
ugcagauaguuccauaaac

SEQ ID NO: 2349389 - RNA, 19 nt, Artificial Sequence
  Description of Artificial Sequence: Synthetic oligonucleotide
  Antisense strand to SEQ ID NO: 2349388
guuuauggaacuaucugca

SEQ ID NO: 2349390 - RNA, 19 nt, Artificial Sequence
  Description of Artificial Sequence: Synthetic oligonucleotide
  Sense strand starting at position 3460 of SEQ ID NO: 1885537
acugguguucaagaucgau

SEQ ID NO: 2349391 - RNA, 19 nt, Artificial Sequence
  Description of Artificial Sequence: Synthetic oligonucleotide
  Antisense strand to SEQ ID NO: 2349390
aucgaucuugaacaccagu

SEQ ID NO: 2349392 - RNA, 19 nt, Artificial Sequence
  Description of Artificial Sequence: Synthetic oligonucleotide
  Sense strand starting at position 3706 of SEQ ID NO: 1885537
aaggaaagugccugaugca

SEQ ID NO: 2349393 - RNA, 19 nt, Artificial Sequence
  Description of Artificial Sequence: Synthetic oligonucleotide
  Antisense strand to SEQ ID NO: 2349392
ugcaucaggcacuuuccuu

SEQ ID NO: 2349394 - RNA, 19 nt, Artificial Sequence
  Description of Artificial Sequence: Synthetic oligonucleotide
  Sense strand starting at position 3707 of SEQ ID NO: 1885537
aggaaagugccugaugcaa

SEQ ID NO: 2349395 - RNA, 19 nt, Artificial Sequence
  Description of Artificial Sequence: Synthetic oligonucleotide
  Antisense strand to SEQ ID NO: 2349394
uugcaucaggcacuuuccu

SEQ ID NO: 2349396 - RNA, 19 nt, Artificial Sequence
  Description of Artificial Sequence: Synthetic oligonucleotide
  Sense strand starting at position 11 of SEQ ID NO: 1885538
uaaugcugacgcugaauca

SEQ ID NO: 2349397 - RNA, 19 nt, Artificial Sequence
  Description of Artificial Sequence: Synthetic oligonucleotide
  Antisense strand to SEQ ID NO: 2349396
ugauucagcgucagcauua

SEQ ID NO: 2349398 - RNA, 19 nt, Artificial Sequence
  Description of Artificial Sequence: Synthetic oligonucleotide
  Sense strand starting at position 18 of SEQ ID NO: 1885538
gacgcugaaucauuaagag

SEQ ID NO: 2349399 - RNA, 19 nt, Artificial Sequence
  Description of Artificial Sequence: Synthetic oligonucleotide
  Antisense strand to SEQ ID NO: 2349398
cucuuaaugauucagcguc

SEQ ID NO: 2349400 - RNA, 19 nt, Artificial Sequence
  Description of Artificial Sequence: Synthetic oligonucleotide
  Sense strand starting at position 169 of SEQ ID NO: 1885538
agguauuguuaugucugau

SEQ ID NO: 2349401 - RNA, 19 nt, Artificial Sequence
  Description of Artificial Sequence: Synthetic oligonucleotide
  Antisense strand to SEQ ID NO: 2349400
aucagacauaacaauaccu

SEQ ID NO: 2349402 - RNA, 19 nt, Artificial Sequence
  Description of Artificial Sequence: Synthetic oligonucleotide
  Sense strand starting at position 172 of SEQ ID NO: 1885538
uauuguuaugucugaugaa

SEQ ID NO: 2349403 - RNA, 19 nt, Artificial Sequence
  Description of Artificial Sequence: Synthetic oligonucleotide
  Antisense strand to SEQ ID NO: 2349402
uucaucagacauaacaaua

SEQ ID NO: 2349404 - RNA, 19 nt, Artificial Sequence
  Description of Artificial Sequence: Synthetic oligonucleotide
  Sense strand starting at position 395 of SEQ ID NO: 1885538
aguguuauucuugggauca

SEQ ID NO: 2349405 - RNA, 19 nt, Artificial Sequence
  Description of Artificial Sequence: Synthetic oligonucleotide
  Antisense strand to SEQ ID NO: 2349404
ugaucccaagaauaacacu

SEQ ID NO: 2349406 - RNA, 19 nt, Artificial Sequence
  Description of Artificial Sequence: Synthetic oligonucleotide
  Sense strand starting at position 429 of SEQ ID NO: 1885538
ccagcuugggaucauuauc

SEQ ID NO: 2349407 - RNA, 19 nt, Artificial Sequence
  Description of Artificial Sequence: Synthetic oligonucleotide
  Antisense strand to SEQ ID NO: 2349406
gauaaugaucccaagcugg

SEQ ID NO: 2349408 - RNA, 19 nt, Artificial Sequence
  Description of Artificial Sequence: Synthetic oligonucleotide
  Sense strand starting at position 435 of SEQ ID NO: 1885538
ugggaucauuaucccaagu

SEQ ID NO: 2349409 - RNA, 19 nt, Artificial Sequence
  Description of Artificial Sequence: Synthetic oligonucleotide
  Antisense strand to SEQ ID NO: 2349408
acuugggauaaugauccca

SEQ ID NO: 2349410 - RNA, 19 nt, Artificial Sequence
  Description of Artificial Sequence: Synthetic oligonucleotide
  Sense strand starting at position 595 of SEQ ID NO: 1885538
accgaagaugcuuaucuuu

SEQ ID NO: 2349411 - RNA, 19 nt, Artificial Sequence
  Description of Artificial Sequence: Synthetic oligonucleotide
  Antisense strand to SEQ ID NO: 2349410
aaagauaagcaucuucggu

SEQ ID NO: 2349412 - RNA, 19 nt, Artificial Sequence
  Description of Artificial Sequence: Synthetic oligonucleotide
  Sense strand starting at position 597 of SEQ ID NO: 1885538
cgaagaugcuuaucuuuag

SEQ ID NO: 2349413 - RNA, 19 nt, Artificial Sequence
  Description of Artificial Sequence: Synthetic oligonucleotide
  Antisense strand to SEQ ID NO: 2349412
cuaaagauaagcaucuucg

SEQ ID NO: 2349414 - RNA, 19 nt, Artificial Sequence
  Description of Artificial Sequence: Synthetic oligonucleotide
  Sense strand starting at position 698 of SEQ ID NO: 1885538
accguagcucuuuacucaa

SEQ ID NO: 2349415 - RNA, 19 nt, Artificial Sequence
  Description of Artificial Sequence: Synthetic oligonucleotide
  Antisense strand to SEQ ID NO: 2349414
uugaguaaagagcuacggu

SEQ ID NO: 2349416 - RNA, 19 nt, Artificial Sequence
  Description of Artificial Sequence: Synthetic oligonucleotide
  Sense strand starting at position 822 of SEQ ID NO: 1885538
aaggaauccguuugccaac

SEQ ID NO: 2349417 - RNA, 19 nt, Artificial Sequence
  Description of Artificial Sequence: Synthetic oligonucleotide
  Antisense strand to SEQ ID NO: 2349416
guuggcaaacggauuccuu

SEQ ID NO: 2349418 - RNA, 19 nt, Artificial Sequence
  Description of Artificial Sequence: Synthetic oligonucleotide
  Sense strand starting at position 1052 of SEQ ID NO: 1885538
agacgacuucucuagacuu

SEQ ID NO: 2349419 - RNA, 19 nt, Artificial Sequence
  Description of Artificial Sequence: Synthetic oligonucleotide
  Antisense strand to SEQ ID NO: 2349418
aagucuagagaagucgucu

SEQ ID NO: 2349420 - RNA, 19 nt, Artificial Sequence
  Description of Artificial Sequence: Synthetic oligonucleotide
  Sense strand starting at position 1062 of SEQ ID NO: 1885538
ucuagacuucccgcguagu

SEQ ID NO: 2349421 - RNA, 19 nt, Artificial Sequence
  Description of Artificial Sequence: Synthetic oligonucleotide
  Antisense strand to SEQ ID NO: 2349420
acuacgcgggaagucuaga

SEQ ID NO: 2349422 - RNA, 19 nt, Artificial Sequence
  Description of Artificial Sequence: Synthetic oligonucleotide
  Sense strand starting at position 1064 of SEQ ID NO: 1885538
uagacuucccgcguaguuu

SEQ ID NO: 2349423 - RNA, 19 nt, Artificial Sequence
  Description of Artificial Sequence: Synthetic oligonucleotide
  Antisense strand to SEQ ID NO: 2349422
aaacuacgcgggaagucua

SEQ ID NO: 2349424 - RNA, 19 nt, Artificial Sequence
  Description of Artificial Sequence: Synthetic oligonucleotide
  Sense strand starting at position 1191 of SEQ ID NO: 1885538
ucgagagugguccauggau

SEQ ID NO: 2349425 - RNA, 19 nt, Artificial Sequence
  Description of Artificial Sequence: Synthetic oligonucleotide
  Antisense strand to SEQ ID NO: 2349424
auccauggaccacucucga

SEQ ID NO: 2349426 - RNA, 19 nt, Artificial Sequence
  Description of Artificial Sequence: Synthetic oligonucleotide
  Sense strand starting at position 2435 of SEQ ID NO: 1885538
ugaaaucuccuucgggcaa

SEQ ID NO: 2349427 - RNA, 19 nt, Artificial Sequence
  Description of Artificial Sequence: Synthetic oligonucleotide
  Antisense strand to SEQ ID NO: 2349426
uugcccgaaggagauuuca

SEQ ID NO: 2349428 - RNA, 19 nt, Artificial Sequence
  Description of Artificial Sequence: Synthetic oligonucleotide
  Sense strand starting at position 2833 of SEQ ID NO: 1885538
aaaugaguugugugcaaac

SEQ ID NO: 2349429 - RNA, 19 nt, Artificial Sequence
  Description of Artificial Sequence: Synthetic oligonucleotide
  Antisense strand to SEQ ID NO: 2349428
guuugcacacaacucauuu

SEQ ID NO: 2349430 - RNA, 19 nt, Artificial Sequence
  Description of Artificial Sequence: Synthetic oligonucleotide
  Sense strand starting at position 2835 of SEQ ID NO: 1885538
augaguugugugcaaacau

SEQ ID NO: 2349431 - RNA, 19 nt, Artificial Sequence
  Description of Artificial Sequence: Synthetic oligonucleotide
  Antisense strand to SEQ ID NO: 2349430
auguuugcacacaacucau

SEQ ID NO: 2349432 - RNA, 19 nt, Artificial Sequence
  Description of Artificial Sequence: Synthetic oligonucleotide
  Sense strand starting at position 2842 of SEQ ID NO: 1885538
gugugcaaacauuaugaaa

SEQ ID NO: 2349433 - RNA, 19 nt, Artificial Sequence
  Description of Artificial Sequence: Synthetic oligonucleotide
  Antisense strand to SEQ ID NO: 2349432
uuucauaauguuugcacac

SEQ ID NO: 2349434 - RNA, 19 nt, Artificial Sequence
  Description of Artificial Sequence: Synthetic oligonucleotide
  Sense strand starting at position 2959 of SEQ ID NO: 1885538
uugcucuuugcugaaagga

SEQ ID NO: 2349435 - RNA, 19 nt, Artificial Sequence
  Description of Artificial Sequence: Synthetic oligonucleotide
  Antisense strand to SEQ ID NO: 2349434
uccuuucagcaaagagcaa

SEQ ID NO: 2349436 - RNA, 19 nt, Artificial Sequence
  Description of Artificial Sequence: Synthetic oligonucleotide
  Sense strand starting at position 3018 of SEQ ID NO: 1885538
guggauuguuuaccgauga

SEQ ID NO: 2349437 - RNA, 19 nt, Artificial Sequence
  Description of Artificial Sequence: Synthetic oligonucleotide
  Antisense strand to SEQ ID NO: 2349436
ucaucgguaaacaauccac

SEQ ID NO: 2349438 - RNA, 19 nt, Artificial Sequence
  Description of Artificial Sequence: Synthetic oligonucleotide
  Sense strand starting at position 3022 of SEQ ID NO: 1885538
auuguuuaccgaugaucaa

SEQ ID NO: 2349439 - RNA, 19 nt, Artificial Sequence
  Description of Artificial Sequence: Synthetic oligonucleotide
  Antisense strand to SEQ ID NO: 2349438
uugaucaucgguaaacaau

SEQ ID NO: 2349440 - RNA, 19 nt, Artificial Sequence
  Description of Artificial Sequence: Synthetic oligonucleotide
  Sense strand starting at position 3023 of SEQ ID NO: 1885538
uuguuuaccgaugaucaau

SEQ ID NO: 2349441 - RNA, 19 nt, Artificial Sequence
  Description of Artificial Sequence: Synthetic oligonucleotide
  Antisense strand to SEQ ID NO: 2349440
auugaucaucgguaaacaa

SEQ ID NO: 2349442 - RNA, 19 nt, Artificial Sequence
  Description of Artificial Sequence: Synthetic oligonucleotide
  Sense strand starting at position 3264 of SEQ ID NO: 1885538
uguacaugggcugguuaaa

SEQ ID NO: 2349443 - RNA, 19 nt, Artificial Sequence
  Description of Artificial Sequence: Synthetic oligonucleotide
  Antisense strand to SEQ ID NO: 2349442
uuuaaccagcccauguaca

SEQ ID NO: 2349444 - RNA, 19 nt, Artificial Sequence
  Description of Artificial Sequence: Synthetic oligonucleotide
  Sense strand starting at position 3356 of SEQ ID NO: 1885538
aguguauaguggccugaga

SEQ ID NO: 2349445 - RNA, 19 nt, Artificial Sequence
  Description of Artificial Sequence: Synthetic oligonucleotide
  Antisense strand to SEQ ID NO: 2349444
ucucaggccacuauacacu

SEQ ID NO: 2349446 - RNA, 19 nt, Artificial Sequence
  Description of Artificial Sequence: Synthetic oligonucleotide
  Sense strand starting at position 3358 of SEQ ID NO: 1885538
uguauaguggccugagaua

SEQ ID NO: 2349447 - RNA, 19 nt, Artificial Sequence
  Description of Artificial Sequence: Synthetic oligonucleotide
  Antisense strand to SEQ ID NO: 2349446
uaucucaggccacuauaca

SEQ ID NO: 2349448 - RNA, 19 nt, Artificial Sequence
  Description of Artificial Sequence: Synthetic oligonucleotide
  Sense strand starting at position 3414 of SEQ ID NO: 1885538
acagaugcauugucuuauu

SEQ ID NO: 2349449 - RNA, 19 nt, Artificial Sequence
  Description of Artificial Sequence: Synthetic oligonucleotide
  Antisense strand to SEQ ID NO: 2349448
aauaagacaaugcaucugu

SEQ ID NO: 2349450 - RNA, 19 nt, Artificial Sequence
  Description of Artificial Sequence: Synthetic oligonucleotide
  Sense strand starting at position 3507 of SEQ ID NO: 1885538
agcaaucugucucugaagu

SEQ ID NO: 2349451 - RNA, 19 nt, Artificial Sequence
  Description of Artificial Sequence: Synthetic oligonucleotide
  Antisense strand to SEQ ID NO: 2349450
acuucagagacagauugcu

SEQ ID NO: 2349452 - RNA, 19 nt, Artificial Sequence
  Description of Artificial Sequence: Synthetic oligonucleotide
  Sense strand starting at position 3540 of SEQ ID NO: 1885538
gagcgugugccagaagauc

SEQ ID NO: 2349453 - RNA, 19 nt, Artificial Sequence
  Description of Artificial Sequence: Synthetic oligonucleotide
  Antisense strand to SEQ ID NO: 2349452
gaucuucuggcacacgcuc

SEQ ID NO: 2349454 - RNA, 19 nt, Artificial Sequence
  Description of Artificial Sequence: Synthetic oligonucleotide
  Sense strand starting at position 3553 of SEQ ID NO: 1885538
aagauccagcuuuguugaa

SEQ ID NO: 2349455 - RNA, 19 nt, Artificial Sequence
  Description of Artificial Sequence: Synthetic oligonucleotide
  Antisense strand to SEQ ID NO: 2349454
uucaacaaagcuggaucuu

SEQ ID NO: 2349456 - RNA, 19 nt, Artificial Sequence
  Description of Artificial Sequence: Synthetic oligonucleotide
  Sense strand starting at position 3554 of SEQ ID NO: 1885538
agauccagcuuuguugaaa

SEQ ID NO: 2349457 - RNA, 19 nt, Artificial Sequence
  Description of Artificial Sequence: Synthetic oligonucleotide
  Antisense strand to SEQ ID NO: 2349456
uuucaacaaagcuggaucu

SEQ ID NO: 2349458 - RNA, 19 nt, Artificial Sequence
  Description of Artificial Sequence: Synthetic oligonucleotide
  Sense strand starting at position 3580 of SEQ ID NO: 1885538
ccguuagucccuuaauaca

SEQ ID NO: 2349459 - RNA, 19 nt, Artificial Sequence
  Description of Artificial Sequence: Synthetic oligonucleotide
  Antisense strand to SEQ ID NO: 2349458
uguauuaagggacuaacgg

SEQ ID NO: 2349460 - RNA, 19 nt, Artificial Sequence
  Description of Artificial Sequence: Synthetic oligonucleotide
  Sense strand starting at position 3603 of SEQ ID NO: 1885538
guaaguguaucauuuaugu

SEQ ID NO: 2349461 - RNA, 19 nt, Artificial Sequence
  Description of Artificial Sequence: Synthetic oligonucleotide
  Antisense strand to SEQ ID NO: 2349460
acauaaaugauacacuuac

SEQ ID NO: 2349462 - RNA, 19 nt, Artificial Sequence
  Description of Artificial Sequence: Synthetic oligonucleotide
  Sense strand starting at position 3633 of SEQ ID NO: 1885538
agggcucuugauuagcuua

SEQ ID NO: 2349463 - RNA, 19 nt, Artificial Sequence
  Description of Artificial Sequence: Synthetic oligonucleotide
  Antisense strand to SEQ ID NO: 2349462
uaagcuaaucaagagcccu

SEQ ID NO: 2349464 - RNA, 19 nt, Artificial Sequence
  Description of Artificial Sequence: Synthetic oligonucleotide
  Sense strand starting at position 3635 of SEQ ID NO: 1885538
ggcucuugauuagcuuaca

SEQ ID NO: 2349465 - RNA, 19 nt, Artificial Sequence
  Description of Artificial Sequence: Synthetic oligonucleotide
  Antisense strand to SEQ ID NO: 2349464
uguaagcuaaucaagagcc

SEQ ID NO: 2349466 - RNA, 19 nt, Artificial Sequence
  Description of Artificial Sequence: Synthetic oligonucleotide
  Sense strand starting at position 3636 of SEQ ID NO: 1885538
gcucuugauuagcuuacaa

SEQ ID NO: 2349467 - RNA, 19 nt, Artificial Sequence
  Description of Artificial Sequence: Synthetic oligonucleotide
  Antisense strand to SEQ ID NO: 2349466
uuguaagcuaaucaagagc

SEQ ID NO: 2349468 - RNA, 19 nt, Artificial Sequence
  Description of Artificial Sequence: Synthetic oligonucleotide
  Sense strand starting at position 3659 of SEQ ID NO: 1885538
ccauguuauuuccucaggu

SEQ ID NO: 2349469 - RNA, 19 nt, Artificial Sequence
  Description of Artificial Sequence: Synthetic oligonucleotide
  Antisense strand to SEQ ID NO: 2349468
accugaggaaauaacaugg

SEQ ID NO: 2349470 - RNA, 19 nt, Artificial Sequence
  Description of Artificial Sequence: Synthetic oligonucleotide
  Sense strand starting at position 3765 of SEQ ID NO: 1885538
auaauauuucggugcacuu

SEQ ID NO: 2349471 - RNA, 19 nt, Artificial Sequence
  Description of Artificial Sequence: Synthetic oligonucleotide
  Antisense strand to SEQ ID NO: 2349470
aagugcaccgaaauauuau

SEQ ID NO: 2349472 - RNA, 19 nt, Artificial Sequence
  Description of Artificial Sequence: Synthetic oligonucleotide
  Sense strand starting at position 3842 of SEQ ID NO: 1885538
aaaggaugacuuuguauca

SEQ ID NO: 2349473 - RNA, 19 nt, Artificial Sequence
  Description of Artificial Sequence: Synthetic oligonucleotide
  Antisense strand to SEQ ID NO: 2349472
ugauacaaagucauccuuu

SEQ ID NO: 2349474 - RNA, 19 nt, Artificial Sequence
  Description of Artificial Sequence: Synthetic oligonucleotide
  Sense strand starting at position 3908 of SEQ ID NO: 1885538
gugguugaaugcuuuauuu

SEQ ID NO: 2349475 - RNA, 19 nt, Artificial Sequence
  Description of Artificial Sequence: Synthetic oligonucleotide
  Antisense strand to SEQ ID NO: 2349474
aaauaaagcauucaaccac

SEQ ID NO: 2349476 - RNA, 19 nt, Artificial Sequence
  Description of Artificial Sequence: Synthetic oligonucleotide
  Sense strand starting at position 244 of SEQ ID NO: 1885539
agccgaaauaggugauaca

SEQ ID NO: 2349477 - RNA, 19 nt, Artificial Sequence
  Description of Artificial Sequence: Synthetic oligonucleotide
  Antisense strand to SEQ ID NO: 2349476
uguaucaccuauuucggcu

SEQ ID NO: 2349478 - RNA, 19 nt, Artificial Sequence
  Description of Artificial Sequence: Synthetic oligonucleotide
  Sense strand starting at position 245 of SEQ ID NO: 1885539
gccgaaauaggugauacaa

SEQ ID NO: 2349479 - RNA, 19 nt, Artificial Sequence
  Description of Artificial Sequence: Synthetic oligonucleotide
  Antisense strand to SEQ ID NO: 2349478
uuguaucaccuauuucggc

SEQ ID NO: 2349480 - RNA, 19 nt, Artificial Sequence
  Description of Artificial Sequence: Synthetic oligonucleotide
  Sense strand starting at position 329 of SEQ ID NO: 1885539
uuacaagugcaccgaaaua

SEQ ID NO: 2349481 - RNA, 19 nt, Artificial Sequence
  Description of Artificial Sequence: Synthetic oligonucleotide
  Antisense strand to SEQ ID NO: 2349480
uauuucggugcacuuguaa

SEQ ID NO: 2349482 - RNA, 19 nt, Artificial Sequence
  Description of Artificial Sequence: Synthetic oligonucleotide
  Sense strand starting at position 446 of SEQ ID NO: 1885539
gaaauaacaugguuguuug

SEQ ID NO: 2349483 - RNA, 19 nt, Artificial Sequence
  Description of Artificial Sequence: Synthetic oligonucleotide
  Antisense strand to SEQ ID NO: 2349482
caaacaaccauguuauuuc

SEQ ID NO: 2349484 - RNA, 19 nt, Artificial Sequence
  Description of Artificial Sequence: Synthetic oligonucleotide
  Sense strand starting at position 449 of SEQ ID NO: 1885539
auaacaugguuguuuguaa

SEQ ID NO: 2349485 - RNA, 19 nt, Artificial Sequence
  Description of Artificial Sequence: Synthetic oligonucleotide
  Antisense strand to SEQ ID NO: 2349484
uuacaaacaaccauguuau

SEQ ID NO: 2349486 - RNA, 19 nt, Artificial Sequence
  Description of Artificial Sequence: Synthetic oligonucleotide
  Sense strand starting at position 461 of SEQ ID NO: 1885539
uuuguaagcuaaucaagag

SEQ ID NO: 2349487 - RNA, 19 nt, Artificial Sequence
  Description of Artificial Sequence: Synthetic oligonucleotide
  Antisense strand to SEQ ID NO: 2349486
cucuugauuagcuuacaaa

SEQ ID NO: 2349488 - RNA, 19 nt, Artificial Sequence
  Description of Artificial Sequence: Synthetic oligonucleotide
  Sense strand starting at position 689 of SEQ ID NO: 1885539
gacaaugcaucuguggaga

SEQ ID NO: 2349489 - RNA, 19 nt, Artificial Sequence
  Description of Artificial Sequence: Synthetic oligonucleotide
  Antisense strand to SEQ ID NO: 2349488
ucuccacagaugcauuguc

SEQ ID NO: 2349490 - RNA, 19 nt, Artificial Sequence
  Description of Artificial Sequence: Synthetic oligonucleotide
  Sense strand starting at position 724 of SEQ ID NO: 1885539
cuggcagaauucucaauau

SEQ ID NO: 2349491 - RNA, 19 nt, Artificial Sequence
  Description of Artificial Sequence: Synthetic oligonucleotide
  Antisense strand to SEQ ID NO: 2349490
auauugagaauucugccag

SEQ ID NO: 2349492 - RNA, 19 nt, Artificial Sequence
  Description of Artificial Sequence: Synthetic oligonucleotide
  Sense strand starting at position 854 of SEQ ID NO: 1885539
gaaauucuguugguguaga

SEQ ID NO: 2349493 - RNA, 19 nt, Artificial Sequence
  Description of Artificial Sequence: Synthetic oligonucleotide
  Antisense strand to SEQ ID NO: 2349492
ucuacaccaacagaauuuc

SEQ ID NO: 2349494 - RNA, 19 nt, Artificial Sequence
  Description of Artificial Sequence: Synthetic oligonucleotide
  Sense strand starting at position 1071 of SEQ ID NO: 1885539
agagauugaucaucgguaa

SEQ ID NO: 2349495 - RNA, 19 nt, Artificial Sequence
  Description of Artificial Sequence: Synthetic oligonucleotide
  Antisense strand to SEQ ID NO: 2349494
uuaccgaugaucaaucucu

SEQ ID NO: 2349496 - RNA, 19 nt, Artificial Sequence
  Description of Artificial Sequence: Synthetic oligonucleotide
  Sense strand starting at position 1072 of SEQ ID NO: 1885539
gagauugaucaucgguaaa

SEQ ID NO: 2349497 - RNA, 19 nt, Artificial Sequence
  Description of Artificial Sequence: Synthetic oligonucleotide
  Antisense strand to SEQ ID NO: 2349496
uuuaccgaugaucaaucuc

SEQ ID NO: 2349498 - RNA, 19 nt, Artificial Sequence
  Description of Artificial Sequence: Synthetic oligonucleotide
  Sense strand starting at position 1074 of SEQ ID NO: 1885539
gauugaucaucgguaaaca

SEQ ID NO: 2349499 - RNA, 19 nt, Artificial Sequence
  Description of Artificial Sequence: Synthetic oligonucleotide
  Antisense strand to SEQ ID NO: 2349498
uguuuaccgaugaucaauc

SEQ ID NO: 2349500 - RNA, 19 nt, Artificial Sequence
  Description of Artificial Sequence: Synthetic oligonucleotide
  Sense strand starting at position 1165 of SEQ ID NO: 1885539
aggagagauccgggcccau

SEQ ID NO: 2349501 - RNA, 19 nt, Artificial Sequence
  Description of Artificial Sequence: Synthetic oligonucleotide
  Antisense strand to SEQ ID NO: 2349500
augggcccggaucucuccu

SEQ ID NO: 2349502 - RNA, 19 nt, Artificial Sequence
  Description of Artificial Sequence: Synthetic oligonucleotide
  Sense strand starting at position 1618 of SEQ ID NO: 1885539
uuauuugggucgcuuucua

SEQ ID NO: 2349503 - RNA, 19 nt, Artificial Sequence
  Description of Artificial Sequence: Synthetic oligonucleotide
  Antisense strand to SEQ ID NO: 2349502
uagaaagcgacccaaauaa

SEQ ID NO: 2349504 - RNA, 19 nt, Artificial Sequence
  Description of Artificial Sequence: Synthetic oligonucleotide
  Sense strand starting at position 1622 of SEQ ID NO: 1885539
uugggucgcuuucuaauuu

SEQ ID NO: 2349505 - RNA, 19 nt, Artificial Sequence
  Description of Artificial Sequence: Synthetic oligonucleotide
  Antisense strand to SEQ ID NO: 2349504
aaauuagaaagcgacccaa

SEQ ID NO: 2349506 - RNA, 19 nt, Artificial Sequence
  Description of Artificial Sequence: Synthetic oligonucleotide
  Sense strand starting at position 1626 of SEQ ID NO: 1885539
gucgcuuucuaauuucuuu

SEQ ID NO: 2349507 - RNA, 19 nt, Artificial Sequence
  Description of Artificial Sequence: Synthetic oligonucleotide
  Antisense strand to SEQ ID NO: 2349506
aaagaaauuagaaagcgac

SEQ ID NO: 2349508 - RNA, 19 nt, Artificial Sequence
  Description of Artificial Sequence: Synthetic oligonucleotide
  Sense strand starting at position 1637 of SEQ ID NO: 1885539
auuucuuucuccguuugua

SEQ ID NO: 2349509 - RNA, 19 nt, Artificial Sequence
  Description of Artificial Sequence: Synthetic oligonucleotide
  Antisense strand to SEQ ID NO: 2349508
uacaaacggagaaagaaau

SEQ ID NO: 2349510 - RNA, 19 nt, Artificial Sequence
  Description of Artificial Sequence: Synthetic oligonucleotide
  Sense strand starting at position 1659 of SEQ ID NO: 1885539
agcguugcccgaaggagau

SEQ ID NO: 2349511 - RNA, 19 nt, Artificial Sequence
  Description of Artificial Sequence: Synthetic oligonucleotide
  Antisense strand to SEQ ID NO: 2349510
aucuccuucgggcaacgcu

SEQ ID NO: 2349512 - RNA, 19 nt, Artificial Sequence
  Description of Artificial Sequence: Synthetic oligonucleotide
  Sense strand starting at position 2958 of SEQ ID NO: 1885539
ggguguguccuagcgauuc

SEQ ID NO: 2349513 - RNA, 19 nt, Artificial Sequence
  Description of Artificial Sequence: Synthetic oligonucleotide
  Antisense strand to SEQ ID NO: 2349512
gaaucgcuaggacacaccc

SEQ ID NO: 2349514 - RNA, 19 nt, Artificial Sequence
  Description of Artificial Sequence: Synthetic oligonucleotide
  Sense strand starting at position 3041 of SEQ ID NO: 1885539
gcgggaagucuagagaagu

SEQ ID NO: 2349515 - RNA, 19 nt, Artificial Sequence
  Description of Artificial Sequence: Synthetic oligonucleotide
  Antisense strand to SEQ ID NO: 2349514
acuucucuagacuucccgc

SEQ ID NO: 2349516 - RNA, 19 nt, Artificial Sequence
  Description of Artificial Sequence: Synthetic oligonucleotide
  Sense strand starting at position 3192 of SEQ ID NO: 1885539
ugacuagguuagguugaaa

SEQ ID NO: 2349517 - RNA, 19 nt, Artificial Sequence
  Description of Artificial Sequence: Synthetic oligonucleotide
  Antisense strand to SEQ ID NO: 2349516
uuucaaccuaaccuaguca

SEQ ID NO: 2349518 - RNA, 19 nt, Artificial Sequence
  Description of Artificial Sequence: Synthetic oligonucleotide
  Sense strand starting at position 3195 of SEQ ID NO: 1885539
cuagguuagguugaaagua

SEQ ID NO: 2349519 - RNA, 19 nt, Artificial Sequence
  Description of Artificial Sequence: Synthetic oligonucleotide
  Antisense strand to SEQ ID NO: 2349518
uacuuucaaccuaaccuag

SEQ ID NO: 2349520 - RNA, 19 nt, Artificial Sequence
  Description of Artificial Sequence: Synthetic oligonucleotide
  Sense strand starting at position 3289 of SEQ ID NO: 1885539
uuccuuagccgcuauuuaa

SEQ ID NO: 2349521 - RNA, 19 nt, Artificial Sequence
  Description of Artificial Sequence: Synthetic oligonucleotide
  Antisense strand to SEQ ID NO: 2349520
uuaaauagcggcuaaggaa

SEQ ID NO: 2349522 - RNA, 19 nt, Artificial Sequence
  Description of Artificial Sequence: Synthetic oligonucleotide
  Sense strand starting at position 3298 of SEQ ID NO: 1885539
cgcuauuuaaguuaguagu

SEQ ID NO: 2349523 - RNA, 19 nt, Artificial Sequence
  Description of Artificial Sequence: Synthetic oligonucleotide
  Antisense strand to SEQ ID NO: 2349522
acuacuaacuuaaauagcg

SEQ ID NO: 2349524 - RNA, 19 nt, Artificial Sequence
  Description of Artificial Sequence: Synthetic oligonucleotide
  Sense strand starting at position 3308 of SEQ ID NO: 1885539
guuaguagugcuuaaagag

SEQ ID NO: 2349525 - RNA, 19 nt, Artificial Sequence
  Description of Artificial Sequence: Synthetic oligonucleotide
  Antisense strand to SEQ ID NO: 2349524
cucuuuaagcacuacuaac

SEQ ID NO: 2349526 - RNA, 19 nt, Artificial Sequence
  Description of Artificial Sequence: Synthetic oligonucleotide
  Sense strand starting at position 3323 of SEQ ID NO: 1885539
agagcuacgguugaaguua

SEQ ID NO: 2349527 - RNA, 19 nt, Artificial Sequence
  Description of Artificial Sequence: Synthetic oligonucleotide
  Antisense strand to SEQ ID NO: 2349526
uaacuucaaccguagcucu

SEQ ID NO: 2349528 - RNA, 19 nt, Artificial Sequence
  Description of Artificial Sequence: Synthetic oligonucleotide
  Sense strand starting at position 3331 of SEQ ID NO: 1885539
gguugaaguuaacuguuaa

SEQ ID NO: 2349529 - RNA, 19 nt, Artificial Sequence
  Description of Artificial Sequence: Synthetic oligonucleotide
  Antisense strand to SEQ ID NO: 2349528
uuaacaguuaacuucaacc

SEQ ID NO: 2349530 - RNA, 19 nt, Artificial Sequence
  Description of Artificial Sequence: Synthetic oligonucleotide
  Sense strand starting at position 3332 of SEQ ID NO: 1885539
guugaaguuaacuguuaag

SEQ ID NO: 2349531 - RNA, 19 nt, Artificial Sequence
  Description of Artificial Sequence: Synthetic oligonucleotide
  Antisense strand to SEQ ID NO: 2349530
cuuaacaguuaacuucaac

SEQ ID NO: 2349532 - RNA, 19 nt, Artificial Sequence
  Description of Artificial Sequence: Synthetic oligonucleotide
  Sense strand starting at position 3378 of SEQ ID NO: 1885539
ugugaugacuuuguggaaa

SEQ ID NO: 2349533 - RNA, 19 nt, Artificial Sequence
  Description of Artificial Sequence: Synthetic oligonucleotide
  Antisense strand to SEQ ID NO: 2349532
uuuccacaaagucaucaca

SEQ ID NO: 2349534 - RNA, 19 nt, Artificial Sequence
  Description of Artificial Sequence: Synthetic oligonucleotide
  Sense strand starting at position 3401 of SEQ ID NO: 1885539
ugaguaaagagcuacgguu

SEQ ID NO: 2349535 - RNA, 19 nt, Artificial Sequence
  Description of Artificial Sequence: Synthetic oligonucleotide
  Antisense strand to SEQ ID NO: 2349534
aaccguagcucuuuacuca

SEQ ID NO: 2349536 - RNA, 19 nt, Artificial Sequence
  Description of Artificial Sequence: Synthetic oligonucleotide
  Sense strand starting at position 3458 of SEQ ID NO: 1885539
uguggaaagccuugagaaa

SEQ ID NO: 2349537 - RNA, 19 nt, Artificial Sequence
  Description of Artificial Sequence: Synthetic oligonucleotide
  Antisense strand to SEQ ID NO: 2349536
uuucucaaggcuuuccaca

SEQ ID NO: 2349538 - RNA, 19 nt, Artificial Sequence
  Description of Artificial Sequence: Synthetic oligonucleotide
  Sense strand starting at position 3465 of SEQ ID NO: 1885539
agccuugagaaauguagac

SEQ ID NO: 2349539 - RNA, 19 nt, Artificial Sequence
  Description of Artificial Sequence: Synthetic oligonucleotide
  Antisense strand to SEQ ID NO: 2349538
gucuacauuucucaaggcu

SEQ ID NO: 2349540 - RNA, 19 nt, Artificial Sequence
  Description of Artificial Sequence: Synthetic oligonucleotide
  Sense strand starting at position 3510 of SEQ ID NO: 1885539
agcaucuucggugaacuaa

SEQ ID NO: 2349541 - RNA, 19 nt, Artificial Sequence
  Description of Artificial Sequence: Synthetic oligonucleotide
  Antisense strand to SEQ ID NO: 2349540
uuaguucaccgaagaugcu

SEQ ID NO: 2349542 - RNA, 19 nt, Artificial Sequence
  Description of Artificial Sequence: Synthetic oligonucleotide
  Sense strand starting at position 3539 of SEQ ID NO: 1885539
uuguauaggaguugacuua

SEQ ID NO: 2349543 - RNA, 19 nt, Artificial Sequence
  Description of Artificial Sequence: Synthetic oligonucleotide
  Antisense strand to SEQ ID NO: 2349542
uaagucaacuccuauacaa

SEQ ID NO: 2349544 - RNA, 19 nt, Artificial Sequence
  Description of Artificial Sequence: Synthetic oligonucleotide
  Sense strand starting at position 3572 of SEQ ID NO: 1885539
gcuaaauuagguugcauuu

SEQ ID NO: 2349545 - RNA, 19 nt, Artificial Sequence
  Description of Artificial Sequence: Synthetic oligonucleotide
  Antisense strand to SEQ ID NO: 2349544
aaaugcaaccuaauuuagc

SEQ ID NO: 2349546 - RNA, 19 nt, Artificial Sequence
  Description of Artificial Sequence: Synthetic oligonucleotide
  Sense strand starting at position 3645 of SEQ ID NO: 1885539
gaagcaauugcuggugaga

SEQ ID NO: 2349547 - RNA, 19 nt, Artificial Sequence
  Description of Artificial Sequence: Synthetic oligonucleotide
  Antisense strand to SEQ ID NO: 2349546
ucucaccagcaauugcuuc

SEQ ID NO: 2349548 - RNA, 19 nt, Artificial Sequence
  Description of Artificial Sequence: Synthetic oligonucleotide
  Sense strand starting at position 3648 of SEQ ID NO: 1885539
gcaauugcuggugagacuu

SEQ ID NO: 2349549 - RNA, 19 nt, Artificial Sequence
  Description of Artificial Sequence: Synthetic oligonucleotide
  Antisense strand to SEQ ID NO: 2349548
aagucucaccagcaauugc

SEQ ID NO: 2349550 - RNA, 19 nt, Artificial Sequence
  Description of Artificial Sequence: Synthetic oligonucleotide
  Sense strand starting at position 3654 of SEQ ID NO: 1885539
gcuggugagacuugggaua

SEQ ID NO: 2349551 - RNA, 19 nt, Artificial Sequence
  Description of Artificial Sequence: Synthetic oligonucleotide
  Antisense strand to SEQ ID NO: 2349550
uaucccaagucucaccagc

SEQ ID NO: 2349552 - RNA, 19 nt, Artificial Sequence
  Description of Artificial Sequence: Synthetic oligonucleotide
  Sense strand starting at position 3946 of SEQ ID NO: 1885539
cuuaucaagugagcuuaga

SEQ ID NO: 2349553 - RNA, 19 nt, Artificial Sequence
  Description of Artificial Sequence: Synthetic oligonucleotide
  Antisense strand to SEQ ID NO: 2349552
ucuaagcucacuugauaag

SEQ ID NO: 2349554 - RNA, 19 nt, Artificial Sequence
  Description of Artificial Sequence: Synthetic oligonucleotide
  Sense strand starting at position 3964 of SEQ ID NO: 1885539
agaauaagguguucuacuu

SEQ ID NO: 2349555 - RNA, 19 nt, Artificial Sequence
  Description of Artificial Sequence: Synthetic oligonucleotide
  Antisense strand to SEQ ID NO: 2349554
aaguagaacaccuuauucu

SEQ ID NO: 2349556 - RNA, 19 nt, Artificial Sequence
  Description of Artificial Sequence: Synthetic oligonucleotide
  Sense strand starting at position 10 of SEQ ID NO: 1885540
gauuauaaaucuggaaagg

SEQ ID NO: 2349557 - RNA, 19 nt, Artificial Sequence
  Description of Artificial Sequence: Synthetic oligonucleotide
  Antisense strand to SEQ ID NO: 2349556
ccuuuccagauuuauaauc

SEQ ID NO: 2349558 - RNA, 19 nt, Artificial Sequence
  Description of Artificial Sequence: Synthetic oligonucleotide
  Sense strand starting at position 188 of SEQ ID NO: 1885540
ucuacauguuugcucaaug

SEQ ID NO: 2349559 - RNA, 19 nt, Artificial Sequence
  Description of Artificial Sequence: Synthetic oligonucleotide
  Antisense strand to SEQ ID NO: 2349558
cauugagcaaacauguaga

SEQ ID NO: 2349560 - RNA, 19 nt, Artificial Sequence
  Description of Artificial Sequence: Synthetic oligonucleotide
  Sense strand starting at position 189 of SEQ ID NO: 1885540
cuacauguuugcucaauga

SEQ ID NO: 2349561 - RNA, 19 nt, Artificial Sequence
  Description of Artificial Sequence: Synthetic oligonucleotide
  Antisense strand to SEQ ID NO: 2349560
ucauugagcaaacauguag

SEQ ID NO: 2349562 - RNA, 19 nt, Artificial Sequence
  Description of Artificial Sequence: Synthetic oligonucleotide
  Sense strand starting at position 199 of SEQ ID NO: 1885540
gcucaaugacccuggacaa

SEQ ID NO: 2349563 - RNA, 19 nt, Artificial Sequence
  Description of Artificial Sequence: Synthetic oligonucleotide
  Antisense strand to SEQ ID NO: 2349562
uuguccagggucauugagc

SEQ ID NO: 2349564 - RNA, 19 nt, Artificial Sequence
  Description of Artificial Sequence: Synthetic oligonucleotide
  Sense strand starting at position 263 of SEQ ID NO: 1885540
gguuauuaacaguaucuua

SEQ ID NO: 2349565 - RNA, 19 nt, Artificial Sequence
  Description of Artificial Sequence: Synthetic oligonucleotide
  Antisense strand to SEQ ID NO: 2349564
uaagauacuguuaauaacc

SEQ ID NO: 2349566 - RNA, 19 nt, Artificial Sequence
  Description of Artificial Sequence: Synthetic oligonucleotide
  Sense strand starting at position 303 of SEQ ID NO: 1885540
ugagauuauccauguagau

SEQ ID NO: 2349567 - RNA, 19 nt, Artificial Sequence
  Description of Artificial Sequence: Synthetic oligonucleotide
  Antisense strand to SEQ ID NO: 2349566
aucuacauggauaaucuca

SEQ ID NO: 2349568 - RNA, 19 nt, Artificial Sequence
  Description of Artificial Sequence: Synthetic oligonucleotide
  Sense strand starting at position 329 of SEQ ID NO: 1885540
auugacauguacuccguaa

SEQ ID NO: 2349569 - RNA, 19 nt, Artificial Sequence
  Description of Artificial Sequence: Synthetic oligonucleotide
  Antisense strand to SEQ ID NO: 2349568
uuacggaguacaugucaau

SEQ ID NO: 2349570 - RNA, 19 nt, Artificial Sequence
  Description of Artificial Sequence: Synthetic oligonucleotide
  Sense strand starting at position 331 of SEQ ID NO: 1885540
ugacauguacuccguaagu

SEQ ID NO: 2349571 - RNA, 19 nt, Artificial Sequence
  Description of Artificial Sequence: Synthetic oligonucleotide
  Antisense strand to SEQ ID NO: 2349570
acuuacggaguacauguca

SEQ ID NO: 2349572 - RNA, 19 nt, Artificial Sequence
  Description of Artificial Sequence: Synthetic oligonucleotide
  Sense strand starting at position 333 of SEQ ID NO: 1885540
acauguacuccguaagugu

SEQ ID NO: 2349573 - RNA, 19 nt, Artificial Sequence
  Description of Artificial Sequence: Synthetic oligonucleotide
  Antisense strand to SEQ ID NO: 2349572
acacuuacggaguacaugu

SEQ ID NO: 2349574 - RNA, 19 nt, Artificial Sequence
  Description of Artificial Sequence: Synthetic oligonucleotide
  Sense strand starting at position 579 of SEQ ID NO: 1885540
gcaugucaaguacaugaaa

SEQ ID NO: 2349575 - RNA, 19 nt, Artificial Sequence
  Description of Artificial Sequence: Synthetic oligonucleotide
  Antisense strand to SEQ ID NO: 2349574
uuucauguacuugacaugc

SEQ ID NO: 2349576 - RNA, 19 nt, Artificial Sequence
  Description of Artificial Sequence: Synthetic oligonucleotide
  Sense strand starting at position 2034 of SEQ ID NO: 1885540
ggcuccuaucuagguguga

SEQ ID NO: 2349577 - RNA, 19 nt, Artificial Sequence
  Description of Artificial Sequence: Synthetic oligonucleotide
  Antisense strand to SEQ ID NO: 2349576
ucacaccuagauaggagcc

SEQ ID NO: 2349578 - RNA, 19 nt, Artificial Sequence
  Description of Artificial Sequence: Synthetic oligonucleotide
  Sense strand starting at position 2035 of SEQ ID NO: 1885540
gcuccuaucuaggugugaa

SEQ ID NO: 2349579 - RNA, 19 nt, Artificial Sequence
  Description of Artificial Sequence: Synthetic oligonucleotide
  Antisense strand to SEQ ID NO: 2349578
uucacaccuagauaggagc

SEQ ID NO: 2349580 - RNA, 19 nt, Artificial Sequence
  Description of Artificial Sequence: Synthetic oligonucleotide
  Sense strand starting at position 2036 of SEQ ID NO: 1885540
cuccuaucuaggugugaag

SEQ ID NO: 2349581 - RNA, 19 nt, Artificial Sequence
  Description of Artificial Sequence: Synthetic oligonucleotide
  Antisense strand to SEQ ID NO: 2349580
cuucacaccuagauaggag

SEQ ID NO: 2349582 - RNA, 19 nt, Artificial Sequence
  Description of Artificial Sequence: Synthetic oligonucleotide
  Sense strand starting at position 2038 of SEQ ID NO: 1885540
ccuaucuaggugugaagau

SEQ ID NO: 2349583 - RNA, 19 nt, Artificial Sequence
  Description of Artificial Sequence: Synthetic oligonucleotide
  Antisense strand to SEQ ID NO: 2349582
aucuucacaccuagauagg

SEQ ID NO: 2349584 - RNA, 19 nt, Artificial Sequence
  Description of Artificial Sequence: Synthetic oligonucleotide
  Sense strand starting at position 2064 of SEQ ID NO: 1885540
ccaugaucugcauggucaa

SEQ ID NO: 2349585 - RNA, 19 nt, Artificial Sequence
  Description of Artificial Sequence: Synthetic oligonucleotide
  Antisense strand to SEQ ID NO: 2349584
uugaccaugcagaucaugg

SEQ ID NO: 2349586 - RNA, 19 nt, Artificial Sequence
  Description of Artificial Sequence: Synthetic oligonucleotide
  Sense strand starting at position 2065 of SEQ ID NO: 1885540
caugaucugcauggucaaa

SEQ ID NO: 2349587 - RNA, 19 nt, Artificial Sequence
  Description of Artificial Sequence: Synthetic oligonucleotide
  Antisense strand to SEQ ID NO: 2349586
uuugaccaugcagaucaug

SEQ ID NO: 2349588 - RNA, 19 nt, Artificial Sequence
  Description of Artificial Sequence: Synthetic oligonucleotide
  Sense strand starting at position 2194 of SEQ ID NO: 1885540
gauaguuaaugggugacaa

SEQ ID NO: 2349589 - RNA, 19 nt, Artificial Sequence
  Description of Artificial Sequence: Synthetic oligonucleotide
  Antisense strand to SEQ ID NO: 2349588
uugucacccauuaacuauc

SEQ ID NO: 2349590 - RNA, 19 nt, Artificial Sequence
  Description of Artificial Sequence: Synthetic oligonucleotide
  Sense strand starting at position 2195 of SEQ ID NO: 1885540
auaguuaaugggugacaaa

SEQ ID NO: 2349591 - RNA, 19 nt, Artificial Sequence
  Description of Artificial Sequence: Synthetic oligonucleotide
  Antisense strand to SEQ ID NO: 2349590
uuugucacccauuaacuau

SEQ ID NO: 2349592 - RNA, 19 nt, Artificial Sequence
  Description of Artificial Sequence: Synthetic oligonucleotide
  Sense strand starting at position 2228 of SEQ ID NO: 1885540
augaauaaggccggguauu

SEQ ID NO: 2349593 - RNA, 19 nt, Artificial Sequence
  Description of Artificial Sequence: Synthetic oligonucleotide
  Antisense strand to SEQ ID NO: 2349592
aauacccggccuuauucau

SEQ ID NO: 2349594 - RNA, 19 nt, Artificial Sequence
  Description of Artificial Sequence: Synthetic oligonucleotide
  Sense strand starting at position 2401 of SEQ ID NO: 1885540
acaucuaacguaugccaua

SEQ ID NO: 2349595 - RNA, 19 nt, Artificial Sequence
  Description of Artificial Sequence: Synthetic oligonucleotide
  Antisense strand to SEQ ID NO: 2349594
uauggcauacguuagaugu

SEQ ID NO: 2349596 - RNA, 19 nt, Artificial Sequence
  Description of Artificial Sequence: Synthetic oligonucleotide
  Sense strand starting at position 2499 of SEQ ID NO: 1885540
gcagaugagaugcauccau

SEQ ID NO: 2349597 - RNA, 19 nt, Artificial Sequence
  Description of Artificial Sequence: Synthetic oligonucleotide
  Antisense strand to SEQ ID NO: 2349596
auggaugcaucucaucugc

SEQ ID NO: 2349598 - RNA, 19 nt, Artificial Sequence
  Description of Artificial Sequence: Synthetic oligonucleotide
  Sense strand starting at position 2506 of SEQ ID NO: 1885540
agaugcauccauggaaaug

SEQ ID NO: 2349599 - RNA, 19 nt, Artificial Sequence
  Description of Artificial Sequence: Synthetic oligonucleotide
  Antisense strand to SEQ ID NO: 2349598
cauuuccauggaugcaucu

SEQ ID NO: 2349600 - RNA, 19 nt, Artificial Sequence
  Description of Artificial Sequence: Synthetic oligonucleotide
  Sense strand starting at position 2556 of SEQ ID NO: 1885540
gaaugugugcuguaggaau

SEQ ID NO: 2349601 - RNA, 19 nt, Artificial Sequence
  Description of Artificial Sequence: Synthetic oligonucleotide
  Antisense strand to SEQ ID NO: 2349600
auuccuacagcacacauuc

SEQ ID NO: 2349602 - RNA, 19 nt, Artificial Sequence
  Description of Artificial Sequence: Synthetic oligonucleotide
  Sense strand starting at position 2675 of SEQ ID NO: 1885540
agguacuuguuauuccaaa

SEQ ID NO: 2349603 - RNA, 19 nt, Artificial Sequence
  Description of Artificial Sequence: Synthetic oligonucleotide
  Antisense strand to SEQ ID NO: 2349602
uuuggaauaacaaguaccu

SEQ ID NO: 2349604 - RNA, 19 nt, Artificial Sequence
  Description of Artificial Sequence: Synthetic oligonucleotide
  Sense strand starting at position 2676 of SEQ ID NO: 1885540
gguacuuguuauuccaaau

SEQ ID NO: 2349605 - RNA, 19 nt, Artificial Sequence
  Description of Artificial Sequence: Synthetic oligonucleotide
  Antisense strand to SEQ ID NO: 2349604
auuuggaauaacaaguacc

SEQ ID NO: 2349606 - RNA, 19 nt, Artificial Sequence
  Description of Artificial Sequence: Synthetic oligonucleotide
  Sense strand starting at position 2803 of SEQ ID NO: 1885540
guggucuggagacaucagu

SEQ ID NO: 2349607 - RNA, 19 nt, Artificial Sequence
  Description of Artificial Sequence: Synthetic oligonucleotide
  Antisense strand to SEQ ID NO: 2349606
acugaugucuccagaccac

SEQ ID NO: 2349608 - RNA, 19 nt, Artificial Sequence
  Description of Artificial Sequence: Synthetic oligonucleotide
  Sense strand starting at position 2933 of SEQ ID NO: 1885540
augggugaguucuuccuaa

SEQ ID NO: 2349609 - RNA, 19 nt, Artificial Sequence
  Description of Artificial Sequence: Synthetic oligonucleotide
  Antisense strand to SEQ ID NO: 2349608
uuaggaagaacucacccau

SEQ ID NO: 2349610 - RNA, 19 nt, Artificial Sequence
  Description of Artificial Sequence: Synthetic oligonucleotide
  Sense strand starting at position 2965 of SEQ ID NO: 1885540
ugugccauggccugaauua

SEQ ID NO: 2349611 - RNA, 19 nt, Artificial Sequence
  Description of Artificial Sequence: Synthetic oligonucleotide
  Antisense strand to SEQ ID NO: 2349610
uaauucaggccauggcaca

SEQ ID NO: 2349612 - RNA, 19 nt, Artificial Sequence
  Description of Artificial Sequence: Synthetic oligonucleotide
  Sense strand starting at position 2966 of SEQ ID NO: 1885540
gugccauggccugaauuac

SEQ ID NO: 2349613 - RNA, 19 nt, Artificial Sequence
  Description of Artificial Sequence: Synthetic oligonucleotide
  Antisense strand to SEQ ID NO: 2349612
guaauucaggccauggcac

SEQ ID NO: 2349614 - RNA, 19 nt, Artificial Sequence
  Description of Artificial Sequence: Synthetic oligonucleotide
  Sense strand starting at position 2975 of SEQ ID NO: 1885540
ccugaauuaccuggaccuu

SEQ ID NO: 2349615 - RNA, 19 nt, Artificial Sequence
  Description of Artificial Sequence: Synthetic oligonucleotide
  Antisense strand to SEQ ID NO: 2349614
aagguccagguaauucagg

SEQ ID NO: 2349616 - RNA, 19 nt, Artificial Sequence
  Description of Artificial Sequence: Synthetic oligonucleotide
  Sense strand starting at position 2981 of SEQ ID NO: 1885540
uuaccuggaccuugaaaca

SEQ ID NO: 2349617 - RNA, 19 nt, Artificial Sequence
  Description of Artificial Sequence: Synthetic oligonucleotide
  Antisense strand to SEQ ID NO: 2349616
uguuucaagguccagguaa

SEQ ID NO: 2349618 - RNA, 19 nt, Artificial Sequence
  Description of Artificial Sequence: Synthetic oligonucleotide
  Sense strand starting at position 3022 of SEQ ID NO: 1885540
uuugcccaccugugauauu

SEQ ID NO: 2349619 - RNA, 19 nt, Artificial Sequence
  Description of Artificial Sequence: Synthetic oligonucleotide
  Antisense strand to SEQ ID NO: 2349618
aauaucacaggugggcaaa

SEQ ID NO: 2349620 - RNA, 19 nt, Artificial Sequence
  Description of Artificial Sequence: Synthetic oligonucleotide
  Sense strand starting at position 3111 of SEQ ID NO: 1885540
caagauauuggcugggugu

SEQ ID NO: 2349621 - RNA, 19 nt, Artificial Sequence
  Description of Artificial Sequence: Synthetic oligonucleotide
  Antisense strand to SEQ ID NO: 2349620
acacccagccaauaucuug

SEQ ID NO: 2349622 - RNA, 19 nt, Artificial Sequence
  Description of Artificial Sequence: Synthetic oligonucleotide
  Sense strand starting at position 3471 of SEQ ID NO: 1885540
ccuccuagggcuuaacaua

SEQ ID NO: 2349623 - RNA, 19 nt, Artificial Sequence
  Description of Artificial Sequence: Synthetic oligonucleotide
  Antisense strand to SEQ ID NO: 2349622
uauguuaagcccuaggagg

SEQ ID NO: 2349624 - RNA, 19 nt, Artificial Sequence
  Description of Artificial Sequence: Synthetic oligonucleotide
  Sense strand starting at position 3553 of SEQ ID NO: 1885540
agaaguguuucugauuuac

SEQ ID NO: 2349625 - RNA, 19 nt, Artificial Sequence
  Description of Artificial Sequence: Synthetic oligonucleotide
  Antisense strand to SEQ ID NO: 2349624
guaaaucagaaacacuucu

SEQ ID NO: 2349626 - RNA, 19 nt, Artificial Sequence
  Description of Artificial Sequence: Synthetic oligonucleotide
  Sense strand starting at position 3584 of SEQ ID NO: 1885540
uuuggaauauguccuuaug

SEQ ID NO: 2349627 - RNA, 19 nt, Artificial Sequence
  Description of Artificial Sequence: Synthetic oligonucleotide
  Antisense strand to SEQ ID NO: 2349626
cauaaggacauauuccaaa

SEQ ID NO: 2349628 - RNA, 19 nt, Artificial Sequence
  Description of Artificial Sequence: Synthetic oligonucleotide
  Sense strand starting at position 3593 of SEQ ID NO: 1885540
uguccuuaugcccaguuaa

SEQ ID NO: 2349629 - RNA, 19 nt, Artificial Sequence
  Description of Artificial Sequence: Synthetic oligonucleotide
  Antisense strand to SEQ ID NO: 2349628
uuaacugggcauaaggaca

SEQ ID NO: 2349630 - RNA, 19 nt, Artificial Sequence
  Description of Artificial Sequence: Synthetic oligonucleotide
  Sense strand starting at position 3665 of SEQ ID NO: 1885540
gagcauggccucugaacau

SEQ ID NO: 2349631 - RNA, 19 nt, Artificial Sequence
  Description of Artificial Sequence: Synthetic oligonucleotide
  Antisense strand to SEQ ID NO: 2349630
auguucagaggccaugcuc

SEQ ID NO: 2349632 - RNA, 19 nt, Artificial Sequence
  Description of Artificial Sequence: Synthetic oligonucleotide
  Sense strand starting at position 3739 of SEQ ID NO: 1885540
ggaugcucauccuuuacua

SEQ ID NO: 2349633 - RNA, 19 nt, Artificial Sequence
  Description of Artificial Sequence: Synthetic oligonucleotide
  Antisense strand to SEQ ID NO: 2349632
uaguaaaggaugagcaucc

SEQ ID NO: 2349634 - RNA, 19 nt, Artificial Sequence
  Description of Artificial Sequence: Synthetic oligonucleotide
  Sense strand starting at position 3769 of SEQ ID NO: 1885540
uuuauaucauagucagaca

SEQ ID NO: 2349635 - RNA, 19 nt, Artificial Sequence
  Description of Artificial Sequence: Synthetic oligonucleotide
  Antisense strand to SEQ ID NO: 2349634
ugucugacuaugauauaaa

SEQ ID NO: 2349636 - RNA, 19 nt, Artificial Sequence
  Description of Artificial Sequence: Synthetic oligonucleotide
  Sense strand starting at position 84 of SEQ ID NO: 1885541
caaugcauguccgggauua

SEQ ID NO: 2349637 - RNA, 19 nt, Artificial Sequence
  Description of Artificial Sequence: Synthetic oligonucleotide
  Antisense strand to SEQ ID NO: 2349636
uaaucccggacaugcauug

SEQ ID NO: 2349638 - RNA, 19 nt, Artificial Sequence
  Description of Artificial Sequence: Synthetic oligonucleotide
  Sense strand starting at position 85 of SEQ ID NO: 1885541
aaugcauguccgggauuac

SEQ ID NO: 2349639 - RNA, 19 nt, Artificial Sequence
  Description of Artificial Sequence: Synthetic oligonucleotide
  Antisense strand to SEQ ID NO: 2349638
guaaucccggacaugcauu

SEQ ID NO: 2349640 - RNA, 19 nt, Artificial Sequence
  Description of Artificial Sequence: Synthetic oligonucleotide
  Sense strand starting at position 135 of SEQ ID NO: 1885541
gaagaauucuccugagucu

SEQ ID NO: 2349641 - RNA, 19 nt, Artificial Sequence
  Description of Artificial Sequence: Synthetic oligonucleotide
  Antisense strand to SEQ ID NO: 2349640
agacucaggagaauucuuc

SEQ ID NO: 2349642 - RNA, 19 nt, Artificial Sequence
  Description of Artificial Sequence: Synthetic oligonucleotide
  Sense strand starting at position 263 of SEQ ID NO: 1885541
uuggcagcccuaggauauu

SEQ ID NO: 2349643 - RNA, 19 nt, Artificial Sequence
  Description of Artificial Sequence: Synthetic oligonucleotide
  Antisense strand to SEQ ID NO: 2349642
aauauccuagggcugccaa

SEQ ID NO: 2349644 - RNA, 19 nt, Artificial Sequence
  Description of Artificial Sequence: Synthetic oligonucleotide
  Sense strand starting at position 504 of SEQ ID NO: 1885541
auccaacaucgucaugaau

SEQ ID NO: 2349645 - RNA, 19 nt, Artificial Sequence
  Description of Artificial Sequence: Synthetic oligonucleotide
  Antisense strand to SEQ ID NO: 2349644
auucaugacgauguuggau

SEQ ID NO: 2349646 - RNA, 19 nt, Artificial Sequence
  Description of Artificial Sequence: Synthetic oligonucleotide
  Sense strand starting at position 506 of SEQ ID NO: 1885541
ccaacaucgucaugaauua

SEQ ID NO: 2349647 - RNA, 19 nt, Artificial Sequence
  Description of Artificial Sequence: Synthetic oligonucleotide
  Antisense strand to SEQ ID NO: 2349646
uaauucaugacgauguugg

SEQ ID NO: 2349648 - RNA, 19 nt, Artificial Sequence
  Description of Artificial Sequence: Synthetic oligonucleotide
  Sense strand starting at position 713 of SEQ ID NO: 1885541
cugucucucuuggguguaa

SEQ ID NO: 2349649 - RNA, 19 nt, Artificial Sequence
  Description of Artificial Sequence: Synthetic oligonucleotide
  Antisense strand to SEQ ID NO: 2349648
uuacacccaagagagacag

SEQ ID NO: 2349650 - RNA, 19 nt, Artificial Sequence
  Description of Artificial Sequence: Synthetic oligonucleotide
  Sense strand starting at position 734 of SEQ ID NO: 1885541
auauaaucuugaggcaaac

SEQ ID NO: 2349651 - RNA, 19 nt, Artificial Sequence
  Description of Artificial Sequence: Synthetic oligonucleotide
  Antisense strand to SEQ ID NO: 2349650
guuugccucaagauuauau

SEQ ID NO: 2349652 - RNA, 19 nt, Artificial Sequence
  Description of Artificial Sequence: Synthetic oligonucleotide
  Sense strand starting at position 765 of SEQ ID NO: 1885541
uuucuuacgccuugaaaua

SEQ ID NO: 2349653 - RNA, 19 nt, Artificial Sequence
  Description of Artificial Sequence: Synthetic oligonucleotide
  Antisense strand to SEQ ID NO: 2349652
uauuucaaggcguaagaaa

SEQ ID NO: 2349654 - RNA, 19 nt, Artificial Sequence
  Description of Artificial Sequence: Synthetic oligonucleotide
  Sense strand starting at position 766 of SEQ ID NO: 1885541
uucuuacgccuugaaauag

SEQ ID NO: 2349655 - RNA, 19 nt, Artificial Sequence
  Description of Artificial Sequence: Synthetic oligonucleotide
  Antisense strand to SEQ ID NO: 2349654
cuauuucaaggcguaagaa

SEQ ID NO: 2349656 - RNA, 19 nt, Artificial Sequence
  Description of Artificial Sequence: Synthetic oligonucleotide
  Sense strand starting at position 1118 of SEQ ID NO: 1885541
ucaagugguugcuugggau

SEQ ID NO: 2349657 - RNA, 19 nt, Artificial Sequence
  Description of Artificial Sequence: Synthetic oligonucleotide
  Antisense strand to SEQ ID NO: 2349656
aucccaagcaaccacuuga

SEQ ID NO: 2349658 - RNA, 19 nt, Artificial Sequence
  Description of Artificial Sequence: Synthetic oligonucleotide
  Sense strand starting at position 1285 of SEQ ID NO: 1885541
cacgguguucugugaaguu

SEQ ID NO: 2349659 - RNA, 19 nt, Artificial Sequence
  Description of Artificial Sequence: Synthetic oligonucleotide
  Antisense strand to SEQ ID NO: 2349658
aacuucacagaacaccgug

SEQ ID NO: 2349660 - RNA, 19 nt, Artificial Sequence
  Description of Artificial Sequence: Synthetic oligonucleotide
  Sense strand starting at position 1287 of SEQ ID NO: 1885541
cgguguucugugaaguuua

SEQ ID NO: 2349661 - RNA, 19 nt, Artificial Sequence
  Description of Artificial Sequence: Synthetic oligonucleotide
  Antisense strand to SEQ ID NO: 2349660
uaaacuucacagaacaccg

SEQ ID NO: 2349662 - RNA, 19 nt, Artificial Sequence
  Description of Artificial Sequence: Synthetic oligonucleotide
  Sense strand starting at position 2257 of SEQ ID NO: 1885541
ggacuuagauccgcuuucu

SEQ ID NO: 2349663 - RNA, 19 nt, Artificial Sequence
  Description of Artificial Sequence: Synthetic oligonucleotide
  Antisense strand to SEQ ID NO: 2349662
agaaagcggaucuaagucc

SEQ ID NO: 2349664 - RNA, 19 nt, Artificial Sequence
  Description of Artificial Sequence: Synthetic oligonucleotide
  Sense strand starting at position 2615 of SEQ ID NO: 1885541
aucuaauccgccuagauau

SEQ ID NO: 2349665 - RNA, 19 nt, Artificial Sequence
  Description of Artificial Sequence: Synthetic oligonucleotide
  Antisense strand to SEQ ID NO: 2349664
auaucuaggcggauuagau

SEQ ID NO: 2349666 - RNA, 19 nt, Artificial Sequence
  Description of Artificial Sequence: Synthetic oligonucleotide
  Sense strand starting at position 2617 of SEQ ID NO: 1885541
cuaauccgccuagauauaa

SEQ ID NO: 2349667 - RNA, 19 nt, Artificial Sequence
  Description of Artificial Sequence: Synthetic oligonucleotide
  Antisense strand to SEQ ID NO: 2349666
uuauaucuaggcggauuag

SEQ ID NO: 2349668 - RNA, 19 nt, Artificial Sequence
  Description of Artificial Sequence: Synthetic oligonucleotide
  Sense strand starting at position 3088 of SEQ ID NO: 1885541
uugaaaugguguuauuaga

SEQ ID NO: 2349669 - RNA, 19 nt, Artificial Sequence
  Description of Artificial Sequence: Synthetic oligonucleotide
  Antisense strand to SEQ ID NO: 2349668
ucuaauaacaccauuucaa

SEQ ID NO: 2349670 - RNA, 19 nt, Artificial Sequence
  Description of Artificial Sequence: Synthetic oligonucleotide
  Sense strand starting at position 3213 of SEQ ID NO: 1885541
ugcucauauuuagaagaca

SEQ ID NO: 2349671 - RNA, 19 nt, Artificial Sequence
  Description of Artificial Sequence: Synthetic oligonucleotide
  Antisense strand to SEQ ID NO: 2349670
ugucuucuaaauaugagca

SEQ ID NO: 2349672 - RNA, 19 nt, Artificial Sequence
  Description of Artificial Sequence: Synthetic oligonucleotide
  Sense strand starting at position 3235 of SEQ ID NO: 1885541
ucauaucauugucauuguu

SEQ ID NO: 2349673 - RNA, 19 nt, Artificial Sequence
  Description of Artificial Sequence: Synthetic oligonucleotide
  Antisense strand to SEQ ID NO: 2349672
aacaaugacaaugauauga

SEQ ID NO: 2349674 - RNA, 19 nt, Artificial Sequence
  Description of Artificial Sequence: Synthetic oligonucleotide
  Sense strand starting at position 3677 of SEQ ID NO: 1885541
gguguuaaguugccagugu

SEQ ID NO: 2349675 - RNA, 19 nt, Artificial Sequence
  Description of Artificial Sequence: Synthetic oligonucleotide
  Antisense strand to SEQ ID NO: 2349674
acacuggcaacuuaacacc

SEQ ID NO: 2349676 - RNA, 19 nt, Artificial Sequence
  Description of Artificial Sequence: Synthetic oligonucleotide
  Sense strand starting at position 3678 of SEQ ID NO: 1885541
guguuaaguugccagugua

SEQ ID NO: 2349677 - RNA, 19 nt, Artificial Sequence
  Description of Artificial Sequence: Synthetic oligonucleotide
  Antisense strand to SEQ ID NO: 2349676
uacacuggcaacuuaacac

SEQ ID NO: 2349678 - RNA, 19 nt, Artificial Sequence
  Description of Artificial Sequence: Synthetic oligonucleotide
  Sense strand starting at position 3681 of SEQ ID NO: 1885541
uuaaguugccaguguauga

SEQ ID NO: 2349679 - RNA, 19 nt, Artificial Sequence
  Description of Artificial Sequence: Synthetic oligonucleotide
  Antisense strand to SEQ ID NO: 2349678
ucauacacuggcaacuuaa

SEQ ID NO: 2349680 - RNA, 19 nt, Artificial Sequence
  Description of Artificial Sequence: Synthetic oligonucleotide
  Sense strand starting at position 3708 of SEQ ID NO: 1885541
gcguuauuaaacgaacgca

SEQ ID NO: 2349681 - RNA, 19 nt, Artificial Sequence
  Description of Artificial Sequence: Synthetic oligonucleotide
  Antisense strand to SEQ ID NO: 2349680
ugcguucguuuaauaacgc

SEQ ID NO: 2349682 - RNA, 19 nt, Artificial Sequence
  Description of Artificial Sequence: Synthetic oligonucleotide
  Sense strand starting at position 3720 of SEQ ID NO: 1885541
gaacgcagcuuguacauau

SEQ ID NO: 2349683 - RNA, 19 nt, Artificial Sequence
  Description of Artificial Sequence: Synthetic oligonucleotide
  Antisense strand to SEQ ID NO: 2349682
auauguacaagcugcguuc

SEQ ID NO: 2349684 - RNA, 19 nt, Artificial Sequence
  Description of Artificial Sequence: Synthetic oligonucleotide
  Sense strand starting at position 38 of SEQ ID NO: 1885542
cugagcuugcuauauagua

SEQ ID NO: 2349685 - RNA, 19 nt, Artificial Sequence
  Description of Artificial Sequence: Synthetic oligonucleotide
  Antisense strand to SEQ ID NO: 2349684
uacuauauagcaagcucag

SEQ ID NO: 2349686 - RNA, 19 nt, Artificial Sequence
  Description of Artificial Sequence: Synthetic oligonucleotide
  Sense strand starting at position 73 of SEQ ID NO: 1885542
ggcccacucucugcugaua

SEQ ID NO: 2349687 - RNA, 19 nt, Artificial Sequence
  Description of Artificial Sequence: Synthetic oligonucleotide
  Antisense strand to SEQ ID NO: 2349686
uaucagcagagagugggcc

SEQ ID NO: 2349688 - RNA, 19 nt, Artificial Sequence
  Description of Artificial Sequence: Synthetic oligonucleotide
  Sense strand starting at position 262 of SEQ ID NO: 1885542
gauauugaguaugaaugga

SEQ ID NO: 2349689 - RNA, 19 nt, Artificial Sequence
  Description of Artificial Sequence: Synthetic oligonucleotide
  Antisense strand to SEQ ID NO: 2349688
uccauucauacucaauauc

SEQ ID NO: 2349690 - RNA, 19 nt, Artificial Sequence
  Description of Artificial Sequence: Synthetic oligonucleotide
  Sense strand starting at position 278 of SEQ ID NO: 1885542
ggauaugagugagaaacag

SEQ ID NO: 2349691 - RNA, 19 nt, Artificial Sequence
  Description of Artificial Sequence: Synthetic oligonucleotide
  Antisense strand to SEQ ID NO: 2349690
cuguuucucacucauaucc

SEQ ID NO: 2349692 - RNA, 19 nt, Artificial Sequence
  Description of Artificial Sequence: Synthetic oligonucleotide
  Sense strand starting at position 339 of SEQ ID NO: 1885542
gcagguauccagugugaga

SEQ ID NO: 2349693 - RNA, 19 nt, Artificial Sequence
  Description of Artificial Sequence: Synthetic oligonucleotide
  Antisense strand to SEQ ID NO: 2349692
ucucacacuggauaccugc

SEQ ID NO: 2349694 - RNA, 19 nt, Artificial Sequence
  Description of Artificial Sequence: Synthetic oligonucleotide
  Sense strand starting at position 341 of SEQ ID NO: 1885542
agguauccagugugagaug

SEQ ID NO: 2349695 - RNA, 19 nt, Artificial Sequence
  Description of Artificial Sequence: Synthetic oligonucleotide
  Antisense strand to SEQ ID NO: 2349694
caucucacacuggauaccu

SEQ ID NO: 2349696 - RNA, 19 nt, Artificial Sequence
  Description of Artificial Sequence: Synthetic oligonucleotide
  Sense strand starting at position 485 of SEQ ID NO: 1885542
gcuggaguugguuggacaa

SEQ ID NO: 2349697 - RNA, 19 nt, Artificial Sequence
  Description of Artificial Sequence: Synthetic oligonucleotide
  Antisense strand to SEQ ID NO: 2349696
uuguccaaccaacuccagc

SEQ ID NO: 2349698 - RNA, 19 nt, Artificial Sequence
  Description of Artificial Sequence: Synthetic oligonucleotide
  Sense strand starting at position 497 of SEQ ID NO: 1885542
uggacaaguuaauccuaau

SEQ ID NO: 2349699 - RNA, 19 nt, Artificial Sequence
  Description of Artificial Sequence: Synthetic oligonucleotide
  Antisense strand to SEQ ID NO: 2349698
auuaggauuaacuugucca

SEQ ID NO: 2349700 - RNA, 19 nt, Artificial Sequence
  Description of Artificial Sequence: Synthetic oligonucleotide
  Sense strand starting at position 619 of SEQ ID NO: 1885542
aggacacggcccuguauua

SEQ ID NO: 2349701 - RNA, 19 nt, Artificial Sequence
  Description of Artificial Sequence: Synthetic oligonucleotide
  Antisense strand to SEQ ID NO: 2349700
uaauacagggccguguccu

SEQ ID NO: 2349702 - RNA, 19 nt, Artificial Sequence
  Description of Artificial Sequence: Synthetic oligonucleotide
  Sense strand starting at position 629 of SEQ ID NO: 1885542
ccuguauuaguguaccaga

SEQ ID NO: 2349703 - RNA, 19 nt, Artificial Sequence
  Description of Artificial Sequence: Synthetic oligonucleotide
  Antisense strand to SEQ ID NO: 2349702
ucugguacacuaauacagg

SEQ ID NO: 2349704 - RNA, 19 nt, Artificial Sequence
  Description of Artificial Sequence: Synthetic oligonucleotide
  Sense strand starting at position 755 of SEQ ID NO: 1885542
ucuggagacuuauuagguu

SEQ ID NO: 2349705 - RNA, 19 nt, Artificial Sequence
  Description of Artificial Sequence: Synthetic oligonucleotide
  Antisense strand to SEQ ID NO: 2349704
aaccuaauaagucuccaga

SEQ ID NO: 2349706 - RNA, 19 nt, Artificial Sequence
  Description of Artificial Sequence: Synthetic oligonucleotide
  Sense strand starting at position 759 of SEQ ID NO: 1885542
gagacuuauuagguuguga

SEQ ID NO: 2349707 - RNA, 19 nt, Artificial Sequence
  Description of Artificial Sequence: Synthetic oligonucleotide
  Antisense strand to SEQ ID NO: 2349706
ucacaaccuaauaagucuc

SEQ ID NO: 2349708 - RNA, 19 nt, Artificial Sequence
  Description of Artificial Sequence: Synthetic oligonucleotide
  Sense strand starting at position 761 of SEQ ID NO: 1885542
gacuuauuagguugugaua

SEQ ID NO: 2349709 - RNA, 19 nt, Artificial Sequence
  Description of Artificial Sequence: Synthetic oligonucleotide
  Antisense strand to SEQ ID NO: 2349708
uaucacaaccuaauaaguc

SEQ ID NO: 2349710 - RNA, 19 nt, Artificial Sequence
  Description of Artificial Sequence: Synthetic oligonucleotide
  Sense strand starting at position 787 of SEQ ID NO: 1885542
augguuauuuaucaugaac

SEQ ID NO: 2349711 - RNA, 19 nt, Artificial Sequence
  Description of Artificial Sequence: Synthetic oligonucleotide
  Antisense strand to SEQ ID NO: 2349710
guucaugauaaauaaccau

SEQ ID NO: 2349712 - RNA, 19 nt, Artificial Sequence
  Description of Artificial Sequence: Synthetic oligonucleotide
  Sense strand starting at position 925 of SEQ ID NO: 1885542
uuguuaacaucuguugaua

SEQ ID NO: 2349713 - RNA, 19 nt, Artificial Sequence
  Description of Artificial Sequence: Synthetic oligonucleotide
  Antisense strand to SEQ ID NO: 2349712
uaucaacagauguuaacaa

SEQ ID NO: 2349714 - RNA, 19 nt, Artificial Sequence
  Description of Artificial Sequence: Synthetic oligonucleotide
  Sense strand starting at position 1605 of SEQ ID NO: 1885542
gcuguuauaccagagaagc

SEQ ID NO: 2349715 - RNA, 19 nt, Artificial Sequence
  Description of Artificial Sequence: Synthetic oligonucleotide
  Antisense strand to SEQ ID NO: 2349714
gcuucucugguauaacagc

SEQ ID NO: 2349716 - RNA, 19 nt, Artificial Sequence
  Description of Artificial Sequence: Synthetic oligonucleotide
  Sense strand starting at position 2049 of SEQ ID NO: 1885542
gcgggucuuccagauugac

SEQ ID NO: 2349717 - RNA, 19 nt, Artificial Sequence
  Description of Artificial Sequence: Synthetic oligonucleotide
  Antisense strand to SEQ ID NO: 2349716
gucaaucuggaagacccgc

SEQ ID NO: 2349718 - RNA, 19 nt, Artificial Sequence
  Description of Artificial Sequence: Synthetic oligonucleotide
  Sense strand starting at position 2140 of SEQ ID NO: 1885542
ggaacagcuaugggaucau

SEQ ID NO: 2349719 - RNA, 19 nt, Artificial Sequence
  Description of Artificial Sequence: Synthetic oligonucleotide
  Antisense strand to SEQ ID NO: 2349718
augaucccauagcuguucc

SEQ ID NO: 2349720 - RNA, 19 nt, Artificial Sequence
  Description of Artificial Sequence: Synthetic oligonucleotide
  Sense strand starting at position 2144 of SEQ ID NO: 1885542
cagcuaugggaucaucagu

SEQ ID NO: 2349721 - RNA, 19 nt, Artificial Sequence
  Description of Artificial Sequence: Synthetic oligonucleotide
  Antisense strand to SEQ ID NO: 2349720
acugaugaucccauagcug

SEQ ID NO: 2349722 - RNA, 19 nt, Artificial Sequence
  Description of Artificial Sequence: Synthetic oligonucleotide
  Sense strand starting at position 2149 of SEQ ID NO: 1885542
augggaucaucagugugga

SEQ ID NO: 2349723 - RNA, 19 nt, Artificial Sequence
  Description of Artificial Sequence: Synthetic oligonucleotide
  Antisense strand to SEQ ID NO: 2349722
uccacacugaugaucccau

SEQ ID NO: 2349724 - RNA, 19 nt, Artificial Sequence
  Description of Artificial Sequence: Synthetic oligonucleotide
  Sense strand starting at position 2378 of SEQ ID NO: 1885542
ggagcccucgaguaaucau

SEQ ID NO: 2349725 - RNA, 19 nt, Artificial Sequence
  Description of Artificial Sequence: Synthetic oligonucleotide
  Antisense strand to SEQ ID NO: 2349724
augauuacucgagggcucc

SEQ ID NO: 2349726 - RNA, 19 nt, Artificial Sequence
  Description of Artificial Sequence: Synthetic oligonucleotide
  Sense strand starting at position 2723 of SEQ ID NO: 1885542
aagugcguucccuaaagau

SEQ ID NO: 2349727 - RNA, 19 nt, Artificial Sequence
  Description of Artificial Sequence: Synthetic oligonucleotide
  Antisense strand to SEQ ID NO: 2349726
aucuuuagggaacgcacuu

SEQ ID NO: 2349728 - RNA, 19 nt, Artificial Sequence
  Description of Artificial Sequence: Synthetic oligonucleotide
  Sense strand starting at position 2892 of SEQ ID NO: 1885542
gugaguccuaaguaugugu

SEQ ID NO: 2349729 - RNA, 19 nt, Artificial Sequence
  Description of Artificial Sequence: Synthetic oligonucleotide
  Antisense strand to SEQ ID NO: 2349728
acacauacuuaggacucac

SEQ ID NO: 2349730 - RNA, 19 nt, Artificial Sequence
  Description of Artificial Sequence: Synthetic oligonucleotide
  Sense strand starting at position 2903 of SEQ ID NO: 1885542
guaugugugcgagaccaga

SEQ ID NO: 2349731 - RNA, 19 nt, Artificial Sequence
  Description of Artificial Sequence: Synthetic oligonucleotide
  Antisense strand to SEQ ID NO: 2349730
ucuggucucgcacacauac

SEQ ID NO: 2349732 - RNA, 19 nt, Artificial Sequence
  Description of Artificial Sequence: Synthetic oligonucleotide
  Sense strand starting at position 2969 of SEQ ID NO: 1885542
ccgugugucguguuuccaa

SEQ ID NO: 2349733 - RNA, 19 nt, Artificial Sequence
  Description of Artificial Sequence: Synthetic oligonucleotide
  Antisense strand to SEQ ID NO: 2349732
uuggaaacacgacacacgg

SEQ ID NO: 2349734 - RNA, 19 nt, Artificial Sequence
  Description of Artificial Sequence: Synthetic oligonucleotide
  Sense strand starting at position 2971 of SEQ ID NO: 1885542
gugugucguguuuccaaac

SEQ ID NO: 2349735 - RNA, 19 nt, Artificial Sequence
  Description of Artificial Sequence: Synthetic oligonucleotide
  Antisense strand to SEQ ID NO: 2349734
guuuggaaacacgacacac

SEQ ID NO: 2349736 - RNA, 19 nt, Artificial Sequence
  Description of Artificial Sequence: Synthetic oligonucleotide
  Sense strand starting at position 3023 of SEQ ID NO: 1885542
agaaaucucucgcuucucu

SEQ ID NO: 2349737 - RNA, 19 nt, Artificial Sequence
  Description of Artificial Sequence: Synthetic oligonucleotide
  Antisense strand to SEQ ID NO: 2349736
agagaagcgagagauuucu

SEQ ID NO: 2349738 - RNA, 19 nt, Artificial Sequence
  Description of Artificial Sequence: Synthetic oligonucleotide
  Sense strand starting at position 3064 of SEQ ID NO: 1885542
cuggaagauucugacugag

SEQ ID NO: 2349739 - RNA, 19 nt, Artificial Sequence
  Description of Artificial Sequence: Synthetic oligonucleotide
  Antisense strand to SEQ ID NO: 2349738
cucagucagaaucuuccag

SEQ ID NO: 2349740 - RNA, 19 nt, Artificial Sequence
  Description of Artificial Sequence: Synthetic oligonucleotide
  Sense strand starting at position 3142 of SEQ ID NO: 1885542
guucauaaggguuguugga

SEQ ID NO: 2349741 - RNA, 19 nt, Artificial Sequence
  Description of Artificial Sequence: Synthetic oligonucleotide
  Antisense strand to SEQ ID NO: 2349740
uccaacaacccuuaugaac

SEQ ID NO: 2349742 - RNA, 19 nt, Artificial Sequence
  Description of Artificial Sequence: Synthetic oligonucleotide
  Sense strand starting at position 3151 of SEQ ID NO: 1885542
gguuguuggaaccauauga

SEQ ID NO: 2349743 - RNA, 19 nt, Artificial Sequence
  Description of Artificial Sequence: Synthetic oligonucleotide
  Antisense strand to SEQ ID NO: 2349742
ucauaugguuccaacaacc

SEQ ID NO: 2349744 - RNA, 19 nt, Artificial Sequence
  Description of Artificial Sequence: Synthetic oligonucleotide
  Sense strand starting at position 3372 of SEQ ID NO: 1885542
cagguuucuggugaguaca

SEQ ID NO: 2349745 - RNA, 19 nt, Artificial Sequence
  Description of Artificial Sequence: Synthetic oligonucleotide
  Antisense strand to SEQ ID NO: 2349744
uguacucaccagaaaccug

SEQ ID NO: 2349746 - RNA, 19 nt, Artificial Sequence
  Description of Artificial Sequence: Synthetic oligonucleotide
  Sense strand starting at position 3374 of SEQ ID NO: 1885542
gguuucuggugaguacauu

SEQ ID NO: 2349747 - RNA, 19 nt, Artificial Sequence
  Description of Artificial Sequence: Synthetic oligonucleotide
  Antisense strand to SEQ ID NO: 2349746
aauguacucaccagaaacc

SEQ ID NO: 2349748 - RNA, 19 nt, Artificial Sequence
  Description of Artificial Sequence: Synthetic oligonucleotide
  Sense strand starting at position 3548 of SEQ ID NO: 1885542
caaaguaggugcuuuauaa

SEQ ID NO: 2349749 - RNA, 19 nt, Artificial Sequence
  Description of Artificial Sequence: Synthetic oligonucleotide
  Antisense strand to SEQ ID NO: 2349748
uuauaaagcaccuacuuug

SEQ ID NO: 2349750 - RNA, 19 nt, Artificial Sequence
  Description of Artificial Sequence: Synthetic oligonucleotide
  Sense strand starting at position 3771 of SEQ ID NO: 1885542
gguauuguuagagguguaa

SEQ ID NO: 2349751 - RNA, 19 nt, Artificial Sequence
  Description of Artificial Sequence: Synthetic oligonucleotide
  Antisense strand to SEQ ID NO: 2349750
uuacaccucuaacaauacc

SEQ ID NO: 2349752 - RNA, 19 nt, Artificial Sequence
  Description of Artificial Sequence: Synthetic oligonucleotide
  Sense strand starting at position 3775 of SEQ ID NO: 1885542
uuguuagagguguaauagu

SEQ ID NO: 2349753 - RNA, 19 nt, Artificial Sequence
  Description of Artificial Sequence: Synthetic oligonucleotide
  Antisense strand to SEQ ID NO: 2349752
acuauuacaccucuaacaa

SEQ ID NO: 2349754 - RNA, 19 nt, Artificial Sequence
  Description of Artificial Sequence: Synthetic oligonucleotide
  Sense strand starting at position 3782 of SEQ ID NO: 1885542
agguguaauaguuggacca

SEQ ID NO: 2349755 - RNA, 19 nt, Artificial Sequence
  Description of Artificial Sequence: Synthetic oligonucleotide
  Antisense strand to SEQ ID NO: 2349754
ugguccaacuauuacaccu

SEQ ID NO: 2349756 - RNA, 19 nt, Artificial Sequence
  Description of Artificial Sequence: Synthetic oligonucleotide
  Sense strand starting at position 3783 of SEQ ID NO: 1885542
gguguaauaguuggaccaa

SEQ ID NO: 2349757 - RNA, 19 nt, Artificial Sequence
  Description of Artificial Sequence: Synthetic oligonucleotide
  Antisense strand to SEQ ID NO: 2349756
uugguccaacuauuacacc

SEQ ID NO: 2349758 - RNA, 19 nt, Artificial Sequence
  Description of Artificial Sequence: Synthetic oligonucleotide
  Sense strand starting at position 3893 of SEQ ID NO: 1885542
gguaauuuauaccaaugac

SEQ ID NO: 2349759 - RNA, 19 nt, Artificial Sequence
  Description of Artificial Sequence: Synthetic oligonucleotide
  Antisense strand to SEQ ID NO: 2349758
gucauugguauaaauuacc

SEQ ID NO: 2349760 - RNA, 19 nt, Artificial Sequence
  Description of Artificial Sequence: Synthetic oligonucleotide
  Sense strand starting at position 3940 of SEQ ID NO: 1885542
aaugacguuugauuggaaa

SEQ ID NO: 2349761 - RNA, 19 nt, Artificial Sequence
  Description of Artificial Sequence: Synthetic oligonucleotide
  Antisense strand to SEQ ID NO: 2349760
uuuccaaucaaacgucauu

SEQ ID NO: 2349762 - RNA, 19 nt, Artificial Sequence
  Description of Artificial Sequence: Synthetic oligonucleotide
  Sense strand starting at position 3967 of SEQ ID NO: 1885542
gugccacaugucgacaauu

SEQ ID NO: 2349763 - RNA, 19 nt, Artificial Sequence
  Description of Artificial Sequence: Synthetic oligonucleotide
  Antisense strand to SEQ ID NO: 2349762
aauugucgacauguggcac

SEQ ID NO: 2349764 - RNA, 19 nt, Artificial Sequence
  Description of Artificial Sequence: Synthetic oligonucleotide
  Sense strand starting at position 51 of SEQ ID NO: 1885543
cugacacugcaauggaauu

SEQ ID NO: 2349765 - RNA, 19 nt, Artificial Sequence
  Description of Artificial Sequence: Synthetic oligonucleotide
  Antisense strand to SEQ ID NO: 2349764
aauuccauugcagugucag

SEQ ID NO: 2349766 - RNA, 19 nt, Artificial Sequence
  Description of Artificial Sequence: Synthetic oligonucleotide
  Sense strand starting at position 247 of SEQ ID NO: 1885543
ccuccuuaaggguaauacu

SEQ ID NO: 2349767 - RNA, 19 nt, Artificial Sequence
  Description of Artificial Sequence: Synthetic oligonucleotide
  Antisense strand to SEQ ID NO: 2349766
aguauuacccuuaaggagg

SEQ ID NO: 2349768 - RNA, 19 nt, Artificial Sequence
  Description of Artificial Sequence: Synthetic oligonucleotide
  Sense strand starting at position 281 of SEQ ID NO: 1885543
gucagaaaguacucuacca

SEQ ID NO: 2349769 - RNA, 19 nt, Artificial Sequence
  Description of Artificial Sequence: Synthetic oligonucleotide
  Antisense strand to SEQ ID NO: 2349768
ugguagaguacuuucugac

SEQ ID NO: 2349770 - RNA, 19 nt, Artificial Sequence
  Description of Artificial Sequence: Synthetic oligonucleotide
  Sense strand starting at position 289 of SEQ ID NO: 1885543
guacucuaccaugaaaguu

SEQ ID NO: 2349771 - RNA, 19 nt, Artificial Sequence
  Description of Artificial Sequence: Synthetic oligonucleotide
  Antisense strand to SEQ ID NO: 2349770
aacuuucaugguagaguac

SEQ ID NO: 2349772 - RNA, 19 nt, Artificial Sequence
  Description of Artificial Sequence: Synthetic oligonucleotide
  Sense strand starting at position 303 of SEQ ID NO: 1885543
aaguuagauggcgacugaa

SEQ ID NO: 2349773 - RNA, 19 nt, Artificial Sequence
  Description of Artificial Sequence: Synthetic oligonucleotide
  Antisense strand to SEQ ID NO: 2349772
uucagucgccaucuaacuu

SEQ ID NO: 2349774 - RNA, 19 nt, Artificial Sequence
  Description of Artificial Sequence: Synthetic oligonucleotide
  Sense strand starting at position 306 of SEQ ID NO: 1885543
uuagauggcgacugaaaua

SEQ ID NO: 2349775 - RNA, 19 nt, Artificial Sequence
  Description of Artificial Sequence: Synthetic oligonucleotide
  Antisense strand to SEQ ID NO: 2349774
uauuucagucgccaucuaa

SEQ ID NO: 2349776 - RNA, 19 nt, Artificial Sequence
  Description of Artificial Sequence: Synthetic oligonucleotide
  Sense strand starting at position 339 of SEQ ID NO: 1885543
agcccuucuggucauagaa

SEQ ID NO: 2349777 - RNA, 19 nt, Artificial Sequence
  Description of Artificial Sequence: Synthetic oligonucleotide
  Antisense strand to SEQ ID NO: 2349776
uucuaugaccagaagggcu

SEQ ID NO: 2349778 - RNA, 19 nt, Artificial Sequence
  Description of Artificial Sequence: Synthetic oligonucleotide
  Sense strand starting at position 352 of SEQ ID NO: 1885543
auagaagaucucuguaacu

SEQ ID NO: 2349779 - RNA, 19 nt, Artificial Sequence
  Description of Artificial Sequence: Synthetic oligonucleotide
  Antisense strand to SEQ ID NO: 2349778
aguuacagagaucuucuau

SEQ ID NO: 2349780 - RNA, 19 nt, Artificial Sequence
  Description of Artificial Sequence: Synthetic oligonucleotide
  Sense strand starting at position 357 of SEQ ID NO: 1885543
agaucucuguaacuaagau

SEQ ID NO: 2349781 - RNA, 19 nt, Artificial Sequence
  Description of Artificial Sequence: Synthetic oligonucleotide
  Antisense strand to SEQ ID NO: 2349780
aucuuaguuacagagaucu

SEQ ID NO: 2349782 - RNA, 19 nt, Artificial Sequence
  Description of Artificial Sequence: Synthetic oligonucleotide
  Sense strand starting at position 403 of SEQ ID NO: 1885543
aucuaugugcucuagaaug

SEQ ID NO: 2349783 - RNA, 19 nt, Artificial Sequence
  Description of Artificial Sequence: Synthetic oligonucleotide
  Antisense strand to SEQ ID NO: 2349782
cauucuagagcacauagau

SEQ ID NO: 2349784 - RNA, 19 nt, Artificial Sequence
  Description of Artificial Sequence: Synthetic oligonucleotide
  Sense strand starting at position 405 of SEQ ID NO: 1885543
cuaugugcucuagaaugaa

SEQ ID NO: 2349785 - RNA, 19 nt, Artificial Sequence
  Description of Artificial Sequence: Synthetic oligonucleotide
  Antisense strand to SEQ ID NO: 2349784
uucauucuagagcacauag

SEQ ID NO: 2349786 - RNA, 19 nt, Artificial Sequence
  Description of Artificial Sequence: Synthetic oligonucleotide
  Sense strand starting at position 568 of SEQ ID NO: 1885543
ugcuaucuucuaggauaaa

SEQ ID NO: 2349787 - RNA, 19 nt, Artificial Sequence
  Description of Artificial Sequence: Synthetic oligonucleotide
  Antisense strand to SEQ ID NO: 2349786
uuuauccuagaagauagca

SEQ ID NO: 2349788 - RNA, 19 nt, Artificial Sequence
  Description of Artificial Sequence: Synthetic oligonucleotide
  Sense strand starting at position 749 of SEQ ID NO: 1885543
aaaucaaguccuugugaga

SEQ ID NO: 2349789 - RNA, 19 nt, Artificial Sequence
  Description of Artificial Sequence: Synthetic oligonucleotide
  Antisense strand to SEQ ID NO: 2349788
ucucacaaggacuugauuu

SEQ ID NO: 2349790 - RNA, 19 nt, Artificial Sequence
  Description of Artificial Sequence: Synthetic oligonucleotide
  Sense strand starting at position 758 of SEQ ID NO: 1885543
ccuugugagagaggauauu

SEQ ID NO: 2349791 - RNA, 19 nt, Artificial Sequence
  Description of Artificial Sequence: Synthetic oligonucleotide
  Antisense strand to SEQ ID NO: 2349790
aauauccucucucacaagg

SEQ ID NO: 2349792 - RNA, 19 nt, Artificial Sequence
  Description of Artificial Sequence: Synthetic oligonucleotide
  Sense strand starting at position 799 of SEQ ID NO: 1885543
auauuuguguucuuguacu

SEQ ID NO: 2349793 - RNA, 19 nt, Artificial Sequence
  Description of Artificial Sequence: Synthetic oligonucleotide
  Antisense strand to SEQ ID NO: 2349792
aguacaagaacacaaauau

SEQ ID NO: 2349794 - RNA, 19 nt, Artificial Sequence
  Description of Artificial Sequence: Synthetic oligonucleotide
  Sense strand starting at position 827 of SEQ ID NO: 1885543
ccaguucuaagcgaagaac

SEQ ID NO: 2349795 - RNA, 19 nt, Artificial Sequence
  Description of Artificial Sequence: Synthetic oligonucleotide
  Antisense strand to SEQ ID NO: 2349794
guucuucgcuuagaacugg

SEQ ID NO: 2349796 - RNA, 19 nt, Artificial Sequence
  Description of Artificial Sequence: Synthetic oligonucleotide
  Sense strand starting at position 982 of SEQ ID NO: 1885543
auaugaguccuuugagaug

SEQ ID NO: 2349797 - RNA, 19 nt, Artificial Sequence
  Description of Artificial Sequence: Synthetic oligonucleotide
  Antisense strand to SEQ ID NO: 2349796
caucucaaaggacucauau

SEQ ID NO: 2349798 - RNA, 19 nt, Artificial Sequence
  Description of Artificial Sequence: Synthetic oligonucleotide
  Sense strand starting at position 991 of SEQ ID NO: 1885543
cuuugagaugcuuaugaua

SEQ ID NO: 2349799 - RNA, 19 nt, Artificial Sequence
  Description of Artificial Sequence: Synthetic oligonucleotide
  Antisense strand to SEQ ID NO: 2349798
uaucauaagcaucucaaag

SEQ ID NO: 2349800 - RNA, 19 nt, Artificial Sequence
  Description of Artificial Sequence: Synthetic oligonucleotide
  Sense strand starting at position 1097 of SEQ ID NO: 1885543
ugcucugguaaagaguuaa

SEQ ID NO: 2349801 - RNA, 19 nt, Artificial Sequence
  Description of Artificial Sequence: Synthetic oligonucleotide
  Antisense strand to SEQ ID NO: 2349800
uuaacucuuuaccagagca

SEQ ID NO: 2349802 - RNA, 19 nt, Artificial Sequence
  Description of Artificial Sequence: Synthetic oligonucleotide
  Sense strand starting at position 1227 of SEQ ID NO: 1885543
uucuaaagugaucaugcau

SEQ ID NO: 2349803 - RNA, 19 nt, Artificial Sequence
  Description of Artificial Sequence: Synthetic oligonucleotide
  Antisense strand to SEQ ID NO: 2349802
augcaugaucacuuuagaa

SEQ ID NO: 2349804 - RNA, 19 nt, Artificial Sequence
  Description of Artificial Sequence: Synthetic oligonucleotide
  Sense strand starting at position 1447 of SEQ ID NO: 1885543
uguccaaaccuuuaguaau

SEQ ID NO: 2349805 - RNA, 19 nt, Artificial Sequence
  Description of Artificial Sequence: Synthetic oligonucleotide
  Antisense strand to SEQ ID NO: 2349804
auuacuaaagguuuggaca

SEQ ID NO: 2349806 - RNA, 19 nt, Artificial Sequence
  Description of Artificial Sequence: Synthetic oligonucleotide
  Sense strand starting at position 1706 of SEQ ID NO: 1885543
uuuagaacuucugugggaa

SEQ ID NO: 2349807 - RNA, 19 nt, Artificial Sequence
  Description of Artificial Sequence: Synthetic oligonucleotide
  Antisense strand to SEQ ID NO: 2349806
uucccacagaaguucuaaa

SEQ ID NO: 2349808 - RNA, 19 nt, Artificial Sequence
  Description of Artificial Sequence: Synthetic oligonucleotide
  Sense strand starting at position 1707 of SEQ ID NO: 1885543
uuagaacuucugugggaag

SEQ ID NO: 2349809 - RNA, 19 nt, Artificial Sequence
  Description of Artificial Sequence: Synthetic oligonucleotide
  Antisense strand to SEQ ID NO: 2349808
cuucccacagaaguucuaa

SEQ ID NO: 2349810 - RNA, 19 nt, Artificial Sequence
  Description of Artificial Sequence: Synthetic oligonucleotide
  Sense strand starting at position 2030 of SEQ ID NO: 1885543
aucaacaggucuuuaaagu

SEQ ID NO: 2349811 - RNA, 19 nt, Artificial Sequence
  Description of Artificial Sequence: Synthetic oligonucleotide
  Antisense strand to SEQ ID NO: 2349810
acuuuaaagaccuguugau

SEQ ID NO: 2349812 - RNA, 19 nt, Artificial Sequence
  Description of Artificial Sequence: Synthetic oligonucleotide
  Sense strand starting at position 2031 of SEQ ID NO: 1885543
ucaacaggucuuuaaagua

SEQ ID NO: 2349813 - RNA, 19 nt, Artificial Sequence
  Description of Artificial Sequence: Synthetic oligonucleotide
  Antisense strand to SEQ ID NO: 2349812
uacuuuaaagaccuguuga

SEQ ID NO: 2349814 - RNA, 19 nt, Artificial Sequence
  Description of Artificial Sequence: Synthetic oligonucleotide
  Sense strand starting at position 2068 of SEQ ID NO: 1885543
guuuguugacuggaaauac

SEQ ID NO: 2349815 - RNA, 19 nt, Artificial Sequence
  Description of Artificial Sequence: Synthetic oligonucleotide
  Antisense strand to SEQ ID NO: 2349814
guauuuccagucaacaaac

SEQ ID NO: 2349816 - RNA, 19 nt, Artificial Sequence
  Description of Artificial Sequence: Synthetic oligonucleotide
  Sense strand starting at position 2140 of SEQ ID NO: 1885543
uucugaagucuuugaauga

SEQ ID NO: 2349817 - RNA, 19 nt, Artificial Sequence
  Description of Artificial Sequence: Synthetic oligonucleotide
  Antisense strand to SEQ ID NO: 2349816
ucauucaaagacuucagaa

SEQ ID NO: 2349818 - RNA, 19 nt, Artificial Sequence
  Description of Artificial Sequence: Synthetic oligonucleotide
  Sense strand starting at position 2242 of SEQ ID NO: 1885543
gcaacaaaccucugugaaa

SEQ ID NO: 2349819 - RNA, 19 nt, Artificial Sequence
  Description of Artificial Sequence: Synthetic oligonucleotide
  Antisense strand to SEQ ID NO: 2349818
uuucacagagguuuguugc

SEQ ID NO: 2349820 - RNA, 19 nt, Artificial Sequence
  Description of Artificial Sequence: Synthetic oligonucleotide
  Sense strand starting at position 2263 of SEQ ID NO: 1885543
ccacuaucuguagagcaca

SEQ ID NO: 2349821 - RNA, 19 nt, Artificial Sequence
  Description of Artificial Sequence: Synthetic oligonucleotide
  Antisense strand to SEQ ID NO: 2349820
ugugcucuacagauagugg

SEQ ID NO: 2349822 - RNA, 19 nt, Artificial Sequence
  Description of Artificial Sequence: Synthetic oligonucleotide
  Sense strand starting at position 2287 of SEQ ID NO: 1885543
agagucugcaaaugaagaa

SEQ ID NO: 2349823 - RNA, 19 nt, Artificial Sequence
  Description of Artificial Sequence: Synthetic oligonucleotide
  Antisense strand to SEQ ID NO: 2349822
uucuucauuugcagacucu

SEQ ID NO: 2349824 - RNA, 19 nt, Artificial Sequence
  Description of Artificial Sequence: Synthetic oligonucleotide
  Sense strand starting at position 2529 of SEQ ID NO: 1885543
gugaaagauccauaucguc

SEQ ID NO: 2349825 - RNA, 19 nt, Artificial Sequence
  Description of Artificial Sequence: Synthetic oligonucleotide
  Antisense strand to SEQ ID NO: 2349824
gacgauauggaucuuucac

SEQ ID NO: 2349826 - RNA, 19 nt, Artificial Sequence
  Description of Artificial Sequence: Synthetic oligonucleotide
  Sense strand starting at position 2577 of SEQ ID NO: 1885543
cugaaagauuguguaauaa

SEQ ID NO: 2349827 - RNA, 19 nt, Artificial Sequence
  Description of Artificial Sequence: Synthetic oligonucleotide
  Antisense strand to SEQ ID NO: 2349826
uuauuacacaaucuuucag

SEQ ID NO: 2349828 - RNA, 19 nt, Artificial Sequence
  Description of Artificial Sequence: Synthetic oligonucleotide
  Sense strand starting at position 2698 of SEQ ID NO: 1885543
cuaugucacuuauuggaag

SEQ ID NO: 2349829 - RNA, 19 nt, Artificial Sequence
  Description of Artificial Sequence: Synthetic oligonucleotide
  Antisense strand to SEQ ID NO: 2349828
cuuccaauaagugacauag

SEQ ID NO: 2349830 - RNA, 19 nt, Artificial Sequence
  Description of Artificial Sequence: Synthetic oligonucleotide
  Sense strand starting at position 2787 of SEQ ID NO: 1885543
aggucucaaagugaguuaa

SEQ ID NO: 2349831 - RNA, 19 nt, Artificial Sequence
  Description of Artificial Sequence: Synthetic oligonucleotide
  Antisense strand to SEQ ID NO: 2349830
uuaacucacuuugagaccu

SEQ ID NO: 2349832 - RNA, 19 nt, Artificial Sequence
  Description of Artificial Sequence: Synthetic oligonucleotide
  Sense strand starting at position 3050 of SEQ ID NO: 1885543
guaauaucgaccugauagg

SEQ ID NO: 2349833 - RNA, 19 nt, Artificial Sequence
  Description of Artificial Sequence: Synthetic oligonucleotide
  Antisense strand to SEQ ID NO: 2349832
ccuaucaggucgauauuac

SEQ ID NO: 2349834 - RNA, 19 nt, Artificial Sequence
  Description of Artificial Sequence: Synthetic oligonucleotide
  Sense strand starting at position 3051 of SEQ ID NO: 1885543
uaauaucgaccugauaggu

SEQ ID NO: 2349835 - RNA, 19 nt, Artificial Sequence
  Description of Artificial Sequence: Synthetic oligonucleotide
  Antisense strand to SEQ ID NO: 2349834
accuaucaggucgauauua

SEQ ID NO: 2349836 - RNA, 19 nt, Artificial Sequence
  Description of Artificial Sequence: Synthetic oligonucleotide
  Sense strand starting at position 3066 of SEQ ID NO: 1885543
agguucguugugaguauga

SEQ ID NO: 2349837 - RNA, 19 nt, Artificial Sequence
  Description of Artificial Sequence: Synthetic oligonucleotide
  Antisense strand to SEQ ID NO: 2349836
ucauacucacaacgaaccu

SEQ ID NO: 2349838 - RNA, 19 nt, Artificial Sequence
  Description of Artificial Sequence: Synthetic oligonucleotide
  Sense strand starting at position 3179 of SEQ ID NO: 1885543
caguuaaguggucagauac

SEQ ID NO: 2349839 - RNA, 19 nt, Artificial Sequence
  Description of Artificial Sequence: Synthetic oligonucleotide
  Antisense strand to SEQ ID NO: 2349838
guaucugaccacuuaacug

SEQ ID NO: 2349840 - RNA, 19 nt, Artificial Sequence
  Description of Artificial Sequence: Synthetic oligonucleotide
  Sense strand starting at position 3808 of SEQ ID NO: 1885543
guuaaauuaggacagccau

SEQ ID NO: 2349841 - RNA, 19 nt, Artificial Sequence
  Description of Artificial Sequence: Synthetic oligonucleotide
  Antisense strand to SEQ ID NO: 2349840
auggcuguccuaauuuaac

SEQ ID NO: 2349842 - RNA, 19 nt, Artificial Sequence
  Description of Artificial Sequence: Synthetic oligonucleotide
  Sense strand starting at position 3976 of SEQ ID NO: 1885543
ggugguagcaaauaguaga

SEQ ID NO: 2349843 - RNA, 19 nt, Artificial Sequence
  Description of Artificial Sequence: Synthetic oligonucleotide
  Antisense strand to SEQ ID NO: 2349842
ucuacuauuugcuaccacc

SEQ ID NO: 2349844 - RNA, 19 nt, Artificial Sequence
  Description of Artificial Sequence: Synthetic oligonucleotide
  Sense strand starting at position 206 of SEQ ID NO: 1885544
cgaggugguaauuauuauu

SEQ ID NO: 2349845 - RNA, 19 nt, Artificial Sequence
  Description of Artificial Sequence: Synthetic oligonucleotide
  Antisense strand to SEQ ID NO: 2349844
aauaauaauuaccaccucg

SEQ ID NO: 2349846 - RNA, 19 nt, Artificial Sequence
  Description of Artificial Sequence: Synthetic oligonucleotide
  Sense strand starting at position 212 of SEQ ID NO: 1885544
gguaauuauuauucucaug

SEQ ID NO: 2349847 - RNA, 19 nt, Artificial Sequence
  Description of Artificial Sequence: Synthetic oligonucleotide
  Antisense strand to SEQ ID NO: 2349846
caugagaauaauaauuacc

SEQ ID NO: 2349848 - RNA, 19 nt, Artificial Sequence
  Description of Artificial Sequence: Synthetic oligonucleotide
  Sense strand starting at position 639 of SEQ ID NO: 1885544
ugguaccugucccugagaa

SEQ ID NO: 2349849 - RNA, 19 nt, Artificial Sequence
  Description of Artificial Sequence: Synthetic oligonucleotide
  Antisense strand to SEQ ID NO: 2349848
uucucagggacagguacca

SEQ ID NO: 2349850 - RNA, 19 nt, Artificial Sequence
  Description of Artificial Sequence: Synthetic oligonucleotide
  Sense strand starting at position 640 of SEQ ID NO: 1885544
gguaccugucccugagaau

SEQ ID NO: 2349851 - RNA, 19 nt, Artificial Sequence
  Description of Artificial Sequence: Synthetic oligonucleotide
  Antisense strand to SEQ ID NO: 2349850
auucucagggacagguacc

SEQ ID NO: 2349852 - RNA, 19 nt, Artificial Sequence
  Description of Artificial Sequence: Synthetic oligonucleotide
  Sense strand starting at position 641 of SEQ ID NO: 1885544
guaccugucccugagaaug

SEQ ID NO: 2349853 - RNA, 19 nt, Artificial Sequence
  Description of Artificial Sequence: Synthetic oligonucleotide
  Antisense strand to SEQ ID NO: 2349852
cauucucagggacagguac

SEQ ID NO: 2349854 - RNA, 19 nt, Artificial Sequence
  Description of Artificial Sequence: Synthetic oligonucleotide
  Sense strand starting at position 649 of SEQ ID NO: 1885544
cccugagaaugguuuggca

SEQ ID NO: 2349855 - RNA, 19 nt, Artificial Sequence
  Description of Artificial Sequence: Synthetic oligonucleotide
  Antisense strand to SEQ ID NO: 2349854
ugccaaaccauucucaggg

SEQ ID NO: 2349856 - RNA, 19 nt, Artificial Sequence
  Description of Artificial Sequence: Synthetic oligonucleotide
  Sense strand starting at position 679 of SEQ ID NO: 1885544
cuugaagucucugcuccua

SEQ ID NO: 2349857 - RNA, 19 nt, Artificial Sequence
  Description of Artificial Sequence: Synthetic oligonucleotide
  Antisense strand to SEQ ID NO: 2349856
uaggagcagagacuucaag

SEQ ID NO: 2349858 - RNA, 19 nt, Artificial Sequence
  Description of Artificial Sequence: Synthetic oligonucleotide
  Sense strand starting at position 681 of SEQ ID NO: 1885544
ugaagucucugcuccuaca

SEQ ID NO: 2349859 - RNA, 19 nt, Artificial Sequence
  Description of Artificial Sequence: Synthetic oligonucleotide
  Antisense strand to SEQ ID NO: 2349858
uguaggagcagagacuuca

SEQ ID NO: 2349860 - RNA, 19 nt, Artificial Sequence
  Description of Artificial Sequence: Synthetic oligonucleotide
  Sense strand starting at position 813 of SEQ ID NO: 1885544
guagaugauucugcuauug

SEQ ID NO: 2349861 - RNA, 19 nt, Artificial Sequence
  Description of Artificial Sequence: Synthetic oligonucleotide
  Antisense strand to SEQ ID NO: 2349860
caauagcagaaucaucuac

SEQ ID NO: 2349862 - RNA, 19 nt, Artificial Sequence
  Description of Artificial Sequence: Synthetic oligonucleotide
  Sense strand starting at position 1137 of SEQ ID NO: 1885544
gggacaacccugugaucau

SEQ ID NO: 2349863 - RNA, 19 nt, Artificial Sequence
  Description of Artificial Sequence: Synthetic oligonucleotide
  Antisense strand to SEQ ID NO: 2349862
augaucacaggguuguccc

SEQ ID NO: 2349864 - RNA, 19 nt, Artificial Sequence
  Description of Artificial Sequence: Synthetic oligonucleotide
  Sense strand starting at position 1337 of SEQ ID NO: 1885544
gcuagagaauuccugcucu

SEQ ID NO: 2349865 - RNA, 19 nt, Artificial Sequence
  Description of Artificial Sequence: Synthetic oligonucleotide
  Antisense strand to SEQ ID NO: 2349864
agagcaggaauucucuagc

SEQ ID NO: 2349866 - RNA, 19 nt, Artificial Sequence
  Description of Artificial Sequence: Synthetic oligonucleotide
  Sense strand starting at position 1476 of SEQ ID NO: 1885544
cuggaaucagugcaaaguu

SEQ ID NO: 2349867 - RNA, 19 nt, Artificial Sequence
  Description of Artificial Sequence: Synthetic oligonucleotide
  Antisense strand to SEQ ID NO: 2349866
aacuuugcacugauuccag

SEQ ID NO: 2349868 - RNA, 19 nt, Artificial Sequence
  Description of Artificial Sequence: Synthetic oligonucleotide
  Sense strand starting at position 1531 of SEQ ID NO: 1885544
gggagagcuuggcucuaac

SEQ ID NO: 2349869 - RNA, 19 nt, Artificial Sequence
  Description of Artificial Sequence: Synthetic oligonucleotide
  Antisense strand to SEQ ID NO: 2349868
guuagagccaagcucuccc

SEQ ID NO: 2349870 - RNA, 19 nt, Artificial Sequence
  Description of Artificial Sequence: Synthetic oligonucleotide
  Sense strand starting at position 1762 of SEQ ID NO: 1885544
uggaaacccucucaagaaa

SEQ ID NO: 2349871 - RNA, 19 nt, Artificial Sequence
  Description of Artificial Sequence: Synthetic oligonucleotide
  Antisense strand to SEQ ID NO: 2349870
uuucuugagaggguuucca

SEQ ID NO: 2349872 - RNA, 19 nt, Artificial Sequence
  Description of Artificial Sequence: Synthetic oligonucleotide
  Sense strand starting at position 1778 of SEQ ID NO: 1885544
aaaggaagcuggguuaauu

SEQ ID NO: 2349873 - RNA, 19 nt, Artificial Sequence
  Description of Artificial Sequence: Synthetic oligonucleotide
  Antisense strand to SEQ ID NO: 2349872
aauuaacccagcuuccuuu

SEQ ID NO: 2349874 - RNA, 19 nt, Artificial Sequence
  Description of Artificial Sequence: Synthetic oligonucleotide
  Sense strand starting at position 1822 of SEQ ID NO: 1885544
cucagaaaucauugugccu

SEQ ID NO: 2349875 - RNA, 19 nt, Artificial Sequence
  Description of Artificial Sequence: Synthetic oligonucleotide
  Antisense strand to SEQ ID NO: 2349874
aggcacaaugauuucugag

SEQ ID NO: 2349876 - RNA, 19 nt, Artificial Sequence
  Description of Artificial Sequence: Synthetic oligonucleotide
  Sense strand starting at position 1835 of SEQ ID NO: 1885544
gugccuaguuaccugauau

SEQ ID NO: 2349877 - RNA, 19 nt, Artificial Sequence
  Description of Artificial Sequence: Synthetic oligonucleotide
  Antisense strand to SEQ ID NO: 2349876
auaucagguaacuaggcac

SEQ ID NO: 2349878 - RNA, 19 nt, Artificial Sequence
  Description of Artificial Sequence: Synthetic oligonucleotide
  Sense strand starting at position 1846 of SEQ ID NO: 1885544
ccugauauccaguguauua

SEQ ID NO: 2349879 - RNA, 19 nt, Artificial Sequence
  Description of Artificial Sequence: Synthetic oligonucleotide
  Antisense strand to SEQ ID NO: 2349878
uaauacacuggauaucagg

SEQ ID NO: 2349880 - RNA, 19 nt, Artificial Sequence
  Description of Artificial Sequence: Synthetic oligonucleotide
  Sense strand starting at position 1848 of SEQ ID NO: 1885544
ugauauccaguguauuagu

SEQ ID NO: 2349881 - RNA, 19 nt, Artificial Sequence
  Description of Artificial Sequence: Synthetic oligonucleotide
  Antisense strand to SEQ ID NO: 2349880
acuaauacacuggauauca

SEQ ID NO: 2349882 - RNA, 19 nt, Artificial Sequence
  Description of Artificial Sequence: Synthetic oligonucleotide
  Sense strand starting at position 2320 of SEQ ID NO: 1885544
cuuguuugggagugaaagu

SEQ ID NO: 2349883 - RNA, 19 nt, Artificial Sequence
  Description of Artificial Sequence: Synthetic oligonucleotide
  Antisense strand to SEQ ID NO: 2349882
acuuucacucccaaacaag

SEQ ID NO: 2349884 - RNA, 19 nt, Artificial Sequence
  Description of Artificial Sequence: Synthetic oligonucleotide
  Sense strand starting at position 2457 of SEQ ID NO: 1885544
gugcauaugcgugcacgua

SEQ ID NO: 2349885 - RNA, 19 nt, Artificial Sequence
  Description of Artificial Sequence: Synthetic oligonucleotide
  Antisense strand to SEQ ID NO: 2349884
uacgugcacgcauaugcac

SEQ ID NO: 2349886 - RNA, 19 nt, Artificial Sequence
  Description of Artificial Sequence: Synthetic oligonucleotide
  Sense strand starting at position 2553 of SEQ ID NO: 1885544
cugaucuuucuugaaaggu

SEQ ID NO: 2349887 - RNA, 19 nt, Artificial Sequence
  Description of Artificial Sequence: Synthetic oligonucleotide
  Antisense strand to SEQ ID NO: 2349886
accuuucaagaaagaucag

SEQ ID NO: 2349888 - RNA, 19 nt, Artificial Sequence
  Description of Artificial Sequence: Synthetic oligonucleotide
  Sense strand starting at position 2571 of SEQ ID NO: 1885544
uacucucugcuggguaaua

SEQ ID NO: 2349889 - RNA, 19 nt, Artificial Sequence
  Description of Artificial Sequence: Synthetic oligonucleotide
  Antisense strand to SEQ ID NO: 2349888
uauuacccagcagagagua

SEQ ID NO: 2349890 - RNA, 19 nt, Artificial Sequence
  Description of Artificial Sequence: Synthetic oligonucleotide
  Sense strand starting at position 2573 of SEQ ID NO: 1885544
cucucugcuggguaauaca

SEQ ID NO: 2349891 - RNA, 19 nt, Artificial Sequence
  Description of Artificial Sequence: Synthetic oligonucleotide
  Antisense strand to SEQ ID NO: 2349890
uguauuacccagcagagag

SEQ ID NO: 2349892 - RNA, 19 nt, Artificial Sequence
  Description of Artificial Sequence: Synthetic oligonucleotide
  Sense strand starting at position 2610 of SEQ ID NO: 1885544
ucuaguaaccuuggucuaa

SEQ ID NO: 2349893 - RNA, 19 nt, Artificial Sequence
  Description of Artificial Sequence: Synthetic oligonucleotide
  Antisense strand to SEQ ID NO: 2349892
uuagaccaagguuacuaga

SEQ ID NO: 2349894 - RNA, 19 nt, Artificial Sequence
  Description of Artificial Sequence: Synthetic oligonucleotide
  Sense strand starting at position 2611 of SEQ ID NO: 1885544
cuaguaaccuuggucuaau

SEQ ID NO: 2349895 - RNA, 19 nt, Artificial Sequence
  Description of Artificial Sequence: Synthetic oligonucleotide
  Antisense strand to SEQ ID NO: 2349894
auuagaccaagguuacuag

SEQ ID NO: 2349896 - RNA, 19 nt, Artificial Sequence
  Description of Artificial Sequence: Synthetic oligonucleotide
  Sense strand starting at position 2614 of SEQ ID NO: 1885544
guaaccuuggucuaauaca

SEQ ID NO: 2349897 - RNA, 19 nt, Artificial Sequence
  Description of Artificial Sequence: Synthetic oligonucleotide
  Antisense strand to SEQ ID NO: 2349896
uguauuagaccaagguuac

SEQ ID NO: 2349898 - RNA, 19 nt, Artificial Sequence
  Description of Artificial Sequence: Synthetic oligonucleotide
  Sense strand starting at position 2727 of SEQ ID NO: 1885544
uccagauugugucugggca

SEQ ID NO: 2349899 - RNA, 19 nt, Artificial Sequence
  Description of Artificial Sequence: Synthetic oligonucleotide
  Antisense strand to SEQ ID NO: 2349898
ugcccagacacaaucugga

SEQ ID NO: 2349900 - RNA, 19 nt, Artificial Sequence
  Description of Artificial Sequence: Synthetic oligonucleotide
  Sense strand starting at position 2731 of SEQ ID NO: 1885544
gauugugucugggcacaca

SEQ ID NO: 2349901 - RNA, 19 nt, Artificial Sequence
  Description of Artificial Sequence: Synthetic oligonucleotide
  Antisense strand to SEQ ID NO: 2349900
ugugugcccagacacaauc

SEQ ID NO: 2349902 - RNA, 19 nt, Artificial Sequence
  Description of Artificial Sequence: Synthetic oligonucleotide
  Sense strand starting at position 2810 of SEQ ID NO: 1885544
ccacacauguucuccaagu

SEQ ID NO: 2349903 - RNA, 19 nt, Artificial Sequence
  Description of Artificial Sequence: Synthetic oligonucleotide
  Antisense strand to SEQ ID NO: 2349902
acuuggagaacaugugugg

SEQ ID NO: 2349904 - RNA, 19 nt, Artificial Sequence
  Description of Artificial Sequence: Synthetic oligonucleotide
  Sense strand starting at position 2812 of SEQ ID NO: 1885544
acacauguucuccaaguuu

SEQ ID NO: 2349905 - RNA, 19 nt, Artificial Sequence
  Description of Artificial Sequence: Synthetic oligonucleotide
  Antisense strand to SEQ ID NO: 2349904
aaacuuggagaacaugugu

SEQ ID NO: 2349906 - RNA, 19 nt, Artificial Sequence
  Description of Artificial Sequence: Synthetic oligonucleotide
  Sense strand starting at position 2820 of SEQ ID NO: 1885544
ucuccaaguuucccugagu

SEQ ID NO: 2349907 - RNA, 19 nt, Artificial Sequence
  Description of Artificial Sequence: Synthetic oligonucleotide
  Antisense strand to SEQ ID NO: 2349906
acucagggaaacuuggaga

SEQ ID NO: 2349908 - RNA, 19 nt, Artificial Sequence
  Description of Artificial Sequence: Synthetic oligonucleotide
  Sense strand starting at position 2821 of SEQ ID NO: 1885544
cuccaaguuucccugaguu

SEQ ID NO: 2349909 - RNA, 19 nt, Artificial Sequence
  Description of Artificial Sequence: Synthetic oligonucleotide
  Antisense strand to SEQ ID NO: 2349908
aacucagggaaacuuggag

SEQ ID NO: 2349910 - RNA, 19 nt, Artificial Sequence
  Description of Artificial Sequence: Synthetic oligonucleotide
  Sense strand starting at position 2823 of SEQ ID NO: 1885544
ccaaguuucccugaguuug

SEQ ID NO: 2349911 - RNA, 19 nt, Artificial Sequence
  Description of Artificial Sequence: Synthetic oligonucleotide
  Antisense strand to SEQ ID NO: 2349910
caaacucagggaaacuugg

SEQ ID NO: 2349912 - RNA, 19 nt, Artificial Sequence
  Description of Artificial Sequence: Synthetic oligonucleotide
  Sense strand starting at position 2884 of SEQ ID NO: 1885544
guggcugucgaggagcaau

SEQ ID NO: 2349913 - RNA, 19 nt, Artificial Sequence
  Description of Artificial Sequence: Synthetic oligonucleotide
  Antisense strand to SEQ ID NO: 2349912
auugcuccucgacagccac

SEQ ID NO: 2349914 - RNA, 19 nt, Artificial Sequence
  Description of Artificial Sequence: Synthetic oligonucleotide
  Sense strand starting at position 2945 of SEQ ID NO: 1885544
cgaagacucuggcuuuauu

SEQ ID NO: 2349915 - RNA, 19 nt, Artificial Sequence
  Description of Artificial Sequence: Synthetic oligonucleotide
  Antisense strand to SEQ ID NO: 2349914
aauaaagccagagucuucg

SEQ ID NO: 2349916 - RNA, 19 nt, Artificial Sequence
  Description of Artificial Sequence: Synthetic oligonucleotide
  Sense strand starting at position 3076 of SEQ ID NO: 1885544
accucaaguaguugggauu

SEQ ID NO: 2349917 - RNA, 19 nt, Artificial Sequence
  Description of Artificial Sequence: Synthetic oligonucleotide
  Antisense strand to SEQ ID NO: 2349916
aaucccaacuacuugaggu

SEQ ID NO: 2349918 - RNA, 19 nt, Artificial Sequence
  Description of Artificial Sequence: Synthetic oligonucleotide
  Sense strand starting at position 3077 of SEQ ID NO: 1885544
ccucaaguaguugggauua

SEQ ID NO: 2349919 - RNA, 19 nt, Artificial Sequence
  Description of Artificial Sequence: Synthetic oligonucleotide
  Antisense strand to SEQ ID NO: 2349918
uaaucccaacuacuugagg

SEQ ID NO: 2349920 - RNA, 19 nt, Artificial Sequence
  Description of Artificial Sequence: Synthetic oligonucleotide
  Sense strand starting at position 3464 of SEQ ID NO: 1885544
ccaagaguuccagagcaac

SEQ ID NO: 2349921 - RNA, 19 nt, Artificial Sequence
  Description of Artificial Sequence: Synthetic oligonucleotide
  Antisense strand to SEQ ID NO: 2349920
guugcucuggaacucuugg

SEQ ID NO: 2349922 - RNA, 19 nt, Artificial Sequence
  Description of Artificial Sequence: Synthetic oligonucleotide
  Sense strand starting at position 3896 of SEQ ID NO: 1885544
cgagaauugcuugggcuca

SEQ ID NO: 2349923 - RNA, 19 nt, Artificial Sequence
  Description of Artificial Sequence: Synthetic oligonucleotide
  Antisense strand to SEQ ID NO: 2349922
ugagcccaagcaauucucg

SEQ ID NO: 2349924 - RNA, 19 nt, Artificial Sequence
  Description of Artificial Sequence: Synthetic oligonucleotide
  Sense strand starting at position 135 of SEQ ID NO: 1885545
gaaugagggcucuggucuu

SEQ ID NO: 2349925 - RNA, 19 nt, Artificial Sequence
  Description of Artificial Sequence: Synthetic oligonucleotide
  Antisense strand to SEQ ID NO: 2349924
aagaccagagcccucauuc

SEQ ID NO: 2349926 - RNA, 19 nt, Artificial Sequence
  Description of Artificial Sequence: Synthetic oligonucleotide
  Sense strand starting at position 149 of SEQ ID NO: 1885545
gucuuucggacuugaaauu

SEQ ID NO: 2349927 - RNA, 19 nt, Artificial Sequence
  Description of Artificial Sequence: Synthetic oligonucleotide
  Antisense strand to SEQ ID NO: 2349926
aauuucaaguccgaaagac

SEQ ID NO: 2349928 - RNA, 19 nt, Artificial Sequence
  Description of Artificial Sequence: Synthetic oligonucleotide
  Sense strand starting at position 299 of SEQ ID NO: 1885545
guuaucugcuauccugaga

SEQ ID NO: 2349929 - RNA, 19 nt, Artificial Sequence
  Description of Artificial Sequence: Synthetic oligonucleotide
  Antisense strand to SEQ ID NO: 2349928
ucucaggauagcagauaac

SEQ ID NO: 2349930 - RNA, 19 nt, Artificial Sequence
  Description of Artificial Sequence: Synthetic oligonucleotide
  Sense strand starting at position 324 of SEQ ID NO: 1885545
gggcaucgugucuaaacca

SEQ ID NO: 2349931 - RNA, 19 nt, Artificial Sequence
  Description of Artificial Sequence: Synthetic oligonucleotide
  Antisense strand to SEQ ID NO: 2349930
ugguuuagacacgaugccc

SEQ ID NO: 2349932 - RNA, 19 nt, Artificial Sequence
  Description of Artificial Sequence: Synthetic oligonucleotide
  Sense strand starting at position 539 of SEQ ID NO: 1885545
cccaguugugcuucugcau

SEQ ID NO: 2349933 - RNA, 19 nt, Artificial Sequence
  Description of Artificial Sequence: Synthetic oligonucleotide
  Antisense strand to SEQ ID NO: 2349932
augcagaagcacaacuggg

SEQ ID NO: 2349934 - RNA, 19 nt, Artificial Sequence
  Description of Artificial Sequence: Synthetic oligonucleotide
  Sense strand starting at position 555 of SEQ ID NO: 1885545
cauggagauguguguagua

SEQ ID NO: 2349935 - RNA, 19 nt, Artificial Sequence
  Description of Artificial Sequence: Synthetic oligonucleotide
  Antisense strand to SEQ ID NO: 2349934
uacuacacacaucuccaug

SEQ ID NO: 2349936 - RNA, 19 nt, Artificial Sequence
  Description of Artificial Sequence: Synthetic oligonucleotide
  Sense strand starting at position 557 of SEQ ID NO: 1885545
uggagauguguguaguacu

SEQ ID NO: 2349937 - RNA, 19 nt, Artificial Sequence
  Description of Artificial Sequence: Synthetic oligonucleotide
  Antisense strand to SEQ ID NO: 2349936
aguacuacacacaucucca

SEQ ID NO: 2349938 - RNA, 19 nt, Artificial Sequence
  Description of Artificial Sequence: Synthetic oligonucleotide
  Sense strand starting at position 564 of SEQ ID NO: 1885545
guguguaguacucacacau

SEQ ID NO: 2349939 - RNA, 19 nt, Artificial Sequence
  Description of Artificial Sequence: Synthetic oligonucleotide
  Antisense strand to SEQ ID NO: 2349938
augugugaguacuacacac

SEQ ID NO: 2349940 - RNA, 19 nt, Artificial Sequence
  Description of Artificial Sequence: Synthetic oligonucleotide
  Sense strand starting at position 707 of SEQ ID NO: 1885545
uuguuucucccaugagagg

SEQ ID NO: 2349941 - RNA, 19 nt, Artificial Sequence
  Description of Artificial Sequence: Synthetic oligonucleotide
  Antisense strand to SEQ ID NO: 2349940
ccucucaugggagaaacaa

SEQ ID NO: 2349942 - RNA, 19 nt, Artificial Sequence
  Description of Artificial Sequence: Synthetic oligonucleotide
  Sense strand starting at position 1083 of SEQ ID NO: 1885545
cagucaugccuggguacaa

SEQ ID NO: 2349943 - RNA, 19 nt, Artificial Sequence
  Description of Artificial Sequence: Synthetic oligonucleotide
  Antisense strand to SEQ ID NO: 2349942
uuguacccaggcaugacug

SEQ ID NO: 2349944 - RNA, 19 nt, Artificial Sequence
  Description of Artificial Sequence: Synthetic oligonucleotide
  Sense strand starting at position 1094 of SEQ ID NO: 1885545
ggguacaagucccaaauuu

SEQ ID NO: 2349945 - RNA, 19 nt, Artificial Sequence
  Description of Artificial Sequence: Synthetic oligonucleotide
  Antisense strand to SEQ ID NO: 2349944
aaauuugggacuuguaccc

SEQ ID NO: 2349946 - RNA, 19 nt, Artificial Sequence
  Description of Artificial Sequence: Synthetic oligonucleotide
  Sense strand starting at position 1167 of SEQ ID NO: 1885545
ucugguuucugaucaugac

SEQ ID NO: 2349947 - RNA, 19 nt, Artificial Sequence
  Description of Artificial Sequence: Synthetic oligonucleotide
  Antisense strand to SEQ ID NO: 2349946
gucaugaucagaaaccaga

SEQ ID NO: 2349948 - RNA, 19 nt, Artificial Sequence
  Description of Artificial Sequence: Synthetic oligonucleotide
  Sense strand starting at position 1168 of SEQ ID NO: 1885545
cugguuucugaucaugacu

SEQ ID NO: 2349949 - RNA, 19 nt, Artificial Sequence
  Description of Artificial Sequence: Synthetic oligonucleotide
  Antisense strand to SEQ ID NO: 2349948
agucaugaucagaaaccag

SEQ ID NO: 2349950 - RNA, 19 nt, Artificial Sequence
  Description of Artificial Sequence: Synthetic oligonucleotide
  Sense strand starting at position 1176 of SEQ ID NO: 1885545
ugaucaugacuccauagca

SEQ ID NO: 2349951 - RNA, 19 nt, Artificial Sequence
  Description of Artificial Sequence: Synthetic oligonucleotide
  Antisense strand to SEQ ID NO: 2349950
ugcuauggagucaugauca

SEQ ID NO: 2349952 - RNA, 19 nt, Artificial Sequence
  Description of Artificial Sequence: Synthetic oligonucleotide
  Sense strand starting at position 1209 of SEQ ID NO: 1885545
gugucaugaccauauugca

SEQ ID NO: 2349953 - RNA, 19 nt, Artificial Sequence
  Description of Artificial Sequence: Synthetic oligonucleotide
  Antisense strand to SEQ ID NO: 2349952
ugcaauauggucaugacac

SEQ ID NO: 2349954 - RNA, 19 nt, Artificial Sequence
  Description of Artificial Sequence: Synthetic oligonucleotide
  Sense strand starting at position 1284 of SEQ ID NO: 1885545
guaggacuuugucccucau

SEQ ID NO: 2349955 - RNA, 19 nt, Artificial Sequence
  Description of Artificial Sequence: Synthetic oligonucleotide
  Antisense strand to SEQ ID NO: 2349954
augagggacaaaguccuac

SEQ ID NO: 2349956 - RNA, 19 nt, Artificial Sequence
  Description of Artificial Sequence: Synthetic oligonucleotide
  Sense strand starting at position 1402 of SEQ ID NO: 1885545
cgaggucccuccuuaugau

SEQ ID NO: 2349957 - RNA, 19 nt, Artificial Sequence
  Description of Artificial Sequence: Synthetic oligonucleotide
  Antisense strand to SEQ ID NO: 2349956
aucauaaggagggaccucg

SEQ ID NO: 2349958 - RNA, 19 nt, Artificial Sequence
  Description of Artificial Sequence: Synthetic oligonucleotide
  Sense strand starting at position 1403 of SEQ ID NO: 1885545
gaggucccuccuuaugauu

SEQ ID NO: 2349959 - RNA, 19 nt, Artificial Sequence
  Description of Artificial Sequence: Synthetic oligonucleotide
  Antisense strand to SEQ ID NO: 2349958
aaucauaaggagggaccuc

SEQ ID NO: 2349960 - RNA, 19 nt, Artificial Sequence
  Description of Artificial Sequence: Synthetic oligonucleotide
  Sense strand starting at position 1518 of SEQ ID NO: 1885545
gcuuuaaggcccugaacau

SEQ ID NO: 2349961 - RNA, 19 nt, Artificial Sequence
  Description of Artificial Sequence: Synthetic oligonucleotide
  Antisense strand to SEQ ID NO: 2349960
auguucagggccuuaaagc

SEQ ID NO: 2349962 - RNA, 19 nt, Artificial Sequence
  Description of Artificial Sequence: Synthetic oligonucleotide
  Sense strand starting at position 1625 of SEQ ID NO: 1885545
agaagucguuucucucaua

SEQ ID NO: 2349963 - RNA, 19 nt, Artificial Sequence
  Description of Artificial Sequence: Synthetic oligonucleotide
  Antisense strand to SEQ ID NO: 2349962
uaugagagaaacgacuucu

SEQ ID NO: 2349964 - RNA, 19 nt, Artificial Sequence
  Description of Artificial Sequence: Synthetic oligonucleotide
  Sense strand starting at position 2005 of SEQ ID NO: 1885545
gcaagcugggcagaucuau

SEQ ID NO: 2349965 - RNA, 19 nt, Artificial Sequence
  Description of Artificial Sequence: Synthetic oligonucleotide
  Antisense strand to SEQ ID NO: 2349964
auagaucugcccagcuugc

SEQ ID NO: 2349966 - RNA, 19 nt, Artificial Sequence
  Description of Artificial Sequence: Synthetic oligonucleotide
  Sense strand starting at position 2013 of SEQ ID NO: 1885545
ggcagaucuauuugucggu

SEQ ID NO: 2349967 - RNA, 19 nt, Artificial Sequence
  Description of Artificial Sequence: Synthetic oligonucleotide
  Antisense strand to SEQ ID NO: 2349966
accgacaaauagaucugcc

SEQ ID NO: 2349968 - RNA, 19 nt, Artificial Sequence
  Description of Artificial Sequence: Synthetic oligonucleotide
  Sense strand starting at position 2018 of SEQ ID NO: 1885545
aucuauuugucgguuccca

SEQ ID NO: 2349969 - RNA, 19 nt, Artificial Sequence
  Description of Artificial Sequence: Synthetic oligonucleotide
  Antisense strand to SEQ ID NO: 2349968
ugggaaccgacaaauagau

SEQ ID NO: 2349970 - RNA, 19 nt, Artificial Sequence
  Description of Artificial Sequence: Synthetic oligonucleotide
  Sense strand starting at position 2035 of SEQ ID NO: 1885545
caagccuugcaggaagaau

SEQ ID NO: 2349971 - RNA, 19 nt, Artificial Sequence
  Description of Artificial Sequence: Synthetic oligonucleotide
  Antisense strand to SEQ ID NO: 2349970
auucuuccugcaaggcuug

SEQ ID NO: 2349972 - RNA, 19 nt, Artificial Sequence
  Description of Artificial Sequence: Synthetic oligonucleotide
  Sense strand starting at position 2418 of SEQ ID NO: 1885545
ggcagauucgucuaguuca

SEQ ID NO: 2349973 - RNA, 19 nt, Artificial Sequence
  Description of Artificial Sequence: Synthetic oligonucleotide
  Antisense strand to SEQ ID NO: 2349972
ugaacuagacgaaucugcc

SEQ ID NO: 2349974 - RNA, 19 nt, Artificial Sequence
  Description of Artificial Sequence: Synthetic oligonucleotide
  Sense strand starting at position 2497 of SEQ ID NO: 1885545
ccaugaagugacugugaua

SEQ ID NO: 2349975 - RNA, 19 nt, Artificial Sequence
  Description of Artificial Sequence: Synthetic oligonucleotide
  Antisense strand to SEQ ID NO: 2349974
uaucacagucacuucaugg

SEQ ID NO: 2349976 - RNA, 19 nt, Artificial Sequence
  Description of Artificial Sequence: Synthetic oligonucleotide
  Sense strand starting at position 2582 of SEQ ID NO: 1885545
cgccuauaucuagacuucu

SEQ ID NO: 2349977 - RNA, 19 nt, Artificial Sequence
  Description of Artificial Sequence: Synthetic oligonucleotide
  Antisense strand to SEQ ID NO: 2349976
agaagucuagauauaggcg

SEQ ID NO: 2349978 - RNA, 19 nt, Artificial Sequence
  Description of Artificial Sequence: Synthetic oligonucleotide
  Sense strand starting at position 2617 of SEQ ID NO: 1885545
uaaagucucugacugguuu

SEQ ID NO: 2349979 - RNA, 19 nt, Artificial Sequence
  Description of Artificial Sequence: Synthetic oligonucleotide
  Antisense strand to SEQ ID NO: 2349978
aaaccagucagagacuuua

SEQ ID NO: 2349980 - RNA, 19 nt, Artificial Sequence
  Description of Artificial Sequence: Synthetic oligonucleotide
  Sense strand starting at position 2618 of SEQ ID NO: 1885545
aaagucucugacugguuua

SEQ ID NO: 2349981 - RNA, 19 nt, Artificial Sequence
  Description of Artificial Sequence: Synthetic oligonucleotide
  Antisense strand to SEQ ID NO: 2349980
uaaaccagucagagacuuu

SEQ ID NO: 2349982 - RNA, 19 nt, Artificial Sequence
  Description of Artificial Sequence: Synthetic oligonucleotide
  Sense strand starting at position 3042 of SEQ ID NO: 1885545
gccugaagaauccagguau

SEQ ID NO: 2349983 - RNA, 19 nt, Artificial Sequence
  Description of Artificial Sequence: Synthetic oligonucleotide
  Antisense strand to SEQ ID NO: 2349982
auaccuggauucuucaggc

SEQ ID NO: 2349984 - RNA, 19 nt, Artificial Sequence
  Description of Artificial Sequence: Synthetic oligonucleotide
  Sense strand starting at position 3404 of SEQ ID NO: 1885545
ugggaaagguuggugauca

SEQ ID NO: 2349985 - RNA, 19 nt, Artificial Sequence
  Description of Artificial Sequence: Synthetic oligonucleotide
  Antisense strand to SEQ ID NO: 2349984
ugaucaccaaccuuuccca

SEQ ID NO: 2349986 - RNA, 19 nt, Artificial Sequence
  Description of Artificial Sequence: Synthetic oligonucleotide
  Sense strand starting at position 3408 of SEQ ID NO: 1885545
aaagguuggugaucaacua

SEQ ID NO: 2349987 - RNA, 19 nt, Artificial Sequence
  Description of Artificial Sequence: Synthetic oligonucleotide
  Antisense strand to SEQ ID NO: 2349986
uaguugaucaccaaccuuu

SEQ ID NO: 2349988 - RNA, 19 nt, Artificial Sequence
  Description of Artificial Sequence: Synthetic oligonucleotide
  Sense strand starting at position 3428 of SEQ ID NO: 1885545
uuugaugucugucuuggaa

SEQ ID NO: 2349989 - RNA, 19 nt, Artificial Sequence
  Description of Artificial Sequence: Synthetic oligonucleotide
  Antisense strand to SEQ ID NO: 2349988
uuccaagacagacaucaaa

SEQ ID NO: 2349990 - RNA, 19 nt, Artificial Sequence
  Description of Artificial Sequence: Synthetic oligonucleotide
  Sense strand starting at position 3513 of SEQ ID NO: 1885545
gggugagaauuagcugagu

SEQ ID NO: 2349991 - RNA, 19 nt, Artificial Sequence
  Description of Artificial Sequence: Synthetic oligonucleotide
  Antisense strand to SEQ ID NO: 2349990
acucagcuaauucucaccc

SEQ ID NO: 2349992 - RNA, 19 nt, Artificial Sequence
  Description of Artificial Sequence: Synthetic oligonucleotide
  Sense strand starting at position 3532 of SEQ ID NO: 1885545
gcccaugagagagggaauu

SEQ ID NO: 2349993 - RNA, 19 nt, Artificial Sequence
  Description of Artificial Sequence: Synthetic oligonucleotide
  Antisense strand to SEQ ID NO: 2349992
aauucccucucucaugggc

SEQ ID NO: 2349994 - RNA, 19 nt, Artificial Sequence
  Description of Artificial Sequence: Synthetic oligonucleotide
  Sense strand starting at position 3747 of SEQ ID NO: 1885545
gcaagagauuauccuugag

SEQ ID NO: 2349995 - RNA, 19 nt, Artificial Sequence
  Description of Artificial Sequence: Synthetic oligonucleotide
  Antisense strand to SEQ ID NO: 2349994
cucaaggauaaucucuugc

SEQ ID NO: 2349996 - RNA, 19 nt, Artificial Sequence
  Description of Artificial Sequence: Synthetic oligonucleotide
  Sense strand starting at position 3750 of SEQ ID NO: 1885545
agagauuauccuugagcau

SEQ ID NO: 2349997 - RNA, 19 nt, Artificial Sequence
  Description of Artificial Sequence: Synthetic oligonucleotide
  Antisense strand to SEQ ID NO: 2349996
augcucaaggauaaucucu

SEQ ID NO: 2349998 - RNA, 19 nt, Artificial Sequence
  Description of Artificial Sequence: Synthetic oligonucleotide
  Sense strand starting at position 3753 of SEQ ID NO: 1885545
gauuauccuugagcaugga

SEQ ID NO: 2349999 - RNA, 19 nt, Artificial Sequence
  Description of Artificial Sequence: Synthetic oligonucleotide
  Antisense strand to SEQ ID NO: 2349998
uccaugcucaaggauaauc

SEQ ID NO: 2350000 - RNA, 19 nt, Artificial Sequence
  Description of Artificial Sequence: Synthetic oligonucleotide
  Sense strand starting at position 3857 of SEQ ID NO: 1885545
acuaauaauugggcuagua

SEQ ID NO: 2350001 - RNA, 19 nt, Artificial Sequence
  Description of Artificial Sequence: Synthetic oligonucleotide
  Antisense strand to SEQ ID NO: 2350000
uacuagcccaauuauuagu

SEQ ID NO: 2350002 - RNA, 19 nt, Artificial Sequence
  Description of Artificial Sequence: Synthetic oligonucleotide
  Sense strand starting at position 3869 of SEQ ID NO: 1885545
gcuaguaauggacacgaca

SEQ ID NO: 2350003 - RNA, 19 nt, Artificial Sequence
  Description of Artificial Sequence: Synthetic oligonucleotide
  Antisense strand to SEQ ID NO: 2350002
ugucguguccauuacuagc

SEQ ID NO: 2350004 - RNA, 19 nt, Artificial Sequence
  Description of Artificial Sequence: Synthetic oligonucleotide
  Sense strand starting at position 25 of SEQ ID NO: 1885546
gggaacccuuucucaugaa

SEQ ID NO: 2350005 - RNA, 19 nt, Artificial Sequence
  Description of Artificial Sequence: Synthetic oligonucleotide
  Antisense strand to SEQ ID NO: 2350004
uucaugagaaaggguuccc

SEQ ID NO: 2350006 - RNA, 19 nt, Artificial Sequence
  Description of Artificial Sequence: Synthetic oligonucleotide
  Sense strand starting at position 231 of SEQ ID NO: 1885546
cugggaaagaagugucacu

SEQ ID NO: 2350007 - RNA, 19 nt, Artificial Sequence
  Description of Artificial Sequence: Synthetic oligonucleotide
  Antisense strand to SEQ ID NO: 2350006
agugacacuucuuucccag

SEQ ID NO: 2350008 - RNA, 19 nt, Artificial Sequence
  Description of Artificial Sequence: Synthetic oligonucleotide
  Sense strand starting at position 452 of SEQ ID NO: 1885546
guaauaauucucgauggug

SEQ ID NO: 2350009 - RNA, 19 nt, Artificial Sequence
  Description of Artificial Sequence: Synthetic oligonucleotide
  Antisense strand to SEQ ID NO: 2350008
caccaucgagaauuauuac

SEQ ID NO: 2350010 - RNA, 19 nt, Artificial Sequence
  Description of Artificial Sequence: Synthetic oligonucleotide
  Sense strand starting at position 466 of SEQ ID NO: 1885546
ugguguuagagauggugaa

SEQ ID NO: 2350011 - RNA, 19 nt, Artificial Sequence
  Description of Artificial Sequence: Synthetic oligonucleotide
  Antisense strand to SEQ ID NO: 2350010
uucaccaucucuaacacca

SEQ ID NO: 2350012 - RNA, 19 nt, Artificial Sequence
  Description of Artificial Sequence: Synthetic oligonucleotide
  Sense strand starting at position 467 of SEQ ID NO: 1885546
gguguuagagauggugaag

SEQ ID NO: 2350013 - RNA, 19 nt, Artificial Sequence
  Description of Artificial Sequence: Synthetic oligonucleotide
  Antisense strand to SEQ ID NO: 2350012
cuucaccaucucuaacacc

SEQ ID NO: 2350014 - RNA, 19 nt, Artificial Sequence
  Description of Artificial Sequence: Synthetic oligonucleotide
  Sense strand starting at position 470 of SEQ ID NO: 1885546
guuagagauggugaaguua

SEQ ID NO: 2350015 - RNA, 19 nt, Artificial Sequence
  Description of Artificial Sequence: Synthetic oligonucleotide
  Antisense strand to SEQ ID NO: 2350014
uaacuucaccaucucuaac

SEQ ID NO: 2350016 - RNA, 19 nt, Artificial Sequence
  Description of Artificial Sequence: Synthetic oligonucleotide
  Sense strand starting at position 497 of SEQ ID NO: 1885546
gaaacauuggaauguuucu

SEQ ID NO: 2350017 - RNA, 19 nt, Artificial Sequence
  Description of Artificial Sequence: Synthetic oligonucleotide
  Antisense strand to SEQ ID NO: 2350016
agaaacauuccaauguuuc

SEQ ID NO: 2350018 - RNA, 19 nt, Artificial Sequence
  Description of Artificial Sequence: Synthetic oligonucleotide
  Sense strand starting at position 506 of SEQ ID NO: 1885546
gaauguuucuaguuauaag

SEQ ID NO: 2350019 - RNA, 19 nt, Artificial Sequence
  Description of Artificial Sequence: Synthetic oligonucleotide
  Antisense strand to SEQ ID NO: 2350018
cuuauaacuagaaacauuc

SEQ ID NO: 2350020 - RNA, 19 nt, Artificial Sequence
  Description of Artificial Sequence: Synthetic oligonucleotide
  Sense strand starting at position 581 of SEQ ID NO: 1885546
aggagcugaaguugacaau

SEQ ID NO: 2350021 - RNA, 19 nt, Artificial Sequence
  Description of Artificial Sequence: Synthetic oligonucleotide
  Antisense strand to SEQ ID NO: 2350020
auugucaacuucagcuccu

SEQ ID NO: 2350022 - RNA, 19 nt, Artificial Sequence
  Description of Artificial Sequence: Synthetic oligonucleotide
  Sense strand starting at position 682 of SEQ ID NO: 1885546
uugacauguuugucaagaa

SEQ ID NO: 2350023 - RNA, 19 nt, Artificial Sequence
  Description of Artificial Sequence: Synthetic oligonucleotide
  Antisense strand to SEQ ID NO: 2350022
uucuugacaaacaugucaa

SEQ ID NO: 2350024 - RNA, 19 nt, Artificial Sequence
  Description of Artificial Sequence: Synthetic oligonucleotide
  Sense strand starting at position 707 of SEQ ID NO: 1885546
caggucauuguuuaaugua

SEQ ID NO: 2350025 - RNA, 19 nt, Artificial Sequence
  Description of Artificial Sequence: Synthetic oligonucleotide
  Antisense strand to SEQ ID NO: 2350024
uacauuaaacaaugaccug

SEQ ID NO: 2350026 - RNA, 19 nt, Artificial Sequence
  Description of Artificial Sequence: Synthetic oligonucleotide
  Sense strand starting at position 1151 of SEQ ID NO: 1885546
gaaggucuccucuagcauc

SEQ ID NO: 2350027 - RNA, 19 nt, Artificial Sequence
  Description of Artificial Sequence: Synthetic oligonucleotide
  Antisense strand to SEQ ID NO: 2350026
gaugcuagaggagaccuuc

SEQ ID NO: 2350028 - RNA, 19 nt, Artificial Sequence
  Description of Artificial Sequence: Synthetic oligonucleotide
  Sense strand starting at position 1227 of SEQ ID NO: 1885546
gcgcuauuauuauuugauu

SEQ ID NO: 2350029 - RNA, 19 nt, Artificial Sequence
  Description of Artificial Sequence: Synthetic oligonucleotide
  Antisense strand to SEQ ID NO: 2350028
aaucaaauaauaauagcgc

SEQ ID NO: 2350030 - RNA, 19 nt, Artificial Sequence
  Description of Artificial Sequence: Synthetic oligonucleotide
  Sense strand starting at position 1405 of SEQ ID NO: 1885546
uguugcuuauugguauuua

SEQ ID NO: 2350031 - RNA, 19 nt, Artificial Sequence
  Description of Artificial Sequence: Synthetic oligonucleotide
  Antisense strand to SEQ ID NO: 2350030
uaaauaccaauaagcaaca

SEQ ID NO: 2350032 - RNA, 19 nt, Artificial Sequence
  Description of Artificial Sequence: Synthetic oligonucleotide
  Sense strand starting at position 1465 of SEQ ID NO: 1885546
ucuguagagcuccaugaac

SEQ ID NO: 2350033 - RNA, 19 nt, Artificial Sequence
  Description of Artificial Sequence: Synthetic oligonucleotide
  Antisense strand to SEQ ID NO: 2350032
guucauggagcucuacaga

SEQ ID NO: 2350034 - RNA, 19 nt, Artificial Sequence
  Description of Artificial Sequence: Synthetic oligonucleotide
  Sense strand starting at position 2136 of SEQ ID NO: 1885546
ccaugacaugcggagauua

SEQ ID NO: 2350035 - RNA, 19 nt, Artificial Sequence
  Description of Artificial Sequence: Synthetic oligonucleotide
  Antisense strand to SEQ ID NO: 2350034
uaaucuccgcaugucaugg

SEQ ID NO: 2350036 - RNA, 19 nt, Artificial Sequence
  Description of Artificial Sequence: Synthetic oligonucleotide
  Sense strand starting at position 2308 of SEQ ID NO: 1885546
aagaauggauagucaugua

SEQ ID NO: 2350037 - RNA, 19 nt, Artificial Sequence
  Description of Artificial Sequence: Synthetic oligonucleotide
  Antisense strand to SEQ ID NO: 2350036
uacaugacuauccauucuu

SEQ ID NO: 2350038 - RNA, 19 nt, Artificial Sequence
  Description of Artificial Sequence: Synthetic oligonucleotide
  Sense strand starting at position 2313 of SEQ ID NO: 1885546
uggauagucauguagaagu

SEQ ID NO: 2350039 - RNA, 19 nt, Artificial Sequence
  Description of Artificial Sequence: Synthetic oligonucleotide
  Antisense strand to SEQ ID NO: 2350038
acuucuacaugacuaucca

SEQ ID NO: 2350040 - RNA, 19 nt, Artificial Sequence
  Description of Artificial Sequence: Synthetic oligonucleotide
  Sense strand starting at position 2315 of SEQ ID NO: 1885546
gauagucauguagaaguau

SEQ ID NO: 2350041 - RNA, 19 nt, Artificial Sequence
  Description of Artificial Sequence: Synthetic oligonucleotide
  Antisense strand to SEQ ID NO: 2350040
auacuucuacaugacuauc

SEQ ID NO: 2350042 - RNA, 19 nt, Artificial Sequence
  Description of Artificial Sequence: Synthetic oligonucleotide
  Sense strand starting at position 2324 of SEQ ID NO: 1885546
guagaaguauaauugguca

SEQ ID NO: 2350043 - RNA, 19 nt, Artificial Sequence
  Description of Artificial Sequence: Synthetic oligonucleotide
  Antisense strand to SEQ ID NO: 2350042
ugaccaauuauacuucuac

SEQ ID NO: 2350044 - RNA, 19 nt, Artificial Sequence
  Description of Artificial Sequence: Synthetic oligonucleotide
  Sense strand starting at position 2471 of SEQ ID NO: 1885546
gucaaagaauucucuuaug

SEQ ID NO: 2350045 - RNA, 19 nt, Artificial Sequence
  Description of Artificial Sequence: Synthetic oligonucleotide
  Antisense strand to SEQ ID NO: 2350044
cauaagagaauucuuugac

SEQ ID NO: 2350046 - RNA, 19 nt, Artificial Sequence
  Description of Artificial Sequence: Synthetic oligonucleotide
  Sense strand starting at position 2581 of SEQ ID NO: 1885546
guaacauguccugaauccu

SEQ ID NO: 2350047 - RNA, 19 nt, Artificial Sequence
  Description of Artificial Sequence: Synthetic oligonucleotide
  Antisense strand to SEQ ID NO: 2350046
aggauucaggacauguuac

SEQ ID NO: 2350048 - RNA, 19 nt, Artificial Sequence
  Description of Artificial Sequence: Synthetic oligonucleotide
  Sense strand starting at position 2691 of SEQ ID NO: 1885546
ucauuaauuucccaugagg

SEQ ID NO: 2350049 - RNA, 19 nt, Artificial Sequence
  Description of Artificial Sequence: Synthetic oligonucleotide
  Antisense strand to SEQ ID NO: 2350048
ccucaugggaaauuaauga

SEQ ID NO: 2350050 - RNA, 19 nt, Artificial Sequence
  Description of Artificial Sequence: Synthetic oligonucleotide
  Sense strand starting at position 2760 of SEQ ID NO: 1885546
agauauaucagguagcuug

SEQ ID NO: 2350051 - RNA, 19 nt, Artificial Sequence
  Description of Artificial Sequence: Synthetic oligonucleotide
  Antisense strand to SEQ ID NO: 2350050
caagcuaccugauauaucu

SEQ ID NO: 2350052 - RNA, 19 nt, Artificial Sequence
  Description of Artificial Sequence: Synthetic oligonucleotide
  Sense strand starting at position 2811 of SEQ ID NO: 1885546
ggugauauuaggcaaguua

SEQ ID NO: 2350053 - RNA, 19 nt, Artificial Sequence
  Description of Artificial Sequence: Synthetic oligonucleotide
  Antisense strand to SEQ ID NO: 2350052
uaacuugccuaauaucacc

SEQ ID NO: 2350054 - RNA, 19 nt, Artificial Sequence
  Description of Artificial Sequence: Synthetic oligonucleotide
  Sense strand starting at position 2947 of SEQ ID NO: 1885546
agcuuaacagauggacaau

SEQ ID NO: 2350055 - RNA, 19 nt, Artificial Sequence
  Description of Artificial Sequence: Synthetic oligonucleotide
  Antisense strand to SEQ ID NO: 2350054
auuguccaucuguuaagcu

SEQ ID NO: 2350056 - RNA, 19 nt, Artificial Sequence
  Description of Artificial Sequence: Synthetic oligonucleotide
  Sense strand starting at position 3028 of SEQ ID NO: 1885546
ggcaaagcaaguuauuaga

SEQ ID NO: 2350057 - RNA, 19 nt, Artificial Sequence
  Description of Artificial Sequence: Synthetic oligonucleotide
  Antisense strand to SEQ ID NO: 2350056
ucuaauaacuugcuuugcc

SEQ ID NO: 2350058 - RNA, 19 nt, Artificial Sequence
  Description of Artificial Sequence: Synthetic oligonucleotide
  Sense strand starting at position 3045 of SEQ ID NO: 1885546
gaaucugaucacugaggua

SEQ ID NO: 2350059 - RNA, 19 nt, Artificial Sequence
  Description of Artificial Sequence: Synthetic oligonucleotide
  Antisense strand to SEQ ID NO: 2350058
uaccucagugaucagauuc

SEQ ID NO: 2350060 - RNA, 19 nt, Artificial Sequence
  Description of Artificial Sequence: Synthetic oligonucleotide
  Sense strand starting at position 3145 of SEQ ID NO: 1885546
uuaguugucacagaaaguc

SEQ ID NO: 2350061 - RNA, 19 nt, Artificial Sequence
  Description of Artificial Sequence: Synthetic oligonucleotide
  Antisense strand to SEQ ID NO: 2350060
gacuuucugugacaacuaa

SEQ ID NO: 2350062 - RNA, 19 nt, Artificial Sequence
  Description of Artificial Sequence: Synthetic oligonucleotide
  Sense strand starting at position 3171 of SEQ ID NO: 1885546
cuugcucuucguucucauu

SEQ ID NO: 2350063 - RNA, 19 nt, Artificial Sequence
  Description of Artificial Sequence: Synthetic oligonucleotide
  Antisense strand to SEQ ID NO: 2350062
aaugagaacgaagagcaag

SEQ ID NO: 2350064 - RNA, 19 nt, Artificial Sequence
  Description of Artificial Sequence: Synthetic oligonucleotide
  Sense strand starting at position 3198 of SEQ ID NO: 1885546
gagcacaggcuuuaugacu

SEQ ID NO: 2350065 - RNA, 19 nt, Artificial Sequence
  Description of Artificial Sequence: Synthetic oligonucleotide
  Antisense strand to SEQ ID NO: 2350064
agucauaaagccugugcuc

SEQ ID NO: 2350066 - RNA, 19 nt, Artificial Sequence
  Description of Artificial Sequence: Synthetic oligonucleotide
  Sense strand starting at position 3204 of SEQ ID NO: 1885546
aggcuuuaugacuauuacu

SEQ ID NO: 2350067 - RNA, 19 nt, Artificial Sequence
  Description of Artificial Sequence: Synthetic oligonucleotide
  Antisense strand to SEQ ID NO: 2350066
aguaauagucauaaagccu

SEQ ID NO: 2350068 - RNA, 19 nt, Artificial Sequence
  Description of Artificial Sequence: Synthetic oligonucleotide
  Sense strand starting at position 3213 of SEQ ID NO: 1885546
gacuauuacugagugcaga

SEQ ID NO: 2350069 - RNA, 19 nt, Artificial Sequence
  Description of Artificial Sequence: Synthetic oligonucleotide
  Antisense strand to SEQ ID NO: 2350068
ucugcacucaguaauaguc

SEQ ID NO: 2350070 - RNA, 19 nt, Artificial Sequence
  Description of Artificial Sequence: Synthetic oligonucleotide
  Sense strand starting at position 3345 of SEQ ID NO: 1885546
ugauuuguagcaugugcca

SEQ ID NO: 2350071 - RNA, 19 nt, Artificial Sequence
  Description of Artificial Sequence: Synthetic oligonucleotide
  Antisense strand to SEQ ID NO: 2350070
uggcacaugcuacaaauca

SEQ ID NO: 2350072 - RNA, 19 nt, Artificial Sequence
  Description of Artificial Sequence: Synthetic oligonucleotide
  Sense strand starting at position 3463 of SEQ ID NO: 1885546
ucucaagaugugcaaaugu

SEQ ID NO: 2350073 - RNA, 19 nt, Artificial Sequence
  Description of Artificial Sequence: Synthetic oligonucleotide
  Antisense strand to SEQ ID NO: 2350072
acauuugcacaucuugaga

SEQ ID NO: 2350074 - RNA, 19 nt, Artificial Sequence
  Description of Artificial Sequence: Synthetic oligonucleotide
  Sense strand starting at position 3498 of SEQ ID NO: 1885546
gccuuugugggauaauuaa

SEQ ID NO: 2350075 - RNA, 19 nt, Artificial Sequence
  Description of Artificial Sequence: Synthetic oligonucleotide
  Antisense strand to SEQ ID NO: 2350074
uuaauuaucccacaaaggc

SEQ ID NO: 2350076 - RNA, 19 nt, Artificial Sequence
  Description of Artificial Sequence: Synthetic oligonucleotide
  Sense strand starting at position 3632 of SEQ ID NO: 1885546
cugagagcucagcauguaa

SEQ ID NO: 2350077 - RNA, 19 nt, Artificial Sequence
  Description of Artificial Sequence: Synthetic oligonucleotide
  Antisense strand to SEQ ID NO: 2350076
uuacaugcugagcucucag

SEQ ID NO: 2350078 - RNA, 19 nt, Artificial Sequence
  Description of Artificial Sequence: Synthetic oligonucleotide
  Sense strand starting at position 3746 of SEQ ID NO: 1885546
uuuggagccguauguauuu

SEQ ID NO: 2350079 - RNA, 19 nt, Artificial Sequence
  Description of Artificial Sequence: Synthetic oligonucleotide
  Antisense strand to SEQ ID NO: 2350078
aaauacauacggcuccaaa

SEQ ID NO: 2350080 - RNA, 19 nt, Artificial Sequence
  Description of Artificial Sequence: Synthetic oligonucleotide
  Sense strand starting at position 3844 of SEQ ID NO: 1885546
aagaacugaguuuaugcau

SEQ ID NO: 2350081 - RNA, 19 nt, Artificial Sequence
  Description of Artificial Sequence: Synthetic oligonucleotide
  Antisense strand to SEQ ID NO: 2350080
augcauaaacucaguucuu

SEQ ID NO: 2350082 - RNA, 19 nt, Artificial Sequence
  Description of Artificial Sequence: Synthetic oligonucleotide
  Sense strand starting at position 3941 of SEQ ID NO: 1885546
gugaguuggcagccucgua

SEQ ID NO: 2350083 - RNA, 19 nt, Artificial Sequence
  Description of Artificial Sequence: Synthetic oligonucleotide
  Antisense strand to SEQ ID NO: 2350082
uacgaggcugccaacucac

SEQ ID NO: 2350084 - RNA, 19 nt, Artificial Sequence
  Description of Artificial Sequence: Synthetic oligonucleotide
  Sense strand starting at position 5 of SEQ ID NO: 1885547
gcugccaucucaggagaca

SEQ ID NO: 2350085 - RNA, 19 nt, Artificial Sequence
  Description of Artificial Sequence: Synthetic oligonucleotide
  Antisense strand to SEQ ID NO: 2350084
ugucuccugagauggcagc

SEQ ID NO: 2350086 - RNA, 19 nt, Artificial Sequence
  Description of Artificial Sequence: Synthetic oligonucleotide
  Sense strand starting at position 204 of SEQ ID NO: 1885547
cgugcuauugccugaccau

SEQ ID NO: 2350087 - RNA, 19 nt, Artificial Sequence
  Description of Artificial Sequence: Synthetic oligonucleotide
  Antisense strand to SEQ ID NO: 2350086
auggucaggcaauagcacg

SEQ ID NO: 2350088 - RNA, 19 nt, Artificial Sequence
  Description of Artificial Sequence: Synthetic oligonucleotide
  Sense strand starting at position 205 of SEQ ID NO: 1885547
gugcuauugccugaccaua

SEQ ID NO: 2350089 - RNA, 19 nt, Artificial Sequence
  Description of Artificial Sequence: Synthetic oligonucleotide
  Antisense strand to SEQ ID NO: 2350088
uauggucaggcaauagcac

SEQ ID NO: 2350090 - RNA, 19 nt, Artificial Sequence
  Description of Artificial Sequence: Synthetic oligonucleotide
  Sense strand starting at position 207 of SEQ ID NO: 1885547
gcuauugccugaccauacu

SEQ ID NO: 2350091 - RNA, 19 nt, Artificial Sequence
  Description of Artificial Sequence: Synthetic oligonucleotide
  Antisense strand to SEQ ID NO: 2350090
aguauggucaggcaauagc

SEQ ID NO: 2350092 - RNA, 19 nt, Artificial Sequence
  Description of Artificial Sequence: Synthetic oligonucleotide
  Sense strand starting at position 431 of SEQ ID NO: 1885547
ccucucucauccguaugau

SEQ ID NO: 2350093 - RNA, 19 nt, Artificial Sequence
  Description of Artificial Sequence: Synthetic oligonucleotide
  Antisense strand to SEQ ID NO: 2350092
aucauacggaugagagagg

SEQ ID NO: 2350094 - RNA, 19 nt, Artificial Sequence
  Description of Artificial Sequence: Synthetic oligonucleotide
  Sense strand starting at position 432 of SEQ ID NO: 1885547
cucucucauccguaugauu

SEQ ID NO: 2350095 - RNA, 19 nt, Artificial Sequence
  Description of Artificial Sequence: Synthetic oligonucleotide
  Antisense strand to SEQ ID NO: 2350094
aaucauacggaugagagag

SEQ ID NO: 2350096 - RNA, 19 nt, Artificial Sequence
  Description of Artificial Sequence: Synthetic oligonucleotide
  Sense strand starting at position 434 of SEQ ID NO: 1885547
cucucauccguaugauucu

SEQ ID NO: 2350097 - RNA, 19 nt, Artificial Sequence
  Description of Artificial Sequence: Synthetic oligonucleotide
  Antisense strand to SEQ ID NO: 2350096
agaaucauacggaugagag

SEQ ID NO: 2350098 - RNA, 19 nt, Artificial Sequence
  Description of Artificial Sequence: Synthetic oligonucleotide
  Sense strand starting at position 437 of SEQ ID NO: 1885547
ucauccguaugauucugaa

SEQ ID NO: 2350099 - RNA, 19 nt, Artificial Sequence
  Description of Artificial Sequence: Synthetic oligonucleotide
  Antisense strand to SEQ ID NO: 2350098
uucagaaucauacggauga

SEQ ID NO: 2350100 - RNA, 19 nt, Artificial Sequence
  Description of Artificial Sequence: Synthetic oligonucleotide
  Sense strand starting at position 499 of SEQ ID NO: 1885547
cccugugagccgugacagu

SEQ ID NO: 2350101 - RNA, 19 nt, Artificial Sequence
  Description of Artificial Sequence: Synthetic oligonucleotide
  Antisense strand to SEQ ID NO: 2350100
acugucacggcucacaggg

SEQ ID NO: 2350102 - RNA, 19 nt, Artificial Sequence
  Description of Artificial Sequence: Synthetic oligonucleotide
  Sense strand starting at position 545 of SEQ ID NO: 1885547
cucugaaucuguuggguca

SEQ ID NO: 2350103 - RNA, 19 nt, Artificial Sequence
  Description of Artificial Sequence: Synthetic oligonucleotide
  Antisense strand to SEQ ID NO: 2350102
ugacccaacagauucagag

SEQ ID NO: 2350104 - RNA, 19 nt, Artificial Sequence
  Description of Artificial Sequence: Synthetic oligonucleotide
  Sense strand starting at position 626 of SEQ ID NO: 1885547
gguagccugaaaugucuua

SEQ ID NO: 2350105 - RNA, 19 nt, Artificial Sequence
  Description of Artificial Sequence: Synthetic oligonucleotide
  Antisense strand to SEQ ID NO: 2350104
uaagacauuucaggcuacc

SEQ ID NO: 2350106 - RNA, 19 nt, Artificial Sequence
  Description of Artificial Sequence: Synthetic oligonucleotide
  Sense strand starting at position 952 of SEQ ID NO: 1885547
gggacauguuugcuaaguc

SEQ ID NO: 2350107 - RNA, 19 nt, Artificial Sequence
  Description of Artificial Sequence: Synthetic oligonucleotide
  Antisense strand to SEQ ID NO: 2350106
gacuuagcaaacauguccc

SEQ ID NO: 2350108 - RNA, 19 nt, Artificial Sequence
  Description of Artificial Sequence: Synthetic oligonucleotide
  Sense strand starting at position 1499 of SEQ ID NO: 1885547
ccaagaugccugggaacuu

SEQ ID NO: 2350109 - RNA, 19 nt, Artificial Sequence
  Description of Artificial Sequence: Synthetic oligonucleotide
  Antisense strand to SEQ ID NO: 2350108
aaguucccaggcaucuugg

SEQ ID NO: 2350110 - RNA, 19 nt, Artificial Sequence
  Description of Artificial Sequence: Synthetic oligonucleotide
  Sense strand starting at position 1500 of SEQ ID NO: 1885547
caagaugccugggaacuuu

SEQ ID NO: 2350111 - RNA, 19 nt, Artificial Sequence
  Description of Artificial Sequence: Synthetic oligonucleotide
  Antisense strand to SEQ ID NO: 2350110
aaaguucccaggcaucuug

SEQ ID NO: 2350112 - RNA, 19 nt, Artificial Sequence
  Description of Artificial Sequence: Synthetic oligonucleotide
  Sense strand starting at position 2028 of SEQ ID NO: 1885547
uggcuucuguccuuaugau

SEQ ID NO: 2350113 - RNA, 19 nt, Artificial Sequence
  Description of Artificial Sequence: Synthetic oligonucleotide
  Antisense strand to SEQ ID NO: 2350112
aucauaaggacagaagcca

SEQ ID NO: 2350114 - RNA, 19 nt, Artificial Sequence
  Description of Artificial Sequence: Synthetic oligonucleotide
  Sense strand starting at position 2029 of SEQ ID NO: 1885547
ggcuucuguccuuaugaug

SEQ ID NO: 2350115 - RNA, 19 nt, Artificial Sequence
  Description of Artificial Sequence: Synthetic oligonucleotide
  Antisense strand to SEQ ID NO: 2350114
caucauaaggacagaagcc

SEQ ID NO: 2350116 - RNA, 19 nt, Artificial Sequence
  Description of Artificial Sequence: Synthetic oligonucleotide
  Sense strand starting at position 2036 of SEQ ID NO: 1885547
guccuuaugauguguccau

SEQ ID NO: 2350117 - RNA, 19 nt, Artificial Sequence
  Description of Artificial Sequence: Synthetic oligonucleotide
  Antisense strand to SEQ ID NO: 2350116
auggacacaucauaaggac

SEQ ID NO: 2350118 - RNA, 19 nt, Artificial Sequence
  Description of Artificial Sequence: Synthetic oligonucleotide
  Sense strand starting at position 2037 of SEQ ID NO: 1885547
uccuuaugauguguccauu

SEQ ID NO: 2350119 - RNA, 19 nt, Artificial Sequence
  Description of Artificial Sequence: Synthetic oligonucleotide
  Antisense strand to SEQ ID NO: 2350118
aauggacacaucauaagga

SEQ ID NO: 2350120 - RNA, 19 nt, Artificial Sequence
  Description of Artificial Sequence: Synthetic oligonucleotide
  Sense strand starting at position 2040 of SEQ ID NO: 1885547
uuaugauguguccauugca

SEQ ID NO: 2350121 - RNA, 19 nt, Artificial Sequence
  Description of Artificial Sequence: Synthetic oligonucleotide
  Antisense strand to SEQ ID NO: 2350120
ugcaauggacacaucauaa

SEQ ID NO: 2350122 - RNA, 19 nt, Artificial Sequence
  Description of Artificial Sequence: Synthetic oligonucleotide
  Sense strand starting at position 2043 of SEQ ID NO: 1885547
ugauguguccauugcagga

SEQ ID NO: 2350123 - RNA, 19 nt, Artificial Sequence
  Description of Artificial Sequence: Synthetic oligonucleotide
  Antisense strand to SEQ ID NO: 2350122
uccugcaauggacacauca

SEQ ID NO: 2350124 - RNA, 19 nt, Artificial Sequence
  Description of Artificial Sequence: Synthetic oligonucleotide
  Sense strand starting at position 2166 of SEQ ID NO: 1885547
ccaugugagacuugggcua

SEQ ID NO: 2350125 - RNA, 19 nt, Artificial Sequence
  Description of Artificial Sequence: Synthetic oligonucleotide
  Antisense strand to SEQ ID NO: 2350124
uagcccaagucucacaugg

SEQ ID NO: 2350126 - RNA, 19 nt, Artificial Sequence
  Description of Artificial Sequence: Synthetic oligonucleotide
  Sense strand starting at position 2168 of SEQ ID NO: 1885547
augugagacuugggcuauu

SEQ ID NO: 2350127 - RNA, 19 nt, Artificial Sequence
  Description of Artificial Sequence: Synthetic oligonucleotide
  Antisense strand to SEQ ID NO: 2350126
aauagcccaagucucacau

SEQ ID NO: 2350128 - RNA, 19 nt, Artificial Sequence
  Description of Artificial Sequence: Synthetic oligonucleotide
  Sense strand starting at position 2213 of SEQ ID NO: 1885547
gcuuuaugugcugcccagu

SEQ ID NO: 2350129 - RNA, 19 nt, Artificial Sequence
  Description of Artificial Sequence: Synthetic oligonucleotide
  Antisense strand to SEQ ID NO: 2350128
acugggcagcacauaaagc

SEQ ID NO: 2350130 - RNA, 19 nt, Artificial Sequence
  Description of Artificial Sequence: Synthetic oligonucleotide
  Sense strand starting at position 2426 of SEQ ID NO: 1885547
cggugaaccuccuguugga

SEQ ID NO: 2350131 - RNA, 19 nt, Artificial Sequence
  Description of Artificial Sequence: Synthetic oligonucleotide
  Antisense strand to SEQ ID NO: 2350130
uccaacaggagguucaccg

SEQ ID NO: 2350132 - RNA, 19 nt, Artificial Sequence
  Description of Artificial Sequence: Synthetic oligonucleotide
  Sense strand starting at position 2595 of SEQ ID NO: 1885547
ucagauggcuccugggaag

SEQ ID NO: 2350133 - RNA, 19 nt, Artificial Sequence
  Description of Artificial Sequence: Synthetic oligonucleotide
  Antisense strand to SEQ ID NO: 2350132
cuucccaggagccaucuga

SEQ ID NO: 2350134 - RNA, 19 nt, Artificial Sequence
  Description of Artificial Sequence: Synthetic oligonucleotide
  Sense strand starting at position 2806 of SEQ ID NO: 1885547
ggagcaagaucuggaucaa

SEQ ID NO: 2350135 - RNA, 19 nt, Artificial Sequence
  Description of Artificial Sequence: Synthetic oligonucleotide
  Antisense strand to SEQ ID NO: 2350134
uugauccagaucuugcucc

SEQ ID NO: 2350136 - RNA, 19 nt, Artificial Sequence
  Description of Artificial Sequence: Synthetic oligonucleotide
  Sense strand starting at position 3182 of SEQ ID NO: 1885547
agcaguguccgagguguuu

SEQ ID NO: 2350137 - RNA, 19 nt, Artificial Sequence
  Description of Artificial Sequence: Synthetic oligonucleotide
  Antisense strand to SEQ ID NO: 2350136
aaacaccucggacacugcu

SEQ ID NO: 2350138 - RNA, 19 nt, Artificial Sequence
  Description of Artificial Sequence: Synthetic oligonucleotide
  Sense strand starting at position 3194 of SEQ ID NO: 1885547
gguguuucacgaggauaag

SEQ ID NO: 2350139 - RNA, 19 nt, Artificial Sequence
  Description of Artificial Sequence: Synthetic oligonucleotide
  Antisense strand to SEQ ID NO: 2350138
cuuauccucgugaaacacc

SEQ ID NO: 2350140 - RNA, 19 nt, Artificial Sequence
  Description of Artificial Sequence: Synthetic oligonucleotide
  Sense strand starting at position 3195 of SEQ ID NO: 1885547
guguuucacgaggauaaga

SEQ ID NO: 2350141 - RNA, 19 nt, Artificial Sequence
  Description of Artificial Sequence: Synthetic oligonucleotide
  Antisense strand to SEQ ID NO: 2350140
ucuuauccucgugaaacac

SEQ ID NO: 2350142 - RNA, 19 nt, Artificial Sequence
  Description of Artificial Sequence: Synthetic oligonucleotide
  Sense strand starting at position 3235 of SEQ ID NO: 1885547
ggcauucuggcagaaggaa

SEQ ID NO: 2350143 - RNA, 19 nt, Artificial Sequence
  Description of Artificial Sequence: Synthetic oligonucleotide
  Antisense strand to SEQ ID NO: 2350142
uuccuucugccagaaugcc

SEQ ID NO: 2350144 - RNA, 19 nt, Artificial Sequence
  Description of Artificial Sequence: Synthetic oligonucleotide
  Sense strand starting at position 3465 of SEQ ID NO: 1885547
ggugcagaaucagaagaaa

SEQ ID NO: 2350145 - RNA, 19 nt, Artificial Sequence
  Description of Artificial Sequence: Synthetic oligonucleotide
  Antisense strand to SEQ ID NO: 2350144
uuucuucugauucugcacc

SEQ ID NO: 2350146 - RNA, 19 nt, Artificial Sequence
  Description of Artificial Sequence: Synthetic oligonucleotide
  Sense strand starting at position 3660 of SEQ ID NO: 1885547
uggcuugacugacagucau

SEQ ID NO: 2350147 - RNA, 19 nt, Artificial Sequence
  Description of Artificial Sequence: Synthetic oligonucleotide
  Antisense strand to SEQ ID NO: 2350146
augacugucagucaagcca

SEQ ID NO: 2350148 - RNA, 19 nt, Artificial Sequence
  Description of Artificial Sequence: Synthetic oligonucleotide
  Sense strand starting at position 3702 of SEQ ID NO: 1885547
ccggaaguuucccagugca

SEQ ID NO: 2350149 - RNA, 19 nt, Artificial Sequence
  Description of Artificial Sequence: Synthetic oligonucleotide
  Antisense strand to SEQ ID NO: 2350148
ugcacugggaaacuuccgg

SEQ ID NO: 2350150 - RNA, 19 nt, Artificial Sequence
  Description of Artificial Sequence: Synthetic oligonucleotide
  Sense strand starting at position 3705 of SEQ ID NO: 1885547
gaaguuucccagugcaaac

SEQ ID NO: 2350151 - RNA, 19 nt, Artificial Sequence
  Description of Artificial Sequence: Synthetic oligonucleotide
  Antisense strand to SEQ ID NO: 2350150
guuugcacugggaaacuuc

SEQ ID NO: 2350152 - RNA, 19 nt, Artificial Sequence
  Description of Artificial Sequence: Synthetic oligonucleotide
  Sense strand starting at position 3726 of SEQ ID NO: 1885547
uggcgcuguucccaaggaa

SEQ ID NO: 2350153 - RNA, 19 nt, Artificial Sequence
  Description of Artificial Sequence: Synthetic oligonucleotide
  Antisense strand to SEQ ID NO: 2350152
uuccuugggaacagcgcca

SEQ ID NO: 2350154 - RNA, 19 nt, Artificial Sequence
  Description of Artificial Sequence: Synthetic oligonucleotide
  Sense strand starting at position 3844 of SEQ ID NO: 1885547
uccggauagguccagggua

SEQ ID NO: 2350155 - RNA, 19 nt, Artificial Sequence
  Description of Artificial Sequence: Synthetic oligonucleotide
  Antisense strand to SEQ ID NO: 2350154
uacccuggaccuauccgga

SEQ ID NO: 2350156 - RNA, 19 nt, Artificial Sequence
  Description of Artificial Sequence: Synthetic oligonucleotide
  Sense strand starting at position 3944 of SEQ ID NO: 1885547
ccgugaugccugggaacuu

SEQ ID NO: 2350157 - RNA, 19 nt, Artificial Sequence
  Description of Artificial Sequence: Synthetic oligonucleotide
  Antisense strand to SEQ ID NO: 2350156
aaguucccaggcaucacgg

SEQ ID NO: 2350158 - RNA, 19 nt, Artificial Sequence
  Description of Artificial Sequence: Synthetic oligonucleotide
  Sense strand starting at position 3945 of SEQ ID NO: 1885547
cgugaugccugggaacuuu

SEQ ID NO: 2350159 - RNA, 19 nt, Artificial Sequence
  Description of Artificial Sequence: Synthetic oligonucleotide
  Antisense strand to SEQ ID NO: 2350158
aaaguucccaggcaucacg

SEQ ID NO: 2350160 - RNA, 19 nt, Artificial Sequence
  Description of Artificial Sequence: Synthetic oligonucleotide
  Sense strand starting at position 3954 of SEQ ID NO: 1885547
ugggaacuuucaguaagug

SEQ ID NO: 2350161 - RNA, 19 nt, Artificial Sequence
  Description of Artificial Sequence: Synthetic oligonucleotide
  Antisense strand to SEQ ID NO: 2350160
cacuuacugaaaguuccca

SEQ ID NO: 2350162 - RNA, 19 nt, Artificial Sequence
  Description of Artificial Sequence: Synthetic oligonucleotide
  Sense strand starting at position 3980 of SEQ ID NO: 1885547
ccaacaaguucuggaagga

SEQ ID NO: 2350163 - RNA, 19 nt, Artificial Sequence
  Description of Artificial Sequence: Synthetic oligonucleotide
  Antisense strand to SEQ ID NO: 2350162
uccuuccagaacuuguugg

SEQ ID NO: 2350164 - RNA, 19 nt, Artificial Sequence
  Description of Artificial Sequence: Synthetic oligonucleotide
  Sense strand starting at position 31 of SEQ ID NO: 1885548
gcugccaucucaggagaca

SEQ ID NO: 2350165 - RNA, 19 nt, Artificial Sequence
  Description of Artificial Sequence: Synthetic oligonucleotide
  Antisense strand to SEQ ID NO: 2350164
ugucuccugagauggcagc

SEQ ID NO: 2350166 - RNA, 19 nt, Artificial Sequence
  Description of Artificial Sequence: Synthetic oligonucleotide
  Sense strand starting at position 230 of SEQ ID NO: 1885548
cgugcuauugccugaccau

SEQ ID NO: 2350167 - RNA, 19 nt, Artificial Sequence
  Description of Artificial Sequence: Synthetic oligonucleotide
  Antisense strand to SEQ ID NO: 2350166
auggucaggcaauagcacg

SEQ ID NO: 2350168 - RNA, 19 nt, Artificial Sequence
  Description of Artificial Sequence: Synthetic oligonucleotide
  Sense strand starting at position 231 of SEQ ID NO: 1885548
gugcuauugccugaccaua

SEQ ID NO: 2350169 - RNA, 19 nt, Artificial Sequence
  Description of Artificial Sequence: Synthetic oligonucleotide
  Antisense strand to SEQ ID NO: 2350168
uauggucaggcaauagcac

SEQ ID NO: 2350170 - RNA, 19 nt, Artificial Sequence
  Description of Artificial Sequence: Synthetic oligonucleotide
  Sense strand starting at position 233 of SEQ ID NO: 1885548
gcuauugccugaccauacu

SEQ ID NO: 2350171 - RNA, 19 nt, Artificial Sequence
  Description of Artificial Sequence: Synthetic oligonucleotide
  Antisense strand to SEQ ID NO: 2350170
aguauggucaggcaauagc

SEQ ID NO: 2350172 - RNA, 19 nt, Artificial Sequence
  Description of Artificial Sequence: Synthetic oligonucleotide
  Sense strand starting at position 457 of SEQ ID NO: 1885548
ccucucucauccguaugau

SEQ ID NO: 2350173 - RNA, 19 nt, Artificial Sequence
  Description of Artificial Sequence: Synthetic oligonucleotide
  Antisense strand to SEQ ID NO: 2350172
aucauacggaugagagagg

SEQ ID NO: 2350174 - RNA, 19 nt, Artificial Sequence
  Description of Artificial Sequence: Synthetic oligonucleotide
  Sense strand starting at position 458 of SEQ ID NO: 1885548
cucucucauccguaugauu

SEQ ID NO: 2350175 - RNA, 19 nt, Artificial Sequence
  Description of Artificial Sequence: Synthetic oligonucleotide
  Antisense strand to SEQ ID NO: 2350174
aaucauacggaugagagag

SEQ ID NO: 2350176 - RNA, 19 nt, Artificial Sequence
  Description of Artificial Sequence: Synthetic oligonucleotide
  Sense strand starting at position 460 of SEQ ID NO: 1885548
cucucauccguaugauucu

SEQ ID NO: 2350177 - RNA, 19 nt, Artificial Sequence
  Description of Artificial Sequence: Synthetic oligonucleotide
  Antisense strand to SEQ ID NO: 2350176
agaaucauacggaugagag

SEQ ID NO: 2350178 - RNA, 19 nt, Artificial Sequence
  Description of Artificial Sequence: Synthetic oligonucleotide
  Sense strand starting at position 463 of SEQ ID NO: 1885548
ucauccguaugauucugaa

SEQ ID NO: 2350179 - RNA, 19 nt, Artificial Sequence
  Description of Artificial Sequence: Synthetic oligonucleotide
  Antisense strand to SEQ ID NO: 2350178
uucagaaucauacggauga

SEQ ID NO: 2350180 - RNA, 19 nt, Artificial Sequence
  Description of Artificial Sequence: Synthetic oligonucleotide
  Sense strand starting at position 525 of SEQ ID NO: 1885548
cccugugagccgugacagu

SEQ ID NO: 2350181 - RNA, 19 nt, Artificial Sequence
  Description of Artificial Sequence: Synthetic oligonucleotide
  Antisense strand to SEQ ID NO: 2350180
acugucacggcucacaggg

SEQ ID NO: 2350182 - RNA, 19 nt, Artificial Sequence
  Description of Artificial Sequence: Synthetic oligonucleotide
  Sense strand starting at position 571 of SEQ ID NO: 1885548
cucugaaucuguuggguca

SEQ ID NO: 2350183 - RNA, 19 nt, Artificial Sequence
  Description of Artificial Sequence: Synthetic oligonucleotide
  Antisense strand to SEQ ID NO: 2350182
ugacccaacagauucagag

SEQ ID NO: 2350184 - RNA, 19 nt, Artificial Sequence
  Description of Artificial Sequence: Synthetic oligonucleotide
  Sense strand starting at position 652 of SEQ ID NO: 1885548
gguagccugaaaugucuua

SEQ ID NO: 2350185 - RNA, 19 nt, Artificial Sequence
  Description of Artificial Sequence: Synthetic oligonucleotide
  Antisense strand to SEQ ID NO: 2350184
uaagacauuucaggcuacc

SEQ ID NO: 2350186 - RNA, 19 nt, Artificial Sequence
  Description of Artificial Sequence: Synthetic oligonucleotide
  Sense strand starting at position 794 of SEQ ID NO: 1885548
aguccuccuuccugaugua

SEQ ID NO: 2350187 - RNA, 19 nt, Artificial Sequence
  Description of Artificial Sequence: Synthetic oligonucleotide
  Antisense strand to SEQ ID NO: 2350186
uacaucaggaaggaggacu

SEQ ID NO: 2350188 - RNA, 19 nt, Artificial Sequence
  Description of Artificial Sequence: Synthetic oligonucleotide
  Sense strand starting at position 978 of SEQ ID NO: 1885548
gggacauguuugcuaaguc

SEQ ID NO: 2350189 - RNA, 19 nt, Artificial Sequence
  Description of Artificial Sequence: Synthetic oligonucleotide
  Antisense strand to SEQ ID NO: 2350188
gacuuagcaaacauguccc

SEQ ID NO: 2350190 - RNA, 19 nt, Artificial Sequence
  Description of Artificial Sequence: Synthetic oligonucleotide
  Sense strand starting at position 1525 of SEQ ID NO: 1885548
ccaagaugccugggaacuu

SEQ ID NO: 2350191 - RNA, 19 nt, Artificial Sequence
  Description of Artificial Sequence: Synthetic oligonucleotide
  Antisense strand to SEQ ID NO: 2350190
aaguucccaggcaucuugg

SEQ ID NO: 2350192 - RNA, 19 nt, Artificial Sequence
  Description of Artificial Sequence: Synthetic oligonucleotide
  Sense strand starting at position 1526 of SEQ ID NO: 1885548
caagaugccugggaacuuu

SEQ ID NO: 2350193 - RNA, 19 nt, Artificial Sequence
  Description of Artificial Sequence: Synthetic oligonucleotide
  Antisense strand to SEQ ID NO: 2350192
aaaguucccaggcaucuug

SEQ ID NO: 2350194 - RNA, 19 nt, Artificial Sequence
  Description of Artificial Sequence: Synthetic oligonucleotide
  Sense strand starting at position 2054 of SEQ ID NO: 1885548
uggcuucuguccuuaugau

SEQ ID NO: 2350195 - RNA, 19 nt, Artificial Sequence
  Description of Artificial Sequence: Synthetic oligonucleotide
  Antisense strand to SEQ ID NO: 2350194
aucauaaggacagaagcca

SEQ ID NO: 2350196 - RNA, 19 nt, Artificial Sequence
  Description of Artificial Sequence: Synthetic oligonucleotide
  Sense strand starting at position 2055 of SEQ ID NO: 1885548
ggcuucuguccuuaugaug

SEQ ID NO: 2350197 - RNA, 19 nt, Artificial Sequence
  Description of Artificial Sequence: Synthetic oligonucleotide
  Antisense strand to SEQ ID NO: 2350196
caucauaaggacagaagcc

SEQ ID NO: 2350198 - RNA, 19 nt, Artificial Sequence
  Description of Artificial Sequence: Synthetic oligonucleotide
  Sense strand starting at position 2062 of SEQ ID NO: 1885548
guccuuaugauguguccau

SEQ ID NO: 2350199 - RNA, 19 nt, Artificial Sequence
  Description of Artificial Sequence: Synthetic oligonucleotide
  Antisense strand to SEQ ID NO: 2350198
auggacacaucauaaggac

SEQ ID NO: 2350200 - RNA, 19 nt, Artificial Sequence
  Description of Artificial Sequence: Synthetic oligonucleotide
  Sense strand starting at position 2063 of SEQ ID NO: 1885548
uccuuaugauguguccauu

SEQ ID NO: 2350201 - RNA, 19 nt, Artificial Sequence
  Description of Artificial Sequence: Synthetic oligonucleotide
  Antisense strand to SEQ ID NO: 2350200
aauggacacaucauaagga

SEQ ID NO: 2350202 - RNA, 19 nt, Artificial Sequence
  Description of Artificial Sequence: Synthetic oligonucleotide
  Sense strand starting at position 2066 of SEQ ID NO: 1885548
uuaugauguguccauugca

SEQ ID NO: 2350203 - RNA, 19 nt, Artificial Sequence
  Description of Artificial Sequence: Synthetic oligonucleotide
  Antisense strand to SEQ ID NO: 2350202
ugcaauggacacaucauaa

SEQ ID NO: 2350204 - RNA, 19 nt, Artificial Sequence
  Description of Artificial Sequence: Synthetic oligonucleotide
  Sense strand starting at position 2069 of SEQ ID NO: 1885548
ugauguguccauugcagga

SEQ ID NO: 2350205 - RNA, 19 nt, Artificial Sequence
  Description of Artificial Sequence: Synthetic oligonucleotide
  Antisense strand to SEQ ID NO: 2350204
uccugcaauggacacauca

SEQ ID NO: 2350206 - RNA, 19 nt, Artificial Sequence
  Description of Artificial Sequence: Synthetic oligonucleotide
  Sense strand starting at position 2192 of SEQ ID NO: 1885548
ccaugugagacuugggcua

SEQ ID NO: 2350207 - RNA, 19 nt, Artificial Sequence
  Description of Artificial Sequence: Synthetic oligonucleotide
  Antisense strand to SEQ ID NO: 2350206
uagcccaagucucacaugg

SEQ ID NO: 2350208 - RNA, 19 nt, Artificial Sequence
  Description of Artificial Sequence: Synthetic oligonucleotide
  Sense strand starting at position 2194 of SEQ ID NO: 1885548
augugagacuugggcuauu

SEQ ID NO: 2350209 - RNA, 19 nt, Artificial Sequence
  Description of Artificial Sequence: Synthetic oligonucleotide
  Antisense strand to SEQ ID NO: 2350208
aauagcccaagucucacau

SEQ ID NO: 2350210 - RNA, 19 nt, Artificial Sequence
  Description of Artificial Sequence: Synthetic oligonucleotide
  Sense strand starting at position 2239 of SEQ ID NO: 1885548
gcuuuaugugcugcccagu

SEQ ID NO: 2350211 - RNA, 19 nt, Artificial Sequence
  Description of Artificial Sequence: Synthetic oligonucleotide
  Antisense strand to SEQ ID NO: 2350210
acugggcagcacauaaagc

SEQ ID NO: 2350212 - RNA, 19 nt, Artificial Sequence
  Description of Artificial Sequence: Synthetic oligonucleotide
  Sense strand starting at position 2452 of SEQ ID NO: 1885548
cggugaaccuccuguugga

SEQ ID NO: 2350213 - RNA, 19 nt, Artificial Sequence
  Description of Artificial Sequence: Synthetic oligonucleotide
  Antisense strand to SEQ ID NO: 2350212
uccaacaggagguucaccg

SEQ ID NO: 2350214 - RNA, 19 nt, Artificial Sequence
  Description of Artificial Sequence: Synthetic oligonucleotide
  Sense strand starting at position 2621 of SEQ ID NO: 1885548
ucagauggcuccugggaag

SEQ ID NO: 2350215 - RNA, 19 nt, Artificial Sequence
  Description of Artificial Sequence: Synthetic oligonucleotide
  Antisense strand to SEQ ID NO: 2350214
cuucccaggagccaucuga

SEQ ID NO: 2350216 - RNA, 19 nt, Artificial Sequence
  Description of Artificial Sequence: Synthetic oligonucleotide
  Sense strand starting at position 2832 of SEQ ID NO: 1885548
ggagcaagaucuggaucaa

SEQ ID NO: 2350217 - RNA, 19 nt, Artificial Sequence
  Description of Artificial Sequence: Synthetic oligonucleotide
  Antisense strand to SEQ ID NO: 2350216
uugauccagaucuugcucc

SEQ ID NO: 2350218 - RNA, 19 nt, Artificial Sequence
  Description of Artificial Sequence: Synthetic oligonucleotide
  Sense strand starting at position 3208 of SEQ ID NO: 1885548
agcaguguccgagguguuu

SEQ ID NO: 2350219 - RNA, 19 nt, Artificial Sequence
  Description of Artificial Sequence: Synthetic oligonucleotide
  Antisense strand to SEQ ID NO: 2350218
aaacaccucggacacugcu

SEQ ID NO: 2350220 - RNA, 19 nt, Artificial Sequence
  Description of Artificial Sequence: Synthetic oligonucleotide
  Sense strand starting at position 3220 of SEQ ID NO: 1885548
gguguuucacgaggauaag

SEQ ID NO: 2350221 - RNA, 19 nt, Artificial Sequence
  Description of Artificial Sequence: Synthetic oligonucleotide
  Antisense strand to SEQ ID NO: 2350220
cuuauccucgugaaacacc

SEQ ID NO: 2350222 - RNA, 19 nt, Artificial Sequence
  Description of Artificial Sequence: Synthetic oligonucleotide
  Sense strand starting at position 3221 of SEQ ID NO: 1885548
guguuucacgaggauaaga

SEQ ID NO: 2350223 - RNA, 19 nt, Artificial Sequence
  Description of Artificial Sequence: Synthetic oligonucleotide
  Antisense strand to SEQ ID NO: 2350222
ucuuauccucgugaaacac

SEQ ID NO: 2350224 - RNA, 19 nt, Artificial Sequence
  Description of Artificial Sequence: Synthetic oligonucleotide
  Sense strand starting at position 3261 of SEQ ID NO: 1885548
ggcauucuggcagaaggaa

SEQ ID NO: 2350225 - RNA, 19 nt, Artificial Sequence
  Description of Artificial Sequence: Synthetic oligonucleotide
  Antisense strand to SEQ ID NO: 2350224
uuccuucugccagaaugcc

SEQ ID NO: 2350226 - RNA, 19 nt, Artificial Sequence
  Description of Artificial Sequence: Synthetic oligonucleotide
  Sense strand starting at position 3491 of SEQ ID NO: 1885548
ggugcagaaucagaagaaa

SEQ ID NO: 2350227 - RNA, 19 nt, Artificial Sequence
  Description of Artificial Sequence: Synthetic oligonucleotide
  Antisense strand to SEQ ID NO: 2350226
uuucuucugauucugcacc

SEQ ID NO: 2350228 - RNA, 19 nt, Artificial Sequence
  Description of Artificial Sequence: Synthetic oligonucleotide
  Sense strand starting at position 3686 of SEQ ID NO: 1885548
uggcuugacugacagucau

SEQ ID NO: 2350229 - RNA, 19 nt, Artificial Sequence
  Description of Artificial Sequence: Synthetic oligonucleotide
  Antisense strand to SEQ ID NO: 2350228
augacugucagucaagcca

SEQ ID NO: 2350230 - RNA, 19 nt, Artificial Sequence
  Description of Artificial Sequence: Synthetic oligonucleotide
  Sense strand starting at position 3728 of SEQ ID NO: 1885548
ccggaaguuucccagugca

SEQ ID NO: 2350231 - RNA, 19 nt, Artificial Sequence
  Description of Artificial Sequence: Synthetic oligonucleotide
  Antisense strand to SEQ ID NO: 2350230
ugcacugggaaacuuccgg

SEQ ID NO: 2350232 - RNA, 19 nt, Artificial Sequence
  Description of Artificial Sequence: Synthetic oligonucleotide
  Sense strand starting at position 3731 of SEQ ID NO: 1885548
gaaguuucccagugcaaac

SEQ ID NO: 2350233 - RNA, 19 nt, Artificial Sequence
  Description of Artificial Sequence: Synthetic oligonucleotide
  Antisense strand to SEQ ID NO: 2350232
guuugcacugggaaacuuc

SEQ ID NO: 2350234 - RNA, 19 nt, Artificial Sequence
  Description of Artificial Sequence: Synthetic oligonucleotide
  Sense strand starting at position 3752 of SEQ ID NO: 1885548
uggcgcuguucccaaggaa

SEQ ID NO: 2350235 - RNA, 19 nt, Artificial Sequence
  Description of Artificial Sequence: Synthetic oligonucleotide
  Antisense strand to SEQ ID NO: 2350234
uuccuugggaacagcgcca

SEQ ID NO: 2350236 - RNA, 19 nt, Artificial Sequence
  Description of Artificial Sequence: Synthetic oligonucleotide
  Sense strand starting at position 3870 of SEQ ID NO: 1885548
uccggauagguccagggua

SEQ ID NO: 2350237 - RNA, 19 nt, Artificial Sequence
  Description of Artificial Sequence: Synthetic oligonucleotide
  Antisense strand to SEQ ID NO: 2350236
uacccuggaccuauccgga

SEQ ID NO: 2350238 - RNA, 19 nt, Artificial Sequence
  Description of Artificial Sequence: Synthetic oligonucleotide
  Sense strand starting at position 3970 of SEQ ID NO: 1885548
ccgugaugccugggaacuu

SEQ ID NO: 2350239 - RNA, 19 nt, Artificial Sequence
  Description of Artificial Sequence: Synthetic oligonucleotide
  Antisense strand to SEQ ID NO: 2350238
aaguucccaggcaucacgg

SEQ ID NO: 2350240 - RNA, 19 nt, Artificial Sequence
  Description of Artificial Sequence: Synthetic oligonucleotide
  Sense strand starting at position 3971 of SEQ ID NO: 1885548
cgugaugccugggaacuuu

SEQ ID NO: 2350241 - RNA, 19 nt, Artificial Sequence
  Description of Artificial Sequence: Synthetic oligonucleotide
  Antisense strand to SEQ ID NO: 2350240
aaaguucccaggcaucacg

SEQ ID NO: 2350242 - RNA, 19 nt, Artificial Sequence
  Description of Artificial Sequence: Synthetic oligonucleotide
  Sense strand starting at position 3980 of SEQ ID NO: 1885548
ugggaacuuucaguaagug

SEQ ID NO: 2350243 - RNA, 19 nt, Artificial Sequence
  Description of Artificial Sequence: Synthetic oligonucleotide
  Antisense strand to SEQ ID NO: 2350242
cacuuacugaaaguuccca

SEQ ID NO: 2350244 - RNA, 19 nt, Artificial Sequence
  Description of Artificial Sequence: Synthetic oligonucleotide
  Sense strand starting at position 27 of SEQ ID NO: 1885549
uucgaauccucuugggaau

SEQ ID NO: 2350245 - RNA, 19 nt, Artificial Sequence
  Description of Artificial Sequence: Synthetic oligonucleotide
  Antisense strand to SEQ ID NO: 2350244
auucccaagaggauucgaa

SEQ ID NO: 2350246 - RNA, 19 nt, Artificial Sequence
  Description of Artificial Sequence: Synthetic oligonucleotide
  Sense strand starting at position 28 of SEQ ID NO: 1885549
ucgaauccucuugggaauu

SEQ ID NO: 2350247 - RNA, 19 nt, Artificial Sequence
  Description of Artificial Sequence: Synthetic oligonucleotide
  Antisense strand to SEQ ID NO: 2350246
aauucccaagaggauucga

SEQ ID NO: 2350248 - RNA, 19 nt, Artificial Sequence
  Description of Artificial Sequence: Synthetic oligonucleotide
  Sense strand starting at position 29 of SEQ ID NO: 1885549
cgaauccucuugggaauuc

SEQ ID NO: 2350249 - RNA, 19 nt, Artificial Sequence
  Description of Artificial Sequence: Synthetic oligonucleotide
  Antisense strand to SEQ ID NO: 2350248
gaauucccaagaggauucg

SEQ ID NO: 2350250 - RNA, 19 nt, Artificial Sequence
  Description of Artificial Sequence: Synthetic oligonucleotide
  Sense strand starting at position 41 of SEQ ID NO: 1885549
ggaauucucgcaggagcca

SEQ ID NO: 2350251 - RNA, 19 nt, Artificial Sequence
  Description of Artificial Sequence: Synthetic oligonucleotide
  Antisense strand to SEQ ID NO: 2350250
uggcuccugcgagaauucc

SEQ ID NO: 2350252 - RNA, 19 nt, Artificial Sequence
  Description of Artificial Sequence: Synthetic oligonucleotide
  Sense strand starting at position 304 of SEQ ID NO: 1885549
ugagaccucccguauaugu

SEQ ID NO: 2350253 - RNA, 19 nt, Artificial Sequence
  Description of Artificial Sequence: Synthetic oligonucleotide
  Antisense strand to SEQ ID NO: 2350252
acauauacgggaggucuca

SEQ ID NO: 2350254 - RNA, 19 nt, Artificial Sequence
  Description of Artificial Sequence: Synthetic oligonucleotide
  Sense strand starting at position 314 of SEQ ID NO: 1885549
cguauauguccugggcuag

SEQ ID NO: 2350255 - RNA, 19 nt, Artificial Sequence
  Description of Artificial Sequence: Synthetic oligonucleotide
  Antisense strand to SEQ ID NO: 2350254
cuagcccaggacauauacg

SEQ ID NO: 2350256 - RNA, 19 nt, Artificial Sequence
  Description of Artificial Sequence: Synthetic oligonucleotide
  Sense strand starting at position 1215 of SEQ ID NO: 1885549
gggcaaugacagcaucuuu

SEQ ID NO: 2350257 - RNA, 19 nt, Artificial Sequence
  Description of Artificial Sequence: Synthetic oligonucleotide
  Antisense strand to SEQ ID NO: 2350256
aaagaugcugucauugccc

SEQ ID NO: 2350258 - RNA, 19 nt, Artificial Sequence
  Description of Artificial Sequence: Synthetic oligonucleotide
  Sense strand starting at position 1270 of SEQ ID NO: 1885549
aguucaacccguguuuguu

SEQ ID NO: 2350259 - RNA, 19 nt, Artificial Sequence
  Description of Artificial Sequence: Synthetic oligonucleotide
  Antisense strand to SEQ ID NO: 2350258
aacaaacacggguugaacu

SEQ ID NO: 2350260 - RNA, 19 nt, Artificial Sequence
  Description of Artificial Sequence: Synthetic oligonucleotide
  Sense strand starting at position 1274 of SEQ ID NO: 1885549
caacccguguuuguugaau

SEQ ID NO: 2350261 - RNA, 19 nt, Artificial Sequence
  Description of Artificial Sequence: Synthetic oligonucleotide
  Antisense strand to SEQ ID NO: 2350260
auucaacaaacacggguug

SEQ ID NO: 2350262 - RNA, 19 nt, Artificial Sequence
  Description of Artificial Sequence: Synthetic oligonucleotide
  Sense strand starting at position 1355 of SEQ ID NO: 1885549
ccagguuuacuuugcuuua

SEQ ID NO: 2350263 - RNA, 19 nt, Artificial Sequence
  Description of Artificial Sequence: Synthetic oligonucleotide
  Antisense strand to SEQ ID NO: 2350262
uaaagcaaaguaaaccugg

SEQ ID NO: 2350264 - RNA, 19 nt, Artificial Sequence
  Description of Artificial Sequence: Synthetic oligonucleotide
  Sense strand starting at position 1358 of SEQ ID NO: 1885549
gguuuacuuugcuuuacuu

SEQ ID NO: 2350265 - RNA, 19 nt, Artificial Sequence
  Description of Artificial Sequence: Synthetic oligonucleotide
  Antisense strand to SEQ ID NO: 2350264
aaguaaagcaaaguaaacc

SEQ ID NO: 2350266 - RNA, 19 nt, Artificial Sequence
  Description of Artificial Sequence: Synthetic oligonucleotide
  Sense strand starting at position 1478 of SEQ ID NO: 1885549
augaaauccugacuuccga

SEQ ID NO: 2350267 - RNA, 19 nt, Artificial Sequence
  Description of Artificial Sequence: Synthetic oligonucleotide
  Antisense strand to SEQ ID NO: 2350266
ucggaagucaggauuucau

SEQ ID NO: 2350268 - RNA, 19 nt, Artificial Sequence
  Description of Artificial Sequence: Synthetic oligonucleotide
  Sense strand starting at position 2015 of SEQ ID NO: 1885549
uauguaaaugggugcagaa

SEQ ID NO: 2350269 - RNA, 19 nt, Artificial Sequence
  Description of Artificial Sequence: Synthetic oligonucleotide
  Antisense strand to SEQ ID NO: 2350268
uucugcacccauuuacaua

SEQ ID NO: 2350270 - RNA, 19 nt, Artificial Sequence
  Description of Artificial Sequence: Synthetic oligonucleotide
  Sense strand starting at position 2153 of SEQ ID NO: 1885549
cugaaauccucaucuggau

SEQ ID NO: 2350271 - RNA, 19 nt, Artificial Sequence
  Description of Artificial Sequence: Synthetic oligonucleotide
  Antisense strand to SEQ ID NO: 2350270
auccagaugaggauuucag

SEQ ID NO: 2350272 - RNA, 19 nt, Artificial Sequence
  Description of Artificial Sequence: Synthetic oligonucleotide
  Sense strand starting at position 2216 of SEQ ID NO: 1885549
gggugcauucgaggaaggu

SEQ ID NO: 2350273 - RNA, 19 nt, Artificial Sequence
  Description of Artificial Sequence: Synthetic oligonucleotide
  Antisense strand to SEQ ID NO: 2350272
accuuccucgaaugcaccc

SEQ ID NO: 2350274 - RNA, 19 nt, Artificial Sequence
  Description of Artificial Sequence: Synthetic oligonucleotide
  Sense strand starting at position 2229 of SEQ ID NO: 1885549
gaaggugcuuugguggaaa

SEQ ID NO: 2350275 - RNA, 19 nt, Artificial Sequence
  Description of Artificial Sequence: Synthetic oligonucleotide
  Antisense strand to SEQ ID NO: 2350274
uuuccaccaaagcaccuuc

SEQ ID NO: 2350276 - RNA, 19 nt, Artificial Sequence
  Description of Artificial Sequence: Synthetic oligonucleotide
  Sense strand starting at position 2231 of SEQ ID NO: 1885549
aggugcuuugguggaaaga

SEQ ID NO: 2350277 - RNA, 19 nt, Artificial Sequence
  Description of Artificial Sequence: Synthetic oligonucleotide
  Antisense strand to SEQ ID NO: 2350276
ucuuuccaccaaagcaccu

SEQ ID NO: 2350278 - RNA, 19 nt, Artificial Sequence
  Description of Artificial Sequence: Synthetic oligonucleotide
  Sense strand starting at position 2291 of SEQ ID NO: 1885549
ggugcugauuccucagggu

SEQ ID NO: 2350279 - RNA, 19 nt, Artificial Sequence
  Description of Artificial Sequence: Synthetic oligonucleotide
  Antisense strand to SEQ ID NO: 2350278
acccugaggaaucagcacc

SEQ ID NO: 2350280 - RNA, 19 nt, Artificial Sequence
  Description of Artificial Sequence: Synthetic oligonucleotide
  Sense strand starting at position 2339 of SEQ ID NO: 1885549
cugcguugccgucucuaau

SEQ ID NO: 2350281 - RNA, 19 nt, Artificial Sequence
  Description of Artificial Sequence: Synthetic oligonucleotide
  Antisense strand to SEQ ID NO: 2350280
auuagagacggcaacgcag

SEQ ID NO: 2350282 - RNA, 19 nt, Artificial Sequence
  Description of Artificial Sequence: Synthetic oligonucleotide
  Sense strand starting at position 2340 of SEQ ID NO: 1885549
ugcguugccgucucuaaua

SEQ ID NO: 2350283 - RNA, 19 nt, Artificial Sequence
  Description of Artificial Sequence: Synthetic oligonucleotide
  Antisense strand to SEQ ID NO: 2350282
uauuagagacggcaacgca

SEQ ID NO: 2350284 - RNA, 19 nt, Artificial Sequence
  Description of Artificial Sequence: Synthetic oligonucleotide
  Sense strand starting at position 2342 of SEQ ID NO: 1885549
cguugccgucucuaauauu

SEQ ID NO: 2350285 - RNA, 19 nt, Artificial Sequence
  Description of Artificial Sequence: Synthetic oligonucleotide
  Antisense strand to SEQ ID NO: 2350284
aauauuagagacggcaacg

SEQ ID NO: 2350286 - RNA, 19 nt, Artificial Sequence
  Description of Artificial Sequence: Synthetic oligonucleotide
  Sense strand starting at position 2459 of SEQ ID NO: 1885549
aacuguguaugcugagaug

SEQ ID NO: 2350287 - RNA, 19 nt, Artificial Sequence
  Description of Artificial Sequence: Synthetic oligonucleotide
  Antisense strand to SEQ ID NO: 2350286
caucucagcauacacaguu

SEQ ID NO: 2350288 - RNA, 19 nt, Artificial Sequence
  Description of Artificial Sequence: Synthetic oligonucleotide
  Sense strand starting at position 2568 of SEQ ID NO: 1885549
aacuguguuuccucagugu

SEQ ID NO: 2350289 - RNA, 19 nt, Artificial Sequence
  Description of Artificial Sequence: Synthetic oligonucleotide
  Antisense strand to SEQ ID NO: 2350288
acacugaggaaacacaguu

SEQ ID NO: 2350290 - RNA, 19 nt, Artificial Sequence
  Description of Artificial Sequence: Synthetic oligonucleotide
  Sense strand starting at position 2571 of SEQ ID NO: 1885549
uguguuuccucaguguugu

SEQ ID NO: 2350291 - RNA, 19 nt, Artificial Sequence
  Description of Artificial Sequence: Synthetic oligonucleotide
  Antisense strand to SEQ ID NO: 2350290
acaacacugaggaaacaca

SEQ ID NO: 2350292 - RNA, 19 nt, Artificial Sequence
  Description of Artificial Sequence: Synthetic oligonucleotide
  Sense strand starting at position 2596 of SEQ ID NO: 1885549
ugaguuccaucgcaaacca

SEQ ID NO: 2350293 - RNA, 19 nt, Artificial Sequence
  Description of Artificial Sequence: Synthetic oligonucleotide
  Antisense strand to SEQ ID NO: 2350292
ugguuugcgauggaacuca

SEQ ID NO: 2350294 - RNA, 19 nt, Artificial Sequence
  Description of Artificial Sequence: Synthetic oligonucleotide
  Sense strand starting at position 2624 of SEQ ID NO: 1885549
gugccaauggaguguuaug

SEQ ID NO: 2350295 - RNA, 19 nt, Artificial Sequence
  Description of Artificial Sequence: Synthetic oligonucleotide
  Antisense strand to SEQ ID NO: 2350294
cauaacacuccauuggcac

SEQ ID NO: 2350296 - RNA, 19 nt, Artificial Sequence
  Description of Artificial Sequence: Synthetic oligonucleotide
  Sense strand starting at position 2635 of SEQ ID NO: 1885549
guguuaugguuuccaaaua

SEQ ID NO: 2350297 - RNA, 19 nt, Artificial Sequence
  Description of Artificial Sequence: Synthetic oligonucleotide
  Antisense strand to SEQ ID NO: 2350296
uauuuggaaaccauaacac

SEQ ID NO: 2350298 - RNA, 19 nt, Artificial Sequence
  Description of Artificial Sequence: Synthetic oligonucleotide
  Sense strand starting at position 2636 of SEQ ID NO: 1885549
uguuaugguuuccaaauac

SEQ ID NO: 2350299 - RNA, 19 nt, Artificial Sequence
  Description of Artificial Sequence: Synthetic oligonucleotide
  Antisense strand to SEQ ID NO: 2350298
guauuuggaaaccauaaca

SEQ ID NO: 2350300 - RNA, 19 nt, Artificial Sequence
  Description of Artificial Sequence: Synthetic oligonucleotide
  Sense strand starting at position 2822 of SEQ ID NO: 1885549
gcugcuguccuccaagacu

SEQ ID NO: 2350301 - RNA, 19 nt, Artificial Sequence
  Description of Artificial Sequence: Synthetic oligonucleotide
  Antisense strand to SEQ ID NO: 2350300
agucuuggaggacagcagc

SEQ ID NO: 2350302 - RNA, 19 nt, Artificial Sequence
  Description of Artificial Sequence: Synthetic oligonucleotide
  Sense strand starting at position 2949 of SEQ ID NO: 1885549
ccgugucacagaugaggaa

SEQ ID NO: 2350303 - RNA, 19 nt, Artificial Sequence
  Description of Artificial Sequence: Synthetic oligonucleotide
  Antisense strand to SEQ ID NO: 2350302
uuccucaucugugacacgg

SEQ ID NO: 2350304 - RNA, 19 nt, Artificial Sequence
  Description of Artificial Sequence: Synthetic oligonucleotide
  Sense strand starting at position 3020 of SEQ ID NO: 1885549
gugagcuccuucccaguga

SEQ ID NO: 2350305 - RNA, 19 nt, Artificial Sequence
  Description of Artificial Sequence: Synthetic oligonucleotide
  Antisense strand to SEQ ID NO: 2350304
ucacugggaaggagcucac

SEQ ID NO: 2350306 - RNA, 19 nt, Artificial Sequence
  Description of Artificial Sequence: Synthetic oligonucleotide
  Sense strand starting at position 3024 of SEQ ID NO: 1885549
gcuccuucccagugacaua

SEQ ID NO: 2350307 - RNA, 19 nt, Artificial Sequence
  Description of Artificial Sequence: Synthetic oligonucleotide
  Antisense strand to SEQ ID NO: 2350306
uaugucacugggaaggagc

SEQ ID NO: 2350308 - RNA, 19 nt, Artificial Sequence
  Description of Artificial Sequence: Synthetic oligonucleotide
  Sense strand starting at position 3045 of SEQ ID NO: 1885549
acaugcucugucugugcaa

SEQ ID NO: 2350309 - RNA, 19 nt, Artificial Sequence
  Description of Artificial Sequence: Synthetic oligonucleotide
  Antisense strand to SEQ ID NO: 2350308
uugcacagacagagcaugu

SEQ ID NO: 2350310 - RNA, 19 nt, Artificial Sequence
  Description of Artificial Sequence: Synthetic oligonucleotide
  Sense strand starting at position 3137 of SEQ ID NO: 1885549
gccugauuccguuucugug

SEQ ID NO: 2350311 - RNA, 19 nt, Artificial Sequence
  Description of Artificial Sequence: Synthetic oligonucleotide
  Antisense strand to SEQ ID NO: 2350310
cacagaaacggaaucaggc

SEQ ID NO: 2350312 - RNA, 19 nt, Artificial Sequence
  Description of Artificial Sequence: Synthetic oligonucleotide
  Sense strand starting at position 3248 of SEQ ID NO: 1885549
ccugaacuuccagagccau

SEQ ID NO: 2350313 - RNA, 19 nt, Artificial Sequence
  Description of Artificial Sequence: Synthetic oligonucleotide
  Antisense strand to SEQ ID NO: 2350312
auggcucuggaaguucagg

SEQ ID NO: 2350314 - RNA, 19 nt, Artificial Sequence
  Description of Artificial Sequence: Synthetic oligonucleotide
  Sense strand starting at position 3286 of SEQ ID NO: 1885549
ccaucugucucaccuguaa

SEQ ID NO: 2350315 - RNA, 19 nt, Artificial Sequence
  Description of Artificial Sequence: Synthetic oligonucleotide
  Antisense strand to SEQ ID NO: 2350314
uuacaggugagacagaugg

SEQ ID NO: 2350316 - RNA, 19 nt, Artificial Sequence
  Description of Artificial Sequence: Synthetic oligonucleotide
  Sense strand starting at position 3561 of SEQ ID NO: 1885549
ggaggcuuuguacauguau

SEQ ID NO: 2350317 - RNA, 19 nt, Artificial Sequence
  Description of Artificial Sequence: Synthetic oligonucleotide
  Antisense strand to SEQ ID NO: 2350316
auacauguacaaagccucc

SEQ ID NO: 2350318 - RNA, 19 nt, Artificial Sequence
  Description of Artificial Sequence: Synthetic oligonucleotide
  Sense strand starting at position 3613 of SEQ ID NO: 1885549
gagcguuuccuguguugga

SEQ ID NO: 2350319 - RNA, 19 nt, Artificial Sequence
  Description of Artificial Sequence: Synthetic oligonucleotide
  Antisense strand to SEQ ID NO: 2350318
uccaacacaggaaacgcuc

SEQ ID NO: 2350320 - RNA, 19 nt, Artificial Sequence
  Description of Artificial Sequence: Synthetic oligonucleotide
  Sense strand starting at position 3615 of SEQ ID NO: 1885549
gcguuuccuguguuggagu

SEQ ID NO: 2350321 - RNA, 19 nt, Artificial Sequence
  Description of Artificial Sequence: Synthetic oligonucleotide
  Antisense strand to SEQ ID NO: 2350320
acuccaacacaggaaacgc

SEQ ID NO: 2350322 - RNA, 19 nt, Artificial Sequence
  Description of Artificial Sequence: Synthetic oligonucleotide
  Sense strand starting at position 3742 of SEQ ID NO: 1885549
ucaguuaaaugaggaggau

SEQ ID NO: 2350323 - RNA, 19 nt, Artificial Sequence
  Description of Artificial Sequence: Synthetic oligonucleotide
  Antisense strand to SEQ ID NO: 2350322
auccuccucauuuaacuga

SEQ ID NO: 2350324 - RNA, 19 nt, Artificial Sequence
  Description of Artificial Sequence: Synthetic oligonucleotide
  Sense strand starting at position 55 of SEQ ID NO: 1885550
uggccaaugaucuaguguu

SEQ ID NO: 2350325 - RNA, 19 nt, Artificial Sequence
  Description of Artificial Sequence: Synthetic oligonucleotide
  Antisense strand to SEQ ID NO: 2350324
aacacuagaucauuggcca

SEQ ID NO: 2350326 - RNA, 19 nt, Artificial Sequence
  Description of Artificial Sequence: Synthetic oligonucleotide
  Sense strand starting at position 356 of SEQ ID NO: 1885550
gacacuuucugugcaugga

SEQ ID NO: 2350327 - RNA, 19 nt, Artificial Sequence
  Description of Artificial Sequence: Synthetic oligonucleotide
  Antisense strand to SEQ ID NO: 2350326
uccaugcacagaaaguguc

SEQ ID NO: 2350328 - RNA, 19 nt, Artificial Sequence
  Description of Artificial Sequence: Synthetic oligonucleotide
  Sense strand starting at position 357 of SEQ ID NO: 1885550
acacuuucugugcauggaa

SEQ ID NO: 2350329 - RNA, 19 nt, Artificial Sequence
  Description of Artificial Sequence: Synthetic oligonucleotide
  Antisense strand to SEQ ID NO: 2350328
uuccaugcacagaaagugu

SEQ ID NO: 2350330 - RNA, 19 nt, Artificial Sequence
  Description of Artificial Sequence: Synthetic oligonucleotide
  Sense strand starting at position 494 of SEQ ID NO: 1885550
gucauuuacuccucagagc

SEQ ID NO: 2350331 - RNA, 19 nt, Artificial Sequence
  Description of Artificial Sequence: Synthetic oligonucleotide
  Antisense strand to SEQ ID NO: 2350330
gcucugaggaguaaaugac

SEQ ID NO: 2350332 - RNA, 19 nt, Artificial Sequence
  Description of Artificial Sequence: Synthetic oligonucleotide
  Sense strand starting at position 737 of SEQ ID NO: 1885550
cuauuuagguaucaucuau

SEQ ID NO: 2350333 - RNA, 19 nt, Artificial Sequence
  Description of Artificial Sequence: Synthetic oligonucleotide
  Antisense strand to SEQ ID NO: 2350332
auagaugauaccuaaauag

SEQ ID NO: 2350334 - RNA, 19 nt, Artificial Sequence
  Description of Artificial Sequence: Synthetic oligonucleotide
  Sense strand starting at position 1052 of SEQ ID NO: 1885550
uuccuuccaguuuaaagua

SEQ ID NO: 2350335 - RNA, 19 nt, Artificial Sequence
  Description of Artificial Sequence: Synthetic oligonucleotide
  Antisense strand to SEQ ID NO: 2350334
uacuuuaaacuggaaggaa

SEQ ID NO: 2350336 - RNA, 19 nt, Artificial Sequence
  Description of Artificial Sequence: Synthetic oligonucleotide
  Sense strand starting at position 1065 of SEQ ID NO: 1885550
aaaguagaauccucugguu

SEQ ID NO: 2350337 - RNA, 19 nt, Artificial Sequence
  Description of Artificial Sequence: Synthetic oligonucleotide
  Antisense strand to SEQ ID NO: 2350336
aaccagaggauucuacuuu

SEQ ID NO: 2350338 - RNA, 19 nt, Artificial Sequence
  Description of Artificial Sequence: Synthetic oligonucleotide
  Sense strand starting at position 1082 of SEQ ID NO: 1885550
uuguuuguccauuacucca

SEQ ID NO: 2350339 - RNA, 19 nt, Artificial Sequence
  Description of Artificial Sequence: Synthetic oligonucleotide
  Antisense strand to SEQ ID NO: 2350338
uggaguaauggacaaacaa

SEQ ID NO: 2350340 - RNA, 19 nt, Artificial Sequence
  Description of Artificial Sequence: Synthetic oligonucleotide
  Sense strand starting at position 1258 of SEQ ID NO: 1885550
ucgggaaucuugcccaaac

SEQ ID NO: 2350341 - RNA, 19 nt, Artificial Sequence
  Description of Artificial Sequence: Synthetic oligonucleotide
  Antisense strand to SEQ ID NO: 2350340
guuugggcaagauucccga

SEQ ID NO: 2350342 - RNA, 19 nt, Artificial Sequence
  Description of Artificial Sequence: Synthetic oligonucleotide
  Sense strand starting at position 1259 of SEQ ID NO: 1885550
cgggaaucuugcccaaacu

SEQ ID NO: 2350343 - RNA, 19 nt, Artificial Sequence
  Description of Artificial Sequence: Synthetic oligonucleotide
  Antisense strand to SEQ ID NO: 2350342
aguuugggcaagauucccg

SEQ ID NO: 2350344 - RNA, 19 nt, Artificial Sequence
  Description of Artificial Sequence: Synthetic oligonucleotide
  Sense strand starting at position 1260 of SEQ ID NO: 1885550
gggaaucuugcccaaacuc

SEQ ID NO: 2350345 - RNA, 19 nt, Artificial Sequence
  Description of Artificial Sequence: Synthetic oligonucleotide
  Antisense strand to SEQ ID NO: 2350344
gaguuugggcaagauuccc

SEQ ID NO: 2350346 - RNA, 19 nt, Artificial Sequence
  Description of Artificial Sequence: Synthetic oligonucleotide
  Sense strand starting at position 1289 of SEQ ID NO: 1885550
gggccucucuuacugguaa

SEQ ID NO: 2350347 - RNA, 19 nt, Artificial Sequence
  Description of Artificial Sequence: Synthetic oligonucleotide
  Antisense strand to SEQ ID NO: 2350346
uuaccaguaagagaggccc

SEQ ID NO: 2350348 - RNA, 19 nt, Artificial Sequence
  Description of Artificial Sequence: Synthetic oligonucleotide
  Sense strand starting at position 1482 of SEQ ID NO: 1885550
ccuucucacccuggagaga

SEQ ID NO: 2350349 - RNA, 19 nt, Artificial Sequence
  Description of Artificial Sequence: Synthetic oligonucleotide
  Antisense strand to SEQ ID NO: 2350348
ucucuccagggugagaagg

SEQ ID NO: 2350350 - RNA, 19 nt, Artificial Sequence
  Description of Artificial Sequence: Synthetic oligonucleotide
  Sense strand starting at position 1493 of SEQ ID NO: 1885550
uggagagauuacccuucua

SEQ ID NO: 2350351 - RNA, 19 nt, Artificial Sequence
  Description of Artificial Sequence: Synthetic oligonucleotide
  Antisense strand to SEQ ID NO: 2350350
uagaaggguaaucucucca

SEQ ID NO: 2350352 - RNA, 19 nt, Artificial Sequence
  Description of Artificial Sequence: Synthetic oligonucleotide
  Sense strand starting at position 1762 of SEQ ID NO: 1885550
ggaacucaucccugagacu

SEQ ID NO: 2350353 - RNA, 19 nt, Artificial Sequence
  Description of Artificial Sequence: Synthetic oligonucleotide
  Antisense strand to SEQ ID NO: 2350352
agucucagggaugaguucc

SEQ ID NO: 2350354 - RNA, 19 nt, Artificial Sequence
  Description of Artificial Sequence: Synthetic oligonucleotide
  Sense strand starting at position 1771 of SEQ ID NO: 1885550
cccugagacugccuggaau

SEQ ID NO: 2350355 - RNA, 19 nt, Artificial Sequence
  Description of Artificial Sequence: Synthetic oligonucleotide
  Antisense strand to SEQ ID NO: 2350354
auuccaggcagucucaggg

SEQ ID NO: 2350356 - RNA, 19 nt, Artificial Sequence
  Description of Artificial Sequence: Synthetic oligonucleotide
  Sense strand starting at position 1773 of SEQ ID NO: 1885550
cugagacugccuggaaugu

SEQ ID NO: 2350357 - RNA, 19 nt, Artificial Sequence
  Description of Artificial Sequence: Synthetic oligonucleotide
  Antisense strand to SEQ ID NO: 2350356
acauuccaggcagucucag

SEQ ID NO: 2350358 - RNA, 19 nt, Artificial Sequence
  Description of Artificial Sequence: Synthetic oligonucleotide
  Sense strand starting at position 1774 of SEQ ID NO: 1885550
ugagacugccuggaaugua

SEQ ID NO: 2350359 - RNA, 19 nt, Artificial Sequence
  Description of Artificial Sequence: Synthetic oligonucleotide
  Antisense strand to SEQ ID NO: 2350358
uacauuccaggcagucuca

SEQ ID NO: 2350360 - RNA, 19 nt, Artificial Sequence
  Description of Artificial Sequence: Synthetic oligonucleotide
  Sense strand starting at position 1816 of SEQ ID NO: 1885550
cuaaccuuccgagguugau

SEQ ID NO: 2350361 - RNA, 19 nt, Artificial Sequence
  Description of Artificial Sequence: Synthetic oligonucleotide
  Antisense strand to SEQ ID NO: 2350360
aucaaccucggaagguuag

SEQ ID NO: 2350362 - RNA, 19 nt, Artificial Sequence
  Description of Artificial Sequence: Synthetic oligonucleotide
  Sense strand starting at position 2072 of SEQ ID NO: 1885550
gcagguuggagacaucuga

SEQ ID NO: 2350363 - RNA, 19 nt, Artificial Sequence
  Description of Artificial Sequence: Synthetic oligonucleotide
  Antisense strand to SEQ ID NO: 2350362
ucagaugucuccaaccugc

SEQ ID NO: 2350364 - RNA, 19 nt, Artificial Sequence
  Description of Artificial Sequence: Synthetic oligonucleotide
  Sense strand starting at position 2098 of SEQ ID NO: 1885550
agcaaaugaguccaugagu

SEQ ID NO: 2350365 - RNA, 19 nt, Artificial Sequence
  Description of Artificial Sequence: Synthetic oligonucleotide
  Antisense strand to SEQ ID NO: 2350364
acucauggacucauuugcu

SEQ ID NO: 2350366 - RNA, 19 nt, Artificial Sequence
  Description of Artificial Sequence: Synthetic oligonucleotide
  Sense strand starting at position 2658 of SEQ ID NO: 1885550
ccuguaaauuccucccgaa

SEQ ID NO: 2350367 - RNA, 19 nt, Artificial Sequence
  Description of Artificial Sequence: Synthetic oligonucleotide
  Antisense strand to SEQ ID NO: 2350366
uucgggaggaauuuacagg

SEQ ID NO: 2350368 - RNA, 19 nt, Artificial Sequence
  Description of Artificial Sequence: Synthetic oligonucleotide
  Sense strand starting at position 2814 of SEQ ID NO: 1885550
gugcauaguuccuuaaaua

SEQ ID NO: 2350369 - RNA, 19 nt, Artificial Sequence
  Description of Artificial Sequence: Synthetic oligonucleotide
  Antisense strand to SEQ ID NO: 2350368
uauuuaaggaacuaugcac

SEQ ID NO: 2350370 - RNA, 19 nt, Artificial Sequence
  Description of Artificial Sequence: Synthetic oligonucleotide
  Sense strand starting at position 2857 of SEQ ID NO: 1885550
cagucuucgguguaaugaa

SEQ ID NO: 2350371 - RNA, 19 nt, Artificial Sequence
  Description of Artificial Sequence: Synthetic oligonucleotide
  Antisense strand to SEQ ID NO: 2350370
uucauuacaccgaagacug

SEQ ID NO: 2350372 - RNA, 19 nt, Artificial Sequence
  Description of Artificial Sequence: Synthetic oligonucleotide
  Sense strand starting at position 2873 of SEQ ID NO: 1885550
gaauauauccauugguuag

SEQ ID NO: 2350373 - RNA, 19 nt, Artificial Sequence
  Description of Artificial Sequence: Synthetic oligonucleotide
  Antisense strand to SEQ ID NO: 2350372
cuaaccaauggauauauuc

SEQ ID NO: 2350374 - RNA, 19 nt, Artificial Sequence
  Description of Artificial Sequence: Synthetic oligonucleotide
  Sense strand starting at position 2979 of SEQ ID NO: 1885550
gugcgagacguucagaaca

SEQ ID NO: 2350375 - RNA, 19 nt, Artificial Sequence
  Description of Artificial Sequence: Synthetic oligonucleotide
  Antisense strand to SEQ ID NO: 2350374
uguucugaacgucucgcac

SEQ ID NO: 2350376 - RNA, 19 nt, Artificial Sequence
  Description of Artificial Sequence: Synthetic oligonucleotide
  Sense strand starting at position 3074 of SEQ ID NO: 1885550
cccuauuguguugaguuga

SEQ ID NO: 2350377 - RNA, 19 nt, Artificial Sequence
  Description of Artificial Sequence: Synthetic oligonucleotide
  Antisense strand to SEQ ID NO: 2350376
ucaacucaacacaauaggg

SEQ ID NO: 2350378 - RNA, 19 nt, Artificial Sequence
  Description of Artificial Sequence: Synthetic oligonucleotide
  Sense strand starting at position 3089 of SEQ ID NO: 1885550
uugauuuggcagugguuau

SEQ ID NO: 2350379 - RNA, 19 nt, Artificial Sequence
  Description of Artificial Sequence: Synthetic oligonucleotide
  Antisense strand to SEQ ID NO: 2350378
auaaccacugccaaaucaa

SEQ ID NO: 2350380 - RNA, 19 nt, Artificial Sequence
  Description of Artificial Sequence: Synthetic oligonucleotide
  Sense strand starting at position 3090 of SEQ ID NO: 1885550
ugauuuggcagugguuauu

SEQ ID NO: 2350381 - RNA, 19 nt, Artificial Sequence
  Description of Artificial Sequence: Synthetic oligonucleotide
  Antisense strand to SEQ ID NO: 2350380
aauaaccacugccaaauca

SEQ ID NO: 2350382 - RNA, 19 nt, Artificial Sequence
  Description of Artificial Sequence: Synthetic oligonucleotide
  Sense strand starting at position 3121 of SEQ ID NO: 1885550
ugucauccucaggaugagu

SEQ ID NO: 2350383 - RNA, 19 nt, Artificial Sequence
  Description of Artificial Sequence: Synthetic oligonucleotide
  Antisense strand to SEQ ID NO: 2350382
acucauccugaggaugaca

SEQ ID NO: 2350384 - RNA, 19 nt, Artificial Sequence
  Description of Artificial Sequence: Synthetic oligonucleotide
  Sense strand starting at position 3167 of SEQ ID NO: 1885550
aacaaauggucauugagcu

SEQ ID NO: 2350385 - RNA, 19 nt, Artificial Sequence
  Description of Artificial Sequence: Synthetic oligonucleotide
  Antisense strand to SEQ ID NO: 2350384
agcucaaugaccauuuguu

SEQ ID NO: 2350386 - RNA, 19 nt, Artificial Sequence
  Description of Artificial Sequence: Synthetic oligonucleotide
  Sense strand starting at position 3173 of SEQ ID NO: 1885550
uggucauugagcugaagaa

SEQ ID NO: 2350387 - RNA, 19 nt, Artificial Sequence
  Description of Artificial Sequence: Synthetic oligonucleotide
  Antisense strand to SEQ ID NO: 2350386
uucuucagcucaaugacca

SEQ ID NO: 2350388 - RNA, 19 nt, Artificial Sequence
  Description of Artificial Sequence: Synthetic oligonucleotide
  Sense strand starting at position 3431 of SEQ ID NO: 1885550
agaauauggugagaaacca

SEQ ID NO: 2350389 - RNA, 19 nt, Artificial Sequence
  Description of Artificial Sequence: Synthetic oligonucleotide
  Antisense strand to SEQ ID NO: 2350388
ugguuucucaccauauucu

SEQ ID NO: 2350390 - RNA, 19 nt, Artificial Sequence
  Description of Artificial Sequence: Synthetic oligonucleotide
  Sense strand starting at position 3466 of SEQ ID NO: 1885550
cucagacuccucggaagau

SEQ ID NO: 2350391 - RNA, 19 nt, Artificial Sequence
  Description of Artificial Sequence: Synthetic oligonucleotide
  Antisense strand to SEQ ID NO: 2350390
aucuuccgaggagucugag

SEQ ID NO: 2350392 - RNA, 19 nt, Artificial Sequence
  Description of Artificial Sequence: Synthetic oligonucleotide
  Sense strand starting at position 3575 of SEQ ID NO: 1885550
ggaucugugccucaaacuu

SEQ ID NO: 2350393 - RNA, 19 nt, Artificial Sequence
  Description of Artificial Sequence: Synthetic oligonucleotide
  Antisense strand to SEQ ID NO: 2350392
aaguuugaggcacagaucc

SEQ ID NO: 2350394 - RNA, 19 nt, Artificial Sequence
  Description of Artificial Sequence: Synthetic oligonucleotide
  Sense strand starting at position 3616 of SEQ ID NO: 1885550
ggugcucacacucagauga

SEQ ID NO: 2350395 - RNA, 19 nt, Artificial Sequence
  Description of Artificial Sequence: Synthetic oligonucleotide
  Antisense strand to SEQ ID NO: 2350394
ucaucugagugugagcacc

SEQ ID NO: 2350396 - RNA, 19 nt, Artificial Sequence
  Description of Artificial Sequence: Synthetic oligonucleotide
  Sense strand starting at position 3834 of SEQ ID NO: 1885550
aaaccaugaugcuuaggua

SEQ ID NO: 2350397 - RNA, 19 nt, Artificial Sequence
  Description of Artificial Sequence: Synthetic oligonucleotide
  Antisense strand to SEQ ID NO: 2350396
uaccuaagcaucaugguuu

SEQ ID NO: 2350398 - RNA, 19 nt, Artificial Sequence
  Description of Artificial Sequence: Synthetic oligonucleotide
  Sense strand starting at position 3838 of SEQ ID NO: 1885550
caugaugcuuagguagaca

SEQ ID NO: 2350399 - RNA, 19 nt, Artificial Sequence
  Description of Artificial Sequence: Synthetic oligonucleotide
  Antisense strand to SEQ ID NO: 2350398
ugucuaccuaagcaucaug

SEQ ID NO: 2350400 - RNA, 19 nt, Artificial Sequence
  Description of Artificial Sequence: Synthetic oligonucleotide
  Sense strand starting at position 3841 of SEQ ID NO: 1885550
gaugcuuagguagacauca

SEQ ID NO: 2350401 - RNA, 19 nt, Artificial Sequence
  Description of Artificial Sequence: Synthetic oligonucleotide
  Antisense strand to SEQ ID NO: 2350400
ugaugucuaccuaagcauc

SEQ ID NO: 2350402 - RNA, 19 nt, Artificial Sequence
  Description of Artificial Sequence: Synthetic oligonucleotide
  Sense strand starting at position 3918 of SEQ ID NO: 1885550
ugaucucagccugggcaau

SEQ ID NO: 2350403 - RNA, 19 nt, Artificial Sequence
  Description of Artificial Sequence: Synthetic oligonucleotide
  Antisense strand to SEQ ID NO: 2350402
auugcccaggcugagauca

SEQ ID NO: 2350404 - RNA, 19 nt, Artificial Sequence
  Description of Artificial Sequence: Synthetic oligonucleotide
  Sense strand starting at position 55 of SEQ ID NO: 1885551
cccugaucgaaaugacuga

SEQ ID NO: 2350405 - RNA, 19 nt, Artificial Sequence
  Description of Artificial Sequence: Synthetic oligonucleotide
  Antisense strand to SEQ ID NO: 2350404
ucagucauuucgaucaggg

SEQ ID NO: 2350406 - RNA, 19 nt, Artificial Sequence
  Description of Artificial Sequence: Synthetic oligonucleotide
  Sense strand starting at position 119 of SEQ ID NO: 1885551
gcaaauggcuuucuaauga

SEQ ID NO: 2350407 - RNA, 19 nt, Artificial Sequence
  Description of Artificial Sequence: Synthetic oligonucleotide
  Antisense strand to SEQ ID NO: 2350406
ucauuagaaagccauuugc

SEQ ID NO: 2350408 - RNA, 19 nt, Artificial Sequence
  Description of Artificial Sequence: Synthetic oligonucleotide
  Sense strand starting at position 124 of SEQ ID NO: 1885551
uggcuuucuaaugagagca

SEQ ID NO: 2350409 - RNA, 19 nt, Artificial Sequence
  Description of Artificial Sequence: Synthetic oligonucleotide
  Antisense strand to SEQ ID NO: 2350408
ugcucucauuagaaagcca

SEQ ID NO: 2350410 - RNA, 19 nt, Artificial Sequence
  Description of Artificial Sequence: Synthetic oligonucleotide
  Sense strand starting at position 126 of SEQ ID NO: 1885551
gcuuucuaaugagagcaca

SEQ ID NO: 2350411 - RNA, 19 nt, Artificial Sequence
  Description of Artificial Sequence: Synthetic oligonucleotide
  Antisense strand to SEQ ID NO: 2350410
ugugcucucauuagaaagc

SEQ ID NO: 2350412 - RNA, 19 nt, Artificial Sequence
  Description of Artificial Sequence: Synthetic oligonucleotide
  Sense strand starting at position 156 of SEQ ID NO: 1885551
cuauguguggacugacaau

SEQ ID NO: 2350413 - RNA, 19 nt, Artificial Sequence
  Description of Artificial Sequence: Synthetic oligonucleotide
  Antisense strand to SEQ ID NO: 2350412
auugucaguccacacauag

SEQ ID NO: 2350414 - RNA, 19 nt, Artificial Sequence
  Description of Artificial Sequence: Synthetic oligonucleotide
  Sense strand starting at position 188 of SEQ ID NO: 1885551
agaaauccauggugaacuu

SEQ ID NO: 2350415 - RNA, 19 nt, Artificial Sequence
  Description of Artificial Sequence: Synthetic oligonucleotide
  Antisense strand to SEQ ID NO: 2350414
aaguucaccauggauuucu

SEQ ID NO: 2350416 - RNA, 19 nt, Artificial Sequence
  Description of Artificial Sequence: Synthetic oligonucleotide
  Sense strand starting at position 257 of SEQ ID NO: 1885551
ggagauuugucagccacgu

SEQ ID NO: 2350417 - RNA, 19 nt, Artificial Sequence
  Description of Artificial Sequence: Synthetic oligonucleotide
  Antisense strand to SEQ ID NO: 2350416
acguggcugacaaaucucc

SEQ ID NO: 2350418 - RNA, 19 nt, Artificial Sequence
  Description of Artificial Sequence: Synthetic oligonucleotide
  Sense strand starting at position 328 of SEQ ID NO: 1885551
cuggcaauuugugugcaaa

SEQ ID NO: 2350419 - RNA, 19 nt, Artificial Sequence
  Description of Artificial Sequence: Synthetic oligonucleotide
  Antisense strand to SEQ ID NO: 2350418
uuugcacacaaauugccag

SEQ ID NO: 2350420 - RNA, 19 nt, Artificial Sequence
  Description of Artificial Sequence: Synthetic oligonucleotide
  Sense strand starting at position 329 of SEQ ID NO: 1885551
uggcaauuugugugcaaag

SEQ ID NO: 2350421 - RNA, 19 nt, Artificial Sequence
  Description of Artificial Sequence: Synthetic oligonucleotide
  Antisense strand to SEQ ID NO: 2350420
cuuugcacacaaauugcca

SEQ ID NO: 2350422 - RNA, 19 nt, Artificial Sequence
  Description of Artificial Sequence: Synthetic oligonucleotide
  Sense strand starting at position 363 of SEQ ID NO: 1885551
caaggaauuuggcguaaua

SEQ ID NO: 2350423 - RNA, 19 nt, Artificial Sequence
  Description of Artificial Sequence: Synthetic oligonucleotide
  Antisense strand to SEQ ID NO: 2350422
uauuacgccaaauuccuug

SEQ ID NO: 2350424 - RNA, 19 nt, Artificial Sequence
  Description of Artificial Sequence: Synthetic oligonucleotide
  Sense strand starting at position 374 of SEQ ID NO: 1885551
gcguaauagaaguaauuag

SEQ ID NO: 2350425 - RNA, 19 nt, Artificial Sequence
  Description of Artificial Sequence: Synthetic oligonucleotide
  Antisense strand to SEQ ID NO: 2350424
cuaauuacuucuauuacgc

SEQ ID NO: 2350426 - RNA, 19 nt, Artificial Sequence
  Description of Artificial Sequence: Synthetic oligonucleotide
  Sense strand starting at position 486 of SEQ ID NO: 1885551
guaccauagcaagauccua

SEQ ID NO: 2350427 - RNA, 19 nt, Artificial Sequence
  Description of Artificial Sequence: Synthetic oligonucleotide
  Antisense strand to SEQ ID NO: 2350426
uaggaucuugcuaugguac

SEQ ID NO: 2350428 - RNA, 19 nt, Artificial Sequence
  Description of Artificial Sequence: Synthetic oligonucleotide
  Sense strand starting at position 576 of SEQ ID NO: 1885551
uguaauuaguaacaggaau

SEQ ID NO: 2350429 - RNA, 19 nt, Artificial Sequence
  Description of Artificial Sequence: Synthetic oligonucleotide
  Antisense strand to SEQ ID NO: 2350428
auuccuguuacuaauuaca

SEQ ID NO: 2350430 - RNA, 19 nt, Artificial Sequence
  Description of Artificial Sequence: Synthetic oligonucleotide
  Sense strand starting at position 698 of SEQ ID NO: 1885551
agaggacuuuaucaagggu

SEQ ID NO: 2350431 - RNA, 19 nt, Artificial Sequence
  Description of Artificial Sequence: Synthetic oligonucleotide
  Antisense strand to SEQ ID NO: 2350430
acccuugauaaaguccucu

SEQ ID NO: 2350432 - RNA, 19 nt, Artificial Sequence
  Description of Artificial Sequence: Synthetic oligonucleotide
  Sense strand starting at position 701 of SEQ ID NO: 1885551
ggacuuuaucaagggugua

SEQ ID NO: 2350433 - RNA, 19 nt, Artificial Sequence
  Description of Artificial Sequence: Synthetic oligonucleotide
  Antisense strand to SEQ ID NO: 2350432
uacacccuugauaaagucc

SEQ ID NO: 2350434 - RNA, 19 nt, Artificial Sequence
  Description of Artificial Sequence: Synthetic oligonucleotide
  Sense strand starting at position 704 of SEQ ID NO: 1885551
cuuuaucaaggguguaaug

SEQ ID NO: 2350435 - RNA, 19 nt, Artificial Sequence
  Description of Artificial Sequence: Synthetic oligonucleotide
  Antisense strand to SEQ ID NO: 2350434
cauuacacccuugauaaag

SEQ ID NO: 2350436 - RNA, 19 nt, Artificial Sequence
  Description of Artificial Sequence: Synthetic oligonucleotide
  Sense strand starting at position 732 of SEQ ID NO: 1885551
gggcaugauucacauguug

SEQ ID NO: 2350437 - RNA, 19 nt, Artificial Sequence
  Description of Artificial Sequence: Synthetic oligonucleotide
  Antisense strand to SEQ ID NO: 2350436
caacaugugaaucaugccc

SEQ ID NO: 2350438 - RNA, 19 nt, Artificial Sequence
  Description of Artificial Sequence: Synthetic oligonucleotide
  Sense strand starting at position 887 of SEQ ID NO: 1885551
uggaguccucucugccaga

SEQ ID NO: 2350439 - RNA, 19 nt, Artificial Sequence
  Description of Artificial Sequence: Synthetic oligonucleotide
  Antisense strand to SEQ ID NO: 2350438
ucuggcagagaggacucca

SEQ ID NO: 2350440 - RNA, 19 nt, Artificial Sequence
  Description of Artificial Sequence: Synthetic oligonucleotide
  Sense strand starting at position 940 of SEQ ID NO: 1885551
guggacaaaucccuuuguu

SEQ ID NO: 2350441 - RNA, 19 nt, Artificial Sequence
  Description of Artificial Sequence: Synthetic oligonucleotide
  Antisense strand to SEQ ID NO: 2350440
aacaaagggauuuguccac

SEQ ID NO: 2350442 - RNA, 19 nt, Artificial Sequence
  Description of Artificial Sequence: Synthetic oligonucleotide
  Sense strand starting at position 1277 of SEQ ID NO: 1885551
auacaaugugucuauauug

SEQ ID NO: 2350443 - RNA, 19 nt, Artificial Sequence
  Description of Artificial Sequence: Synthetic oligonucleotide
  Antisense strand to SEQ ID NO: 2350442
caauauagacacauuguau

SEQ ID NO: 2350444 - RNA, 19 nt, Artificial Sequence
  Description of Artificial Sequence: Synthetic oligonucleotide
  Sense strand starting at position 1299 of SEQ ID NO: 1885551
ucuguacuguaauugagau

SEQ ID NO: 2350445 - RNA, 19 nt, Artificial Sequence
  Description of Artificial Sequence: Synthetic oligonucleotide
  Antisense strand to SEQ ID NO: 2350444
aucucaauuacaguacaga

SEQ ID NO: 2350446 - RNA, 19 nt, Artificial Sequence
  Description of Artificial Sequence: Synthetic oligonucleotide
  Sense strand starting at position 1300 of SEQ ID NO: 1885551
cuguacuguaauugagaug

SEQ ID NO: 2350447 - RNA, 19 nt, Artificial Sequence
  Description of Artificial Sequence: Synthetic oligonucleotide
  Antisense strand to SEQ ID NO: 2350446
caucucaauuacaguacag

SEQ ID NO: 2350448 - RNA, 19 nt, Artificial Sequence
  Description of Artificial Sequence: Synthetic oligonucleotide
  Sense strand starting at position 1303 of SEQ ID NO: 1885551
uacuguaauugagaugaaa

SEQ ID NO: 2350449 - RNA, 19 nt, Artificial Sequence
  Description of Artificial Sequence: Synthetic oligonucleotide
  Antisense strand to SEQ ID NO: 2350448
uuucaucucaauuacagua

SEQ ID NO: 2350450 - RNA, 19 nt, Artificial Sequence
  Description of Artificial Sequence: Synthetic oligonucleotide
  Sense strand starting at position 1348 of SEQ ID NO: 1885551
ccuaaaugcuccgcaaucu

SEQ ID NO: 2350451 - RNA, 19 nt, Artificial Sequence
  Description of Artificial Sequence: Synthetic oligonucleotide
  Antisense strand to SEQ ID NO: 2350450
agauugcggagcauuuagg

SEQ ID NO: 2350452 - RNA, 19 nt, Artificial Sequence
  Description of Artificial Sequence: Synthetic oligonucleotide
  Sense strand starting at position 1349 of SEQ ID NO: 1885551
cuaaaugcuccgcaaucua

SEQ ID NO: 2350453 - RNA, 19 nt, Artificial Sequence
  Description of Artificial Sequence: Synthetic oligonucleotide
  Antisense strand to SEQ ID NO: 2350452
uagauugcggagcauuuag

SEQ ID NO: 2350454 - RNA, 19 nt, Artificial Sequence
  Description of Artificial Sequence: Synthetic oligonucleotide
  Sense strand starting at position 1518 of SEQ ID NO: 1885551
gugaauugcugaucaagua

SEQ ID NO: 2350455 - RNA, 19 nt, Artificial Sequence
  Description of Artificial Sequence: Synthetic oligonucleotide
  Antisense strand to SEQ ID NO: 2350454
uacuugaucagcaauucac

SEQ ID NO: 2350456 - RNA, 19 nt, Artificial Sequence
  Description of Artificial Sequence: Synthetic oligonucleotide
  Sense strand starting at position 1519 of SEQ ID NO: 1885551
ugaauugcugaucaaguau

SEQ ID NO: 2350457 - RNA, 19 nt, Artificial Sequence
  Description of Artificial Sequence: Synthetic oligonucleotide
  Antisense strand to SEQ ID NO: 2350456
auacuugaucagcaauuca

SEQ ID NO: 2350458 - RNA, 19 nt, Artificial Sequence
  Description of Artificial Sequence: Synthetic oligonucleotide
  Sense strand starting at position 1640 of SEQ ID NO: 1885551
cgacgaaacugauuaggaa

SEQ ID NO: 2350459 - RNA, 19 nt, Artificial Sequence
  Description of Artificial Sequence: Synthetic oligonucleotide
  Antisense strand to SEQ ID NO: 2350458
uuccuaaucaguuucgucg

SEQ ID NO: 2350460 - RNA, 19 nt, Artificial Sequence
  Description of Artificial Sequence: Synthetic oligonucleotide
  Sense strand starting at position 1785 of SEQ ID NO: 1885551
ucaauuacaccgcaauaga

SEQ ID NO: 2350461 - RNA, 19 nt, Artificial Sequence
  Description of Artificial Sequence: Synthetic oligonucleotide
  Antisense strand to SEQ ID NO: 2350460
ucuauugcgguguaauuga

SEQ ID NO: 2350462 - RNA, 19 nt, Artificial Sequence
  Description of Artificial Sequence: Synthetic oligonucleotide
  Sense strand starting at position 3116 of SEQ ID NO: 1885551
ucugcaaucugguuuagag

SEQ ID NO: 2350463 - RNA, 19 nt, Artificial Sequence
  Description of Artificial Sequence: Synthetic oligonucleotide
  Antisense strand to SEQ ID NO: 2350462
cucuaaaccagauugcaga

SEQ ID NO: 2350464 - RNA, 19 nt, Artificial Sequence
  Description of Artificial Sequence: Synthetic oligonucleotide
  Sense strand starting at position 3118 of SEQ ID NO: 1885551
ugcaaucugguuuagagua

SEQ ID NO: 2350465 - RNA, 19 nt, Artificial Sequence
  Description of Artificial Sequence: Synthetic oligonucleotide
  Antisense strand to SEQ ID NO: 2350464
uacucuaaaccagauugca

SEQ ID NO: 2350466 - RNA, 19 nt, Artificial Sequence
  Description of Artificial Sequence: Synthetic oligonucleotide
  Sense strand starting at position 3120 of SEQ ID NO: 1885551
caaucugguuuagaguaga

SEQ ID NO: 2350467 - RNA, 19 nt, Artificial Sequence
  Description of Artificial Sequence: Synthetic oligonucleotide
  Antisense strand to SEQ ID NO: 2350466
ucuacucuaaaccagauug

SEQ ID NO: 2350468 - RNA, 19 nt, Artificial Sequence
  Description of Artificial Sequence: Synthetic oligonucleotide
  Sense strand starting at position 3136 of SEQ ID NO: 1885551
agacaaagcuucccuuaag

SEQ ID NO: 2350469 - RNA, 19 nt, Artificial Sequence
  Description of Artificial Sequence: Synthetic oligonucleotide
  Antisense strand to SEQ ID NO: 2350468
cuuaagggaagcuuugucu

SEQ ID NO: 2350470 - RNA, 19 nt, Artificial Sequence
  Description of Artificial Sequence: Synthetic oligonucleotide
  Sense strand starting at position 3150 of SEQ ID NO: 1885551
uuaagcaagugaucuguua

SEQ ID NO: 2350471 - RNA, 19 nt, Artificial Sequence
  Description of Artificial Sequence: Synthetic oligonucleotide
  Antisense strand to SEQ ID NO: 2350470
uaacagaucacuugcuuaa

SEQ ID NO: 2350472 - RNA, 19 nt, Artificial Sequence
  Description of Artificial Sequence: Synthetic oligonucleotide
  Sense strand starting at position 3368 of SEQ ID NO: 1885551
uggagaaggucccuugcuu

SEQ ID NO: 2350473 - RNA, 19 nt, Artificial Sequence
  Description of Artificial Sequence: Synthetic oligonucleotide
  Antisense strand to SEQ ID NO: 2350472
aagcaagggaccuucucca

SEQ ID NO: 2350474 - RNA, 19 nt, Artificial Sequence
  Description of Artificial Sequence: Synthetic oligonucleotide
  Sense strand starting at position 3667 of SEQ ID NO: 1885551
cucacacaucuauggugua

SEQ ID NO: 2350475 - RNA, 19 nt, Artificial Sequence
  Description of Artificial Sequence: Synthetic oligonucleotide
  Antisense strand to SEQ ID NO: 2350474
uacaccauagaugugugag

SEQ ID NO: 2350476 - RNA, 19 nt, Artificial Sequence
  Description of Artificial Sequence: Synthetic oligonucleotide
  Sense strand starting at position 3670 of SEQ ID NO: 1885551
acacaucuaugguguaaag

SEQ ID NO: 2350477 - RNA, 19 nt, Artificial Sequence
  Description of Artificial Sequence: Synthetic oligonucleotide
  Antisense strand to SEQ ID NO: 2350476
cuuuacaccauagaugugu

SEQ ID NO: 2350478 - RNA, 19 nt, Artificial Sequence
  Description of Artificial Sequence: Synthetic oligonucleotide
  Sense strand starting at position 3672 of SEQ ID NO: 1885551
acaucuaugguguaaagug

SEQ ID NO: 2350479 - RNA, 19 nt, Artificial Sequence
  Description of Artificial Sequence: Synthetic oligonucleotide
  Antisense strand to SEQ ID NO: 2350478
cacuuuacaccauagaugu

SEQ ID NO: 2350480 - RNA, 19 nt, Artificial Sequence
  Description of Artificial Sequence: Synthetic oligonucleotide
  Sense strand starting at position 3765 of SEQ ID NO: 1885551
agagcgugucugggagaaa

SEQ ID NO: 2350481 - RNA, 19 nt, Artificial Sequence
  Description of Artificial Sequence: Synthetic oligonucleotide
  Antisense strand to SEQ ID NO: 2350480
uuucucccagacacgcucu

SEQ ID NO: 2350482 - RNA, 19 nt, Artificial Sequence
  Description of Artificial Sequence: Synthetic oligonucleotide
  Sense strand starting at position 3768 of SEQ ID NO: 1885551
gcgugucugggagaaaugu

SEQ ID NO: 2350483 - RNA, 19 nt, Artificial Sequence
  Description of Artificial Sequence: Synthetic oligonucleotide
  Antisense strand to SEQ ID NO: 2350482
acauuucucccagacacgc

SEQ ID NO: 2350484 - RNA, 19 nt, Artificial Sequence
  Description of Artificial Sequence: Synthetic oligonucleotide
  Sense strand starting at position 10 of SEQ ID NO: 1885552
guagcuaacuuagcuauuu

SEQ ID NO: 2350485 - RNA, 19 nt, Artificial Sequence
  Description of Artificial Sequence: Synthetic oligonucleotide
  Antisense strand to SEQ ID NO: 2350484
aaauagcuaaguuagcuac

SEQ ID NO: 2350486 - RNA, 19 nt, Artificial Sequence
  Description of Artificial Sequence: Synthetic oligonucleotide
  Sense strand starting at position 402 of SEQ ID NO: 1885552
uaaggauuguuguuaggag

SEQ ID NO: 2350487 - RNA, 19 nt, Artificial Sequence
  Description of Artificial Sequence: Synthetic oligonucleotide
  Antisense strand to SEQ ID NO: 2350486
cuccuaacaacaauccuua

SEQ ID NO: 2350488 - RNA, 19 nt, Artificial Sequence
  Description of Artificial Sequence: Synthetic oligonucleotide
  Sense strand starting at position 451 of SEQ ID NO: 1885552
cuuugacucugguuaaauu

SEQ ID NO: 2350489 - RNA, 19 nt, Artificial Sequence
  Description of Artificial Sequence: Synthetic oligonucleotide
  Antisense strand to SEQ ID NO: 2350488
aauuuaaccagagucaaag

SEQ ID NO: 2350490 - RNA, 19 nt, Artificial Sequence
  Description of Artificial Sequence: Synthetic oligonucleotide
  Sense strand starting at position 452 of SEQ ID NO: 1885552
uuugacucugguuaaauua

SEQ ID NO: 2350491 - RNA, 19 nt, Artificial Sequence
  Description of Artificial Sequence: Synthetic oligonucleotide
  Antisense strand to SEQ ID NO: 2350490
uaauuuaaccagagucaaa

SEQ ID NO: 2350492 - RNA, 19 nt, Artificial Sequence
  Description of Artificial Sequence: Synthetic oligonucleotide
  Sense strand starting at position 525 of SEQ ID NO: 1885552
uaguuaugagcauggauca

SEQ ID NO: 2350493 - RNA, 19 nt, Artificial Sequence
  Description of Artificial Sequence: Synthetic oligonucleotide
  Antisense strand to SEQ ID NO: 2350492
ugauccaugcucauaacua

SEQ ID NO: 2350494 - RNA, 19 nt, Artificial Sequence
  Description of Artificial Sequence: Synthetic oligonucleotide
  Sense strand starting at position 667 of SEQ ID NO: 1885552
uaauauuugugccugguau

SEQ ID NO: 2350495 - RNA, 19 nt, Artificial Sequence
  Description of Artificial Sequence: Synthetic oligonucleotide
  Antisense strand to SEQ ID NO: 2350494
auaccaggcacaaauauua

SEQ ID NO: 2350496 - RNA, 19 nt, Artificial Sequence
  Description of Artificial Sequence: Synthetic oligonucleotide
  Sense strand starting at position 668 of SEQ ID NO: 1885552
aauauuugugccugguaug

SEQ ID NO: 2350497 - RNA, 19 nt, Artificial Sequence
  Description of Artificial Sequence: Synthetic oligonucleotide
  Antisense strand to SEQ ID NO: 2350496
cauaccaggcacaaauauu

SEQ ID NO: 2350498 - RNA, 19 nt, Artificial Sequence
  Description of Artificial Sequence: Synthetic oligonucleotide
  Sense strand starting at position 685 of SEQ ID NO: 1885552
ugcaguaaccacuauguau

SEQ ID NO: 2350499 - RNA, 19 nt, Artificial Sequence
  Description of Artificial Sequence: Synthetic oligonucleotide
  Antisense strand to SEQ ID NO: 2350498
auacauagugguuacugca

SEQ ID NO: 2350500 - RNA, 19 nt, Artificial Sequence
  Description of Artificial Sequence: Synthetic oligonucleotide
  Sense strand starting at position 715 of SEQ ID NO: 1885552
aaauaaauguuguuggagu

SEQ ID NO: 2350501 - RNA, 19 nt, Artificial Sequence
  Description of Artificial Sequence: Synthetic oligonucleotide
  Antisense strand to SEQ ID NO: 2350500
acuccaacaacauuuauuu

SEQ ID NO: 2350502 - RNA, 19 nt, Artificial Sequence
  Description of Artificial Sequence: Synthetic oligonucleotide
  Sense strand starting at position 717 of SEQ ID NO: 1885552
auaaauguuguuggaguga

SEQ ID NO: 2350503 - RNA, 19 nt, Artificial Sequence
  Description of Artificial Sequence: Synthetic oligonucleotide
  Antisense strand to SEQ ID NO: 2350502
ucacuccaacaacauuuau

SEQ ID NO: 2350504 - RNA, 19 nt, Artificial Sequence
  Description of Artificial Sequence: Synthetic oligonucleotide
  Sense strand starting at position 751 of SEQ ID NO: 1885552
cucuaaugccgccuuguga

SEQ ID NO: 2350505 - RNA, 19 nt, Artificial Sequence
  Description of Artificial Sequence: Synthetic oligonucleotide
  Antisense strand to SEQ ID NO: 2350504
ucacaaggcggcauuagag

SEQ ID NO: 2350506 - RNA, 19 nt, Artificial Sequence
  Description of Artificial Sequence: Synthetic oligonucleotide
  Sense strand starting at position 798 of SEQ ID NO: 1885552
uauguauuacuugagugau

SEQ ID NO: 2350507 - RNA, 19 nt, Artificial Sequence
  Description of Artificial Sequence: Synthetic oligonucleotide
  Antisense strand to SEQ ID NO: 2350506
aucacucaaguaauacaua

SEQ ID NO: 2350508 - RNA, 19 nt, Artificial Sequence
  Description of Artificial Sequence: Synthetic oligonucleotide
  Sense strand starting at position 801 of SEQ ID NO: 1885552
guauuacuugagugauuaa

SEQ ID NO: 2350509 - RNA, 19 nt, Artificial Sequence
  Description of Artificial Sequence: Synthetic oligonucleotide
  Antisense strand to SEQ ID NO: 2350508
uuaaucacucaaguaauac

SEQ ID NO: 2350510 - RNA, 19 nt, Artificial Sequence
  Description of Artificial Sequence: Synthetic oligonucleotide
  Sense strand starting at position 865 of SEQ ID NO: 1885552
gugaaucauuccuucuaag

SEQ ID NO: 2350511 - RNA, 19 nt, Artificial Sequence
  Description of Artificial Sequence: Synthetic oligonucleotide
  Antisense strand to SEQ ID NO: 2350510
cuuagaaggaaugauucac

SEQ ID NO: 2350512 - RNA, 19 nt, Artificial Sequence
  Description of Artificial Sequence: Synthetic oligonucleotide
  Sense strand starting at position 880 of SEQ ID NO: 1885552
uaagcacaagguugugaaa

SEQ ID NO: 2350513 - RNA, 19 nt, Artificial Sequence
  Description of Artificial Sequence: Synthetic oligonucleotide
  Antisense strand to SEQ ID NO: 2350512
uuucacaaccuugugcuua

SEQ ID NO: 2350514 - RNA, 19 nt, Artificial Sequence
  Description of Artificial Sequence: Synthetic oligonucleotide
  Sense strand starting at position 932 of SEQ ID NO: 1885552
cuacuauaaccagggcuua

SEQ ID NO: 2350515 - RNA, 19 nt, Artificial Sequence
  Description of Artificial Sequence: Synthetic oligonucleotide
  Antisense strand to SEQ ID NO: 2350514
uaagcccugguuauaguag

SEQ ID NO: 2350516 - RNA, 19 nt, Artificial Sequence
  Description of Artificial Sequence: Synthetic oligonucleotide
  Sense strand starting at position 1004 of SEQ ID NO: 1885552
aucagucaaugaucuguua

SEQ ID NO: 2350517 - RNA, 19 nt, Artificial Sequence
  Description of Artificial Sequence: Synthetic oligonucleotide
  Antisense strand to SEQ ID NO: 2350516
uaacagaucauugacugau

SEQ ID NO: 2350518 - RNA, 19 nt, Artificial Sequence
  Description of Artificial Sequence: Synthetic oligonucleotide
  Sense strand starting at position 1011 of SEQ ID NO: 1885552
aaugaucuguuagcuggaa

SEQ ID NO: 2350519 - RNA, 19 nt, Artificial Sequence
  Description of Artificial Sequence: Synthetic oligonucleotide
  Antisense strand to SEQ ID NO: 2350518
uuccagcuaacagaucauu

SEQ ID NO: 2350520 - RNA, 19 nt, Artificial Sequence
  Description of Artificial Sequence: Synthetic oligonucleotide
  Sense strand starting at position 1012 of SEQ ID NO: 1885552
augaucuguuagcuggaaa

SEQ ID NO: 2350521 - RNA, 19 nt, Artificial Sequence
  Description of Artificial Sequence: Synthetic oligonucleotide
  Antisense strand to SEQ ID NO: 2350520
uuuccagcuaacagaucau

SEQ ID NO: 2350522 - RNA, 19 nt, Artificial Sequence
  Description of Artificial Sequence: Synthetic oligonucleotide
  Sense strand starting at position 1114 of SEQ ID NO: 1885552
uguuauucuagguaaguua

SEQ ID NO: 2350523 - RNA, 19 nt, Artificial Sequence
  Description of Artificial Sequence: Synthetic oligonucleotide
  Antisense strand to SEQ ID NO: 2350522
uaacuuaccuagaauaaca

SEQ ID NO: 2350524 - RNA, 19 nt, Artificial Sequence
  Description of Artificial Sequence: Synthetic oligonucleotide
  Sense strand starting at position 1167 of SEQ ID NO: 1885552
aggauuaaaugauuagugu

SEQ ID NO: 2350525 - RNA, 19 nt, Artificial Sequence
  Description of Artificial Sequence: Synthetic oligonucleotide
  Antisense strand to SEQ ID NO: 2350524
acacuaaucauuuaauccu

SEQ ID NO: 2350526 - RNA, 19 nt, Artificial Sequence
  Description of Artificial Sequence: Synthetic oligonucleotide
  Sense strand starting at position 1173 of SEQ ID NO: 1885552
aaaugauuagugugugaga

SEQ ID NO: 2350527 - RNA, 19 nt, Artificial Sequence
  Description of Artificial Sequence: Synthetic oligonucleotide
  Antisense strand to SEQ ID NO: 2350526
ucucacacacuaaucauuu

SEQ ID NO: 2350528 - RNA, 19 nt, Artificial Sequence
  Description of Artificial Sequence: Synthetic oligonucleotide
  Sense strand starting at position 1174 of SEQ ID NO: 1885552
aaugauuagugugugagaa

SEQ ID NO: 2350529 - RNA, 19 nt, Artificial Sequence
  Description of Artificial Sequence: Synthetic oligonucleotide
  Antisense strand to SEQ ID NO: 2350528
uucucacacacuaaucauu

SEQ ID NO: 2350530 - RNA, 19 nt, Artificial Sequence
  Description of Artificial Sequence: Synthetic oligonucleotide
  Sense strand starting at position 1175 of SEQ ID NO: 1885552
augauuagugugugagaaa

SEQ ID NO: 2350531 - RNA, 19 nt, Artificial Sequence
  Description of Artificial Sequence: Synthetic oligonucleotide
  Antisense strand to SEQ ID NO: 2350530
uuucucacacacuaaucau

SEQ ID NO: 2350532 - RNA, 19 nt, Artificial Sequence
  Description of Artificial Sequence: Synthetic oligonucleotide
  Sense strand starting at position 1199 of SEQ ID NO: 1885552
agaacaaugccuggcucaa

SEQ ID NO: 2350533 - RNA, 19 nt, Artificial Sequence
  Description of Artificial Sequence: Synthetic oligonucleotide
  Antisense strand to SEQ ID NO: 2350532
uugagccaggcauuguucu

SEQ ID NO: 2350534 - RNA, 19 nt, Artificial Sequence
  Description of Artificial Sequence: Synthetic oligonucleotide
  Sense strand starting at position 1211 of SEQ ID NO: 1885552
ggcucaaaguaaguaauca

SEQ ID NO: 2350535 - RNA, 19 nt, Artificial Sequence
  Description of Artificial Sequence: Synthetic oligonucleotide
  Antisense strand to SEQ ID NO: 2350534
ugauuacuuacuuugagcc

SEQ ID NO: 2350536 - RNA, 19 nt, Artificial Sequence
  Description of Artificial Sequence: Synthetic oligonucleotide
  Sense strand starting at position 1219 of SEQ ID NO: 1885552
guaaguaaucaauaaaugc

SEQ ID NO: 2350537 - RNA, 19 nt, Artificial Sequence
  Description of Artificial Sequence: Synthetic oligonucleotide
  Antisense strand to SEQ ID NO: 2350536
gcauuuauugauuacuuac

SEQ ID NO: 2350538 - RNA, 19 nt, Artificial Sequence
  Description of Artificial Sequence: Synthetic oligonucleotide
  Sense strand starting at position 1383 of SEQ ID NO: 1885552
ccaagagaagugggcauua

SEQ ID NO: 2350539 - RNA, 19 nt, Artificial Sequence
  Description of Artificial Sequence: Synthetic oligonucleotide
  Antisense strand to SEQ ID NO: 2350538
uaaugcccacuucucuugg

SEQ ID NO: 2350540 - RNA, 19 nt, Artificial Sequence
  Description of Artificial Sequence: Synthetic oligonucleotide
  Sense strand starting at position 1566 of SEQ ID NO: 1885552
ggugaaagaggcuguuaac

SEQ ID NO: 2350541 - RNA, 19 nt, Artificial Sequence
  Description of Artificial Sequence: Synthetic oligonucleotide
  Antisense strand to SEQ ID NO: 2350540
guuaacagccucuuucacc

SEQ ID NO: 2350542 - RNA, 19 nt, Artificial Sequence
  Description of Artificial Sequence: Synthetic oligonucleotide
  Sense strand starting at position 1577 of SEQ ID NO: 1885552
cuguuaacacucgaaagua

SEQ ID NO: 2350543 - RNA, 19 nt, Artificial Sequence
  Description of Artificial Sequence: Synthetic oligonucleotide
  Antisense strand to SEQ ID NO: 2350542
uacuuucgaguguuaacag

SEQ ID NO: 2350544 - RNA, 19 nt, Artificial Sequence
  Description of Artificial Sequence: Synthetic oligonucleotide
  Sense strand starting at position 1720 of SEQ ID NO: 1885552
ggauguuaaucaguaccau

SEQ ID NO: 2350545 - RNA, 19 nt, Artificial Sequence
  Description of Artificial Sequence: Synthetic oligonucleotide
  Antisense strand to SEQ ID NO: 2350544
augguacugauuaacaucc

SEQ ID NO: 2350546 - RNA, 19 nt, Artificial Sequence
  Description of Artificial Sequence: Synthetic oligonucleotide
  Sense strand starting at position 2221 of SEQ ID NO: 1885552
ggcagaggaaucugccaaa

SEQ ID NO: 2350547 - RNA, 19 nt, Artificial Sequence
  Description of Artificial Sequence: Synthetic oligonucleotide
  Antisense strand to SEQ ID NO: 2350546
uuuggcagauuccucugcc

SEQ ID NO: 2350548 - RNA, 19 nt, Artificial Sequence
  Description of Artificial Sequence: Synthetic oligonucleotide
  Sense strand starting at position 2313 of SEQ ID NO: 1885552
ugcaaagagcuuuaacuuc

SEQ ID NO: 2350549 - RNA, 19 nt, Artificial Sequence
  Description of Artificial Sequence: Synthetic oligonucleotide
  Antisense strand to SEQ ID NO: 2350548
gaaguuaaagcucuuugca

SEQ ID NO: 2350550 - RNA, 19 nt, Artificial Sequence
  Description of Artificial Sequence: Synthetic oligonucleotide
  Sense strand starting at position 2432 of SEQ ID NO: 1885552
aggauacuuuaucuuguga

SEQ ID NO: 2350551 - RNA, 19 nt, Artificial Sequence
  Description of Artificial Sequence: Synthetic oligonucleotide
  Antisense strand to SEQ ID NO: 2350550
ucacaagauaaaguauccu

SEQ ID NO: 2350552 - RNA, 19 nt, Artificial Sequence
  Description of Artificial Sequence: Synthetic oligonucleotide
  Sense strand starting at position 2648 of SEQ ID NO: 1885552
uuggucuuaguccaauaau

SEQ ID NO: 2350553 - RNA, 19 nt, Artificial Sequence
  Description of Artificial Sequence: Synthetic oligonucleotide
  Antisense strand to SEQ ID NO: 2350552
auuauuggacuaagaccaa

SEQ ID NO: 2350554 - RNA, 19 nt, Artificial Sequence
  Description of Artificial Sequence: Synthetic oligonucleotide
  Sense strand starting at position 2651 of SEQ ID NO: 1885552
gucuuaguccaauaaugac

SEQ ID NO: 2350555 - RNA, 19 nt, Artificial Sequence
  Description of Artificial Sequence: Synthetic oligonucleotide
  Antisense strand to SEQ ID NO: 2350554
gucauuauuggacuaagac

SEQ ID NO: 2350556 - RNA, 19 nt, Artificial Sequence
  Description of Artificial Sequence: Synthetic oligonucleotide
  Sense strand starting at position 3217 of SEQ ID NO: 1885552
auggaugacucacaauuua

SEQ ID NO: 2350557 - RNA, 19 nt, Artificial Sequence
  Description of Artificial Sequence: Synthetic oligonucleotide
  Antisense strand to SEQ ID NO: 2350556
uaaauugugagucauccau

SEQ ID NO: 2350558 - RNA, 19 nt, Artificial Sequence
  Description of Artificial Sequence: Synthetic oligonucleotide
  Sense strand starting at position 3534 of SEQ ID NO: 1885552
cccacaucucagcaaggau

SEQ ID NO: 2350559 - RNA, 19 nt, Artificial Sequence
  Description of Artificial Sequence: Synthetic oligonucleotide
  Antisense strand to SEQ ID NO: 2350558
auccuugcugagauguggg

SEQ ID NO: 2350560 - RNA, 19 nt, Artificial Sequence
  Description of Artificial Sequence: Synthetic oligonucleotide
  Sense strand starting at position 3739 of SEQ ID NO: 1885552
aaaggucacugagcagaaa

SEQ ID NO: 2350561 - RNA, 19 nt, Artificial Sequence
  Description of Artificial Sequence: Synthetic oligonucleotide
  Antisense strand to SEQ ID NO: 2350560
uuucugcucagugaccuuu

SEQ ID NO: 2350562 - RNA, 19 nt, Artificial Sequence
  Description of Artificial Sequence: Synthetic oligonucleotide
  Sense strand starting at position 3801 of SEQ ID NO: 1885552
cuuuauucugaccauuagu

SEQ ID NO: 2350563 - RNA, 19 nt, Artificial Sequence
  Description of Artificial Sequence: Synthetic oligonucleotide
  Antisense strand to SEQ ID NO: 2350562
acuaauggucagaauaaag

SEQ ID NO: 2350564 - RNA, 19 nt, Artificial Sequence
  Description of Artificial Sequence: Synthetic oligonucleotide
  Sense strand starting at position 5 of SEQ ID NO: 1885553
ggaguuaagcaauggagua

SEQ ID NO: 2350565 - RNA, 19 nt, Artificial Sequence
  Description of Artificial Sequence: Synthetic oligonucleotide
  Antisense strand to SEQ ID NO: 2350564
uacuccauugcuuaacucc

SEQ ID NO: 2350566 - RNA, 19 nt, Artificial Sequence
  Description of Artificial Sequence: Synthetic oligonucleotide
  Sense strand starting at position 85 of SEQ ID NO: 1885553
aagaauagacgucagcaua

SEQ ID NO: 2350567 - RNA, 19 nt, Artificial Sequence
  Description of Artificial Sequence: Synthetic oligonucleotide
  Antisense strand to SEQ ID NO: 2350566
uaugcugacgucuauucuu

SEQ ID NO: 2350568 - RNA, 19 nt, Artificial Sequence
  Description of Artificial Sequence: Synthetic oligonucleotide
  Sense strand starting at position 88 of SEQ ID NO: 1885553
aauagacgucagcauaauu

SEQ ID NO: 2350569 - RNA, 19 nt, Artificial Sequence
  Description of Artificial Sequence: Synthetic oligonucleotide
  Antisense strand to SEQ ID NO: 2350568
aauuaugcugacgucuauu

SEQ ID NO: 2350570 - RNA, 19 nt, Artificial Sequence
  Description of Artificial Sequence: Synthetic oligonucleotide
  Sense strand starting at position 93 of SEQ ID NO: 1885553
acgucagcauaauugaaau

SEQ ID NO: 2350571 - RNA, 19 nt, Artificial Sequence
  Description of Artificial Sequence: Synthetic oligonucleotide
  Antisense strand to SEQ ID NO: 2350570
auuucaauuaugcugacgu

SEQ ID NO: 2350572 - RNA, 19 nt, Artificial Sequence
  Description of Artificial Sequence: Synthetic oligonucleotide
  Sense strand starting at position 118 of SEQ ID NO: 1885553
ucuugcaauccucagguaa

SEQ ID NO: 2350573 - RNA, 19 nt, Artificial Sequence
  Description of Artificial Sequence: Synthetic oligonucleotide
  Antisense strand to SEQ ID NO: 2350572
uuaccugaggauugcaaga

SEQ ID NO: 2350574 - RNA, 19 nt, Artificial Sequence
  Description of Artificial Sequence: Synthetic oligonucleotide
  Sense strand starting at position 375 of SEQ ID NO: 1885553
ugauaacaugcugguaaca

SEQ ID NO: 2350575 - RNA, 19 nt, Artificial Sequence
  Description of Artificial Sequence: Synthetic oligonucleotide
  Antisense strand to SEQ ID NO: 2350574
uguuaccagcauguuauca

SEQ ID NO: 2350576 - RNA, 19 nt, Artificial Sequence
  Description of Artificial Sequence: Synthetic oligonucleotide
  Sense strand starting at position 394 of SEQ ID NO: 1885553
uggaguuucccagggacaa

SEQ ID NO: 2350577 - RNA, 19 nt, Artificial Sequence
  Description of Artificial Sequence: Synthetic oligonucleotide
  Antisense strand to SEQ ID NO: 2350576
uugucccugggaaacucca

SEQ ID NO: 2350578 - RNA, 19 nt, Artificial Sequence
  Description of Artificial Sequence: Synthetic oligonucleotide
  Sense strand starting at position 395 of SEQ ID NO: 1885553
ggaguuucccagggacaag

SEQ ID NO: 2350579 - RNA, 19 nt, Artificial Sequence
  Description of Artificial Sequence: Synthetic oligonucleotide
  Antisense strand to SEQ ID NO: 2350578
cuugucccugggaaacucc

SEQ ID NO: 2350580 - RNA, 19 nt, Artificial Sequence
  Description of Artificial Sequence: Synthetic oligonucleotide
  Sense strand starting at position 775 of SEQ ID NO: 1885553
uucuguuaccgguauaauu

SEQ ID NO: 2350581 - RNA, 19 nt, Artificial Sequence
  Description of Artificial Sequence: Synthetic oligonucleotide
  Antisense strand to SEQ ID NO: 2350580
aauuauaccgguaacagaa

SEQ ID NO: 2350582 - RNA, 19 nt, Artificial Sequence
  Description of Artificial Sequence: Synthetic oligonucleotide
  Sense strand starting at position 837 of SEQ ID NO: 1885553
agcgaaugugacugcauuu

SEQ ID NO: 2350583 - RNA, 19 nt, Artificial Sequence
  Description of Artificial Sequence: Synthetic oligonucleotide
  Antisense strand to SEQ ID NO: 2350582
aaaugcagucacauucgcu

SEQ ID NO: 2350584 - RNA, 19 nt, Artificial Sequence
  Description of Artificial Sequence: Synthetic oligonucleotide
  Sense strand starting at position 857 of SEQ ID NO: 1885553
uaaauaagguccuugcaga

SEQ ID NO: 2350585 - RNA, 19 nt, Artificial Sequence
  Description of Artificial Sequence: Synthetic oligonucleotide
  Antisense strand to SEQ ID NO: 2350584
ucugcaaggaccuuauuua

SEQ ID NO: 2350586 - RNA, 19 nt, Artificial Sequence
  Description of Artificial Sequence: Synthetic oligonucleotide
  Sense strand starting at position 858 of SEQ ID NO: 1885553
aaauaagguccuugcagau

SEQ ID NO: 2350587 - RNA, 19 nt, Artificial Sequence
  Description of Artificial Sequence: Synthetic oligonucleotide
  Antisense strand to SEQ ID NO: 2350586
aucugcaaggaccuuauuu

SEQ ID NO: 2350588 - RNA, 19 nt, Artificial Sequence
  Description of Artificial Sequence: Synthetic oligonucleotide
  Sense strand starting at position 980 of SEQ ID NO: 1885553
gaacacacccugugaagau

SEQ ID NO: 2350589 - RNA, 19 nt, Artificial Sequence
  Description of Artificial Sequence: Synthetic oligonucleotide
  Antisense strand to SEQ ID NO: 2350588
aucuucacaggguguguuc

SEQ ID NO: 2350590 - RNA, 19 nt, Artificial Sequence
  Description of Artificial Sequence: Synthetic oligonucleotide
  Sense strand starting at position 1201 of SEQ ID NO: 1885553
aauacagugggucauguua

SEQ ID NO: 2350591 - RNA, 19 nt, Artificial Sequence
  Description of Artificial Sequence: Synthetic oligonucleotide
  Antisense strand to SEQ ID NO: 2350590
uaacaugacccacuguauu

SEQ ID NO: 2350592 - RNA, 19 nt, Artificial Sequence
  Description of Artificial Sequence: Synthetic oligonucleotide
  Sense strand starting at position 1210 of SEQ ID NO: 1885553
ggucauguuauuugucuca

SEQ ID NO: 2350593 - RNA, 19 nt, Artificial Sequence
  Description of Artificial Sequence: Synthetic oligonucleotide
  Antisense strand to SEQ ID NO: 2350592
ugagacaaauaacaugacc

SEQ ID NO: 2350594 - RNA, 19 nt, Artificial Sequence
  Description of Artificial Sequence: Synthetic oligonucleotide
  Sense strand starting at position 1215 of SEQ ID NO: 1885553
uguuauuugucucaauuuc

SEQ ID NO: 2350595 - RNA, 19 nt, Artificial Sequence
  Description of Artificial Sequence: Synthetic oligonucleotide
  Antisense strand to SEQ ID NO: 2350594
gaaauugagacaaauaaca

SEQ ID NO: 2350596 - RNA, 19 nt, Artificial Sequence
  Description of Artificial Sequence: Synthetic oligonucleotide
  Sense strand starting at position 1272 of SEQ ID NO: 1885553
ccaagaucucauggcagga

SEQ ID NO: 2350597 - RNA, 19 nt, Artificial Sequence
  Description of Artificial Sequence: Synthetic oligonucleotide
  Antisense strand to SEQ ID NO: 2350596
uccugccaugagaucuugg

SEQ ID NO: 2350598 - RNA, 19 nt, Artificial Sequence
  Description of Artificial Sequence: Synthetic oligonucleotide
  Sense strand starting at position 1458 of SEQ ID NO: 1885553
cucugaugggugggaaaua

SEQ ID NO: 2350599 - RNA, 19 nt, Artificial Sequence
  Description of Artificial Sequence: Synthetic oligonucleotide
  Antisense strand to SEQ ID NO: 2350598
uauuucccacccaucagag

SEQ ID NO: 2350600 - RNA, 19 nt, Artificial Sequence
  Description of Artificial Sequence: Synthetic oligonucleotide
  Sense strand starting at position 1470 of SEQ ID NO: 1885553
ggaaauaagccucaggcca

SEQ ID NO: 2350601 - RNA, 19 nt, Artificial Sequence
  Description of Artificial Sequence: Synthetic oligonucleotide
  Antisense strand to SEQ ID NO: 2350600
uggccugaggcuuauuucc

SEQ ID NO: 2350602 - RNA, 19 nt, Artificial Sequence
  Description of Artificial Sequence: Synthetic oligonucleotide
  Sense strand starting at position 1520 of SEQ ID NO: 1885553
accugccuugcucaggaaa

SEQ ID NO: 2350603 - RNA, 19 nt, Artificial Sequence
  Description of Artificial Sequence: Synthetic oligonucleotide
  Antisense strand to SEQ ID NO: 2350602
uuuccugagcaaggcaggu

SEQ ID NO: 2350604 - RNA, 19 nt, Artificial Sequence
  Description of Artificial Sequence: Synthetic oligonucleotide
  Sense strand starting at position 1613 of SEQ ID NO: 1885553
caaucuuugcgggacacuu

SEQ ID NO: 2350605 - RNA, 19 nt, Artificial Sequence
  Description of Artificial Sequence: Synthetic oligonucleotide
  Antisense strand to SEQ ID NO: 2350604
aagugucccgcaaagauug

SEQ ID NO: 2350606 - RNA, 19 nt, Artificial Sequence
  Description of Artificial Sequence: Synthetic oligonucleotide
  Sense strand starting at position 2117 of SEQ ID NO: 1885553
cggcaagucacguucccau

SEQ ID NO: 2350607 - RNA, 19 nt, Artificial Sequence
  Description of Artificial Sequence: Synthetic oligonucleotide
  Antisense strand to SEQ ID NO: 2350606
augggaacgugacuugccg

SEQ ID NO: 2350608 - RNA, 19 nt, Artificial Sequence
  Description of Artificial Sequence: Synthetic oligonucleotide
  Sense strand starting at position 2152 of SEQ ID NO: 1885553
acgauuuagcucugugagc

SEQ ID NO: 2350609 - RNA, 19 nt, Artificial Sequence
  Description of Artificial Sequence: Synthetic oligonucleotide
  Antisense strand to SEQ ID NO: 2350608
gcucacagagcuaaaucgu

SEQ ID NO: 2350610 - RNA, 19 nt, Artificial Sequence
  Description of Artificial Sequence: Synthetic oligonucleotide
  Sense strand starting at position 2154 of SEQ ID NO: 1885553
gauuuagcucugugagccu

SEQ ID NO: 2350611 - RNA, 19 nt, Artificial Sequence
  Description of Artificial Sequence: Synthetic oligonucleotide
  Antisense strand to SEQ ID NO: 2350610
aggcucacagagcuaaauc

SEQ ID NO: 2350612 - RNA, 19 nt, Artificial Sequence
  Description of Artificial Sequence: Synthetic oligonucleotide
  Sense strand starting at position 2417 of SEQ ID NO: 1885553
auguauucgaagugaccca

SEQ ID NO: 2350613 - RNA, 19 nt, Artificial Sequence
  Description of Artificial Sequence: Synthetic oligonucleotide
  Antisense strand to SEQ ID NO: 2350612
ugggucacuucgaauacau

SEQ ID NO: 2350614 - RNA, 19 nt, Artificial Sequence
  Description of Artificial Sequence: Synthetic oligonucleotide
  Sense strand starting at position 3095 of SEQ ID NO: 1885553
uuacaacuguucuuaggaa

SEQ ID NO: 2350615 - RNA, 19 nt, Artificial Sequence
  Description of Artificial Sequence: Synthetic oligonucleotide
  Antisense strand to SEQ ID NO: 2350614
uuccuaagaacaguuguaa

SEQ ID NO: 2350616 - RNA, 19 nt, Artificial Sequence
  Description of Artificial Sequence: Synthetic oligonucleotide
  Sense strand starting at position 3191 of SEQ ID NO: 1885553
uuuccaguucuguaacacu

SEQ ID NO: 2350617 - RNA, 19 nt, Artificial Sequence
  Description of Artificial Sequence: Synthetic oligonucleotide
  Antisense strand to SEQ ID NO: 2350616
aguguuacagaacuggaaa

SEQ ID NO: 2350618 - RNA, 19 nt, Artificial Sequence
  Description of Artificial Sequence: Synthetic oligonucleotide
  Sense strand starting at position 3242 of SEQ ID NO: 1885553
ugcucauuagggugaaacu

SEQ ID NO: 2350619 - RNA, 19 nt, Artificial Sequence
  Description of Artificial Sequence: Synthetic oligonucleotide
  Antisense strand to SEQ ID NO: 2350618
aguuucacccuaaugagca

SEQ ID NO: 2350620 - RNA, 19 nt, Artificial Sequence
  Description of Artificial Sequence: Synthetic oligonucleotide
  Sense strand starting at position 3414 of SEQ ID NO: 1885553
aggugaggcaaaugcuuau

SEQ ID NO: 2350621 - RNA, 19 nt, Artificial Sequence
  Description of Artificial Sequence: Synthetic oligonucleotide
  Antisense strand to SEQ ID NO: 2350620
auaagcauuugccucaccu

SEQ ID NO: 2350622 - RNA, 19 nt, Artificial Sequence
  Description of Artificial Sequence: Synthetic oligonucleotide
  Sense strand starting at position 3417 of SEQ ID NO: 1885553
ugaggcaaaugcuuaucau

SEQ ID NO: 2350623 - RNA, 19 nt, Artificial Sequence
  Description of Artificial Sequence: Synthetic oligonucleotide
  Antisense strand to SEQ ID NO: 2350622
augauaagcauuugccuca

SEQ ID NO: 2350624 - RNA, 19 nt, Artificial Sequence
  Description of Artificial Sequence: Synthetic oligonucleotide
  Sense strand starting at position 3451 of SEQ ID NO: 1885553
acacgauaauaugcuagau

SEQ ID NO: 2350625 - RNA, 19 nt, Artificial Sequence
  Description of Artificial Sequence: Synthetic oligonucleotide
  Antisense strand to SEQ ID NO: 2350624
aucuagcauauuaucgugu

SEQ ID NO: 2350626 - RNA, 19 nt, Artificial Sequence
  Description of Artificial Sequence: Synthetic oligonucleotide
  Sense strand starting at position 3474 of SEQ ID NO: 1885553
aaauaauuaggcugauggu

SEQ ID NO: 2350627 - RNA, 19 nt, Artificial Sequence
  Description of Artificial Sequence: Synthetic oligonucleotide
  Antisense strand to SEQ ID NO: 2350626
accaucagccuaauuauuu

SEQ ID NO: 2350628 - RNA, 19 nt, Artificial Sequence
  Description of Artificial Sequence: Synthetic oligonucleotide
  Sense strand starting at position 3505 of SEQ ID NO: 1885553
augguuucugugcaauuag

SEQ ID NO: 2350629 - RNA, 19 nt, Artificial Sequence
  Description of Artificial Sequence: Synthetic oligonucleotide
  Antisense strand to SEQ ID NO: 2350628
cuaauugcacagaaaccau

SEQ ID NO: 2350630 - RNA, 19 nt, Artificial Sequence
  Description of Artificial Sequence: Synthetic oligonucleotide
  Sense strand starting at position 3514 of SEQ ID NO: 1885553
gugcaauuagacggaugga

SEQ ID NO: 2350631 - RNA, 19 nt, Artificial Sequence
  Description of Artificial Sequence: Synthetic oligonucleotide
  Antisense strand to SEQ ID NO: 2350630
uccauccgucuaauugcac

SEQ ID NO: 2350632 - RNA, 19 nt, Artificial Sequence
  Description of Artificial Sequence: Synthetic oligonucleotide
  Sense strand starting at position 3569 of SEQ ID NO: 1885553
ugaccucaagugggaauau

SEQ ID NO: 2350633 - RNA, 19 nt, Artificial Sequence
  Description of Artificial Sequence: Synthetic oligonucleotide
  Antisense strand to SEQ ID NO: 2350632
auauucccacuugagguca

SEQ ID NO: 2350634 - RNA, 19 nt, Artificial Sequence
  Description of Artificial Sequence: Synthetic oligonucleotide
  Sense strand starting at position 3691 of SEQ ID NO: 1885553
accagauguucccuagaca

SEQ ID NO: 2350635 - RNA, 19 nt, Artificial Sequence
  Description of Artificial Sequence: Synthetic oligonucleotide
  Antisense strand to SEQ ID NO: 2350634
ugucuagggaacaucuggu

SEQ ID NO: 2350636 - RNA, 19 nt, Artificial Sequence
  Description of Artificial Sequence: Synthetic oligonucleotide
  Sense strand starting at position 3692 of SEQ ID NO: 1885553
ccagauguucccuagacau

SEQ ID NO: 2350637 - RNA, 19 nt, Artificial Sequence
  Description of Artificial Sequence: Synthetic oligonucleotide
  Antisense strand to SEQ ID NO: 2350636
augucuagggaacaucugg

SEQ ID NO: 2350638 - RNA, 19 nt, Artificial Sequence
  Description of Artificial Sequence: Synthetic oligonucleotide
  Sense strand starting at position 3862 of SEQ ID NO: 1885553
ggaugauaauaucuacugu

SEQ ID NO: 2350639 - RNA, 19 nt, Artificial Sequence
  Description of Artificial Sequence: Synthetic oligonucleotide
  Antisense strand to SEQ ID NO: 2350638
acaguagauauuaucaucc

SEQ ID NO: 2350640 - RNA, 19 nt, Artificial Sequence
  Description of Artificial Sequence: Synthetic oligonucleotide
  Sense strand starting at position 3916 of SEQ ID NO: 1885553
gugugauaaagauauggug

SEQ ID NO: 2350641 - RNA, 19 nt, Artificial Sequence
  Description of Artificial Sequence: Synthetic oligonucleotide
  Antisense strand to SEQ ID NO: 2350640
caccauaucuuuaucacac

SEQ ID NO: 2350642 - RNA, 19 nt, Artificial Sequence
  Description of Artificial Sequence: Synthetic oligonucleotide
  Sense strand starting at position 3918 of SEQ ID NO: 1885553
gugauaaagauauggugga

SEQ ID NO: 2350643 - RNA, 19 nt, Artificial Sequence
  Description of Artificial Sequence: Synthetic oligonucleotide
  Antisense strand to SEQ ID NO: 2350642
uccaccauaucuuuaucac

SEQ ID NO: 2350644 - RNA, 19 nt, Artificial Sequence
  Description of Artificial Sequence: Synthetic oligonucleotide
  Sense strand starting at position 39 of SEQ ID NO: 1885554
gcuuauaaugaaugagcuu

SEQ ID NO: 2350645 - RNA, 19 nt, Artificial Sequence
  Description of Artificial Sequence: Synthetic oligonucleotide
  Antisense strand to SEQ ID NO: 2350644
aagcucauucauuauaagc

SEQ ID NO: 2350646 - RNA, 19 nt, Artificial Sequence
  Description of Artificial Sequence: Synthetic oligonucleotide
  Sense strand starting at position 45 of SEQ ID NO: 1885554
aaugaaugagcuuggucca

SEQ ID NO: 2350647 - RNA, 19 nt, Artificial Sequence
  Description of Artificial Sequence: Synthetic oligonucleotide
  Antisense strand to SEQ ID NO: 2350646
uggaccaagcucauucauu

SEQ ID NO: 2350648 - RNA, 19 nt, Artificial Sequence
  Description of Artificial Sequence: Synthetic oligonucleotide
  Sense strand starting at position 48 of SEQ ID NO: 1885554
gaaugagcuugguccaggu

SEQ ID NO: 2350649 - RNA, 19 nt, Artificial Sequence
  Description of Artificial Sequence: Synthetic oligonucleotide
  Antisense strand to SEQ ID NO: 2350648
accuggaccaagcucauuc

SEQ ID NO: 2350650 - RNA, 19 nt, Artificial Sequence
  Description of Artificial Sequence: Synthetic oligonucleotide
  Sense strand starting at position 172 of SEQ ID NO: 1885554
cccuuaccuggaggauaua

SEQ ID NO: 2350651 - RNA, 19 nt, Artificial Sequence
  Description of Artificial Sequence: Synthetic oligonucleotide
  Antisense strand to SEQ ID NO: 2350650
uauauccuccagguaaggg

SEQ ID NO: 2350652 - RNA, 19 nt, Artificial Sequence
  Description of Artificial Sequence: Synthetic oligonucleotide
  Sense strand starting at position 330 of SEQ ID NO: 1885554
ucugaagagccuuggcaaa

SEQ ID NO: 2350653 - RNA, 19 nt, Artificial Sequence
  Description of Artificial Sequence: Synthetic oligonucleotide
  Antisense strand to SEQ ID NO: 2350652
uuugccaaggcucuucaga

SEQ ID NO: 2350654 - RNA, 19 nt, Artificial Sequence
  Description of Artificial Sequence: Synthetic oligonucleotide
  Sense strand starting at position 398 of SEQ ID NO: 1885554
agggacaucagcugucaaa

SEQ ID NO: 2350655 - RNA, 19 nt, Artificial Sequence
  Description of Artificial Sequence: Synthetic oligonucleotide
  Antisense strand to SEQ ID NO: 2350654
uuugacagcugaugucccu

SEQ ID NO: 2350656 - RNA, 19 nt, Artificial Sequence
  Description of Artificial Sequence: Synthetic oligonucleotide
  Sense strand starting at position 502 of SEQ ID NO: 1885554
uuaaguaugucucugacuu

SEQ ID NO: 2350657 - RNA, 19 nt, Artificial Sequence
  Description of Artificial Sequence: Synthetic oligonucleotide
  Antisense strand to SEQ ID NO: 2350656
aagucagagacauacuuaa

SEQ ID NO: 2350658 - RNA, 19 nt, Artificial Sequence
  Description of Artificial Sequence: Synthetic oligonucleotide
  Sense strand starting at position 523 of SEQ ID NO: 1885554
agccuaggaucacucauua

SEQ ID NO: 2350659 - RNA, 19 nt, Artificial Sequence
  Description of Artificial Sequence: Synthetic oligonucleotide
  Antisense strand to SEQ ID NO: 2350658
uaaugagugauccuaggcu

SEQ ID NO: 2350660 - RNA, 19 nt, Artificial Sequence
  Description of Artificial Sequence: Synthetic oligonucleotide
  Sense strand starting at position 608 of SEQ ID NO: 1885554
agguguggauagguuuaaa

SEQ ID NO: 2350661 - RNA, 19 nt, Artificial Sequence
  Description of Artificial Sequence: Synthetic oligonucleotide
  Antisense strand to SEQ ID NO: 2350660
uuuaaaccuauccacaccu

SEQ ID NO: 2350662 - RNA, 19 nt, Artificial Sequence
  Description of Artificial Sequence: Synthetic oligonucleotide
  Sense strand starting at position 632 of SEQ ID NO: 1885554
cagggacgucuguacacua

SEQ ID NO: 2350663 - RNA, 19 nt, Artificial Sequence
  Description of Artificial Sequence: Synthetic oligonucleotide
  Antisense strand to SEQ ID NO: 2350662
uaguguacagacgucccug

SEQ ID NO: 2350664 - RNA, 19 nt, Artificial Sequence
  Description of Artificial Sequence: Synthetic oligonucleotide
  Sense strand starting at position 885 of SEQ ID NO: 1885554
aagucugucuaacuggaaa

SEQ ID NO: 2350665 - RNA, 19 nt, Artificial Sequence
  Description of Artificial Sequence: Synthetic oligonucleotide
  Antisense strand to SEQ ID NO: 2350664
uuuccaguuagacagacuu

SEQ ID NO: 2350666 - RNA, 19 nt, Artificial Sequence
  Description of Artificial Sequence: Synthetic oligonucleotide
  Sense strand starting at position 887 of SEQ ID NO: 1885554
gucugucuaacuggaaagu

SEQ ID NO: 2350667 - RNA, 19 nt, Artificial Sequence
  Description of Artificial Sequence: Synthetic oligonucleotide
  Antisense strand to SEQ ID NO: 2350666
acuuuccaguuagacagac

SEQ ID NO: 2350668 - RNA, 19 nt, Artificial Sequence
  Description of Artificial Sequence: Synthetic oligonucleotide
  Sense strand starting at position 1021 of SEQ ID NO: 1885554
ccagaagccucuccgagaa

SEQ ID NO: 2350669 - RNA, 19 nt, Artificial Sequence
  Description of Artificial Sequence: Synthetic oligonucleotide
  Antisense strand to SEQ ID NO: 2350668
uucucggagaggcuucugg

SEQ ID NO: 2350670 - RNA, 19 nt, Artificial Sequence
  Description of Artificial Sequence: Synthetic oligonucleotide
  Sense strand starting at position 2867 of SEQ ID NO: 1885554
gguuguacugaggaaaggu

SEQ ID NO: 2350671 - RNA, 19 nt, Artificial Sequence
  Description of Artificial Sequence: Synthetic oligonucleotide
  Antisense strand to SEQ ID NO: 2350670
accuuuccucaguacaacc

SEQ ID NO: 2350672 - RNA, 19 nt, Artificial Sequence
  Description of Artificial Sequence: Synthetic oligonucleotide
  Sense strand starting at position 3022 of SEQ ID NO: 1885554
uuguccugcccuuaaggau

SEQ ID NO: 2350673 - RNA, 19 nt, Artificial Sequence
  Description of Artificial Sequence: Synthetic oligonucleotide
  Antisense strand to SEQ ID NO: 2350672
auccuuaagggcaggacaa

SEQ ID NO: 2350674 - RNA, 19 nt, Artificial Sequence
  Description of Artificial Sequence: Synthetic oligonucleotide
  Sense strand starting at position 3038 of SEQ ID NO: 1885554
gaugcuuucgccuagaaag

SEQ ID NO: 2350675 - RNA, 19 nt, Artificial Sequence
  Description of Artificial Sequence: Synthetic oligonucleotide
  Antisense strand to SEQ ID NO: 2350674
cuuucuaggcgaaagcauc

SEQ ID NO: 2350676 - RNA, 19 nt, Artificial Sequence
  Description of Artificial Sequence: Synthetic oligonucleotide
  Sense strand starting at position 3040 of SEQ ID NO: 1885554
ugcuuucgccuagaaagac

SEQ ID NO: 2350677 - RNA, 19 nt, Artificial Sequence
  Description of Artificial Sequence: Synthetic oligonucleotide
  Antisense strand to SEQ ID NO: 2350676
gucuuucuaggcgaaagca

SEQ ID NO: 2350678 - RNA, 19 nt, Artificial Sequence
  Description of Artificial Sequence: Synthetic oligonucleotide
  Sense strand starting at position 3049 of SEQ ID NO: 1885554
cuagaaagacauuggccau

SEQ ID NO: 2350679 - RNA, 19 nt, Artificial Sequence
  Description of Artificial Sequence: Synthetic oligonucleotide
  Antisense strand to SEQ ID NO: 2350678
auggccaaugucuuucuag

SEQ ID NO: 2350680 - RNA, 19 nt, Artificial Sequence
  Description of Artificial Sequence: Synthetic oligonucleotide
  Sense strand starting at position 3064 of SEQ ID NO: 1885554
ccauuagauuugccaucgu

SEQ ID NO: 2350681 - RNA, 19 nt, Artificial Sequence
  Description of Artificial Sequence: Synthetic oligonucleotide
  Antisense strand to SEQ ID NO: 2350680
acgauggcaaaucuaaugg

SEQ ID NO: 2350682 - RNA, 19 nt, Artificial Sequence
  Description of Artificial Sequence: Synthetic oligonucleotide
  Sense strand starting at position 3068 of SEQ ID NO: 1885554
uagauuugccaucguccua

SEQ ID NO: 2350683 - RNA, 19 nt, Artificial Sequence
  Description of Artificial Sequence: Synthetic oligonucleotide
  Antisense strand to SEQ ID NO: 2350682
uaggacgauggcaaaucua

SEQ ID NO: 2350684 - RNA, 19 nt, Artificial Sequence
  Description of Artificial Sequence: Synthetic oligonucleotide
  Sense strand starting at position 3186 of SEQ ID NO: 1885554
aaaugugggacugguugua

SEQ ID NO: 2350685 - RNA, 19 nt, Artificial Sequence
  Description of Artificial Sequence: Synthetic oligonucleotide
  Antisense strand to SEQ ID NO: 2350684
uacaaccagucccacauuu

SEQ ID NO: 2350686 - RNA, 19 nt, Artificial Sequence
  Description of Artificial Sequence: Synthetic oligonucleotide
  Sense strand starting at position 3203 of SEQ ID NO: 1885554
uacccaguuggagagguau

SEQ ID NO: 2350687 - RNA, 19 nt, Artificial Sequence
  Description of Artificial Sequence: Synthetic oligonucleotide
  Antisense strand to SEQ ID NO: 2350686
auaccucuccaacugggua

SEQ ID NO: 2350688 - RNA, 19 nt, Artificial Sequence
  Description of Artificial Sequence: Synthetic oligonucleotide
  Sense strand starting at position 3232 of SEQ ID NO: 1885554
agcgccuauaucguaagua

SEQ ID NO: 2350689 - RNA, 19 nt, Artificial Sequence
  Description of Artificial Sequence: Synthetic oligonucleotide
  Antisense strand to SEQ ID NO: 2350688
uacuuacgauauaggcgcu

SEQ ID NO: 2350690 - RNA, 19 nt, Artificial Sequence
  Description of Artificial Sequence: Synthetic oligonucleotide
  Sense strand starting at position 3256 of SEQ ID NO: 1885554
cucaaacacguuuauagua

SEQ ID NO: 2350691 - RNA, 19 nt, Artificial Sequence
  Description of Artificial Sequence: Synthetic oligonucleotide
  Antisense strand to SEQ ID NO: 2350690
uacuauaaacguguuugag

SEQ ID NO: 2350692 - RNA, 19 nt, Artificial Sequence
  Description of Artificial Sequence: Synthetic oligonucleotide
  Sense strand starting at position 3298 of SEQ ID NO: 1885554
ccuacaauacuacguugaa

SEQ ID NO: 2350693 - RNA, 19 nt, Artificial Sequence
  Description of Artificial Sequence: Synthetic oligonucleotide
  Antisense strand to SEQ ID NO: 2350692
uucaacguaguauuguagg

SEQ ID NO: 2350694 - RNA, 19 nt, Artificial Sequence
  Description of Artificial Sequence: Synthetic oligonucleotide
  Sense strand starting at position 3299 of SEQ ID NO: 1885554
cuacaauacuacguugaaa

SEQ ID NO: 2350695 - RNA, 19 nt, Artificial Sequence
  Description of Artificial Sequence: Synthetic oligonucleotide
  Antisense strand to SEQ ID NO: 2350694
uuucaacguaguauuguag

SEQ ID NO: 2350696 - RNA, 19 nt, Artificial Sequence
  Description of Artificial Sequence: Synthetic oligonucleotide
  Sense strand starting at position 3465 of SEQ ID NO: 1885554
aacggauuccagcauguuu

SEQ ID NO: 2350697 - RNA, 19 nt, Artificial Sequence
  Description of Artificial Sequence: Synthetic oligonucleotide
  Antisense strand to SEQ ID NO: 2350696
aaacaugcuggaauccguu

SEQ ID NO: 2350698 - RNA, 19 nt, Artificial Sequence
  Description of Artificial Sequence: Synthetic oligonucleotide
  Sense strand starting at position 3509 of SEQ ID NO: 1885554
agucuuaagguuugaucua

SEQ ID NO: 2350699 - RNA, 19 nt, Artificial Sequence
  Description of Artificial Sequence: Synthetic oligonucleotide
  Antisense strand to SEQ ID NO: 2350698
uagaucaaaccuuaagacu

SEQ ID NO: 2350700 - RNA, 19 nt, Artificial Sequence
  Description of Artificial Sequence: Synthetic oligonucleotide
  Sense strand starting at position 3525 of SEQ ID NO: 1885554
cuacuugauccuuaggucu

SEQ ID NO: 2350701 - RNA, 19 nt, Artificial Sequence
  Description of Artificial Sequence: Synthetic oligonucleotide
  Antisense strand to SEQ ID NO: 2350700
agaccuaaggaucaaguag

SEQ ID NO: 2350702 - RNA, 19 nt, Artificial Sequence
  Description of Artificial Sequence: Synthetic oligonucleotide
  Sense strand starting at position 3532 of SEQ ID NO: 1885554
auccuuaggucuuucuuua

SEQ ID NO: 2350703 - RNA, 19 nt, Artificial Sequence
  Description of Artificial Sequence: Synthetic oligonucleotide
  Antisense strand to SEQ ID NO: 2350702
uaaagaaagaccuaaggau

SEQ ID NO: 2350704 - RNA, 19 nt, Artificial Sequence
  Description of Artificial Sequence: Synthetic oligonucleotide
  Sense strand starting at position 3555 of SEQ ID NO: 1885554
cagacuuguuggguuucua

SEQ ID NO: 2350705 - RNA, 19 nt, Artificial Sequence
  Description of Artificial Sequence: Synthetic oligonucleotide
  Antisense strand to SEQ ID NO: 2350704
uagaaacccaacaagucug

SEQ ID NO: 2350706 - RNA, 19 nt, Artificial Sequence
  Description of Artificial Sequence: Synthetic oligonucleotide
  Sense strand starting at position 3559 of SEQ ID NO: 1885554
cuuguuggguuucuaaaca

SEQ ID NO: 2350707 - RNA, 19 nt, Artificial Sequence
  Description of Artificial Sequence: Synthetic oligonucleotide
  Antisense strand to SEQ ID NO: 2350706
uguuuagaaacccaacaag

SEQ ID NO: 2350708 - RNA, 19 nt, Artificial Sequence
  Description of Artificial Sequence: Synthetic oligonucleotide
  Sense strand starting at position 3597 of SEQ ID NO: 1885554
uugucuuguaauggaaaga

SEQ ID NO: 2350709 - RNA, 19 nt, Artificial Sequence
  Description of Artificial Sequence: Synthetic oligonucleotide
  Antisense strand to SEQ ID NO: 2350708
ucuuuccauuacaagacaa

SEQ ID NO: 2350710 - RNA, 19 nt, Artificial Sequence
  Description of Artificial Sequence: Synthetic oligonucleotide
  Sense strand starting at position 3683 of SEQ ID NO: 1885554
ugaagaagucaaggucuuu

SEQ ID NO: 2350711 - RNA, 19 nt, Artificial Sequence
  Description of Artificial Sequence: Synthetic oligonucleotide
  Antisense strand to SEQ ID NO: 2350710
aaagaccuugacuucuuca

SEQ ID NO: 2350712 - RNA, 19 nt, Artificial Sequence
  Description of Artificial Sequence: Synthetic oligonucleotide
  Sense strand starting at position 3752 of SEQ ID NO: 1885554
cgcuguccugaggaucaaa

SEQ ID NO: 2350713 - RNA, 19 nt, Artificial Sequence
  Description of Artificial Sequence: Synthetic oligonucleotide
  Antisense strand to SEQ ID NO: 2350712
uuugauccucaggacagcg

SEQ ID NO: 2350714 - RNA, 19 nt, Artificial Sequence
  Description of Artificial Sequence: Synthetic oligonucleotide
  Sense strand starting at position 3795 of SEQ ID NO: 1885554
gguugaacagaaugucaua

SEQ ID NO: 2350715 - RNA, 19 nt, Artificial Sequence
  Description of Artificial Sequence: Synthetic oligonucleotide
  Antisense strand to SEQ ID NO: 2350714
uaugacauucuguucaacc

SEQ ID NO: 2350716 - RNA, 19 nt, Artificial Sequence
  Description of Artificial Sequence: Synthetic oligonucleotide
  Sense strand starting at position 3827 of SEQ ID NO: 1885554
uucuuaauauggcuuugaa

SEQ ID NO: 2350717 - RNA, 19 nt, Artificial Sequence
  Description of Artificial Sequence: Synthetic oligonucleotide
  Antisense strand to SEQ ID NO: 2350716
uucaaagccauauuaagaa

SEQ ID NO: 2350718 - RNA, 19 nt, Artificial Sequence
  Description of Artificial Sequence: Synthetic oligonucleotide
  Sense strand starting at position 3960 of SEQ ID NO: 1885554
aguuaaauccuguaauagu

SEQ ID NO: 2350719 - RNA, 19 nt, Artificial Sequence
  Description of Artificial Sequence: Synthetic oligonucleotide
  Antisense strand to SEQ ID NO: 2350718
acuauuacaggauuuaacu

SEQ ID NO: 2350720 - RNA, 19 nt, Artificial Sequence
  Description of Artificial Sequence: Synthetic oligonucleotide
  Sense strand starting at position 3968 of SEQ ID NO: 1885554
ccuguaauaguugauugau

SEQ ID NO: 2350721 - RNA, 19 nt, Artificial Sequence
  Description of Artificial Sequence: Synthetic oligonucleotide
  Antisense strand to SEQ ID NO: 2350720
aucaaucaacuauuacagg

SEQ ID NO: 2350722 - RNA, 19 nt, Artificial Sequence
  Description of Artificial Sequence: Synthetic oligonucleotide
  Sense strand starting at position 3971 of SEQ ID NO: 1885554
guaauaguugauugaugca

SEQ ID NO: 2350723 - RNA, 19 nt, Artificial Sequence
  Description of Artificial Sequence: Synthetic oligonucleotide
  Antisense strand to SEQ ID NO: 2350722
ugcaucaaucaacuauuac

SEQ ID NO: 2350724 - RNA, 19 nt, Artificial Sequence
  Description of Artificial Sequence: Synthetic oligonucleotide
  Sense strand starting at position 2005 of SEQ ID NO: 1885555
gcuucuauucccggacgca

SEQ ID NO: 2350725 - RNA, 19 nt, Artificial Sequence
  Description of Artificial Sequence: Synthetic oligonucleotide
  Antisense strand to SEQ ID NO: 2350724
ugcguccgggaauagaagc

SEQ ID NO: 2350726 - RNA, 19 nt, Artificial Sequence
  Description of Artificial Sequence: Synthetic oligonucleotide
  Sense strand starting at position 2022 of SEQ ID NO: 1885555
cagcguauugcagguuaau

SEQ ID NO: 2350727 - RNA, 19 nt, Artificial Sequence
  Description of Artificial Sequence: Synthetic oligonucleotide
  Antisense strand to SEQ ID NO: 2350726
auuaaccugcaauacgcug

SEQ ID NO: 2350728 - RNA, 19 nt, Artificial Sequence
  Description of Artificial Sequence: Synthetic oligonucleotide
  Sense strand starting at position 2081 of SEQ ID NO: 1885555
agggauuacuaguggcuca

SEQ ID NO: 2350729 - RNA, 19 nt, Artificial Sequence
  Description of Artificial Sequence: Synthetic oligonucleotide
  Antisense strand to SEQ ID NO: 2350728
ugagccacuaguaaucccu

SEQ ID NO: 2350730 - RNA, 19 nt, Artificial Sequence
  Description of Artificial Sequence: Synthetic oligonucleotide
  Sense strand starting at position 2084 of SEQ ID NO: 1885555
gauuacuaguggcucacaa

SEQ ID NO: 2350731 - RNA, 19 nt, Artificial Sequence
  Description of Artificial Sequence: Synthetic oligonucleotide
  Antisense strand to SEQ ID NO: 2350730
uugugagccacuaguaauc

SEQ ID NO: 2350732 - RNA, 19 nt, Artificial Sequence
  Description of Artificial Sequence: Synthetic oligonucleotide
  Sense strand starting at position 2109 of SEQ ID NO: 1885555
uccgauuucugugggaagu

SEQ ID NO: 2350733 - RNA, 19 nt, Artificial Sequence
  Description of Artificial Sequence: Synthetic oligonucleotide
  Antisense strand to SEQ ID NO: 2350732
acuucccacagaaaucgga

SEQ ID NO: 2350734 - RNA, 19 nt, Artificial Sequence
  Description of Artificial Sequence: Synthetic oligonucleotide
  Sense strand starting at position 2162 of SEQ ID NO: 1885555
ucuuucucuuagggaagga

SEQ ID NO: 2350735 - RNA, 19 nt, Artificial Sequence
  Description of Artificial Sequence: Synthetic oligonucleotide
  Antisense strand to SEQ ID NO: 2350734
uccuucccuaagagaaaga

SEQ ID NO: 2350736 - RNA, 19 nt, Artificial Sequence
  Description of Artificial Sequence: Synthetic oligonucleotide
  Sense strand starting at position 2250 of SEQ ID NO: 1885555
cugugcucugccugggaca

SEQ ID NO: 2350737 - RNA, 19 nt, Artificial Sequence
  Description of Artificial Sequence: Synthetic oligonucleotide
  Antisense strand to SEQ ID NO: 2350736
ugucccaggcagagcacag

SEQ ID NO: 2350738 - RNA, 19 nt, Artificial Sequence
  Description of Artificial Sequence: Synthetic oligonucleotide
  Sense strand starting at position 2251 of SEQ ID NO: 1885555
ugugcucugccugggacau

SEQ ID NO: 2350739 - RNA, 19 nt, Artificial Sequence
  Description of Artificial Sequence: Synthetic oligonucleotide
  Antisense strand to SEQ ID NO: 2350738
augucccaggcagagcaca

SEQ ID NO: 2350740 - RNA, 19 nt, Artificial Sequence
  Description of Artificial Sequence: Synthetic oligonucleotide
  Sense strand starting at position 2656 of SEQ ID NO: 1885555
gugacuguauuucgagaug

SEQ ID NO: 2350741 - RNA, 19 nt, Artificial Sequence
  Description of Artificial Sequence: Synthetic oligonucleotide
  Antisense strand to SEQ ID NO: 2350740
caucucgaaauacagucac

SEQ ID NO: 2350742 - RNA, 19 nt, Artificial Sequence
  Description of Artificial Sequence: Synthetic oligonucleotide
  Sense strand starting at position 2682 of SEQ ID NO: 1885555
uaaauaaggucacuagagu

SEQ ID NO: 2350743 - RNA, 19 nt, Artificial Sequence
  Description of Artificial Sequence: Synthetic oligonucleotide
  Antisense strand to SEQ ID NO: 2350742
acucuagugaccuuauuua

SEQ ID NO: 2350744 - RNA, 19 nt, Artificial Sequence
  Description of Artificial Sequence: Synthetic oligonucleotide
  Sense strand starting at position 2724 of SEQ ID NO: 1885555
cggauacccucauaagaga

SEQ ID NO: 2350745 - RNA, 19 nt, Artificial Sequence
  Description of Artificial Sequence: Synthetic oligonucleotide
  Antisense strand to SEQ ID NO: 2350744
ucucuuaugaggguauccg

SEQ ID NO: 2350746 - RNA, 19 nt, Artificial Sequence
  Description of Artificial Sequence: Synthetic oligonucleotide
  Sense strand starting at position 3277 of SEQ ID NO: 1885555
gacagaugguauggagaga

SEQ ID NO: 2350747 - RNA, 19 nt, Artificial Sequence
  Description of Artificial Sequence: Synthetic oligonucleotide
  Antisense strand to SEQ ID NO: 2350746
ucucuccauaccaucuguc

SEQ ID NO: 2350748 - RNA, 19 nt, Artificial Sequence
  Description of Artificial Sequence: Synthetic oligonucleotide
  Sense strand starting at position 3322 of SEQ ID NO: 1885555
agguauguaaauuauguca

SEQ ID NO: 2350749 - RNA, 19 nt, Artificial Sequence
  Description of Artificial Sequence: Synthetic oligonucleotide
  Antisense strand to SEQ ID NO: 2350748
ugacauaauuuacauaccu

SEQ ID NO: 2350750 - RNA, 19 nt, Artificial Sequence
  Description of Artificial Sequence: Synthetic oligonucleotide
  Sense strand starting at position 3327 of SEQ ID NO: 1885555
uguaaauuaugucacauga

SEQ ID NO: 2350751 - RNA, 19 nt, Artificial Sequence
  Description of Artificial Sequence: Synthetic oligonucleotide
  Antisense strand to SEQ ID NO: 2350750
ucaugugacauaauuuaca

SEQ ID NO: 2350752 - RNA, 19 nt, Artificial Sequence
  Description of Artificial Sequence: Synthetic oligonucleotide
  Sense strand starting at position 3338 of SEQ ID NO: 1885555
ucacaugacucugcaagua

SEQ ID NO: 2350753 - RNA, 19 nt, Artificial Sequence
  Description of Artificial Sequence: Synthetic oligonucleotide
  Antisense strand to SEQ ID NO: 2350752
uacuugcagagucauguga

SEQ ID NO: 2350754 - RNA, 19 nt, Artificial Sequence
  Description of Artificial Sequence: Synthetic oligonucleotide
  Sense strand starting at position 3499 of SEQ ID NO: 1885555
accucuaaaugaguucgaa

SEQ ID NO: 2350755 - RNA, 19 nt, Artificial Sequence
  Description of Artificial Sequence: Synthetic oligonucleotide
  Antisense strand to SEQ ID NO: 2350754
uucgaacucauuuagaggu

SEQ ID NO: 2350756 - RNA, 19 nt, Artificial Sequence
  Description of Artificial Sequence: Synthetic oligonucleotide
  Sense strand starting at position 3502 of SEQ ID NO: 1885555
ucuaaaugaguucgaagga

SEQ ID NO: 2350757 - RNA, 19 nt, Artificial Sequence
  Description of Artificial Sequence: Synthetic oligonucleotide
  Antisense strand to SEQ ID NO: 2350756
uccuucgaacucauuuaga

SEQ ID NO: 2350758 - RNA, 19 nt, Artificial Sequence
  Description of Artificial Sequence: Synthetic oligonucleotide
  Sense strand starting at position 3620 of SEQ ID NO: 1885555
gcucccacauucggaaaua

SEQ ID NO: 2350759 - RNA, 19 nt, Artificial Sequence
  Description of Artificial Sequence: Synthetic oligonucleotide
  Antisense strand to SEQ ID NO: 2350758
uauuuccgaaugugggagc

SEQ ID NO: 2350760 - RNA, 19 nt, Artificial Sequence
  Description of Artificial Sequence: Synthetic oligonucleotide
  Sense strand starting at position 3878 of SEQ ID NO: 1885555
caggauaugugcucugaau

SEQ ID NO: 2350761 - RNA, 19 nt, Artificial Sequence
  Description of Artificial Sequence: Synthetic oligonucleotide
  Antisense strand to SEQ ID NO: 2350760
auucagagcacauauccug

SEQ ID NO: 2350762 - RNA, 19 nt, Artificial Sequence
  Description of Artificial Sequence: Synthetic oligonucleotide
  Sense strand starting at position 3880 of SEQ ID NO: 1885555
ggauaugugcucugaauuc

SEQ ID NO: 2350763 - RNA, 19 nt, Artificial Sequence
  Description of Artificial Sequence: Synthetic oligonucleotide
  Antisense strand to SEQ ID NO: 2350762
gaauucagagcacauaucc

SEQ ID NO: 2350764 - RNA, 19 nt, Artificial Sequence
  Description of Artificial Sequence: Synthetic oligonucleotide
  Sense strand starting at position 3944 of SEQ ID NO: 1885555
gccagagcuguguagcuua

SEQ ID NO: 2350765 - RNA, 19 nt, Artificial Sequence
  Description of Artificial Sequence: Synthetic oligonucleotide
  Antisense strand to SEQ ID NO: 2350764
uaagcuacacagcucuggc

SEQ ID NO: 2350766 - RNA, 19 nt, Artificial Sequence
  Description of Artificial Sequence: Synthetic oligonucleotide
  Sense strand starting at position 3949 of SEQ ID NO: 1885555
agcuguguagcuuauagga

SEQ ID NO: 2350767 - RNA, 19 nt, Artificial Sequence
  Description of Artificial Sequence: Synthetic oligonucleotide
  Antisense strand to SEQ ID NO: 2350766
uccuauaagcuacacagcu

SEQ ID NO: 2350768 - RNA, 19 nt, Artificial Sequence
  Description of Artificial Sequence: Synthetic oligonucleotide
  Sense strand starting at position 315 of SEQ ID NO: 1885556
agaggauauuaccacugaa

SEQ ID NO: 2350769 - RNA, 19 nt, Artificial Sequence
  Description of Artificial Sequence: Synthetic oligonucleotide
  Antisense strand to SEQ ID NO: 2350768
uucagugguaauauccucu

SEQ ID NO: 2350770 - RNA, 19 nt, Artificial Sequence
  Description of Artificial Sequence: Synthetic oligonucleotide
  Sense strand starting at position 318 of SEQ ID NO: 1885556
ggauauuaccacugaacuc

SEQ ID NO: 2350771 - RNA, 19 nt, Artificial Sequence
  Description of Artificial Sequence: Synthetic oligonucleotide
  Antisense strand to SEQ ID NO: 2350770
gaguucagugguaauaucc

SEQ ID NO: 2350772 - RNA, 19 nt, Artificial Sequence
  Description of Artificial Sequence: Synthetic oligonucleotide
  Sense strand starting at position 532 of SEQ ID NO: 1885556
ugaaauugaggugguaaua

SEQ ID NO: 2350773 - RNA, 19 nt, Artificial Sequence
  Description of Artificial Sequence: Synthetic oligonucleotide
  Antisense strand to SEQ ID NO: 2350772
uauuaccaccucaauuuca

SEQ ID NO: 2350774 - RNA, 19 nt, Artificial Sequence
  Description of Artificial Sequence: Synthetic oligonucleotide
  Sense strand starting at position 834 of SEQ ID NO: 1885556
ugaccagacugguugacaa

SEQ ID NO: 2350775 - RNA, 19 nt, Artificial Sequence
  Description of Artificial Sequence: Synthetic oligonucleotide
  Antisense strand to SEQ ID NO: 2350774
uugucaaccagucugguca

SEQ ID NO: 2350776 - RNA, 19 nt, Artificial Sequence
  Description of Artificial Sequence: Synthetic oligonucleotide
  Sense strand starting at position 1347 of SEQ ID NO: 1885556
gguugcaaauuucccgaau

SEQ ID NO: 2350777 - RNA, 19 nt, Artificial Sequence
  Description of Artificial Sequence: Synthetic oligonucleotide
  Antisense strand to SEQ ID NO: 2350776
auucgggaaauuugcaacc

SEQ ID NO: 2350778 - RNA, 19 nt, Artificial Sequence
  Description of Artificial Sequence: Synthetic oligonucleotide
  Sense strand starting at position 1348 of SEQ ID NO: 1885556
guugcaaauuucccgaauu

SEQ ID NO: 2350779 - RNA, 19 nt, Artificial Sequence
  Description of Artificial Sequence: Synthetic oligonucleotide
  Antisense strand to SEQ ID NO: 2350778
aauucgggaaauuugcaac

SEQ ID NO: 2350780 - RNA, 19 nt, Artificial Sequence
  Description of Artificial Sequence: Synthetic oligonucleotide
  Sense strand starting at position 1349 of SEQ ID NO: 1885556
uugcaaauuucccgaauuu

SEQ ID NO: 2350781 - RNA, 19 nt, Artificial Sequence
  Description of Artificial Sequence: Synthetic oligonucleotide
  Antisense strand to SEQ ID NO: 2350780
aaauucgggaaauuugcaa

SEQ ID NO: 2350782 - RNA, 19 nt, Artificial Sequence
  Description of Artificial Sequence: Synthetic oligonucleotide
  Sense strand starting at position 2201 of SEQ ID NO: 1885556
cuauauguccaccaacagu

SEQ ID NO: 2350783 - RNA, 19 nt, Artificial Sequence
  Description of Artificial Sequence: Synthetic oligonucleotide
  Antisense strand to SEQ ID NO: 2350782
acuguugguggacauauag

SEQ ID NO: 2350784 - RNA, 19 nt, Artificial Sequence
  Description of Artificial Sequence: Synthetic oligonucleotide
  Sense strand starting at position 2283 of SEQ ID NO: 1885556
agagauauguccuuugcaa

SEQ ID NO: 2350785 - RNA, 19 nt, Artificial Sequence
  Description of Artificial Sequence: Synthetic oligonucleotide
  Antisense strand to SEQ ID NO: 2350784
uugcaaaggacauaucucu

SEQ ID NO: 2350786 - RNA, 19 nt, Artificial Sequence
  Description of Artificial Sequence: Synthetic oligonucleotide
  Sense strand starting at position 2285 of SEQ ID NO: 1885556
agauauguccuuugcaaga

SEQ ID NO: 2350787 - RNA, 19 nt, Artificial Sequence
  Description of Artificial Sequence: Synthetic oligonucleotide
  Antisense strand to SEQ ID NO: 2350786
ucuugcaaaggacauaucu

SEQ ID NO: 2350788 - RNA, 19 nt, Artificial Sequence
  Description of Artificial Sequence: Synthetic oligonucleotide
  Sense strand starting at position 2290 of SEQ ID NO: 1885556
uguccuuugcaagaacaca

SEQ ID NO: 2350789 - RNA, 19 nt, Artificial Sequence
  Description of Artificial Sequence: Synthetic oligonucleotide
  Antisense strand to SEQ ID NO: 2350788
uguguucuugcaaaggaca

SEQ ID NO: 2350790 - RNA, 19 nt, Artificial Sequence
  Description of Artificial Sequence: Synthetic oligonucleotide
  Sense strand starting at position 2513 of SEQ ID NO: 1885556
ggguauuaggcuuaagauc

SEQ ID NO: 2350791 - RNA, 19 nt, Artificial Sequence
  Description of Artificial Sequence: Synthetic oligonucleotide
  Antisense strand to SEQ ID NO: 2350790
gaucuuaagccuaauaccc

SEQ ID NO: 2350792 - RNA, 19 nt, Artificial Sequence
  Description of Artificial Sequence: Synthetic oligonucleotide
  Sense strand starting at position 2520 of SEQ ID NO: 1885556
aggcuuaagaucuggguga

SEQ ID NO: 2350793 - RNA, 19 nt, Artificial Sequence
  Description of Artificial Sequence: Synthetic oligonucleotide
  Antisense strand to SEQ ID NO: 2350792
ucacccagaucuuaagccu

SEQ ID NO: 2350794 - RNA, 19 nt, Artificial Sequence
  Description of Artificial Sequence: Synthetic oligonucleotide
  Sense strand starting at position 2522 of SEQ ID NO: 1885556
gcuuaagaucugggugaca

SEQ ID NO: 2350795 - RNA, 19 nt, Artificial Sequence
  Description of Artificial Sequence: Synthetic oligonucleotide
  Antisense strand to SEQ ID NO: 2350794
ugucacccagaucuuaagc

SEQ ID NO: 2350796 - RNA, 19 nt, Artificial Sequence
  Description of Artificial Sequence: Synthetic oligonucleotide
  Sense strand starting at position 2647 of SEQ ID NO: 1885556
agcagauuauagcccauua

SEQ ID NO: 2350797 - RNA, 19 nt, Artificial Sequence
  Description of Artificial Sequence: Synthetic oligonucleotide
  Antisense strand to SEQ ID NO: 2350796
uaaugggcuauaaucugcu

SEQ ID NO: 2350798 - RNA, 19 nt, Artificial Sequence
  Description of Artificial Sequence: Synthetic oligonucleotide
  Sense strand starting at position 2733 of SEQ ID NO: 1885556
cuaauuacuguaugcagaa

SEQ ID NO: 2350799 - RNA, 19 nt, Artificial Sequence
  Description of Artificial Sequence: Synthetic oligonucleotide
  Antisense strand to SEQ ID NO: 2350798
uucugcauacaguaauuag

SEQ ID NO: 2350800 - RNA, 19 nt, Artificial Sequence
  Description of Artificial Sequence: Synthetic oligonucleotide
  Sense strand starting at position 2758 of SEQ ID NO: 1885556
guagaauuggaaggucauu

SEQ ID NO: 2350801 - RNA, 19 nt, Artificial Sequence
  Description of Artificial Sequence: Synthetic oligonucleotide
  Antisense strand to SEQ ID NO: 2350800
aaugaccuuccaauucuac

SEQ ID NO: 2350802 - RNA, 19 nt, Artificial Sequence
  Description of Artificial Sequence: Synthetic oligonucleotide
  Sense strand starting at position 2791 of SEQ ID NO: 1885556
auaguaguaguugauugaa

SEQ ID NO: 2350803 - RNA, 19 nt, Artificial Sequence
  Description of Artificial Sequence: Synthetic oligonucleotide
  Antisense strand to SEQ ID NO: 2350802
uucaaucaacuacuacuau

SEQ ID NO: 2350804 - RNA, 19 nt, Artificial Sequence
  Description of Artificial Sequence: Synthetic oligonucleotide
  Sense strand starting at position 2793 of SEQ ID NO: 1885556
aguaguaguugauugaaga

SEQ ID NO: 2350805 - RNA, 19 nt, Artificial Sequence
  Description of Artificial Sequence: Synthetic oligonucleotide
  Antisense strand to SEQ ID NO: 2350804
ucuucaaucaacuacuacu

SEQ ID NO: 2350806 - RNA, 19 nt, Artificial Sequence
  Description of Artificial Sequence: Synthetic oligonucleotide
  Sense strand starting at position 2794 of SEQ ID NO: 1885556
guaguaguugauugaagaa

SEQ ID NO: 2350807 - RNA, 19 nt, Artificial Sequence
  Description of Artificial Sequence: Synthetic oligonucleotide
  Antisense strand to SEQ ID NO: 2350806
uucuucaaucaacuacuac

SEQ ID NO: 2350808 - RNA, 19 nt, Artificial Sequence
  Description of Artificial Sequence: Synthetic oligonucleotide
  Sense strand starting at position 2825 of SEQ ID NO: 1885556
ugaugcugaaucugaguga

SEQ ID NO: 2350809 - RNA, 19 nt, Artificial Sequence
  Description of Artificial Sequence: Synthetic oligonucleotide
  Antisense strand to SEQ ID NO: 2350808
ucacucagauucagcauca

SEQ ID NO: 2350810 - RNA, 19 nt, Artificial Sequence
  Description of Artificial Sequence: Synthetic oligonucleotide
  Sense strand starting at position 2829 of SEQ ID NO: 1885556
gcugaaucugagugaaggu

SEQ ID NO: 2350811 - RNA, 19 nt, Artificial Sequence
  Description of Artificial Sequence: Synthetic oligonucleotide
  Antisense strand to SEQ ID NO: 2350810
accuucacucagauucagc

SEQ ID NO: 2350812 - RNA, 19 nt, Artificial Sequence
  Description of Artificial Sequence: Synthetic oligonucleotide
  Sense strand starting at position 2830 of SEQ ID NO: 1885556
cugaaucugagugaagguu

SEQ ID NO: 2350813 - RNA, 19 nt, Artificial Sequence
  Description of Artificial Sequence: Synthetic oligonucleotide
  Antisense strand to SEQ ID NO: 2350812
aaccuucacucagauucag

SEQ ID NO: 2350814 - RNA, 19 nt, Artificial Sequence
  Description of Artificial Sequence: Synthetic oligonucleotide
  Sense strand starting at position 2887 of SEQ ID NO: 1885556
aagugcuguuaacugcaaa

SEQ ID NO: 2350815 - RNA, 19 nt, Artificial Sequence
  Description of Artificial Sequence: Synthetic oligonucleotide
  Antisense strand to SEQ ID NO: 2350814
uuugcaguuaacagcacuu

SEQ ID NO: 2350816 - RNA, 19 nt, Artificial Sequence
  Description of Artificial Sequence: Synthetic oligonucleotide
  Sense strand starting at position 2908 of SEQ ID NO: 1885556
ggagaugaguuacuuugca

SEQ ID NO: 2350817 - RNA, 19 nt, Artificial Sequence
  Description of Artificial Sequence: Synthetic oligonucleotide
  Antisense strand to SEQ ID NO: 2350816
ugcaaaguaacucaucucc

SEQ ID NO: 2350818 - RNA, 19 nt, Artificial Sequence
  Description of Artificial Sequence: Synthetic oligonucleotide
  Sense strand starting at position 2912 of SEQ ID NO: 1885556
augaguuacuuugcaguca

SEQ ID NO: 2350819 - RNA, 19 nt, Artificial Sequence
  Description of Artificial Sequence: Synthetic oligonucleotide
  Antisense strand to SEQ ID NO: 2350818
ugacugcaaaguaacucau

SEQ ID NO: 2350820 - RNA, 19 nt, Artificial Sequence
  Description of Artificial Sequence: Synthetic oligonucleotide
  Sense strand starting at position 2935 of SEQ ID NO: 1885556
uguuguaucacugggcaca

SEQ ID NO: 2350821 - RNA, 19 nt, Artificial Sequence
  Description of Artificial Sequence: Synthetic oligonucleotide
  Antisense strand to SEQ ID NO: 2350820
ugugcccagugauacaaca

SEQ ID NO: 2350822 - RNA, 19 nt, Artificial Sequence
  Description of Artificial Sequence: Synthetic oligonucleotide
  Sense strand starting at position 3018 of SEQ ID NO: 1885556
cauggcuuguggucuuaga

SEQ ID NO: 2350823 - RNA, 19 nt, Artificial Sequence
  Description of Artificial Sequence: Synthetic oligonucleotide
  Antisense strand to SEQ ID NO: 2350822
ucuaagaccacaagccaug

SEQ ID NO: 2350824 - RNA, 19 nt, Artificial Sequence
  Description of Artificial Sequence: Synthetic oligonucleotide
  Sense strand starting at position 3165 of SEQ ID NO: 1885556
acauauauucucgguaccu

SEQ ID NO: 2350825 - RNA, 19 nt, Artificial Sequence
  Description of Artificial Sequence: Synthetic oligonucleotide
  Antisense strand to SEQ ID NO: 2350824
agguaccgagaauauaugu

SEQ ID NO: 2350826 - RNA, 19 nt, Artificial Sequence
  Description of Artificial Sequence: Synthetic oligonucleotide
  Sense strand starting at position 3167 of SEQ ID NO: 1885556
auauauucucgguaccuuu

SEQ ID NO: 2350827 - RNA, 19 nt, Artificial Sequence
  Description of Artificial Sequence: Synthetic oligonucleotide
  Antisense strand to SEQ ID NO: 2350826
aaagguaccgagaauauau

SEQ ID NO: 2350828 - RNA, 19 nt, Artificial Sequence
  Description of Artificial Sequence: Synthetic oligonucleotide
  Sense strand starting at position 3174 of SEQ ID NO: 1885556
cucgguaccuuuguugaaa

SEQ ID NO: 2350829 - RNA, 19 nt, Artificial Sequence
  Description of Artificial Sequence: Synthetic oligonucleotide
  Antisense strand to SEQ ID NO: 2350828
uuucaacaaagguaccgag

SEQ ID NO: 2350830 - RNA, 19 nt, Artificial Sequence
  Description of Artificial Sequence: Synthetic oligonucleotide
  Sense strand starting at position 3193 of SEQ ID NO: 1885556
acaaguuuacuguagaugu

SEQ ID NO: 2350831 - RNA, 19 nt, Artificial Sequence
  Description of Artificial Sequence: Synthetic oligonucleotide
  Antisense strand to SEQ ID NO: 2350830
acaucuacaguaaacuugu

SEQ ID NO: 2350832 - RNA, 19 nt, Artificial Sequence
  Description of Artificial Sequence: Synthetic oligonucleotide
  Sense strand starting at position 3297 of SEQ ID NO: 1885556
agcccuguaguauaaugua

SEQ ID NO: 2350833 - RNA, 19 nt, Artificial Sequence
  Description of Artificial Sequence: Synthetic oligonucleotide
  Antisense strand to SEQ ID NO: 2350832
uacauuauacuacagggcu

SEQ ID NO: 2350834 - RNA, 19 nt, Artificial Sequence
  Description of Artificial Sequence: Synthetic oligonucleotide
  Sense strand starting at position 3495 of SEQ ID NO: 1885556
agggagggagguuguauua

SEQ ID NO: 2350835 - RNA, 19 nt, Artificial Sequence
  Description of Artificial Sequence: Synthetic oligonucleotide
  Antisense strand to SEQ ID NO: 2350834
uaauacaaccucccucccu

SEQ ID NO: 2350836 - RNA, 19 nt, Artificial Sequence
  Description of Artificial Sequence: Synthetic oligonucleotide
  Sense strand starting at position 3671 of SEQ ID NO: 1885556
guggccuuguggaaggaau

SEQ ID NO: 2350837 - RNA, 19 nt, Artificial Sequence
  Description of Artificial Sequence: Synthetic oligonucleotide
  Antisense strand to SEQ ID NO: 2350836
auuccuuccacaaggccac

SEQ ID NO: 2350838 - RNA, 19 nt, Artificial Sequence
  Description of Artificial Sequence: Synthetic oligonucleotide
  Sense strand starting at position 3690 of SEQ ID NO: 1885556
acguaaagcuauuugcauu

SEQ ID NO: 2350839 - RNA, 19 nt, Artificial Sequence
  Description of Artificial Sequence: Synthetic oligonucleotide
  Antisense strand to SEQ ID NO: 2350838
aaugcaaauagcuuuacgu

SEQ ID NO: 2350840 - RNA, 19 nt, Artificial Sequence
  Description of Artificial Sequence: Synthetic oligonucleotide
  Sense strand starting at position 3752 of SEQ ID NO: 1885556
agaaucugcuucuuuguaa

SEQ ID NO: 2350841 - RNA, 19 nt, Artificial Sequence
  Description of Artificial Sequence: Synthetic oligonucleotide
  Antisense strand to SEQ ID NO: 2350840
uuacaaagaagcagauucu

SEQ ID NO: 2350842 - RNA, 19 nt, Artificial Sequence
  Description of Artificial Sequence: Synthetic oligonucleotide
  Sense strand starting at position 3764 of SEQ ID NO: 1885556
uuuguaacuucuguccauu

SEQ ID NO: 2350843 - RNA, 19 nt, Artificial Sequence
  Description of Artificial Sequence: Synthetic oligonucleotide
  Antisense strand to SEQ ID NO: 2350842
aauggacagaaguuacaaa

SEQ ID NO: 2350844 - RNA, 19 nt, Artificial Sequence
  Description of Artificial Sequence: Synthetic oligonucleotide
  Sense strand starting at position 3808 of SEQ ID NO: 1885556
gagcaagucucauugcuca

SEQ ID NO: 2350845 - RNA, 19 nt, Artificial Sequence
  Description of Artificial Sequence: Synthetic oligonucleotide
  Antisense strand to SEQ ID NO: 2350844
ugagcaaugagacuugcuc

SEQ ID NO: 2350846 - RNA, 19 nt, Artificial Sequence
  Description of Artificial Sequence: Synthetic oligonucleotide
  Sense strand starting at position 3977 of SEQ ID NO: 1885556
guacuaugauaccucugaa

SEQ ID NO: 2350847 - RNA, 19 nt, Artificial Sequence
  Description of Artificial Sequence: Synthetic oligonucleotide
  Antisense strand to SEQ ID NO: 2350846
uucagagguaucauaguac

SEQ ID NO: 2350848 - RNA, 19 nt, Artificial Sequence
  Description of Artificial Sequence: Synthetic oligonucleotide
  Sense strand starting at position 10 of SEQ ID NO: 1885557
gaauuucucugccugguuu

SEQ ID NO: 2350849 - RNA, 19 nt, Artificial Sequence
  Description of Artificial Sequence: Synthetic oligonucleotide
  Antisense strand to SEQ ID NO: 2350848
aaaccaggcagagaaauuc

SEQ ID NO: 2350850 - RNA, 19 nt, Artificial Sequence
  Description of Artificial Sequence: Synthetic oligonucleotide
  Sense strand starting at position 133 of SEQ ID NO: 1885557
accugaggccucuggacau

SEQ ID NO: 2350851 - RNA, 19 nt, Artificial Sequence
  Description of Artificial Sequence: Synthetic oligonucleotide
  Antisense strand to SEQ ID NO: 2350850
auguccagaggccucaggu

SEQ ID NO: 2350852 - RNA, 19 nt, Artificial Sequence
  Description of Artificial Sequence: Synthetic oligonucleotide
  Sense strand starting at position 137 of SEQ ID NO: 1885557
gaggccucuggacaucauu

SEQ ID NO: 2350853 - RNA, 19 nt, Artificial Sequence
  Description of Artificial Sequence: Synthetic oligonucleotide
  Antisense strand to SEQ ID NO: 2350852
aaugauguccagaggccuc

SEQ ID NO: 2350854 - RNA, 19 nt, Artificial Sequence
  Description of Artificial Sequence: Synthetic oligonucleotide
  Sense strand starting at position 511 of SEQ ID NO: 1885557
ugugcugggaugcaucaaa

SEQ ID NO: 2350855 - RNA, 19 nt, Artificial Sequence
  Description of Artificial Sequence: Synthetic oligonucleotide
  Antisense strand to SEQ ID NO: 2350854
uuugaugcaucccagcaca

SEQ ID NO: 2350856 - RNA, 19 nt, Artificial Sequence
  Description of Artificial Sequence: Synthetic oligonucleotide
  Sense strand starting at position 543 of SEQ ID NO: 1885557
augucccaucuggaucaua

SEQ ID NO: 2350857 - RNA, 19 nt, Artificial Sequence
  Description of Artificial Sequence: Synthetic oligonucleotide
  Antisense strand to SEQ ID NO: 2350856
uaugauccagaugggacau

SEQ ID NO: 2350858 - RNA, 19 nt, Artificial Sequence
  Description of Artificial Sequence: Synthetic oligonucleotide
  Sense strand starting at position 596 of SEQ ID NO: 1885557
uagauuaugcuggagucca

SEQ ID NO: 2350859 - RNA, 19 nt, Artificial Sequence
  Description of Artificial Sequence: Synthetic oligonucleotide
  Antisense strand to SEQ ID NO: 2350858
uggacuccagcauaaucua

SEQ ID NO: 2350860 - RNA, 19 nt, Artificial Sequence
  Description of Artificial Sequence: Synthetic oligonucleotide
  Sense strand starting at position 604 of SEQ ID NO: 1885557
gcuggaguccaagaaagua

SEQ ID NO: 2350861 - RNA, 19 nt, Artificial Sequence
  Description of Artificial Sequence: Synthetic oligonucleotide
  Antisense strand to SEQ ID NO: 2350860
uacuuucuuggacuccagc

SEQ ID NO: 2350862 - RNA, 19 nt, Artificial Sequence
  Description of Artificial Sequence: Synthetic oligonucleotide
  Sense strand starting at position 696 of SEQ ID NO: 1885557
guagauuucucagcugcac

SEQ ID NO: 2350863 - RNA, 19 nt, Artificial Sequence
  Description of Artificial Sequence: Synthetic oligonucleotide
  Antisense strand to SEQ ID NO: 2350862
gugcagcugagaaaucuac

SEQ ID NO: 2350864 - RNA, 19 nt, Artificial Sequence
  Description of Artificial Sequence: Synthetic oligonucleotide
  Sense strand starting at position 722 of SEQ ID NO: 1885557
guuccugauuucguggaau

SEQ ID NO: 2350865 - RNA, 19 nt, Artificial Sequence
  Description of Artificial Sequence: Synthetic oligonucleotide
  Antisense strand to SEQ ID NO: 2350864
auuccacgaaaucaggaac

SEQ ID NO: 2350866 - RNA, 19 nt, Artificial Sequence
  Description of Artificial Sequence: Synthetic oligonucleotide
  Sense strand starting at position 736 of SEQ ID NO: 1885557
ggaauagggccugaagugu

SEQ ID NO: 2350867 - RNA, 19 nt, Artificial Sequence
  Description of Artificial Sequence: Synthetic oligonucleotide
  Antisense strand to SEQ ID NO: 2350866
acacuucaggcccuauucc

SEQ ID NO: 2350868 - RNA, 19 nt, Artificial Sequence
  Description of Artificial Sequence: Synthetic oligonucleotide
  Sense strand starting at position 742 of SEQ ID NO: 1885557
gggccugaagugugcauuu

SEQ ID NO: 2350869 - RNA, 19 nt, Artificial Sequence
  Description of Artificial Sequence: Synthetic oligonucleotide
  Antisense strand to SEQ ID NO: 2350868
aaaugcacacuucaggccc

SEQ ID NO: 2350870 - RNA, 19 nt, Artificial Sequence
  Description of Artificial Sequence: Synthetic oligonucleotide
  Sense strand starting at position 761 of SEQ ID NO: 1885557
uaauaaguggucuagguaa

SEQ ID NO: 2350871 - RNA, 19 nt, Artificial Sequence
  Description of Artificial Sequence: Synthetic oligonucleotide
  Antisense strand to SEQ ID NO: 2350870
uuaccuagaccacuuauua

SEQ ID NO: 2350872 - RNA, 19 nt, Artificial Sequence
  Description of Artificial Sequence: Synthetic oligonucleotide
  Sense strand starting at position 768 of SEQ ID NO: 1885557
uggucuagguaaucuuaaa

SEQ ID NO: 2350873 - RNA, 19 nt, Artificial Sequence
  Description of Artificial Sequence: Synthetic oligonucleotide
  Antisense strand to SEQ ID NO: 2350872
uuuaagauuaccuagacca

SEQ ID NO: 2350874 - RNA, 19 nt, Artificial Sequence
  Description of Artificial Sequence: Synthetic oligonucleotide
  Sense strand starting at position 783 of SEQ ID NO: 1885557
uaaaguagauaguuuguca

SEQ ID NO: 2350875 - RNA, 19 nt, Artificial Sequence
  Description of Artificial Sequence: Synthetic oligonucleotide
  Antisense strand to SEQ ID NO: 2350874
ugacaaacuaucuacuuua

SEQ ID NO: 2350876 - RNA, 19 nt, Artificial Sequence
  Description of Artificial Sequence: Synthetic oligonucleotide
  Sense strand starting at position 797 of SEQ ID NO: 1885557
ugucaauccuacucugaag

SEQ ID NO: 2350877 - RNA, 19 nt, Artificial Sequence
  Description of Artificial Sequence: Synthetic oligonucleotide
  Antisense strand to SEQ ID NO: 2350876
cuucagaguaggauugaca

SEQ ID NO: 2350878 - RNA, 19 nt, Artificial Sequence
  Description of Artificial Sequence: Synthetic oligonucleotide
  Sense strand starting at position 987 of SEQ ID NO: 1885557
ccacuuggccuugaagagu

SEQ ID NO: 2350879 - RNA, 19 nt, Artificial Sequence
  Description of Artificial Sequence: Synthetic oligonucleotide
  Antisense strand to SEQ ID NO: 2350878
acucuucaaggccaagugg

SEQ ID NO: 2350880 - RNA, 19 nt, Artificial Sequence
  Description of Artificial Sequence: Synthetic oligonucleotide
  Sense strand starting at position 1163 of SEQ ID NO: 1885557
acaugagacuugucacauc

SEQ ID NO: 2350881 - RNA, 19 nt, Artificial Sequence
  Description of Artificial Sequence: Synthetic oligonucleotide
  Antisense strand to SEQ ID NO: 2350880
gaugugacaagucucaugu

SEQ ID NO: 2350882 - RNA, 19 nt, Artificial Sequence
  Description of Artificial Sequence: Synthetic oligonucleotide
  Sense strand starting at position 1530 of SEQ ID NO: 1885557
gggaacuuuguaggguaga

SEQ ID NO: 2350883 - RNA, 19 nt, Artificial Sequence
  Description of Artificial Sequence: Synthetic oligonucleotide
  Antisense strand to SEQ ID NO: 2350882
ucuacccuacaaaguuccc

SEQ ID NO: 2350884 - RNA, 19 nt, Artificial Sequence
  Description of Artificial Sequence: Synthetic oligonucleotide
  Sense strand starting at position 1541 of SEQ ID NO: 1885557
aggguagacaacuguuaau

SEQ ID NO: 2350885 - RNA, 19 nt, Artificial Sequence
  Description of Artificial Sequence: Synthetic oligonucleotide
  Antisense strand to SEQ ID NO: 2350884
auuaacaguugucuacccu

SEQ ID NO: 2350886 - RNA, 19 nt, Artificial Sequence
  Description of Artificial Sequence: Synthetic oligonucleotide
  Sense strand starting at position 1597 of SEQ ID NO: 1885557
ugcccuaaagcagauguua

SEQ ID NO: 2350887 - RNA, 19 nt, Artificial Sequence
  Description of Artificial Sequence: Synthetic oligonucleotide
  Antisense strand to SEQ ID NO: 2350886
uaacaucugcuuuagggca

SEQ ID NO: 2350888 - RNA, 19 nt, Artificial Sequence
  Description of Artificial Sequence: Synthetic oligonucleotide
  Sense strand starting at position 1654 of SEQ ID NO: 1885557
cucuaagcaugaguuagaa

SEQ ID NO: 2350889 - RNA, 19 nt, Artificial Sequence
  Description of Artificial Sequence: Synthetic oligonucleotide
  Antisense strand to SEQ ID NO: 2350888
uucuaacucaugcuuagag

SEQ ID NO: 2350890 - RNA, 19 nt, Artificial Sequence
  Description of Artificial Sequence: Synthetic oligonucleotide
  Sense strand starting at position 1740 of SEQ ID NO: 1885557
gagcuuccugggcacaaga

SEQ ID NO: 2350891 - RNA, 19 nt, Artificial Sequence
  Description of Artificial Sequence: Synthetic oligonucleotide
  Antisense strand to SEQ ID NO: 2350890
ucuugugcccaggaagcuc

SEQ ID NO: 2350892 - RNA, 19 nt, Artificial Sequence
  Description of Artificial Sequence: Synthetic oligonucleotide
  Sense strand starting at position 2090 of SEQ ID NO: 1885557
aggacauugcaucaagcua

SEQ ID NO: 2350893 - RNA, 19 nt, Artificial Sequence
  Description of Artificial Sequence: Synthetic oligonucleotide
  Antisense strand to SEQ ID NO: 2350892
uagcuugaugcaauguccu

SEQ ID NO: 2350894 - RNA, 19 nt, Artificial Sequence
  Description of Artificial Sequence: Synthetic oligonucleotide
  Sense strand starting at position 2488 of SEQ ID NO: 1885557
cucugugagguugagauaa

SEQ ID NO: 2350895 - RNA, 19 nt, Artificial Sequence
  Description of Artificial Sequence: Synthetic oligonucleotide
  Antisense strand to SEQ ID NO: 2350894
uuaucucaaccucacagag

SEQ ID NO: 2350896 - RNA, 19 nt, Artificial Sequence
  Description of Artificial Sequence: Synthetic oligonucleotide
  Sense strand starting at position 2496 of SEQ ID NO: 1885557
gguugagauaaugguagca

SEQ ID NO: 2350897 - RNA, 19 nt, Artificial Sequence
  Description of Artificial Sequence: Synthetic oligonucleotide
  Antisense strand to SEQ ID NO: 2350896
ugcuaccauuaucucaacc

SEQ ID NO: 2350898 - RNA, 19 nt, Artificial Sequence
  Description of Artificial Sequence: Synthetic oligonucleotide
  Sense strand starting at position 2543 of SEQ ID NO: 1885557
aaaugagauugucuauguc

SEQ ID NO: 2350899 - RNA, 19 nt, Artificial Sequence
  Description of Artificial Sequence: Synthetic oligonucleotide
  Antisense strand to SEQ ID NO: 2350898
gacauagacaaucucauuu

SEQ ID NO: 2350900 - RNA, 19 nt, Artificial Sequence
  Description of Artificial Sequence: Synthetic oligonucleotide
  Sense strand starting at position 2547 of SEQ ID NO: 1885557
gagauugucuaugucauaa

SEQ ID NO: 2350901 - RNA, 19 nt, Artificial Sequence
  Description of Artificial Sequence: Synthetic oligonucleotide
  Antisense strand to SEQ ID NO: 2350900
uuaugacauagacaaucuc

SEQ ID NO: 2350902 - RNA, 19 nt, Artificial Sequence
  Description of Artificial Sequence: Synthetic oligonucleotide
  Sense strand starting at position 2560 of SEQ ID NO: 1885557
ucauaauagguaugcaaua

SEQ ID NO: 2350903 - RNA, 19 nt, Artificial Sequence
  Description of Artificial Sequence: Synthetic oligonucleotide
  Antisense strand to SEQ ID NO: 2350902
uauugcauaccuauuauga

SEQ ID NO: 2350904 - RNA, 19 nt, Artificial Sequence
  Description of Artificial Sequence: Synthetic oligonucleotide
  Sense strand starting at position 2573 of SEQ ID NO: 1885557
gcaauaagugccuaauaua

SEQ ID NO: 2350905 - RNA, 19 nt, Artificial Sequence
  Description of Artificial Sequence: Synthetic oligonucleotide
  Antisense strand to SEQ ID NO: 2350904
uauauuaggcacuuauugc

SEQ ID NO: 2350906 - RNA, 19 nt, Artificial Sequence
  Description of Artificial Sequence: Synthetic oligonucleotide
  Sense strand starting at position 2654 of SEQ ID NO: 1885557
ggcuucugaagaugucaaa

SEQ ID NO: 2350907 - RNA, 19 nt, Artificial Sequence
  Description of Artificial Sequence: Synthetic oligonucleotide
  Antisense strand to SEQ ID NO: 2350906
uuugacaucuucagaagcc

SEQ ID NO: 2350908 - RNA, 19 nt, Artificial Sequence
  Description of Artificial Sequence: Synthetic oligonucleotide
  Sense strand starting at position 2980 of SEQ ID NO: 1885557
aggucauguuaauuaagua

SEQ ID NO: 2350909 - RNA, 19 nt, Artificial Sequence
  Description of Artificial Sequence: Synthetic oligonucleotide
  Antisense strand to SEQ ID NO: 2350908
uacuuaauuaacaugaccu

SEQ ID NO: 2350910 - RNA, 19 nt, Artificial Sequence
  Description of Artificial Sequence: Synthetic oligonucleotide
  Sense strand starting at position 3239 of SEQ ID NO: 1885557
auugacauuugcuaagaag

SEQ ID NO: 2350911 - RNA, 19 nt, Artificial Sequence
  Description of Artificial Sequence: Synthetic oligonucleotide
  Antisense strand to SEQ ID NO: 2350910
cuucuuagcaaaugucaau

SEQ ID NO: 2350912 - RNA, 19 nt, Artificial Sequence
  Description of Artificial Sequence: Synthetic oligonucleotide
  Sense strand starting at position 3328 of SEQ ID NO: 1885557
gaccaauugcuguacuaag

SEQ ID NO: 2350913 - RNA, 19 nt, Artificial Sequence
  Description of Artificial Sequence: Synthetic oligonucleotide
  Antisense strand to SEQ ID NO: 2350912
cuuaguacagcaauugguc

SEQ ID NO: 2350914 - RNA, 19 nt, Artificial Sequence
  Description of Artificial Sequence: Synthetic oligonucleotide
  Sense strand starting at position 3377 of SEQ ID NO: 1885557
aguccaugucccuaaugaa

SEQ ID NO: 2350915 - RNA, 19 nt, Artificial Sequence
  Description of Artificial Sequence: Synthetic oligonucleotide
  Antisense strand to SEQ ID NO: 2350914
uucauuagggacauggacu

SEQ ID NO: 2350916 - RNA, 19 nt, Artificial Sequence
  Description of Artificial Sequence: Synthetic oligonucleotide
  Sense strand starting at position 3497 of SEQ ID NO: 1885557
agcagagaucugggagagu

SEQ ID NO: 2350917 - RNA, 19 nt, Artificial Sequence
  Description of Artificial Sequence: Synthetic oligonucleotide
  Antisense strand to SEQ ID NO: 2350916
acucucccagaucucugcu

SEQ ID NO: 2350918 - RNA, 19 nt, Artificial Sequence
  Description of Artificial Sequence: Synthetic oligonucleotide
  Sense strand starting at position 3661 of SEQ ID NO: 1885557
acuagugucugacucugaa

SEQ ID NO: 2350919 - RNA, 19 nt, Artificial Sequence
  Description of Artificial Sequence: Synthetic oligonucleotide
  Antisense strand to SEQ ID NO: 2350918
uucagagucagacacuagu

SEQ ID NO: 2350920 - RNA, 19 nt, Artificial Sequence
  Description of Artificial Sequence: Synthetic oligonucleotide
  Sense strand starting at position 3743 of SEQ ID NO: 1885557
ccuuaagggccugaauguu

SEQ ID NO: 2350921 - RNA, 19 nt, Artificial Sequence
  Description of Artificial Sequence: Synthetic oligonucleotide
  Antisense strand to SEQ ID NO: 2350920
aacauucaggcccuuaagg

SEQ ID NO: 2350922 - RNA, 19 nt, Artificial Sequence
  Description of Artificial Sequence: Synthetic oligonucleotide
  Sense strand starting at position 3776 of SEQ ID NO: 1885557
gggcuuuauucucuaauga

SEQ ID NO: 2350923 - RNA, 19 nt, Artificial Sequence
  Description of Artificial Sequence: Synthetic oligonucleotide
  Antisense strand to SEQ ID NO: 2350922
ucauuagagaauaaagccc

SEQ ID NO: 2350924 - RNA, 19 nt, Artificial Sequence
  Description of Artificial Sequence: Synthetic oligonucleotide
  Sense strand starting at position 3777 of SEQ ID NO: 1885557
ggcuuuauucucuaaugaa

SEQ ID NO: 2350925 - RNA, 19 nt, Artificial Sequence
  Description of Artificial Sequence: Synthetic oligonucleotide
  Antisense strand to SEQ ID NO: 2350924
uucauuagagaauaaagcc

SEQ ID NO: 2350926 - RNA, 19 nt, Artificial Sequence
  Description of Artificial Sequence: Synthetic oligonucleotide
  Sense strand starting at position 3833 of SEQ ID NO: 1885557
gagcaucaucuagggauug

SEQ ID NO: 2350927 - RNA, 19 nt, Artificial Sequence
  Description of Artificial Sequence: Synthetic oligonucleotide
  Antisense strand to SEQ ID NO: 2350926
caaucccuagaugaugcuc

SEQ ID NO: 2350928 - RNA, 19 nt, Artificial Sequence
  Description of Artificial Sequence: Synthetic oligonucleotide
  Sense strand starting at position 318 of SEQ ID NO: 1885558
cagcauuuccagcacguau

SEQ ID NO: 2350929 - RNA, 19 nt, Artificial Sequence
  Description of Artificial Sequence: Synthetic oligonucleotide
  Antisense strand to SEQ ID NO: 2350928
auacgugcuggaaaugcug

SEQ ID NO: 2350930 - RNA, 19 nt, Artificial Sequence
  Description of Artificial Sequence: Synthetic oligonucleotide
  Sense strand starting at position 320 of SEQ ID NO: 1885558
gcauuuccagcacguauga

SEQ ID NO: 2350931 - RNA, 19 nt, Artificial Sequence
  Description of Artificial Sequence: Synthetic oligonucleotide
  Antisense strand to SEQ ID NO: 2350930
ucauacgugcuggaaaugc

SEQ ID NO: 2350932 - RNA, 19 nt, Artificial Sequence
  Description of Artificial Sequence: Synthetic oligonucleotide
  Sense strand starting at position 402 of SEQ ID NO: 1885558
aaaggaucuuguuugacag

SEQ ID NO: 2350933 - RNA, 19 nt, Artificial Sequence
  Description of Artificial Sequence: Synthetic oligonucleotide
  Antisense strand to SEQ ID NO: 2350932
cugucaaacaagauccuuu

SEQ ID NO: 2350934 - RNA, 19 nt, Artificial Sequence
  Description of Artificial Sequence: Synthetic oligonucleotide
  Sense strand starting at position 856 of SEQ ID NO: 1885558
auuguagaucugggcaaag

SEQ ID NO: 2350935 - RNA, 19 nt, Artificial Sequence
  Description of Artificial Sequence: Synthetic oligonucleotide
  Antisense strand to SEQ ID NO: 2350934
cuuugcccagaucuacaau

SEQ ID NO: 2350936 - RNA, 19 nt, Artificial Sequence
  Description of Artificial Sequence: Synthetic oligonucleotide
  Sense strand starting at position 858 of SEQ ID NO: 1885558
uguagaucugggcaaaguu

SEQ ID NO: 2350937 - RNA, 19 nt, Artificial Sequence
  Description of Artificial Sequence: Synthetic oligonucleotide
  Antisense strand to SEQ ID NO: 2350936
aacuuugcccagaucuaca

SEQ ID NO: 2350938 - RNA, 19 nt, Artificial Sequence
  Description of Artificial Sequence: Synthetic oligonucleotide
  Sense strand starting at position 889 of SEQ ID NO: 1885558
agcucuagcugguuauuua

SEQ ID NO: 2350939 - RNA, 19 nt, Artificial Sequence
  Description of Artificial Sequence: Synthetic oligonucleotide
  Antisense strand to SEQ ID NO: 2350938
uaaauaaccagcuagagcu

SEQ ID NO: 2350940 - RNA, 19 nt, Artificial Sequence
  Description of Artificial Sequence: Synthetic oligonucleotide
  Sense strand starting at position 896 of SEQ ID NO: 1885558
gcugguuauuuagcagacu

SEQ ID NO: 2350941 - RNA, 19 nt, Artificial Sequence
  Description of Artificial Sequence: Synthetic oligonucleotide
  Antisense strand to SEQ ID NO: 2350940
agucugcuaaauaaccagc

SEQ ID NO: 2350942 - RNA, 19 nt, Artificial Sequence
  Description of Artificial Sequence: Synthetic oligonucleotide
  Sense strand starting at position 962 of SEQ ID NO: 1885558
ugaaguauuuaugccucuu

SEQ ID NO: 2350943 - RNA, 19 nt, Artificial Sequence
  Description of Artificial Sequence: Synthetic oligonucleotide
  Antisense strand to SEQ ID NO: 2350942
aagaggcauaaauacuuca

SEQ ID NO: 2350944 - RNA, 19 nt, Artificial Sequence
  Description of Artificial Sequence: Synthetic oligonucleotide
  Sense strand starting at position 1034 of SEQ ID NO: 1885558
aagacauuaugguccauag

SEQ ID NO: 2350945 - RNA, 19 nt, Artificial Sequence
  Description of Artificial Sequence: Synthetic oligonucleotide
  Antisense strand to SEQ ID NO: 2350944
cuauggaccauaaugucuu

SEQ ID NO: 2350946 - RNA, 19 nt, Artificial Sequence
  Description of Artificial Sequence: Synthetic oligonucleotide
  Sense strand starting at position 1054 of SEQ ID NO: 1885558
aagguuaagccuggaugga

SEQ ID NO: 2350947 - RNA, 19 nt, Artificial Sequence
  Description of Artificial Sequence: Synthetic oligonucleotide
  Antisense strand to SEQ ID NO: 2350946
uccauccaggcuuaaccuu

SEQ ID NO: 2350948 - RNA, 19 nt, Artificial Sequence
  Description of Artificial Sequence: Synthetic oligonucleotide
  Sense strand starting at position 1105 of SEQ ID NO: 1885558
agaaauggagucugaguca

SEQ ID NO: 2350949 - RNA, 19 nt, Artificial Sequence
  Description of Artificial Sequence: Synthetic oligonucleotide
  Antisense strand to SEQ ID NO: 2350948
ugacucagacuccauuucu

SEQ ID NO: 2350950 - RNA, 19 nt, Artificial Sequence
  Description of Artificial Sequence: Synthetic oligonucleotide
  Sense strand starting at position 1108 of SEQ ID NO: 1885558
aauggagucugagucauug

SEQ ID NO: 2350951 - RNA, 19 nt, Artificial Sequence
  Description of Artificial Sequence: Synthetic oligonucleotide
  Antisense strand to SEQ ID NO: 2350950
caaugacucagacuccauu

SEQ ID NO: 2350952 - RNA, 19 nt, Artificial Sequence
  Description of Artificial Sequence: Synthetic oligonucleotide
  Sense strand starting at position 1110 of SEQ ID NO: 1885558
uggagucugagucauugaa

SEQ ID NO: 2350953 - RNA, 19 nt, Artificial Sequence
  Description of Artificial Sequence: Synthetic oligonucleotide
  Antisense strand to SEQ ID NO: 2350952
uucaaugacucagacucca

SEQ ID NO: 2350954 - RNA, 19 nt, Artificial Sequence
  Description of Artificial Sequence: Synthetic oligonucleotide
  Sense strand starting at position 1112 of SEQ ID NO: 1885558
gagucugagucauugaacu

SEQ ID NO: 2350955 - RNA, 19 nt, Artificial Sequence
  Description of Artificial Sequence: Synthetic oligonucleotide
  Antisense strand to SEQ ID NO: 2350954
aguucaaugacucagacuc

SEQ ID NO: 2350956 - RNA, 19 nt, Artificial Sequence
  Description of Artificial Sequence: Synthetic oligonucleotide
  Sense strand starting at position 1114 of SEQ ID NO: 1885558
gucugagucauugaacuug

SEQ ID NO: 2350957 - RNA, 19 nt, Artificial Sequence
  Description of Artificial Sequence: Synthetic oligonucleotide
  Antisense strand to SEQ ID NO: 2350956
caaguucaaugacucagac

SEQ ID NO: 2350958 - RNA, 19 nt, Artificial Sequence
  Description of Artificial Sequence: Synthetic oligonucleotide
  Sense strand starting at position 1230 of SEQ ID NO: 1885558
gacugaaucuuugucacug

SEQ ID NO: 2350959 - RNA, 19 nt, Artificial Sequence
  Description of Artificial Sequence: Synthetic oligonucleotide
  Antisense strand to SEQ ID NO: 2350958
cagugacaaagauucaguc

SEQ ID NO: 2350960 - RNA, 19 nt, Artificial Sequence
  Description of Artificial Sequence: Synthetic oligonucleotide
  Sense strand starting at position 1408 of SEQ ID NO: 1885558
ggcugagguggccagagau

SEQ ID NO: 2350961 - RNA, 19 nt, Artificial Sequence
  Description of Artificial Sequence: Synthetic oligonucleotide
  Antisense strand to SEQ ID NO: 2350960
aucucuggccaccucagcc

SEQ ID NO: 2350962 - RNA, 19 nt, Artificial Sequence
  Description of Artificial Sequence: Synthetic oligonucleotide
  Sense strand starting at position 1654 of SEQ ID NO: 1885558
ugucuucugggccagaaga

SEQ ID NO: 2350963 - RNA, 19 nt, Artificial Sequence
  Description of Artificial Sequence: Synthetic oligonucleotide
  Antisense strand to SEQ ID NO: 2350962
ucuucuggcccagaagaca

SEQ ID NO: 2350964 - RNA, 19 nt, Artificial Sequence
  Description of Artificial Sequence: Synthetic oligonucleotide
  Sense strand starting at position 1664 of SEQ ID NO: 1885558
gccagaagaaaugguuuaa

SEQ ID NO: 2350965 - RNA, 19 nt, Artificial Sequence
  Description of Artificial Sequence: Synthetic oligonucleotide
  Antisense strand to SEQ ID NO: 2350964
uuaaaccauuucuucuggc

SEQ ID NO: 2350966 - RNA, 19 nt, Artificial Sequence
  Description of Artificial Sequence: Synthetic oligonucleotide
  Sense strand starting at position 2066 of SEQ ID NO: 1885558
accauagggcuuugaacaa

SEQ ID NO: 2350967 - RNA, 19 nt, Artificial Sequence
  Description of Artificial Sequence: Synthetic oligonucleotide
  Antisense strand to SEQ ID NO: 2350966
uuguucaaagcccuauggu

SEQ ID NO: 2350968 - RNA, 19 nt, Artificial Sequence
  Description of Artificial Sequence: Synthetic oligonucleotide
  Sense strand starting at position 2138 of SEQ ID NO: 1885558
auagaacuguuguuugaga

SEQ ID NO: 2350969 - RNA, 19 nt, Artificial Sequence
  Description of Artificial Sequence: Synthetic oligonucleotide
  Antisense strand to SEQ ID NO: 2350968
ucucaaacaacaguucuau

SEQ ID NO: 2350970 - RNA, 19 nt, Artificial Sequence
  Description of Artificial Sequence: Synthetic oligonucleotide
  Sense strand starting at position 2139 of SEQ ID NO: 1885558
uagaacuguuguuugagaa

SEQ ID NO: 2350971 - RNA, 19 nt, Artificial Sequence
  Description of Artificial Sequence: Synthetic oligonucleotide
  Antisense strand to SEQ ID NO: 2350970
uucucaaacaacaguucua

SEQ ID NO: 2350972 - RNA, 19 nt, Artificial Sequence
  Description of Artificial Sequence: Synthetic oligonucleotide
  Sense strand starting at position 2140 of SEQ ID NO: 1885558
agaacuguuguuugagaaa

SEQ ID NO: 2350973 - RNA, 19 nt, Artificial Sequence
  Description of Artificial Sequence: Synthetic oligonucleotide
  Antisense strand to SEQ ID NO: 2350972
uuucucaaacaacaguucu

SEQ ID NO: 2350974 - RNA, 19 nt, Artificial Sequence
  Description of Artificial Sequence: Synthetic oligonucleotide
  Sense strand starting at position 2158 of SEQ ID NO: 1885558
acaacagucuaugucaauu

SEQ ID NO: 2350975 - RNA, 19 nt, Artificial Sequence
  Description of Artificial Sequence: Synthetic oligonucleotide
  Antisense strand to SEQ ID NO: 2350974
aauugacauagacuguugu

SEQ ID NO: 2350976 - RNA, 19 nt, Artificial Sequence
  Description of Artificial Sequence: Synthetic oligonucleotide
  Sense strand starting at position 2274 of SEQ ID NO: 1885558
auaguuuauucuguaagag

SEQ ID NO: 2350977 - RNA, 19 nt, Artificial Sequence
  Description of Artificial Sequence: Synthetic oligonucleotide
  Antisense strand to SEQ ID NO: 2350976
cucuuacagaauaaacuau

SEQ ID NO: 2350978 - RNA, 19 nt, Artificial Sequence
  Description of Artificial Sequence: Synthetic oligonucleotide
  Sense strand starting at position 2275 of SEQ ID NO: 1885558
uaguuuauucuguaagagg

SEQ ID NO: 2350979 - RNA, 19 nt, Artificial Sequence
  Description of Artificial Sequence: Synthetic oligonucleotide
  Antisense strand to SEQ ID NO: 2350978
ccucuuacagaauaaacua

SEQ ID NO: 2350980 - RNA, 19 nt, Artificial Sequence
  Description of Artificial Sequence: Synthetic oligonucleotide
  Sense strand starting at position 2290 of SEQ ID NO: 1885558
gaggcacugcuauaugaag

SEQ ID NO: 2350981 - RNA, 19 nt, Artificial Sequence
  Description of Artificial Sequence: Synthetic oligonucleotide
  Antisense strand to SEQ ID NO: 2350980
cuucauauagcagugccuc

SEQ ID NO: 2350982 - RNA, 19 nt, Artificial Sequence
  Description of Artificial Sequence: Synthetic oligonucleotide
  Sense strand starting at position 2322 of SEQ ID NO: 1885558
ggauuaagccugcaauauc

SEQ ID NO: 2350983 - RNA, 19 nt, Artificial Sequence
  Description of Artificial Sequence: Synthetic oligonucleotide
  Antisense strand to SEQ ID NO: 2350982
gauauugcaggcuuaaucc

SEQ ID NO: 2350984 - RNA, 19 nt, Artificial Sequence
  Description of Artificial Sequence: Synthetic oligonucleotide
  Sense strand starting at position 2385 of SEQ ID NO: 1885558
gccuaaggucuaggaaaga

SEQ ID NO: 2350985 - RNA, 19 nt, Artificial Sequence
  Description of Artificial Sequence: Synthetic oligonucleotide
  Antisense strand to SEQ ID NO: 2350984
ucuuuccuagaccuuaggc

SEQ ID NO: 2350986 - RNA, 19 nt, Artificial Sequence
  Description of Artificial Sequence: Synthetic oligonucleotide
  Sense strand starting at position 2489 of SEQ ID NO: 1885558
uguggaaacuucucaauau

SEQ ID NO: 2350987 - RNA, 19 nt, Artificial Sequence
  Description of Artificial Sequence: Synthetic oligonucleotide
  Antisense strand to SEQ ID NO: 2350986
auauugagaaguuuccaca

SEQ ID NO: 2350988 - RNA, 19 nt, Artificial Sequence
  Description of Artificial Sequence: Synthetic oligonucleotide
  Sense strand starting at position 2544 of SEQ ID NO: 1885558
gucacacgucucuaaauaa

SEQ ID NO: 2350989 - RNA, 19 nt, Artificial Sequence
  Description of Artificial Sequence: Synthetic oligonucleotide
  Antisense strand to SEQ ID NO: 2350988
uuauuuagagacgugugac

SEQ ID NO: 2350990 - RNA, 19 nt, Artificial Sequence
  Description of Artificial Sequence: Synthetic oligonucleotide
  Sense strand starting at position 2667 of SEQ ID NO: 1885558
uguuacugacaguacuaua

SEQ ID NO: 2350991 - RNA, 19 nt, Artificial Sequence
  Description of Artificial Sequence: Synthetic oligonucleotide
  Antisense strand to SEQ ID NO: 2350990
uauaguacugucaguaaca

SEQ ID NO: 2350992 - RNA, 19 nt, Artificial Sequence
  Description of Artificial Sequence: Synthetic oligonucleotide
  Sense strand starting at position 2672 of SEQ ID NO: 1885558
cugacaguacuauagcuuu

SEQ ID NO: 2350993 - RNA, 19 nt, Artificial Sequence
  Description of Artificial Sequence: Synthetic oligonucleotide
  Antisense strand to SEQ ID NO: 2350992
aaagcuauaguacugucag

SEQ ID NO: 2350994 - RNA, 19 nt, Artificial Sequence
  Description of Artificial Sequence: Synthetic oligonucleotide
  Sense strand starting at position 3310 of SEQ ID NO: 1885558
uuuauuucugagugccacu

SEQ ID NO: 2350995 - RNA, 19 nt, Artificial Sequence
  Description of Artificial Sequence: Synthetic oligonucleotide
  Antisense strand to SEQ ID NO: 2350994
aguggcacucagaaauaaa

SEQ ID NO: 2350996 - RNA, 19 nt, Artificial Sequence
  Description of Artificial Sequence: Synthetic oligonucleotide
  Sense strand starting at position 3401 of SEQ ID NO: 1885558
aucccuuugucauuugcau

SEQ ID NO: 2350997 - RNA, 19 nt, Artificial Sequence
  Description of Artificial Sequence: Synthetic oligonucleotide
  Antisense strand to SEQ ID NO: 2350996
augcaaaugacaaagggau

SEQ ID NO: 2350998 - RNA, 19 nt, Artificial Sequence
  Description of Artificial Sequence: Synthetic oligonucleotide
  Sense strand starting at position 3479 of SEQ ID NO: 1885558
gggcguuaacuccaaugaa

SEQ ID NO: 2350999 - RNA, 19 nt, Artificial Sequence
  Description of Artificial Sequence: Synthetic oligonucleotide
  Antisense strand to SEQ ID NO: 2350998
uucauuggaguuaacgccc

SEQ ID NO: 2351000 - RNA, 19 nt, Artificial Sequence
  Description of Artificial Sequence: Synthetic oligonucleotide
  Sense strand starting at position 3482 of SEQ ID NO: 1885558
cguuaacuccaaugaagaa

SEQ ID NO: 2351001 - RNA, 19 nt, Artificial Sequence
  Description of Artificial Sequence: Synthetic oligonucleotide
  Antisense strand to SEQ ID NO: 2351000
uucuucauuggaguuaacg

SEQ ID NO: 2351002 - RNA, 19 nt, Artificial Sequence
  Description of Artificial Sequence: Synthetic oligonucleotide
  Sense strand starting at position 3920 of SEQ ID NO: 1885558
auuugacaucaguguagcu

SEQ ID NO: 2351003 - RNA, 19 nt, Artificial Sequence
  Description of Artificial Sequence: Synthetic oligonucleotide
  Antisense strand to SEQ ID NO: 2351002
agcuacacugaugucaaau

SEQ ID NO: 2351004 - RNA, 19 nt, Artificial Sequence
  Description of Artificial Sequence: Synthetic oligonucleotide
  Sense strand starting at position 3961 of SEQ ID NO: 1885558
ggucaacugucaguaggaa

SEQ ID NO: 2351005 - RNA, 19 nt, Artificial Sequence
  Description of Artificial Sequence: Synthetic oligonucleotide
  Antisense strand to SEQ ID NO: 2351004
uuccuacugacaguugacc

SEQ ID NO: 2351006 - RNA, 19 nt, Artificial Sequence
  Description of Artificial Sequence: Synthetic oligonucleotide
  Sense strand starting at position 3962 of SEQ ID NO: 1885558
gucaacugucaguaggaau

SEQ ID NO: 2351007 - RNA, 19 nt, Artificial Sequence
  Description of Artificial Sequence: Synthetic oligonucleotide
  Antisense strand to SEQ ID NO: 2351006
auuccuacugacaguugac

SEQ ID NO: 2351008 - RNA, 19 nt, Artificial Sequence
  Description of Artificial Sequence: Synthetic oligonucleotide
  Sense strand starting at position 11 of SEQ ID NO: 1885559
ggcugagguggccagagau

SEQ ID NO: 2351009 - RNA, 19 nt, Artificial Sequence
  Description of Artificial Sequence: Synthetic oligonucleotide
  Antisense strand to SEQ ID NO: 2351008
aucucuggccaccucagcc

SEQ ID NO: 2351010 - RNA, 19 nt, Artificial Sequence
  Description of Artificial Sequence: Synthetic oligonucleotide
  Sense strand starting at position 257 of SEQ ID NO: 1885559
ugucuucugggccagaaga

SEQ ID NO: 2351011 - RNA, 19 nt, Artificial Sequence
  Description of Artificial Sequence: Synthetic oligonucleotide
  Antisense strand to SEQ ID NO: 2351010
ucuucuggcccagaagaca

SEQ ID NO: 2351012 - RNA, 19 nt, Artificial Sequence
  Description of Artificial Sequence: Synthetic oligonucleotide
  Sense strand starting at position 267 of SEQ ID NO: 1885559
gccagaagaaaugguuuaa

SEQ ID NO: 2351013 - RNA, 19 nt, Artificial Sequence
  Description of Artificial Sequence: Synthetic oligonucleotide
  Antisense strand to SEQ ID NO: 2351012
uuaaaccauuucuucuggc

SEQ ID NO: 2351014 - RNA, 19 nt, Artificial Sequence
  Description of Artificial Sequence: Synthetic oligonucleotide
  Sense strand starting at position 512 of SEQ ID NO: 1885559
cuaggauccuagucucuua

SEQ ID NO: 2351015 - RNA, 19 nt, Artificial Sequence
  Description of Artificial Sequence: Synthetic oligonucleotide
  Antisense strand to SEQ ID NO: 2351014
uaagagacuaggauccuag

SEQ ID NO: 2351016 - RNA, 19 nt, Artificial Sequence
  Description of Artificial Sequence: Synthetic oligonucleotide
  Sense strand starting at position 669 of SEQ ID NO: 1885559
accauagggcuuugaacaa

SEQ ID NO: 2351017 - RNA, 19 nt, Artificial Sequence
  Description of Artificial Sequence: Synthetic oligonucleotide
  Antisense strand to SEQ ID NO: 2351016
uuguucaaagcccuauggu

SEQ ID NO: 2351018 - RNA, 19 nt, Artificial Sequence
  Description of Artificial Sequence: Synthetic oligonucleotide
  Sense strand starting at position 741 of SEQ ID NO: 1885559
auagaacuguuguuugaga

SEQ ID NO: 2351019 - RNA, 19 nt, Artificial Sequence
  Description of Artificial Sequence: Synthetic oligonucleotide
  Antisense strand to SEQ ID NO: 2351018
ucucaaacaacaguucuau

SEQ ID NO: 2351020 - RNA, 19 nt, Artificial Sequence
  Description of Artificial Sequence: Synthetic oligonucleotide
  Sense strand starting at position 742 of SEQ ID NO: 1885559
uagaacuguuguuugagaa

SEQ ID NO: 2351021 - RNA, 19 nt, Artificial Sequence
  Description of Artificial Sequence: Synthetic oligonucleotide
  Antisense strand to SEQ ID NO: 2351020
uucucaaacaacaguucua

SEQ ID NO: 2351022 - RNA, 19 nt, Artificial Sequence
  Description of Artificial Sequence: Synthetic oligonucleotide
  Sense strand starting at position 743 of SEQ ID NO: 1885559
agaacuguuguuugagaaa

SEQ ID NO: 2351023 - RNA, 19 nt, Artificial Sequence
  Description of Artificial Sequence: Synthetic oligonucleotide
  Antisense strand to SEQ ID NO: 2351022
uuucucaaacaacaguucu

SEQ ID NO: 2351024 - RNA, 19 nt, Artificial Sequence
  Description of Artificial Sequence: Synthetic oligonucleotide
  Sense strand starting at position 761 of SEQ ID NO: 1885559
acaacagucuaugucaauu

SEQ ID NO: 2351025 - RNA, 19 nt, Artificial Sequence
  Description of Artificial Sequence: Synthetic oligonucleotide
  Antisense strand to SEQ ID NO: 2351024
aauugacauagacuguugu

SEQ ID NO: 2351026 - RNA, 19 nt, Artificial Sequence
  Description of Artificial Sequence: Synthetic oligonucleotide
  Sense strand starting at position 877 of SEQ ID NO: 1885559
auaguuuauucuguaagag

SEQ ID NO: 2351027 - RNA, 19 nt, Artificial Sequence
  Description of Artificial Sequence: Synthetic oligonucleotide
  Antisense strand to SEQ ID NO: 2351026
cucuuacagaauaaacuau

SEQ ID NO: 2351028 - RNA, 19 nt, Artificial Sequence
  Description of Artificial Sequence: Synthetic oligonucleotide
  Sense strand starting at position 878 of SEQ ID NO: 1885559
uaguuuauucuguaagagg

SEQ ID NO: 2351029 - RNA, 19 nt, Artificial Sequence
  Description of Artificial Sequence: Synthetic oligonucleotide
  Antisense strand to SEQ ID NO: 2351028
ccucuuacagaauaaacua

SEQ ID NO: 2351030 - RNA, 19 nt, Artificial Sequence
  Description of Artificial Sequence: Synthetic oligonucleotide
  Sense strand starting at position 893 of SEQ ID NO: 1885559
gaggcacugcuauaugaag

SEQ ID NO: 2351031 - RNA, 19 nt, Artificial Sequence
  Description of Artificial Sequence: Synthetic oligonucleotide
  Antisense strand to SEQ ID NO: 2351030
cuucauauagcagugccuc

SEQ ID NO: 2351032 - RNA, 19 nt, Artificial Sequence
  Description of Artificial Sequence: Synthetic oligonucleotide
  Sense strand starting at position 923 of SEQ ID NO: 1885559
auggauuaagccugcaaua

SEQ ID NO: 2351033 - RNA, 19 nt, Artificial Sequence
  Description of Artificial Sequence: Synthetic oligonucleotide
  Antisense strand to SEQ ID NO: 2351032
uauugcaggcuuaauccau

SEQ ID NO: 2351034 - RNA, 19 nt, Artificial Sequence
  Description of Artificial Sequence: Synthetic oligonucleotide
  Sense strand starting at position 925 of SEQ ID NO: 1885559
ggauuaagccugcaauauc

SEQ ID NO: 2351035 - RNA, 19 nt, Artificial Sequence
  Description of Artificial Sequence: Synthetic oligonucleotide
  Antisense strand to SEQ ID NO: 2351034
gauauugcaggcuuaaucc

SEQ ID NO: 2351036 - RNA, 19 nt, Artificial Sequence
  Description of Artificial Sequence: Synthetic oligonucleotide
  Sense strand starting at position 988 of SEQ ID NO: 1885559
gccuaaggucuaggaaaga

SEQ ID NO: 2351037 - RNA, 19 nt, Artificial Sequence
  Description of Artificial Sequence: Synthetic oligonucleotide
  Antisense strand to SEQ ID NO: 2351036
ucuuuccuagaccuuaggc

SEQ ID NO: 2351038 - RNA, 19 nt, Artificial Sequence
  Description of Artificial Sequence: Synthetic oligonucleotide
  Sense strand starting at position 1092 of SEQ ID NO: 1885559
uguggaaacuucucaauau

SEQ ID NO: 2351039 - RNA, 19 nt, Artificial Sequence
  Description of Artificial Sequence: Synthetic oligonucleotide
  Antisense strand to SEQ ID NO: 2351038
auauugagaaguuuccaca

SEQ ID NO: 2351040 - RNA, 19 nt, Artificial Sequence
  Description of Artificial Sequence: Synthetic oligonucleotide
  Sense strand starting at position 1147 of SEQ ID NO: 1885559
gucacacgucucuaaauaa

SEQ ID NO: 2351041 - RNA, 19 nt, Artificial Sequence
  Description of Artificial Sequence: Synthetic oligonucleotide
  Antisense strand to SEQ ID NO: 2351040
uuauuuagagacgugugac

SEQ ID NO: 2351042 - RNA, 19 nt, Artificial Sequence
  Description of Artificial Sequence: Synthetic oligonucleotide
  Sense strand starting at position 1265 of SEQ ID NO: 1885559
cgaaguguuacugacagua

SEQ ID NO: 2351043 - RNA, 19 nt, Artificial Sequence
  Description of Artificial Sequence: Synthetic oligonucleotide
  Antisense strand to SEQ ID NO: 2351042
uacugucaguaacacuucg

SEQ ID NO: 2351044 - RNA, 19 nt, Artificial Sequence
  Description of Artificial Sequence: Synthetic oligonucleotide
  Sense strand starting at position 1270 of SEQ ID NO: 1885559
uguuacugacaguacuaua

SEQ ID NO: 2351045 - RNA, 19 nt, Artificial Sequence
  Description of Artificial Sequence: Synthetic oligonucleotide
  Antisense strand to SEQ ID NO: 2351044
uauaguacugucaguaaca

SEQ ID NO: 2351046 - RNA, 19 nt, Artificial Sequence
  Description of Artificial Sequence: Synthetic oligonucleotide
  Sense strand starting at position 1275 of SEQ ID NO: 1885559
cugacaguacuauagcuuu

SEQ ID NO: 2351047 - RNA, 19 nt, Artificial Sequence
  Description of Artificial Sequence: Synthetic oligonucleotide
  Antisense strand to SEQ ID NO: 2351046
aaagcuauaguacugucag

SEQ ID NO: 2351048 - RNA, 19 nt, Artificial Sequence
  Description of Artificial Sequence: Synthetic oligonucleotide
  Sense strand starting at position 1843 of SEQ ID NO: 1885559
gaaagucuuguaggaguua

SEQ ID NO: 2351049 - RNA, 19 nt, Artificial Sequence
  Description of Artificial Sequence: Synthetic oligonucleotide
  Antisense strand to SEQ ID NO: 2351048
uaacuccuacaagacuuuc

SEQ ID NO: 2351050 - RNA, 19 nt, Artificial Sequence
  Description of Artificial Sequence: Synthetic oligonucleotide
  Sense strand starting at position 1913 of SEQ ID NO: 1885559
uuuauuucugagugccacu

SEQ ID NO: 2351051 - RNA, 19 nt, Artificial Sequence
  Description of Artificial Sequence: Synthetic oligonucleotide
  Antisense strand to SEQ ID NO: 2351050
aguggcacucagaaauaaa

SEQ ID NO: 2351052 - RNA, 19 nt, Artificial Sequence
  Description of Artificial Sequence: Synthetic oligonucleotide
  Sense strand starting at position 2004 of SEQ ID NO: 1885559
aucccuuugucauuugcau

SEQ ID NO: 2351053 - RNA, 19 nt, Artificial Sequence
  Description of Artificial Sequence: Synthetic oligonucleotide
  Antisense strand to SEQ ID NO: 2351052
augcaaaugacaaagggau

SEQ ID NO: 2351054 - RNA, 19 nt, Artificial Sequence
  Description of Artificial Sequence: Synthetic oligonucleotide
  Sense strand starting at position 2082 of SEQ ID NO: 1885559
gggcguuaacuccaaugaa

SEQ ID NO: 2351055 - RNA, 19 nt, Artificial Sequence
  Description of Artificial Sequence: Synthetic oligonucleotide
  Antisense strand to SEQ ID NO: 2351054
uucauuggaguuaacgccc

SEQ ID NO: 2351056 - RNA, 19 nt, Artificial Sequence
  Description of Artificial Sequence: Synthetic oligonucleotide
  Sense strand starting at position 2085 of SEQ ID NO: 1885559
cguuaacuccaaugaagaa

SEQ ID NO: 2351057 - RNA, 19 nt, Artificial Sequence
  Description of Artificial Sequence: Synthetic oligonucleotide
  Antisense strand to SEQ ID NO: 2351056
uucuucauuggaguuaacg

SEQ ID NO: 2351058 - RNA, 19 nt, Artificial Sequence
  Description of Artificial Sequence: Synthetic oligonucleotide
  Sense strand starting at position 2523 of SEQ ID NO: 1885559
auuugacaucaguguagcu

SEQ ID NO: 2351059 - RNA, 19 nt, Artificial Sequence
  Description of Artificial Sequence: Synthetic oligonucleotide
  Antisense strand to SEQ ID NO: 2351058
agcuacacugaugucaaau

SEQ ID NO: 2351060 - RNA, 19 nt, Artificial Sequence
  Description of Artificial Sequence: Synthetic oligonucleotide
  Sense strand starting at position 2564 of SEQ ID NO: 1885559
ggucaacugucaguaggaa

SEQ ID NO: 2351061 - RNA, 19 nt, Artificial Sequence
  Description of Artificial Sequence: Synthetic oligonucleotide
  Antisense strand to SEQ ID NO: 2351060
uuccuacugacaguugacc

SEQ ID NO: 2351062 - RNA, 19 nt, Artificial Sequence
  Description of Artificial Sequence: Synthetic oligonucleotide
  Sense strand starting at position 2565 of SEQ ID NO: 1885559
gucaacugucaguaggaau

SEQ ID NO: 2351063 - RNA, 19 nt, Artificial Sequence
  Description of Artificial Sequence: Synthetic oligonucleotide
  Antisense strand to SEQ ID NO: 2351062
auuccuacugacaguugac

SEQ ID NO: 2351064 - RNA, 19 nt, Artificial Sequence
  Description of Artificial Sequence: Synthetic oligonucleotide
  Sense strand starting at position 2651 of SEQ ID NO: 1885559
uccugagcugaucacauua

SEQ ID NO: 2351065 - RNA, 19 nt, Artificial Sequence
  Description of Artificial Sequence: Synthetic oligonucleotide
  Antisense strand to SEQ ID NO: 2351064
uaaugugaucagcucagga

SEQ ID NO: 2351066 - RNA, 19 nt, Artificial Sequence
  Description of Artificial Sequence: Synthetic oligonucleotide
  Sense strand starting at position 3176 of SEQ ID NO: 1885559
agcucaucccacugagaca

SEQ ID NO: 2351067 - RNA, 19 nt, Artificial Sequence
  Description of Artificial Sequence: Synthetic oligonucleotide
  Antisense strand to SEQ ID NO: 2351066
ugucucagugggaugagcu

SEQ ID NO: 2351068 - RNA, 19 nt, Artificial Sequence
  Description of Artificial Sequence: Synthetic oligonucleotide
  Sense strand starting at position 3367 of SEQ ID NO: 1885559
ugagaaacuuguguucuga

SEQ ID NO: 2351069 - RNA, 19 nt, Artificial Sequence
  Description of Artificial Sequence: Synthetic oligonucleotide
  Antisense strand to SEQ ID NO: 2351068
ucagaacacaaguuucuca

SEQ ID NO: 2351070 - RNA, 19 nt, Artificial Sequence
  Description of Artificial Sequence: Synthetic oligonucleotide
  Sense strand starting at position 3369 of SEQ ID NO: 1885559
agaaacuuguguucugaau

SEQ ID NO: 2351071 - RNA, 19 nt, Artificial Sequence
  Description of Artificial Sequence: Synthetic oligonucleotide
  Antisense strand to SEQ ID NO: 2351070
auucagaacacaaguuucu

SEQ ID NO: 2351072 - RNA, 19 nt, Artificial Sequence
  Description of Artificial Sequence: Synthetic oligonucleotide
  Sense strand starting at position 3440 of SEQ ID NO: 1885559
guguaaucagacuaucaau

SEQ ID NO: 2351073 - RNA, 19 nt, Artificial Sequence
  Description of Artificial Sequence: Synthetic oligonucleotide
  Antisense strand to SEQ ID NO: 2351072
auugauagucugauuacac

SEQ ID NO: 2351074 - RNA, 19 nt, Artificial Sequence
  Description of Artificial Sequence: Synthetic oligonucleotide
  Sense strand starting at position 3627 of SEQ ID NO: 1885559
ucugauaaauggccuuuaa

SEQ ID NO: 2351075 - RNA, 19 nt, Artificial Sequence
  Description of Artificial Sequence: Synthetic oligonucleotide
  Antisense strand to SEQ ID NO: 2351074
uuaaaggccauuuaucaga

SEQ ID NO: 2351076 - RNA, 19 nt, Artificial Sequence
  Description of Artificial Sequence: Synthetic oligonucleotide
  Sense strand starting at position 3673 of SEQ ID NO: 1885559
uguacuuaucugcauuaga

SEQ ID NO: 2351077 - RNA, 19 nt, Artificial Sequence
  Description of Artificial Sequence: Synthetic oligonucleotide
  Antisense strand to SEQ ID NO: 2351076
ucuaaugcagauaaguaca

SEQ ID NO: 2351078 - RNA, 19 nt, Artificial Sequence
  Description of Artificial Sequence: Synthetic oligonucleotide
  Sense strand starting at position 3774 of SEQ ID NO: 1885559
augucaaaguacucaauga

SEQ ID NO: 2351079 - RNA, 19 nt, Artificial Sequence
  Description of Artificial Sequence: Synthetic oligonucleotide
  Antisense strand to SEQ ID NO: 2351078
ucauugaguacuuugacau

SEQ ID NO: 2351080 - RNA, 19 nt, Artificial Sequence
  Description of Artificial Sequence: Synthetic oligonucleotide
  Sense strand starting at position 3793 of SEQ ID NO: 1885559
guacaccugugauuauaga

SEQ ID NO: 2351081 - RNA, 19 nt, Artificial Sequence
  Description of Artificial Sequence: Synthetic oligonucleotide
  Antisense strand to SEQ ID NO: 2351080
ucuauaaucacagguguac

SEQ ID NO: 2351082 - RNA, 19 nt, Artificial Sequence
  Description of Artificial Sequence: Synthetic oligonucleotide
  Sense strand starting at position 3827 of SEQ ID NO: 1885559
uugucuuaaacacgaggaa

SEQ ID NO: 2351083 - RNA, 19 nt, Artificial Sequence
  Description of Artificial Sequence: Synthetic oligonucleotide
  Antisense strand to SEQ ID NO: 2351082
uuccucguguuuaagacaa

SEQ ID NO: 2351084 - RNA, 19 nt, Artificial Sequence
  Description of Artificial Sequence: Synthetic oligonucleotide
  Sense strand starting at position 3913 of SEQ ID NO: 1885559
acaugucaguauuccaaca

SEQ ID NO: 2351085 - RNA, 19 nt, Artificial Sequence
  Description of Artificial Sequence: Synthetic oligonucleotide
  Antisense strand to SEQ ID NO: 2351084
uguuggaauacugacaugu

SEQ ID NO: 2351086 - RNA, 19 nt, Artificial Sequence
  Description of Artificial Sequence: Synthetic oligonucleotide
  Sense strand starting at position 3937 of SEQ ID NO: 1885559
accauauguguguauagau

SEQ ID NO: 2351087 - RNA, 19 nt, Artificial Sequence
  Description of Artificial Sequence: Synthetic oligonucleotide
  Antisense strand to SEQ ID NO: 2351086
aucuauacacacauauggu

SEQ ID NO: 2351088 - RNA, 19 nt, Artificial Sequence
  Description of Artificial Sequence: Synthetic oligonucleotide
  Sense strand starting at position 10 of SEQ ID NO: 1885560
gguuaaacaccuugacaua

SEQ ID NO: 2351089 - RNA, 19 nt, Artificial Sequence
  Description of Artificial Sequence: Synthetic oligonucleotide
  Antisense strand to SEQ ID NO: 2351088
uaugucaagguguuuaacc

SEQ ID NO: 2351090 - RNA, 19 nt, Artificial Sequence
  Description of Artificial Sequence: Synthetic oligonucleotide
  Sense strand starting at position 52 of SEQ ID NO: 1885560
auuccuauagcugggaguu

SEQ ID NO: 2351091 - RNA, 19 nt, Artificial Sequence
  Description of Artificial Sequence: Synthetic oligonucleotide
  Antisense strand to SEQ ID NO: 2351090
aacucccagcuauaggaau

SEQ ID NO: 2351092 - RNA, 19 nt, Artificial Sequence
  Description of Artificial Sequence: Synthetic oligonucleotide
  Sense strand starting at position 53 of SEQ ID NO: 1885560
uuccuauagcugggaguua

SEQ ID NO: 2351093 - RNA, 19 nt, Artificial Sequence
  Description of Artificial Sequence: Synthetic oligonucleotide
  Antisense strand to SEQ ID NO: 2351092
uaacucccagcuauaggaa

SEQ ID NO: 2351094 - RNA, 19 nt, Artificial Sequence
  Description of Artificial Sequence: Synthetic oligonucleotide
  Sense strand starting at position 386 of SEQ ID NO: 1885560
uccacauccgugugggaaa

SEQ ID NO: 2351095 - RNA, 19 nt, Artificial Sequence
  Description of Artificial Sequence: Synthetic oligonucleotide
  Antisense strand to SEQ ID NO: 2351094
uuucccacacggaugugga

SEQ ID NO: 2351096 - RNA, 19 nt, Artificial Sequence
  Description of Artificial Sequence: Synthetic oligonucleotide
  Sense strand starting at position 398 of SEQ ID NO: 1885560
ugggaaagcuuaucauuaa

SEQ ID NO: 2351097 - RNA, 19 nt, Artificial Sequence
  Description of Artificial Sequence: Synthetic oligonucleotide
  Antisense strand to SEQ ID NO: 2351096
uuaaugauaagcuuuccca

SEQ ID NO: 2351098 - RNA, 19 nt, Artificial Sequence
  Description of Artificial Sequence: Synthetic oligonucleotide
  Sense strand starting at position 399 of SEQ ID NO: 1885560
gggaaagcuuaucauuaag

SEQ ID NO: 2351099 - RNA, 19 nt, Artificial Sequence
  Description of Artificial Sequence: Synthetic oligonucleotide
  Antisense strand to SEQ ID NO: 2351098
cuuaaugauaagcuuuccc

SEQ ID NO: 2351100 - RNA, 19 nt, Artificial Sequence
  Description of Artificial Sequence: Synthetic oligonucleotide
  Sense strand starting at position 678 of SEQ ID NO: 1885560
accuguauacagggaucaa

SEQ ID NO: 2351101 - RNA, 19 nt, Artificial Sequence
  Description of Artificial Sequence: Synthetic oligonucleotide
  Antisense strand to SEQ ID NO: 2351100
uugaucccuguauacaggu

SEQ ID NO: 2351102 - RNA, 19 nt, Artificial Sequence
  Description of Artificial Sequence: Synthetic oligonucleotide
  Sense strand starting at position 847 of SEQ ID NO: 1885560
uccugucugccugguaaac

SEQ ID NO: 2351103 - RNA, 19 nt, Artificial Sequence
  Description of Artificial Sequence: Synthetic oligonucleotide
  Antisense strand to SEQ ID NO: 2351102
guuuaccaggcagacagga

SEQ ID NO: 2351104 - RNA, 19 nt, Artificial Sequence
  Description of Artificial Sequence: Synthetic oligonucleotide
  Sense strand starting at position 1050 of SEQ ID NO: 1885560
uugcauaggucaucuugaa

SEQ ID NO: 2351105 - RNA, 19 nt, Artificial Sequence
  Description of Artificial Sequence: Synthetic oligonucleotide
  Antisense strand to SEQ ID NO: 2351104
uucaagaugaccuaugcaa

SEQ ID NO: 2351106 - RNA, 19 nt, Artificial Sequence
  Description of Artificial Sequence: Synthetic oligonucleotide
  Sense strand starting at position 1054 of SEQ ID NO: 1885560
auaggucaucuugaaugca

SEQ ID NO: 2351107 - RNA, 19 nt, Artificial Sequence
  Description of Artificial Sequence: Synthetic oligonucleotide
  Antisense strand to SEQ ID NO: 2351106
ugcauucaagaugaccuau

SEQ ID NO: 2351108 - RNA, 19 nt, Artificial Sequence
  Description of Artificial Sequence: Synthetic oligonucleotide
  Sense strand starting at position 1057 of SEQ ID NO: 1885560
ggucaucuugaaugcauau

SEQ ID NO: 2351109 - RNA, 19 nt, Artificial Sequence
  Description of Artificial Sequence: Synthetic oligonucleotide
  Antisense strand to SEQ ID NO: 2351108
auaugcauucaagaugacc

SEQ ID NO: 2351110 - RNA, 19 nt, Artificial Sequence
  Description of Artificial Sequence: Synthetic oligonucleotide
  Sense strand starting at position 1074 of SEQ ID NO: 1885560
augugaaaguguccugcuu

SEQ ID NO: 2351111 - RNA, 19 nt, Artificial Sequence
  Description of Artificial Sequence: Synthetic oligonucleotide
  Antisense strand to SEQ ID NO: 2351110
aagcaggacacuuucacau

SEQ ID NO: 2351112 - RNA, 19 nt, Artificial Sequence
  Description of Artificial Sequence: Synthetic oligonucleotide
  Sense strand starting at position 1626 of SEQ ID NO: 1885560
cagggaaucugugcugauc

SEQ ID NO: 2351113 - RNA, 19 nt, Artificial Sequence
  Description of Artificial Sequence: Synthetic oligonucleotide
  Antisense strand to SEQ ID NO: 2351112
gaucagcacagauucccug

SEQ ID NO: 2351114 - RNA, 19 nt, Artificial Sequence
  Description of Artificial Sequence: Synthetic oligonucleotide
  Sense strand starting at position 1629 of SEQ ID NO: 1885560
ggaaucugugcugaucuca

SEQ ID NO: 2351115 - RNA, 19 nt, Artificial Sequence
  Description of Artificial Sequence: Synthetic oligonucleotide
  Antisense strand to SEQ ID NO: 2351114
ugagaucagcacagauucc

SEQ ID NO: 2351116 - RNA, 19 nt, Artificial Sequence
  Description of Artificial Sequence: Synthetic oligonucleotide
  Sense strand starting at position 1691 of SEQ ID NO: 1885560
ggagcaaugcgcuaggauc

SEQ ID NO: 2351117 - RNA, 19 nt, Artificial Sequence
  Description of Artificial Sequence: Synthetic oligonucleotide
  Antisense strand to SEQ ID NO: 2351116
gauccuagcgcauugcucc

SEQ ID NO: 2351118 - RNA, 19 nt, Artificial Sequence
  Description of Artificial Sequence: Synthetic oligonucleotide
  Sense strand starting at position 1733 of SEQ ID NO: 1885560
aagccagcucacugugauu

SEQ ID NO: 2351119 - RNA, 19 nt, Artificial Sequence
  Description of Artificial Sequence: Synthetic oligonucleotide
  Antisense strand to SEQ ID NO: 2351118
aaucacagugagcuggcuu

SEQ ID NO: 2351120 - RNA, 19 nt, Artificial Sequence
  Description of Artificial Sequence: Synthetic oligonucleotide
  Sense strand starting at position 1735 of SEQ ID NO: 1885560
gccagcucacugugauuua

SEQ ID NO: 2351121 - RNA, 19 nt, Artificial Sequence
  Description of Artificial Sequence: Synthetic oligonucleotide
  Antisense strand to SEQ ID NO: 2351120
uaaaucacagugagcuggc

SEQ ID NO: 2351122 - RNA, 19 nt, Artificial Sequence
  Description of Artificial Sequence: Synthetic oligonucleotide
  Sense strand starting at position 1807 of SEQ ID NO: 1885560
ggaccaaacuugucaaauc

SEQ ID NO: 2351123 - RNA, 19 nt, Artificial Sequence
  Description of Artificial Sequence: Synthetic oligonucleotide
  Antisense strand to SEQ ID NO: 2351122
gauuugacaaguuuggucc

SEQ ID NO: 2351124 - RNA, 19 nt, Artificial Sequence
  Description of Artificial Sequence: Synthetic oligonucleotide
  Sense strand starting at position 2179 of SEQ ID NO: 1885560
cagugcuugucucugaaca

SEQ ID NO: 2351125 - RNA, 19 nt, Artificial Sequence
  Description of Artificial Sequence: Synthetic oligonucleotide
  Antisense strand to SEQ ID NO: 2351124
uguucagagacaagcacug

SEQ ID NO: 2351126 - RNA, 19 nt, Artificial Sequence
  Description of Artificial Sequence: Synthetic oligonucleotide
  Sense strand starting at position 2180 of SEQ ID NO: 1885560
agugcuugucucugaacaa

SEQ ID NO: 2351127 - RNA, 19 nt, Artificial Sequence
  Description of Artificial Sequence: Synthetic oligonucleotide
  Antisense strand to SEQ ID NO: 2351126
uuguucagagacaagcacu

SEQ ID NO: 2351128 - RNA, 19 nt, Artificial Sequence
  Description of Artificial Sequence: Synthetic oligonucleotide
  Sense strand starting at position 2216 of SEQ ID NO: 1885560
gcuaauauuuaggacacga

SEQ ID NO: 2351129 - RNA, 19 nt, Artificial Sequence
  Description of Artificial Sequence: Synthetic oligonucleotide
  Antisense strand to SEQ ID NO: 2351128
ucguguccuaaauauuagc

SEQ ID NO: 2351130 - RNA, 19 nt, Artificial Sequence
  Description of Artificial Sequence: Synthetic oligonucleotide
  Sense strand starting at position 2436 of SEQ ID NO: 1885560
gcggcagaacccgagauua

SEQ ID NO: 2351131 - RNA, 19 nt, Artificial Sequence
  Description of Artificial Sequence: Synthetic oligonucleotide
  Antisense strand to SEQ ID NO: 2351130
uaaucucggguucugccgc

SEQ ID NO: 2351132 - RNA, 19 nt, Artificial Sequence
  Description of Artificial Sequence: Synthetic oligonucleotide
  Sense strand starting at position 2798 of SEQ ID NO: 1885560
gggucauuggucugggaag

SEQ ID NO: 2351133 - RNA, 19 nt, Artificial Sequence
  Description of Artificial Sequence: Synthetic oligonucleotide
  Antisense strand to SEQ ID NO: 2351132
cuucccagaccaaugaccc

SEQ ID NO: 2351134 - RNA, 19 nt, Artificial Sequence
  Description of Artificial Sequence: Synthetic oligonucleotide
  Sense strand starting at position 2800 of SEQ ID NO: 1885560
gucauuggucugggaagga

SEQ ID NO: 2351135 - RNA, 19 nt, Artificial Sequence
  Description of Artificial Sequence: Synthetic oligonucleotide
  Antisense strand to SEQ ID NO: 2351134
uccuucccagaccaaugac

SEQ ID NO: 2351136 - RNA, 19 nt, Artificial Sequence
  Description of Artificial Sequence: Synthetic oligonucleotide
  Sense strand starting at position 2995 of SEQ ID NO: 1885560
ugcaaaucucaggaguguu

SEQ ID NO: 2351137 - RNA, 19 nt, Artificial Sequence
  Description of Artificial Sequence: Synthetic oligonucleotide
  Antisense strand to SEQ ID NO: 2351136
aacacuccugagauuugca

SEQ ID NO: 2351138 - RNA, 19 nt, Artificial Sequence
  Description of Artificial Sequence: Synthetic oligonucleotide
  Sense strand starting at position 3132 of SEQ ID NO: 1885560
cucuaaacaucugugauga

SEQ ID NO: 2351139 - RNA, 19 nt, Artificial Sequence
  Description of Artificial Sequence: Synthetic oligonucleotide
  Antisense strand to SEQ ID NO: 2351138
ucaucacagauguuuagag

SEQ ID NO: 2351140 - RNA, 19 nt, Artificial Sequence
  Description of Artificial Sequence: Synthetic oligonucleotide
  Sense strand starting at position 3133 of SEQ ID NO: 1885560
ucuaaacaucugugaugau

SEQ ID NO: 2351141 - RNA, 19 nt, Artificial Sequence
  Description of Artificial Sequence: Synthetic oligonucleotide
  Antisense strand to SEQ ID NO: 2351140
aucaucacagauguuuaga

SEQ ID NO: 2351142 - RNA, 19 nt, Artificial Sequence
  Description of Artificial Sequence: Synthetic oligonucleotide
  Sense strand starting at position 3140 of SEQ ID NO: 1885560
aucugugaugauuauaggu

SEQ ID NO: 2351143 - RNA, 19 nt, Artificial Sequence
  Description of Artificial Sequence: Synthetic oligonucleotide
  Antisense strand to SEQ ID NO: 2351142
accuauaaucaucacagau

SEQ ID NO: 2351144 - RNA, 19 nt, Artificial Sequence
  Description of Artificial Sequence: Synthetic oligonucleotide
  Sense strand starting at position 3148 of SEQ ID NO: 1885560
ugauuauaggucuggguga

SEQ ID NO: 2351145 - RNA, 19 nt, Artificial Sequence
  Description of Artificial Sequence: Synthetic oligonucleotide
  Antisense strand to SEQ ID NO: 2351144
ucacccagaccuauaauca

SEQ ID NO: 2351146 - RNA, 19 nt, Artificial Sequence
  Description of Artificial Sequence: Synthetic oligonucleotide
  Sense strand starting at position 3150 of SEQ ID NO: 1885560
auuauaggucugggugaaa

SEQ ID NO: 2351147 - RNA, 19 nt, Artificial Sequence
  Description of Artificial Sequence: Synthetic oligonucleotide
  Antisense strand to SEQ ID NO: 2351146
uuucacccagaccuauaau

SEQ ID NO: 2351148 - RNA, 19 nt, Artificial Sequence
  Description of Artificial Sequence: Synthetic oligonucleotide
  Sense strand starting at position 3205 of SEQ ID NO: 1885560
ggauuugcuuuggaaacca

SEQ ID NO: 2351149 - RNA, 19 nt, Artificial Sequence
  Description of Artificial Sequence: Synthetic oligonucleotide
  Antisense strand to SEQ ID NO: 2351148
ugguuuccaaagcaaaucc

SEQ ID NO: 2351150 - RNA, 19 nt, Artificial Sequence
  Description of Artificial Sequence: Synthetic oligonucleotide
  Sense strand starting at position 3386 of SEQ ID NO: 1885560
ccaugagguccaugacugu

SEQ ID NO: 2351151 - RNA, 19 nt, Artificial Sequence
  Description of Artificial Sequence: Synthetic oligonucleotide
  Antisense strand to SEQ ID NO: 2351150
acagucauggaccucaugg

SEQ ID NO: 2351152 - RNA, 19 nt, Artificial Sequence
  Description of Artificial Sequence: Synthetic oligonucleotide
  Sense strand starting at position 3395 of SEQ ID NO: 1885560
ccaugacuguauccucauu

SEQ ID NO: 2351153 - RNA, 19 nt, Artificial Sequence
  Description of Artificial Sequence: Synthetic oligonucleotide
  Antisense strand to SEQ ID NO: 2351152
aaugaggauacagucaugg

SEQ ID NO: 2351154 - RNA, 19 nt, Artificial Sequence
  Description of Artificial Sequence: Synthetic oligonucleotide
  Sense strand starting at position 3568 of SEQ ID NO: 1885560
ggaguucuugcucaacauc

SEQ ID NO: 2351155 - RNA, 19 nt, Artificial Sequence
  Description of Artificial Sequence: Synthetic oligonucleotide
  Antisense strand to SEQ ID NO: 2351154
gauguugagcaagaacucc

SEQ ID NO: 2351156 - RNA, 19 nt, Artificial Sequence
  Description of Artificial Sequence: Synthetic oligonucleotide
  Sense strand starting at position 3712 of SEQ ID NO: 1885560
gagggaaccuggcagacau

SEQ ID NO: 2351157 - RNA, 19 nt, Artificial Sequence
  Description of Artificial Sequence: Synthetic oligonucleotide
  Antisense strand to SEQ ID NO: 2351156
augucugccagguucccuc

SEQ ID NO: 2351158 - RNA, 19 nt, Artificial Sequence
  Description of Artificial Sequence: Synthetic oligonucleotide
  Sense strand starting at position 3747 of SEQ ID NO: 1885560
uggccaauucgguacauca

SEQ ID NO: 2351159 - RNA, 19 nt, Artificial Sequence
  Description of Artificial Sequence: Synthetic oligonucleotide
  Antisense strand to SEQ ID NO: 2351158
ugauguaccgaauuggcca

SEQ ID NO: 2351160 - RNA, 19 nt, Artificial Sequence
  Description of Artificial Sequence: Synthetic oligonucleotide
  Sense strand starting at position 3749 of SEQ ID NO: 1885560
gccaauucgguacaucaga

SEQ ID NO: 2351161 - RNA, 19 nt, Artificial Sequence
  Description of Artificial Sequence: Synthetic oligonucleotide
  Antisense strand to SEQ ID NO: 2351160
ucugauguaccgaauuggc

SEQ ID NO: 2351162 - RNA, 19 nt, Artificial Sequence
  Description of Artificial Sequence: Synthetic oligonucleotide
  Sense strand starting at position 3853 of SEQ ID NO: 1885560
ccaucaggcccguaugaau

SEQ ID NO: 2351163 - RNA, 19 nt, Artificial Sequence
  Description of Artificial Sequence: Synthetic oligonucleotide
  Antisense strand to SEQ ID NO: 2351162
auucauacgggccugaugg

SEQ ID NO: 2351164 - RNA, 19 nt, Artificial Sequence
  Description of Artificial Sequence: Synthetic oligonucleotide
  Sense strand starting at position 3860 of SEQ ID NO: 1885560
gcccguaugaaucagaaau

SEQ ID NO: 2351165 - RNA, 19 nt, Artificial Sequence
  Description of Artificial Sequence: Synthetic oligonucleotide
  Antisense strand to SEQ ID NO: 2351164
auuucugauucauacgggc

SEQ ID NO: 2351166 - RNA, 19 nt, Artificial Sequence
  Description of Artificial Sequence: Synthetic oligonucleotide
  Sense strand starting at position 3871 of SEQ ID NO: 1885560
ucagaaauucugggcuucu

SEQ ID NO: 2351167 - RNA, 19 nt, Artificial Sequence
  Description of Artificial Sequence: Synthetic oligonucleotide
  Antisense strand to SEQ ID NO: 2351166
agaagcccagaauuucuga

SEQ ID NO: 2351168 - RNA, 19 nt, Artificial Sequence
  Description of Artificial Sequence: Synthetic oligonucleotide
  Sense strand starting at position 8 of SEQ ID NO: 1885561
gaugaaaugcagcauggua

SEQ ID NO: 2351169 - RNA, 19 nt, Artificial Sequence
  Description of Artificial Sequence: Synthetic oligonucleotide
  Antisense strand to SEQ ID NO: 2351168
uaccaugcugcauuucauc

SEQ ID NO: 2351170 - RNA, 19 nt, Artificial Sequence
  Description of Artificial Sequence: Synthetic oligonucleotide
  Sense strand starting at position 58 of SEQ ID NO: 1885561
gcugguuaccuauaggaag

SEQ ID NO: 2351171 - RNA, 19 nt, Artificial Sequence
  Description of Artificial Sequence: Synthetic oligonucleotide
  Antisense strand to SEQ ID NO: 2351170
cuuccuauagguaaccagc

SEQ ID NO: 2351172 - RNA, 19 nt, Artificial Sequence
  Description of Artificial Sequence: Synthetic oligonucleotide
  Sense strand starting at position 76 of SEQ ID NO: 1885561
gggcacaguacaugugaaa

SEQ ID NO: 2351173 - RNA, 19 nt, Artificial Sequence
  Description of Artificial Sequence: Synthetic oligonucleotide
  Antisense strand to SEQ ID NO: 2351172
uuucacauguacugugccc

SEQ ID NO: 2351174 - RNA, 19 nt, Artificial Sequence
  Description of Artificial Sequence: Synthetic oligonucleotide
  Sense strand starting at position 275 of SEQ ID NO: 1885561
ugcacucgugugcucagua

SEQ ID NO: 2351175 - RNA, 19 nt, Artificial Sequence
  Description of Artificial Sequence: Synthetic oligonucleotide
  Antisense strand to SEQ ID NO: 2351174
uacugagcacacgagugca

SEQ ID NO: 2351176 - RNA, 19 nt, Artificial Sequence
  Description of Artificial Sequence: Synthetic oligonucleotide
  Sense strand starting at position 534 of SEQ ID NO: 1885561
uagcaauuaccugguaaug

SEQ ID NO: 2351177 - RNA, 19 nt, Artificial Sequence
  Description of Artificial Sequence: Synthetic oligonucleotide
  Antisense strand to SEQ ID NO: 2351176
cauuaccagguaauugcua

SEQ ID NO: 2351178 - RNA, 19 nt, Artificial Sequence
  Description of Artificial Sequence: Synthetic oligonucleotide
  Sense strand starting at position 928 of SEQ ID NO: 1885561
uuauuuacuugggagauua

SEQ ID NO: 2351179 - RNA, 19 nt, Artificial Sequence
  Description of Artificial Sequence: Synthetic oligonucleotide
  Antisense strand to SEQ ID NO: 2351178
uaaucucccaaguaaauaa

SEQ ID NO: 2351180 - RNA, 19 nt, Artificial Sequence
  Description of Artificial Sequence: Synthetic oligonucleotide
  Sense strand starting at position 949 of SEQ ID NO: 1885561
uuuggaagauuaucaguag

SEQ ID NO: 2351181 - RNA, 19 nt, Artificial Sequence
  Description of Artificial Sequence: Synthetic oligonucleotide
  Antisense strand to SEQ ID NO: 2351180
cuacugauaaucuuccaaa

SEQ ID NO: 2351182 - RNA, 19 nt, Artificial Sequence
  Description of Artificial Sequence: Synthetic oligonucleotide
  Sense strand starting at position 952 of SEQ ID NO: 1885561
ggaagauuaucaguaggcu

SEQ ID NO: 2351183 - RNA, 19 nt, Artificial Sequence
  Description of Artificial Sequence: Synthetic oligonucleotide
  Antisense strand to SEQ ID NO: 2351182
agccuacugauaaucuucc

SEQ ID NO: 2351184 - RNA, 19 nt, Artificial Sequence
  Description of Artificial Sequence: Synthetic oligonucleotide
  Sense strand starting at position 955 of SEQ ID NO: 1885561
agauuaucaguaggcugau

SEQ ID NO: 2351185 - RNA, 19 nt, Artificial Sequence
  Description of Artificial Sequence: Synthetic oligonucleotide
  Antisense strand to SEQ ID NO: 2351184
aucagccuacugauaaucu

SEQ ID NO: 2351186 - RNA, 19 nt, Artificial Sequence
  Description of Artificial Sequence: Synthetic oligonucleotide
  Sense strand starting at position 956 of SEQ ID NO: 1885561
gauuaucaguaggcugaua

SEQ ID NO: 2351187 - RNA, 19 nt, Artificial Sequence
  Description of Artificial Sequence: Synthetic oligonucleotide
  Antisense strand to SEQ ID NO: 2351186
uaucagccuacugauaauc

SEQ ID NO: 2351188 - RNA, 19 nt, Artificial Sequence
  Description of Artificial Sequence: Synthetic oligonucleotide
  Sense strand starting at position 958 of SEQ ID NO: 1885561
uuaucaguaggcugauauu

SEQ ID NO: 2351189 - RNA, 19 nt, Artificial Sequence
  Description of Artificial Sequence: Synthetic oligonucleotide
  Antisense strand to SEQ ID NO: 2351188
aauaucagccuacugauaa

SEQ ID NO: 2351190 - RNA, 19 nt, Artificial Sequence
  Description of Artificial Sequence: Synthetic oligonucleotide
  Sense strand starting at position 1167 of SEQ ID NO: 1885561
uuuaaagggccauguuuaa

SEQ ID NO: 2351191 - RNA, 19 nt, Artificial Sequence
  Description of Artificial Sequence: Synthetic oligonucleotide
  Antisense strand to SEQ ID NO: 2351190
uuaaacauggcccuuuaaa

SEQ ID NO: 2351192 - RNA, 19 nt, Artificial Sequence
  Description of Artificial Sequence: Synthetic oligonucleotide
  Sense strand starting at position 1216 of SEQ ID NO: 1885561
cggaucucaucaucuucua

SEQ ID NO: 2351193 - RNA, 19 nt, Artificial Sequence
  Description of Artificial Sequence: Synthetic oligonucleotide
  Antisense strand to SEQ ID NO: 2351192
uagaagaugaugagauccg

SEQ ID NO: 2351194 - RNA, 19 nt, Artificial Sequence
  Description of Artificial Sequence: Synthetic oligonucleotide
  Sense strand starting at position 1229 of SEQ ID NO: 1885561
cuucuaaauuuagagagau

SEQ ID NO: 2351195 - RNA, 19 nt, Artificial Sequence
  Description of Artificial Sequence: Synthetic oligonucleotide
  Antisense strand to SEQ ID NO: 2351194
aucucucuaaauuuagaag

SEQ ID NO: 2351196 - RNA, 19 nt, Artificial Sequence
  Description of Artificial Sequence: Synthetic oligonucleotide
  Sense strand starting at position 1304 of SEQ ID NO: 1885561
gaguuacuaugguuacuuu

SEQ ID NO: 2351197 - RNA, 19 nt, Artificial Sequence
  Description of Artificial Sequence: Synthetic oligonucleotide
  Antisense strand to SEQ ID NO: 2351196
aaaguaaccauaguaacuc

SEQ ID NO: 2351198 - RNA, 19 nt, Artificial Sequence
  Description of Artificial Sequence: Synthetic oligonucleotide
  Sense strand starting at position 1331 of SEQ ID NO: 1885561
uugaguaacagugaacagu

SEQ ID NO: 2351199 - RNA, 19 nt, Artificial Sequence
  Description of Artificial Sequence: Synthetic oligonucleotide
  Antisense strand to SEQ ID NO: 2351198
acuguucacuguuacucaa

SEQ ID NO: 2351200 - RNA, 19 nt, Artificial Sequence
  Description of Artificial Sequence: Synthetic oligonucleotide
  Sense strand starting at position 1418 of SEQ ID NO: 1885561
ucaauuagucgagacuaca

SEQ ID NO: 2351201 - RNA, 19 nt, Artificial Sequence
  Description of Artificial Sequence: Synthetic oligonucleotide
  Antisense strand to SEQ ID NO: 2351200
uguagucucgacuaauuga

SEQ ID NO: 2351202 - RNA, 19 nt, Artificial Sequence
  Description of Artificial Sequence: Synthetic oligonucleotide
  Sense strand starting at position 1507 of SEQ ID NO: 1885561
cagcgaagucaacgggaaa

SEQ ID NO: 2351203 - RNA, 19 nt, Artificial Sequence
  Description of Artificial Sequence: Synthetic oligonucleotide
  Antisense strand to SEQ ID NO: 2351202
uuucccguugacuucgcug

SEQ ID NO: 2351204 - RNA, 19 nt, Artificial Sequence
  Description of Artificial Sequence: Synthetic oligonucleotide
  Sense strand starting at position 1722 of SEQ ID NO: 1885561
ccuucugagcucggaggaa

SEQ ID NO: 2351205 - RNA, 19 nt, Artificial Sequence
  Description of Artificial Sequence: Synthetic oligonucleotide
  Antisense strand to SEQ ID NO: 2351204
uuccuccgagcucagaagg

SEQ ID NO: 2351206 - RNA, 19 nt, Artificial Sequence
  Description of Artificial Sequence: Synthetic oligonucleotide
  Sense strand starting at position 1995 of SEQ ID NO: 1885561
gcuguucucagcucgcauu

SEQ ID NO: 2351207 - RNA, 19 nt, Artificial Sequence
  Description of Artificial Sequence: Synthetic oligonucleotide
  Antisense strand to SEQ ID NO: 2351206
aaugcgagcugagaacagc

SEQ ID NO: 2351208 - RNA, 19 nt, Artificial Sequence
  Description of Artificial Sequence: Synthetic oligonucleotide
  Sense strand starting at position 2442 of SEQ ID NO: 1885561
ugacccuuccucugggaua

SEQ ID NO: 2351209 - RNA, 19 nt, Artificial Sequence
  Description of Artificial Sequence: Synthetic oligonucleotide
  Antisense strand to SEQ ID NO: 2351208
uaucccagaggaaggguca

SEQ ID NO: 2351210 - RNA, 19 nt, Artificial Sequence
  Description of Artificial Sequence: Synthetic oligonucleotide
  Sense strand starting at position 2608 of SEQ ID NO: 1885561
guuugagcacuugauagau

SEQ ID NO: 2351211 - RNA, 19 nt, Artificial Sequence
  Description of Artificial Sequence: Synthetic oligonucleotide
  Antisense strand to SEQ ID NO: 2351210
aucuaucaagugcucaaac

SEQ ID NO: 2351212 - RNA, 19 nt, Artificial Sequence
  Description of Artificial Sequence: Synthetic oligonucleotide
  Sense strand starting at position 2889 of SEQ ID NO: 1885561
ggagacuagaggugugcau

SEQ ID NO: 2351213 - RNA, 19 nt, Artificial Sequence
  Description of Artificial Sequence: Synthetic oligonucleotide
  Antisense strand to SEQ ID NO: 2351212
augcacaccucuagucucc

SEQ ID NO: 2351214 - RNA, 19 nt, Artificial Sequence
  Description of Artificial Sequence: Synthetic oligonucleotide
  Sense strand starting at position 2893 of SEQ ID NO: 1885561
acuagaggugugcaugauu

SEQ ID NO: 2351215 - RNA, 19 nt, Artificial Sequence
  Description of Artificial Sequence: Synthetic oligonucleotide
  Antisense strand to SEQ ID NO: 2351214
aaucaugcacaccucuagu

SEQ ID NO: 2351216 - RNA, 19 nt, Artificial Sequence
  Description of Artificial Sequence: Synthetic oligonucleotide
  Sense strand starting at position 2898 of SEQ ID NO: 1885561
aggugugcaugauuuagca

SEQ ID NO: 2351217 - RNA, 19 nt, Artificial Sequence
  Description of Artificial Sequence: Synthetic oligonucleotide
  Antisense strand to SEQ ID NO: 2351216
ugcuaaaucaugcacaccu

SEQ ID NO: 2351218 - RNA, 19 nt, Artificial Sequence
  Description of Artificial Sequence: Synthetic oligonucleotide
  Sense strand starting at position 2902 of SEQ ID NO: 1885561
gugcaugauuuagcacuuu

SEQ ID NO: 2351219 - RNA, 19 nt, Artificial Sequence
  Description of Artificial Sequence: Synthetic oligonucleotide
  Antisense strand to SEQ ID NO: 2351218
aaagugcuaaaucaugcac

SEQ ID NO: 2351220 - RNA, 19 nt, Artificial Sequence
  Description of Artificial Sequence: Synthetic oligonucleotide
  Sense strand starting at position 2918 of SEQ ID NO: 1885561
uuuaguacacuuuagugua

SEQ ID NO: 2351221 - RNA, 19 nt, Artificial Sequence
  Description of Artificial Sequence: Synthetic oligonucleotide
  Antisense strand to SEQ ID NO: 2351220
uacacuaaaguguacuaaa

SEQ ID NO: 2351222 - RNA, 19 nt, Artificial Sequence
  Description of Artificial Sequence: Synthetic oligonucleotide
  Sense strand starting at position 3139 of SEQ ID NO: 1885561
gagaaauguuacccaaagc

SEQ ID NO: 2351223 - RNA, 19 nt, Artificial Sequence
  Description of Artificial Sequence: Synthetic oligonucleotide
  Antisense strand to SEQ ID NO: 2351222
gcuuuggguaacauuucuc

SEQ ID NO: 2351224 - RNA, 19 nt, Artificial Sequence
  Description of Artificial Sequence: Synthetic oligonucleotide
  Sense strand starting at position 3169 of SEQ ID NO: 1885561
agagaaucgcacugaagaa

SEQ ID NO: 2351225 - RNA, 19 nt, Artificial Sequence
  Description of Artificial Sequence: Synthetic oligonucleotide
  Antisense strand to SEQ ID NO: 2351224
uucuucagugcgauucucu

SEQ ID NO: 2351226 - RNA, 19 nt, Artificial Sequence
  Description of Artificial Sequence: Synthetic oligonucleotide
  Sense strand starting at position 3254 of SEQ ID NO: 1885561
gggaaucaauuagaaagaa

SEQ ID NO: 2351227 - RNA, 19 nt, Artificial Sequence
  Description of Artificial Sequence: Synthetic oligonucleotide
  Antisense strand to SEQ ID NO: 2351226
uucuuucuaauugauuccc

SEQ ID NO: 2351228 - RNA, 19 nt, Artificial Sequence
  Description of Artificial Sequence: Synthetic oligonucleotide
  Sense strand starting at position 3300 of SEQ ID NO: 1885561
ggcugcugugcaguguuau

SEQ ID NO: 2351229 - RNA, 19 nt, Artificial Sequence
  Description of Artificial Sequence: Synthetic oligonucleotide
  Antisense strand to SEQ ID NO: 2351228
auaacacugcacagcagcc

SEQ ID NO: 2351230 - RNA, 19 nt, Artificial Sequence
  Description of Artificial Sequence: Synthetic oligonucleotide
  Sense strand starting at position 3415 of SEQ ID NO: 1885561
acugaaagccuguggcaaa

SEQ ID NO: 2351231 - RNA, 19 nt, Artificial Sequence
  Description of Artificial Sequence: Synthetic oligonucleotide
  Antisense strand to SEQ ID NO: 2351230
uuugccacaggcuuucagu

SEQ ID NO: 2351232 - RNA, 19 nt, Artificial Sequence
  Description of Artificial Sequence: Synthetic oligonucleotide
  Sense strand starting at position 3479 of SEQ ID NO: 1885561
aaucgaacugucugaagaa

SEQ ID NO: 2351233 - RNA, 19 nt, Artificial Sequence
  Description of Artificial Sequence: Synthetic oligonucleotide
  Antisense strand to SEQ ID NO: 2351232
uucuucagacaguucgauu

SEQ ID NO: 2351234 - RNA, 19 nt, Artificial Sequence
  Description of Artificial Sequence: Synthetic oligonucleotide
  Sense strand starting at position 3508 of SEQ ID NO: 1885561
gccacaguggguugaagau

SEQ ID NO: 2351235 - RNA, 19 nt, Artificial Sequence
  Description of Artificial Sequence: Synthetic oligonucleotide
  Antisense strand to SEQ ID NO: 2351234
aucuucaacccacuguggc

SEQ ID NO: 2351236 - RNA, 19 nt, Artificial Sequence
  Description of Artificial Sequence: Synthetic oligonucleotide
  Sense strand starting at position 3541 of SEQ ID NO: 1885561
ucagcuaucggguaugaca

SEQ ID NO: 2351237 - RNA, 19 nt, Artificial Sequence
  Description of Artificial Sequence: Synthetic oligonucleotide
  Antisense strand to SEQ ID NO: 2351236
ugucauacccgauagcuga

SEQ ID NO: 2351238 - RNA, 19 nt, Artificial Sequence
  Description of Artificial Sequence: Synthetic oligonucleotide
  Sense strand starting at position 3562 of SEQ ID NO: 1885561
gggcuuugagacggguaca

SEQ ID NO: 2351239 - RNA, 19 nt, Artificial Sequence
  Description of Artificial Sequence: Synthetic oligonucleotide
  Antisense strand to SEQ ID NO: 2351238
uguacccgucucaaagccc

SEQ ID NO: 2351240 - RNA, 19 nt, Artificial Sequence
  Description of Artificial Sequence: Synthetic oligonucleotide
  Sense strand starting at position 3565 of SEQ ID NO: 1885561
cuuugagacggguacacuu

SEQ ID NO: 2351241 - RNA, 19 nt, Artificial Sequence
  Description of Artificial Sequence: Synthetic oligonucleotide
  Antisense strand to SEQ ID NO: 2351240
aaguguacccgucucaaag

SEQ ID NO: 2351242 - RNA, 19 nt, Artificial Sequence
  Description of Artificial Sequence: Synthetic oligonucleotide
  Sense strand starting at position 3595 of SEQ ID NO: 1885561
gaugguccuagccagaagu

SEQ ID NO: 2351243 - RNA, 19 nt, Artificial Sequence
  Description of Artificial Sequence: Synthetic oligonucleotide
  Antisense strand to SEQ ID NO: 2351242
acuucuggcuaggaccauc

SEQ ID NO: 2351244 - RNA, 19 nt, Artificial Sequence
  Description of Artificial Sequence: Synthetic oligonucleotide
  Sense strand starting at position 3660 of SEQ ID NO: 1885561
cugauaucucaaugagccu

SEQ ID NO: 2351245 - RNA, 19 nt, Artificial Sequence
  Description of Artificial Sequence: Synthetic oligonucleotide
  Antisense strand to SEQ ID NO: 2351244
aggcucauugagauaucag

SEQ ID NO: 2351246 - RNA, 19 nt, Artificial Sequence
  Description of Artificial Sequence: Synthetic oligonucleotide
  Sense strand starting at position 3774 of SEQ ID NO: 1885561
gucucacuugccuaaggua

SEQ ID NO: 2351247 - RNA, 19 nt, Artificial Sequence
  Description of Artificial Sequence: Synthetic oligonucleotide
  Antisense strand to SEQ ID NO: 2351246
uaccuuaggcaagugagac

SEQ ID NO: 2351248 - RNA, 19 nt, Artificial Sequence
  Description of Artificial Sequence: Synthetic oligonucleotide
  Sense strand starting at position 232 of SEQ ID NO: 1885562
aaaggcuuugguuaaauca

SEQ ID NO: 2351249 - RNA, 19 nt, Artificial Sequence
  Description of Artificial Sequence: Synthetic oligonucleotide
  Antisense strand to SEQ ID NO: 2351248
ugauuuaaccaaagccuuu

SEQ ID NO: 2351250 - RNA, 19 nt, Artificial Sequence
  Description of Artificial Sequence: Synthetic oligonucleotide
  Sense strand starting at position 507 of SEQ ID NO: 1885562
aucaauuauggucauagua

SEQ ID NO: 2351251 - RNA, 19 nt, Artificial Sequence
  Description of Artificial Sequence: Synthetic oligonucleotide
  Antisense strand to SEQ ID NO: 2351250
uacuaugaccauaauugau

SEQ ID NO: 2351252 - RNA, 19 nt, Artificial Sequence
  Description of Artificial Sequence: Synthetic oligonucleotide
  Sense strand starting at position 517 of SEQ ID NO: 1885562
gucauaguauuucuauagu

SEQ ID NO: 2351253 - RNA, 19 nt, Artificial Sequence
  Description of Artificial Sequence: Synthetic oligonucleotide
  Antisense strand to SEQ ID NO: 2351252
acuauagaaauacuaugac

SEQ ID NO: 2351254 - RNA, 19 nt, Artificial Sequence
  Description of Artificial Sequence: Synthetic oligonucleotide
  Sense strand starting at position 616 of SEQ ID NO: 1885562
aggguacaauucuuuaauu

SEQ ID NO: 2351255 - RNA, 19 nt, Artificial Sequence
  Description of Artificial Sequence: Synthetic oligonucleotide
  Antisense strand to SEQ ID NO: 2351254
aauuaaagaauuguacccu

SEQ ID NO: 2351256 - RNA, 19 nt, Artificial Sequence
  Description of Artificial Sequence: Synthetic oligonucleotide
  Sense strand starting at position 617 of SEQ ID NO: 1885562
ggguacaauucuuuaauua

SEQ ID NO: 2351257 - RNA, 19 nt, Artificial Sequence
  Description of Artificial Sequence: Synthetic oligonucleotide
  Antisense strand to SEQ ID NO: 2351256
uaauuaaagaauuguaccc

SEQ ID NO: 2351258 - RNA, 19 nt, Artificial Sequence
  Description of Artificial Sequence: Synthetic oligonucleotide
  Sense strand starting at position 688 of SEQ ID NO: 1885562
ggacaucuuucuccuggga

SEQ ID NO: 2351259 - RNA, 19 nt, Artificial Sequence
  Description of Artificial Sequence: Synthetic oligonucleotide
  Antisense strand to SEQ ID NO: 2351258
ucccaggagaaagaugucc

SEQ ID NO: 2351260 - RNA, 19 nt, Artificial Sequence
  Description of Artificial Sequence: Synthetic oligonucleotide
  Sense strand starting at position 691 of SEQ ID NO: 1885562
caucuuucuccugggagag

SEQ ID NO: 2351261 - RNA, 19 nt, Artificial Sequence
  Description of Artificial Sequence: Synthetic oligonucleotide
  Antisense strand to SEQ ID NO: 2351260
cucucccaggagaaagaug

SEQ ID NO: 2351262 - RNA, 19 nt, Artificial Sequence
  Description of Artificial Sequence: Synthetic oligonucleotide
  Sense strand starting at position 758 of SEQ ID NO: 1885562
gcaucuugucaggagagag

SEQ ID NO: 2351263 - RNA, 19 nt, Artificial Sequence
  Description of Artificial Sequence: Synthetic oligonucleotide
  Antisense strand to SEQ ID NO: 2351262
cucucuccugacaagaugc

SEQ ID NO: 2351264 - RNA, 19 nt, Artificial Sequence
  Description of Artificial Sequence: Synthetic oligonucleotide
  Sense strand starting at position 903 of SEQ ID NO: 1885562
uagggaaacugucuucuua

SEQ ID NO: 2351265 - RNA, 19 nt, Artificial Sequence
  Description of Artificial Sequence: Synthetic oligonucleotide
  Antisense strand to SEQ ID NO: 2351264
uaagaagacaguuucccua

SEQ ID NO: 2351266 - RNA, 19 nt, Artificial Sequence
  Description of Artificial Sequence: Synthetic oligonucleotide
  Sense strand starting at position 905 of SEQ ID NO: 1885562
gggaaacugucuucuuaca

SEQ ID NO: 2351267 - RNA, 19 nt, Artificial Sequence
  Description of Artificial Sequence: Synthetic oligonucleotide
  Antisense strand to SEQ ID NO: 2351266
uguaagaagacaguuuccc

SEQ ID NO: 2351268 - RNA, 19 nt, Artificial Sequence
  Description of Artificial Sequence: Synthetic oligonucleotide
  Sense strand starting at position 924 of SEQ ID NO: 1885562
auggaaccuuauccugauu

SEQ ID NO: 2351269 - RNA, 19 nt, Artificial Sequence
  Description of Artificial Sequence: Synthetic oligonucleotide
  Antisense strand to SEQ ID NO: 2351268
aaucaggauaagguuccau

SEQ ID NO: 2351270 - RNA, 19 nt, Artificial Sequence
  Description of Artificial Sequence: Synthetic oligonucleotide
  Sense strand starting at position 999 of SEQ ID NO: 1885562
aggaaauuaucucugugga

SEQ ID NO: 2351271 - RNA, 19 nt, Artificial Sequence
  Description of Artificial Sequence: Synthetic oligonucleotide
  Antisense strand to SEQ ID NO: 2351270
uccacagagauaauuuccu

SEQ ID NO: 2351272 - RNA, 19 nt, Artificial Sequence
  Description of Artificial Sequence: Synthetic oligonucleotide
  Sense strand starting at position 1000 of SEQ ID NO: 1885562
ggaaauuaucucuguggau

SEQ ID NO: 2351273 - RNA, 19 nt, Artificial Sequence
  Description of Artificial Sequence: Synthetic oligonucleotide
  Antisense strand to SEQ ID NO: 2351272
auccacagagauaauuucc

SEQ ID NO: 2351274 - RNA, 19 nt, Artificial Sequence
  Description of Artificial Sequence: Synthetic oligonucleotide
  Sense strand starting at position 1001 of SEQ ID NO: 1885562
gaaauuaucucuguggaua

SEQ ID NO: 2351275 - RNA, 19 nt, Artificial Sequence
  Description of Artificial Sequence: Synthetic oligonucleotide
  Antisense strand to SEQ ID NO: 2351274
uauccacagagauaauuuc

SEQ ID NO: 2351276 - RNA, 19 nt, Artificial Sequence
  Description of Artificial Sequence: Synthetic oligonucleotide
  Sense strand starting at position 1004 of SEQ ID NO: 1885562
auuaucucuguggauacua

SEQ ID NO: 2351277 - RNA, 19 nt, Artificial Sequence
  Description of Artificial Sequence: Synthetic oligonucleotide
  Antisense strand to SEQ ID NO: 2351276
uaguauccacagagauaau

SEQ ID NO: 2351278 - RNA, 19 nt, Artificial Sequence
  Description of Artificial Sequence: Synthetic oligonucleotide
  Sense strand starting at position 1239 of SEQ ID NO: 1885562
gucagcauugauggagaga

SEQ ID NO: 2351279 - RNA, 19 nt, Artificial Sequence
  Description of Artificial Sequence: Synthetic oligonucleotide
  Antisense strand to SEQ ID NO: 2351278
ucucuccaucaaugcugac

SEQ ID NO: 2351280 - RNA, 19 nt, Artificial Sequence
  Description of Artificial Sequence: Synthetic oligonucleotide
  Sense strand starting at position 1331 of SEQ ID NO: 1885562
acaaaugcaccagggaauu

SEQ ID NO: 2351281 - RNA, 19 nt, Artificial Sequence
  Description of Artificial Sequence: Synthetic oligonucleotide
  Antisense strand to SEQ ID NO: 2351280
aauucccuggugcauuugu

SEQ ID NO: 2351282 - RNA, 19 nt, Artificial Sequence
  Description of Artificial Sequence: Synthetic oligonucleotide
  Sense strand starting at position 1359 of SEQ ID NO: 1885562
uuccuauauuuagaggaaa

SEQ ID NO: 2351283 - RNA, 19 nt, Artificial Sequence
  Description of Artificial Sequence: Synthetic oligonucleotide
  Antisense strand to SEQ ID NO: 2351282
uuuccucuaaauauaggaa

SEQ ID NO: 2351284 - RNA, 19 nt, Artificial Sequence
  Description of Artificial Sequence: Synthetic oligonucleotide
  Sense strand starting at position 1457 of SEQ ID NO: 1885562
ucagacagauggcugaaau

SEQ ID NO: 2351285 - RNA, 19 nt, Artificial Sequence
  Description of Artificial Sequence: Synthetic oligonucleotide
  Antisense strand to SEQ ID NO: 2351284
auuucagccaucugucuga

SEQ ID NO: 2351286 - RNA, 19 nt, Artificial Sequence
  Description of Artificial Sequence: Synthetic oligonucleotide
  Sense strand starting at position 1469 of SEQ ID NO: 1885562
cugaaaugauugcuaccau

SEQ ID NO: 2351287 - RNA, 19 nt, Artificial Sequence
  Description of Artificial Sequence: Synthetic oligonucleotide
  Antisense strand to SEQ ID NO: 2351286
augguagcaaucauuucag

SEQ ID NO: 2351288 - RNA, 19 nt, Artificial Sequence
  Description of Artificial Sequence: Synthetic oligonucleotide
  Sense strand starting at position 1491 of SEQ ID NO: 1885562
uugcauauugcacaaugaa

SEQ ID NO: 2351289 - RNA, 19 nt, Artificial Sequence
  Description of Artificial Sequence: Synthetic oligonucleotide
  Antisense strand to SEQ ID NO: 2351288
uucauugugcaauaugcaa

SEQ ID NO: 2351290 - RNA, 19 nt, Artificial Sequence
  Description of Artificial Sequence: Synthetic oligonucleotide
  Sense strand starting at position 1591 of SEQ ID NO: 1885562
guauccuauuacccuggaa

SEQ ID NO: 2351291 - RNA, 19 nt, Artificial Sequence
  Description of Artificial Sequence: Synthetic oligonucleotide
  Antisense strand to SEQ ID NO: 2351290
uuccaggguaauaggauac

SEQ ID NO: 2351292 - RNA, 19 nt, Artificial Sequence
  Description of Artificial Sequence: Synthetic oligonucleotide
  Sense strand starting at position 1622 of SEQ ID NO: 1885562
aauuguccugguuauagaa

SEQ ID NO: 2351293 - RNA, 19 nt, Artificial Sequence
  Description of Artificial Sequence: Synthetic oligonucleotide
  Antisense strand to SEQ ID NO: 2351292
uucuauaaccaggacaauu

SEQ ID NO: 2351294 - RNA, 19 nt, Artificial Sequence
  Description of Artificial Sequence: Synthetic oligonucleotide
  Sense strand starting at position 1940 of SEQ ID NO: 1885562
gccugaaugauggaaagcu

SEQ ID NO: 2351295 - RNA, 19 nt, Artificial Sequence
  Description of Artificial Sequence: Synthetic oligonucleotide
  Antisense strand to SEQ ID NO: 2351294
agcuuuccaucauucaggc

SEQ ID NO: 2351296 - RNA, 19 nt, Artificial Sequence
  Description of Artificial Sequence: Synthetic oligonucleotide
  Sense strand starting at position 1949 of SEQ ID NO: 1885562
auggaaagcucuuucgaaa

SEQ ID NO: 2351297 - RNA, 19 nt, Artificial Sequence
  Description of Artificial Sequence: Synthetic oligonucleotide
  Antisense strand to SEQ ID NO: 2351296
uuucgaaagagcuuuccau

SEQ ID NO: 2351298 - RNA, 19 nt, Artificial Sequence
  Description of Artificial Sequence: Synthetic oligonucleotide
  Sense strand starting at position 2026 of SEQ ID NO: 1885562
uuacguaucuauuuguaga

SEQ ID NO: 2351299 - RNA, 19 nt, Artificial Sequence
  Description of Artificial Sequence: Synthetic oligonucleotide
  Antisense strand to SEQ ID NO: 2351298
ucuacaaauagauacguaa

SEQ ID NO: 2351300 - RNA, 19 nt, Artificial Sequence
  Description of Artificial Sequence: Synthetic oligonucleotide
  Sense strand starting at position 2028 of SEQ ID NO: 1885562
acguaucuauuuguagauu

SEQ ID NO: 2351301 - RNA, 19 nt, Artificial Sequence
  Description of Artificial Sequence: Synthetic oligonucleotide
  Antisense strand to SEQ ID NO: 2351300
aaucuacaaauagauacgu

SEQ ID NO: 2351302 - RNA, 19 nt, Artificial Sequence
  Description of Artificial Sequence: Synthetic oligonucleotide
  Sense strand starting at position 2152 of SEQ ID NO: 1885562
agauuugccuaaguugcau

SEQ ID NO: 2351303 - RNA, 19 nt, Artificial Sequence
  Description of Artificial Sequence: Synthetic oligonucleotide
  Antisense strand to SEQ ID NO: 2351302
augcaacuuaggcaaaucu

SEQ ID NO: 2351304 - RNA, 19 nt, Artificial Sequence
  Description of Artificial Sequence: Synthetic oligonucleotide
  Sense strand starting at position 2358 of SEQ ID NO: 1885562
aucuguagucuggauuaau

SEQ ID NO: 2351305 - RNA, 19 nt, Artificial Sequence
  Description of Artificial Sequence: Synthetic oligonucleotide
  Antisense strand to SEQ ID NO: 2351304
auuaauccagacuacagau

SEQ ID NO: 2351306 - RNA, 19 nt, Artificial Sequence
  Description of Artificial Sequence: Synthetic oligonucleotide
  Sense strand starting at position 2361 of SEQ ID NO: 1885562
uguagucuggauuaauuga

SEQ ID NO: 2351307 - RNA, 19 nt, Artificial Sequence
  Description of Artificial Sequence: Synthetic oligonucleotide
  Antisense strand to SEQ ID NO: 2351306
ucaauuaauccagacuaca

SEQ ID NO: 2351308 - RNA, 19 nt, Artificial Sequence
  Description of Artificial Sequence: Synthetic oligonucleotide
  Sense strand starting at position 2530 of SEQ ID NO: 1885562
uggagagguuggucuuaca

SEQ ID NO: 2351309 - RNA, 19 nt, Artificial Sequence
  Description of Artificial Sequence: Synthetic oligonucleotide
  Antisense strand to SEQ ID NO: 2351308
uguaagaccaaccucucca

SEQ ID NO: 2351310 - RNA, 19 nt, Artificial Sequence
  Description of Artificial Sequence: Synthetic oligonucleotide
  Sense strand starting at position 2543 of SEQ ID NO: 1885562
cuuacauguguugaauaga

SEQ ID NO: 2351311 - RNA, 19 nt, Artificial Sequence
  Description of Artificial Sequence: Synthetic oligonucleotide
  Antisense strand to SEQ ID NO: 2351310
ucuauucaacacauguaag

SEQ ID NO: 2351312 - RNA, 19 nt, Artificial Sequence
  Description of Artificial Sequence: Synthetic oligonucleotide
  Sense strand starting at position 2714 of SEQ ID NO: 1885562
ugaacuguggauggucuaa

SEQ ID NO: 2351313 - RNA, 19 nt, Artificial Sequence
  Description of Artificial Sequence: Synthetic oligonucleotide
  Antisense strand to SEQ ID NO: 2351312
uuagaccauccacaguuca

SEQ ID NO: 2351314 - RNA, 19 nt, Artificial Sequence
  Description of Artificial Sequence: Synthetic oligonucleotide
  Sense strand starting at position 2716 of SEQ ID NO: 1885562
aacuguggauggucuaaau

SEQ ID NO: 2351315 - RNA, 19 nt, Artificial Sequence
  Description of Artificial Sequence: Synthetic oligonucleotide
  Antisense strand to SEQ ID NO: 2351314
auuuagaccauccacaguu

SEQ ID NO: 2351316 - RNA, 19 nt, Artificial Sequence
  Description of Artificial Sequence: Synthetic oligonucleotide
  Sense strand starting at position 2735 of SEQ ID NO: 1885562
ugagauguacuguaauugu

SEQ ID NO: 2351317 - RNA, 19 nt, Artificial Sequence
  Description of Artificial Sequence: Synthetic oligonucleotide
  Antisense strand to SEQ ID NO: 2351316
acaauuacaguacaucuca

SEQ ID NO: 2351318 - RNA, 19 nt, Artificial Sequence
  Description of Artificial Sequence: Synthetic oligonucleotide
  Sense strand starting at position 2893 of SEQ ID NO: 1885562
auguuuaguguggacacua

SEQ ID NO: 2351319 - RNA, 19 nt, Artificial Sequence
  Description of Artificial Sequence: Synthetic oligonucleotide
  Antisense strand to SEQ ID NO: 2351318
uaguguccacacuaaacau

SEQ ID NO: 2351320 - RNA, 19 nt, Artificial Sequence
  Description of Artificial Sequence: Synthetic oligonucleotide
  Sense strand starting at position 3069 of SEQ ID NO: 1885562
uuagcuuggagugaaacau

SEQ ID NO: 2351321 - RNA, 19 nt, Artificial Sequence
  Description of Artificial Sequence: Synthetic oligonucleotide
  Antisense strand to SEQ ID NO: 2351320
auguuucacuccaagcuaa

SEQ ID NO: 2351322 - RNA, 19 nt, Artificial Sequence
  Description of Artificial Sequence: Synthetic oligonucleotide
  Sense strand starting at position 3341 of SEQ ID NO: 1885562
ugcccauagauauggauga

SEQ ID NO: 2351323 - RNA, 19 nt, Artificial Sequence
  Description of Artificial Sequence: Synthetic oligonucleotide
  Antisense strand to SEQ ID NO: 2351322
ucauccauaucuaugggca

SEQ ID NO: 2351324 - RNA, 19 nt, Artificial Sequence
  Description of Artificial Sequence: Synthetic oligonucleotide
  Sense strand starting at position 3378 of SEQ ID NO: 1885562
cuuguaauggagugagaga

SEQ ID NO: 2351325 - RNA, 19 nt, Artificial Sequence
  Description of Artificial Sequence: Synthetic oligonucleotide
  Antisense strand to SEQ ID NO: 2351324
ucucucacuccauuacaag

SEQ ID NO: 2351326 - RNA, 19 nt, Artificial Sequence
  Description of Artificial Sequence: Synthetic oligonucleotide
  Sense strand starting at position 3452 of SEQ ID NO: 1885562
guuggugacgugagugaau

SEQ ID NO: 2351327 - RNA, 19 nt, Artificial Sequence
  Description of Artificial Sequence: Synthetic oligonucleotide
  Antisense strand to SEQ ID NO: 2351326
auucacucacgucaccaac

SEQ ID NO: 2351328 - RNA, 19 nt, Artificial Sequence
  Description of Artificial Sequence: Synthetic oligonucleotide
  Sense strand starting at position 50 of SEQ ID NO: 1885563
agagacuuauagccaauua

SEQ ID NO: 2351329 - RNA, 19 nt, Artificial Sequence
  Description of Artificial Sequence: Synthetic oligonucleotide
  Antisense strand to SEQ ID NO: 2351328
uaauuggcuauaagucucu

SEQ ID NO: 2351330 - RNA, 19 nt, Artificial Sequence
  Description of Artificial Sequence: Synthetic oligonucleotide
  Sense strand starting at position 66 of SEQ ID NO: 1885563
uuaaauauuccaggccaga

SEQ ID NO: 2351331 - RNA, 19 nt, Artificial Sequence
  Description of Artificial Sequence: Synthetic oligonucleotide
  Antisense strand to SEQ ID NO: 2351330
ucuggccuggaauauuuaa

SEQ ID NO: 2351332 - RNA, 19 nt, Artificial Sequence
  Description of Artificial Sequence: Synthetic oligonucleotide
  Sense strand starting at position 188 of SEQ ID NO: 1885563
auuuaacuucuguguguug

SEQ ID NO: 2351333 - RNA, 19 nt, Artificial Sequence
  Description of Artificial Sequence: Synthetic oligonucleotide
  Antisense strand to SEQ ID NO: 2351332
caacacacagaaguuaaau

SEQ ID NO: 2351334 - RNA, 19 nt, Artificial Sequence
  Description of Artificial Sequence: Synthetic oligonucleotide
  Sense strand starting at position 259 of SEQ ID NO: 1885563
agcauaacauuguucugaa

SEQ ID NO: 2351335 - RNA, 19 nt, Artificial Sequence
  Description of Artificial Sequence: Synthetic oligonucleotide
  Antisense strand to SEQ ID NO: 2351334
uucagaacaauguuaugcu

SEQ ID NO: 2351336 - RNA, 19 nt, Artificial Sequence
  Description of Artificial Sequence: Synthetic oligonucleotide
  Sense strand starting at position 260 of SEQ ID NO: 1885563
gcauaacauuguucugaaa

SEQ ID NO: 2351337 - RNA, 19 nt, Artificial Sequence
  Description of Artificial Sequence: Synthetic oligonucleotide
  Antisense strand to SEQ ID NO: 2351336
uuucagaacaauguuaugc

SEQ ID NO: 2351338 - RNA, 19 nt, Artificial Sequence
  Description of Artificial Sequence: Synthetic oligonucleotide
  Sense strand starting at position 342 of SEQ ID NO: 1885563
uuggucacgagguaucaua

SEQ ID NO: 2351339 - RNA, 19 nt, Artificial Sequence
  Description of Artificial Sequence: Synthetic oligonucleotide
  Antisense strand to SEQ ID NO: 2351338
uaugauaccucgugaccaa

SEQ ID NO: 2351340 - RNA, 19 nt, Artificial Sequence
  Description of Artificial Sequence: Synthetic oligonucleotide
  Sense strand starting at position 381 of SEQ ID NO: 1885563
cucuuaauuguaugggaag

SEQ ID NO: 2351341 - RNA, 19 nt, Artificial Sequence
  Description of Artificial Sequence: Synthetic oligonucleotide
  Antisense strand to SEQ ID NO: 2351340
cuucccauacaauuaagag

SEQ ID NO: 2351342 - RNA, 19 nt, Artificial Sequence
  Description of Artificial Sequence: Synthetic oligonucleotide
  Sense strand starting at position 383 of SEQ ID NO: 1885563
cuuaauuguaugggaagca

SEQ ID NO: 2351343 - RNA, 19 nt, Artificial Sequence
  Description of Artificial Sequence: Synthetic oligonucleotide
  Antisense strand to SEQ ID NO: 2351342
ugcuucccauacaauuaag

SEQ ID NO: 2351344 - RNA, 19 nt, Artificial Sequence
  Description of Artificial Sequence: Synthetic oligonucleotide
  Sense strand starting at position 436 of SEQ ID NO: 1885563
gcuacauaauagcucagaa

SEQ ID NO: 2351345 - RNA, 19 nt, Artificial Sequence
  Description of Artificial Sequence: Synthetic oligonucleotide
  Antisense strand to SEQ ID NO: 2351344
uucugagcuauuauguagc

SEQ ID NO: 2351346 - RNA, 19 nt, Artificial Sequence
  Description of Artificial Sequence: Synthetic oligonucleotide
  Sense strand starting at position 486 of SEQ ID NO: 1885563
guguauuuguacccaucuu

SEQ ID NO: 2351347 - RNA, 19 nt, Artificial Sequence
  Description of Artificial Sequence: Synthetic oligonucleotide
  Antisense strand to SEQ ID NO: 2351346
aagauggguacaaauacac

SEQ ID NO: 2351348 - RNA, 19 nt, Artificial Sequence
  Description of Artificial Sequence: Synthetic oligonucleotide
  Sense strand starting at position 679 of SEQ ID NO: 1885563
gagggaaauuugcaucuug

SEQ ID NO: 2351349 - RNA, 19 nt, Artificial Sequence
  Description of Artificial Sequence: Synthetic oligonucleotide
  Antisense strand to SEQ ID NO: 2351348
caagaugcaaauuucccuc

SEQ ID NO: 2351350 - RNA, 19 nt, Artificial Sequence
  Description of Artificial Sequence: Synthetic oligonucleotide
  Sense strand starting at position 909 of SEQ ID NO: 1885563
gcaagaauugauugccaua

SEQ ID NO: 2351351 - RNA, 19 nt, Artificial Sequence
  Description of Artificial Sequence: Synthetic oligonucleotide
  Antisense strand to SEQ ID NO: 2351350
uauggcaaucaauucuugc

SEQ ID NO: 2351352 - RNA, 19 nt, Artificial Sequence
  Description of Artificial Sequence: Synthetic oligonucleotide
  Sense strand starting at position 1364 of SEQ ID NO: 1885563
uucccugcucaugagaauu

SEQ ID NO: 2351353 - RNA, 19 nt, Artificial Sequence
  Description of Artificial Sequence: Synthetic oligonucleotide
  Antisense strand to SEQ ID NO: 2351352
aauucucaugagcagggaa

SEQ ID NO: 2351354 - RNA, 19 nt, Artificial Sequence
  Description of Artificial Sequence: Synthetic oligonucleotide
  Sense strand starting at position 1508 of SEQ ID NO: 1885563
aguaaauucuccucaggug

SEQ ID NO: 2351355 - RNA, 19 nt, Artificial Sequence
  Description of Artificial Sequence: Synthetic oligonucleotide
  Antisense strand to SEQ ID NO: 2351354
caccugaggagaauuuacu

SEQ ID NO: 2351356 - RNA, 19 nt, Artificial Sequence
  Description of Artificial Sequence: Synthetic oligonucleotide
  Sense strand starting at position 1524 of SEQ ID NO: 1885563
guggauauucucuagucca

SEQ ID NO: 2351357 - RNA, 19 nt, Artificial Sequence
  Description of Artificial Sequence: Synthetic oligonucleotide
  Antisense strand to SEQ ID NO: 2351356
uggacuagagaauauccac

SEQ ID NO: 2351358 - RNA, 19 nt, Artificial Sequence
  Description of Artificial Sequence: Synthetic oligonucleotide
  Sense strand starting at position 1542 of SEQ ID NO: 1885563
agaaguugucauugggaag

SEQ ID NO: 2351359 - RNA, 19 nt, Artificial Sequence
  Description of Artificial Sequence: Synthetic oligonucleotide
  Antisense strand to SEQ ID NO: 2351358
cuucccaaugacaacuucu

SEQ ID NO: 2351360 - RNA, 19 nt, Artificial Sequence
  Description of Artificial Sequence: Synthetic oligonucleotide
  Sense strand starting at position 1704 of SEQ ID NO: 1885563
uccauauucucuuugggaa

SEQ ID NO: 2351361 - RNA, 19 nt, Artificial Sequence
  Description of Artificial Sequence: Synthetic oligonucleotide
  Antisense strand to SEQ ID NO: 2351360
uucccaaagagaauaugga

SEQ ID NO: 2351362 - RNA, 19 nt, Artificial Sequence
  Description of Artificial Sequence: Synthetic oligonucleotide
  Sense strand starting at position 1705 of SEQ ID NO: 1885563
ccauauucucuuugggaaa

SEQ ID NO: 2351363 - RNA, 19 nt, Artificial Sequence
  Description of Artificial Sequence: Synthetic oligonucleotide
  Antisense strand to SEQ ID NO: 2351362
uuucccaaagagaauaugg

SEQ ID NO: 2351364 - RNA, 19 nt, Artificial Sequence
  Description of Artificial Sequence: Synthetic oligonucleotide
  Sense strand starting at position 1791 of SEQ ID NO: 1885563
uauggcaaugcagauguaa

SEQ ID NO: 2351365 - RNA, 19 nt, Artificial Sequence
  Description of Artificial Sequence: Synthetic oligonucleotide
  Antisense strand to SEQ ID NO: 2351364
uuacaucugcauugccaua

SEQ ID NO: 2351366 - RNA, 19 nt, Artificial Sequence
  Description of Artificial Sequence: Synthetic oligonucleotide
  Sense strand starting at position 2175 of SEQ ID NO: 1885563
agagauuuguccgaaacag

SEQ ID NO: 2351367 - RNA, 19 nt, Artificial Sequence
  Description of Artificial Sequence: Synthetic oligonucleotide
  Antisense strand to SEQ ID NO: 2351366
cuguuucggacaaaucucu

SEQ ID NO: 2351368 - RNA, 19 nt, Artificial Sequence
  Description of Artificial Sequence: Synthetic oligonucleotide
  Sense strand starting at position 2186 of SEQ ID NO: 1885563
cgaaacagugcuggauaaa

SEQ ID NO: 2351369 - RNA, 19 nt, Artificial Sequence
  Description of Artificial Sequence: Synthetic oligonucleotide
  Antisense strand to SEQ ID NO: 2351368
uuuauccagcacuguuucg

SEQ ID NO: 2351370 - RNA, 19 nt, Artificial Sequence
  Description of Artificial Sequence: Synthetic oligonucleotide
  Sense strand starting at position 2399 of SEQ ID NO: 1885563
uucguagccauuuauguga

SEQ ID NO: 2351371 - RNA, 19 nt, Artificial Sequence
  Description of Artificial Sequence: Synthetic oligonucleotide
  Antisense strand to SEQ ID NO: 2351370
ucacauaaauggcuacgaa

SEQ ID NO: 2351372 - RNA, 19 nt, Artificial Sequence
  Description of Artificial Sequence: Synthetic oligonucleotide
  Sense strand starting at position 2587 of SEQ ID NO: 1885563
cagggaacuuggucucuuu

SEQ ID NO: 2351373 - RNA, 19 nt, Artificial Sequence
  Description of Artificial Sequence: Synthetic oligonucleotide
  Antisense strand to SEQ ID NO: 2351372
aaagagaccaaguucccug

SEQ ID NO: 2351374 - RNA, 19 nt, Artificial Sequence
  Description of Artificial Sequence: Synthetic oligonucleotide
  Sense strand starting at position 2889 of SEQ ID NO: 1885563
guggcauuuaucuggguca

SEQ ID NO: 2351375 - RNA, 19 nt, Artificial Sequence
  Description of Artificial Sequence: Synthetic oligonucleotide
  Antisense strand to SEQ ID NO: 2351374
ugacccagauaaaugccac

SEQ ID NO: 2351376 - RNA, 19 nt, Artificial Sequence
  Description of Artificial Sequence: Synthetic oligonucleotide
  Sense strand starting at position 2917 of SEQ ID NO: 1885563
ucguucucucaggaauaac

SEQ ID NO: 2351377 - RNA, 19 nt, Artificial Sequence
  Description of Artificial Sequence: Synthetic oligonucleotide
  Antisense strand to SEQ ID NO: 2351376
guuauuccugagagaacga

SEQ ID NO: 2351378 - RNA, 19 nt, Artificial Sequence
  Description of Artificial Sequence: Synthetic oligonucleotide
  Sense strand starting at position 2990 of SEQ ID NO: 1885563
ugggucuugcauuaacuua

SEQ ID NO: 2351379 - RNA, 19 nt, Artificial Sequence
  Description of Artificial Sequence: Synthetic oligonucleotide
  Antisense strand to SEQ ID NO: 2351378
uaaguuaaugcaagaccca

SEQ ID NO: 2351380 - RNA, 19 nt, Artificial Sequence
  Description of Artificial Sequence: Synthetic oligonucleotide
  Sense strand starting at position 3039 of SEQ ID NO: 1885563
auuaaagauuguguccuua

SEQ ID NO: 2351381 - RNA, 19 nt, Artificial Sequence
  Description of Artificial Sequence: Synthetic oligonucleotide
  Antisense strand to SEQ ID NO: 2351380
uaaggacacaaucuuuaau

SEQ ID NO: 2351382 - RNA, 19 nt, Artificial Sequence
  Description of Artificial Sequence: Synthetic oligonucleotide
  Sense strand starting at position 3185 of SEQ ID NO: 1885563
uugacuaacucauugguaa

SEQ ID NO: 2351383 - RNA, 19 nt, Artificial Sequence
  Description of Artificial Sequence: Synthetic oligonucleotide
  Antisense strand to SEQ ID NO: 2351382
uuaccaaugaguuagucaa

SEQ ID NO: 2351384 - RNA, 19 nt, Artificial Sequence
  Description of Artificial Sequence: Synthetic oligonucleotide
  Sense strand starting at position 3186 of SEQ ID NO: 1885563
ugacuaacucauugguaac

SEQ ID NO: 2351385 - RNA, 19 nt, Artificial Sequence
  Description of Artificial Sequence: Synthetic oligonucleotide
  Antisense strand to SEQ ID NO: 2351384
guuaccaaugaguuaguca

SEQ ID NO: 2351386 - RNA, 19 nt, Artificial Sequence
  Description of Artificial Sequence: Synthetic oligonucleotide
  Sense strand starting at position 3208 of SEQ ID NO: 1885563
aggucuaagagguaaguuu

SEQ ID NO: 2351387 - RNA, 19 nt, Artificial Sequence
  Description of Artificial Sequence: Synthetic oligonucleotide
  Antisense strand to SEQ ID NO: 2351386
aaacuuaccucuuagaccu

SEQ ID NO: 2351388 - RNA, 19 nt, Artificial Sequence
  Description of Artificial Sequence: Synthetic oligonucleotide
  Sense strand starting at position 3352 of SEQ ID NO: 1885563
agcuauugcagauaacgau

SEQ ID NO: 2351389 - RNA, 19 nt, Artificial Sequence
  Description of Artificial Sequence: Synthetic oligonucleotide
  Antisense strand to SEQ ID NO: 2351388
aucguuaucugcaauagcu

SEQ ID NO: 2351390 - RNA, 19 nt, Artificial Sequence
  Description of Artificial Sequence: Synthetic oligonucleotide
  Sense strand starting at position 3436 of SEQ ID NO: 1885563
gaacuaaugcccugggacu

SEQ ID NO: 2351391 - RNA, 19 nt, Artificial Sequence
  Description of Artificial Sequence: Synthetic oligonucleotide
  Antisense strand to SEQ ID NO: 2351390
agucccagggcauuaguuc

SEQ ID NO: 2351392 - RNA, 19 nt, Artificial Sequence
  Description of Artificial Sequence: Synthetic oligonucleotide
  Sense strand starting at position 3438 of SEQ ID NO: 1885563
acuaaugcccugggacuau

SEQ ID NO: 2351393 - RNA, 19 nt, Artificial Sequence
  Description of Artificial Sequence: Synthetic oligonucleotide
  Antisense strand to SEQ ID NO: 2351392
auagucccagggcauuagu

SEQ ID NO: 2351394 - RNA, 19 nt, Artificial Sequence
  Description of Artificial Sequence: Synthetic oligonucleotide
  Sense strand starting at position 3447 of SEQ ID NO: 1885563
cugggacuaugaguaugau

SEQ ID NO: 2351395 - RNA, 19 nt, Artificial Sequence
  Description of Artificial Sequence: Synthetic oligonucleotide
  Antisense strand to SEQ ID NO: 2351394
aucauacucauagucccag

SEQ ID NO: 2351396 - RNA, 19 nt, Artificial Sequence
  Description of Artificial Sequence: Synthetic oligonucleotide
  Sense strand starting at position 3524 of SEQ ID NO: 1885563
gcucuuuaagauggguaaa

SEQ ID NO: 2351397 - RNA, 19 nt, Artificial Sequence
  Description of Artificial Sequence: Synthetic oligonucleotide
  Antisense strand to SEQ ID NO: 2351396
uuuacccaucuuaaagagc

SEQ ID NO: 2351398 - RNA, 19 nt, Artificial Sequence
  Description of Artificial Sequence: Synthetic oligonucleotide
  Sense strand starting at position 3526 of SEQ ID NO: 1885563
ucuuuaagauggguaaaca

SEQ ID NO: 2351399 - RNA, 19 nt, Artificial Sequence
  Description of Artificial Sequence: Synthetic oligonucleotide
  Antisense strand to SEQ ID NO: 2351398
uguuuacccaucuuaaaga

SEQ ID NO: 2351400 - RNA, 19 nt, Artificial Sequence
  Description of Artificial Sequence: Synthetic oligonucleotide
  Sense strand starting at position 3546 of SEQ ID NO: 1885563
guggccacucaauaaucaa

SEQ ID NO: 2351401 - RNA, 19 nt, Artificial Sequence
  Description of Artificial Sequence: Synthetic oligonucleotide
  Antisense strand to SEQ ID NO: 2351400
uugauuauugaguggccac

SEQ ID NO: 2351402 - RNA, 19 nt, Artificial Sequence
  Description of Artificial Sequence: Synthetic oligonucleotide
  Sense strand starting at position 3649 of SEQ ID NO: 1885563
cugaaauggucuccaaacu

SEQ ID NO: 2351403 - RNA, 19 nt, Artificial Sequence
  Description of Artificial Sequence: Synthetic oligonucleotide
  Antisense strand to SEQ ID NO: 2351402
aguuuggagaccauuucag

SEQ ID NO: 2351404 - RNA, 19 nt, Artificial Sequence
  Description of Artificial Sequence: Synthetic oligonucleotide
  Sense strand starting at position 3800 of SEQ ID NO: 1885563
uguaauguagcauaauaug

SEQ ID NO: 2351405 - RNA, 19 nt, Artificial Sequence
  Description of Artificial Sequence: Synthetic oligonucleotide
  Antisense strand to SEQ ID NO: 2351404
cauauuaugcuacauuaca

SEQ ID NO: 2351406 - RNA, 19 nt, Artificial Sequence
  Description of Artificial Sequence: Synthetic oligonucleotide
  Sense strand starting at position 3808 of SEQ ID NO: 1885563
agcauaauaugacuuuaag

SEQ ID NO: 2351407 - RNA, 19 nt, Artificial Sequence
  Description of Artificial Sequence: Synthetic oligonucleotide
  Antisense strand to SEQ ID NO: 2351406
cuuaaagucauauuaugcu

SEQ ID NO: 2351408 - RNA, 19 nt, Artificial Sequence
  Description of Artificial Sequence: Synthetic oligonucleotide
  Sense strand starting at position 6 of SEQ ID NO: 1885564
aguacaagcucuuuaucag

SEQ ID NO: 2351409 - RNA, 19 nt, Artificial Sequence
  Description of Artificial Sequence: Synthetic oligonucleotide
  Antisense strand to SEQ ID NO: 2351408
cugauaaagagcuuguacu

SEQ ID NO: 2351410 - RNA, 19 nt, Artificial Sequence
  Description of Artificial Sequence: Synthetic oligonucleotide
  Sense strand starting at position 7 of SEQ ID NO: 1885564
guacaagcucuuuaucaga

SEQ ID NO: 2351411 - RNA, 19 nt, Artificial Sequence
  Description of Artificial Sequence: Synthetic oligonucleotide
  Antisense strand to SEQ ID NO: 2351410
ucugauaaagagcuuguac

SEQ ID NO: 2351412 - RNA, 19 nt, Artificial Sequence
  Description of Artificial Sequence: Synthetic oligonucleotide
  Sense strand starting at position 160 of SEQ ID NO: 1885564
cuguuaaugcuguacuuua

SEQ ID NO: 2351413 - RNA, 19 nt, Artificial Sequence
  Description of Artificial Sequence: Synthetic oligonucleotide
  Antisense strand to SEQ ID NO: 2351412
uaaaguacagcauuaacag

SEQ ID NO: 2351414 - RNA, 19 nt, Artificial Sequence
  Description of Artificial Sequence: Synthetic oligonucleotide
  Sense strand starting at position 196 of SEQ ID NO: 1885564
cuagguaauguagauuguu

SEQ ID NO: 2351415 - RNA, 19 nt, Artificial Sequence
  Description of Artificial Sequence: Synthetic oligonucleotide
  Antisense strand to SEQ ID NO: 2351414
aacaaucuacauuaccuag

SEQ ID NO: 2351416 - RNA, 19 nt, Artificial Sequence
  Description of Artificial Sequence: Synthetic oligonucleotide
  Sense strand starting at position 204 of SEQ ID NO: 1885564
uguagauuguuguccuaug

SEQ ID NO: 2351417 - RNA, 19 nt, Artificial Sequence
  Description of Artificial Sequence: Synthetic oligonucleotide
  Antisense strand to SEQ ID NO: 2351416
cauaggacaacaaucuaca

SEQ ID NO: 2351418 - RNA, 19 nt, Artificial Sequence
  Description of Artificial Sequence: Synthetic oligonucleotide
  Sense strand starting at position 205 of SEQ ID NO: 1885564
guagauuguuguccuaugu

SEQ ID NO: 2351419 - RNA, 19 nt, Artificial Sequence
  Description of Artificial Sequence: Synthetic oligonucleotide
  Antisense strand to SEQ ID NO: 2351418
acauaggacaacaaucuac

SEQ ID NO: 2351420 - RNA, 19 nt, Artificial Sequence
  Description of Artificial Sequence: Synthetic oligonucleotide
  Sense strand starting at position 282 of SEQ ID NO: 1885564
ugacccuauuuguguaagu

SEQ ID NO: 2351421 - RNA, 19 nt, Artificial Sequence
  Description of Artificial Sequence: Synthetic oligonucleotide
  Antisense strand to SEQ ID NO: 2351420
acuuacacaaauaggguca

SEQ ID NO: 2351422 - RNA, 19 nt, Artificial Sequence
  Description of Artificial Sequence: Synthetic oligonucleotide
  Sense strand starting at position 319 of SEQ ID NO: 1885564
uuguguuccagugaucggu

SEQ ID NO: 2351423 - RNA, 19 nt, Artificial Sequence
  Description of Artificial Sequence: Synthetic oligonucleotide
  Antisense strand to SEQ ID NO: 2351422
accgaucacuggaacacaa

SEQ ID NO: 2351424 - RNA, 19 nt, Artificial Sequence
  Description of Artificial Sequence: Synthetic oligonucleotide
  Sense strand starting at position 321 of SEQ ID NO: 1885564
guguuccagugaucgguau

SEQ ID NO: 2351425 - RNA, 19 nt, Artificial Sequence
  Description of Artificial Sequence: Synthetic oligonucleotide
  Antisense strand to SEQ ID NO: 2351424
auaccgaucacuggaacac

SEQ ID NO: 2351426 - RNA, 19 nt, Artificial Sequence
  Description of Artificial Sequence: Synthetic oligonucleotide
  Sense strand starting at position 322 of SEQ ID NO: 1885564
uguuccagugaucgguauu

SEQ ID NO: 2351427 - RNA, 19 nt, Artificial Sequence
  Description of Artificial Sequence: Synthetic oligonucleotide
  Antisense strand to SEQ ID NO: 2351426
aauaccgaucacuggaaca

SEQ ID NO: 2351428 - RNA, 19 nt, Artificial Sequence
  Description of Artificial Sequence: Synthetic oligonucleotide
  Sense strand starting at position 323 of SEQ ID NO: 1885564
guuccagugaucgguauuu

SEQ ID NO: 2351429 - RNA, 19 nt, Artificial Sequence
  Description of Artificial Sequence: Synthetic oligonucleotide
  Antisense strand to SEQ ID NO: 2351428
aaauaccgaucacuggaac

SEQ ID NO: 2351430 - RNA, 19 nt, Artificial Sequence
  Description of Artificial Sequence: Synthetic oligonucleotide
  Sense strand starting at position 409 of SEQ ID NO: 1885564
auaggagucuugcaaauuu

SEQ ID NO: 2351431 - RNA, 19 nt, Artificial Sequence
  Description of Artificial Sequence: Synthetic oligonucleotide
  Antisense strand to SEQ ID NO: 2351430
aaauuugcaagacuccuau

SEQ ID NO: 2351432 - RNA, 19 nt, Artificial Sequence
  Description of Artificial Sequence: Synthetic oligonucleotide
  Sense strand starting at position 726 of SEQ ID NO: 1885564
uuucauugugucggccaga

SEQ ID NO: 2351433 - RNA, 19 nt, Artificial Sequence
  Description of Artificial Sequence: Synthetic oligonucleotide
  Antisense strand to SEQ ID NO: 2351432
ucuggccgacacaaugaaa

SEQ ID NO: 2351434 - RNA, 19 nt, Artificial Sequence
  Description of Artificial Sequence: Synthetic oligonucleotide
  Sense strand starting at position 731 of SEQ ID NO: 1885564
uugugucggccagacugau

SEQ ID NO: 2351435 - RNA, 19 nt, Artificial Sequence
  Description of Artificial Sequence: Synthetic oligonucleotide
  Antisense strand to SEQ ID NO: 2351434
aucagucuggccgacacaa

SEQ ID NO: 2351436 - RNA, 19 nt, Artificial Sequence
  Description of Artificial Sequence: Synthetic oligonucleotide
  Sense strand starting at position 737 of SEQ ID NO: 1885564
cggccagacugaucuggaa

SEQ ID NO: 2351437 - RNA, 19 nt, Artificial Sequence
  Description of Artificial Sequence: Synthetic oligonucleotide
  Antisense strand to SEQ ID NO: 2351436
uuccagaucagucuggccg

SEQ ID NO: 2351438 - RNA, 19 nt, Artificial Sequence
  Description of Artificial Sequence: Synthetic oligonucleotide
  Sense strand starting at position 785 of SEQ ID NO: 1885564
ccucucaucuugcugggau

SEQ ID NO: 2351439 - RNA, 19 nt, Artificial Sequence
  Description of Artificial Sequence: Synthetic oligonucleotide
  Antisense strand to SEQ ID NO: 2351438
aucccagcaagaugagagg

SEQ ID NO: 2351440 - RNA, 19 nt, Artificial Sequence
  Description of Artificial Sequence: Synthetic oligonucleotide
  Sense strand starting at position 1014 of SEQ ID NO: 1885564
aacagaguauguucucuga

SEQ ID NO: 2351441 - RNA, 19 nt, Artificial Sequence
  Description of Artificial Sequence: Synthetic oligonucleotide
  Antisense strand to SEQ ID NO: 2351440
ucagagaacauacucuguu

SEQ ID NO: 2351442 - RNA, 19 nt, Artificial Sequence
  Description of Artificial Sequence: Synthetic oligonucleotide
  Sense strand starting at position 1029 of SEQ ID NO: 1885564
cugaccaugugggaauuaa

SEQ ID NO: 2351443 - RNA, 19 nt, Artificial Sequence
  Description of Artificial Sequence: Synthetic oligonucleotide
  Antisense strand to SEQ ID NO: 2351442
uuaauucccacauggucag

SEQ ID NO: 2351444 - RNA, 19 nt, Artificial Sequence
  Description of Artificial Sequence: Synthetic oligonucleotide
  Sense strand starting at position 1114 of SEQ ID NO: 1885564
ucuaaauugccaugaguca

SEQ ID NO: 2351445 - RNA, 19 nt, Artificial Sequence
  Description of Artificial Sequence: Synthetic oligonucleotide
  Antisense strand to SEQ ID NO: 2351444
ugacucauggcaauuuaga

SEQ ID NO: 2351446 - RNA, 19 nt, Artificial Sequence
  Description of Artificial Sequence: Synthetic oligonucleotide
  Sense strand starting at position 1115 of SEQ ID NO: 1885564
cuaaauugccaugagucaa

SEQ ID NO: 2351447 - RNA, 19 nt, Artificial Sequence
  Description of Artificial Sequence: Synthetic oligonucleotide
  Antisense strand to SEQ ID NO: 2351446
uugacucauggcaauuuag

SEQ ID NO: 2351448 - RNA, 19 nt, Artificial Sequence
  Description of Artificial Sequence: Synthetic oligonucleotide
  Sense strand starting at position 1148 of SEQ ID NO: 1885564
agaaaucaguauuaggaaa

SEQ ID NO: 2351449 - RNA, 19 nt, Artificial Sequence
  Description of Artificial Sequence: Synthetic oligonucleotide
  Antisense strand to SEQ ID NO: 2351448
uuuccuaauacugauuucu

SEQ ID NO: 2351450 - RNA, 19 nt, Artificial Sequence
  Description of Artificial Sequence: Synthetic oligonucleotide
  Sense strand starting at position 1218 of SEQ ID NO: 1885564
gaagcuaaaguguauacua

SEQ ID NO: 2351451 - RNA, 19 nt, Artificial Sequence
  Description of Artificial Sequence: Synthetic oligonucleotide
  Antisense strand to SEQ ID NO: 2351450
uaguauacacuuuagcuuc

SEQ ID NO: 2351452 - RNA, 19 nt, Artificial Sequence
  Description of Artificial Sequence: Synthetic oligonucleotide
  Sense strand starting at position 1220 of SEQ ID NO: 1885564
agcuaaaguguauacuaca

SEQ ID NO: 2351453 - RNA, 19 nt, Artificial Sequence
  Description of Artificial Sequence: Synthetic oligonucleotide
  Antisense strand to SEQ ID NO: 2351452
uguaguauacacuuuagcu

SEQ ID NO: 2351454 - RNA, 19 nt, Artificial Sequence
  Description of Artificial Sequence: Synthetic oligonucleotide
  Sense strand starting at position 1225 of SEQ ID NO: 1885564
aaguguauacuacaaggua

SEQ ID NO: 2351455 - RNA, 19 nt, Artificial Sequence
  Description of Artificial Sequence: Synthetic oligonucleotide
  Antisense strand to SEQ ID NO: 2351454
uaccuuguaguauacacuu

SEQ ID NO: 2351456 - RNA, 19 nt, Artificial Sequence
  Description of Artificial Sequence: Synthetic oligonucleotide
  Sense strand starting at position 1228 of SEQ ID NO: 1885564
uguauacuacaagguaauu

SEQ ID NO: 2351457 - RNA, 19 nt, Artificial Sequence
  Description of Artificial Sequence: Synthetic oligonucleotide
  Antisense strand to SEQ ID NO: 2351456
aauuaccuuguaguauaca

SEQ ID NO: 2351458 - RNA, 19 nt, Artificial Sequence
  Description of Artificial Sequence: Synthetic oligonucleotide
  Sense strand starting at position 1369 of SEQ ID NO: 1885564
aguaaagaaugucaacaaa

SEQ ID NO: 2351459 - RNA, 19 nt, Artificial Sequence
  Description of Artificial Sequence: Synthetic oligonucleotide
  Antisense strand to SEQ ID NO: 2351458
uuuguugacauucuuuacu

SEQ ID NO: 2351460 - RNA, 19 nt, Artificial Sequence
  Description of Artificial Sequence: Synthetic oligonucleotide
  Sense strand starting at position 1421 of SEQ ID NO: 1885564
uuuguaauccucuggaaag

SEQ ID NO: 2351461 - RNA, 19 nt, Artificial Sequence
  Description of Artificial Sequence: Synthetic oligonucleotide
  Antisense strand to SEQ ID NO: 2351460
cuuuccagaggauuacaaa

SEQ ID NO: 2351462 - RNA, 19 nt, Artificial Sequence
  Description of Artificial Sequence: Synthetic oligonucleotide
  Sense strand starting at position 1470 of SEQ ID NO: 1885564
ugaaauaauggaugucauu

SEQ ID NO: 2351463 - RNA, 19 nt, Artificial Sequence
  Description of Artificial Sequence: Synthetic oligonucleotide
  Antisense strand to SEQ ID NO: 2351462
aaugacauccauuauuuca

SEQ ID NO: 2351464 - RNA, 19 nt, Artificial Sequence
  Description of Artificial Sequence: Synthetic oligonucleotide
  Sense strand starting at position 1521 of SEQ ID NO: 1885564
aauaauucggugugaauaa

SEQ ID NO: 2351465 - RNA, 19 nt, Artificial Sequence
  Description of Artificial Sequence: Synthetic oligonucleotide
  Antisense strand to SEQ ID NO: 2351464
uuauucacaccgaauuauu

SEQ ID NO: 2351466 - RNA, 19 nt, Artificial Sequence
  Description of Artificial Sequence: Synthetic oligonucleotide
  Sense strand starting at position 1531 of SEQ ID NO: 1885564
ugugaauaaguuugacaac

SEQ ID NO: 2351467 - RNA, 19 nt, Artificial Sequence
  Description of Artificial Sequence: Synthetic oligonucleotide
  Antisense strand to SEQ ID NO: 2351466
guugucaaacuuauucaca

SEQ ID NO: 2351468 - RNA, 19 nt, Artificial Sequence
  Description of Artificial Sequence: Synthetic oligonucleotide
  Sense strand starting at position 1537 of SEQ ID NO: 1885564
uaaguuugacaacgugaau

SEQ ID NO: 2351469 - RNA, 19 nt, Artificial Sequence
  Description of Artificial Sequence: Synthetic oligonucleotide
  Antisense strand to SEQ ID NO: 2351468
auucacguugucaaacuua

SEQ ID NO: 2351470 - RNA, 19 nt, Artificial Sequence
  Description of Artificial Sequence: Synthetic oligonucleotide
  Sense strand starting at position 1589 of SEQ ID NO: 1885564
agacguaauuggcacaaga

SEQ ID NO: 2351471 - RNA, 19 nt, Artificial Sequence
  Description of Artificial Sequence: Synthetic oligonucleotide
  Antisense strand to SEQ ID NO: 2351470
ucuugugccaauuacgucu

SEQ ID NO: 2351472 - RNA, 19 nt, Artificial Sequence
  Description of Artificial Sequence: Synthetic oligonucleotide
  Sense strand starting at position 1591 of SEQ ID NO: 1885564
acguaauuggcacaagaca

SEQ ID NO: 2351473 - RNA, 19 nt, Artificial Sequence
  Description of Artificial Sequence: Synthetic oligonucleotide
  Antisense strand to SEQ ID NO: 2351472
ugucuugugccaauuacgu

SEQ ID NO: 2351474 - RNA, 19 nt, Artificial Sequence
  Description of Artificial Sequence: Synthetic oligonucleotide
  Sense strand starting at position 1663 of SEQ ID NO: 1885564
ggaaucuucuugcaaagau

SEQ ID NO: 2351475 - RNA, 19 nt, Artificial Sequence
  Description of Artificial Sequence: Synthetic oligonucleotide
  Antisense strand to SEQ ID NO: 2351474
aucuuugcaagaagauucc

SEQ ID NO: 2351476 - RNA, 19 nt, Artificial Sequence
  Description of Artificial Sequence: Synthetic oligonucleotide
  Sense strand starting at position 1677 of SEQ ID NO: 1885564
aagauaacucuaggacugu

SEQ ID NO: 2351477 - RNA, 19 nt, Artificial Sequence
  Description of Artificial Sequence: Synthetic oligonucleotide
  Antisense strand to SEQ ID NO: 2351476
acaguccuagaguuaucuu

SEQ ID NO: 2351478 - RNA, 19 nt, Artificial Sequence
  Description of Artificial Sequence: Synthetic oligonucleotide
  Sense strand starting at position 1678 of SEQ ID NO: 1885564
agauaacucuaggacuguu

SEQ ID NO: 2351479 - RNA, 19 nt, Artificial Sequence
  Description of Artificial Sequence: Synthetic oligonucleotide
  Antisense strand to SEQ ID NO: 2351478
aacaguccuagaguuaucu

SEQ ID NO: 2351480 - RNA, 19 nt, Artificial Sequence
  Description of Artificial Sequence: Synthetic oligonucleotide
  Sense strand starting at position 1794 of SEQ ID NO: 1885564
aggcaaguaugucuuugau

SEQ ID NO: 2351481 - RNA, 19 nt, Artificial Sequence
  Description of Artificial Sequence: Synthetic oligonucleotide
  Antisense strand to SEQ ID NO: 2351480
aucaaagacauacuugccu

SEQ ID NO: 2351482 - RNA, 19 nt, Artificial Sequence
  Description of Artificial Sequence: Synthetic oligonucleotide
  Sense strand starting at position 1796 of SEQ ID NO: 1885564
gcaaguaugucuuugauuc

SEQ ID NO: 2351483 - RNA, 19 nt, Artificial Sequence
  Description of Artificial Sequence: Synthetic oligonucleotide
  Antisense strand to SEQ ID NO: 2351482
gaaucaaagacauacuugc

SEQ ID NO: 2351484 - RNA, 19 nt, Artificial Sequence
  Description of Artificial Sequence: Synthetic oligonucleotide
  Sense strand starting at position 1800 of SEQ ID NO: 1885564
guaugucuuugauuccaaa

SEQ ID NO: 2351485 - RNA, 19 nt, Artificial Sequence
  Description of Artificial Sequence: Synthetic oligonucleotide
  Antisense strand to SEQ ID NO: 2351484
uuuggaaucaaagacauac

SEQ ID NO: 2351486 - RNA, 19 nt, Artificial Sequence
  Description of Artificial Sequence: Synthetic oligonucleotide
  Sense strand starting at position 1840 of SEQ ID NO: 1885564
agagaaguauugcagacaa

SEQ ID NO: 2351487 - RNA, 19 nt, Artificial Sequence
  Description of Artificial Sequence: Synthetic oligonucleotide
  Antisense strand to SEQ ID NO: 2351486
uugucugcaauacuucucu

SEQ ID NO: 2351488 - RNA, 19 nt, Artificial Sequence
  Description of Artificial Sequence: Synthetic oligonucleotide
  Sense strand starting at position 250 of SEQ ID NO: 1885566
uuaugcauagcuuaagaaa

SEQ ID NO: 2351489 - RNA, 19 nt, Artificial Sequence
  Description of Artificial Sequence: Synthetic oligonucleotide
  Antisense strand to SEQ ID NO: 2351488
uuucuuaagcuaugcauaa

SEQ ID NO: 2351490 - RNA, 19 nt, Artificial Sequence
  Description of Artificial Sequence: Synthetic oligonucleotide
  Sense strand starting at position 285 of SEQ ID NO: 1885566
cucuguucucauggaugaa

SEQ ID NO: 2351491 - RNA, 19 nt, Artificial Sequence
  Description of Artificial Sequence: Synthetic oligonucleotide
  Antisense strand to SEQ ID NO: 2351490
uucauccaugagaacagag

SEQ ID NO: 2351492 - RNA, 19 nt, Artificial Sequence
  Description of Artificial Sequence: Synthetic oligonucleotide
  Sense strand starting at position 481 of SEQ ID NO: 1885566
ucaagaaucucucuguaga

SEQ ID NO: 2351493 - RNA, 19 nt, Artificial Sequence
  Description of Artificial Sequence: Synthetic oligonucleotide
  Antisense strand to SEQ ID NO: 2351492
ucuacagagagauucuuga

SEQ ID NO: 2351494 - RNA, 19 nt, Artificial Sequence
  Description of Artificial Sequence: Synthetic oligonucleotide
  Sense strand starting at position 609 of SEQ ID NO: 1885566
cagcauaguugauugacaa

SEQ ID NO: 2351495 - RNA, 19 nt, Artificial Sequence
  Description of Artificial Sequence: Synthetic oligonucleotide
  Antisense strand to SEQ ID NO: 2351494
uugucaaucaacuaugcug

SEQ ID NO: 2351496 - RNA, 19 nt, Artificial Sequence
  Description of Artificial Sequence: Synthetic oligonucleotide
  Sense strand starting at position 610 of SEQ ID NO: 1885566
agcauaguugauugacaag

SEQ ID NO: 2351497 - RNA, 19 nt, Artificial Sequence
  Description of Artificial Sequence: Synthetic oligonucleotide
  Antisense strand to SEQ ID NO: 2351496
cuugucaaucaacuaugcu

SEQ ID NO: 2351498 - RNA, 19 nt, Artificial Sequence
  Description of Artificial Sequence: Synthetic oligonucleotide
  Sense strand starting at position 626 of SEQ ID NO: 1885566
aagcauuauggguaucugu

SEQ ID NO: 2351499 - RNA, 19 nt, Artificial Sequence
  Description of Artificial Sequence: Synthetic oligonucleotide
  Antisense strand to SEQ ID NO: 2351498
acagauacccauaaugcuu

SEQ ID NO: 2351500 - RNA, 19 nt, Artificial Sequence
  Description of Artificial Sequence: Synthetic oligonucleotide
  Sense strand starting at position 785 of SEQ ID NO: 1885566
gguacuggacuuuauagua

SEQ ID NO: 2351501 - RNA, 19 nt, Artificial Sequence
  Description of Artificial Sequence: Synthetic oligonucleotide
  Antisense strand to SEQ ID NO: 2351500
uacuauaaaguccaguacc

SEQ ID NO: 2351502 - RNA, 19 nt, Artificial Sequence
  Description of Artificial Sequence: Synthetic oligonucleotide
  Sense strand starting at position 817 of SEQ ID NO: 1885566
auguguuugcauuacaaac

SEQ ID NO: 2351503 - RNA, 19 nt, Artificial Sequence
  Description of Artificial Sequence: Synthetic oligonucleotide
  Antisense strand to SEQ ID NO: 2351502
guuuguaaugcaaacacau

SEQ ID NO: 2351504 - RNA, 19 nt, Artificial Sequence
  Description of Artificial Sequence: Synthetic oligonucleotide
  Sense strand starting at position 930 of SEQ ID NO: 1885566
uuccaagaaccaugcuaga

SEQ ID NO: 2351505 - RNA, 19 nt, Artificial Sequence
  Description of Artificial Sequence: Synthetic oligonucleotide
  Antisense strand to SEQ ID NO: 2351504
ucuagcaugguucuuggaa

SEQ ID NO: 2351506 - RNA, 19 nt, Artificial Sequence
  Description of Artificial Sequence: Synthetic oligonucleotide
  Sense strand starting at position 994 of SEQ ID NO: 1885566
ugugcucuccaauuguguu

SEQ ID NO: 2351507 - RNA, 19 nt, Artificial Sequence
  Description of Artificial Sequence: Synthetic oligonucleotide
  Antisense strand to SEQ ID NO: 2351506
aacacaauuggagagcaca

SEQ ID NO: 2351508 - RNA, 19 nt, Artificial Sequence
  Description of Artificial Sequence: Synthetic oligonucleotide
  Sense strand starting at position 1065 of SEQ ID NO: 1885566
ugaggaguugcauacagua

SEQ ID NO: 2351509 - RNA, 19 nt, Artificial Sequence
  Description of Artificial Sequence: Synthetic oligonucleotide
  Antisense strand to SEQ ID NO: 2351508
uacuguaugcaacuccuca

SEQ ID NO: 2351510 - RNA, 19 nt, Artificial Sequence
  Description of Artificial Sequence: Synthetic oligonucleotide
  Sense strand starting at position 1067 of SEQ ID NO: 1885566
aggaguugcauacaguauu

SEQ ID NO: 2351511 - RNA, 19 nt, Artificial Sequence
  Description of Artificial Sequence: Synthetic oligonucleotide
  Antisense strand to SEQ ID NO: 2351510
aauacuguaugcaacuccu

SEQ ID NO: 2351512 - RNA, 19 nt, Artificial Sequence
  Description of Artificial Sequence: Synthetic oligonucleotide
  Sense strand starting at position 1081 of SEQ ID NO: 1885566
guauuuggauaucaaaucu

SEQ ID NO: 2351513 - RNA, 19 nt, Artificial Sequence
  Description of Artificial Sequence: Synthetic oligonucleotide
  Antisense strand to SEQ ID NO: 2351512
agauuugauauccaaauac

SEQ ID NO: 2351514 - RNA, 19 nt, Artificial Sequence
  Description of Artificial Sequence: Synthetic oligonucleotide
  Sense strand starting at position 1165 of SEQ ID NO: 1885566
uggaacuacuaauuaguua

SEQ ID NO: 2351515 - RNA, 19 nt, Artificial Sequence
  Description of Artificial Sequence: Synthetic oligonucleotide
  Antisense strand to SEQ ID NO: 2351514
uaacuaauuaguaguucca

SEQ ID NO: 2351516 - RNA, 19 nt, Artificial Sequence
  Description of Artificial Sequence: Synthetic oligonucleotide
  Sense strand starting at position 1370 of SEQ ID NO: 1885566
auacuauaauuggugguaa

SEQ ID NO: 2351517 - RNA, 19 nt, Artificial Sequence
  Description of Artificial Sequence: Synthetic oligonucleotide
  Antisense strand to SEQ ID NO: 2351516
uuaccaccaauuauaguau

SEQ ID NO: 2351518 - RNA, 19 nt, Artificial Sequence
  Description of Artificial Sequence: Synthetic oligonucleotide
  Sense strand starting at position 1446 of SEQ ID NO: 1885566
ugacuauuccuuugaagua

SEQ ID NO: 2351519 - RNA, 19 nt, Artificial Sequence
  Description of Artificial Sequence: Synthetic oligonucleotide
  Antisense strand to SEQ ID NO: 2351518
uacuucaaaggaauaguca

SEQ ID NO: 2351520 - RNA, 19 nt, Artificial Sequence
  Description of Artificial Sequence: Synthetic oligonucleotide
  Sense strand starting at position 1453 of SEQ ID NO: 1885566
uccuuugaaguaugagaua

SEQ ID NO: 2351521 - RNA, 19 nt, Artificial Sequence
  Description of Artificial Sequence: Synthetic oligonucleotide
  Antisense strand to SEQ ID NO: 2351520
uaucucauacuucaaagga

SEQ ID NO: 2351522 - RNA, 19 nt, Artificial Sequence
  Description of Artificial Sequence: Synthetic oligonucleotide
  Sense strand starting at position 1513 of SEQ ID NO: 1885566
uaaauuagucaugggcaag

SEQ ID NO: 2351523 - RNA, 19 nt, Artificial Sequence
  Description of Artificial Sequence: Synthetic oligonucleotide
  Antisense strand to SEQ ID NO: 2351522
cuugcccaugacuaauuua

SEQ ID NO: 2351524 - RNA, 19 nt, Artificial Sequence
  Description of Artificial Sequence: Synthetic oligonucleotide
  Sense strand starting at position 1712 of SEQ ID NO: 1885566
auagaaaggucauugcaaa

SEQ ID NO: 2351525 - RNA, 19 nt, Artificial Sequence
  Description of Artificial Sequence: Synthetic oligonucleotide
  Antisense strand to SEQ ID NO: 2351524
uuugcaaugaccuuucuau

SEQ ID NO: 2351526 - RNA, 19 nt, Artificial Sequence
  Description of Artificial Sequence: Synthetic oligonucleotide
  Sense strand starting at position 1755 of SEQ ID NO: 1885566
cuugaauucugcccuauga

SEQ ID NO: 2351527 - RNA, 19 nt, Artificial Sequence
  Description of Artificial Sequence: Synthetic oligonucleotide
  Antisense strand to SEQ ID NO: 2351526
ucauagggcagaauucaag

SEQ ID NO: 2351528 - RNA, 19 nt, Artificial Sequence
  Description of Artificial Sequence: Synthetic oligonucleotide
  Sense strand starting at position 1757 of SEQ ID NO: 1885566
ugaauucugcccuaugaaa

SEQ ID NO: 2351529 - RNA, 19 nt, Artificial Sequence
  Description of Artificial Sequence: Synthetic oligonucleotide
  Antisense strand to SEQ ID NO: 2351528
uuucauagggcagaauuca

SEQ ID NO: 2351530 - RNA, 19 nt, Artificial Sequence
  Description of Artificial Sequence: Synthetic oligonucleotide
  Sense strand starting at position 1839 of SEQ ID NO: 1885566
agguacuuacugggcuaaa

SEQ ID NO: 2351531 - RNA, 19 nt, Artificial Sequence
  Description of Artificial Sequence: Synthetic oligonucleotide
  Antisense strand to SEQ ID NO: 2351530
uuuagcccaguaaguaccu

SEQ ID NO: 2351532 - RNA, 19 nt, Artificial Sequence
  Description of Artificial Sequence: Synthetic oligonucleotide
  Sense strand starting at position 1840 of SEQ ID NO: 1885566
gguacuuacugggcuaaag

SEQ ID NO: 2351533 - RNA, 19 nt, Artificial Sequence
  Description of Artificial Sequence: Synthetic oligonucleotide
  Antisense strand to SEQ ID NO: 2351532
cuuuagcccaguaaguacc

SEQ ID NO: 2351534 - RNA, 19 nt, Artificial Sequence
  Description of Artificial Sequence: Synthetic oligonucleotide
  Sense strand starting at position 1993 of SEQ ID NO: 1885566
uuguuucugcauuaagaaa

SEQ ID NO: 2351535 - RNA, 19 nt, Artificial Sequence
  Description of Artificial Sequence: Synthetic oligonucleotide
  Antisense strand to SEQ ID NO: 2351534
uuucuuaaugcagaaacaa

SEQ ID NO: 2351536 - RNA, 19 nt, Artificial Sequence
  Description of Artificial Sequence: Synthetic oligonucleotide
  Sense strand starting at position 2216 of SEQ ID NO: 1885566
aguuuaguuugaccucuaa

SEQ ID NO: 2351537 - RNA, 19 nt, Artificial Sequence
  Description of Artificial Sequence: Synthetic oligonucleotide
  Antisense strand to SEQ ID NO: 2351536
uuagaggucaaacuaaacu

SEQ ID NO: 2351538 - RNA, 19 nt, Artificial Sequence
  Description of Artificial Sequence: Synthetic oligonucleotide
  Sense strand starting at position 2248 of SEQ ID NO: 1885566
cagagcugacuuuguaaau

SEQ ID NO: 2351539 - RNA, 19 nt, Artificial Sequence
  Description of Artificial Sequence: Synthetic oligonucleotide
  Antisense strand to SEQ ID NO: 2351538
auuuacaaagucagcucug

SEQ ID NO: 2351540 - RNA, 19 nt, Artificial Sequence
  Description of Artificial Sequence: Synthetic oligonucleotide
  Sense strand starting at position 2249 of SEQ ID NO: 1885566
agagcugacuuuguaaauu

SEQ ID NO: 2351541 - RNA, 19 nt, Artificial Sequence
  Description of Artificial Sequence: Synthetic oligonucleotide
  Antisense strand to SEQ ID NO: 2351540
aauuuacaaagucagcucu

SEQ ID NO: 2351542 - RNA, 19 nt, Artificial Sequence
  Description of Artificial Sequence: Synthetic oligonucleotide
  Sense strand starting at position 2330 of SEQ ID NO: 1885566
aauagagcuccagggucaa

SEQ ID NO: 2351543 - RNA, 19 nt, Artificial Sequence
  Description of Artificial Sequence: Synthetic oligonucleotide
  Antisense strand to SEQ ID NO: 2351542
uugacccuggagcucuauu

SEQ ID NO: 2351544 - RNA, 19 nt, Artificial Sequence
  Description of Artificial Sequence: Synthetic oligonucleotide
  Sense strand starting at position 2342 of SEQ ID NO: 1885566
gggucaauucagggugaga

SEQ ID NO: 2351545 - RNA, 19 nt, Artificial Sequence
  Description of Artificial Sequence: Synthetic oligonucleotide
  Antisense strand to SEQ ID NO: 2351544
ucucacccugaauugaccc

SEQ ID NO: 2351546 - RNA, 19 nt, Artificial Sequence
  Description of Artificial Sequence: Synthetic oligonucleotide
  Sense strand starting at position 2344 of SEQ ID NO: 1885566
gucaauucagggugagaug

SEQ ID NO: 2351547 - RNA, 19 nt, Artificial Sequence
  Description of Artificial Sequence: Synthetic oligonucleotide
  Antisense strand to SEQ ID NO: 2351546
caucucacccugaauugac

SEQ ID NO: 2351548 - RNA, 19 nt, Artificial Sequence
  Description of Artificial Sequence: Synthetic oligonucleotide
  Sense strand starting at position 2661 of SEQ ID NO: 1885566
aguggcauagcauaauaua

SEQ ID NO: 2351549 - RNA, 19 nt, Artificial Sequence
  Description of Artificial Sequence: Synthetic oligonucleotide
  Antisense strand to SEQ ID NO: 2351548
uauauuaugcuaugccacu

SEQ ID NO: 2351550 - RNA, 19 nt, Artificial Sequence
  Description of Artificial Sequence: Synthetic oligonucleotide
  Sense strand starting at position 3014 of SEQ ID NO: 1885566
acauguaauccugauguua

SEQ ID NO: 2351551 - RNA, 19 nt, Artificial Sequence
  Description of Artificial Sequence: Synthetic oligonucleotide
  Antisense strand to SEQ ID NO: 2351550
uaacaucaggauuacaugu

SEQ ID NO: 2351552 - RNA, 19 nt, Artificial Sequence
  Description of Artificial Sequence: Synthetic oligonucleotide
  Sense strand starting at position 3040 of SEQ ID NO: 1885566
auaagaaccugugucucuu

SEQ ID NO: 2351553 - RNA, 19 nt, Artificial Sequence
  Description of Artificial Sequence: Synthetic oligonucleotide
  Antisense strand to SEQ ID NO: 2351552
aagagacacagguucuuau

SEQ ID NO: 2351554 - RNA, 19 nt, Artificial Sequence
  Description of Artificial Sequence: Synthetic oligonucleotide
  Sense strand starting at position 3053 of SEQ ID NO: 1885566
ucucuugauuucuagauga

SEQ ID NO: 2351555 - RNA, 19 nt, Artificial Sequence
  Description of Artificial Sequence: Synthetic oligonucleotide
  Antisense strand to SEQ ID NO: 2351554
ucaucuagaaaucaagaga

SEQ ID NO: 2351556 - RNA, 19 nt, Artificial Sequence
  Description of Artificial Sequence: Synthetic oligonucleotide
  Sense strand starting at position 3120 of SEQ ID NO: 1885566
gcuuguagauuugacauuu

SEQ ID NO: 2351557 - RNA, 19 nt, Artificial Sequence
  Description of Artificial Sequence: Synthetic oligonucleotide
  Antisense strand to SEQ ID NO: 2351556
aaaugucaaaucuacaagc

SEQ ID NO: 2351558 - RNA, 19 nt, Artificial Sequence
  Description of Artificial Sequence: Synthetic oligonucleotide
  Sense strand starting at position 3184 of SEQ ID NO: 1885566
uaaagugaauucuuggucu

SEQ ID NO: 2351559 - RNA, 19 nt, Artificial Sequence
  Description of Artificial Sequence: Synthetic oligonucleotide
  Antisense strand to SEQ ID NO: 2351558
agaccaagaauucacuuua

SEQ ID NO: 2351560 - RNA, 19 nt, Artificial Sequence
  Description of Artificial Sequence: Synthetic oligonucleotide
  Sense strand starting at position 3197 of SEQ ID NO: 1885566
uggucuucgagcuaauuaa

SEQ ID NO: 2351561 - RNA, 19 nt, Artificial Sequence
  Description of Artificial Sequence: Synthetic oligonucleotide
  Antisense strand to SEQ ID NO: 2351560
uuaauuagcucgaagacca

SEQ ID NO: 2351562 - RNA, 19 nt, Artificial Sequence
  Description of Artificial Sequence: Synthetic oligonucleotide
  Sense strand starting at position 3207 of SEQ ID NO: 1885566
gcuaauuaagucuaugaca

SEQ ID NO: 2351563 - RNA, 19 nt, Artificial Sequence
  Description of Artificial Sequence: Synthetic oligonucleotide
  Antisense strand to SEQ ID NO: 2351562
ugucauagacuuaauuagc

SEQ ID NO: 2351564 - RNA, 19 nt, Artificial Sequence
  Description of Artificial Sequence: Synthetic oligonucleotide
  Sense strand starting at position 3230 of SEQ ID NO: 1885566
gccagauagccagauaguu

SEQ ID NO: 2351565 - RNA, 19 nt, Artificial Sequence
  Description of Artificial Sequence: Synthetic oligonucleotide
  Antisense strand to SEQ ID NO: 2351564
aacuaucuggcuaucuggc

SEQ ID NO: 2351566 - RNA, 19 nt, Artificial Sequence
  Description of Artificial Sequence: Synthetic oligonucleotide
  Sense strand starting at position 3724 of SEQ ID NO: 1885566
ugacuuguugcugaaauaa

SEQ ID NO: 2351567 - RNA, 19 nt, Artificial Sequence
  Description of Artificial Sequence: Synthetic oligonucleotide
  Antisense strand to SEQ ID NO: 2351566
uuauuucagcaacaaguca

SEQ ID NO: 2351568 - RNA, 19 nt, Artificial Sequence
  Description of Artificial Sequence: Synthetic oligonucleotide
  Sense strand starting at position 1154 of SEQ ID NO: 1885565
uucugugauuagccaauua

SEQ ID NO: 2351569 - RNA, 19 nt, Artificial Sequence
  Description of Artificial Sequence: Synthetic oligonucleotide
  Antisense strand to SEQ ID NO: 2351568
uaauuggcuaaucacagaa

SEQ ID NO: 2351570 - RNA, 19 nt, Artificial Sequence
  Description of Artificial Sequence: Synthetic oligonucleotide
  Sense strand starting at position 1218 of SEQ ID NO: 1885565
uuauguguucucuauauag

SEQ ID NO: 2351571 - RNA, 19 nt, Artificial Sequence
  Description of Artificial Sequence: Synthetic oligonucleotide
  Antisense strand to SEQ ID NO: 2351570
cuauauagagaacacauaa

SEQ ID NO: 2351572 - RNA, 19 nt, Artificial Sequence
  Description of Artificial Sequence: Synthetic oligonucleotide
  Sense strand starting at position 1220 of SEQ ID NO: 1885565
auguguucucuauauagag

SEQ ID NO: 2351573 - RNA, 19 nt, Artificial Sequence
  Description of Artificial Sequence: Synthetic oligonucleotide
  Antisense strand to SEQ ID NO: 2351572
cucuauauagagaacacau

SEQ ID NO: 2351574 - RNA, 19 nt, Artificial Sequence
  Description of Artificial Sequence: Synthetic oligonucleotide
  Sense strand starting at position 1327 of SEQ ID NO: 1885565
ggaacaucaucucuguuau

SEQ ID NO: 2351575 - RNA, 19 nt, Artificial Sequence
  Description of Artificial Sequence: Synthetic oligonucleotide
  Antisense strand to SEQ ID NO: 2351574
auaacagagaugauguucc

SEQ ID NO: 2351576 - RNA, 19 nt, Artificial Sequence
  Description of Artificial Sequence: Synthetic oligonucleotide
  Sense strand starting at position 1740 of SEQ ID NO: 1885565
cccaguguaaacuauguga

SEQ ID NO: 2351577 - RNA, 19 nt, Artificial Sequence
  Description of Artificial Sequence: Synthetic oligonucleotide
  Antisense strand to SEQ ID NO: 2351576
ucacauaguuuacacuggg

SEQ ID NO: 2351578 - RNA, 19 nt, Artificial Sequence
  Description of Artificial Sequence: Synthetic oligonucleotide
  Sense strand starting at position 1742 of SEQ ID NO: 1885565
caguguaaacuaugugaua

SEQ ID NO: 2351579 - RNA, 19 nt, Artificial Sequence
  Description of Artificial Sequence: Synthetic oligonucleotide
  Antisense strand to SEQ ID NO: 2351578
uaucacauaguuuacacug

SEQ ID NO: 2351580 - RNA, 19 nt, Artificial Sequence
  Description of Artificial Sequence: Synthetic oligonucleotide
  Sense strand starting at position 1743 of SEQ ID NO: 1885565
aguguaaacuaugugauau

SEQ ID NO: 2351581 - RNA, 19 nt, Artificial Sequence
  Description of Artificial Sequence: Synthetic oligonucleotide
  Antisense strand to SEQ ID NO: 2351580
auaucacauaguuuacacu

SEQ ID NO: 2351582 - RNA, 19 nt, Artificial Sequence
  Description of Artificial Sequence: Synthetic oligonucleotide
  Sense strand starting at position 1744 of SEQ ID NO: 1885565
guguaaacuaugugauaua

SEQ ID NO: 2351583 - RNA, 19 nt, Artificial Sequence
  Description of Artificial Sequence: Synthetic oligonucleotide
  Antisense strand to SEQ ID NO: 2351582
uauaucacauaguuuacac

SEQ ID NO: 2351584 - RNA, 19 nt, Artificial Sequence
  Description of Artificial Sequence: Synthetic oligonucleotide
  Sense strand starting at position 1751 of SEQ ID NO: 1885565
cuaugugauauaggaguua

SEQ ID NO: 2351585 - RNA, 19 nt, Artificial Sequence
  Description of Artificial Sequence: Synthetic oligonucleotide
  Antisense strand to SEQ ID NO: 2351584
uaacuccuauaucacauag

SEQ ID NO: 2351586 - RNA, 19 nt, Artificial Sequence
  Description of Artificial Sequence: Synthetic oligonucleotide
  Sense strand starting at position 1984 of SEQ ID NO: 1885565
uucucuuugcgagucaugu

SEQ ID NO: 2351587 - RNA, 19 nt, Artificial Sequence
  Description of Artificial Sequence: Synthetic oligonucleotide
  Antisense strand to SEQ ID NO: 2351586
acaugacucgcaaagagaa

SEQ ID NO: 2351588 - RNA, 19 nt, Artificial Sequence
  Description of Artificial Sequence: Synthetic oligonucleotide
  Sense strand starting at position 1994 of SEQ ID NO: 1885565
gagucauguguacaguaag

SEQ ID NO: 2351589 - RNA, 19 nt, Artificial Sequence
  Description of Artificial Sequence: Synthetic oligonucleotide
  Antisense strand to SEQ ID NO: 2351588
cuuacuguacacaugacuc

SEQ ID NO: 2351590 - RNA, 19 nt, Artificial Sequence
  Description of Artificial Sequence: Synthetic oligonucleotide
  Sense strand starting at position 2228 of SEQ ID NO: 1885565
acgcuagaaagagaguuau

SEQ ID NO: 2351591 - RNA, 19 nt, Artificial Sequence
  Description of Artificial Sequence: Synthetic oligonucleotide
  Antisense strand to SEQ ID NO: 2351590
auaacucucuuucuagcgu

SEQ ID NO: 2351592 - RNA, 19 nt, Artificial Sequence
  Description of Artificial Sequence: Synthetic oligonucleotide
  Sense strand starting at position 2356 of SEQ ID NO: 1885565
cccagagaacagugucacu

SEQ ID NO: 2351593 - RNA, 19 nt, Artificial Sequence
  Description of Artificial Sequence: Synthetic oligonucleotide
  Antisense strand to SEQ ID NO: 2351592
agugacacuguucucuggg

SEQ ID NO: 2351594 - RNA, 19 nt, Artificial Sequence
  Description of Artificial Sequence: Synthetic oligonucleotide
  Sense strand starting at position 2495 of SEQ ID NO: 1885565
cacagaaacuguguaguuu

SEQ ID NO: 2351595 - RNA, 19 nt, Artificial Sequence
  Description of Artificial Sequence: Synthetic oligonucleotide
  Antisense strand to SEQ ID NO: 2351594
aaacuacacaguuucugug

SEQ ID NO: 2351596 - RNA, 19 nt, Artificial Sequence
  Description of Artificial Sequence: Synthetic oligonucleotide
  Sense strand starting at position 2641 of SEQ ID NO: 1885565
gaaauauuaugagcuaugu

SEQ ID NO: 2351597 - RNA, 19 nt, Artificial Sequence
  Description of Artificial Sequence: Synthetic oligonucleotide
  Antisense strand to SEQ ID NO: 2351596
acauagcucauaauauuuc

SEQ ID NO: 2351598 - RNA, 19 nt, Artificial Sequence
  Description of Artificial Sequence: Synthetic oligonucleotide
  Sense strand starting at position 2702 of SEQ ID NO: 1885565
ccuaaaugccaagguuuau

SEQ ID NO: 2351599 - RNA, 19 nt, Artificial Sequence
  Description of Artificial Sequence: Synthetic oligonucleotide
  Antisense strand to SEQ ID NO: 2351598
auaaaccuuggcauuuagg

SEQ ID NO: 2351600 - RNA, 19 nt, Artificial Sequence
  Description of Artificial Sequence: Synthetic oligonucleotide
  Sense strand starting at position 2729 of SEQ ID NO: 1885565
uuauuagagcuauggaaau

SEQ ID NO: 2351601 - RNA, 19 nt, Artificial Sequence
  Description of Artificial Sequence: Synthetic oligonucleotide
  Antisense strand to SEQ ID NO: 2351600
auuuccauagcucuaauaa

SEQ ID NO: 2351602 - RNA, 19 nt, Artificial Sequence
  Description of Artificial Sequence: Synthetic oligonucleotide
  Sense strand starting at position 2762 of SEQ ID NO: 1885565
gacauacauugagaaugga

SEQ ID NO: 2351603 - RNA, 19 nt, Artificial Sequence
  Description of Artificial Sequence: Synthetic oligonucleotide
  Antisense strand to SEQ ID NO: 2351602
uccauucucaauguauguc

SEQ ID NO: 2351604 - RNA, 19 nt, Artificial Sequence
  Description of Artificial Sequence: Synthetic oligonucleotide
  Sense strand starting at position 2883 of SEQ ID NO: 1885565
ggaccaugucauuguagga

SEQ ID NO: 2351605 - RNA, 19 nt, Artificial Sequence
  Description of Artificial Sequence: Synthetic oligonucleotide
  Antisense strand to SEQ ID NO: 2351604
uccuacaaugacauggucc

SEQ ID NO: 2351606 - RNA, 19 nt, Artificial Sequence
  Description of Artificial Sequence: Synthetic oligonucleotide
  Sense strand starting at position 2951 of SEQ ID NO: 1885565
ggaucacuauccucugcua

SEQ ID NO: 2351607 - RNA, 19 nt, Artificial Sequence
  Description of Artificial Sequence: Synthetic oligonucleotide
  Antisense strand to SEQ ID NO: 2351606
uagcagaggauagugaucc

SEQ ID NO: 2351608 - RNA, 19 nt, Artificial Sequence
  Description of Artificial Sequence: Synthetic oligonucleotide
  Sense strand starting at position 3013 of SEQ ID NO: 1885565
cauuuaauugugugcugca

SEQ ID NO: 2351609 - RNA, 19 nt, Artificial Sequence
  Description of Artificial Sequence: Synthetic oligonucleotide
  Antisense strand to SEQ ID NO: 2351608
ugcagcacacaauuaaaug

SEQ ID NO: 2351610 - RNA, 19 nt, Artificial Sequence
  Description of Artificial Sequence: Synthetic oligonucleotide
  Sense strand starting at position 3014 of SEQ ID NO: 1885565
auuuaauugugugcugcaa

SEQ ID NO: 2351611 - RNA, 19 nt, Artificial Sequence
  Description of Artificial Sequence: Synthetic oligonucleotide
  Antisense strand to SEQ ID NO: 2351610
uugcagcacacaauuaaau

SEQ ID NO: 2351612 - RNA, 19 nt, Artificial Sequence
  Description of Artificial Sequence: Synthetic oligonucleotide
  Sense strand starting at position 3071 of SEQ ID NO: 1885565
auggcaugucucuacuuau

SEQ ID NO: 2351613 - RNA, 19 nt, Artificial Sequence
  Description of Artificial Sequence: Synthetic oligonucleotide
  Antisense strand to SEQ ID NO: 2351612
auaaguagagacaugccau

SEQ ID NO: 2351614 - RNA, 19 nt, Artificial Sequence
  Description of Artificial Sequence: Synthetic oligonucleotide
  Sense strand starting at position 3082 of SEQ ID NO: 1885565
cuacuuauuggagguuaca

SEQ ID NO: 2351615 - RNA, 19 nt, Artificial Sequence
  Description of Artificial Sequence: Synthetic oligonucleotide
  Antisense strand to SEQ ID NO: 2351614
uguaaccuccaauaaguag

SEQ ID NO: 2351616 - RNA, 19 nt, Artificial Sequence
  Description of Artificial Sequence: Synthetic oligonucleotide
  Sense strand starting at position 3101 of SEQ ID NO: 1885565
uacuuaucugagggaguau

SEQ ID NO: 2351617 - RNA, 19 nt, Artificial Sequence
  Description of Artificial Sequence: Synthetic oligonucleotide
  Antisense strand to SEQ ID NO: 2351616
auacucccucagauaagua

SEQ ID NO: 2351618 - RNA, 19 nt, Artificial Sequence
  Description of Artificial Sequence: Synthetic oligonucleotide
  Sense strand starting at position 3199 of SEQ ID NO: 1885565
aaauaaugggucuguuuga

SEQ ID NO: 2351619 - RNA, 19 nt, Artificial Sequence
  Description of Artificial Sequence: Synthetic oligonucleotide
  Antisense strand to SEQ ID NO: 2351618
ucaaacagacccauuauuu

SEQ ID NO: 2351620 - RNA, 19 nt, Artificial Sequence
  Description of Artificial Sequence: Synthetic oligonucleotide
  Sense strand starting at position 3200 of SEQ ID NO: 1885565
aauaaugggucuguuugau

SEQ ID NO: 2351621 - RNA, 19 nt, Artificial Sequence
  Description of Artificial Sequence: Synthetic oligonucleotide
  Antisense strand to SEQ ID NO: 2351620
aucaaacagacccauuauu

SEQ ID NO: 2351622 - RNA, 19 nt, Artificial Sequence
  Description of Artificial Sequence: Synthetic oligonucleotide
  Sense strand starting at position 3208 of SEQ ID NO: 1885565
gucuguuugaucuagcuag

SEQ ID NO: 2351623 - RNA, 19 nt, Artificial Sequence
  Description of Artificial Sequence: Synthetic oligonucleotide
  Antisense strand to SEQ ID NO: 2351622
cuagcuagaucaaacagac

SEQ ID NO: 2351624 - RNA, 19 nt, Artificial Sequence
  Description of Artificial Sequence: Synthetic oligonucleotide
  Sense strand starting at position 3212 of SEQ ID NO: 1885565
guuugaucuagcuaggaca

SEQ ID NO: 2351625 - RNA, 19 nt, Artificial Sequence
  Description of Artificial Sequence: Synthetic oligonucleotide
  Antisense strand to SEQ ID NO: 2351624
uguccuagcuagaucaaac

SEQ ID NO: 2351626 - RNA, 19 nt, Artificial Sequence
  Description of Artificial Sequence: Synthetic oligonucleotide
  Sense strand starting at position 3220 of SEQ ID NO: 1885565
uagcuaggacagugagaaa

SEQ ID NO: 2351627 - RNA, 19 nt, Artificial Sequence
  Description of Artificial Sequence: Synthetic oligonucleotide
  Antisense strand to SEQ ID NO: 2351626
uuucucacuguccuagcua

SEQ ID NO: 2351628 - RNA, 19 nt, Artificial Sequence
  Description of Artificial Sequence: Synthetic oligonucleotide
  Sense strand starting at position 3358 of SEQ ID NO: 1885565
cuggcaaauagaugagacu

SEQ ID NO: 2351629 - RNA, 19 nt, Artificial Sequence
  Description of Artificial Sequence: Synthetic oligonucleotide
  Antisense strand to SEQ ID NO: 2351628
agucucaucuauuugccag

SEQ ID NO: 2351630 - RNA, 19 nt, Artificial Sequence
  Description of Artificial Sequence: Synthetic oligonucleotide
  Sense strand starting at position 3417 of SEQ ID NO: 1885565
agagguaaaugggccuaau

SEQ ID NO: 2351631 - RNA, 19 nt, Artificial Sequence
  Description of Artificial Sequence: Synthetic oligonucleotide
  Antisense strand to SEQ ID NO: 2351630
auuaggcccauuuaccucu

SEQ ID NO: 2351632 - RNA, 19 nt, Artificial Sequence
  Description of Artificial Sequence: Synthetic oligonucleotide
  Sense strand starting at position 3457 of SEQ ID NO: 1885565
ugaugaagcuuauuauccu

SEQ ID NO: 2351633 - RNA, 19 nt, Artificial Sequence
  Description of Artificial Sequence: Synthetic oligonucleotide
  Antisense strand to SEQ ID NO: 2351632
aggauaauaagcuucauca

SEQ ID NO: 2351634 - RNA, 19 nt, Artificial Sequence
  Description of Artificial Sequence: Synthetic oligonucleotide
  Sense strand starting at position 3514 of SEQ ID NO: 1885565
gagugaaauguuuacaucu

SEQ ID NO: 2351635 - RNA, 19 nt, Artificial Sequence
  Description of Artificial Sequence: Synthetic oligonucleotide
  Antisense strand to SEQ ID NO: 2351634
agauguaaacauuucacuc

SEQ ID NO: 2351636 - RNA, 19 nt, Artificial Sequence
  Description of Artificial Sequence: Synthetic oligonucleotide
  Sense strand starting at position 3552 of SEQ ID NO: 1885565
uuuaaugaaagcuguagga

SEQ ID NO: 2351637 - RNA, 19 nt, Artificial Sequence
  Description of Artificial Sequence: Synthetic oligonucleotide
  Antisense strand to SEQ ID NO: 2351636
uccuacagcuuucauuaaa

SEQ ID NO: 2351638 - RNA, 19 nt, Artificial Sequence
  Description of Artificial Sequence: Synthetic oligonucleotide
  Sense strand starting at position 3554 of SEQ ID NO: 1885565
uaaugaaagcuguaggagu

SEQ ID NO: 2351639 - RNA, 19 nt, Artificial Sequence
  Description of Artificial Sequence: Synthetic oligonucleotide
  Antisense strand to SEQ ID NO: 2351638
acuccuacagcuuucauua

SEQ ID NO: 2351640 - RNA, 19 nt, Artificial Sequence
  Description of Artificial Sequence: Synthetic oligonucleotide
  Sense strand starting at position 3735 of SEQ ID NO: 1885565
caggucaguuuccuugaca

SEQ ID NO: 2351641 - RNA, 19 nt, Artificial Sequence
  Description of Artificial Sequence: Synthetic oligonucleotide
  Antisense strand to SEQ ID NO: 2351640
ugucaaggaaacugaccug

SEQ ID NO: 2351642 - RNA, 19 nt, Artificial Sequence
  Description of Artificial Sequence: Synthetic oligonucleotide
  Sense strand starting at position 3736 of SEQ ID NO: 1885565
aggucaguuuccuugacau

SEQ ID NO: 2351643 - RNA, 19 nt, Artificial Sequence
  Description of Artificial Sequence: Synthetic oligonucleotide
  Antisense strand to SEQ ID NO: 2351642
augucaaggaaacugaccu

SEQ ID NO: 2351644 - RNA, 19 nt, Artificial Sequence
  Description of Artificial Sequence: Synthetic oligonucleotide
  Sense strand starting at position 3738 of SEQ ID NO: 1885565
gucaguuuccuugacaugu

SEQ ID NO: 2351645 - RNA, 19 nt, Artificial Sequence
  Description of Artificial Sequence: Synthetic oligonucleotide
  Antisense strand to SEQ ID NO: 2351644
acaugucaaggaaacugac

SEQ ID NO: 2351646 - RNA, 19 nt, Artificial Sequence
  Description of Artificial Sequence: Synthetic oligonucleotide
  Sense strand starting at position 3860 of SEQ ID NO: 1885565
ugaacaugguauccuauca

SEQ ID NO: 2351647 - RNA, 19 nt, Artificial Sequence
  Description of Artificial Sequence: Synthetic oligonucleotide
  Antisense strand to SEQ ID NO: 2351646
ugauaggauaccauguuca

SEQ ID NO: 2351648 - RNA, 19 nt, Artificial Sequence
  Description of Artificial Sequence: Synthetic oligonucleotide
  Sense strand starting at position 102 of SEQ ID NO: 1885567
caaggagucagagguuaua

SEQ ID NO: 2351649 - RNA, 19 nt, Artificial Sequence
  Description of Artificial Sequence: Synthetic oligonucleotide
  Antisense strand to SEQ ID NO: 2351648
uauaaccucugacuccuug

SEQ ID NO: 2351650 - RNA, 19 nt, Artificial Sequence
  Description of Artificial Sequence: Synthetic oligonucleotide
  Sense strand starting at position 115 of SEQ ID NO: 1885567
guuauauuugauugugagu

SEQ ID NO: 2351651 - RNA, 19 nt, Artificial Sequence
  Description of Artificial Sequence: Synthetic oligonucleotide
  Antisense strand to SEQ ID NO: 2351650
acucacaaucaaauauaac

SEQ ID NO: 2351652 - RNA, 19 nt, Artificial Sequence
  Description of Artificial Sequence: Synthetic oligonucleotide
  Sense strand starting at position 211 of SEQ ID NO: 1885567
cuaaaugcucaucaacgau

SEQ ID NO: 2351653 - RNA, 19 nt, Artificial Sequence
  Description of Artificial Sequence: Synthetic oligonucleotide
  Antisense strand to SEQ ID NO: 2351652
aucguugaugagcauuuag

SEQ ID NO: 2351654 - RNA, 19 nt, Artificial Sequence
  Description of Artificial Sequence: Synthetic oligonucleotide
  Sense strand starting at position 217 of SEQ ID NO: 1885567
gcucaucaacgauagacua

SEQ ID NO: 2351655 - RNA, 19 nt, Artificial Sequence
  Description of Artificial Sequence: Synthetic oligonucleotide
  Antisense strand to SEQ ID NO: 2351654
uagucuaucguugaugagc

SEQ ID NO: 2351656 - RNA, 19 nt, Artificial Sequence
  Description of Artificial Sequence: Synthetic oligonucleotide
  Sense strand starting at position 371 of SEQ ID NO: 1885567
acgggaaguucucccuuau

SEQ ID NO: 2351657 - RNA, 19 nt, Artificial Sequence
  Description of Artificial Sequence: Synthetic oligonucleotide
  Antisense strand to SEQ ID NO: 2351656
auaagggagaacuucccgu

SEQ ID NO: 2351658 - RNA, 19 nt, Artificial Sequence
  Description of Artificial Sequence: Synthetic oligonucleotide
  Sense strand starting at position 556 of SEQ ID NO: 1885567
gugacucgaguuuaccuau

SEQ ID NO: 2351659 - RNA, 19 nt, Artificial Sequence
  Description of Artificial Sequence: Synthetic oligonucleotide
  Antisense strand to SEQ ID NO: 2351658
auagguaaacucgagucac

SEQ ID NO: 2351660 - RNA, 19 nt, Artificial Sequence
  Description of Artificial Sequence: Synthetic oligonucleotide
  Sense strand starting at position 584 of SEQ ID NO: 1885567
cuggacauguacccuuuaa

SEQ ID NO: 2351661 - RNA, 19 nt, Artificial Sequence
  Description of Artificial Sequence: Synthetic oligonucleotide
  Antisense strand to SEQ ID NO: 2351660
uuaaaggguacauguccag

SEQ ID NO: 2351662 - RNA, 19 nt, Artificial Sequence
  Description of Artificial Sequence: Synthetic oligonucleotide
  Sense strand starting at position 588 of SEQ ID NO: 1885567
acauguacccuuuaaguua

SEQ ID NO: 2351663 - RNA, 19 nt, Artificial Sequence
  Description of Artificial Sequence: Synthetic oligonucleotide
  Antisense strand to SEQ ID NO: 2351662
uaacuuaaaggguacaugu

SEQ ID NO: 2351664 - RNA, 19 nt, Artificial Sequence
  Description of Artificial Sequence: Synthetic oligonucleotide
  Sense strand starting at position 646 of SEQ ID NO: 1885567
uccagaagugccuaaacaa

SEQ ID NO: 2351665 - RNA, 19 nt, Artificial Sequence
  Description of Artificial Sequence: Synthetic oligonucleotide
  Antisense strand to SEQ ID NO: 2351664
uuguuuaggcacuucugga

SEQ ID NO: 2351666 - RNA, 19 nt, Artificial Sequence
  Description of Artificial Sequence: Synthetic oligonucleotide
  Sense strand starting at position 808 of SEQ ID NO: 1885567
uagauaaccgauugcuuga

SEQ ID NO: 2351667 - RNA, 19 nt, Artificial Sequence
  Description of Artificial Sequence: Synthetic oligonucleotide
  Antisense strand to SEQ ID NO: 2351666
ucaagcaaucgguuaucua

SEQ ID NO: 2351668 - RNA, 19 nt, Artificial Sequence
  Description of Artificial Sequence: Synthetic oligonucleotide
  Sense strand starting at position 810 of SEQ ID NO: 1885567
gauaaccgauugcuugauu

SEQ ID NO: 2351669 - RNA, 19 nt, Artificial Sequence
  Description of Artificial Sequence: Synthetic oligonucleotide
  Antisense strand to SEQ ID NO: 2351668
aaucaagcaaucgguuauc

SEQ ID NO: 2351670 - RNA, 19 nt, Artificial Sequence
  Description of Artificial Sequence: Synthetic oligonucleotide
  Sense strand starting at position 1371 of SEQ ID NO: 1885567
uguaaucauuugucuucuu

SEQ ID NO: 2351671 - RNA, 19 nt, Artificial Sequence
  Description of Artificial Sequence: Synthetic oligonucleotide
  Antisense strand to SEQ ID NO: 2351670
aagaagacaaaugauuaca

SEQ ID NO: 2351672 - RNA, 19 nt, Artificial Sequence
  Description of Artificial Sequence: Synthetic oligonucleotide
  Sense strand starting at position 1524 of SEQ ID NO: 1885567
gugacuauuucugcucauu

SEQ ID NO: 2351673 - RNA, 19 nt, Artificial Sequence
  Description of Artificial Sequence: Synthetic oligonucleotide
  Antisense strand to SEQ ID NO: 2351672
aaugagcagaaauagucac

SEQ ID NO: 2351674 - RNA, 19 nt, Artificial Sequence
  Description of Artificial Sequence: Synthetic oligonucleotide
  Sense strand starting at position 1722 of SEQ ID NO: 1885567
auuguaaugugaccauaaa

SEQ ID NO: 2351675 - RNA, 19 nt, Artificial Sequence
  Description of Artificial Sequence: Synthetic oligonucleotide
  Antisense strand to SEQ ID NO: 2351674
uuuauggucacauuacaau

SEQ ID NO: 2351676 - RNA, 19 nt, Artificial Sequence
  Description of Artificial Sequence: Synthetic oligonucleotide
  Sense strand starting at position 1723 of SEQ ID NO: 1885567
uuguaaugugaccauaaau

SEQ ID NO: 2351677 - RNA, 19 nt, Artificial Sequence
  Description of Artificial Sequence: Synthetic oligonucleotide
  Antisense strand to SEQ ID NO: 2351676
auuuauggucacauuacaa

SEQ ID NO: 2351678 - RNA, 19 nt, Artificial Sequence
  Description of Artificial Sequence: Synthetic oligonucleotide
  Sense strand starting at position 1747 of SEQ ID NO: 1885567
acacaaagucaugagucuu

SEQ ID NO: 2351679 - RNA, 19 nt, Artificial Sequence
  Description of Artificial Sequence: Synthetic oligonucleotide
  Antisense strand to SEQ ID NO: 2351678
aagacucaugacuuugugu

SEQ ID NO: 2351680 - RNA, 19 nt, Artificial Sequence
  Description of Artificial Sequence: Synthetic oligonucleotide
  Sense strand starting at position 1769 of SEQ ID NO: 1885567
uaaggcacccugugaagaa

SEQ ID NO: 2351681 - RNA, 19 nt, Artificial Sequence
  Description of Artificial Sequence: Synthetic oligonucleotide
  Antisense strand to SEQ ID NO: 2351680
uucuucacagggugccuua

SEQ ID NO: 2351682 - RNA, 19 nt, Artificial Sequence
  Description of Artificial Sequence: Synthetic oligonucleotide
  Sense strand starting at position 1832 of SEQ ID NO: 1885567
uagaguuaugaacaucugu

SEQ ID NO: 2351683 - RNA, 19 nt, Artificial Sequence
  Description of Artificial Sequence: Synthetic oligonucleotide
  Antisense strand to SEQ ID NO: 2351682
acagauguucauaacucua

SEQ ID NO: 2351684 - RNA, 19 nt, Artificial Sequence
  Description of Artificial Sequence: Synthetic oligonucleotide
  Sense strand starting at position 1837 of SEQ ID NO: 1885567
uuaugaacaucuguuugga

SEQ ID NO: 2351685 - RNA, 19 nt, Artificial Sequence
  Description of Artificial Sequence: Synthetic oligonucleotide
  Antisense strand to SEQ ID NO: 2351684
uccaaacagauguucauaa

SEQ ID NO: 2351686 - RNA, 19 nt, Artificial Sequence
  Description of Artificial Sequence: Synthetic oligonucleotide
  Sense strand starting at position 1840 of SEQ ID NO: 1885567
ugaacaucuguuuggaaca

SEQ ID NO: 2351687 - RNA, 19 nt, Artificial Sequence
  Description of Artificial Sequence: Synthetic oligonucleotide
  Antisense strand to SEQ ID NO: 2351686
uguuccaaacagauguuca

SEQ ID NO: 2351688 - RNA, 19 nt, Artificial Sequence
  Description of Artificial Sequence: Synthetic oligonucleotide
  Sense strand starting at position 1912 of SEQ ID NO: 1885567
agugcuuaccauuacauca

SEQ ID NO: 2351689 - RNA, 19 nt, Artificial Sequence
  Description of Artificial Sequence: Synthetic oligonucleotide
  Antisense strand to SEQ ID NO: 2351688
ugauguaaugguaagcacu

SEQ ID NO: 2351690 - RNA, 19 nt, Artificial Sequence
  Description of Artificial Sequence: Synthetic oligonucleotide
  Sense strand starting at position 1995 of SEQ ID NO: 1885567
auaaacugucagugaaacu

SEQ ID NO: 2351691 - RNA, 19 nt, Artificial Sequence
  Description of Artificial Sequence: Synthetic oligonucleotide
  Antisense strand to SEQ ID NO: 2351690
aguuucacugacaguuuau

SEQ ID NO: 2351692 - RNA, 19 nt, Artificial Sequence
  Description of Artificial Sequence: Synthetic oligonucleotide
  Sense strand starting at position 2032 of SEQ ID NO: 1885567
acggacauuccuggagguu

SEQ ID NO: 2351693 - RNA, 19 nt, Artificial Sequence
  Description of Artificial Sequence: Synthetic oligonucleotide
  Antisense strand to SEQ ID NO: 2351692
aaccuccaggaauguccgu

SEQ ID NO: 2351694 - RNA, 19 nt, Artificial Sequence
  Description of Artificial Sequence: Synthetic oligonucleotide
  Sense strand starting at position 2035 of SEQ ID NO: 1885567
gacauuccuggagguucua

SEQ ID NO: 2351695 - RNA, 19 nt, Artificial Sequence
  Description of Artificial Sequence: Synthetic oligonucleotide
  Antisense strand to SEQ ID NO: 2351694
uagaaccuccaggaauguc

SEQ ID NO: 2351696 - RNA, 19 nt, Artificial Sequence
  Description of Artificial Sequence: Synthetic oligonucleotide
  Sense strand starting at position 2158 of SEQ ID NO: 1885567
uaagcaaucuguguuggag

SEQ ID NO: 2351697 - RNA, 19 nt, Artificial Sequence
  Description of Artificial Sequence: Synthetic oligonucleotide
  Antisense strand to SEQ ID NO: 2351696
cuccaacacagauugcuua

SEQ ID NO: 2351698 - RNA, 19 nt, Artificial Sequence
  Description of Artificial Sequence: Synthetic oligonucleotide
  Sense strand starting at position 2161 of SEQ ID NO: 1885567
gcaaucuguguuggaggaa

SEQ ID NO: 2351699 - RNA, 19 nt, Artificial Sequence
  Description of Artificial Sequence: Synthetic oligonucleotide
  Antisense strand to SEQ ID NO: 2351698
uuccuccaacacagauugc

SEQ ID NO: 2351700 - RNA, 19 nt, Artificial Sequence
  Description of Artificial Sequence: Synthetic oligonucleotide
  Sense strand starting at position 2276 of SEQ ID NO: 1885567
cauuaaucacguuauguag

SEQ ID NO: 2351701 - RNA, 19 nt, Artificial Sequence
  Description of Artificial Sequence: Synthetic oligonucleotide
  Antisense strand to SEQ ID NO: 2351700
cuacauaacgugauuaaug

SEQ ID NO: 2351702 - RNA, 19 nt, Artificial Sequence
  Description of Artificial Sequence: Synthetic oligonucleotide
  Sense strand starting at position 2402 of SEQ ID NO: 1885567
uauugauacuaggagagaa

SEQ ID NO: 2351703 - RNA, 19 nt, Artificial Sequence
  Description of Artificial Sequence: Synthetic oligonucleotide
  Antisense strand to SEQ ID NO: 2351702
uucucuccuaguaucaaua

SEQ ID NO: 2351704 - RNA, 19 nt, Artificial Sequence
  Description of Artificial Sequence: Synthetic oligonucleotide
  Sense strand starting at position 2435 of SEQ ID NO: 1885567
gcacuauaaguaggguaga

SEQ ID NO: 2351705 - RNA, 19 nt, Artificial Sequence
  Description of Artificial Sequence: Synthetic oligonucleotide
  Antisense strand to SEQ ID NO: 2351704
ucuacccuacuuauagugc

SEQ ID NO: 2351706 - RNA, 19 nt, Artificial Sequence
  Description of Artificial Sequence: Synthetic oligonucleotide
  Sense strand starting at position 2485 of SEQ ID NO: 1885567
auuugaaguucugauucua

SEQ ID NO: 2351707 - RNA, 19 nt, Artificial Sequence
  Description of Artificial Sequence: Synthetic oligonucleotide
  Antisense strand to SEQ ID NO: 2351706
uagaaucagaacuucaaau

SEQ ID NO: 2351708 - RNA, 19 nt, Artificial Sequence
  Description of Artificial Sequence: Synthetic oligonucleotide
  Sense strand starting at position 2657 of SEQ ID NO: 1885567
cauagaagugcuuggugaa

SEQ ID NO: 2351709 - RNA, 19 nt, Artificial Sequence
  Description of Artificial Sequence: Synthetic oligonucleotide
  Antisense strand to SEQ ID NO: 2351708
uucaccaagcacuucuaug

SEQ ID NO: 2351710 - RNA, 19 nt, Artificial Sequence
  Description of Artificial Sequence: Synthetic oligonucleotide
  Sense strand starting at position 2658 of SEQ ID NO: 1885567
auagaagugcuuggugaaa

SEQ ID NO: 2351711 - RNA, 19 nt, Artificial Sequence
  Description of Artificial Sequence: Synthetic oligonucleotide
  Antisense strand to SEQ ID NO: 2351710
uuucaccaagcacuucuau

SEQ ID NO: 2351712 - RNA, 19 nt, Artificial Sequence
  Description of Artificial Sequence: Synthetic oligonucleotide
  Sense strand starting at position 2667 of SEQ ID NO: 1885567
cuuggugaaaugugaaaca

SEQ ID NO: 2351713 - RNA, 19 nt, Artificial Sequence
  Description of Artificial Sequence: Synthetic oligonucleotide
  Antisense strand to SEQ ID NO: 2351712
uguuucacauuucaccaag

SEQ ID NO: 2351714 - RNA, 19 nt, Artificial Sequence
  Description of Artificial Sequence: Synthetic oligonucleotide
  Sense strand starting at position 2686 of SEQ ID NO: 1885567
cugugaaaugauugcuuug

SEQ ID NO: 2351715 - RNA, 19 nt, Artificial Sequence
  Description of Artificial Sequence: Synthetic oligonucleotide
  Antisense strand to SEQ ID NO: 2351714
caaagcaaucauuucacag

SEQ ID NO: 2351716 - RNA, 19 nt, Artificial Sequence
  Description of Artificial Sequence: Synthetic oligonucleotide
  Sense strand starting at position 2689 of SEQ ID NO: 1885567
ugaaaugauugcuuuguag

SEQ ID NO: 2351717 - RNA, 19 nt, Artificial Sequence
  Description of Artificial Sequence: Synthetic oligonucleotide
  Antisense strand to SEQ ID NO: 2351716
cuacaaagcaaucauuuca

SEQ ID NO: 2351718 - RNA, 19 nt, Artificial Sequence
  Description of Artificial Sequence: Synthetic oligonucleotide
  Sense strand starting at position 3201 of SEQ ID NO: 1885567
aguuaaugacaauaugcua

SEQ ID NO: 2351719 - RNA, 19 nt, Artificial Sequence
  Description of Artificial Sequence: Synthetic oligonucleotide
  Antisense strand to SEQ ID NO: 2351718
uagcauauugucauuaacu

SEQ ID NO: 2351720 - RNA, 19 nt, Artificial Sequence
  Description of Artificial Sequence: Synthetic oligonucleotide
  Sense strand starting at position 3224 of SEQ ID NO: 1885567
cuugacauuugcuaaagga

SEQ ID NO: 2351721 - RNA, 19 nt, Artificial Sequence
  Description of Artificial Sequence: Synthetic oligonucleotide
  Antisense strand to SEQ ID NO: 2351720
uccuuuagcaaaugucaag

SEQ ID NO: 2351722 - RNA, 19 nt, Artificial Sequence
  Description of Artificial Sequence: Synthetic oligonucleotide
  Sense strand starting at position 3467 of SEQ ID NO: 1885567
cucucaugagcucauguau

SEQ ID NO: 2351723 - RNA, 19 nt, Artificial Sequence
  Description of Artificial Sequence: Synthetic oligonucleotide
  Antisense strand to SEQ ID NO: 2351722
auacaugagcucaugagag

SEQ ID NO: 2351724 - RNA, 19 nt, Artificial Sequence
  Description of Artificial Sequence: Synthetic oligonucleotide
  Sense strand starting at position 3694 of SEQ ID NO: 1885567
ucuuuauaagguugaugaa

SEQ ID NO: 2351725 - RNA, 19 nt, Artificial Sequence
  Description of Artificial Sequence: Synthetic oligonucleotide
  Antisense strand to SEQ ID NO: 2351724
uucaucaaccuuauaaaga

SEQ ID NO: 2351726 - RNA, 19 nt, Artificial Sequence
  Description of Artificial Sequence: Synthetic oligonucleotide
  Sense strand starting at position 3751 of SEQ ID NO: 1885567
ggcaguuuccaagaaccca

SEQ ID NO: 2351727 - RNA, 19 nt, Artificial Sequence
  Description of Artificial Sequence: Synthetic oligonucleotide
  Antisense strand to SEQ ID NO: 2351726
uggguucuuggaaacugcc

SEQ ID NO: 2351728 - RNA, 19 nt, Artificial Sequence
  Description of Artificial Sequence: Synthetic oligonucleotide
  Sense strand starting at position 8 of SEQ ID NO: 1885568
auaugaauguuccugucau

SEQ ID NO: 2351729 - RNA, 19 nt, Artificial Sequence
  Description of Artificial Sequence: Synthetic oligonucleotide
  Antisense strand to SEQ ID NO: 2351728
augacaggaacauucauau

SEQ ID NO: 2351730 - RNA, 19 nt, Artificial Sequence
  Description of Artificial Sequence: Synthetic oligonucleotide
  Sense strand starting at position 138 of SEQ ID NO: 1885568
caaggagucagagguuaua

SEQ ID NO: 2351731 - RNA, 19 nt, Artificial Sequence
  Description of Artificial Sequence: Synthetic oligonucleotide
  Antisense strand to SEQ ID NO: 2351730
uauaaccucugacuccuug

SEQ ID NO: 2351732 - RNA, 19 nt, Artificial Sequence
  Description of Artificial Sequence: Synthetic oligonucleotide
  Sense strand starting at position 151 of SEQ ID NO: 1885568
guuauauuugauugugagu

SEQ ID NO: 2351733 - RNA, 19 nt, Artificial Sequence
  Description of Artificial Sequence: Synthetic oligonucleotide
  Antisense strand to SEQ ID NO: 2351732
acucacaaucaaauauaac

SEQ ID NO: 2351734 - RNA, 19 nt, Artificial Sequence
  Description of Artificial Sequence: Synthetic oligonucleotide
  Sense strand starting at position 247 of SEQ ID NO: 1885568
cuaaaugcucaucaacgau

SEQ ID NO: 2351735 - RNA, 19 nt, Artificial Sequence
  Description of Artificial Sequence: Synthetic oligonucleotide
  Antisense strand to SEQ ID NO: 2351734
aucguugaugagcauuuag

SEQ ID NO: 2351736 - RNA, 19 nt, Artificial Sequence
  Description of Artificial Sequence: Synthetic oligonucleotide
  Sense strand starting at position 253 of SEQ ID NO: 1885568
gcucaucaacgauagacua

SEQ ID NO: 2351737 - RNA, 19 nt, Artificial Sequence
  Description of Artificial Sequence: Synthetic oligonucleotide
  Antisense strand to SEQ ID NO: 2351736
uagucuaucguugaugagc

SEQ ID NO: 2351738 - RNA, 19 nt, Artificial Sequence
  Description of Artificial Sequence: Synthetic oligonucleotide
  Sense strand starting at position 407 of SEQ ID NO: 1885568
acgggaaguucucccuuau

SEQ ID NO: 2351739 - RNA, 19 nt, Artificial Sequence
  Description of Artificial Sequence: Synthetic oligonucleotide
  Antisense strand to SEQ ID NO: 2351738
auaagggagaacuucccgu

SEQ ID NO: 2351740 - RNA, 19 nt, Artificial Sequence
  Description of Artificial Sequence: Synthetic oligonucleotide
  Sense strand starting at position 592 of SEQ ID NO: 1885568
gugacucgaguuuaccuau

SEQ ID NO: 2351741 - RNA, 19 nt, Artificial Sequence
  Description of Artificial Sequence: Synthetic oligonucleotide
  Antisense strand to SEQ ID NO: 2351740
auagguaaacucgagucac

SEQ ID NO: 2351742 - RNA, 19 nt, Artificial Sequence
  Description of Artificial Sequence: Synthetic oligonucleotide
  Sense strand starting at position 620 of SEQ ID NO: 1885568
cuggacauguacccuuuaa

SEQ ID NO: 2351743 - RNA, 19 nt, Artificial Sequence
  Description of Artificial Sequence: Synthetic oligonucleotide
  Antisense strand to SEQ ID NO: 2351742
uuaaaggguacauguccag

SEQ ID NO: 2351744 - RNA, 19 nt, Artificial Sequence
  Description of Artificial Sequence: Synthetic oligonucleotide
  Sense strand starting at position 624 of SEQ ID NO: 1885568
acauguacccuuuaaguua

SEQ ID NO: 2351745 - RNA, 19 nt, Artificial Sequence
  Description of Artificial Sequence: Synthetic oligonucleotide
  Antisense strand to SEQ ID NO: 2351744
uaacuuaaaggguacaugu

SEQ ID NO: 2351746 - RNA, 19 nt, Artificial Sequence
  Description of Artificial Sequence: Synthetic oligonucleotide
  Sense strand starting at position 682 of SEQ ID NO: 1885568
uccagaagugccuaaacaa

SEQ ID NO: 2351747 - RNA, 19 nt, Artificial Sequence
  Description of Artificial Sequence: Synthetic oligonucleotide
  Antisense strand to SEQ ID NO: 2351746
uuguuuaggcacuucugga

SEQ ID NO: 2351748 - RNA, 19 nt, Artificial Sequence
  Description of Artificial Sequence: Synthetic oligonucleotide
  Sense strand starting at position 844 of SEQ ID NO: 1885568
uagauaaccgauugcuuga

SEQ ID NO: 2351749 - RNA, 19 nt, Artificial Sequence
  Description of Artificial Sequence: Synthetic oligonucleotide
  Antisense strand to SEQ ID NO: 2351748
ucaagcaaucgguuaucua

SEQ ID NO: 2351750 - RNA, 19 nt, Artificial Sequence
  Description of Artificial Sequence: Synthetic oligonucleotide
  Sense strand starting at position 846 of SEQ ID NO: 1885568
gauaaccgauugcuugauu

SEQ ID NO: 2351751 - RNA, 19 nt, Artificial Sequence
  Description of Artificial Sequence: Synthetic oligonucleotide
  Antisense strand to SEQ ID NO: 2351750
aaucaagcaaucgguuauc

SEQ ID NO: 2351752 - RNA, 19 nt, Artificial Sequence
  Description of Artificial Sequence: Synthetic oligonucleotide
  Sense strand starting at position 1407 of SEQ ID NO: 1885568
uguaaucauuugucuucuu

SEQ ID NO: 2351753 - RNA, 19 nt, Artificial Sequence
  Description of Artificial Sequence: Synthetic oligonucleotide
  Antisense strand to SEQ ID NO: 2351752
aagaagacaaaugauuaca

SEQ ID NO: 2351754 - RNA, 19 nt, Artificial Sequence
  Description of Artificial Sequence: Synthetic oligonucleotide
  Sense strand starting at position 1560 of SEQ ID NO: 1885568
gugacuauuucugcucauu

SEQ ID NO: 2351755 - RNA, 19 nt, Artificial Sequence
  Description of Artificial Sequence: Synthetic oligonucleotide
  Antisense strand to SEQ ID NO: 2351754
aaugagcagaaauagucac

SEQ ID NO: 2351756 - RNA, 19 nt, Artificial Sequence
  Description of Artificial Sequence: Synthetic oligonucleotide
  Sense strand starting at position 1758 of SEQ ID NO: 1885568
auuguaaugugaccauaaa

SEQ ID NO: 2351757 - RNA, 19 nt, Artificial Sequence
  Description of Artificial Sequence: Synthetic oligonucleotide
  Antisense strand to SEQ ID NO: 2351756
uuuauggucacauuacaau

SEQ ID NO: 2351758 - RNA, 19 nt, Artificial Sequence
  Description of Artificial Sequence: Synthetic oligonucleotide
  Sense strand starting at position 1759 of SEQ ID NO: 1885568
uuguaaugugaccauaaau

SEQ ID NO: 2351759 - RNA, 19 nt, Artificial Sequence
  Description of Artificial Sequence: Synthetic oligonucleotide
  Antisense strand to SEQ ID NO: 2351758
auuuauggucacauuacaa

SEQ ID NO: 2351760 - RNA, 19 nt, Artificial Sequence
  Description of Artificial Sequence: Synthetic oligonucleotide
  Sense strand starting at position 1783 of SEQ ID NO: 1885568
acacaaagucaugagucuu

SEQ ID NO: 2351761 - RNA, 19 nt, Artificial Sequence
  Description of Artificial Sequence: Synthetic oligonucleotide
  Antisense strand to SEQ ID NO: 2351760
aagacucaugacuuugugu

SEQ ID NO: 2351762 - RNA, 19 nt, Artificial Sequence
  Description of Artificial Sequence: Synthetic oligonucleotide
  Sense strand starting at position 1805 of SEQ ID NO: 1885568
uaaggcacccugugaagaa

SEQ ID NO: 2351763 - RNA, 19 nt, Artificial Sequence
  Description of Artificial Sequence: Synthetic oligonucleotide
  Antisense strand to SEQ ID NO: 2351762
uucuucacagggugccuua

SEQ ID NO: 2351764 - RNA, 19 nt, Artificial Sequence
  Description of Artificial Sequence: Synthetic oligonucleotide
  Sense strand starting at position 1868 of SEQ ID NO: 1885568
uagaguuaugaacaucugu

SEQ ID NO: 2351765 - RNA, 19 nt, Artificial Sequence
  Description of Artificial Sequence: Synthetic oligonucleotide
  Antisense strand to SEQ ID NO: 2351764
acagauguucauaacucua

SEQ ID NO: 2351766 - RNA, 19 nt, Artificial Sequence
  Description of Artificial Sequence: Synthetic oligonucleotide
  Sense strand starting at position 1873 of SEQ ID NO: 1885568
uuaugaacaucuguuugga

SEQ ID NO: 2351767 - RNA, 19 nt, Artificial Sequence
  Description of Artificial Sequence: Synthetic oligonucleotide
  Antisense strand to SEQ ID NO: 2351766
uccaaacagauguucauaa

SEQ ID NO: 2351768 - RNA, 19 nt, Artificial Sequence
  Description of Artificial Sequence: Synthetic oligonucleotide
  Sense strand starting at position 1876 of SEQ ID NO: 1885568
ugaacaucuguuuggaaca

SEQ ID NO: 2351769 - RNA, 19 nt, Artificial Sequence
  Description of Artificial Sequence: Synthetic oligonucleotide
  Antisense strand to SEQ ID NO: 2351768
uguuccaaacagauguuca

SEQ ID NO: 2351770 - RNA, 19 nt, Artificial Sequence
  Description of Artificial Sequence: Synthetic oligonucleotide
  Sense strand starting at position 1948 of SEQ ID NO: 1885568
agugcuuaccauuacauca

SEQ ID NO: 2351771 - RNA, 19 nt, Artificial Sequence
  Description of Artificial Sequence: Synthetic oligonucleotide
  Antisense strand to SEQ ID NO: 2351770
ugauguaaugguaagcacu

SEQ ID NO: 2351772 - RNA, 19 nt, Artificial Sequence
  Description of Artificial Sequence: Synthetic oligonucleotide
  Sense strand starting at position 2031 of SEQ ID NO: 1885568
auaaacugucagugaaacu

SEQ ID NO: 2351773 - RNA, 19 nt, Artificial Sequence
  Description of Artificial Sequence: Synthetic oligonucleotide
  Antisense strand to SEQ ID NO: 2351772
aguuucacugacaguuuau

SEQ ID NO: 2351774 - RNA, 19 nt, Artificial Sequence
  Description of Artificial Sequence: Synthetic oligonucleotide
  Sense strand starting at position 2068 of SEQ ID NO: 1885568
acggacauuccuggagguu

SEQ ID NO: 2351775 - RNA, 19 nt, Artificial Sequence
  Description of Artificial Sequence: Synthetic oligonucleotide
  Antisense strand to SEQ ID NO: 2351774
aaccuccaggaauguccgu

SEQ ID NO: 2351776 - RNA, 19 nt, Artificial Sequence
  Description of Artificial Sequence: Synthetic oligonucleotide
  Sense strand starting at position 2071 of SEQ ID NO: 1885568
gacauuccuggagguucua

SEQ ID NO: 2351777 - RNA, 19 nt, Artificial Sequence
  Description of Artificial Sequence: Synthetic oligonucleotide
  Antisense strand to SEQ ID NO: 2351776
uagaaccuccaggaauguc

SEQ ID NO: 2351778 - RNA, 19 nt, Artificial Sequence
  Description of Artificial Sequence: Synthetic oligonucleotide
  Sense strand starting at position 2194 of SEQ ID NO: 1885568
uaagcaaucuguguuggag

SEQ ID NO: 2351779 - RNA, 19 nt, Artificial Sequence
  Description of Artificial Sequence: Synthetic oligonucleotide
  Antisense strand to SEQ ID NO: 2351778
cuccaacacagauugcuua

SEQ ID NO: 2351780 - RNA, 19 nt, Artificial Sequence
  Description of Artificial Sequence: Synthetic oligonucleotide
  Sense strand starting at position 2197 of SEQ ID NO: 1885568
gcaaucuguguuggaggaa

SEQ ID NO: 2351781 - RNA, 19 nt, Artificial Sequence
  Description of Artificial Sequence: Synthetic oligonucleotide
  Antisense strand to SEQ ID NO: 2351780
uuccuccaacacagauugc

SEQ ID NO: 2351782 - RNA, 19 nt, Artificial Sequence
  Description of Artificial Sequence: Synthetic oligonucleotide
  Sense strand starting at position 2312 of SEQ ID NO: 1885568
cauuaaucacguuauguag

SEQ ID NO: 2351783 - RNA, 19 nt, Artificial Sequence
  Description of Artificial Sequence: Synthetic oligonucleotide
  Antisense strand to SEQ ID NO: 2351782
cuacauaacgugauuaaug

SEQ ID NO: 2351784 - RNA, 19 nt, Artificial Sequence
  Description of Artificial Sequence: Synthetic oligonucleotide
  Sense strand starting at position 2438 of SEQ ID NO: 1885568
uauugauacuaggagagaa

SEQ ID NO: 2351785 - RNA, 19 nt, Artificial Sequence
  Description of Artificial Sequence: Synthetic oligonucleotide
  Antisense strand to SEQ ID NO: 2351784
uucucuccuaguaucaaua

SEQ ID NO: 2351786 - RNA, 19 nt, Artificial Sequence
  Description of Artificial Sequence: Synthetic oligonucleotide
  Sense strand starting at position 2471 of SEQ ID NO: 1885568
gcacuauaaguaggguaga

SEQ ID NO: 2351787 - RNA, 19 nt, Artificial Sequence
  Description of Artificial Sequence: Synthetic oligonucleotide
  Antisense strand to SEQ ID NO: 2351786
ucuacccuacuuauagugc

SEQ ID NO: 2351788 - RNA, 19 nt, Artificial Sequence
  Description of Artificial Sequence: Synthetic oligonucleotide
  Sense strand starting at position 2521 of SEQ ID NO: 1885568
auuugaaguucugauucua

SEQ ID NO: 2351789 - RNA, 19 nt, Artificial Sequence
  Description of Artificial Sequence: Synthetic oligonucleotide
  Antisense strand to SEQ ID NO: 2351788
uagaaucagaacuucaaau

SEQ ID NO: 2351790 - RNA, 19 nt, Artificial Sequence
  Description of Artificial Sequence: Synthetic oligonucleotide
  Sense strand starting at position 2693 of SEQ ID NO: 1885568
cauagaagugcuuggugaa

SEQ ID NO: 2351791 - RNA, 19 nt, Artificial Sequence
  Description of Artificial Sequence: Synthetic oligonucleotide
  Antisense strand to SEQ ID NO: 2351790
uucaccaagcacuucuaug

SEQ ID NO: 2351792 - RNA, 19 nt, Artificial Sequence
  Description of Artificial Sequence: Synthetic oligonucleotide
  Sense strand starting at position 2694 of SEQ ID NO: 1885568
auagaagugcuuggugaaa

SEQ ID NO: 2351793 - RNA, 19 nt, Artificial Sequence
  Description of Artificial Sequence: Synthetic oligonucleotide
  Antisense strand to SEQ ID NO: 2351792
uuucaccaagcacuucuau

SEQ ID NO: 2351794 - RNA, 19 nt, Artificial Sequence
  Description of Artificial Sequence: Synthetic oligonucleotide
  Sense strand starting at position 2703 of SEQ ID NO: 1885568
cuuggugaaaugugaaaca

SEQ ID NO: 2351795 - RNA, 19 nt, Artificial Sequence
  Description of Artificial Sequence: Synthetic oligonucleotide
  Antisense strand to SEQ ID NO: 2351794
uguuucacauuucaccaag

SEQ ID NO: 2351796 - RNA, 19 nt, Artificial Sequence
  Description of Artificial Sequence: Synthetic oligonucleotide
  Sense strand starting at position 2725 of SEQ ID NO: 1885568
ugaaaugauugcuuuguag

SEQ ID NO: 2351797 - RNA, 19 nt, Artificial Sequence
  Description of Artificial Sequence: Synthetic oligonucleotide
  Antisense strand to SEQ ID NO: 2351796
cuacaaagcaaucauuuca

SEQ ID NO: 2351798 - RNA, 19 nt, Artificial Sequence
  Description of Artificial Sequence: Synthetic oligonucleotide
  Sense strand starting at position 3237 of SEQ ID NO: 1885568
aguuaaugacaauaugcua

SEQ ID NO: 2351799 - RNA, 19 nt, Artificial Sequence
  Description of Artificial Sequence: Synthetic oligonucleotide
  Antisense strand to SEQ ID NO: 2351798
uagcauauugucauuaacu

SEQ ID NO: 2351800 - RNA, 19 nt, Artificial Sequence
  Description of Artificial Sequence: Synthetic oligonucleotide
  Sense strand starting at position 3260 of SEQ ID NO: 1885568
cuugacauuugcuaaagga

SEQ ID NO: 2351801 - RNA, 19 nt, Artificial Sequence
  Description of Artificial Sequence: Synthetic oligonucleotide
  Antisense strand to SEQ ID NO: 2351800
uccuuuagcaaaugucaag

SEQ ID NO: 2351802 - RNA, 19 nt, Artificial Sequence
  Description of Artificial Sequence: Synthetic oligonucleotide
  Sense strand starting at position 3503 of SEQ ID NO: 1885568
cucucaugagcucauguau

SEQ ID NO: 2351803 - RNA, 19 nt, Artificial Sequence
  Description of Artificial Sequence: Synthetic oligonucleotide
  Antisense strand to SEQ ID NO: 2351802
auacaugagcucaugagag

SEQ ID NO: 2351804 - RNA, 19 nt, Artificial Sequence
  Description of Artificial Sequence: Synthetic oligonucleotide
  Sense strand starting at position 3730 of SEQ ID NO: 1885568
ucuuuauaagguugaugaa

SEQ ID NO: 2351805 - RNA, 19 nt, Artificial Sequence
  Description of Artificial Sequence: Synthetic oligonucleotide
  Antisense strand to SEQ ID NO: 2351804
uucaucaaccuuauaaaga

SEQ ID NO: 2351806 - RNA, 19 nt, Artificial Sequence
  Description of Artificial Sequence: Synthetic oligonucleotide
  Sense strand starting at position 3787 of SEQ ID NO: 1885568
ggcaguuuccaagaaccca

SEQ ID NO: 2351807 - RNA, 19 nt, Artificial Sequence
  Description of Artificial Sequence: Synthetic oligonucleotide
  Antisense strand to SEQ ID NO: 2351806
uggguucuuggaaacugcc

SEQ ID NO: 2351808 - RNA, 19 nt, Artificial Sequence
  Description of Artificial Sequence: Synthetic oligonucleotide
  Sense strand starting at position 168 of SEQ ID NO: 1885569
acuaguggccuugaaucuu

SEQ ID NO: 2351809 - RNA, 19 nt, Artificial Sequence
  Description of Artificial Sequence: Synthetic oligonucleotide
  Antisense strand to SEQ ID NO: 2351808
aagauucaaggccacuagu

SEQ ID NO: 2351810 - RNA, 19 nt, Artificial Sequence
  Description of Artificial Sequence: Synthetic oligonucleotide
  Sense strand starting at position 177 of SEQ ID NO: 1885569
cuugaaucuuaugugauau

SEQ ID NO: 2351811 - RNA, 19 nt, Artificial Sequence
  Description of Artificial Sequence: Synthetic oligonucleotide
  Antisense strand to SEQ ID NO: 2351810
auaucacauaagauucaag

SEQ ID NO: 2351812 - RNA, 19 nt, Artificial Sequence
  Description of Artificial Sequence: Synthetic oligonucleotide
  Sense strand starting at position 383 of SEQ ID NO: 1885569
uccguuacucaacagugau

SEQ ID NO: 2351813 - RNA, 19 nt, Artificial Sequence
  Description of Artificial Sequence: Synthetic oligonucleotide
  Antisense strand to SEQ ID NO: 2351812
aucacuguugaguaacgga

SEQ ID NO: 2351814 - RNA, 19 nt, Artificial Sequence
  Description of Artificial Sequence: Synthetic oligonucleotide
  Sense strand starting at position 460 of SEQ ID NO: 1885569
acagguaggcuauauguau

SEQ ID NO: 2351815 - RNA, 19 nt, Artificial Sequence
  Description of Artificial Sequence: Synthetic oligonucleotide
  Antisense strand to SEQ ID NO: 2351814
auacauauagccuaccugu

SEQ ID NO: 2351816 - RNA, 19 nt, Artificial Sequence
  Description of Artificial Sequence: Synthetic oligonucleotide
  Sense strand starting at position 618 of SEQ ID NO: 1885569
uggaguucucagcauauag

SEQ ID NO: 2351817 - RNA, 19 nt, Artificial Sequence
  Description of Artificial Sequence: Synthetic oligonucleotide
  Antisense strand to SEQ ID NO: 2351816
cuauaugcugagaacucca

SEQ ID NO: 2351818 - RNA, 19 nt, Artificial Sequence
  Description of Artificial Sequence: Synthetic oligonucleotide
  Sense strand starting at position 620 of SEQ ID NO: 1885569
gaguucucagcauauagua

SEQ ID NO: 2351819 - RNA, 19 nt, Artificial Sequence
  Description of Artificial Sequence: Synthetic oligonucleotide
  Antisense strand to SEQ ID NO: 2351818
uacuauaugcugagaacuc

SEQ ID NO: 2351820 - RNA, 19 nt, Artificial Sequence
  Description of Artificial Sequence: Synthetic oligonucleotide
  Sense strand starting at position 657 of SEQ ID NO: 1885569
ggcagcuaucacugaugaa

SEQ ID NO: 2351821 - RNA, 19 nt, Artificial Sequence
  Description of Artificial Sequence: Synthetic oligonucleotide
  Antisense strand to SEQ ID NO: 2351820
uucaucagugauagcugcc

SEQ ID NO: 2351822 - RNA, 19 nt, Artificial Sequence
  Description of Artificial Sequence: Synthetic oligonucleotide
  Sense strand starting at position 848 of SEQ ID NO: 1885569
ucagaacucuaggcaauga

SEQ ID NO: 2351823 - RNA, 19 nt, Artificial Sequence
  Description of Artificial Sequence: Synthetic oligonucleotide
  Antisense strand to SEQ ID NO: 2351822
ucauugccuagaguucuga

SEQ ID NO: 2351824 - RNA, 19 nt, Artificial Sequence
  Description of Artificial Sequence: Synthetic oligonucleotide
  Sense strand starting at position 863 of SEQ ID NO: 1885569
augaccuaguagucaguaa

SEQ ID NO: 2351825 - RNA, 19 nt, Artificial Sequence
  Description of Artificial Sequence: Synthetic oligonucleotide
  Antisense strand to SEQ ID NO: 2351824
uuacugacuacuaggucau

SEQ ID NO: 2351826 - RNA, 19 nt, Artificial Sequence
  Description of Artificial Sequence: Synthetic oligonucleotide
  Sense strand starting at position 867 of SEQ ID NO: 1885569
ccuaguagucaguaaggca

SEQ ID NO: 2351827 - RNA, 19 nt, Artificial Sequence
  Description of Artificial Sequence: Synthetic oligonucleotide
  Antisense strand to SEQ ID NO: 2351826
ugccuuacugacuacuagg

SEQ ID NO: 2351828 - RNA, 19 nt, Artificial Sequence
  Description of Artificial Sequence: Synthetic oligonucleotide
  Sense strand starting at position 874 of SEQ ID NO: 1885569
gucaguaaggcaggaauaa

SEQ ID NO: 2351829 - RNA, 19 nt, Artificial Sequence
  Description of Artificial Sequence: Synthetic oligonucleotide
  Antisense strand to SEQ ID NO: 2351828
uuauuccugccuuacugac

SEQ ID NO: 2351830 - RNA, 19 nt, Artificial Sequence
  Description of Artificial Sequence: Synthetic oligonucleotide
  Sense strand starting at position 883 of SEQ ID NO: 1885569
gcaggaauaaauugugaua

SEQ ID NO: 2351831 - RNA, 19 nt, Artificial Sequence
  Description of Artificial Sequence: Synthetic oligonucleotide
  Antisense strand to SEQ ID NO: 2351830
uaucacaauuuauuccugc

SEQ ID NO: 2351832 - RNA, 19 nt, Artificial Sequence
  Description of Artificial Sequence: Synthetic oligonucleotide
  Sense strand starting at position 897 of SEQ ID NO: 1885569
ugauaagccugguucuauu

SEQ ID NO: 2351833 - RNA, 19 nt, Artificial Sequence
  Description of Artificial Sequence: Synthetic oligonucleotide
  Antisense strand to SEQ ID NO: 2351832
aauagaaccaggcuuauca

SEQ ID NO: 2351834 - RNA, 19 nt, Artificial Sequence
  Description of Artificial Sequence: Synthetic oligonucleotide
  Sense strand starting at position 954 of SEQ ID NO: 1885569
caggaagauccauggcuaa

SEQ ID NO: 2351835 - RNA, 19 nt, Artificial Sequence
  Description of Artificial Sequence: Synthetic oligonucleotide
  Antisense strand to SEQ ID NO: 2351834
uuagccauggaucuuccug

SEQ ID NO: 2351836 - RNA, 19 nt, Artificial Sequence
  Description of Artificial Sequence: Synthetic oligonucleotide
  Sense strand starting at position 1031 of SEQ ID NO: 1885569
uugccuagucaugaacaga

SEQ ID NO: 2351837 - RNA, 19 nt, Artificial Sequence
  Description of Artificial Sequence: Synthetic oligonucleotide
  Antisense strand to SEQ ID NO: 2351836
ucuguucaugacuaggcaa

SEQ ID NO: 2351838 - RNA, 19 nt, Artificial Sequence
  Description of Artificial Sequence: Synthetic oligonucleotide
  Sense strand starting at position 1161 of SEQ ID NO: 1885569
gugcauuugccacgaauuc

SEQ ID NO: 2351839 - RNA, 19 nt, Artificial Sequence
  Description of Artificial Sequence: Synthetic oligonucleotide
  Antisense strand to SEQ ID NO: 2351838
gaauucguggcaaaugcac

SEQ ID NO: 2351840 - RNA, 19 nt, Artificial Sequence
  Description of Artificial Sequence: Synthetic oligonucleotide
  Sense strand starting at position 1227 of SEQ ID NO: 1885569
ccaagugggcuuuagaacu

SEQ ID NO: 2351841 - RNA, 19 nt, Artificial Sequence
  Description of Artificial Sequence: Synthetic oligonucleotide
  Antisense strand to SEQ ID NO: 2351840
aguucuaaagcccacuugg

SEQ ID NO: 2351842 - RNA, 19 nt, Artificial Sequence
  Description of Artificial Sequence: Synthetic oligonucleotide
  Sense strand starting at position 1405 of SEQ ID NO: 1885569
ugaguuuccucaguauuaa

SEQ ID NO: 2351843 - RNA, 19 nt, Artificial Sequence
  Description of Artificial Sequence: Synthetic oligonucleotide
  Antisense strand to SEQ ID NO: 2351842
uuaauacugaggaaacuca

SEQ ID NO: 2351844 - RNA, 19 nt, Artificial Sequence
  Description of Artificial Sequence: Synthetic oligonucleotide
  Sense strand starting at position 1654 of SEQ ID NO: 1885569
caguaaauagaacguauaa

SEQ ID NO: 2351845 - RNA, 19 nt, Artificial Sequence
  Description of Artificial Sequence: Synthetic oligonucleotide
  Antisense strand to SEQ ID NO: 2351844
uuauacguucuauuuacug

SEQ ID NO: 2351846 - RNA, 19 nt, Artificial Sequence
  Description of Artificial Sequence: Synthetic oligonucleotide
  Sense strand starting at position 1668 of SEQ ID NO: 1885569
uauaaucggguuugacauu

SEQ ID NO: 2351847 - RNA, 19 nt, Artificial Sequence
  Description of Artificial Sequence: Synthetic oligonucleotide
  Antisense strand to SEQ ID NO: 2351846
aaugucaaacccgauuaua

SEQ ID NO: 2351848 - RNA, 19 nt, Artificial Sequence
  Description of Artificial Sequence: Synthetic oligonucleotide
  Sense strand starting at position 1674 of SEQ ID NO: 1885569
cggguuugacauugagaca

SEQ ID NO: 2351849 - RNA, 19 nt, Artificial Sequence
  Description of Artificial Sequence: Synthetic oligonucleotide
  Antisense strand to SEQ ID NO: 2351848
ugucucaaugucaaacccg

SEQ ID NO: 2351850 - RNA, 19 nt, Artificial Sequence
  Description of Artificial Sequence: Synthetic oligonucleotide
  Sense strand starting at position 1677 of SEQ ID NO: 1885569
guuugacauugagacauuu

SEQ ID NO: 2351851 - RNA, 19 nt, Artificial Sequence
  Description of Artificial Sequence: Synthetic oligonucleotide
  Antisense strand to SEQ ID NO: 2351850
aaaugucucaaugucaaac

SEQ ID NO: 2351852 - RNA, 19 nt, Artificial Sequence
  Description of Artificial Sequence: Synthetic oligonucleotide
  Sense strand starting at position 2208 of SEQ ID NO: 1885569
cacguagaacucugaaaua

SEQ ID NO: 2351853 - RNA, 19 nt, Artificial Sequence
  Description of Artificial Sequence: Synthetic oligonucleotide
  Antisense strand to SEQ ID NO: 2351852
uauuucagaguucuacgug

SEQ ID NO: 2351854 - RNA, 19 nt, Artificial Sequence
  Description of Artificial Sequence: Synthetic oligonucleotide
  Sense strand starting at position 2264 of SEQ ID NO: 1885569
uguauuucuuaugcucaua

SEQ ID NO: 2351855 - RNA, 19 nt, Artificial Sequence
  Description of Artificial Sequence: Synthetic oligonucleotide
  Antisense strand to SEQ ID NO: 2351854
uaugagcauaagaaauaca

SEQ ID NO: 2351856 - RNA, 19 nt, Artificial Sequence
  Description of Artificial Sequence: Synthetic oligonucleotide
  Sense strand starting at position 2454 of SEQ ID NO: 1885569
ucacguagccuguaaauga

SEQ ID NO: 2351857 - RNA, 19 nt, Artificial Sequence
  Description of Artificial Sequence: Synthetic oligonucleotide
  Antisense strand to SEQ ID NO: 2351856
ucauuuacaggcuacguga

SEQ ID NO: 2351858 - RNA, 19 nt, Artificial Sequence
  Description of Artificial Sequence: Synthetic oligonucleotide
  Sense strand starting at position 2458 of SEQ ID NO: 1885569
guagccuguaaaugaaaga

SEQ ID NO: 2351859 - RNA, 19 nt, Artificial Sequence
  Description of Artificial Sequence: Synthetic oligonucleotide
  Antisense strand to SEQ ID NO: 2351858
ucuuucauuuacaggcuac

SEQ ID NO: 2351860 - RNA, 19 nt, Artificial Sequence
  Description of Artificial Sequence: Synthetic oligonucleotide
  Sense strand starting at position 2614 of SEQ ID NO: 1885569
agucaaugccacuggaaau

SEQ ID NO: 2351861 - RNA, 19 nt, Artificial Sequence
  Description of Artificial Sequence: Synthetic oligonucleotide
  Antisense strand to SEQ ID NO: 2351860
auuuccaguggcauugacu

SEQ ID NO: 2351862 - RNA, 19 nt, Artificial Sequence
  Description of Artificial Sequence: Synthetic oligonucleotide
  Sense strand starting at position 2638 of SEQ ID NO: 1885569
cagggcauguguuuagaca

SEQ ID NO: 2351863 - RNA, 19 nt, Artificial Sequence
  Description of Artificial Sequence: Synthetic oligonucleotide
  Antisense strand to SEQ ID NO: 2351862
ugucuaaacacaugcccug

SEQ ID NO: 2351864 - RNA, 19 nt, Artificial Sequence
  Description of Artificial Sequence: Synthetic oligonucleotide
  Sense strand starting at position 2639 of SEQ ID NO: 1885569
agggcauguguuuagacau

SEQ ID NO: 2351865 - RNA, 19 nt, Artificial Sequence
  Description of Artificial Sequence: Synthetic oligonucleotide
  Antisense strand to SEQ ID NO: 2351864
augucuaaacacaugcccu

SEQ ID NO: 2351866 - RNA, 19 nt, Artificial Sequence
  Description of Artificial Sequence: Synthetic oligonucleotide
  Sense strand starting at position 2835 of SEQ ID NO: 1885569
agggaauuccugcagcaag

SEQ ID NO: 2351867 - RNA, 19 nt, Artificial Sequence
  Description of Artificial Sequence: Synthetic oligonucleotide
  Antisense strand to SEQ ID NO: 2351866
cuugcugcaggaauucccu

SEQ ID NO: 2351868 - RNA, 19 nt, Artificial Sequence
  Description of Artificial Sequence: Synthetic oligonucleotide
  Sense strand starting at position 3123 of SEQ ID NO: 1885569
auaccugaauuugagugau

SEQ ID NO: 2351869 - RNA, 19 nt, Artificial Sequence
  Description of Artificial Sequence: Synthetic oligonucleotide
  Antisense strand to SEQ ID NO: 2351868
aucacucaaauucagguau

SEQ ID NO: 2351870 - RNA, 19 nt, Artificial Sequence
  Description of Artificial Sequence: Synthetic oligonucleotide
  Sense strand starting at position 3156 of SEQ ID NO: 1885569
ccaggauccuuccugacau

SEQ ID NO: 2351871 - RNA, 19 nt, Artificial Sequence
  Description of Artificial Sequence: Synthetic oligonucleotide
  Antisense strand to SEQ ID NO: 2351870
augucaggaaggauccugg

SEQ ID NO: 2351872 - RNA, 19 nt, Artificial Sequence
  Description of Artificial Sequence: Synthetic oligonucleotide
  Sense strand starting at position 3198 of SEQ ID NO: 1885569
gaaggagucuauucucuau

SEQ ID NO: 2351873 - RNA, 19 nt, Artificial Sequence
  Description of Artificial Sequence: Synthetic oligonucleotide
  Antisense strand to SEQ ID NO: 2351872
auagagaauagacuccuuc

SEQ ID NO: 2351874 - RNA, 19 nt, Artificial Sequence
  Description of Artificial Sequence: Synthetic oligonucleotide
  Sense strand starting at position 3201 of SEQ ID NO: 1885569
ggagucuauucucuaugca

SEQ ID NO: 2351875 - RNA, 19 nt, Artificial Sequence
  Description of Artificial Sequence: Synthetic oligonucleotide
  Antisense strand to SEQ ID NO: 2351874
ugcauagagaauagacucc

SEQ ID NO: 2351876 - RNA, 19 nt, Artificial Sequence
  Description of Artificial Sequence: Synthetic oligonucleotide
  Sense strand starting at position 3204 of SEQ ID NO: 1885569
gucuauucucuaugcaaag

SEQ ID NO: 2351877 - RNA, 19 nt, Artificial Sequence
  Description of Artificial Sequence: Synthetic oligonucleotide
  Antisense strand to SEQ ID NO: 2351876
cuuugcauagagaauagac

SEQ ID NO: 2351878 - RNA, 19 nt, Artificial Sequence
  Description of Artificial Sequence: Synthetic oligonucleotide
  Sense strand starting at position 3432 of SEQ ID NO: 1885569
guuauuauggugggaccga

SEQ ID NO: 2351879 - RNA, 19 nt, Artificial Sequence
  Description of Artificial Sequence: Synthetic oligonucleotide
  Antisense strand to SEQ ID NO: 2351878
ucggucccaccauaauaac

SEQ ID NO: 2351880 - RNA, 19 nt, Artificial Sequence
  Description of Artificial Sequence: Synthetic oligonucleotide
  Sense strand starting at position 3526 of SEQ ID NO: 1885569
guuuaaagaugggaaggaa

SEQ ID NO: 2351881 - RNA, 19 nt, Artificial Sequence
  Description of Artificial Sequence: Synthetic oligonucleotide
  Antisense strand to SEQ ID NO: 2351880
uuccuucccaucuuuaaac

SEQ ID NO: 2351882 - RNA, 19 nt, Artificial Sequence
  Description of Artificial Sequence: Synthetic oligonucleotide
  Sense strand starting at position 3591 of SEQ ID NO: 1885569
gcucucuucccgcuggauu

SEQ ID NO: 2351883 - RNA, 19 nt, Artificial Sequence
  Description of Artificial Sequence: Synthetic oligonucleotide
  Antisense strand to SEQ ID NO: 2351882
aauccagcgggaagagagc

SEQ ID NO: 2351884 - RNA, 19 nt, Artificial Sequence
  Description of Artificial Sequence: Synthetic oligonucleotide
  Sense strand starting at position 3788 of SEQ ID NO: 1885569
gaccaauaaucuuugugug

SEQ ID NO: 2351885 - RNA, 19 nt, Artificial Sequence
  Description of Artificial Sequence: Synthetic oligonucleotide
  Antisense strand to SEQ ID NO: 2351884
cacacaaagauuauugguc

SEQ ID NO: 2351886 - RNA, 19 nt, Artificial Sequence
  Description of Artificial Sequence: Synthetic oligonucleotide
  Sense strand starting at position 3826 of SEQ ID NO: 1885569
gugugugaucuguugucac

SEQ ID NO: 2351887 - RNA, 19 nt, Artificial Sequence
  Description of Artificial Sequence: Synthetic oligonucleotide
  Antisense strand to SEQ ID NO: 2351886
gugacaacagaucacacac

SEQ ID NO: 2351888 - RNA, 19 nt, Artificial Sequence
  Description of Artificial Sequence: Synthetic oligonucleotide
  Sense strand starting at position 298 of SEQ ID NO: 1885570
gaagaaacagcguguaaga

SEQ ID NO: 2351889 - RNA, 19 nt, Artificial Sequence
  Description of Artificial Sequence: Synthetic oligonucleotide
  Antisense strand to SEQ ID NO: 2351888
ucuuacacgcuguuucuuc

SEQ ID NO: 2351890 - RNA, 19 nt, Artificial Sequence
  Description of Artificial Sequence: Synthetic oligonucleotide
  Sense strand starting at position 315 of SEQ ID NO: 1885570
gaggaaguugggugagacu

SEQ ID NO: 2351891 - RNA, 19 nt, Artificial Sequence
  Description of Artificial Sequence: Synthetic oligonucleotide
  Antisense strand to SEQ ID NO: 2351890
agucucacccaacuuccuc

SEQ ID NO: 2351892 - RNA, 19 nt, Artificial Sequence
  Description of Artificial Sequence: Synthetic oligonucleotide
  Sense strand starting at position 461 of SEQ ID NO: 1885570
cuguaaucuuggcugagaa

SEQ ID NO: 2351893 - RNA, 19 nt, Artificial Sequence
  Description of Artificial Sequence: Synthetic oligonucleotide
  Antisense strand to SEQ ID NO: 2351892
uucucagccaagauuacag

SEQ ID NO: 2351894 - RNA, 19 nt, Artificial Sequence
  Description of Artificial Sequence: Synthetic oligonucleotide
  Sense strand starting at position 462 of SEQ ID NO: 1885570
uguaaucuuggcugagaaa

SEQ ID NO: 2351895 - RNA, 19 nt, Artificial Sequence
  Description of Artificial Sequence: Synthetic oligonucleotide
  Antisense strand to SEQ ID NO: 2351894
uuucucagccaagauuaca

SEQ ID NO: 2351896 - RNA, 19 nt, Artificial Sequence
  Description of Artificial Sequence: Synthetic oligonucleotide
  Sense strand starting at position 492 of SEQ ID NO: 1885570
aggcuuggguaacuaugaa

SEQ ID NO: 2351897 - RNA, 19 nt, Artificial Sequence
  Description of Artificial Sequence: Synthetic oligonucleotide
  Antisense strand to SEQ ID NO: 2351896
uucauaguuacccaagccu

SEQ ID NO: 2351898 - RNA, 19 nt, Artificial Sequence
  Description of Artificial Sequence: Synthetic oligonucleotide
  Sense strand starting at position 552 of SEQ ID NO: 1885570
gacuccuguucccuggaca

SEQ ID NO: 2351899 - RNA, 19 nt, Artificial Sequence
  Description of Artificial Sequence: Synthetic oligonucleotide
  Antisense strand to SEQ ID NO: 2351898
uguccagggaacaggaguc

SEQ ID NO: 2351900 - RNA, 19 nt, Artificial Sequence
  Description of Artificial Sequence: Synthetic oligonucleotide
  Sense strand starting at position 585 of SEQ ID NO: 1885570
agcugcucuaaggaggaau

SEQ ID NO: 2351901 - RNA, 19 nt, Artificial Sequence
  Description of Artificial Sequence: Synthetic oligonucleotide
  Antisense strand to SEQ ID NO: 2351900
auuccuccuuagagcagcu

SEQ ID NO: 2351902 - RNA, 19 nt, Artificial Sequence
  Description of Artificial Sequence: Synthetic oligonucleotide
  Sense strand starting at position 596 of SEQ ID NO: 1885570
ggaggaaugcuugaggcuu

SEQ ID NO: 2351903 - RNA, 19 nt, Artificial Sequence
  Description of Artificial Sequence: Synthetic oligonucleotide
  Antisense strand to SEQ ID NO: 2351902
aagccucaagcauuccucc

SEQ ID NO: 2351904 - RNA, 19 nt, Artificial Sequence
  Description of Artificial Sequence: Synthetic oligonucleotide
  Sense strand starting at position 702 of SEQ ID NO: 1885570
cuuuaagagcccugaaguc

SEQ ID NO: 2351905 - RNA, 19 nt, Artificial Sequence
  Description of Artificial Sequence: Synthetic oligonucleotide
  Antisense strand to SEQ ID NO: 2351904
gacuucagggcucuuaaag

SEQ ID NO: 2351906 - RNA, 19 nt, Artificial Sequence
  Description of Artificial Sequence: Synthetic oligonucleotide
  Sense strand starting at position 799 of SEQ ID NO: 1885570
ggcgauguggaacacuauu

SEQ ID NO: 2351907 - RNA, 19 nt, Artificial Sequence
  Description of Artificial Sequence: Synthetic oligonucleotide
  Antisense strand to SEQ ID NO: 2351906
aauaguguuccacaucgcc

SEQ ID NO: 2351908 - RNA, 19 nt, Artificial Sequence
  Description of Artificial Sequence: Synthetic oligonucleotide
  Sense strand starting at position 807 of SEQ ID NO: 1885570
ggaacacuauuugaagcua

SEQ ID NO: 2351909 - RNA, 19 nt, Artificial Sequence
  Description of Artificial Sequence: Synthetic oligonucleotide
  Antisense strand to SEQ ID NO: 2351908
uagcuucaaauaguguucc

SEQ ID NO: 2351910 - RNA, 19 nt, Artificial Sequence
  Description of Artificial Sequence: Synthetic oligonucleotide
  Sense strand starting at position 861 of SEQ ID NO: 1885570
gcaaguuuggauggucgaa

SEQ ID NO: 2351911 - RNA, 19 nt, Artificial Sequence
  Description of Artificial Sequence: Synthetic oligonucleotide
  Antisense strand to SEQ ID NO: 2351910
uucgaccauccaaacuugc

SEQ ID NO: 2351912 - RNA, 19 nt, Artificial Sequence
  Description of Artificial Sequence: Synthetic oligonucleotide
  Sense strand starting at position 907 of SEQ ID NO: 1885570
guuggcgaaauagguuaaa

SEQ ID NO: 2351913 - RNA, 19 nt, Artificial Sequence
  Description of Artificial Sequence: Synthetic oligonucleotide
  Antisense strand to SEQ ID NO: 2351912
uuuaaccuauuucgccaac

SEQ ID NO: 2351914 - RNA, 19 nt, Artificial Sequence
  Description of Artificial Sequence: Synthetic oligonucleotide
  Sense strand starting at position 910 of SEQ ID NO: 1885570
ggcgaaauagguuaaauua

SEQ ID NO: 2351915 - RNA, 19 nt, Artificial Sequence
  Description of Artificial Sequence: Synthetic oligonucleotide
  Antisense strand to SEQ ID NO: 2351914
uaauuuaaccuauuucgcc

SEQ ID NO: 2351916 - RNA, 19 nt, Artificial Sequence
  Description of Artificial Sequence: Synthetic oligonucleotide
  Sense strand starting at position 1043 of SEQ ID NO: 1885570
aggcgucuugaaggauuaa

SEQ ID NO: 2351917 - RNA, 19 nt, Artificial Sequence
  Description of Artificial Sequence: Synthetic oligonucleotide
  Antisense strand to SEQ ID NO: 2351916
uuaauccuucaagacgccu

SEQ ID NO: 2351918 - RNA, 19 nt, Artificial Sequence
  Description of Artificial Sequence: Synthetic oligonucleotide
  Sense strand starting at position 1044 of SEQ ID NO: 1885570
ggcgucuugaaggauuaac

SEQ ID NO: 2351919 - RNA, 19 nt, Artificial Sequence
  Description of Artificial Sequence: Synthetic oligonucleotide
  Antisense strand to SEQ ID NO: 2351918
guuaauccuucaagacgcc

SEQ ID NO: 2351920 - RNA, 19 nt, Artificial Sequence
  Description of Artificial Sequence: Synthetic oligonucleotide
  Sense strand starting at position 1179 of SEQ ID NO: 1885570
ucuggaaucucgcuggauu

SEQ ID NO: 2351921 - RNA, 19 nt, Artificial Sequence
  Description of Artificial Sequence: Synthetic oligonucleotide
  Antisense strand to SEQ ID NO: 2351920
aauccagcgagauuccaga

SEQ ID NO: 2351922 - RNA, 19 nt, Artificial Sequence
  Description of Artificial Sequence: Synthetic oligonucleotide
  Sense strand starting at position 1191 of SEQ ID NO: 1885570
cuggauuucucccaggaau

SEQ ID NO: 2351923 - RNA, 19 nt, Artificial Sequence
  Description of Artificial Sequence: Synthetic oligonucleotide
  Antisense strand to SEQ ID NO: 2351922
auuccugggagaaauccag

SEQ ID NO: 2351924 - RNA, 19 nt, Artificial Sequence
  Description of Artificial Sequence: Synthetic oligonucleotide
  Sense strand starting at position 1229 of SEQ ID NO: 1885570
ugcaaaucgcuuuacauca

SEQ ID NO: 2351925 - RNA, 19 nt, Artificial Sequence
  Description of Artificial Sequence: Synthetic oligonucleotide
  Antisense strand to SEQ ID NO: 2351924
ugauguaaagcgauuugca

SEQ ID NO: 2351926 - RNA, 19 nt, Artificial Sequence
  Description of Artificial Sequence: Synthetic oligonucleotide
  Sense strand starting at position 1346 of SEQ ID NO: 1885570
uuaugaaggugauucguau

SEQ ID NO: 2351927 - RNA, 19 nt, Artificial Sequence
  Description of Artificial Sequence: Synthetic oligonucleotide
  Antisense strand to SEQ ID NO: 2351926
auacgaaucaccuucauaa

SEQ ID NO: 2351928 - RNA, 19 nt, Artificial Sequence
  Description of Artificial Sequence: Synthetic oligonucleotide
  Sense strand starting at position 1738 of SEQ ID NO: 1885570
acagcguugggcgagagau

SEQ ID NO: 2351929 - RNA, 19 nt, Artificial Sequence
  Description of Artificial Sequence: Synthetic oligonucleotide
  Antisense strand to SEQ ID NO: 2351928
aucucucgcccaacgcugu

SEQ ID NO: 2351930 - RNA, 19 nt, Artificial Sequence
  Description of Artificial Sequence: Synthetic oligonucleotide
  Sense strand starting at position 1739 of SEQ ID NO: 1885570
cagcguugggcgagagaug

SEQ ID NO: 2351931 - RNA, 19 nt, Artificial Sequence
  Description of Artificial Sequence: Synthetic oligonucleotide
  Antisense strand to SEQ ID NO: 2351930
caucucucgcccaacgcug

SEQ ID NO: 2351932 - RNA, 19 nt, Artificial Sequence
  Description of Artificial Sequence: Synthetic oligonucleotide
  Sense strand starting at position 1758 of SEQ ID NO: 1885570
gcaugauuuccgggcacag

SEQ ID NO: 2351933 - RNA, 19 nt, Artificial Sequence
  Description of Artificial Sequence: Synthetic oligonucleotide
  Antisense strand to SEQ ID NO: 2351932
cugugcccggaaaucaugc

SEQ ID NO: 2351934 - RNA, 19 nt, Artificial Sequence
  Description of Artificial Sequence: Synthetic oligonucleotide
  Sense strand starting at position 2820 of SEQ ID NO: 1885570
gguuguugcggauacugau

SEQ ID NO: 2351935 - RNA, 19 nt, Artificial Sequence
  Description of Artificial Sequence: Synthetic oligonucleotide
  Antisense strand to SEQ ID NO: 2351934
aucaguauccgcaacaacc

SEQ ID NO: 2351936 - RNA, 19 nt, Artificial Sequence
  Description of Artificial Sequence: Synthetic oligonucleotide
  Sense strand starting at position 2854 of SEQ ID NO: 1885570
cuuucuaauggcuaagagu

SEQ ID NO: 2351937 - RNA, 19 nt, Artificial Sequence
  Description of Artificial Sequence: Synthetic oligonucleotide
  Antisense strand to SEQ ID NO: 2351936
acucuuagccauuagaaag

SEQ ID NO: 2351938 - RNA, 19 nt, Artificial Sequence
  Description of Artificial Sequence: Synthetic oligonucleotide
  Sense strand starting at position 2862 of SEQ ID NO: 1885570
uggcuaagaguucaggcau

SEQ ID NO: 2351939 - RNA, 19 nt, Artificial Sequence
  Description of Artificial Sequence: Synthetic oligonucleotide
  Antisense strand to SEQ ID NO: 2351938
augccugaacucuuagcca

SEQ ID NO: 2351940 - RNA, 19 nt, Artificial Sequence
  Description of Artificial Sequence: Synthetic oligonucleotide
  Sense strand starting at position 2919 of SEQ ID NO: 1885570
acuccaguuggaugaucuu

SEQ ID NO: 2351941 - RNA, 19 nt, Artificial Sequence
  Description of Artificial Sequence: Synthetic oligonucleotide
  Antisense strand to SEQ ID NO: 2351940
aagaucauccaacuggagu

SEQ ID NO: 2351942 - RNA, 19 nt, Artificial Sequence
  Description of Artificial Sequence: Synthetic oligonucleotide
  Sense strand starting at position 3146 of SEQ ID NO: 1885570
agagaaacuuacguaguau

SEQ ID NO: 2351943 - RNA, 19 nt, Artificial Sequence
  Description of Artificial Sequence: Synthetic oligonucleotide
  Antisense strand to SEQ ID NO: 2351942
auacuacguaaguuucucu

SEQ ID NO: 2351944 - RNA, 19 nt, Artificial Sequence
  Description of Artificial Sequence: Synthetic oligonucleotide
  Sense strand starting at position 3166 of SEQ ID NO: 1885570
aguagugcaucuccuaaau

SEQ ID NO: 2351945 - RNA, 19 nt, Artificial Sequence
  Description of Artificial Sequence: Synthetic oligonucleotide
  Antisense strand to SEQ ID NO: 2351944
auuuaggagaugcacuacu

SEQ ID NO: 2351946 - RNA, 19 nt, Artificial Sequence
  Description of Artificial Sequence: Synthetic oligonucleotide
  Sense strand starting at position 3209 of SEQ ID NO: 1885570
ucucgagucuucuuuagau

SEQ ID NO: 2351947 - RNA, 19 nt, Artificial Sequence
  Description of Artificial Sequence: Synthetic oligonucleotide
  Antisense strand to SEQ ID NO: 2351946
aucuaaagaagacucgaga

SEQ ID NO: 2351948 - RNA, 19 nt, Artificial Sequence
  Description of Artificial Sequence: Synthetic oligonucleotide
  Sense strand starting at position 3600 of SEQ ID NO: 1885570
augugcauuugucaaauaa

SEQ ID NO: 2351949 - RNA, 19 nt, Artificial Sequence
  Description of Artificial Sequence: Synthetic oligonucleotide
  Antisense strand to SEQ ID NO: 2351948
uuauuugacaaaugcacau

SEQ ID NO: 2351950 - RNA, 19 nt, Artificial Sequence
  Description of Artificial Sequence: Synthetic oligonucleotide
  Sense strand starting at position 3638 of SEQ ID NO: 1885570
aucacacugcuucgcaauu

SEQ ID NO: 2351951 - RNA, 19 nt, Artificial Sequence
  Description of Artificial Sequence: Synthetic oligonucleotide
  Antisense strand to SEQ ID NO: 2351950
aauugcgaagcagugugau

SEQ ID NO: 2351952 - RNA, 19 nt, Artificial Sequence
  Description of Artificial Sequence: Synthetic oligonucleotide
  Sense strand starting at position 3678 of SEQ ID NO: 1885570
uccaaaugguuacauggaa

SEQ ID NO: 2351953 - RNA, 19 nt, Artificial Sequence
  Description of Artificial Sequence: Synthetic oligonucleotide
  Antisense strand to SEQ ID NO: 2351952
uuccauguaaccauuugga

SEQ ID NO: 2351954 - RNA, 19 nt, Artificial Sequence
  Description of Artificial Sequence: Synthetic oligonucleotide
  Sense strand starting at position 3721 of SEQ ID NO: 1885570
cacagucauuguguuaucu

SEQ ID NO: 2351955 - RNA, 19 nt, Artificial Sequence
  Description of Artificial Sequence: Synthetic oligonucleotide
  Antisense strand to SEQ ID NO: 2351954
agauaacacaaugacugug

SEQ ID NO: 2351956 - RNA, 19 nt, Artificial Sequence
  Description of Artificial Sequence: Synthetic oligonucleotide
  Sense strand starting at position 3762 of SEQ ID NO: 1885570
aaaugaagcguacauauua

SEQ ID NO: 2351957 - RNA, 19 nt, Artificial Sequence
  Description of Artificial Sequence: Synthetic oligonucleotide
  Antisense strand to SEQ ID NO: 2351956
uaauauguacgcuucauuu

SEQ ID NO: 2351958 - RNA, 19 nt, Artificial Sequence
  Description of Artificial Sequence: Synthetic oligonucleotide
  Sense strand starting at position 3848 of SEQ ID NO: 1885570
gaagaaguacuuugucacu

SEQ ID NO: 2351959 - RNA, 19 nt, Artificial Sequence
  Description of Artificial Sequence: Synthetic oligonucleotide
  Antisense strand to SEQ ID NO: 2351958
agugacaaaguacuucuuc

SEQ ID NO: 2351960 - RNA, 19 nt, Artificial Sequence
  Description of Artificial Sequence: Synthetic oligonucleotide
  Sense strand starting at position 3850 of SEQ ID NO: 1885570
agaaguacuuugucacuga

SEQ ID NO: 2351961 - RNA, 19 nt, Artificial Sequence
  Description of Artificial Sequence: Synthetic oligonucleotide
  Antisense strand to SEQ ID NO: 2351960
ucagugacaaaguacuucu

SEQ ID NO: 2351962 - RNA, 19 nt, Artificial Sequence
  Description of Artificial Sequence: Synthetic oligonucleotide
  Sense strand starting at position 3853 of SEQ ID NO: 1885570
aguacuuugucacugacaa

SEQ ID NO: 2351963 - RNA, 19 nt, Artificial Sequence
  Description of Artificial Sequence: Synthetic oligonucleotide
  Antisense strand to SEQ ID NO: 2351962
uugucagugacaaaguacu

SEQ ID NO: 2351964 - RNA, 19 nt, Artificial Sequence
  Description of Artificial Sequence: Synthetic oligonucleotide
  Sense strand starting at position 3854 of SEQ ID NO: 1885570
guacuuugucacugacaac

SEQ ID NO: 2351965 - RNA, 19 nt, Artificial Sequence
  Description of Artificial Sequence: Synthetic oligonucleotide
  Antisense strand to SEQ ID NO: 2351964
guugucagugacaaaguac

SEQ ID NO: 2351966 - RNA, 19 nt, Artificial Sequence
  Description of Artificial Sequence: Synthetic oligonucleotide
  Sense strand starting at position 3885 of SEQ ID NO: 1885570
agcucauaguguuuauuua

SEQ ID NO: 2351967 - RNA, 19 nt, Artificial Sequence
  Description of Artificial Sequence: Synthetic oligonucleotide
  Antisense strand to SEQ ID NO: 2351966
uaaauaaacacuaugagcu

SEQ ID NO: 2351968 - RNA, 19 nt, Artificial Sequence
  Description of Artificial Sequence: Synthetic oligonucleotide
  Sense strand starting at position 170 of SEQ ID NO: 1885571
ugccuauuccuaggaagga

SEQ ID NO: 2351969 - RNA, 19 nt, Artificial Sequence
  Description of Artificial Sequence: Synthetic oligonucleotide
  Antisense strand to SEQ ID NO: 2351968
uccuuccuaggaauaggca

SEQ ID NO: 2351970 - RNA, 19 nt, Artificial Sequence
  Description of Artificial Sequence: Synthetic oligonucleotide
  Sense strand starting at position 186 of SEQ ID NO: 1885571
ggauuuggauaccagucau

SEQ ID NO: 2351971 - RNA, 19 nt, Artificial Sequence
  Description of Artificial Sequence: Synthetic oligonucleotide
  Antisense strand to SEQ ID NO: 2351970
augacugguauccaaaucc

SEQ ID NO: 2351972 - RNA, 19 nt, Artificial Sequence
  Description of Artificial Sequence: Synthetic oligonucleotide
  Sense strand starting at position 219 of SEQ ID NO: 1885571
gccucauggcaugauguuu

SEQ ID NO: 2351973 - RNA, 19 nt, Artificial Sequence
  Description of Artificial Sequence: Synthetic oligonucleotide
  Antisense strand to SEQ ID NO: 2351972
aaacaucaugccaugaggc

SEQ ID NO: 2351974 - RNA, 19 nt, Artificial Sequence
  Description of Artificial Sequence: Synthetic oligonucleotide
  Sense strand starting at position 262 of SEQ ID NO: 1885571
uuaguagcuuggguugaaa

SEQ ID NO: 2351975 - RNA, 19 nt, Artificial Sequence
  Description of Artificial Sequence: Synthetic oligonucleotide
  Antisense strand to SEQ ID NO: 2351974
uuucaacccaagcuacuaa

SEQ ID NO: 2351976 - RNA, 19 nt, Artificial Sequence
  Description of Artificial Sequence: Synthetic oligonucleotide
  Sense strand starting at position 264 of SEQ ID NO: 1885571
aguagcuuggguugaaauc

SEQ ID NO: 2351977 - RNA, 19 nt, Artificial Sequence
  Description of Artificial Sequence: Synthetic oligonucleotide
  Antisense strand to SEQ ID NO: 2351976
gauuucaacccaagcuacu

SEQ ID NO: 2351978 - RNA, 19 nt, Artificial Sequence
  Description of Artificial Sequence: Synthetic oligonucleotide
  Sense strand starting at position 265 of SEQ ID NO: 1885571
guagcuuggguugaaaucu

SEQ ID NO: 2351979 - RNA, 19 nt, Artificial Sequence
  Description of Artificial Sequence: Synthetic oligonucleotide
  Antisense strand to SEQ ID NO: 2351978
agauuucaacccaagcuac

SEQ ID NO: 2351980 - RNA, 19 nt, Artificial Sequence
  Description of Artificial Sequence: Synthetic oligonucleotide
  Sense strand starting at position 301 of SEQ ID NO: 1885571
ugcaacuuugaauauguua

SEQ ID NO: 2351981 - RNA, 19 nt, Artificial Sequence
  Description of Artificial Sequence: Synthetic oligonucleotide
  Antisense strand to SEQ ID NO: 2351980
uaacauauucaaaguugca

SEQ ID NO: 2351982 - RNA, 19 nt, Artificial Sequence
  Description of Artificial Sequence: Synthetic oligonucleotide
  Sense strand starting at position 332 of SEQ ID NO: 1885571
augggcaaguuuccucaau

SEQ ID NO: 2351983 - RNA, 19 nt, Artificial Sequence
  Description of Artificial Sequence: Synthetic oligonucleotide
  Antisense strand to SEQ ID NO: 2351982
auugaggaaacuugcccau

SEQ ID NO: 2351984 - RNA, 19 nt, Artificial Sequence
  Description of Artificial Sequence: Synthetic oligonucleotide
  Sense strand starting at position 334 of SEQ ID NO: 1885571
gggcaaguuuccucaaucu

SEQ ID NO: 2351985 - RNA, 19 nt, Artificial Sequence
  Description of Artificial Sequence: Synthetic oligonucleotide
  Antisense strand to SEQ ID NO: 2351984
agauugaggaaacuugccc

SEQ ID NO: 2351986 - RNA, 19 nt, Artificial Sequence
  Description of Artificial Sequence: Synthetic oligonucleotide
  Sense strand starting at position 361 of SEQ ID NO: 1885571
gggcuaacaguauauauca

SEQ ID NO: 2351987 - RNA, 19 nt, Artificial Sequence
  Description of Artificial Sequence: Synthetic oligonucleotide
  Antisense strand to SEQ ID NO: 2351986
ugauauauacuguuagccc

SEQ ID NO: 2351988 - RNA, 19 nt, Artificial Sequence
  Description of Artificial Sequence: Synthetic oligonucleotide
  Sense strand starting at position 370 of SEQ ID NO: 1885571
guauauaucaugugauugu

SEQ ID NO: 2351989 - RNA, 19 nt, Artificial Sequence
  Description of Artificial Sequence: Synthetic oligonucleotide
  Antisense strand to SEQ ID NO: 2351988
acaaucacaugauauauac

SEQ ID NO: 2351990 - RNA, 19 nt, Artificial Sequence
  Description of Artificial Sequence: Synthetic oligonucleotide
  Sense strand starting at position 489 of SEQ ID NO: 1885571
ugugcuguaccucaauaag

SEQ ID NO: 2351991 - RNA, 19 nt, Artificial Sequence
  Description of Artificial Sequence: Synthetic oligonucleotide
  Antisense strand to SEQ ID NO: 2351990
cuuauugagguacagcaca

SEQ ID NO: 2351992 - RNA, 19 nt, Artificial Sequence
  Description of Artificial Sequence: Synthetic oligonucleotide
  Sense strand starting at position 764 of SEQ ID NO: 1885571
gcgugaugucauuccuccu

SEQ ID NO: 2351993 - RNA, 19 nt, Artificial Sequence
  Description of Artificial Sequence: Synthetic oligonucleotide
  Antisense strand to SEQ ID NO: 2351992
aggaggaaugacaucacgc

SEQ ID NO: 2351994 - RNA, 19 nt, Artificial Sequence
  Description of Artificial Sequence: Synthetic oligonucleotide
  Sense strand starting at position 971 of SEQ ID NO: 1885571
guugucaccucccuccaua

SEQ ID NO: 2351995 - RNA, 19 nt, Artificial Sequence
  Description of Artificial Sequence: Synthetic oligonucleotide
  Antisense strand to SEQ ID NO: 2351994
uauggagggaggugacaac

SEQ ID NO: 2351996 - RNA, 19 nt, Artificial Sequence
  Description of Artificial Sequence: Synthetic oligonucleotide
  Sense strand starting at position 1004 of SEQ ID NO: 1885571
ucugguccucaaugcaauu

SEQ ID NO: 2351997 - RNA, 19 nt, Artificial Sequence
  Description of Artificial Sequence: Synthetic oligonucleotide
  Antisense strand to SEQ ID NO: 2351996
aauugcauugaggaccaga

SEQ ID NO: 2351998 - RNA, 19 nt, Artificial Sequence
  Description of Artificial Sequence: Synthetic oligonucleotide
  Sense strand starting at position 1046 of SEQ ID NO: 1885571
aggaaaggucccugggcaa

SEQ ID NO: 2351999 - RNA, 19 nt, Artificial Sequence
  Description of Artificial Sequence: Synthetic oligonucleotide
  Antisense strand to SEQ ID NO: 2351998
uugcccagggaccuuuccu

SEQ ID NO: 2352000 - RNA, 19 nt, Artificial Sequence
  Description of Artificial Sequence: Synthetic oligonucleotide
  Sense strand starting at position 1084 of SEQ ID NO: 1885571
accuguaggugugugaauu

SEQ ID NO: 2352001 - RNA, 19 nt, Artificial Sequence
  Description of Artificial Sequence: Synthetic oligonucleotide
  Antisense strand to SEQ ID NO: 2352000
aauucacacaccuacaggu

SEQ ID NO: 2352002 - RNA, 19 nt, Artificial Sequence
  Description of Artificial Sequence: Synthetic oligonucleotide
  Sense strand starting at position 1085 of SEQ ID NO: 1885571
ccuguaggugugugaauua

SEQ ID NO: 2352003 - RNA, 19 nt, Artificial Sequence
  Description of Artificial Sequence: Synthetic oligonucleotide
  Antisense strand to SEQ ID NO: 2352002
uaauucacacaccuacagg

SEQ ID NO: 2352004 - RNA, 19 nt, Artificial Sequence
  Description of Artificial Sequence: Synthetic oligonucleotide
  Sense strand starting at position 1098 of SEQ ID NO: 1885571
gaauuaccgucuucuaugu

SEQ ID NO: 2352005 - RNA, 19 nt, Artificial Sequence
  Description of Artificial Sequence: Synthetic oligonucleotide
  Antisense strand to SEQ ID NO: 2352004
acauagaagacgguaauuc

SEQ ID NO: 2352006 - RNA, 19 nt, Artificial Sequence
  Description of Artificial Sequence: Synthetic oligonucleotide
  Sense strand starting at position 1286 of SEQ ID NO: 1885571
guaguuggcacugauaggu

SEQ ID NO: 2352007 - RNA, 19 nt, Artificial Sequence
  Description of Artificial Sequence: Synthetic oligonucleotide
  Antisense strand to SEQ ID NO: 2352006
accuaucagugccaacuac

SEQ ID NO: 2352008 - RNA, 19 nt, Artificial Sequence
  Description of Artificial Sequence: Synthetic oligonucleotide
  Sense strand starting at position 1415 of SEQ ID NO: 1885571
gaugacagauguuagagau

SEQ ID NO: 2352009 - RNA, 19 nt, Artificial Sequence
  Description of Artificial Sequence: Synthetic oligonucleotide
  Antisense strand to SEQ ID NO: 2352008
aucucuaacaucugucauc

SEQ ID NO: 2352010 - RNA, 19 nt, Artificial Sequence
  Description of Artificial Sequence: Synthetic oligonucleotide
  Sense strand starting at position 1729 of SEQ ID NO: 1885571
aauugaaaugcagggcuaa

SEQ ID NO: 2352011 - RNA, 19 nt, Artificial Sequence
  Description of Artificial Sequence: Synthetic oligonucleotide
  Antisense strand to SEQ ID NO: 2352010
uuagcccugcauuucaauu

SEQ ID NO: 2352012 - RNA, 19 nt, Artificial Sequence
  Description of Artificial Sequence: Synthetic oligonucleotide
  Sense strand starting at position 2030 of SEQ ID NO: 1885571
auaucugaugccuggagca

SEQ ID NO: 2352013 - RNA, 19 nt, Artificial Sequence
  Description of Artificial Sequence: Synthetic oligonucleotide
  Antisense strand to SEQ ID NO: 2352012
ugcuccaggcaucagauau

SEQ ID NO: 2352014 - RNA, 19 nt, Artificial Sequence
  Description of Artificial Sequence: Synthetic oligonucleotide
  Sense strand starting at position 2123 of SEQ ID NO: 1885571
gauacagaccuuuguaguu

SEQ ID NO: 2352015 - RNA, 19 nt, Artificial Sequence
  Description of Artificial Sequence: Synthetic oligonucleotide
  Antisense strand to SEQ ID NO: 2352014
aacuacaaaggucuguauc

SEQ ID NO: 2352016 - RNA, 19 nt, Artificial Sequence
  Description of Artificial Sequence: Synthetic oligonucleotide
  Sense strand starting at position 2625 of SEQ ID NO: 1885571
agcuuuauugcauaagcau

SEQ ID NO: 2352017 - RNA, 19 nt, Artificial Sequence
  Description of Artificial Sequence: Synthetic oligonucleotide
  Antisense strand to SEQ ID NO: 2352016
augcuuaugcaauaaagcu

SEQ ID NO: 2352018 - RNA, 19 nt, Artificial Sequence
  Description of Artificial Sequence: Synthetic oligonucleotide
  Sense strand starting at position 2736 of SEQ ID NO: 1885571
gacucugaagugugagaaa

SEQ ID NO: 2352019 - RNA, 19 nt, Artificial Sequence
  Description of Artificial Sequence: Synthetic oligonucleotide
  Antisense strand to SEQ ID NO: 2352018
uuucucacacuucagaguc

SEQ ID NO: 2352020 - RNA, 19 nt, Artificial Sequence
  Description of Artificial Sequence: Synthetic oligonucleotide
  Sense strand starting at position 2783 of SEQ ID NO: 1885571
aaggccucaugugucaaua

SEQ ID NO: 2352021 - RNA, 19 nt, Artificial Sequence
  Description of Artificial Sequence: Synthetic oligonucleotide
  Antisense strand to SEQ ID NO: 2352020
uauugacacaugaggccuu

SEQ ID NO: 2352022 - RNA, 19 nt, Artificial Sequence
  Description of Artificial Sequence: Synthetic oligonucleotide
  Sense strand starting at position 2995 of SEQ ID NO: 1885571
cuuuaaggccuuugcaaau

SEQ ID NO: 2352023 - RNA, 19 nt, Artificial Sequence
  Description of Artificial Sequence: Synthetic oligonucleotide
  Antisense strand to SEQ ID NO: 2352022
auuugcaaaggccuuaaag

SEQ ID NO: 2352024 - RNA, 19 nt, Artificial Sequence
  Description of Artificial Sequence: Synthetic oligonucleotide
  Sense strand starting at position 3024 of SEQ ID NO: 1885571
ccaggaaagucuccaacua

SEQ ID NO: 2352025 - RNA, 19 nt, Artificial Sequence
  Description of Artificial Sequence: Synthetic oligonucleotide
  Antisense strand to SEQ ID NO: 2352024
uaguuggagacuuuccugg

SEQ ID NO: 2352026 - RNA, 19 nt, Artificial Sequence
  Description of Artificial Sequence: Synthetic oligonucleotide
  Sense strand starting at position 3065 of SEQ ID NO: 1885571
cucucuguccugugacauc

SEQ ID NO: 2352027 - RNA, 19 nt, Artificial Sequence
  Description of Artificial Sequence: Synthetic oligonucleotide
  Antisense strand to SEQ ID NO: 2352026
gaugucacaggacagagag

SEQ ID NO: 2352028 - RNA, 19 nt, Artificial Sequence
  Description of Artificial Sequence: Synthetic oligonucleotide
  Sense strand starting at position 3126 of SEQ ID NO: 1885571
uugucaucaucauuacuga

SEQ ID NO: 2352029 - RNA, 19 nt, Artificial Sequence
  Description of Artificial Sequence: Synthetic oligonucleotide
  Antisense strand to SEQ ID NO: 2352028
ucaguaaugaugaugacaa

SEQ ID NO: 2352030 - RNA, 19 nt, Artificial Sequence
  Description of Artificial Sequence: Synthetic oligonucleotide
  Sense strand starting at position 3186 of SEQ ID NO: 1885571
ucuacuaugcgccaugaaa

SEQ ID NO: 2352031 - RNA, 19 nt, Artificial Sequence
  Description of Artificial Sequence: Synthetic oligonucleotide
  Antisense strand to SEQ ID NO: 2352030
uuucauggcgcauaguaga

SEQ ID NO: 2352032 - RNA, 19 nt, Artificial Sequence
  Description of Artificial Sequence: Synthetic oligonucleotide
  Sense strand starting at position 3281 of SEQ ID NO: 1885571
uccuuucuagcauacagua

SEQ ID NO: 2352033 - RNA, 19 nt, Artificial Sequence
  Description of Artificial Sequence: Synthetic oligonucleotide
  Antisense strand to SEQ ID NO: 2352032
uacuguaugcuagaaagga

SEQ ID NO: 2352034 - RNA, 19 nt, Artificial Sequence
  Description of Artificial Sequence: Synthetic oligonucleotide
  Sense strand starting at position 3341 of SEQ ID NO: 1885571
cgaguuccauuauuugguu

SEQ ID NO: 2352035 - RNA, 19 nt, Artificial Sequence
  Description of Artificial Sequence: Synthetic oligonucleotide
  Antisense strand to SEQ ID NO: 2352034
aaccaaauaauggaacucg

SEQ ID NO: 2352036 - RNA, 19 nt, Artificial Sequence
  Description of Artificial Sequence: Synthetic oligonucleotide
  Sense strand starting at position 3360 of SEQ ID NO: 1885571
guaggacuuuaggcaaauu

SEQ ID NO: 2352037 - RNA, 19 nt, Artificial Sequence
  Description of Artificial Sequence: Synthetic oligonucleotide
  Antisense strand to SEQ ID NO: 2352036
aauuugccuaaaguccuac

SEQ ID NO: 2352038 - RNA, 19 nt, Artificial Sequence
  Description of Artificial Sequence: Synthetic oligonucleotide
  Sense strand starting at position 3439 of SEQ ID NO: 1885571
cauaaaggguaauuguauu

SEQ ID NO: 2352039 - RNA, 19 nt, Artificial Sequence
  Description of Artificial Sequence: Synthetic oligonucleotide
  Antisense strand to SEQ ID NO: 2352038
aauacaauuacccuuuaug

SEQ ID NO: 2352040 - RNA, 19 nt, Artificial Sequence
  Description of Artificial Sequence: Synthetic oligonucleotide
  Sense strand starting at position 3499 of SEQ ID NO: 1885571
auauuauaugcugggcagu

SEQ ID NO: 2352041 - RNA, 19 nt, Artificial Sequence
  Description of Artificial Sequence: Synthetic oligonucleotide
  Antisense strand to SEQ ID NO: 2352040
acugcccagcauauaauau

SEQ ID NO: 2352042 - RNA, 19 nt, Artificial Sequence
  Description of Artificial Sequence: Synthetic oligonucleotide
  Sense strand starting at position 3524 of SEQ ID NO: 1885571
aguaccaauucuguauuau

SEQ ID NO: 2352043 - RNA, 19 nt, Artificial Sequence
  Description of Artificial Sequence: Synthetic oligonucleotide
  Antisense strand to SEQ ID NO: 2352042
auaauacagaauugguacu

SEQ ID NO: 2352044 - RNA, 19 nt, Artificial Sequence
  Description of Artificial Sequence: Synthetic oligonucleotide
  Sense strand starting at position 3525 of SEQ ID NO: 1885571
guaccaauucuguauuauu

SEQ ID NO: 2352045 - RNA, 19 nt, Artificial Sequence
  Description of Artificial Sequence: Synthetic oligonucleotide
  Antisense strand to SEQ ID NO: 2352044
aauaauacagaauugguac

SEQ ID NO: 2352046 - RNA, 19 nt, Artificial Sequence
  Description of Artificial Sequence: Synthetic oligonucleotide
  Sense strand starting at position 3956 of SEQ ID NO: 1885571
uggccagaauccucccuuu

SEQ ID NO: 2352047 - RNA, 19 nt, Artificial Sequence
  Description of Artificial Sequence: Synthetic oligonucleotide
  Antisense strand to SEQ ID NO: 2352046
aaagggaggauucuggcca

SEQ ID NO: 2352048 - RNA, 19 nt, Artificial Sequence
  Description of Artificial Sequence: Synthetic oligonucleotide
  Sense strand starting at position 1449 of SEQ ID NO: 1885572
uaggaaugcggguaugguu

SEQ ID NO: 2352049 - RNA, 19 nt, Artificial Sequence
  Description of Artificial Sequence: Synthetic oligonucleotide
  Antisense strand to SEQ ID NO: 2352048
aaccauacccgcauuccua

SEQ ID NO: 2352050 - RNA, 19 nt, Artificial Sequence
  Description of Artificial Sequence: Synthetic oligonucleotide
  Sense strand starting at position 186 of SEQ ID NO: 1885573
ggaccuuuauguugugaaa

SEQ ID NO: 2352051 - RNA, 19 nt, Artificial Sequence
  Description of Artificial Sequence: Synthetic oligonucleotide
  Antisense strand to SEQ ID NO: 2352050
uuucacaacauaaaggucc

SEQ ID NO: 2352052 - RNA, 19 nt, Artificial Sequence
  Description of Artificial Sequence: Synthetic oligonucleotide
  Sense strand starting at position 330 of SEQ ID NO: 1885573
ccaaguuguaguuauacag

SEQ ID NO: 2352053 - RNA, 19 nt, Artificial Sequence
  Description of Artificial Sequence: Synthetic oligonucleotide
  Antisense strand to SEQ ID NO: 2352052
cuguauaacuacaacuugg

SEQ ID NO: 2352054 - RNA, 19 nt, Artificial Sequence
  Description of Artificial Sequence: Synthetic oligonucleotide
  Sense strand starting at position 339 of SEQ ID NO: 1885573
aguuauacagcugauauau

SEQ ID NO: 2352055 - RNA, 19 nt, Artificial Sequence
  Description of Artificial Sequence: Synthetic oligonucleotide
  Antisense strand to SEQ ID NO: 2352054
auauaucagcuguauaacu

SEQ ID NO: 2352056 - RNA, 19 nt, Artificial Sequence
  Description of Artificial Sequence: Synthetic oligonucleotide
  Sense strand starting at position 341 of SEQ ID NO: 1885573
uuauacagcugauauauga

SEQ ID NO: 2352057 - RNA, 19 nt, Artificial Sequence
  Description of Artificial Sequence: Synthetic oligonucleotide
  Antisense strand to SEQ ID NO: 2352056
ucauauaucagcuguauaa

SEQ ID NO: 2352058 - RNA, 19 nt, Artificial Sequence
  Description of Artificial Sequence: Synthetic oligonucleotide
  Sense strand starting at position 363 of SEQ ID NO: 1885573
uugcauaaacuauggacaa

SEQ ID NO: 2352059 - RNA, 19 nt, Artificial Sequence
  Description of Artificial Sequence: Synthetic oligonucleotide
  Antisense strand to SEQ ID NO: 2352058
uuguccauaguuuaugcaa

SEQ ID NO: 2352060 - RNA, 19 nt, Artificial Sequence
  Description of Artificial Sequence: Synthetic oligonucleotide
  Sense strand starting at position 364 of SEQ ID NO: 1885573
ugcauaaacuauggacaaa

SEQ ID NO: 2352061 - RNA, 19 nt, Artificial Sequence
  Description of Artificial Sequence: Synthetic oligonucleotide
  Antisense strand to SEQ ID NO: 2352060
uuuguccauaguuuaugca

SEQ ID NO: 2352062 - RNA, 19 nt, Artificial Sequence
  Description of Artificial Sequence: Synthetic oligonucleotide
  Sense strand starting at position 712 of SEQ ID NO: 1885573
uuaaaugcuuugucacuga

SEQ ID NO: 2352063 - RNA, 19 nt, Artificial Sequence
  Description of Artificial Sequence: Synthetic oligonucleotide
  Antisense strand to SEQ ID NO: 2352062
ucagugacaaagcauuuaa

SEQ ID NO: 2352064 - RNA, 19 nt, Artificial Sequence
  Description of Artificial Sequence: Synthetic oligonucleotide
  Sense strand starting at position 716 of SEQ ID NO: 1885573
augcuuugucacugauaua

SEQ ID NO: 2352065 - RNA, 19 nt, Artificial Sequence
  Description of Artificial Sequence: Synthetic oligonucleotide
  Antisense strand to SEQ ID NO: 2352064
uauaucagugacaaagcau

SEQ ID NO: 2352066 - RNA, 19 nt, Artificial Sequence
  Description of Artificial Sequence: Synthetic oligonucleotide
  Sense strand starting at position 738 of SEQ ID NO: 1885573
uuucuuauaugggugacaa

SEQ ID NO: 2352067 - RNA, 19 nt, Artificial Sequence
  Description of Artificial Sequence: Synthetic oligonucleotide
  Antisense strand to SEQ ID NO: 2352066
uugucacccauauaagaaa

SEQ ID NO: 2352068 - RNA, 19 nt, Artificial Sequence
  Description of Artificial Sequence: Synthetic oligonucleotide
  Sense strand starting at position 739 of SEQ ID NO: 1885573
uucuuauaugggugacaaa

SEQ ID NO: 2352069 - RNA, 19 nt, Artificial Sequence
  Description of Artificial Sequence: Synthetic oligonucleotide
  Antisense strand to SEQ ID NO: 2352068
uuugucacccauauaagaa

SEQ ID NO: 2352070 - RNA, 19 nt, Artificial Sequence
  Description of Artificial Sequence: Synthetic oligonucleotide
  Sense strand starting at position 900 of SEQ ID NO: 1885573
ggaguugucaucuaacaug

SEQ ID NO: 2352071 - RNA, 19 nt, Artificial Sequence
  Description of Artificial Sequence: Synthetic oligonucleotide
  Antisense strand to SEQ ID NO: 2352070
cauguuagaugacaacucc

SEQ ID NO: 2352072 - RNA, 19 nt, Artificial Sequence
  Description of Artificial Sequence: Synthetic oligonucleotide
  Sense strand starting at position 1348 of SEQ ID NO: 1885573
gcugcagucugccgagaug

SEQ ID NO: 2352073 - RNA, 19 nt, Artificial Sequence
  Description of Artificial Sequence: Synthetic oligonucleotide
  Antisense strand to SEQ ID NO: 2352072
caucucggcagacugcagc

SEQ ID NO: 2352074 - RNA, 19 nt, Artificial Sequence
  Description of Artificial Sequence: Synthetic oligonucleotide
  Sense strand starting at position 1448 of SEQ ID NO: 1885573
uaggaaugcggguaugguu

SEQ ID NO: 2352075 - RNA, 19 nt, Artificial Sequence
  Description of Artificial Sequence: Synthetic oligonucleotide
  Antisense strand to SEQ ID NO: 2352074
aaccauacccgcauuccua

SEQ ID NO: 2352076 - RNA, 19 nt, Artificial Sequence
  Description of Artificial Sequence: Synthetic oligonucleotide
  Sense strand starting at position 1532 of SEQ ID NO: 1885573
agcuaaauagcuggagacu

SEQ ID NO: 2352077 - RNA, 19 nt, Artificial Sequence
  Description of Artificial Sequence: Synthetic oligonucleotide
  Antisense strand to SEQ ID NO: 2352076
agucuccagcuauuuagcu

SEQ ID NO: 2352078 - RNA, 19 nt, Artificial Sequence
  Description of Artificial Sequence: Synthetic oligonucleotide
  Sense strand starting at position 1541 of SEQ ID NO: 1885573
gcuggagacuccucaaaga

SEQ ID NO: 2352079 - RNA, 19 nt, Artificial Sequence
  Description of Artificial Sequence: Synthetic oligonucleotide
  Antisense strand to SEQ ID NO: 2352078
ucuuugaggagucuccagc

SEQ ID NO: 2352080 - RNA, 19 nt, Artificial Sequence
  Description of Artificial Sequence: Synthetic oligonucleotide
  Sense strand starting at position 2198 of SEQ ID NO: 1885573
gcuuucgggcccuagaagu

SEQ ID NO: 2352081 - RNA, 19 nt, Artificial Sequence
  Description of Artificial Sequence: Synthetic oligonucleotide
  Antisense strand to SEQ ID NO: 2352080
acuucuagggcccgaaagc

SEQ ID NO: 2352082 - RNA, 19 nt, Artificial Sequence
  Description of Artificial Sequence: Synthetic oligonucleotide
  Sense strand starting at position 2486 of SEQ ID NO: 1885573
ccgcaucuguccuguggga

SEQ ID NO: 2352083 - RNA, 19 nt, Artificial Sequence
  Description of Artificial Sequence: Synthetic oligonucleotide
  Antisense strand to SEQ ID NO: 2352082
ucccacaggacagaugcgg

SEQ ID NO: 2352084 - RNA, 19 nt, Artificial Sequence
  Description of Artificial Sequence: Synthetic oligonucleotide
  Sense strand starting at position 2683 of SEQ ID NO: 1885573
gggagaggcuauuaauuau

SEQ ID NO: 2352085 - RNA, 19 nt, Artificial Sequence
  Description of Artificial Sequence: Synthetic oligonucleotide
  Antisense strand to SEQ ID NO: 2352084
auaauuaauagccucuccc

SEQ ID NO: 2352086 - RNA, 19 nt, Artificial Sequence
  Description of Artificial Sequence: Synthetic oligonucleotide
  Sense strand starting at position 2717 of SEQ ID NO: 1885573
gccuguuaucggucucuuc

SEQ ID NO: 2352087 - RNA, 19 nt, Artificial Sequence
  Description of Artificial Sequence: Synthetic oligonucleotide
  Antisense strand to SEQ ID NO: 2352086
gaagagaccgauaacaggc

SEQ ID NO: 2352088 - RNA, 19 nt, Artificial Sequence
  Description of Artificial Sequence: Synthetic oligonucleotide
  Sense strand starting at position 2845 of SEQ ID NO: 1885573
cucugaugauagcugguau

SEQ ID NO: 2352089 - RNA, 19 nt, Artificial Sequence
  Description of Artificial Sequence: Synthetic oligonucleotide
  Antisense strand to SEQ ID NO: 2352088
auaccagcuaucaucagag

SEQ ID NO: 2352090 - RNA, 19 nt, Artificial Sequence
  Description of Artificial Sequence: Synthetic oligonucleotide
  Sense strand starting at position 2846 of SEQ ID NO: 1885573
ucugaugauagcugguauu

SEQ ID NO: 2352091 - RNA, 19 nt, Artificial Sequence
  Description of Artificial Sequence: Synthetic oligonucleotide
  Antisense strand to SEQ ID NO: 2352090
aauaccagcuaucaucaga

SEQ ID NO: 2352092 - RNA, 19 nt, Artificial Sequence
  Description of Artificial Sequence: Synthetic oligonucleotide
  Sense strand starting at position 2849 of SEQ ID NO: 1885573
gaugauagcugguauuucu

SEQ ID NO: 2352093 - RNA, 19 nt, Artificial Sequence
  Description of Artificial Sequence: Synthetic oligonucleotide
  Antisense strand to SEQ ID NO: 2352092
agaaauaccagcuaucauc

SEQ ID NO: 2352094 - RNA, 19 nt, Artificial Sequence
  Description of Artificial Sequence: Synthetic oligonucleotide
  Sense strand starting at position 3270 of SEQ ID NO: 1885573
cuuuauuucugucuucguu

SEQ ID NO: 2352095 - RNA, 19 nt, Artificial Sequence
  Description of Artificial Sequence: Synthetic oligonucleotide
  Antisense strand to SEQ ID NO: 2352094
aacgaagacagaaauaaag

SEQ ID NO: 2352096 - RNA, 19 nt, Artificial Sequence
  Description of Artificial Sequence: Synthetic oligonucleotide
  Sense strand starting at position 3276 of SEQ ID NO: 1885573
uucugucuucguuucguua

SEQ ID NO: 2352097 - RNA, 19 nt, Artificial Sequence
  Description of Artificial Sequence: Synthetic oligonucleotide
  Antisense strand to SEQ ID NO: 2352096
uaacgaaacgaagacagaa

SEQ ID NO: 2352098 - RNA, 19 nt, Artificial Sequence
  Description of Artificial Sequence: Synthetic oligonucleotide
  Sense strand starting at position 3277 of SEQ ID NO: 1885573
ucugucuucguuucguuau

SEQ ID NO: 2352099 - RNA, 19 nt, Artificial Sequence
  Description of Artificial Sequence: Synthetic oligonucleotide
  Antisense strand to SEQ ID NO: 2352098
auaacgaaacgaagacaga

SEQ ID NO: 2352100 - RNA, 19 nt, Artificial Sequence
  Description of Artificial Sequence: Synthetic oligonucleotide
  Sense strand starting at position 3280 of SEQ ID NO: 1885573
gucuucguuucguuaugua

SEQ ID NO: 2352101 - RNA, 19 nt, Artificial Sequence
  Description of Artificial Sequence: Synthetic oligonucleotide
  Antisense strand to SEQ ID NO: 2352100
uacauaacgaaacgaagac

SEQ ID NO: 2352102 - RNA, 19 nt, Artificial Sequence
  Description of Artificial Sequence: Synthetic oligonucleotide
  Sense strand starting at position 3679 of SEQ ID NO: 1885573
uuugguugaaguugaguuu

SEQ ID NO: 2352103 - RNA, 19 nt, Artificial Sequence
  Description of Artificial Sequence: Synthetic oligonucleotide
  Antisense strand to SEQ ID NO: 2352102
aaacucaacuucaaccaaa

SEQ ID NO: 2352104 - RNA, 19 nt, Artificial Sequence
  Description of Artificial Sequence: Synthetic oligonucleotide
  Sense strand starting at position 3682 of SEQ ID NO: 1885573
gguugaaguugaguuucua

SEQ ID NO: 2352105 - RNA, 19 nt, Artificial Sequence
  Description of Artificial Sequence: Synthetic oligonucleotide
  Antisense strand to SEQ ID NO: 2352104
uagaaacucaacuucaacc

SEQ ID NO: 2352106 - RNA, 19 nt, Artificial Sequence
  Description of Artificial Sequence: Synthetic oligonucleotide
  Sense strand starting at position 3686 of SEQ ID NO: 1885573
gaaguugaguuucuaguca

SEQ ID NO: 2352107 - RNA, 19 nt, Artificial Sequence
  Description of Artificial Sequence: Synthetic oligonucleotide
  Antisense strand to SEQ ID NO: 2352106
ugacuagaaacucaacuuc

SEQ ID NO: 2352108 - RNA, 19 nt, Artificial Sequence
  Description of Artificial Sequence: Synthetic oligonucleotide
  Sense strand starting at position 3690 of SEQ ID NO: 1885573
uugaguuucuagucaaaga

SEQ ID NO: 2352109 - RNA, 19 nt, Artificial Sequence
  Description of Artificial Sequence: Synthetic oligonucleotide
  Antisense strand to SEQ ID NO: 2352108
ucuuugacuagaaacucaa

SEQ ID NO: 2352110 - RNA, 19 nt, Artificial Sequence
  Description of Artificial Sequence: Synthetic oligonucleotide
  Sense strand starting at position 3725 of SEQ ID NO: 1885573
gcauucguguuuccaggaa

SEQ ID NO: 2352111 - RNA, 19 nt, Artificial Sequence
  Description of Artificial Sequence: Synthetic oligonucleotide
  Antisense strand to SEQ ID NO: 2352110
uuccuggaaacacgaaugc

SEQ ID NO: 2352112 - RNA, 19 nt, Artificial Sequence
  Description of Artificial Sequence: Synthetic oligonucleotide
  Sense strand starting at position 3729 of SEQ ID NO: 1885573
ucguguuuccaggaacaga

SEQ ID NO: 2352113 - RNA, 19 nt, Artificial Sequence
  Description of Artificial Sequence: Synthetic oligonucleotide
  Antisense strand to SEQ ID NO: 2352112
ucuguuccuggaaacacga

SEQ ID NO: 2352114 - RNA, 19 nt, Artificial Sequence
  Description of Artificial Sequence: Synthetic oligonucleotide
  Sense strand starting at position 3746 of SEQ ID NO: 1885573
gaagcauccugucugguuu

SEQ ID NO: 2352115 - RNA, 19 nt, Artificial Sequence
  Description of Artificial Sequence: Synthetic oligonucleotide
  Antisense strand to SEQ ID NO: 2352114
aaaccagacaggaugcuuc

SEQ ID NO: 2352116 - RNA, 19 nt, Artificial Sequence
  Description of Artificial Sequence: Synthetic oligonucleotide
  Sense strand starting at position 3797 of SEQ ID NO: 1885573
auggcauacgugugucuau

SEQ ID NO: 2352117 - RNA, 19 nt, Artificial Sequence
  Description of Artificial Sequence: Synthetic oligonucleotide
  Antisense strand to SEQ ID NO: 2352116
auagacacacguaugccau

SEQ ID NO: 2352118 - RNA, 19 nt, Artificial Sequence
  Description of Artificial Sequence: Synthetic oligonucleotide
  Sense strand starting at position 3798 of SEQ ID NO: 1885573
uggcauacgugugucuaua

SEQ ID NO: 2352119 - RNA, 19 nt, Artificial Sequence
  Description of Artificial Sequence: Synthetic oligonucleotide
  Antisense strand to SEQ ID NO: 2352118
uauagacacacguaugcca

SEQ ID NO: 2352120 - RNA, 19 nt, Artificial Sequence
  Description of Artificial Sequence: Synthetic oligonucleotide
  Sense strand starting at position 3800 of SEQ ID NO: 1885573
gcauacgugugucuauaau

SEQ ID NO: 2352121 - RNA, 19 nt, Artificial Sequence
  Description of Artificial Sequence: Synthetic oligonucleotide
  Antisense strand to SEQ ID NO: 2352120
auuauagacacacguaugc

SEQ ID NO: 2352122 - RNA, 19 nt, Artificial Sequence
  Description of Artificial Sequence: Synthetic oligonucleotide
  Sense strand starting at position 36 of SEQ ID NO: 1885574
uucugcaucccauauucga

SEQ ID NO: 2352123 - RNA, 19 nt, Artificial Sequence
  Description of Artificial Sequence: Synthetic oligonucleotide
  Antisense strand to SEQ ID NO: 2352122
ucgaauaugggaugcagaa

SEQ ID NO: 2352124 - RNA, 19 nt, Artificial Sequence
  Description of Artificial Sequence: Synthetic oligonucleotide
  Sense strand starting at position 45 of SEQ ID NO: 1885574
ccauauucgagcgauucuc

SEQ ID NO: 2352125 - RNA, 19 nt, Artificial Sequence
  Description of Artificial Sequence: Synthetic oligonucleotide
  Antisense strand to SEQ ID NO: 2352124
gagaaucgcucgaauaugg

SEQ ID NO: 2352126 - RNA, 19 nt, Artificial Sequence
  Description of Artificial Sequence: Synthetic oligonucleotide
  Sense strand starting at position 304 of SEQ ID NO: 1885574
ugaggaaauugauaccaau

SEQ ID NO: 2352127 - RNA, 19 nt, Artificial Sequence
  Description of Artificial Sequence: Synthetic oligonucleotide
  Antisense strand to SEQ ID NO: 2352126
auugguaucaauuuccuca

SEQ ID NO: 2352128 - RNA, 19 nt, Artificial Sequence
  Description of Artificial Sequence: Synthetic oligonucleotide
  Sense strand starting at position 307 of SEQ ID NO: 1885574
ggaaauugauaccaauaau

SEQ ID NO: 2352129 - RNA, 19 nt, Artificial Sequence
  Description of Artificial Sequence: Synthetic oligonucleotide
  Antisense strand to SEQ ID NO: 2352128
auuauugguaucaauuucc

SEQ ID NO: 2352130 - RNA, 19 nt, Artificial Sequence
  Description of Artificial Sequence: Synthetic oligonucleotide
  Sense strand starting at position 437 of SEQ ID NO: 1885574
gggagaaucuuccuagcua

SEQ ID NO: 2352131 - RNA, 19 nt, Artificial Sequence
  Description of Artificial Sequence: Synthetic oligonucleotide
  Antisense strand to SEQ ID NO: 2352130
uagcuaggaagauucuccc

SEQ ID NO: 2352132 - RNA, 19 nt, Artificial Sequence
  Description of Artificial Sequence: Synthetic oligonucleotide
  Sense strand starting at position 456 of SEQ ID NO: 1885574
aaagauuauggagggugua

SEQ ID NO: 2352133 - RNA, 19 nt, Artificial Sequence
  Description of Artificial Sequence: Synthetic oligonucleotide
  Antisense strand to SEQ ID NO: 2352132
uacacccuccauaaucuuu

SEQ ID NO: 2352134 - RNA, 19 nt, Artificial Sequence
  Description of Artificial Sequence: Synthetic oligonucleotide
  Sense strand starting at position 457 of SEQ ID NO: 1885574
aagauuauggaggguguau

SEQ ID NO: 2352135 - RNA, 19 nt, Artificial Sequence
  Description of Artificial Sequence: Synthetic oligonucleotide
  Antisense strand to SEQ ID NO: 2352134
auacacccuccauaaucuu

SEQ ID NO: 2352136 - RNA, 19 nt, Artificial Sequence
  Description of Artificial Sequence: Synthetic oligonucleotide
  Sense strand starting at position 576 of SEQ ID NO: 1885574
cuuggcacucucuaguuau

SEQ ID NO: 2352137 - RNA, 19 nt, Artificial Sequence
  Description of Artificial Sequence: Synthetic oligonucleotide
  Antisense strand to SEQ ID NO: 2352136
auaacuagagagugccaag

SEQ ID NO: 2352138 - RNA, 19 nt, Artificial Sequence
  Description of Artificial Sequence: Synthetic oligonucleotide
  Sense strand starting at position 583 of SEQ ID NO: 1885574
cucucuaguuaucuaaagu

SEQ ID NO: 2352139 - RNA, 19 nt, Artificial Sequence
  Description of Artificial Sequence: Synthetic oligonucleotide
  Antisense strand to SEQ ID NO: 2352138
acuuuagauaacuagagag

SEQ ID NO: 2352140 - RNA, 19 nt, Artificial Sequence
  Description of Artificial Sequence: Synthetic oligonucleotide
  Sense strand starting at position 590 of SEQ ID NO: 1885574
guuaucuaaaguugaguuu

SEQ ID NO: 2352141 - RNA, 19 nt, Artificial Sequence
  Description of Artificial Sequence: Synthetic oligonucleotide
  Antisense strand to SEQ ID NO: 2352140
aaacucaacuuuagauaac

SEQ ID NO: 2352142 - RNA, 19 nt, Artificial Sequence
  Description of Artificial Sequence: Synthetic oligonucleotide
  Sense strand starting at position 605 of SEQ ID NO: 1885574
guuugcaucgaugaucuca

SEQ ID NO: 2352143 - RNA, 19 nt, Artificial Sequence
  Description of Artificial Sequence: Synthetic oligonucleotide
  Antisense strand to SEQ ID NO: 2352142
ugagaucaucgaugcaaac

SEQ ID NO: 2352144 - RNA, 19 nt, Artificial Sequence
  Description of Artificial Sequence: Synthetic oligonucleotide
  Sense strand starting at position 646 of SEQ ID NO: 1885574
gcaggaagucagggcuaau

SEQ ID NO: 2352145 - RNA, 19 nt, Artificial Sequence
  Description of Artificial Sequence: Synthetic oligonucleotide
  Antisense strand to SEQ ID NO: 2352144
auuagcccugacuuccugc

SEQ ID NO: 2352146 - RNA, 19 nt, Artificial Sequence
  Description of Artificial Sequence: Synthetic oligonucleotide
  Sense strand starting at position 704 of SEQ ID NO: 1885574
agagagugugauuggucga

SEQ ID NO: 2352147 - RNA, 19 nt, Artificial Sequence
  Description of Artificial Sequence: Synthetic oligonucleotide
  Antisense strand to SEQ ID NO: 2352146
ucgaccaaucacacucucu

SEQ ID NO: 2352148 - RNA, 19 nt, Artificial Sequence
  Description of Artificial Sequence: Synthetic oligonucleotide
  Sense strand starting at position 705 of SEQ ID NO: 1885574
gagagugugauuggucgaa

SEQ ID NO: 2352149 - RNA, 19 nt, Artificial Sequence
  Description of Artificial Sequence: Synthetic oligonucleotide
  Antisense strand to SEQ ID NO: 2352148
uucgaccaaucacacucuc

SEQ ID NO: 2352150 - RNA, 19 nt, Artificial Sequence
  Description of Artificial Sequence: Synthetic oligonucleotide
  Sense strand starting at position 707 of SEQ ID NO: 1885574
gagugugauuggucgaaag

SEQ ID NO: 2352151 - RNA, 19 nt, Artificial Sequence
  Description of Artificial Sequence: Synthetic oligonucleotide
  Antisense strand to SEQ ID NO: 2352150
cuuucgaccaaucacacuc

SEQ ID NO: 2352152 - RNA, 19 nt, Artificial Sequence
  Description of Artificial Sequence: Synthetic oligonucleotide
  Sense strand starting at position 857 of SEQ ID NO: 1885574
ccaugagcuucccuugaac

SEQ ID NO: 2352153 - RNA, 19 nt, Artificial Sequence
  Description of Artificial Sequence: Synthetic oligonucleotide
  Antisense strand to SEQ ID NO: 2352152
guucaagggaagcucaugg

SEQ ID NO: 2352154 - RNA, 19 nt, Artificial Sequence
  Description of Artificial Sequence: Synthetic oligonucleotide
  Sense strand starting at position 1094 of SEQ ID NO: 1885574
uccagcaaaguuuaaagua

SEQ ID NO: 2352155 - RNA, 19 nt, Artificial Sequence
  Description of Artificial Sequence: Synthetic oligonucleotide
  Antisense strand to SEQ ID NO: 2352154
uacuuuaaacuuugcugga

SEQ ID NO: 2352156 - RNA, 19 nt, Artificial Sequence
  Description of Artificial Sequence: Synthetic oligonucleotide
  Sense strand starting at position 1157 of SEQ ID NO: 1885574
gcauuuccaugagaaacug

SEQ ID NO: 2352157 - RNA, 19 nt, Artificial Sequence
  Description of Artificial Sequence: Synthetic oligonucleotide
  Antisense strand to SEQ ID NO: 2352156
caguuucucauggaaaugc

SEQ ID NO: 2352158 - RNA, 19 nt, Artificial Sequence
  Description of Artificial Sequence: Synthetic oligonucleotide
  Sense strand starting at position 1298 of SEQ ID NO: 1885574
agccaacaugugggauuau

SEQ ID NO: 2352159 - RNA, 19 nt, Artificial Sequence
  Description of Artificial Sequence: Synthetic oligonucleotide
  Antisense strand to SEQ ID NO: 2352158
auaaucccacauguuggcu

SEQ ID NO: 2352160 - RNA, 19 nt, Artificial Sequence
  Description of Artificial Sequence: Synthetic oligonucleotide
  Sense strand starting at position 1369 of SEQ ID NO: 1885574
uguauuauguaacucugga

SEQ ID NO: 2352161 - RNA, 19 nt, Artificial Sequence
  Description of Artificial Sequence: Synthetic oligonucleotide
  Antisense strand to SEQ ID NO: 2352160
uccagaguuacauaauaca

SEQ ID NO: 2352162 - RNA, 19 nt, Artificial Sequence
  Description of Artificial Sequence: Synthetic oligonucleotide
  Sense strand starting at position 1487 of SEQ ID NO: 1885574
ggcccacucagauggguaa

SEQ ID NO: 2352163 - RNA, 19 nt, Artificial Sequence
  Description of Artificial Sequence: Synthetic oligonucleotide
  Antisense strand to SEQ ID NO: 2352162
uuacccaucugagugggcc

SEQ ID NO: 2352164 - RNA, 19 nt, Artificial Sequence
  Description of Artificial Sequence: Synthetic oligonucleotide
  Sense strand starting at position 1488 of SEQ ID NO: 1885574
gcccacucagauggguaau

SEQ ID NO: 2352165 - RNA, 19 nt, Artificial Sequence
  Description of Artificial Sequence: Synthetic oligonucleotide
  Antisense strand to SEQ ID NO: 2352164
auuacccaucugagugggc

SEQ ID NO: 2352166 - RNA, 19 nt, Artificial Sequence
  Description of Artificial Sequence: Synthetic oligonucleotide
  Sense strand starting at position 1490 of SEQ ID NO: 1885574
ccacucagauggguaauaa

SEQ ID NO: 2352167 - RNA, 19 nt, Artificial Sequence
  Description of Artificial Sequence: Synthetic oligonucleotide
  Antisense strand to SEQ ID NO: 2352166
uuauuacccaucugagugg

SEQ ID NO: 2352168 - RNA, 19 nt, Artificial Sequence
  Description of Artificial Sequence: Synthetic oligonucleotide
  Sense strand starting at position 1657 of SEQ ID NO: 1885574
ugcguuguuacaguucuua

SEQ ID NO: 2352169 - RNA, 19 nt, Artificial Sequence
  Description of Artificial Sequence: Synthetic oligonucleotide
  Antisense strand to SEQ ID NO: 2352168
uaagaacuguaacaacgca

SEQ ID NO: 2352170 - RNA, 19 nt, Artificial Sequence
  Description of Artificial Sequence: Synthetic oligonucleotide
  Sense strand starting at position 3346 of SEQ ID NO: 1885574
ggcuaacuuggaggaaauu

SEQ ID NO: 2352171 - RNA, 19 nt, Artificial Sequence
  Description of Artificial Sequence: Synthetic oligonucleotide
  Antisense strand to SEQ ID NO: 2352170
aauuuccuccaaguuagcc

SEQ ID NO: 2352172 - RNA, 19 nt, Artificial Sequence
  Description of Artificial Sequence: Synthetic oligonucleotide
  Sense strand starting at position 3427 of SEQ ID NO: 1885574
ggcuuaaucaagggcagag

SEQ ID NO: 2352173 - RNA, 19 nt, Artificial Sequence
  Description of Artificial Sequence: Synthetic oligonucleotide
  Antisense strand to SEQ ID NO: 2352172
cucugcccuugauuaagcc

SEQ ID NO: 2352174 - RNA, 19 nt, Artificial Sequence
  Description of Artificial Sequence: Synthetic oligonucleotide
  Sense strand starting at position 3506 of SEQ ID NO: 1885574
uuugcaaggugacucaauu

SEQ ID NO: 2352175 - RNA, 19 nt, Artificial Sequence
  Description of Artificial Sequence: Synthetic oligonucleotide
  Antisense strand to SEQ ID NO: 2352174
aauugagucaccuugcaaa

SEQ ID NO: 2352176 - RNA, 19 nt, Artificial Sequence
  Description of Artificial Sequence: Synthetic oligonucleotide
  Sense strand starting at position 3549 of SEQ ID NO: 1885574
uucugucuccaaggagaau

SEQ ID NO: 2352177 - RNA, 19 nt, Artificial Sequence
  Description of Artificial Sequence: Synthetic oligonucleotide
  Antisense strand to SEQ ID NO: 2352176
auucuccuuggagacagaa

SEQ ID NO: 2352178 - RNA, 19 nt, Artificial Sequence
  Description of Artificial Sequence: Synthetic oligonucleotide
  Sense strand starting at position 3560 of SEQ ID NO: 1885574
aggagaauaccaggugugu

SEQ ID NO: 2352179 - RNA, 19 nt, Artificial Sequence
  Description of Artificial Sequence: Synthetic oligonucleotide
  Antisense strand to SEQ ID NO: 2352178
acacaccugguauucuccu

SEQ ID NO: 2352180 - RNA, 19 nt, Artificial Sequence
  Description of Artificial Sequence: Synthetic oligonucleotide
  Sense strand starting at position 3562 of SEQ ID NO: 1885574
gagaauaccagguguguuc

SEQ ID NO: 2352181 - RNA, 19 nt, Artificial Sequence
  Description of Artificial Sequence: Synthetic oligonucleotide
  Antisense strand to SEQ ID NO: 2352180
gaacacaccugguauucuc

SEQ ID NO: 2352182 - RNA, 19 nt, Artificial Sequence
  Description of Artificial Sequence: Synthetic oligonucleotide
  Sense strand starting at position 3637 of SEQ ID NO: 1885574
agguguuucuucuccauga

SEQ ID NO: 2352183 - RNA, 19 nt, Artificial Sequence
  Description of Artificial Sequence: Synthetic oligonucleotide
  Antisense strand to SEQ ID NO: 2352182
ucauggagaagaaacaccu

SEQ ID NO: 2352184 - RNA, 19 nt, Artificial Sequence
  Description of Artificial Sequence: Synthetic oligonucleotide
  Sense strand starting at position 3639 of SEQ ID NO: 1885574
guguuucuucuccaugaua

SEQ ID NO: 2352185 - RNA, 19 nt, Artificial Sequence
  Description of Artificial Sequence: Synthetic oligonucleotide
  Antisense strand to SEQ ID NO: 2352184
uaucauggagaagaaacac

SEQ ID NO: 2352186 - RNA, 19 nt, Artificial Sequence
  Description of Artificial Sequence: Synthetic oligonucleotide
  Sense strand starting at position 3641 of SEQ ID NO: 1885574
guuucuucuccaugauauc

SEQ ID NO: 2352187 - RNA, 19 nt, Artificial Sequence
  Description of Artificial Sequence: Synthetic oligonucleotide
  Antisense strand to SEQ ID NO: 2352186
gauaucauggagaagaaac

SEQ ID NO: 2352188 - RNA, 19 nt, Artificial Sequence
  Description of Artificial Sequence: Synthetic oligonucleotide
  Sense strand starting at position 3764 of SEQ ID NO: 1885574
cuauaaugguguuugguac

SEQ ID NO: 2352189 - RNA, 19 nt, Artificial Sequence
  Description of Artificial Sequence: Synthetic oligonucleotide
  Antisense strand to SEQ ID NO: 2352188
guaccaaacaccauuauag

SEQ ID NO: 2352190 - RNA, 19 nt, Artificial Sequence
  Description of Artificial Sequence: Synthetic oligonucleotide
  Sense strand starting at position 3765 of SEQ ID NO: 1885574
uauaaugguguuugguaca

SEQ ID NO: 2352191 - RNA, 19 nt, Artificial Sequence
  Description of Artificial Sequence: Synthetic oligonucleotide
  Antisense strand to SEQ ID NO: 2352190
uguaccaaacaccauuaua

SEQ ID NO: 2352192 - RNA, 19 nt, Artificial Sequence
  Description of Artificial Sequence: Synthetic oligonucleotide
  Sense strand starting at position 3770 of SEQ ID NO: 1885574
ugguguuugguacacagua

SEQ ID NO: 2352193 - RNA, 19 nt, Artificial Sequence
  Description of Artificial Sequence: Synthetic oligonucleotide
  Antisense strand to SEQ ID NO: 2352192
uacuguguaccaaacacca

SEQ ID NO: 2352194 - RNA, 19 nt, Artificial Sequence
  Description of Artificial Sequence: Synthetic oligonucleotide
  Sense strand starting at position 3865 of SEQ ID NO: 1885574
uugguaaacacgcagauaa

SEQ ID NO: 2352195 - RNA, 19 nt, Artificial Sequence
  Description of Artificial Sequence: Synthetic oligonucleotide
  Antisense strand to SEQ ID NO: 2352194
uuaucugcguguuuaccaa

SEQ ID NO: 2352196 - RNA, 19 nt, Artificial Sequence
  Description of Artificial Sequence: Synthetic oligonucleotide
  Sense strand starting at position 3961 of SEQ ID NO: 1885574
uccuuuaggguuuauggua

SEQ ID NO: 2352197 - RNA, 19 nt, Artificial Sequence
  Description of Artificial Sequence: Synthetic oligonucleotide
  Antisense strand to SEQ ID NO: 2352196
uaccauaaacccuaaagga

SEQ ID NO: 2352198 - RNA, 19 nt, Artificial Sequence
  Description of Artificial Sequence: Synthetic oligonucleotide
  Sense strand starting at position 3981 of SEQ ID NO: 1885574
gucccaugaauggguauua

SEQ ID NO: 2352199 - RNA, 19 nt, Artificial Sequence
  Description of Artificial Sequence: Synthetic oligonucleotide
  Antisense strand to SEQ ID NO: 2352198
uaauacccauucaugggac

SEQ ID NO: 2352200 - RNA, 19 nt, Artificial Sequence
  Description of Artificial Sequence: Synthetic oligonucleotide
  Sense strand starting at position 3982 of SEQ ID NO: 1885574
ucccaugaauggguauuau

SEQ ID NO: 2352201 - RNA, 19 nt, Artificial Sequence
  Description of Artificial Sequence: Synthetic oligonucleotide
  Antisense strand to SEQ ID NO: 2352200
auaauacccauucauggga

SEQ ID NO: 2352202 - RNA, 19 nt, Artificial Sequence
  Description of Artificial Sequence: Synthetic oligonucleotide
  Sense strand starting at position 35 of SEQ ID NO: 1885575
gagauaauagcauguaaag

SEQ ID NO: 2352203 - RNA, 19 nt, Artificial Sequence
  Description of Artificial Sequence: Synthetic oligonucleotide
  Antisense strand to SEQ ID NO: 2352202
cuuuacaugcuauuaucuc

SEQ ID NO: 2352204 - RNA, 19 nt, Artificial Sequence
  Description of Artificial Sequence: Synthetic oligonucleotide
  Sense strand starting at position 46 of SEQ ID NO: 1885575
auguaaaguuggcuauuaa

SEQ ID NO: 2352205 - RNA, 19 nt, Artificial Sequence
  Description of Artificial Sequence: Synthetic oligonucleotide
  Antisense strand to SEQ ID NO: 2352204
uuaauagccaacuuuacau

SEQ ID NO: 2352206 - RNA, 19 nt, Artificial Sequence
  Description of Artificial Sequence: Synthetic oligonucleotide
  Sense strand starting at position 47 of SEQ ID NO: 1885575
uguaaaguuggcuauuaaa

SEQ ID NO: 2352207 - RNA, 19 nt, Artificial Sequence
  Description of Artificial Sequence: Synthetic oligonucleotide
  Antisense strand to SEQ ID NO: 2352206
uuuaauagccaacuuuaca

SEQ ID NO: 2352208 - RNA, 19 nt, Artificial Sequence
  Description of Artificial Sequence: Synthetic oligonucleotide
  Sense strand starting at position 376 of SEQ ID NO: 1885575
ucuuucgauuaaccuagau

SEQ ID NO: 2352209 - RNA, 19 nt, Artificial Sequence
  Description of Artificial Sequence: Synthetic oligonucleotide
  Antisense strand to SEQ ID NO: 2352208
aucuagguuaaucgaaaga

SEQ ID NO: 2352210 - RNA, 19 nt, Artificial Sequence
  Description of Artificial Sequence: Synthetic oligonucleotide
  Sense strand starting at position 519 of SEQ ID NO: 1885575
cuaagagucuaauuagcag

SEQ ID NO: 2352211 - RNA, 19 nt, Artificial Sequence
  Description of Artificial Sequence: Synthetic oligonucleotide
  Antisense strand to SEQ ID NO: 2352210
cugcuaauuagacucuuag

SEQ ID NO: 2352212 - RNA, 19 nt, Artificial Sequence
  Description of Artificial Sequence: Synthetic oligonucleotide
  Sense strand starting at position 522 of SEQ ID NO: 1885575
agagucuaauuagcagaaa

SEQ ID NO: 2352213 - RNA, 19 nt, Artificial Sequence
  Description of Artificial Sequence: Synthetic oligonucleotide
  Antisense strand to SEQ ID NO: 2352212
uuucugcuaauuagacucu

SEQ ID NO: 2352214 - RNA, 19 nt, Artificial Sequence
  Description of Artificial Sequence: Synthetic oligonucleotide
  Sense strand starting at position 715 of SEQ ID NO: 1885575
cgaaaucuaguauggaguu

SEQ ID NO: 2352215 - RNA, 19 nt, Artificial Sequence
  Description of Artificial Sequence: Synthetic oligonucleotide
  Antisense strand to SEQ ID NO: 2352214
aacuccauacuagauuucg

SEQ ID NO: 2352216 - RNA, 19 nt, Artificial Sequence
  Description of Artificial Sequence: Synthetic oligonucleotide
  Sense strand starting at position 729 of SEQ ID NO: 1885575
gaguuaauugaaggaagug

SEQ ID NO: 2352217 - RNA, 19 nt, Artificial Sequence
  Description of Artificial Sequence: Synthetic oligonucleotide
  Antisense strand to SEQ ID NO: 2352216
cacuuccuucaauuaacuc

SEQ ID NO: 2352218 - RNA, 19 nt, Artificial Sequence
  Description of Artificial Sequence: Synthetic oligonucleotide
  Sense strand starting at position 730 of SEQ ID NO: 1885575
aguuaauugaaggaagugu

SEQ ID NO: 2352219 - RNA, 19 nt, Artificial Sequence
  Description of Artificial Sequence: Synthetic oligonucleotide
  Antisense strand to SEQ ID NO: 2352218
acacuuccuucaauuaacu

SEQ ID NO: 2352220 - RNA, 19 nt, Artificial Sequence
  Description of Artificial Sequence: Synthetic oligonucleotide
  Sense strand starting at position 738 of SEQ ID NO: 1885575
gaaggaaguguuugaauag

SEQ ID NO: 2352221 - RNA, 19 nt, Artificial Sequence
  Description of Artificial Sequence: Synthetic oligonucleotide
  Antisense strand to SEQ ID NO: 2352220
cuauucaaacacuuccuuc

SEQ ID NO: 2352222 - RNA, 19 nt, Artificial Sequence
  Description of Artificial Sequence: Synthetic oligonucleotide
  Sense strand starting at position 758 of SEQ ID NO: 1885575
agggaaacauuagagauaa

SEQ ID NO: 2352223 - RNA, 19 nt, Artificial Sequence
  Description of Artificial Sequence: Synthetic oligonucleotide
  Antisense strand to SEQ ID NO: 2352222
uuaucucuaauguuucccu

SEQ ID NO: 2352224 - RNA, 19 nt, Artificial Sequence
  Description of Artificial Sequence: Synthetic oligonucleotide
  Sense strand starting at position 875 of SEQ ID NO: 1885575
gaaauacaguagucauaug

SEQ ID NO: 2352225 - RNA, 19 nt, Artificial Sequence
  Description of Artificial Sequence: Synthetic oligonucleotide
  Antisense strand to SEQ ID NO: 2352224
cauaugacuacuguauuuc

SEQ ID NO: 2352226 - RNA, 19 nt, Artificial Sequence
  Description of Artificial Sequence: Synthetic oligonucleotide
  Sense strand starting at position 943 of SEQ ID NO: 1885575
auauuaaugccucaagguu

SEQ ID NO: 2352227 - RNA, 19 nt, Artificial Sequence
  Description of Artificial Sequence: Synthetic oligonucleotide
  Antisense strand to SEQ ID NO: 2352226
aaccuugaggcauuaauau

SEQ ID NO: 2352228 - RNA, 19 nt, Artificial Sequence
  Description of Artificial Sequence: Synthetic oligonucleotide
  Sense strand starting at position 980 of SEQ ID NO: 1885575
agagguuuaugguccaauu

SEQ ID NO: 2352229 - RNA, 19 nt, Artificial Sequence
  Description of Artificial Sequence: Synthetic oligonucleotide
  Antisense strand to SEQ ID NO: 2352228
aauuggaccauaaaccucu

SEQ ID NO: 2352230 - RNA, 19 nt, Artificial Sequence
  Description of Artificial Sequence: Synthetic oligonucleotide
  Sense strand starting at position 1068 of SEQ ID NO: 1885575
ugaauuaaaugcuugguaa

SEQ ID NO: 2352231 - RNA, 19 nt, Artificial Sequence
  Description of Artificial Sequence: Synthetic oligonucleotide
  Antisense strand to SEQ ID NO: 2352230
uuaccaagcauuuaauuca

SEQ ID NO: 2352232 - RNA, 19 nt, Artificial Sequence
  Description of Artificial Sequence: Synthetic oligonucleotide
  Sense strand starting at position 1069 of SEQ ID NO: 1885575
gaauuaaaugcuugguaag

SEQ ID NO: 2352233 - RNA, 19 nt, Artificial Sequence
  Description of Artificial Sequence: Synthetic oligonucleotide
  Antisense strand to SEQ ID NO: 2352232
cuuaccaagcauuuaauuc

SEQ ID NO: 2352234 - RNA, 19 nt, Artificial Sequence
  Description of Artificial Sequence: Synthetic oligonucleotide
  Sense strand starting at position 1071 of SEQ ID NO: 1885575
auuaaaugcuugguaagaa

SEQ ID NO: 2352235 - RNA, 19 nt, Artificial Sequence
  Description of Artificial Sequence: Synthetic oligonucleotide
  Antisense strand to SEQ ID NO: 2352234
uucuuaccaagcauuuaau

SEQ ID NO: 2352236 - RNA, 19 nt, Artificial Sequence
  Description of Artificial Sequence: Synthetic oligonucleotide
  Sense strand starting at position 1086 of SEQ ID NO: 1885575
agaaauaucuacuuauggu

SEQ ID NO: 2352237 - RNA, 19 nt, Artificial Sequence
  Description of Artificial Sequence: Synthetic oligonucleotide
  Antisense strand to SEQ ID NO: 2352236
accauaaguagauauuucu

SEQ ID NO: 2352238 - RNA, 19 nt, Artificial Sequence
  Description of Artificial Sequence: Synthetic oligonucleotide
  Sense strand starting at position 1092 of SEQ ID NO: 1885575
aucuacuuaugguugaaua

SEQ ID NO: 2352239 - RNA, 19 nt, Artificial Sequence
  Description of Artificial Sequence: Synthetic oligonucleotide
  Antisense strand to SEQ ID NO: 2352238
uauucaaccauaaguagau

SEQ ID NO: 2352240 - RNA, 19 nt, Artificial Sequence
  Description of Artificial Sequence: Synthetic oligonucleotide
  Sense strand starting at position 1093 of SEQ ID NO: 1885575
ucuacuuaugguugaauau

SEQ ID NO: 2352241 - RNA, 19 nt, Artificial Sequence
  Description of Artificial Sequence: Synthetic oligonucleotide
  Antisense strand to SEQ ID NO: 2352240
auauucaaccauaaguaga

SEQ ID NO: 2352242 - RNA, 19 nt, Artificial Sequence
  Description of Artificial Sequence: Synthetic oligonucleotide
  Sense strand starting at position 1229 of SEQ ID NO: 1885575
uuaguaagaccucaugucu

SEQ ID NO: 2352243 - RNA, 19 nt, Artificial Sequence
  Description of Artificial Sequence: Synthetic oligonucleotide
  Antisense strand to SEQ ID NO: 2352242
agacaugaggucuuacuaa

SEQ ID NO: 2352244 - RNA, 19 nt, Artificial Sequence
  Description of Artificial Sequence: Synthetic oligonucleotide
  Sense strand starting at position 1363 of SEQ ID NO: 1885575
ccuaauacacgccaguuaa

SEQ ID NO: 2352245 - RNA, 19 nt, Artificial Sequence
  Description of Artificial Sequence: Synthetic oligonucleotide
  Antisense strand to SEQ ID NO: 2352244
uuaacuggcguguauuagg

SEQ ID NO: 2352246 - RNA, 19 nt, Artificial Sequence
  Description of Artificial Sequence: Synthetic oligonucleotide
  Sense strand starting at position 1412 of SEQ ID NO: 1885575
gacgcuauaggcuagauaa

SEQ ID NO: 2352247 - RNA, 19 nt, Artificial Sequence
  Description of Artificial Sequence: Synthetic oligonucleotide
  Antisense strand to SEQ ID NO: 2352246
uuaucuagccuauagcguc

SEQ ID NO: 2352248 - RNA, 19 nt, Artificial Sequence
  Description of Artificial Sequence: Synthetic oligonucleotide
  Sense strand starting at position 1414 of SEQ ID NO: 1885575
cgcuauaggcuagauaaua

SEQ ID NO: 2352249 - RNA, 19 nt, Artificial Sequence
  Description of Artificial Sequence: Synthetic oligonucleotide
  Antisense strand to SEQ ID NO: 2352248
uauuaucuagccuauagcg

SEQ ID NO: 2352250 - RNA, 19 nt, Artificial Sequence
  Description of Artificial Sequence: Synthetic oligonucleotide
  Sense strand starting at position 1614 of SEQ ID NO: 1885575
cuuuccuuugucuggaaua

SEQ ID NO: 2352251 - RNA, 19 nt, Artificial Sequence
  Description of Artificial Sequence: Synthetic oligonucleotide
  Antisense strand to SEQ ID NO: 2352250
uauuccagacaaaggaaag

SEQ ID NO: 2352252 - RNA, 19 nt, Artificial Sequence
  Description of Artificial Sequence: Synthetic oligonucleotide
  Sense strand starting at position 1616 of SEQ ID NO: 1885575
uuccuuugucuggaauaau

SEQ ID NO: 2352253 - RNA, 19 nt, Artificial Sequence
  Description of Artificial Sequence: Synthetic oligonucleotide
  Antisense strand to SEQ ID NO: 2352252
auuauuccagacaaaggaa

SEQ ID NO: 2352254 - RNA, 19 nt, Artificial Sequence
  Description of Artificial Sequence: Synthetic oligonucleotide
  Sense strand starting at position 1619 of SEQ ID NO: 1885575
cuuugucuggaauaauggu

SEQ ID NO: 2352255 - RNA, 19 nt, Artificial Sequence
  Description of Artificial Sequence: Synthetic oligonucleotide
  Antisense strand to SEQ ID NO: 2352254
accauuauuccagacaaag

SEQ ID NO: 2352256 - RNA, 19 nt, Artificial Sequence
  Description of Artificial Sequence: Synthetic oligonucleotide
  Sense strand starting at position 2112 of SEQ ID NO: 1885575
cuuagaacuggaugacguu

SEQ ID NO: 2352257 - RNA, 19 nt, Artificial Sequence
  Description of Artificial Sequence: Synthetic oligonucleotide
  Antisense strand to SEQ ID NO: 2352256
aacgucauccaguucuaag

SEQ ID NO: 2352258 - RNA, 19 nt, Artificial Sequence
  Description of Artificial Sequence: Synthetic oligonucleotide
  Sense strand starting at position 2223 of SEQ ID NO: 1885575
gaagauuugucacacucug

SEQ ID NO: 2352259 - RNA, 19 nt, Artificial Sequence
  Description of Artificial Sequence: Synthetic oligonucleotide
  Antisense strand to SEQ ID NO: 2352258
cagagugugacaaaucuuc

SEQ ID NO: 2352260 - RNA, 19 nt, Artificial Sequence
  Description of Artificial Sequence: Synthetic oligonucleotide
  Sense strand starting at position 2250 of SEQ ID NO: 1885575
gcuuguugccaugacaaug

SEQ ID NO: 2352261 - RNA, 19 nt, Artificial Sequence
  Description of Artificial Sequence: Synthetic oligonucleotide
  Antisense strand to SEQ ID NO: 2352260
cauugucauggcaacaagc

SEQ ID NO: 2352262 - RNA, 19 nt, Artificial Sequence
  Description of Artificial Sequence: Synthetic oligonucleotide
  Sense strand starting at position 2298 of SEQ ID NO: 1885575
cauugucagcgacaugauu

SEQ ID NO: 2352263 - RNA, 19 nt, Artificial Sequence
  Description of Artificial Sequence: Synthetic oligonucleotide
  Antisense strand to SEQ ID NO: 2352262
aaucaugucgcugacaaug

SEQ ID NO: 2352264 - RNA, 19 nt, Artificial Sequence
  Description of Artificial Sequence: Synthetic oligonucleotide
  Sense strand starting at position 2518 of SEQ ID NO: 1885575
uuggaaguccuucgagaag

SEQ ID NO: 2352265 - RNA, 19 nt, Artificial Sequence
  Description of Artificial Sequence: Synthetic oligonucleotide
  Antisense strand to SEQ ID NO: 2352264
cuucucgaaggacuuccaa

SEQ ID NO: 2352266 - RNA, 19 nt, Artificial Sequence
  Description of Artificial Sequence: Synthetic oligonucleotide
  Sense strand starting at position 2521 of SEQ ID NO: 1885575
gaaguccuucgagaaguag

SEQ ID NO: 2352267 - RNA, 19 nt, Artificial Sequence
  Description of Artificial Sequence: Synthetic oligonucleotide
  Antisense strand to SEQ ID NO: 2352266
cuacuucucgaaggacuuc

SEQ ID NO: 2352268 - RNA, 19 nt, Artificial Sequence
  Description of Artificial Sequence: Synthetic oligonucleotide
  Sense strand starting at position 2966 of SEQ ID NO: 1885575
cucucucgaucagucagaa

SEQ ID NO: 2352269 - RNA, 19 nt, Artificial Sequence
  Description of Artificial Sequence: Synthetic oligonucleotide
  Antisense strand to SEQ ID NO: 2352268
uucugacugaucgagagag

SEQ ID NO: 2352270 - RNA, 19 nt, Artificial Sequence
  Description of Artificial Sequence: Synthetic oligonucleotide
  Sense strand starting at position 3145 of SEQ ID NO: 1885575
cagguuuggguuugaagau

SEQ ID NO: 2352271 - RNA, 19 nt, Artificial Sequence
  Description of Artificial Sequence: Synthetic oligonucleotide
  Antisense strand to SEQ ID NO: 2352270
aucuucaaacccaaaccug

SEQ ID NO: 2352272 - RNA, 19 nt, Artificial Sequence
  Description of Artificial Sequence: Synthetic oligonucleotide
  Sense strand starting at position 3222 of SEQ ID NO: 1885575
cuagguggauaguaaauuu

SEQ ID NO: 2352273 - RNA, 19 nt, Artificial Sequence
  Description of Artificial Sequence: Synthetic oligonucleotide
  Antisense strand to SEQ ID NO: 2352272
aaauuuacuauccaccuag

SEQ ID NO: 2352274 - RNA, 19 nt, Artificial Sequence
  Description of Artificial Sequence: Synthetic oligonucleotide
  Sense strand starting at position 3496 of SEQ ID NO: 1885575
cucaauagucaucauuagu

SEQ ID NO: 2352275 - RNA, 19 nt, Artificial Sequence
  Description of Artificial Sequence: Synthetic oligonucleotide
  Antisense strand to SEQ ID NO: 2352274
acuaaugaugacuauugag

SEQ ID NO: 2352276 - RNA, 19 nt, Artificial Sequence
  Description of Artificial Sequence: Synthetic oligonucleotide
  Sense strand starting at position 3592 of SEQ ID NO: 1885575
cuguuucuucuugaagauu

SEQ ID NO: 2352277 - RNA, 19 nt, Artificial Sequence
  Description of Artificial Sequence: Synthetic oligonucleotide
  Antisense strand to SEQ ID NO: 2352276
aaucuucaagaagaaacag

SEQ ID NO: 2352278 - RNA, 19 nt, Artificial Sequence
  Description of Artificial Sequence: Synthetic oligonucleotide
  Sense strand starting at position 3652 of SEQ ID NO: 1885575
ugcaauuagcuuuaggaca

SEQ ID NO: 2352279 - RNA, 19 nt, Artificial Sequence
  Description of Artificial Sequence: Synthetic oligonucleotide
  Antisense strand to SEQ ID NO: 2352278
uguccuaaagcuaauugca

SEQ ID NO: 2352280 - RNA, 19 nt, Artificial Sequence
  Description of Artificial Sequence: Synthetic oligonucleotide
  Sense strand starting at position 3767 of SEQ ID NO: 1885575
acauguuauuuggauacca

SEQ ID NO: 2352281 - RNA, 19 nt, Artificial Sequence
  Description of Artificial Sequence: Synthetic oligonucleotide
  Antisense strand to SEQ ID NO: 2352280
ugguauccaaauaacaugu

SEQ ID NO: 2352282 - RNA, 19 nt, Artificial Sequence
  Description of Artificial Sequence: Synthetic oligonucleotide
  Sense strand starting at position 201 of SEQ ID NO: 1885576
cccucagugguuuagacaa

SEQ ID NO: 2352283 - RNA, 19 nt, Artificial Sequence
  Description of Artificial Sequence: Synthetic oligonucleotide
  Antisense strand to SEQ ID NO: 2352282
uugucuaaaccacugaggg

SEQ ID NO: 2352284 - RNA, 19 nt, Artificial Sequence
  Description of Artificial Sequence: Synthetic oligonucleotide
  Sense strand starting at position 219 of SEQ ID NO: 1885576
aucaucugcccacauguua

SEQ ID NO: 2352285 - RNA, 19 nt, Artificial Sequence
  Description of Artificial Sequence: Synthetic oligonucleotide
  Antisense strand to SEQ ID NO: 2352284
uaacaugugggcagaugau

SEQ ID NO: 2352286 - RNA, 19 nt, Artificial Sequence
  Description of Artificial Sequence: Synthetic oligonucleotide
  Sense strand starting at position 255 of SEQ ID NO: 1885576
agccucuuggagugaaauu

SEQ ID NO: 2352287 - RNA, 19 nt, Artificial Sequence
  Description of Artificial Sequence: Synthetic oligonucleotide
  Antisense strand to SEQ ID NO: 2352286
aauuucacuccaagaggcu

SEQ ID NO: 2352288 - RNA, 19 nt, Artificial Sequence
  Description of Artificial Sequence: Synthetic oligonucleotide
  Sense strand starting at position 313 of SEQ ID NO: 1885576
ucccucuuucugugauaga

SEQ ID NO: 2352289 - RNA, 19 nt, Artificial Sequence
  Description of Artificial Sequence: Synthetic oligonucleotide
  Antisense strand to SEQ ID NO: 2352288
ucuaucacagaaagaggga

SEQ ID NO: 2352290 - RNA, 19 nt, Artificial Sequence
  Description of Artificial Sequence: Synthetic oligonucleotide
  Sense strand starting at position 337 of SEQ ID NO: 1885576
ccaguucugcauuauucca

SEQ ID NO: 2352291 - RNA, 19 nt, Artificial Sequence
  Description of Artificial Sequence: Synthetic oligonucleotide
  Antisense strand to SEQ ID NO: 2352290
uggaauaaugcagaacugg

SEQ ID NO: 2352292 - RNA, 19 nt, Artificial Sequence
  Description of Artificial Sequence: Synthetic oligonucleotide
  Sense strand starting at position 507 of SEQ ID NO: 1885576
augacuacuugugauuuau

SEQ ID NO: 2352293 - RNA, 19 nt, Artificial Sequence
  Description of Artificial Sequence: Synthetic oligonucleotide
  Antisense strand to SEQ ID NO: 2352292
auaaaucacaaguagucau

SEQ ID NO: 2352294 - RNA, 19 nt, Artificial Sequence
  Description of Artificial Sequence: Synthetic oligonucleotide
  Sense strand starting at position 518 of SEQ ID NO: 1885576
ugauuuauuugccauguca

SEQ ID NO: 2352295 - RNA, 19 nt, Artificial Sequence
  Description of Artificial Sequence: Synthetic oligonucleotide
  Antisense strand to SEQ ID NO: 2352294
ugacauggcaaauaaauca

SEQ ID NO: 2352296 - RNA, 19 nt, Artificial Sequence
  Description of Artificial Sequence: Synthetic oligonucleotide
  Sense strand starting at position 553 of SEQ ID NO: 1885576
guauaaauuugccauuuga

SEQ ID NO: 2352297 - RNA, 19 nt, Artificial Sequence
  Description of Artificial Sequence: Synthetic oligonucleotide
  Antisense strand to SEQ ID NO: 2352296
ucaaauggcaaauuuauac

SEQ ID NO: 2352298 - RNA, 19 nt, Artificial Sequence
  Description of Artificial Sequence: Synthetic oligonucleotide
  Sense strand starting at position 638 of SEQ ID NO: 1885576
aacagaggcuuugugacuu

SEQ ID NO: 2352299 - RNA, 19 nt, Artificial Sequence
  Description of Artificial Sequence: Synthetic oligonucleotide
  Antisense strand to SEQ ID NO: 2352298
aagucacaaagccucuguu

SEQ ID NO: 2352300 - RNA, 19 nt, Artificial Sequence
  Description of Artificial Sequence: Synthetic oligonucleotide
  Sense strand starting at position 642 of SEQ ID NO: 1885576
gaggcuuugugacuucuaa

SEQ ID NO: 2352301 - RNA, 19 nt, Artificial Sequence
  Description of Artificial Sequence: Synthetic oligonucleotide
  Antisense strand to SEQ ID NO: 2352300
uuagaagucacaaagccuc

SEQ ID NO: 2352302 - RNA, 19 nt, Artificial Sequence
  Description of Artificial Sequence: Synthetic oligonucleotide
  Sense strand starting at position 688 of SEQ ID NO: 1885576
ggaacauaucugugcucag

SEQ ID NO: 2352303 - RNA, 19 nt, Artificial Sequence
  Description of Artificial Sequence: Synthetic oligonucleotide
  Antisense strand to SEQ ID NO: 2352302
cugagcacagauauguucc

SEQ ID NO: 2352304 - RNA, 19 nt, Artificial Sequence
  Description of Artificial Sequence: Synthetic oligonucleotide
  Sense strand starting at position 689 of SEQ ID NO: 1885576
gaacauaucugugcucaga

SEQ ID NO: 2352305 - RNA, 19 nt, Artificial Sequence
  Description of Artificial Sequence: Synthetic oligonucleotide
  Antisense strand to SEQ ID NO: 2352304
ucugagcacagauauguuc

SEQ ID NO: 2352306 - RNA, 19 nt, Artificial Sequence
  Description of Artificial Sequence: Synthetic oligonucleotide
  Sense strand starting at position 691 of SEQ ID NO: 1885576
acauaucugugcucagaag

SEQ ID NO: 2352307 - RNA, 19 nt, Artificial Sequence
  Description of Artificial Sequence: Synthetic oligonucleotide
  Antisense strand to SEQ ID NO: 2352306
cuucugagcacagauaugu

SEQ ID NO: 2352308 - RNA, 19 nt, Artificial Sequence
  Description of Artificial Sequence: Synthetic oligonucleotide
  Sense strand starting at position 722 of SEQ ID NO: 1885576
gugaaauucuaucuggaau

SEQ ID NO: 2352309 - RNA, 19 nt, Artificial Sequence
  Description of Artificial Sequence: Synthetic oligonucleotide
  Antisense strand to SEQ ID NO: 2352308
auuccagauagaauuucac

SEQ ID NO: 2352310 - RNA, 19 nt, Artificial Sequence
  Description of Artificial Sequence: Synthetic oligonucleotide
  Sense strand starting at position 837 of SEQ ID NO: 1885576
acagcugugccucaaugaa

SEQ ID NO: 2352311 - RNA, 19 nt, Artificial Sequence
  Description of Artificial Sequence: Synthetic oligonucleotide
  Antisense strand to SEQ ID NO: 2352310
uucauugaggcacagcugu

SEQ ID NO: 2352312 - RNA, 19 nt, Artificial Sequence
  Description of Artificial Sequence: Synthetic oligonucleotide
  Sense strand starting at position 895 of SEQ ID NO: 1885576
ccagcaauguuagccaaau

SEQ ID NO: 2352313 - RNA, 19 nt, Artificial Sequence
  Description of Artificial Sequence: Synthetic oligonucleotide
  Antisense strand to SEQ ID NO: 2352312
auuuggcuaacauugcugg

SEQ ID NO: 2352314 - RNA, 19 nt, Artificial Sequence
  Description of Artificial Sequence: Synthetic oligonucleotide
  Sense strand starting at position 1201 of SEQ ID NO: 1885576
gaggguguucuguauacaa

SEQ ID NO: 2352315 - RNA, 19 nt, Artificial Sequence
  Description of Artificial Sequence: Synthetic oligonucleotide
  Antisense strand to SEQ ID NO: 2352314
uuguauacagaacacccuc

SEQ ID NO: 2352316 - RNA, 19 nt, Artificial Sequence
  Description of Artificial Sequence: Synthetic oligonucleotide
  Sense strand starting at position 1203 of SEQ ID NO: 1885576
ggguguucuguauacaaag

SEQ ID NO: 2352317 - RNA, 19 nt, Artificial Sequence
  Description of Artificial Sequence: Synthetic oligonucleotide
  Antisense strand to SEQ ID NO: 2352316
cuuuguauacagaacaccc

SEQ ID NO: 2352318 - RNA, 19 nt, Artificial Sequence
  Description of Artificial Sequence: Synthetic oligonucleotide
  Sense strand starting at position 1339 of SEQ ID NO: 1885576
ggagaaugcugaguucuuu

SEQ ID NO: 2352319 - RNA, 19 nt, Artificial Sequence
  Description of Artificial Sequence: Synthetic oligonucleotide
  Antisense strand to SEQ ID NO: 2352318
aaagaacucagcauucucc

SEQ ID NO: 2352320 - RNA, 19 nt, Artificial Sequence
  Description of Artificial Sequence: Synthetic oligonucleotide
  Sense strand starting at position 1343 of SEQ ID NO: 1885576
aaugcugaguucuuugaau

SEQ ID NO: 2352321 - RNA, 19 nt, Artificial Sequence
  Description of Artificial Sequence: Synthetic oligonucleotide
  Antisense strand to SEQ ID NO: 2352320
auucaaagaacucagcauu

SEQ ID NO: 2352322 - RNA, 19 nt, Artificial Sequence
  Description of Artificial Sequence: Synthetic oligonucleotide
  Sense strand starting at position 1345 of SEQ ID NO: 1885576
ugcugaguucuuugaauug

SEQ ID NO: 2352323 - RNA, 19 nt, Artificial Sequence
  Description of Artificial Sequence: Synthetic oligonucleotide
  Antisense strand to SEQ ID NO: 2352322
caauucaaagaacucagca

SEQ ID NO: 2352324 - RNA, 19 nt, Artificial Sequence
  Description of Artificial Sequence: Synthetic oligonucleotide
  Sense strand starting at position 1435 of SEQ ID NO: 1885576
ccagucuggagucauaaug

SEQ ID NO: 2352325 - RNA, 19 nt, Artificial Sequence
  Description of Artificial Sequence: Synthetic oligonucleotide
  Antisense strand to SEQ ID NO: 2352324
cauuaugacuccagacugg

SEQ ID NO: 2352326 - RNA, 19 nt, Artificial Sequence
  Description of Artificial Sequence: Synthetic oligonucleotide
  Sense strand starting at position 1444 of SEQ ID NO: 1885576
agucauaauguggaacgua

SEQ ID NO: 2352327 - RNA, 19 nt, Artificial Sequence
  Description of Artificial Sequence: Synthetic oligonucleotide
  Antisense strand to SEQ ID NO: 2352326
uacguuccacauuaugacu

SEQ ID NO: 2352328 - RNA, 19 nt, Artificial Sequence
  Description of Artificial Sequence: Synthetic oligonucleotide
  Sense strand starting at position 1476 of SEQ ID NO: 1885576
aguucugaucuuggcaaca

SEQ ID NO: 2352329 - RNA, 19 nt, Artificial Sequence
  Description of Artificial Sequence: Synthetic oligonucleotide
  Antisense strand to SEQ ID NO: 2352328
uguugccaagaucagaacu

SEQ ID NO: 2352330 - RNA, 19 nt, Artificial Sequence
  Description of Artificial Sequence: Synthetic oligonucleotide
  Sense strand starting at position 1552 of SEQ ID NO: 1885576
aagugacaugugugcacaa

SEQ ID NO: 2352331 - RNA, 19 nt, Artificial Sequence
  Description of Artificial Sequence: Synthetic oligonucleotide
  Antisense strand to SEQ ID NO: 2352330
uugugcacacaugucacuu

SEQ ID NO: 2352332 - RNA, 19 nt, Artificial Sequence
  Description of Artificial Sequence: Synthetic oligonucleotide
  Sense strand starting at position 1554 of SEQ ID NO: 1885576
gugacaugugugcacaaca

SEQ ID NO: 2352333 - RNA, 19 nt, Artificial Sequence
  Description of Artificial Sequence: Synthetic oligonucleotide
  Antisense strand to SEQ ID NO: 2352332
uguugugcacacaugucac

SEQ ID NO: 2352334 - RNA, 19 nt, Artificial Sequence
  Description of Artificial Sequence: Synthetic oligonucleotide
  Sense strand starting at position 1578 of SEQ ID NO: 1885576
ugagaaacccugugcugga

SEQ ID NO: 2352335 - RNA, 19 nt, Artificial Sequence
  Description of Artificial Sequence: Synthetic oligonucleotide
  Antisense strand to SEQ ID NO: 2352334
uccagcacaggguuucuca

SEQ ID NO: 2352336 - RNA, 19 nt, Artificial Sequence
  Description of Artificial Sequence: Synthetic oligonucleotide
  Sense strand starting at position 1731 of SEQ ID NO: 1885576
agaacuguuucuccucuga

SEQ ID NO: 2352337 - RNA, 19 nt, Artificial Sequence
  Description of Artificial Sequence: Synthetic oligonucleotide
  Antisense strand to SEQ ID NO: 2352336
ucagaggagaaacaguucu

SEQ ID NO: 2352338 - RNA, 19 nt, Artificial Sequence
  Description of Artificial Sequence: Synthetic oligonucleotide
  Sense strand starting at position 2315 of SEQ ID NO: 1885576
uagugauauuugcuuaagu

SEQ ID NO: 2352339 - RNA, 19 nt, Artificial Sequence
  Description of Artificial Sequence: Synthetic oligonucleotide
  Antisense strand to SEQ ID NO: 2352338
acuuaagcaaauaucacua

SEQ ID NO: 2352340 - RNA, 19 nt, Artificial Sequence
  Description of Artificial Sequence: Synthetic oligonucleotide
  Sense strand starting at position 2492 of SEQ ID NO: 1885576
ggagucaucccucaggcca

SEQ ID NO: 2352341 - RNA, 19 nt, Artificial Sequence
  Description of Artificial Sequence: Synthetic oligonucleotide
  Antisense strand to SEQ ID NO: 2352340
uggccugagggaugacucc

SEQ ID NO: 2352342 - RNA, 19 nt, Artificial Sequence
  Description of Artificial Sequence: Synthetic oligonucleotide
  Sense strand starting at position 2631 of SEQ ID NO: 1885576
uuuccuucucuggauuguu

SEQ ID NO: 2352343 - RNA, 19 nt, Artificial Sequence
  Description of Artificial Sequence: Synthetic oligonucleotide
  Antisense strand to SEQ ID NO: 2352342
aacaauccagagaaggaaa

SEQ ID NO: 2352344 - RNA, 19 nt, Artificial Sequence
  Description of Artificial Sequence: Synthetic oligonucleotide
  Sense strand starting at position 2848 of SEQ ID NO: 1885576
uggcuuuggacauaggauu

SEQ ID NO: 2352345 - RNA, 19 nt, Artificial Sequence
  Description of Artificial Sequence: Synthetic oligonucleotide
  Antisense strand to SEQ ID NO: 2352344
aauccuauguccaaagcca

SEQ ID NO: 2352346 - RNA, 19 nt, Artificial Sequence
  Description of Artificial Sequence: Synthetic oligonucleotide
  Sense strand starting at position 2998 of SEQ ID NO: 1885576
gaacaugugccuuguagac

SEQ ID NO: 2352347 - RNA, 19 nt, Artificial Sequence
  Description of Artificial Sequence: Synthetic oligonucleotide
  Antisense strand to SEQ ID NO: 2352346
gucuacaaggcacauguuc

SEQ ID NO: 2352348 - RNA, 19 nt, Artificial Sequence
  Description of Artificial Sequence: Synthetic oligonucleotide
  Sense strand starting at position 3144 of SEQ ID NO: 1885576
aucaacuugccguaagaug

SEQ ID NO: 2352349 - RNA, 19 nt, Artificial Sequence
  Description of Artificial Sequence: Synthetic oligonucleotide
  Antisense strand to SEQ ID NO: 2352348
caucuuacggcaaguugau

SEQ ID NO: 2352350 - RNA, 19 nt, Artificial Sequence
  Description of Artificial Sequence: Synthetic oligonucleotide
  Sense strand starting at position 3183 of SEQ ID NO: 1885576
ugugcaugcccuuaauuua

SEQ ID NO: 2352351 - RNA, 19 nt, Artificial Sequence
  Description of Artificial Sequence: Synthetic oligonucleotide
  Antisense strand to SEQ ID NO: 2352350
uaaauuaagggcaugcaca

SEQ ID NO: 2352352 - RNA, 19 nt, Artificial Sequence
  Description of Artificial Sequence: Synthetic oligonucleotide
  Sense strand starting at position 3377 of SEQ ID NO: 1885576
uuggcuuauggugaacaau

SEQ ID NO: 2352353 - RNA, 19 nt, Artificial Sequence
  Description of Artificial Sequence: Synthetic oligonucleotide
  Antisense strand to SEQ ID NO: 2352352
auuguucaccauaagccaa

SEQ ID NO: 2352354 - RNA, 19 nt, Artificial Sequence
  Description of Artificial Sequence: Synthetic oligonucleotide
  Sense strand starting at position 3579 of SEQ ID NO: 1885576
cugggaugaccugguccaa

SEQ ID NO: 2352355 - RNA, 19 nt, Artificial Sequence
  Description of Artificial Sequence: Synthetic oligonucleotide
  Antisense strand to SEQ ID NO: 2352354
uuggaccaggucaucccag

SEQ ID NO: 2352356 - RNA, 19 nt, Artificial Sequence
  Description of Artificial Sequence: Synthetic oligonucleotide
  Sense strand starting at position 3611 of SEQ ID NO: 1885576
agacaauucuacgcccaau

SEQ ID NO: 2352357 - RNA, 19 nt, Artificial Sequence
  Description of Artificial Sequence: Synthetic oligonucleotide
  Antisense strand to SEQ ID NO: 2352356
auugggcguagaauugucu

SEQ ID NO: 2352358 - RNA, 19 nt, Artificial Sequence
  Description of Artificial Sequence: Synthetic oligonucleotide
  Sense strand starting at position 3974 of SEQ ID NO: 1885576
gcugcucaugauuaguuau

SEQ ID NO: 2352359 - RNA, 19 nt, Artificial Sequence
  Description of Artificial Sequence: Synthetic oligonucleotide
  Antisense strand to SEQ ID NO: 2352358
auaacuaaucaugagcagc

SEQ ID NO: 2352360 - RNA, 19 nt, Artificial Sequence
  Description of Artificial Sequence: Synthetic oligonucleotide
  Sense strand starting at position 3976 of SEQ ID NO: 1885576
ugcucaugauuaguuauuu

SEQ ID NO: 2352361 - RNA, 19 nt, Artificial Sequence
  Description of Artificial Sequence: Synthetic oligonucleotide
  Antisense strand to SEQ ID NO: 2352360
aaauaacuaaucaugagca

SEQ ID NO: 2352362 - RNA, 19 nt, Artificial Sequence
  Description of Artificial Sequence: Synthetic oligonucleotide
  Sense strand starting at position 105 of SEQ ID NO: 1885577
cugcuuguccugggcaaga

SEQ ID NO: 2352363 - RNA, 19 nt, Artificial Sequence
  Description of Artificial Sequence: Synthetic oligonucleotide
  Antisense strand to SEQ ID NO: 2352362
ucuugcccaggacaagcag

SEQ ID NO: 2352364 - RNA, 19 nt, Artificial Sequence
  Description of Artificial Sequence: Synthetic oligonucleotide
  Sense strand starting at position 118 of SEQ ID NO: 1885577
gcaagagcgcccucauguu

SEQ ID NO: 2352365 - RNA, 19 nt, Artificial Sequence
  Description of Artificial Sequence: Synthetic oligonucleotide
  Antisense strand to SEQ ID NO: 2352364
aacaugagggcgcucuugc

SEQ ID NO: 2352366 - RNA, 19 nt, Artificial Sequence
  Description of Artificial Sequence: Synthetic oligonucleotide
  Sense strand starting at position 507 of SEQ ID NO: 1885577
gucuccuaagugugcauua

SEQ ID NO: 2352367 - RNA, 19 nt, Artificial Sequence
  Description of Artificial Sequence: Synthetic oligonucleotide
  Antisense strand to SEQ ID NO: 2352366
uaaugcacacuuaggagac

SEQ ID NO: 2352368 - RNA, 19 nt, Artificial Sequence
  Description of Artificial Sequence: Synthetic oligonucleotide
  Sense strand starting at position 508 of SEQ ID NO: 1885577
ucuccuaagugugcauuaa

SEQ ID NO: 2352369 - RNA, 19 nt, Artificial Sequence
  Description of Artificial Sequence: Synthetic oligonucleotide
  Antisense strand to SEQ ID NO: 2352368
uuaaugcacacuuaggaga

SEQ ID NO: 2352370 - RNA, 19 nt, Artificial Sequence
  Description of Artificial Sequence: Synthetic oligonucleotide
  Sense strand starting at position 512 of SEQ ID NO: 1885577
cuaagugugcauuaagaau

SEQ ID NO: 2352371 - RNA, 19 nt, Artificial Sequence
  Description of Artificial Sequence: Synthetic oligonucleotide
  Antisense strand to SEQ ID NO: 2352370
auucuuaaugcacacuuag

SEQ ID NO: 2352372 - RNA, 19 nt, Artificial Sequence
  Description of Artificial Sequence: Synthetic oligonucleotide
  Sense strand starting at position 593 of SEQ ID NO: 1885577
agcccagaacgguguucau

SEQ ID NO: 2352373 - RNA, 19 nt, Artificial Sequence
  Description of Artificial Sequence: Synthetic oligonucleotide
  Antisense strand to SEQ ID NO: 2352372
augaacaccguucugggcu

SEQ ID NO: 2352374 - RNA, 19 nt, Artificial Sequence
  Description of Artificial Sequence: Synthetic oligonucleotide
  Sense strand starting at position 755 of SEQ ID NO: 1885577
gaagguuggcuauguuagu

SEQ ID NO: 2352375 - RNA, 19 nt, Artificial Sequence
  Description of Artificial Sequence: Synthetic oligonucleotide
  Antisense strand to SEQ ID NO: 2352374
acuaacauagccaaccuuc

SEQ ID NO: 2352376 - RNA, 19 nt, Artificial Sequence
  Description of Artificial Sequence: Synthetic oligonucleotide
  Sense strand starting at position 764 of SEQ ID NO: 1885577
cuauguuagugugcaaaua

SEQ ID NO: 2352377 - RNA, 19 nt, Artificial Sequence
  Description of Artificial Sequence: Synthetic oligonucleotide
  Antisense strand to SEQ ID NO: 2352376
uauuugcacacuaacauag

SEQ ID NO: 2352378 - RNA, 19 nt, Artificial Sequence
  Description of Artificial Sequence: Synthetic oligonucleotide
  Sense strand starting at position 765 of SEQ ID NO: 1885577
uauguuagugugcaaauag

SEQ ID NO: 2352379 - RNA, 19 nt, Artificial Sequence
  Description of Artificial Sequence: Synthetic oligonucleotide
  Antisense strand to SEQ ID NO: 2352378
cuauuugcacacuaacaua

SEQ ID NO: 2352380 - RNA, 19 nt, Artificial Sequence
  Description of Artificial Sequence: Synthetic oligonucleotide
  Sense strand starting at position 799 of SEQ ID NO: 1885577
agaagaacuuuagagagaa

SEQ ID NO: 2352381 - RNA, 19 nt, Artificial Sequence
  Description of Artificial Sequence: Synthetic oligonucleotide
  Antisense strand to SEQ ID NO: 2352380
uucucucuaaaguucuucu

SEQ ID NO: 2352382 - RNA, 19 nt, Artificial Sequence
  Description of Artificial Sequence: Synthetic oligonucleotide
  Sense strand starting at position 836 of SEQ ID NO: 1885577
agcaaagagcuuuaacuga

SEQ ID NO: 2352383 - RNA, 19 nt, Artificial Sequence
  Description of Artificial Sequence: Synthetic oligonucleotide
  Antisense strand to SEQ ID NO: 2352382
ucaguuaaagcucuuugcu

SEQ ID NO: 2352384 - RNA, 19 nt, Artificial Sequence
  Description of Artificial Sequence: Synthetic oligonucleotide
  Sense strand starting at position 873 of SEQ ID NO: 1885577
accugucuuugagcguuaa

SEQ ID NO: 2352385 - RNA, 19 nt, Artificial Sequence
  Description of Artificial Sequence: Synthetic oligonucleotide
  Antisense strand to SEQ ID NO: 2352384
uuaacgcucaaagacaggu

SEQ ID NO: 2352386 - RNA, 19 nt, Artificial Sequence
  Description of Artificial Sequence: Synthetic oligonucleotide
  Sense strand starting at position 877 of SEQ ID NO: 1885577
gucuuugagcguuaagaac

SEQ ID NO: 2352387 - RNA, 19 nt, Artificial Sequence
  Description of Artificial Sequence: Synthetic oligonucleotide
  Antisense strand to SEQ ID NO: 2352386
guucuuaacgcucaaagac

SEQ ID NO: 2352388 - RNA, 19 nt, Artificial Sequence
  Description of Artificial Sequence: Synthetic oligonucleotide
  Sense strand starting at position 889 of SEQ ID NO: 1885577
uaagaacgucccggaaguu

SEQ ID NO: 2352389 - RNA, 19 nt, Artificial Sequence
  Description of Artificial Sequence: Synthetic oligonucleotide
  Antisense strand to SEQ ID NO: 2352388
aacuuccgggacguucuua

SEQ ID NO: 2352390 - RNA, 19 nt, Artificial Sequence
  Description of Artificial Sequence: Synthetic oligonucleotide
  Sense strand starting at position 1032 of SEQ ID NO: 1885577
uccuuugccgugucuacau

SEQ ID NO: 2352391 - RNA, 19 nt, Artificial Sequence
  Description of Artificial Sequence: Synthetic oligonucleotide
  Antisense strand to SEQ ID NO: 2352390
auguagacacggcaaagga

SEQ ID NO: 2352392 - RNA, 19 nt, Artificial Sequence
  Description of Artificial Sequence: Synthetic oligonucleotide
  Sense strand starting at position 1180 of SEQ ID NO: 1885577
cccaaagucaggcguuaaa

SEQ ID NO: 2352393 - RNA, 19 nt, Artificial Sequence
  Description of Artificial Sequence: Synthetic oligonucleotide
  Antisense strand to SEQ ID NO: 2352392
uuuaacgccugacuuuggg

SEQ ID NO: 2352394 - RNA, 19 nt, Artificial Sequence
  Description of Artificial Sequence: Synthetic oligonucleotide
  Sense strand starting at position 1524 of SEQ ID NO: 1885577
aaaucugagguggguuauu

SEQ ID NO: 2352395 - RNA, 19 nt, Artificial Sequence
  Description of Artificial Sequence: Synthetic oligonucleotide
  Antisense strand to SEQ ID NO: 2352394
aauaacccaccucagauuu

SEQ ID NO: 2352396 - RNA, 19 nt, Artificial Sequence
  Description of Artificial Sequence: Synthetic oligonucleotide
  Sense strand starting at position 1593 of SEQ ID NO: 1885577
gggaaugauugguauagag

SEQ ID NO: 2352397 - RNA, 19 nt, Artificial Sequence
  Description of Artificial Sequence: Synthetic oligonucleotide
  Antisense strand to SEQ ID NO: 2352396
cucuauaccaaucauuccc

SEQ ID NO: 2352398 - RNA, 19 nt, Artificial Sequence
  Description of Artificial Sequence: Synthetic oligonucleotide
  Sense strand starting at position 1666 of SEQ ID NO: 1885577
aguacuaacugggaaagau

SEQ ID NO: 2352399 - RNA, 19 nt, Artificial Sequence
  Description of Artificial Sequence: Synthetic oligonucleotide
  Antisense strand to SEQ ID NO: 2352398
aucuuucccaguuaguacu

SEQ ID NO: 2352400 - RNA, 19 nt, Artificial Sequence
  Description of Artificial Sequence: Synthetic oligonucleotide
  Sense strand starting at position 1675 of SEQ ID NO: 1885577
ugggaaagaucucuagcac

SEQ ID NO: 2352401 - RNA, 19 nt, Artificial Sequence
  Description of Artificial Sequence: Synthetic oligonucleotide
  Antisense strand to SEQ ID NO: 2352400
gugcuagagaucuuuccca

SEQ ID NO: 2352402 - RNA, 19 nt, Artificial Sequence
  Description of Artificial Sequence: Synthetic oligonucleotide
  Sense strand starting at position 1725 of SEQ ID NO: 1885577
gaagaaugcagacgugugu

SEQ ID NO: 2352403 - RNA, 19 nt, Artificial Sequence
  Description of Artificial Sequence: Synthetic oligonucleotide
  Antisense strand to SEQ ID NO: 2352402
acacacgucugcauucuuc

SEQ ID NO: 2352404 - RNA, 19 nt, Artificial Sequence
  Description of Artificial Sequence: Synthetic oligonucleotide
  Sense strand starting at position 2042 of SEQ ID NO: 1885577
acccuuuguuagucuaauu

SEQ ID NO: 2352405 - RNA, 19 nt, Artificial Sequence
  Description of Artificial Sequence: Synthetic oligonucleotide
  Antisense strand to SEQ ID NO: 2352404
aauuagacuaacaaagggu

SEQ ID NO: 2352406 - RNA, 19 nt, Artificial Sequence
  Description of Artificial Sequence: Synthetic oligonucleotide
  Sense strand starting at position 2047 of SEQ ID NO: 1885577
uuguuagucuaauucucca

SEQ ID NO: 2352407 - RNA, 19 nt, Artificial Sequence
  Description of Artificial Sequence: Synthetic oligonucleotide
  Antisense strand to SEQ ID NO: 2352406
uggagaauuagacuaacaa

SEQ ID NO: 2352408 - RNA, 19 nt, Artificial Sequence
  Description of Artificial Sequence: Synthetic oligonucleotide
  Sense strand starting at position 2364 of SEQ ID NO: 1885577
ggauauuuguauuaaaccu

SEQ ID NO: 2352409 - RNA, 19 nt, Artificial Sequence
  Description of Artificial Sequence: Synthetic oligonucleotide
  Antisense strand to SEQ ID NO: 2352408
agguuuaauacaaauaucc

SEQ ID NO: 2352410 - RNA, 19 nt, Artificial Sequence
  Description of Artificial Sequence: Synthetic oligonucleotide
  Sense strand starting at position 2371 of SEQ ID NO: 1885577
uguauuaaaccuuguuagu

SEQ ID NO: 2352411 - RNA, 19 nt, Artificial Sequence
  Description of Artificial Sequence: Synthetic oligonucleotide
  Antisense strand to SEQ ID NO: 2352410
acuaacaagguuuaauaca

SEQ ID NO: 2352412 - RNA, 19 nt, Artificial Sequence
  Description of Artificial Sequence: Synthetic oligonucleotide
  Sense strand starting at position 2420 of SEQ ID NO: 1885577
uuuguaacaggcugaagaa

SEQ ID NO: 2352413 - RNA, 19 nt, Artificial Sequence
  Description of Artificial Sequence: Synthetic oligonucleotide
  Antisense strand to SEQ ID NO: 2352412
uucuucagccuguuacaaa

SEQ ID NO: 2352414 - RNA, 19 nt, Artificial Sequence
  Description of Artificial Sequence: Synthetic oligonucleotide
  Sense strand starting at position 2694 of SEQ ID NO: 1885577
guguauuucugacauaaac

SEQ ID NO: 2352415 - RNA, 19 nt, Artificial Sequence
  Description of Artificial Sequence: Synthetic oligonucleotide
  Antisense strand to SEQ ID NO: 2352414
guuuaugucagaaauacac

SEQ ID NO: 2352416 - RNA, 19 nt, Artificial Sequence
  Description of Artificial Sequence: Synthetic oligonucleotide
  Sense strand starting at position 2818 of SEQ ID NO: 1885577
aagauaaguugagggauga

SEQ ID NO: 2352417 - RNA, 19 nt, Artificial Sequence
  Description of Artificial Sequence: Synthetic oligonucleotide
  Antisense strand to SEQ ID NO: 2352416
ucaucccucaacuuaucuu

SEQ ID NO: 2352418 - RNA, 19 nt, Artificial Sequence
  Description of Artificial Sequence: Synthetic oligonucleotide
  Sense strand starting at position 2828 of SEQ ID NO: 1885577
gagggaugauaagauagau

SEQ ID NO: 2352419 - RNA, 19 nt, Artificial Sequence
  Description of Artificial Sequence: Synthetic oligonucleotide
  Antisense strand to SEQ ID NO: 2352418
aucuaucuuaucaucccuc

SEQ ID NO: 2352420 - RNA, 19 nt, Artificial Sequence
  Description of Artificial Sequence: Synthetic oligonucleotide
  Sense strand starting at position 2912 of SEQ ID NO: 1885577
caccuucgugucuaguaca

SEQ ID NO: 2352421 - RNA, 19 nt, Artificial Sequence
  Description of Artificial Sequence: Synthetic oligonucleotide
  Antisense strand to SEQ ID NO: 2352420
uguacuagacacgaaggug

SEQ ID NO: 2352422 - RNA, 19 nt, Artificial Sequence
  Description of Artificial Sequence: Synthetic oligonucleotide
  Sense strand starting at position 2945 of SEQ ID NO: 1885577
agucauauccauuauaugu

SEQ ID NO: 2352423 - RNA, 19 nt, Artificial Sequence
  Description of Artificial Sequence: Synthetic oligonucleotide
  Antisense strand to SEQ ID NO: 2352422
acauauaauggauaugacu

SEQ ID NO: 2352424 - RNA, 19 nt, Artificial Sequence
  Description of Artificial Sequence: Synthetic oligonucleotide
  Sense strand starting at position 3048 of SEQ ID NO: 1885577
aaaguaugauguuugccau

SEQ ID NO: 2352425 - RNA, 19 nt, Artificial Sequence
  Description of Artificial Sequence: Synthetic oligonucleotide
  Antisense strand to SEQ ID NO: 2352424
auggcaaacaucauacuuu

SEQ ID NO: 2352426 - RNA, 19 nt, Artificial Sequence
  Description of Artificial Sequence: Synthetic oligonucleotide
  Sense strand starting at position 3049 of SEQ ID NO: 1885577
aaguaugauguuugccauu

SEQ ID NO: 2352427 - RNA, 19 nt, Artificial Sequence
  Description of Artificial Sequence: Synthetic oligonucleotide
  Antisense strand to SEQ ID NO: 2352426
aauggcaaacaucauacuu

SEQ ID NO: 2352428 - RNA, 19 nt, Artificial Sequence
  Description of Artificial Sequence: Synthetic oligonucleotide
  Sense strand starting at position 3051 of SEQ ID NO: 1885577
guaugauguuugccauuaa

SEQ ID NO: 2352429 - RNA, 19 nt, Artificial Sequence
  Description of Artificial Sequence: Synthetic oligonucleotide
  Antisense strand to SEQ ID NO: 2352428
uuaauggcaaacaucauac

SEQ ID NO: 2352430 - RNA, 19 nt, Artificial Sequence
  Description of Artificial Sequence: Synthetic oligonucleotide
  Sense strand starting at position 3122 of SEQ ID NO: 1885577
cuuauuuaauguggccaaa

SEQ ID NO: 2352431 - RNA, 19 nt, Artificial Sequence
  Description of Artificial Sequence: Synthetic oligonucleotide
  Antisense strand to SEQ ID NO: 2352430
uuuggccacauuaaauaag

SEQ ID NO: 2352432 - RNA, 19 nt, Artificial Sequence
  Description of Artificial Sequence: Synthetic oligonucleotide
  Sense strand starting at position 3334 of SEQ ID NO: 1885577
gucucucuuugagcuauuu

SEQ ID NO: 2352433 - RNA, 19 nt, Artificial Sequence
  Description of Artificial Sequence: Synthetic oligonucleotide
  Antisense strand to SEQ ID NO: 2352432
aaauagcucaaagagagac

SEQ ID NO: 2352434 - RNA, 19 nt, Artificial Sequence
  Description of Artificial Sequence: Synthetic oligonucleotide
  Sense strand starting at position 3556 of SEQ ID NO: 1885577
ugucuaauugcuuaaagga

SEQ ID NO: 2352435 - RNA, 19 nt, Artificial Sequence
  Description of Artificial Sequence: Synthetic oligonucleotide
  Antisense strand to SEQ ID NO: 2352434
uccuuuaagcaauuagaca

SEQ ID NO: 2352436 - RNA, 19 nt, Artificial Sequence
  Description of Artificial Sequence: Synthetic oligonucleotide
  Sense strand starting at position 3903 of SEQ ID NO: 1885577
ugagcaacugucuaagugu

SEQ ID NO: 2352437 - RNA, 19 nt, Artificial Sequence
  Description of Artificial Sequence: Synthetic oligonucleotide
  Antisense strand to SEQ ID NO: 2352436
acacuuagacaguugcuca

SEQ ID NO: 2352438 - RNA, 19 nt, Artificial Sequence
  Description of Artificial Sequence: Synthetic oligonucleotide
  Sense strand starting at position 3912 of SEQ ID NO: 1885577
gucuaaguguuugcugaua

SEQ ID NO: 2352439 - RNA, 19 nt, Artificial Sequence
  Description of Artificial Sequence: Synthetic oligonucleotide
  Antisense strand to SEQ ID NO: 2352438
uaucagcaaacacuuagac

SEQ ID NO: 2352440 - RNA, 19 nt, Artificial Sequence
  Description of Artificial Sequence: Synthetic oligonucleotide
  Sense strand starting at position 3933 of SEQ ID NO: 1885577
aucuuagggccagauuauu

SEQ ID NO: 2352441 - RNA, 19 nt, Artificial Sequence
  Description of Artificial Sequence: Synthetic oligonucleotide
  Antisense strand to SEQ ID NO: 2352440
aauaaucuggcccuaagau

SEQ ID NO: 2352442 - RNA, 19 nt, Artificial Sequence
  Description of Artificial Sequence: Synthetic oligonucleotide
  Sense strand starting at position 253 of SEQ ID NO: 1885579
auuccuaucuggucagaua

SEQ ID NO: 2352443 - RNA, 19 nt, Artificial Sequence
  Description of Artificial Sequence: Synthetic oligonucleotide
  Antisense strand to SEQ ID NO: 2352442
uaucugaccagauaggaau

SEQ ID NO: 2352444 - RNA, 19 nt, Artificial Sequence
  Description of Artificial Sequence: Synthetic oligonucleotide
  Sense strand starting at position 254 of SEQ ID NO: 1885579
uuccuaucuggucagauaa

SEQ ID NO: 2352445 - RNA, 19 nt, Artificial Sequence
  Description of Artificial Sequence: Synthetic oligonucleotide
  Antisense strand to SEQ ID NO: 2352444
uuaucugaccagauaggaa

SEQ ID NO: 2352446 - RNA, 19 nt, Artificial Sequence
  Description of Artificial Sequence: Synthetic oligonucleotide
  Sense strand starting at position 323 of SEQ ID NO: 1885579
aguaucuaacuuugugauc

SEQ ID NO: 2352447 - RNA, 19 nt, Artificial Sequence
  Description of Artificial Sequence: Synthetic oligonucleotide
  Antisense strand to SEQ ID NO: 2352446
gaucacaaaguuagauacu

SEQ ID NO: 2352448 - RNA, 19 nt, Artificial Sequence
  Description of Artificial Sequence: Synthetic oligonucleotide
  Sense strand starting at position 360 of SEQ ID NO: 1885579
ucguucucugaguacacaa

SEQ ID NO: 2352449 - RNA, 19 nt, Artificial Sequence
  Description of Artificial Sequence: Synthetic oligonucleotide
  Antisense strand to SEQ ID NO: 2352448
uuguguacucagagaacga

SEQ ID NO: 2352450 - RNA, 19 nt, Artificial Sequence
  Description of Artificial Sequence: Synthetic oligonucleotide
  Sense strand starting at position 390 of SEQ ID NO: 1885579
ucguaauaucuuugaacca

SEQ ID NO: 2352451 - RNA, 19 nt, Artificial Sequence
  Description of Artificial Sequence: Synthetic oligonucleotide
  Antisense strand to SEQ ID NO: 2352450
ugguucaaagauauuacga

SEQ ID NO: 2352452 - RNA, 19 nt, Artificial Sequence
  Description of Artificial Sequence: Synthetic oligonucleotide
  Sense strand starting at position 421 of SEQ ID NO: 1885579
ugcaaagucccuuaugaau

SEQ ID NO: 2352453 - RNA, 19 nt, Artificial Sequence
  Description of Artificial Sequence: Synthetic oligonucleotide
  Antisense strand to SEQ ID NO: 2352452
auucauaagggacuuugca

SEQ ID NO: 2352454 - RNA, 19 nt, Artificial Sequence
  Description of Artificial Sequence: Synthetic oligonucleotide
  Sense strand starting at position 427 of SEQ ID NO: 1885579
gucccuuaugaaugaguua

SEQ ID NO: 2352455 - RNA, 19 nt, Artificial Sequence
  Description of Artificial Sequence: Synthetic oligonucleotide
  Antisense strand to SEQ ID NO: 2352454
uaacucauucauaagggac

SEQ ID NO: 2352456 - RNA, 19 nt, Artificial Sequence
  Description of Artificial Sequence: Synthetic oligonucleotide
  Sense strand starting at position 735 of SEQ ID NO: 1885579
ucaagaugccuccaaugcu

SEQ ID NO: 2352457 - RNA, 19 nt, Artificial Sequence
  Description of Artificial Sequence: Synthetic oligonucleotide
  Antisense strand to SEQ ID NO: 2352456
agcauuggaggcaucuuga

SEQ ID NO: 2352458 - RNA, 19 nt, Artificial Sequence
  Description of Artificial Sequence: Synthetic oligonucleotide
  Sense strand starting at position 794 of SEQ ID NO: 1885579
ugcgcauaaccuuagaacu

SEQ ID NO: 2352459 - RNA, 19 nt, Artificial Sequence
  Description of Artificial Sequence: Synthetic oligonucleotide
  Antisense strand to SEQ ID NO: 2352458
aguucuaagguuaugcgca

SEQ ID NO: 2352460 - RNA, 19 nt, Artificial Sequence
  Description of Artificial Sequence: Synthetic oligonucleotide
  Sense strand starting at position 902 of SEQ ID NO: 1885579
ccaccaggccagugagauu

SEQ ID NO: 2352461 - RNA, 19 nt, Artificial Sequence
  Description of Artificial Sequence: Synthetic oligonucleotide
  Antisense strand to SEQ ID NO: 2352460
aaucucacuggccuggugg

SEQ ID NO: 2352462 - RNA, 19 nt, Artificial Sequence
  Description of Artificial Sequence: Synthetic oligonucleotide
  Sense strand starting at position 928 of SEQ ID NO: 1885579
uuggcaaauugcuuaaaga

SEQ ID NO: 2352463 - RNA, 19 nt, Artificial Sequence
  Description of Artificial Sequence: Synthetic oligonucleotide
  Antisense strand to SEQ ID NO: 2352462
ucuuuaagcaauuugccaa

SEQ ID NO: 2352464 - RNA, 19 nt, Artificial Sequence
  Description of Artificial Sequence: Synthetic oligonucleotide
  Sense strand starting at position 929 of SEQ ID NO: 1885579
uggcaaauugcuuaaagac

SEQ ID NO: 2352465 - RNA, 19 nt, Artificial Sequence
  Description of Artificial Sequence: Synthetic oligonucleotide
  Antisense strand to SEQ ID NO: 2352464
gucuuuaagcaauuugcca

SEQ ID NO: 2352466 - RNA, 19 nt, Artificial Sequence
  Description of Artificial Sequence: Synthetic oligonucleotide
  Sense strand starting at position 938 of SEQ ID NO: 1885579
gcuuaaagacuugauagua

SEQ ID NO: 2352467 - RNA, 19 nt, Artificial Sequence
  Description of Artificial Sequence: Synthetic oligonucleotide
  Antisense strand to SEQ ID NO: 2352466
uacuaucaagucuuuaagc

SEQ ID NO: 2352468 - RNA, 19 nt, Artificial Sequence
  Description of Artificial Sequence: Synthetic oligonucleotide
  Sense strand starting at position 1144 of SEQ ID NO: 1885579
gugugugaucuugaaagac

SEQ ID NO: 2352469 - RNA, 19 nt, Artificial Sequence
  Description of Artificial Sequence: Synthetic oligonucleotide
  Antisense strand to SEQ ID NO: 2352468
gucuuucaagaucacacac

SEQ ID NO: 2352470 - RNA, 19 nt, Artificial Sequence
  Description of Artificial Sequence: Synthetic oligonucleotide
  Sense strand starting at position 1165 of SEQ ID NO: 1885579
cucgguucgugaauggcau

SEQ ID NO: 2352471 - RNA, 19 nt, Artificial Sequence
  Description of Artificial Sequence: Synthetic oligonucleotide
  Antisense strand to SEQ ID NO: 2352470
augccauucacgaaccgag

SEQ ID NO: 2352472 - RNA, 19 nt, Artificial Sequence
  Description of Artificial Sequence: Synthetic oligonucleotide
  Sense strand starting at position 1489 of SEQ ID NO: 1885579
gaaagaagguuuccuuggu

SEQ ID NO: 2352473 - RNA, 19 nt, Artificial Sequence
  Description of Artificial Sequence: Synthetic oligonucleotide
  Antisense strand to SEQ ID NO: 2352472
accaaggaaaccuucuuuc

SEQ ID NO: 2352474 - RNA, 19 nt, Artificial Sequence
  Description of Artificial Sequence: Synthetic oligonucleotide
  Sense strand starting at position 1490 of SEQ ID NO: 1885579
aaagaagguuuccuugguu

SEQ ID NO: 2352475 - RNA, 19 nt, Artificial Sequence
  Description of Artificial Sequence: Synthetic oligonucleotide
  Antisense strand to SEQ ID NO: 2352474
aaccaaggaaaccuucuuu

SEQ ID NO: 2352476 - RNA, 19 nt, Artificial Sequence
  Description of Artificial Sequence: Synthetic oligonucleotide
  Sense strand starting at position 1493 of SEQ ID NO: 1885579
gaagguuuccuugguuaga

SEQ ID NO: 2352477 - RNA, 19 nt, Artificial Sequence
  Description of Artificial Sequence: Synthetic oligonucleotide
  Antisense strand to SEQ ID NO: 2352476
ucuaaccaaggaaaccuuc

SEQ ID NO: 2352478 - RNA, 19 nt, Artificial Sequence
  Description of Artificial Sequence: Synthetic oligonucleotide
  Sense strand starting at position 1494 of SEQ ID NO: 1885579
aagguuuccuugguuagac

SEQ ID NO: 2352479 - RNA, 19 nt, Artificial Sequence
  Description of Artificial Sequence: Synthetic oligonucleotide
  Antisense strand to SEQ ID NO: 2352478
gucuaaccaaggaaaccuu

SEQ ID NO: 2352480 - RNA, 19 nt, Artificial Sequence
  Description of Artificial Sequence: Synthetic oligonucleotide
  Sense strand starting at position 1602 of SEQ ID NO: 1885579
caauauucguacuuugaag

SEQ ID NO: 2352481 - RNA, 19 nt, Artificial Sequence
  Description of Artificial Sequence: Synthetic oligonucleotide
  Antisense strand to SEQ ID NO: 2352480
cuucaaaguacgaauauug

SEQ ID NO: 2352482 - RNA, 19 nt, Artificial Sequence
  Description of Artificial Sequence: Synthetic oligonucleotide
  Sense strand starting at position 1604 of SEQ ID NO: 1885579
auauucguacuuugaagau

SEQ ID NO: 2352483 - RNA, 19 nt, Artificial Sequence
  Description of Artificial Sequence: Synthetic oligonucleotide
  Antisense strand to SEQ ID NO: 2352482
aucuucaaaguacgaauau

SEQ ID NO: 2352484 - RNA, 19 nt, Artificial Sequence
  Description of Artificial Sequence: Synthetic oligonucleotide
  Sense strand starting at position 1875 of SEQ ID NO: 1885579
uugcuuuggcauuaugaug

SEQ ID NO: 2352485 - RNA, 19 nt, Artificial Sequence
  Description of Artificial Sequence: Synthetic oligonucleotide
  Antisense strand to SEQ ID NO: 2352484
caucauaaugccaaagcaa

SEQ ID NO: 2352486 - RNA, 19 nt, Artificial Sequence
  Description of Artificial Sequence: Synthetic oligonucleotide
  Sense strand starting at position 1916 of SEQ ID NO: 1885579
gucguuugucauguuuaac

SEQ ID NO: 2352487 - RNA, 19 nt, Artificial Sequence
  Description of Artificial Sequence: Synthetic oligonucleotide
  Antisense strand to SEQ ID NO: 2352486
guuaaacaugacaaacgac

SEQ ID NO: 2352488 - RNA, 19 nt, Artificial Sequence
  Description of Artificial Sequence: Synthetic oligonucleotide
  Sense strand starting at position 1977 of SEQ ID NO: 1885579
agagacuucuguucuugau

SEQ ID NO: 2352489 - RNA, 19 nt, Artificial Sequence
  Description of Artificial Sequence: Synthetic oligonucleotide
  Antisense strand to SEQ ID NO: 2352488
aucaagaacagaagucucu

SEQ ID NO: 2352490 - RNA, 19 nt, Artificial Sequence
  Description of Artificial Sequence: Synthetic oligonucleotide
  Sense strand starting at position 2020 of SEQ ID NO: 1885579
ugguuuauuccaugagaac

SEQ ID NO: 2352491 - RNA, 19 nt, Artificial Sequence
  Description of Artificial Sequence: Synthetic oligonucleotide
  Antisense strand to SEQ ID NO: 2352490
guucucauggaauaaacca

SEQ ID NO: 2352492 - RNA, 19 nt, Artificial Sequence
  Description of Artificial Sequence: Synthetic oligonucleotide
  Sense strand starting at position 2065 of SEQ ID NO: 1885579
gguucuuccuucuugauuu

SEQ ID NO: 2352493 - RNA, 19 nt, Artificial Sequence
  Description of Artificial Sequence: Synthetic oligonucleotide
  Antisense strand to SEQ ID NO: 2352492
aaaucaagaaggaagaacc

SEQ ID NO: 2352494 - RNA, 19 nt, Artificial Sequence
  Description of Artificial Sequence: Synthetic oligonucleotide
  Sense strand starting at position 2086 of SEQ ID NO: 1885579
cugggagaugacuguaauu

SEQ ID NO: 2352495 - RNA, 19 nt, Artificial Sequence
  Description of Artificial Sequence: Synthetic oligonucleotide
  Antisense strand to SEQ ID NO: 2352494
aauuacagucaucucccag

SEQ ID NO: 2352496 - RNA, 19 nt, Artificial Sequence
  Description of Artificial Sequence: Synthetic oligonucleotide
  Sense strand starting at position 2677 of SEQ ID NO: 1885579
gagggaauccaacgguguu

SEQ ID NO: 2352497 - RNA, 19 nt, Artificial Sequence
  Description of Artificial Sequence: Synthetic oligonucleotide
  Antisense strand to SEQ ID NO: 2352496
aacaccguuggauucccuc

SEQ ID NO: 2352498 - RNA, 19 nt, Artificial Sequence
  Description of Artificial Sequence: Synthetic oligonucleotide
  Sense strand starting at position 2789 of SEQ ID NO: 1885579
ucaugacagguuugaucau

SEQ ID NO: 2352499 - RNA, 19 nt, Artificial Sequence
  Description of Artificial Sequence: Synthetic oligonucleotide
  Antisense strand to SEQ ID NO: 2352498
augaucaaaccugucauga

SEQ ID NO: 2352500 - RNA, 19 nt, Artificial Sequence
  Description of Artificial Sequence: Synthetic oligonucleotide
  Sense strand starting at position 2830 of SEQ ID NO: 1885579
ugucauggugaugaagagu

SEQ ID NO: 2352501 - RNA, 19 nt, Artificial Sequence
  Description of Artificial Sequence: Synthetic oligonucleotide
  Antisense strand to SEQ ID NO: 2352500
acucuucaucaccaugaca

SEQ ID NO: 2352502 - RNA, 19 nt, Artificial Sequence
  Description of Artificial Sequence: Synthetic oligonucleotide
  Sense strand starting at position 2917 of SEQ ID NO: 1885579
gagaauggcugcuuccuaa

SEQ ID NO: 2352503 - RNA, 19 nt, Artificial Sequence
  Description of Artificial Sequence: Synthetic oligonucleotide
  Antisense strand to SEQ ID NO: 2352502
uuaggaagcagccauucuc

SEQ ID NO: 2352504 - RNA, 19 nt, Artificial Sequence
  Description of Artificial Sequence: Synthetic oligonucleotide
  Sense strand starting at position 2985 of SEQ ID NO: 1885579
gugguaacuauggguauga

SEQ ID NO: 2352505 - RNA, 19 nt, Artificial Sequence
  Description of Artificial Sequence: Synthetic oligonucleotide
  Antisense strand to SEQ ID NO: 2352504
ucauacccauaguuaccac

SEQ ID NO: 2352506 - RNA, 19 nt, Artificial Sequence
  Description of Artificial Sequence: Synthetic oligonucleotide
  Sense strand starting at position 2986 of SEQ ID NO: 1885579
ugguaacuauggguaugau

SEQ ID NO: 2352507 - RNA, 19 nt, Artificial Sequence
  Description of Artificial Sequence: Synthetic oligonucleotide
  Antisense strand to SEQ ID NO: 2352506
aucauacccauaguuacca

SEQ ID NO: 2352508 - RNA, 19 nt, Artificial Sequence
  Description of Artificial Sequence: Synthetic oligonucleotide
  Sense strand starting at position 2987 of SEQ ID NO: 1885579
gguaacuauggguaugauu

SEQ ID NO: 2352509 - RNA, 19 nt, Artificial Sequence
  Description of Artificial Sequence: Synthetic oligonucleotide
  Antisense strand to SEQ ID NO: 2352508
aaucauacccauaguuacc

SEQ ID NO: 2352510 - RNA, 19 nt, Artificial Sequence
  Description of Artificial Sequence: Synthetic oligonucleotide
  Sense strand starting at position 3232 of SEQ ID NO: 1885579
gggagaucuaccugcacau

SEQ ID NO: 2352511 - RNA, 19 nt, Artificial Sequence
  Description of Artificial Sequence: Synthetic oligonucleotide
  Antisense strand to SEQ ID NO: 2352510
augugcagguagaucuccc

SEQ ID NO: 2352512 - RNA, 19 nt, Artificial Sequence
  Description of Artificial Sequence: Synthetic oligonucleotide
  Sense strand starting at position 3344 of SEQ ID NO: 1885579
ccuugaguccagggagauu

SEQ ID NO: 2352513 - RNA, 19 nt, Artificial Sequence
  Description of Artificial Sequence: Synthetic oligonucleotide
  Antisense strand to SEQ ID NO: 2352512
aaucucccuggacucaagg

SEQ ID NO: 2352514 - RNA, 19 nt, Artificial Sequence
  Description of Artificial Sequence: Synthetic oligonucleotide
  Sense strand starting at position 3708 of SEQ ID NO: 1885579
ggccacauuucuguauauc

SEQ ID NO: 2352515 - RNA, 19 nt, Artificial Sequence
  Description of Artificial Sequence: Synthetic oligonucleotide
  Antisense strand to SEQ ID NO: 2352514
gauauacagaaauguggcc

SEQ ID NO: 2352516 - RNA, 19 nt, Artificial Sequence
  Description of Artificial Sequence: Synthetic oligonucleotide
  Sense strand starting at position 3757 of SEQ ID NO: 1885579
uugaucaucuuuccaagga

SEQ ID NO: 2352517 - RNA, 19 nt, Artificial Sequence
  Description of Artificial Sequence: Synthetic oligonucleotide
  Antisense strand to SEQ ID NO: 2352516
uccuuggaaagaugaucaa

SEQ ID NO: 2352518 - RNA, 19 nt, Artificial Sequence
  Description of Artificial Sequence: Synthetic oligonucleotide
  Sense strand starting at position 3761 of SEQ ID NO: 1885579
ucaucuuuccaaggaugcu

SEQ ID NO: 2352519 - RNA, 19 nt, Artificial Sequence
  Description of Artificial Sequence: Synthetic oligonucleotide
  Antisense strand to SEQ ID NO: 2352518
agcauccuuggaaagauga

SEQ ID NO: 2352520 - RNA, 19 nt, Artificial Sequence
  Description of Artificial Sequence: Synthetic oligonucleotide
  Sense strand starting at position 3811 of SEQ ID NO: 1885579
gcuguuucuccagagaaag

SEQ ID NO: 2352521 - RNA, 19 nt, Artificial Sequence
  Description of Artificial Sequence: Synthetic oligonucleotide
  Antisense strand to SEQ ID NO: 2352520
cuuucucuggagaaacagc

SEQ ID NO: 2352522 - RNA, 19 nt, Artificial Sequence
  Description of Artificial Sequence: Synthetic oligonucleotide
  Sense strand starting at position 109 of SEQ ID NO: 1885580
auuccuaucuggucagaua

SEQ ID NO: 2352523 - RNA, 19 nt, Artificial Sequence
  Description of Artificial Sequence: Synthetic oligonucleotide
  Antisense strand to SEQ ID NO: 2352522
uaucugaccagauaggaau

SEQ ID NO: 2352524 - RNA, 19 nt, Artificial Sequence
  Description of Artificial Sequence: Synthetic oligonucleotide
  Sense strand starting at position 110 of SEQ ID NO: 1885580
uuccuaucuggucagauaa

SEQ ID NO: 2352525 - RNA, 19 nt, Artificial Sequence
  Description of Artificial Sequence: Synthetic oligonucleotide
  Antisense strand to SEQ ID NO: 2352524
uuaucugaccagauaggaa

SEQ ID NO: 2352526 - RNA, 19 nt, Artificial Sequence
  Description of Artificial Sequence: Synthetic oligonucleotide
  Sense strand starting at position 179 of SEQ ID NO: 1885580
aguaucuaacuuugugauc

SEQ ID NO: 2352527 - RNA, 19 nt, Artificial Sequence
  Description of Artificial Sequence: Synthetic oligonucleotide
  Antisense strand to SEQ ID NO: 2352526
gaucacaaaguuagauacu

SEQ ID NO: 2352528 - RNA, 19 nt, Artificial Sequence
  Description of Artificial Sequence: Synthetic oligonucleotide
  Sense strand starting at position 216 of SEQ ID NO: 1885580
ucguucucugaguacacaa

SEQ ID NO: 2352529 - RNA, 19 nt, Artificial Sequence
  Description of Artificial Sequence: Synthetic oligonucleotide
  Antisense strand to SEQ ID NO: 2352528
uuguguacucagagaacga

SEQ ID NO: 2352530 - RNA, 19 nt, Artificial Sequence
  Description of Artificial Sequence: Synthetic oligonucleotide
  Sense strand starting at position 246 of SEQ ID NO: 1885580
ucguaauaucuuugaacca

SEQ ID NO: 2352531 - RNA, 19 nt, Artificial Sequence
  Description of Artificial Sequence: Synthetic oligonucleotide
  Antisense strand to SEQ ID NO: 2352530
ugguucaaagauauuacga

SEQ ID NO: 2352532 - RNA, 19 nt, Artificial Sequence
  Description of Artificial Sequence: Synthetic oligonucleotide
  Sense strand starting at position 277 of SEQ ID NO: 1885580
ugcaaagucccuuaugaau

SEQ ID NO: 2352533 - RNA, 19 nt, Artificial Sequence
  Description of Artificial Sequence: Synthetic oligonucleotide
  Antisense strand to SEQ ID NO: 2352532
auucauaagggacuuugca

SEQ ID NO: 2352534 - RNA, 19 nt, Artificial Sequence
  Description of Artificial Sequence: Synthetic oligonucleotide
  Sense strand starting at position 283 of SEQ ID NO: 1885580
gucccuuaugaaugaguua

SEQ ID NO: 2352535 - RNA, 19 nt, Artificial Sequence
  Description of Artificial Sequence: Synthetic oligonucleotide
  Antisense strand to SEQ ID NO: 2352534
uaacucauucauaagggac

SEQ ID NO: 2352536 - RNA, 19 nt, Artificial Sequence
  Description of Artificial Sequence: Synthetic oligonucleotide
  Sense strand starting at position 591 of SEQ ID NO: 1885580
ucaagaugccuccaaugcu

SEQ ID NO: 2352537 - RNA, 19 nt, Artificial Sequence
  Description of Artificial Sequence: Synthetic oligonucleotide
  Antisense strand to SEQ ID NO: 2352536
agcauuggaggcaucuuga

SEQ ID NO: 2352538 - RNA, 19 nt, Artificial Sequence
  Description of Artificial Sequence: Synthetic oligonucleotide
  Sense strand starting at position 650 of SEQ ID NO: 1885580
ugcgcauaaccuuagaacu

SEQ ID NO: 2352539 - RNA, 19 nt, Artificial Sequence
  Description of Artificial Sequence: Synthetic oligonucleotide
  Antisense strand to SEQ ID NO: 2352538
aguucuaagguuaugcgca

SEQ ID NO: 2352540 - RNA, 19 nt, Artificial Sequence
  Description of Artificial Sequence: Synthetic oligonucleotide
  Sense strand starting at position 758 of SEQ ID NO: 1885580
ccaccaggccagugagauu

SEQ ID NO: 2352541 - RNA, 19 nt, Artificial Sequence
  Description of Artificial Sequence: Synthetic oligonucleotide
  Antisense strand to SEQ ID NO: 2352540
aaucucacuggccuggugg

SEQ ID NO: 2352542 - RNA, 19 nt, Artificial Sequence
  Description of Artificial Sequence: Synthetic oligonucleotide
  Sense strand starting at position 784 of SEQ ID NO: 1885580
uuggcaaauugcuuaaaga

SEQ ID NO: 2352543 - RNA, 19 nt, Artificial Sequence
  Description of Artificial Sequence: Synthetic oligonucleotide
  Antisense strand to SEQ ID NO: 2352542
ucuuuaagcaauuugccaa

SEQ ID NO: 2352544 - RNA, 19 nt, Artificial Sequence
  Description of Artificial Sequence: Synthetic oligonucleotide
  Sense strand starting at position 785 of SEQ ID NO: 1885580
uggcaaauugcuuaaagac

SEQ ID NO: 2352545 - RNA, 19 nt, Artificial Sequence
  Description of Artificial Sequence: Synthetic oligonucleotide
  Antisense strand to SEQ ID NO: 2352544
gucuuuaagcaauuugcca

SEQ ID NO: 2352546 - RNA, 19 nt, Artificial Sequence
  Description of Artificial Sequence: Synthetic oligonucleotide
  Sense strand starting at position 794 of SEQ ID NO: 1885580
gcuuaaagacuugauagua

SEQ ID NO: 2352547 - RNA, 19 nt, Artificial Sequence
  Description of Artificial Sequence: Synthetic oligonucleotide
  Antisense strand to SEQ ID NO: 2352546
uacuaucaagucuuuaagc

SEQ ID NO: 2352548 - RNA, 19 nt, Artificial Sequence
  Description of Artificial Sequence: Synthetic oligonucleotide
  Sense strand starting at position 1000 of SEQ ID NO: 1885580
gugugugaucuugaaagac

SEQ ID NO: 2352549 - RNA, 19 nt, Artificial Sequence
  Description of Artificial Sequence: Synthetic oligonucleotide
  Antisense strand to SEQ ID NO: 2352548
gucuuucaagaucacacac

SEQ ID NO: 2352550 - RNA, 19 nt, Artificial Sequence
  Description of Artificial Sequence: Synthetic oligonucleotide
  Sense strand starting at position 1021 of SEQ ID NO: 1885580
cucgguucgugaauggcau

SEQ ID NO: 2352551 - RNA, 19 nt, Artificial Sequence
  Description of Artificial Sequence: Synthetic oligonucleotide
  Antisense strand to SEQ ID NO: 2352550
augccauucacgaaccgag

SEQ ID NO: 2352552 - RNA, 19 nt, Artificial Sequence
  Description of Artificial Sequence: Synthetic oligonucleotide
  Sense strand starting at position 1345 of SEQ ID NO: 1885580
gaaagaagguuuccuuggu

SEQ ID NO: 2352553 - RNA, 19 nt, Artificial Sequence
  Description of Artificial Sequence: Synthetic oligonucleotide
  Antisense strand to SEQ ID NO: 2352552
accaaggaaaccuucuuuc

SEQ ID NO: 2352554 - RNA, 19 nt, Artificial Sequence
  Description of Artificial Sequence: Synthetic oligonucleotide
  Sense strand starting at position 1346 of SEQ ID NO: 1885580
aaagaagguuuccuugguu

SEQ ID NO: 2352555 - RNA, 19 nt, Artificial Sequence
  Description of Artificial Sequence: Synthetic oligonucleotide
  Antisense strand to SEQ ID NO: 2352554
aaccaaggaaaccuucuuu

SEQ ID NO: 2352556 - RNA, 19 nt, Artificial Sequence
  Description of Artificial Sequence: Synthetic oligonucleotide
  Sense strand starting at position 1349 of SEQ ID NO: 1885580
gaagguuuccuugguuaga

SEQ ID NO: 2352557 - RNA, 19 nt, Artificial Sequence
  Description of Artificial Sequence: Synthetic oligonucleotide
  Antisense strand to SEQ ID NO: 2352556
ucuaaccaaggaaaccuuc

SEQ ID NO: 2352558 - RNA, 19 nt, Artificial Sequence
  Description of Artificial Sequence: Synthetic oligonucleotide
  Sense strand starting at position 1350 of SEQ ID NO: 1885580
aagguuuccuugguuagac

SEQ ID NO: 2352559 - RNA, 19 nt, Artificial Sequence
  Description of Artificial Sequence: Synthetic oligonucleotide
  Antisense strand to SEQ ID NO: 2352558
gucuaaccaaggaaaccuu

SEQ ID NO: 2352560 - RNA, 19 nt, Artificial Sequence
  Description of Artificial Sequence: Synthetic oligonucleotide
  Sense strand starting at position 1458 of SEQ ID NO: 1885580
caauauucguacuuugaag

SEQ ID NO: 2352561 - RNA, 19 nt, Artificial Sequence
  Description of Artificial Sequence: Synthetic oligonucleotide
  Antisense strand to SEQ ID NO: 2352560
cuucaaaguacgaauauug

SEQ ID NO: 2352562 - RNA, 19 nt, Artificial Sequence
  Description of Artificial Sequence: Synthetic oligonucleotide
  Sense strand starting at position 1460 of SEQ ID NO: 1885580
auauucguacuuugaagau

SEQ ID NO: 2352563 - RNA, 19 nt, Artificial Sequence
  Description of Artificial Sequence: Synthetic oligonucleotide
  Antisense strand to SEQ ID NO: 2352562
aucuucaaaguacgaauau

SEQ ID NO: 2352564 - RNA, 19 nt, Artificial Sequence
  Description of Artificial Sequence: Synthetic oligonucleotide
  Sense strand starting at position 1731 of SEQ ID NO: 1885580
uugcuuuggcauuaugaug

SEQ ID NO: 2352565 - RNA, 19 nt, Artificial Sequence
  Description of Artificial Sequence: Synthetic oligonucleotide
  Antisense strand to SEQ ID NO: 2352564
caucauaaugccaaagcaa

SEQ ID NO: 2352566 - RNA, 19 nt, Artificial Sequence
  Description of Artificial Sequence: Synthetic oligonucleotide
  Sense strand starting at position 1772 of SEQ ID NO: 1885580
gucguuugucauguuuaac

SEQ ID NO: 2352567 - RNA, 19 nt, Artificial Sequence
  Description of Artificial Sequence: Synthetic oligonucleotide
  Antisense strand to SEQ ID NO: 2352566
guuaaacaugacaaacgac

SEQ ID NO: 2352568 - RNA, 19 nt, Artificial Sequence
  Description of Artificial Sequence: Synthetic oligonucleotide
  Sense strand starting at position 1833 of SEQ ID NO: 1885580
agagacuucuguucuugau

SEQ ID NO: 2352569 - RNA, 19 nt, Artificial Sequence
  Description of Artificial Sequence: Synthetic oligonucleotide
  Antisense strand to SEQ ID NO: 2352568
aucaagaacagaagucucu

SEQ ID NO: 2352570 - RNA, 19 nt, Artificial Sequence
  Description of Artificial Sequence: Synthetic oligonucleotide
  Sense strand starting at position 1876 of SEQ ID NO: 1885580
ugguuuauuccaugagaac

SEQ ID NO: 2352571 - RNA, 19 nt, Artificial Sequence
  Description of Artificial Sequence: Synthetic oligonucleotide
  Antisense strand to SEQ ID NO: 2352570
guucucauggaauaaacca

SEQ ID NO: 2352572 - RNA, 19 nt, Artificial Sequence
  Description of Artificial Sequence: Synthetic oligonucleotide
  Sense strand starting at position 1921 of SEQ ID NO: 1885580
gguucuuccuucuugauuu

SEQ ID NO: 2352573 - RNA, 19 nt, Artificial Sequence
  Description of Artificial Sequence: Synthetic oligonucleotide
  Antisense strand to SEQ ID NO: 2352572
aaaucaagaaggaagaacc

SEQ ID NO: 2352574 - RNA, 19 nt, Artificial Sequence
  Description of Artificial Sequence: Synthetic oligonucleotide
  Sense strand starting at position 1942 of SEQ ID NO: 1885580
cugggagaugacuguaauu

SEQ ID NO: 2352575 - RNA, 19 nt, Artificial Sequence
  Description of Artificial Sequence: Synthetic oligonucleotide
  Antisense strand to SEQ ID NO: 2352574
aauuacagucaucucccag

SEQ ID NO: 2352576 - RNA, 19 nt, Artificial Sequence
  Description of Artificial Sequence: Synthetic oligonucleotide
  Sense strand starting at position 2533 of SEQ ID NO: 1885580
gagggaauccaacgguguu

SEQ ID NO: 2352577 - RNA, 19 nt, Artificial Sequence
  Description of Artificial Sequence: Synthetic oligonucleotide
  Antisense strand to SEQ ID NO: 2352576
aacaccguuggauucccuc

SEQ ID NO: 2352578 - RNA, 19 nt, Artificial Sequence
  Description of Artificial Sequence: Synthetic oligonucleotide
  Sense strand starting at position 2645 of SEQ ID NO: 1885580
ucaugacagguuugaucau

SEQ ID NO: 2352579 - RNA, 19 nt, Artificial Sequence
  Description of Artificial Sequence: Synthetic oligonucleotide
  Antisense strand to SEQ ID NO: 2352578
augaucaaaccugucauga

SEQ ID NO: 2352580 - RNA, 19 nt, Artificial Sequence
  Description of Artificial Sequence: Synthetic oligonucleotide
  Sense strand starting at position 2686 of SEQ ID NO: 1885580
ugucauggugaugaagagu

SEQ ID NO: 2352581 - RNA, 19 nt, Artificial Sequence
  Description of Artificial Sequence: Synthetic oligonucleotide
  Antisense strand to SEQ ID NO: 2352580
acucuucaucaccaugaca

SEQ ID NO: 2352582 - RNA, 19 nt, Artificial Sequence
  Description of Artificial Sequence: Synthetic oligonucleotide
  Sense strand starting at position 2773 of SEQ ID NO: 1885580
gagaauggcugcuuccuaa

SEQ ID NO: 2352583 - RNA, 19 nt, Artificial Sequence
  Description of Artificial Sequence: Synthetic oligonucleotide
  Antisense strand to SEQ ID NO: 2352582
uuaggaagcagccauucuc

SEQ ID NO: 2352584 - RNA, 19 nt, Artificial Sequence
  Description of Artificial Sequence: Synthetic oligonucleotide
  Sense strand starting at position 2841 of SEQ ID NO: 1885580
gugguaacuauggguauga

SEQ ID NO: 2352585 - RNA, 19 nt, Artificial Sequence
  Description of Artificial Sequence: Synthetic oligonucleotide
  Antisense strand to SEQ ID NO: 2352584
ucauacccauaguuaccac

SEQ ID NO: 2352586 - RNA, 19 nt, Artificial Sequence
  Description of Artificial Sequence: Synthetic oligonucleotide
  Sense strand starting at position 2842 of SEQ ID NO: 1885580
ugguaacuauggguaugau

SEQ ID NO: 2352587 - RNA, 19 nt, Artificial Sequence
  Description of Artificial Sequence: Synthetic oligonucleotide
  Antisense strand to SEQ ID NO: 2352586
aucauacccauaguuacca

SEQ ID NO: 2352588 - RNA, 19 nt, Artificial Sequence
  Description of Artificial Sequence: Synthetic oligonucleotide
  Sense strand starting at position 2843 of SEQ ID NO: 1885580
gguaacuauggguaugauu

SEQ ID NO: 2352589 - RNA, 19 nt, Artificial Sequence
  Description of Artificial Sequence: Synthetic oligonucleotide
  Antisense strand to SEQ ID NO: 2352588
aaucauacccauaguuacc

SEQ ID NO: 2352590 - RNA, 19 nt, Artificial Sequence
  Description of Artificial Sequence: Synthetic oligonucleotide
  Sense strand starting at position 3088 of SEQ ID NO: 1885580
gggagaucuaccugcacau

SEQ ID NO: 2352591 - RNA, 19 nt, Artificial Sequence
  Description of Artificial Sequence: Synthetic oligonucleotide
  Antisense strand to SEQ ID NO: 2352590
augugcagguagaucuccc

SEQ ID NO: 2352592 - RNA, 19 nt, Artificial Sequence
  Description of Artificial Sequence: Synthetic oligonucleotide
  Sense strand starting at position 3200 of SEQ ID NO: 1885580
ccuugaguccagggagauu

SEQ ID NO: 2352593 - RNA, 19 nt, Artificial Sequence
  Description of Artificial Sequence: Synthetic oligonucleotide
  Antisense strand to SEQ ID NO: 2352592
aaucucccuggacucaagg

SEQ ID NO: 2352594 - RNA, 19 nt, Artificial Sequence
  Description of Artificial Sequence: Synthetic oligonucleotide
  Sense strand starting at position 3564 of SEQ ID NO: 1885580
ggccacauuucuguauauc

SEQ ID NO: 2352595 - RNA, 19 nt, Artificial Sequence
  Description of Artificial Sequence: Synthetic oligonucleotide
  Antisense strand to SEQ ID NO: 2352594
gauauacagaaauguggcc

SEQ ID NO: 2352596 - RNA, 19 nt, Artificial Sequence
  Description of Artificial Sequence: Synthetic oligonucleotide
  Sense strand starting at position 3613 of SEQ ID NO: 1885580
uugaucaucuuuccaagga

SEQ ID NO: 2352597 - RNA, 19 nt, Artificial Sequence
  Description of Artificial Sequence: Synthetic oligonucleotide
  Antisense strand to SEQ ID NO: 2352596
uccuuggaaagaugaucaa

SEQ ID NO: 2352598 - RNA, 19 nt, Artificial Sequence
  Description of Artificial Sequence: Synthetic oligonucleotide
  Sense strand starting at position 3617 of SEQ ID NO: 1885580
ucaucuuuccaaggaugcu

SEQ ID NO: 2352599 - RNA, 19 nt, Artificial Sequence
  Description of Artificial Sequence: Synthetic oligonucleotide
  Antisense strand to SEQ ID NO: 2352598
agcauccuuggaaagauga

SEQ ID NO: 2352600 - RNA, 19 nt, Artificial Sequence
  Description of Artificial Sequence: Synthetic oligonucleotide
  Sense strand starting at position 3667 of SEQ ID NO: 1885580
gcuguuucuccagagaaag

SEQ ID NO: 2352601 - RNA, 19 nt, Artificial Sequence
  Description of Artificial Sequence: Synthetic oligonucleotide
  Antisense strand to SEQ ID NO: 2352600
cuuucucuggagaaacagc

SEQ ID NO: 2352602 - RNA, 19 nt, Artificial Sequence
  Description of Artificial Sequence: Synthetic oligonucleotide
  Sense strand starting at position 143 of SEQ ID NO: 1885581
gugugugaucuugaaagac

SEQ ID NO: 2352603 - RNA, 19 nt, Artificial Sequence
  Description of Artificial Sequence: Synthetic oligonucleotide
  Antisense strand to SEQ ID NO: 2352602
gucuuucaagaucacacac

SEQ ID NO: 2352604 - RNA, 19 nt, Artificial Sequence
  Description of Artificial Sequence: Synthetic oligonucleotide
  Sense strand starting at position 164 of SEQ ID NO: 1885581
cucgguucgugaauggcau

SEQ ID NO: 2352605 - RNA, 19 nt, Artificial Sequence
  Description of Artificial Sequence: Synthetic oligonucleotide
  Antisense strand to SEQ ID NO: 2352604
augccauucacgaaccgag

SEQ ID NO: 2352606 - RNA, 19 nt, Artificial Sequence
  Description of Artificial Sequence: Synthetic oligonucleotide
  Sense strand starting at position 488 of SEQ ID NO: 1885581
gaaagaagguuuccuuggu

SEQ ID NO: 2352607 - RNA, 19 nt, Artificial Sequence
  Description of Artificial Sequence: Synthetic oligonucleotide
  Antisense strand to SEQ ID NO: 2352606
accaaggaaaccuucuuuc

SEQ ID NO: 2352608 - RNA, 19 nt, Artificial Sequence
  Description of Artificial Sequence: Synthetic oligonucleotide
  Sense strand starting at position 489 of SEQ ID NO: 1885581
aaagaagguuuccuugguu

SEQ ID NO: 2352609 - RNA, 19 nt, Artificial Sequence
  Description of Artificial Sequence: Synthetic oligonucleotide
  Antisense strand to SEQ ID NO: 2352608
aaccaaggaaaccuucuuu

SEQ ID NO: 2352610 - RNA, 19 nt, Artificial Sequence
  Description of Artificial Sequence: Synthetic oligonucleotide
  Sense strand starting at position 492 of SEQ ID NO: 1885581
gaagguuuccuugguuaga

SEQ ID NO: 2352611 - RNA, 19 nt, Artificial Sequence
  Description of Artificial Sequence: Synthetic oligonucleotide
  Antisense strand to SEQ ID NO: 2352610
ucuaaccaaggaaaccuuc

SEQ ID NO: 2352612 - RNA, 19 nt, Artificial Sequence
  Description of Artificial Sequence: Synthetic oligonucleotide
  Sense strand starting at position 493 of SEQ ID NO: 1885581
aagguuuccuugguuagac

SEQ ID NO: 2352613 - RNA, 19 nt, Artificial Sequence
  Description of Artificial Sequence: Synthetic oligonucleotide
  Antisense strand to SEQ ID NO: 2352612
gucuaaccaaggaaaccuu

SEQ ID NO: 2352614 - RNA, 19 nt, Artificial Sequence
  Description of Artificial Sequence: Synthetic oligonucleotide
  Sense strand starting at position 601 of SEQ ID NO: 1885581
caauauucguacuuugaag

SEQ ID NO: 2352615 - RNA, 19 nt, Artificial Sequence
  Description of Artificial Sequence: Synthetic oligonucleotide
  Antisense strand to SEQ ID NO: 2352614
cuucaaaguacgaauauug

SEQ ID NO: 2352616 - RNA, 19 nt, Artificial Sequence
  Description of Artificial Sequence: Synthetic oligonucleotide
  Sense strand starting at position 603 of SEQ ID NO: 1885581
auauucguacuuugaagau

SEQ ID NO: 2352617 - RNA, 19 nt, Artificial Sequence
  Description of Artificial Sequence: Synthetic oligonucleotide
  Antisense strand to SEQ ID NO: 2352616
aucuucaaaguacgaauau

SEQ ID NO: 2352618 - RNA, 19 nt, Artificial Sequence
  Description of Artificial Sequence: Synthetic oligonucleotide
  Sense strand starting at position 874 of SEQ ID NO: 1885581
uugcuuuggcauuaugaug

SEQ ID NO: 2352619 - RNA, 19 nt, Artificial Sequence
  Description of Artificial Sequence: Synthetic oligonucleotide
  Antisense strand to SEQ ID NO: 2352618
caucauaaugccaaagcaa

SEQ ID NO: 2352620 - RNA, 19 nt, Artificial Sequence
  Description of Artificial Sequence: Synthetic oligonucleotide
  Sense strand starting at position 915 of SEQ ID NO: 1885581
gucguuugucauguuuaac

SEQ ID NO: 2352621 - RNA, 19 nt, Artificial Sequence
  Description of Artificial Sequence: Synthetic oligonucleotide
  Antisense strand to SEQ ID NO: 2352620
guuaaacaugacaaacgac

SEQ ID NO: 2352622 - RNA, 19 nt, Artificial Sequence
  Description of Artificial Sequence: Synthetic oligonucleotide
  Sense strand starting at position 918 of SEQ ID NO: 1885581
guuugucauguuuaaccca

SEQ ID NO: 2352623 - RNA, 19 nt, Artificial Sequence
  Description of Artificial Sequence: Synthetic oligonucleotide
  Antisense strand to SEQ ID NO: 2352622
uggguuaaacaugacaaac

SEQ ID NO: 2352624 - RNA, 19 nt, Artificial Sequence
  Description of Artificial Sequence: Synthetic oligonucleotide
  Sense strand starting at position 976 of SEQ ID NO: 1885581
agagacuucuguucuugau

SEQ ID NO: 2352625 - RNA, 19 nt, Artificial Sequence
  Description of Artificial Sequence: Synthetic oligonucleotide
  Antisense strand to SEQ ID NO: 2352624
aucaagaacagaagucucu

SEQ ID NO: 2352626 - RNA, 19 nt, Artificial Sequence
  Description of Artificial Sequence: Synthetic oligonucleotide
  Sense strand starting at position 1019 of SEQ ID NO: 1885581
ugguuuauuccaugagaac

SEQ ID NO: 2352627 - RNA, 19 nt, Artificial Sequence
  Description of Artificial Sequence: Synthetic oligonucleotide
  Antisense strand to SEQ ID NO: 2352626
guucucauggaauaaacca

SEQ ID NO: 2352628 - RNA, 19 nt, Artificial Sequence
  Description of Artificial Sequence: Synthetic oligonucleotide
  Sense strand starting at position 1064 of SEQ ID NO: 1885581
gguucuuccuucuugauuu

SEQ ID NO: 2352629 - RNA, 19 nt, Artificial Sequence
  Description of Artificial Sequence: Synthetic oligonucleotide
  Antisense strand to SEQ ID NO: 2352628
aaaucaagaaggaagaacc

SEQ ID NO: 2352630 - RNA, 19 nt, Artificial Sequence
  Description of Artificial Sequence: Synthetic oligonucleotide
  Sense strand starting at position 1085 of SEQ ID NO: 1885581
cugggagaugacuguaauu

SEQ ID NO: 2352631 - RNA, 19 nt, Artificial Sequence
  Description of Artificial Sequence: Synthetic oligonucleotide
  Antisense strand to SEQ ID NO: 2352630
aauuacagucaucucccag

SEQ ID NO: 2352632 - RNA, 19 nt, Artificial Sequence
  Description of Artificial Sequence: Synthetic oligonucleotide
  Sense strand starting at position 1676 of SEQ ID NO: 1885581
gagggaauccaacgguguu

SEQ ID NO: 2352633 - RNA, 19 nt, Artificial Sequence
  Description of Artificial Sequence: Synthetic oligonucleotide
  Antisense strand to SEQ ID NO: 2352632
aacaccguuggauucccuc

SEQ ID NO: 2352634 - RNA, 19 nt, Artificial Sequence
  Description of Artificial Sequence: Synthetic oligonucleotide
  Sense strand starting at position 1788 of SEQ ID NO: 1885581
ucaugacagguuugaucau

SEQ ID NO: 2352635 - RNA, 19 nt, Artificial Sequence
  Description of Artificial Sequence: Synthetic oligonucleotide
  Antisense strand to SEQ ID NO: 2352634
augaucaaaccugucauga

SEQ ID NO: 2352636 - RNA, 19 nt, Artificial Sequence
  Description of Artificial Sequence: Synthetic oligonucleotide
  Sense strand starting at position 1829 of SEQ ID NO: 1885581
ugucauggugaugaagagu

SEQ ID NO: 2352637 - RNA, 19 nt, Artificial Sequence
  Description of Artificial Sequence: Synthetic oligonucleotide
  Antisense strand to SEQ ID NO: 2352636
acucuucaucaccaugaca

SEQ ID NO: 2352638 - RNA, 19 nt, Artificial Sequence
  Description of Artificial Sequence: Synthetic oligonucleotide
  Sense strand starting at position 1889 of SEQ ID NO: 1885581
ggcuuccuccucuacagua

SEQ ID NO: 2352639 - RNA, 19 nt, Artificial Sequence
  Description of Artificial Sequence: Synthetic oligonucleotide
  Antisense strand to SEQ ID NO: 2352638
uacuguagaggaggaagcc

SEQ ID NO: 2352640 - RNA, 19 nt, Artificial Sequence
  Description of Artificial Sequence: Synthetic oligonucleotide
  Sense strand starting at position 1916 of SEQ ID NO: 1885581
gagaauggcugcuuccuaa

SEQ ID NO: 2352641 - RNA, 19 nt, Artificial Sequence
  Description of Artificial Sequence: Synthetic oligonucleotide
  Antisense strand to SEQ ID NO: 2352640
uuaggaagcagccauucuc

SEQ ID NO: 2352642 - RNA, 19 nt, Artificial Sequence
  Description of Artificial Sequence: Synthetic oligonucleotide
  Sense strand starting at position 1984 of SEQ ID NO: 1885581
gugguaacuauggguauga

SEQ ID NO: 2352643 - RNA, 19 nt, Artificial Sequence
  Description of Artificial Sequence: Synthetic oligonucleotide
  Antisense strand to SEQ ID NO: 2352642
ucauacccauaguuaccac

SEQ ID NO: 2352644 - RNA, 19 nt, Artificial Sequence
  Description of Artificial Sequence: Synthetic oligonucleotide
  Sense strand starting at position 1985 of SEQ ID NO: 1885581
ugguaacuauggguaugau

SEQ ID NO: 2352645 - RNA, 19 nt, Artificial Sequence
  Description of Artificial Sequence: Synthetic oligonucleotide
  Antisense strand to SEQ ID NO: 2352644
aucauacccauaguuacca

SEQ ID NO: 2352646 - RNA, 19 nt, Artificial Sequence
  Description of Artificial Sequence: Synthetic oligonucleotide
  Sense strand starting at position 1986 of SEQ ID NO: 1885581
gguaacuauggguaugauu

SEQ ID NO: 2352647 - RNA, 19 nt, Artificial Sequence
  Description of Artificial Sequence: Synthetic oligonucleotide
  Antisense strand to SEQ ID NO: 2352646
aaucauacccauaguuacc

SEQ ID NO: 2352648 - RNA, 19 nt, Artificial Sequence
  Description of Artificial Sequence: Synthetic oligonucleotide
  Sense strand starting at position 2097 of SEQ ID NO: 1885581
gcuacagggccucaauguu

SEQ ID NO: 2352649 - RNA, 19 nt, Artificial Sequence
  Description of Artificial Sequence: Synthetic oligonucleotide
  Antisense strand to SEQ ID NO: 2352648
aacauugaggcccuguagc

SEQ ID NO: 2352650 - RNA, 19 nt, Artificial Sequence
  Description of Artificial Sequence: Synthetic oligonucleotide
  Sense strand starting at position 2231 of SEQ ID NO: 1885581
gggagaucuaccugcacau

SEQ ID NO: 2352651 - RNA, 19 nt, Artificial Sequence
  Description of Artificial Sequence: Synthetic oligonucleotide
  Antisense strand to SEQ ID NO: 2352650
augugcagguagaucuccc

SEQ ID NO: 2352652 - RNA, 19 nt, Artificial Sequence
  Description of Artificial Sequence: Synthetic oligonucleotide
  Sense strand starting at position 2343 of SEQ ID NO: 1885581
ccuugaguccagggagauu

SEQ ID NO: 2352653 - RNA, 19 nt, Artificial Sequence
  Description of Artificial Sequence: Synthetic oligonucleotide
  Antisense strand to SEQ ID NO: 2352652
aaucucccuggacucaagg

SEQ ID NO: 2352654 - RNA, 19 nt, Artificial Sequence
  Description of Artificial Sequence: Synthetic oligonucleotide
  Sense strand starting at position 2707 of SEQ ID NO: 1885581
ggccacauuucuguauauc

SEQ ID NO: 2352655 - RNA, 19 nt, Artificial Sequence
  Description of Artificial Sequence: Synthetic oligonucleotide
  Antisense strand to SEQ ID NO: 2352654
gauauacagaaauguggcc

SEQ ID NO: 2352656 - RNA, 19 nt, Artificial Sequence
  Description of Artificial Sequence: Synthetic oligonucleotide
  Sense strand starting at position 2756 of SEQ ID NO: 1885581
uugaucaucuuuccaagga

SEQ ID NO: 2352657 - RNA, 19 nt, Artificial Sequence
  Description of Artificial Sequence: Synthetic oligonucleotide
  Antisense strand to SEQ ID NO: 2352656
uccuuggaaagaugaucaa

SEQ ID NO: 2352658 - RNA, 19 nt, Artificial Sequence
  Description of Artificial Sequence: Synthetic oligonucleotide
  Sense strand starting at position 2760 of SEQ ID NO: 1885581
ucaucuuuccaaggaugcu

SEQ ID NO: 2352659 - RNA, 19 nt, Artificial Sequence
  Description of Artificial Sequence: Synthetic oligonucleotide
  Antisense strand to SEQ ID NO: 2352658
agcauccuuggaaagauga

SEQ ID NO: 2352660 - RNA, 19 nt, Artificial Sequence
  Description of Artificial Sequence: Synthetic oligonucleotide
  Sense strand starting at position 2807 of SEQ ID NO: 1885581
gaugcuguuucuccagaga

SEQ ID NO: 2352661 - RNA, 19 nt, Artificial Sequence
  Description of Artificial Sequence: Synthetic oligonucleotide
  Antisense strand to SEQ ID NO: 2352660
ucucuggagaaacagcauc

SEQ ID NO: 2352662 - RNA, 19 nt, Artificial Sequence
  Description of Artificial Sequence: Synthetic oligonucleotide
  Sense strand starting at position 2810 of SEQ ID NO: 1885581
gcuguuucuccagagaaag

SEQ ID NO: 2352663 - RNA, 19 nt, Artificial Sequence
  Description of Artificial Sequence: Synthetic oligonucleotide
  Antisense strand to SEQ ID NO: 2352662
cuuucucuggagaaacagc

SEQ ID NO: 2352664 - RNA, 19 nt, Artificial Sequence
  Description of Artificial Sequence: Synthetic oligonucleotide
  Sense strand starting at position 2976 of SEQ ID NO: 1885581
ccaugauuaugccuguaau

SEQ ID NO: 2352665 - RNA, 19 nt, Artificial Sequence
  Description of Artificial Sequence: Synthetic oligonucleotide
  Antisense strand to SEQ ID NO: 2352664
auuacaggcauaaucaugg

SEQ ID NO: 2352666 - RNA, 19 nt, Artificial Sequence
  Description of Artificial Sequence: Synthetic oligonucleotide
  Sense strand starting at position 3680 of SEQ ID NO: 1885581
auuuguaacuauugggaaa

SEQ ID NO: 2352667 - RNA, 19 nt, Artificial Sequence
  Description of Artificial Sequence: Synthetic oligonucleotide
  Antisense strand to SEQ ID NO: 2352666
uuucccaauaguuacaaau

SEQ ID NO: 2352668 - RNA, 19 nt, Artificial Sequence
  Description of Artificial Sequence: Synthetic oligonucleotide
  Sense strand starting at position 3681 of SEQ ID NO: 1885581
uuuguaacuauugggaaag

SEQ ID NO: 2352669 - RNA, 19 nt, Artificial Sequence
  Description of Artificial Sequence: Synthetic oligonucleotide
  Antisense strand to SEQ ID NO: 2352668
cuuucccaauaguuacaaa

SEQ ID NO: 2352670 - RNA, 19 nt, Artificial Sequence
  Description of Artificial Sequence: Synthetic oligonucleotide
  Sense strand starting at position 3692 of SEQ ID NO: 1885581
ugggaaagugucuagcuuu

SEQ ID NO: 2352671 - RNA, 19 nt, Artificial Sequence
  Description of Artificial Sequence: Synthetic oligonucleotide
  Antisense strand to SEQ ID NO: 2352670
aaagcuagacacuuuccca

SEQ ID NO: 2352672 - RNA, 19 nt, Artificial Sequence
  Description of Artificial Sequence: Synthetic oligonucleotide
  Sense strand starting at position 3843 of SEQ ID NO: 1885581
cgaauucagcaguauguga

SEQ ID NO: 2352673 - RNA, 19 nt, Artificial Sequence
  Description of Artificial Sequence: Synthetic oligonucleotide
  Antisense strand to SEQ ID NO: 2352672
ucacauacugcugaauucg

SEQ ID NO: 2352674 - RNA, 19 nt, Artificial Sequence
  Description of Artificial Sequence: Synthetic oligonucleotide
  Sense strand starting at position 3878 of SEQ ID NO: 1885581
guuauaugugcugaugaau

SEQ ID NO: 2352675 - RNA, 19 nt, Artificial Sequence
  Description of Artificial Sequence: Synthetic oligonucleotide
  Antisense strand to SEQ ID NO: 2352674
auucaucagcacauauaac

SEQ ID NO: 2352676 - RNA, 19 nt, Artificial Sequence
  Description of Artificial Sequence: Synthetic oligonucleotide
  Sense strand starting at position 3881 of SEQ ID NO: 1885581
auaugugcugaugaauuau

SEQ ID NO: 2352677 - RNA, 19 nt, Artificial Sequence
  Description of Artificial Sequence: Synthetic oligonucleotide
  Antisense strand to SEQ ID NO: 2352676
auaauucaucagcacauau

SEQ ID NO: 2352678 - RNA, 19 nt, Artificial Sequence
  Description of Artificial Sequence: Synthetic oligonucleotide
  Sense strand starting at position 3915 of SEQ ID NO: 1885581
ccauuugaauuggaguuua

SEQ ID NO: 2352679 - RNA, 19 nt, Artificial Sequence
  Description of Artificial Sequence: Synthetic oligonucleotide
  Antisense strand to SEQ ID NO: 2352678
uaaacuccaauucaaaugg

SEQ ID NO: 2352680 - RNA, 19 nt, Artificial Sequence
  Description of Artificial Sequence: Synthetic oligonucleotide
  Sense strand starting at position 3983 of SEQ ID NO: 1885581
aguauaaacugguuucuag

SEQ ID NO: 2352681 - RNA, 19 nt, Artificial Sequence
  Description of Artificial Sequence: Synthetic oligonucleotide
  Antisense strand to SEQ ID NO: 2352680
cuagaaaccaguuuauacu

SEQ ID NO: 2352682 - RNA, 19 nt, Artificial Sequence
  Description of Artificial Sequence: Synthetic oligonucleotide
  Sense strand starting at position 257 of SEQ ID NO: 1885578
acaucacaagcuuagugau

SEQ ID NO: 2352683 - RNA, 19 nt, Artificial Sequence
  Description of Artificial Sequence: Synthetic oligonucleotide
  Antisense strand to SEQ ID NO: 2352682
aucacuaagcuugugaugu

SEQ ID NO: 2352684 - RNA, 19 nt, Artificial Sequence
  Description of Artificial Sequence: Synthetic oligonucleotide
  Sense strand starting at position 263 of SEQ ID NO: 1885578
caagcuuagugaucuugga

SEQ ID NO: 2352685 - RNA, 19 nt, Artificial Sequence
  Description of Artificial Sequence: Synthetic oligonucleotide
  Antisense strand to SEQ ID NO: 2352684
uccaagaucacuaagcuug

SEQ ID NO: 2352686 - RNA, 19 nt, Artificial Sequence
  Description of Artificial Sequence: Synthetic oligonucleotide
  Sense strand starting at position 267 of SEQ ID NO: 1885578
cuuagugaucuuggaaagg

SEQ ID NO: 2352687 - RNA, 19 nt, Artificial Sequence
  Description of Artificial Sequence: Synthetic oligonucleotide
  Antisense strand to SEQ ID NO: 2352686
ccuuuccaagaucacuaag

SEQ ID NO: 2352688 - RNA, 19 nt, Artificial Sequence
  Description of Artificial Sequence: Synthetic oligonucleotide
  Sense strand starting at position 277 of SEQ ID NO: 1885578
uuggaaaggcuuugacaga

SEQ ID NO: 2352689 - RNA, 19 nt, Artificial Sequence
  Description of Artificial Sequence: Synthetic oligonucleotide
  Antisense strand to SEQ ID NO: 2352688
ucugucaaagccuuuccaa

SEQ ID NO: 2352690 - RNA, 19 nt, Artificial Sequence
  Description of Artificial Sequence: Synthetic oligonucleotide
  Sense strand starting at position 284 of SEQ ID NO: 1885578
ggcuuugacagaggaguga

SEQ ID NO: 2352691 - RNA, 19 nt, Artificial Sequence
  Description of Artificial Sequence: Synthetic oligonucleotide
  Antisense strand to SEQ ID NO: 2352690
ucacuccucugucaaagcc

SEQ ID NO: 2352692 - RNA, 19 nt, Artificial Sequence
  Description of Artificial Sequence: Synthetic oligonucleotide
  Sense strand starting at position 348 of SEQ ID NO: 1885578
cuguaagacaaaggugauu

SEQ ID NO: 2352693 - RNA, 19 nt, Artificial Sequence
  Description of Artificial Sequence: Synthetic oligonucleotide
  Antisense strand to SEQ ID NO: 2352692
aaucaccuuugucuuacag

SEQ ID NO: 2352694 - RNA, 19 nt, Artificial Sequence
  Description of Artificial Sequence: Synthetic oligonucleotide
  Sense strand starting at position 415 of SEQ ID NO: 1885578
gggauuauguaauuguauu

SEQ ID NO: 2352695 - RNA, 19 nt, Artificial Sequence
  Description of Artificial Sequence: Synthetic oligonucleotide
  Antisense strand to SEQ ID NO: 2352694
aauacaauuacauaauccc

SEQ ID NO: 2352696 - RNA, 19 nt, Artificial Sequence
  Description of Artificial Sequence: Synthetic oligonucleotide
  Sense strand starting at position 460 of SEQ ID NO: 1885578
agagcuuuauucucucaug

SEQ ID NO: 2352697 - RNA, 19 nt, Artificial Sequence
  Description of Artificial Sequence: Synthetic oligonucleotide
  Antisense strand to SEQ ID NO: 2352696
caugagagaauaaagcucu

SEQ ID NO: 2352698 - RNA, 19 nt, Artificial Sequence
  Description of Artificial Sequence: Synthetic oligonucleotide
  Sense strand starting at position 498 of SEQ ID NO: 1885578
ucacgugggcuucagauaa

SEQ ID NO: 2352699 - RNA, 19 nt, Artificial Sequence
  Description of Artificial Sequence: Synthetic oligonucleotide
  Antisense strand to SEQ ID NO: 2352698
uuaucugaagcccacguga

SEQ ID NO: 2352700 - RNA, 19 nt, Artificial Sequence
  Description of Artificial Sequence: Synthetic oligonucleotide
  Sense strand starting at position 740 of SEQ ID NO: 1885578
ggugacuaucccuaagcca

SEQ ID NO: 2352701 - RNA, 19 nt, Artificial Sequence
  Description of Artificial Sequence: Synthetic oligonucleotide
  Antisense strand to SEQ ID NO: 2352700
uggcuuagggauagucacc

SEQ ID NO: 2352702 - RNA, 19 nt, Artificial Sequence
  Description of Artificial Sequence: Synthetic oligonucleotide
  Sense strand starting at position 818 of SEQ ID NO: 1885578
agagaauugcaaugauguu

SEQ ID NO: 2352703 - RNA, 19 nt, Artificial Sequence
  Description of Artificial Sequence: Synthetic oligonucleotide
  Antisense strand to SEQ ID NO: 2352702
aacaucauugcaauucucu

SEQ ID NO: 2352704 - RNA, 19 nt, Artificial Sequence
  Description of Artificial Sequence: Synthetic oligonucleotide
  Sense strand starting at position 1129 of SEQ ID NO: 1885578
auuaauuccucgguagaca

SEQ ID NO: 2352705 - RNA, 19 nt, Artificial Sequence
  Description of Artificial Sequence: Synthetic oligonucleotide
  Antisense strand to SEQ ID NO: 2352704
ugucuaccgaggaauuaau

SEQ ID NO: 2352706 - RNA, 19 nt, Artificial Sequence
  Description of Artificial Sequence: Synthetic oligonucleotide
  Sense strand starting at position 1130 of SEQ ID NO: 1885578
uuaauuccucgguagacau

SEQ ID NO: 2352707 - RNA, 19 nt, Artificial Sequence
  Description of Artificial Sequence: Synthetic oligonucleotide
  Antisense strand to SEQ ID NO: 2352706
augucuaccgaggaauuaa

SEQ ID NO: 2352708 - RNA, 19 nt, Artificial Sequence
  Description of Artificial Sequence: Synthetic oligonucleotide
  Sense strand starting at position 1182 of SEQ ID NO: 1885578
caggucuugccugagagga

SEQ ID NO: 2352709 - RNA, 19 nt, Artificial Sequence
  Description of Artificial Sequence: Synthetic oligonucleotide
  Antisense strand to SEQ ID NO: 2352708
uccucucaggcaagaccug

SEQ ID NO: 2352710 - RNA, 19 nt, Artificial Sequence
  Description of Artificial Sequence: Synthetic oligonucleotide
  Sense strand starting at position 1248 of SEQ ID NO: 1885578
acuuguacucuuuaugaag

SEQ ID NO: 2352711 - RNA, 19 nt, Artificial Sequence
  Description of Artificial Sequence: Synthetic oligonucleotide
  Antisense strand to SEQ ID NO: 2352710
cuucauaaagaguacaagu

SEQ ID NO: 2352712 - RNA, 19 nt, Artificial Sequence
  Description of Artificial Sequence: Synthetic oligonucleotide
  Sense strand starting at position 1377 of SEQ ID NO: 1885578
gcaugagucccucagugag

SEQ ID NO: 2352713 - RNA, 19 nt, Artificial Sequence
  Description of Artificial Sequence: Synthetic oligonucleotide
  Antisense strand to SEQ ID NO: 2352712
cucacugagggacucaugc

SEQ ID NO: 2352714 - RNA, 19 nt, Artificial Sequence
  Description of Artificial Sequence: Synthetic oligonucleotide
  Sense strand starting at position 1622 of SEQ ID NO: 1885578
gagugaaaucucugaaacu

SEQ ID NO: 2352715 - RNA, 19 nt, Artificial Sequence
  Description of Artificial Sequence: Synthetic oligonucleotide
  Antisense strand to SEQ ID NO: 2352714
aguuucagagauuucacuc

SEQ ID NO: 2352716 - RNA, 19 nt, Artificial Sequence
  Description of Artificial Sequence: Synthetic oligonucleotide
  Sense strand starting at position 1731 of SEQ ID NO: 1885578
uucuuucuccugcaaggau

SEQ ID NO: 2352717 - RNA, 19 nt, Artificial Sequence
  Description of Artificial Sequence: Synthetic oligonucleotide
  Antisense strand to SEQ ID NO: 2352716
auccuugcaggagaaagaa

SEQ ID NO: 2352718 - RNA, 19 nt, Artificial Sequence
  Description of Artificial Sequence: Synthetic oligonucleotide
  Sense strand starting at position 1787 of SEQ ID NO: 1885578
cgugguauucgccucuauu

SEQ ID NO: 2352719 - RNA, 19 nt, Artificial Sequence
  Description of Artificial Sequence: Synthetic oligonucleotide
  Antisense strand to SEQ ID NO: 2352718
aauagaggcgaauaccacg

SEQ ID NO: 2352720 - RNA, 19 nt, Artificial Sequence
  Description of Artificial Sequence: Synthetic oligonucleotide
  Sense strand starting at position 1871 of SEQ ID NO: 1885578
gcucuaauuuggucaggcu

SEQ ID NO: 2352721 - RNA, 19 nt, Artificial Sequence
  Description of Artificial Sequence: Synthetic oligonucleotide
  Antisense strand to SEQ ID NO: 2352720
agccugaccaaauuagagc

SEQ ID NO: 2352722 - RNA, 19 nt, Artificial Sequence
  Description of Artificial Sequence: Synthetic oligonucleotide
  Sense strand starting at position 2075 of SEQ ID NO: 1885578
gagcuuugccucuagagau

SEQ ID NO: 2352723 - RNA, 19 nt, Artificial Sequence
  Description of Artificial Sequence: Synthetic oligonucleotide
  Antisense strand to SEQ ID NO: 2352722
aucucuagaggcaaagcuc

SEQ ID NO: 2352724 - RNA, 19 nt, Artificial Sequence
  Description of Artificial Sequence: Synthetic oligonucleotide
  Sense strand starting at position 2108 of SEQ ID NO: 1885578
aaucguggcucugucauuu

SEQ ID NO: 2352725 - RNA, 19 nt, Artificial Sequence
  Description of Artificial Sequence: Synthetic oligonucleotide
  Antisense strand to SEQ ID NO: 2352724
aaaugacagagccacgauu

SEQ ID NO: 2352726 - RNA, 19 nt, Artificial Sequence
  Description of Artificial Sequence: Synthetic oligonucleotide
  Sense strand starting at position 2112 of SEQ ID NO: 1885578
guggcucugucauuuagca

SEQ ID NO: 2352727 - RNA, 19 nt, Artificial Sequence
  Description of Artificial Sequence: Synthetic oligonucleotide
  Antisense strand to SEQ ID NO: 2352726
ugcuaaaugacagagccac

SEQ ID NO: 2352728 - RNA, 19 nt, Artificial Sequence
  Description of Artificial Sequence: Synthetic oligonucleotide
  Sense strand starting at position 2121 of SEQ ID NO: 1885578
ucauuuagcagcuguguga

SEQ ID NO: 2352729 - RNA, 19 nt, Artificial Sequence
  Description of Artificial Sequence: Synthetic oligonucleotide
  Antisense strand to SEQ ID NO: 2352728
ucacacagcugcuaaauga

SEQ ID NO: 2352730 - RNA, 19 nt, Artificial Sequence
  Description of Artificial Sequence: Synthetic oligonucleotide
  Sense strand starting at position 2492 of SEQ ID NO: 1885578
cugcaaugguaccuagaca

SEQ ID NO: 2352731 - RNA, 19 nt, Artificial Sequence
  Description of Artificial Sequence: Synthetic oligonucleotide
  Antisense strand to SEQ ID NO: 2352730
ugucuagguaccauugcag

SEQ ID NO: 2352732 - RNA, 19 nt, Artificial Sequence
  Description of Artificial Sequence: Synthetic oligonucleotide
  Sense strand starting at position 2519 of SEQ ID NO: 1885578
auuaauaugugugccaaga

SEQ ID NO: 2352733 - RNA, 19 nt, Artificial Sequence
  Description of Artificial Sequence: Synthetic oligonucleotide
  Antisense strand to SEQ ID NO: 2352732
ucuuggcacacauauuaau

SEQ ID NO: 2352734 - RNA, 19 nt, Artificial Sequence
  Description of Artificial Sequence: Synthetic oligonucleotide
  Sense strand starting at position 3119 of SEQ ID NO: 1885578
agaaucucuugcccagaga

SEQ ID NO: 2352735 - RNA, 19 nt, Artificial Sequence
  Description of Artificial Sequence: Synthetic oligonucleotide
  Antisense strand to SEQ ID NO: 2352734
ucucugggcaagagauucu

SEQ ID NO: 2352736 - RNA, 19 nt, Artificial Sequence
  Description of Artificial Sequence: Synthetic oligonucleotide
  Sense strand starting at position 3302 of SEQ ID NO: 1885578
cuggguuguagucaagaaa

SEQ ID NO: 2352737 - RNA, 19 nt, Artificial Sequence
  Description of Artificial Sequence: Synthetic oligonucleotide
  Antisense strand to SEQ ID NO: 2352736
uuucuugacuacaacccag

SEQ ID NO: 2352738 - RNA, 19 nt, Artificial Sequence
  Description of Artificial Sequence: Synthetic oligonucleotide
  Sense strand starting at position 3305 of SEQ ID NO: 1885578
gguuguagucaagaaacuu

SEQ ID NO: 2352739 - RNA, 19 nt, Artificial Sequence
  Description of Artificial Sequence: Synthetic oligonucleotide
  Antisense strand to SEQ ID NO: 2352738
aaguuucuugacuacaacc

SEQ ID NO: 2352740 - RNA, 19 nt, Artificial Sequence
  Description of Artificial Sequence: Synthetic oligonucleotide
  Sense strand starting at position 3313 of SEQ ID NO: 1885578
ucaagaaacuuguccugua

SEQ ID NO: 2352741 - RNA, 19 nt, Artificial Sequence
  Description of Artificial Sequence: Synthetic oligonucleotide
  Antisense strand to SEQ ID NO: 2352740
uacaggacaaguuucuuga

SEQ ID NO: 2352742 - RNA, 19 nt, Artificial Sequence
  Description of Artificial Sequence: Synthetic oligonucleotide
  Sense strand starting at position 3363 of SEQ ID NO: 1885578
uuggaaaugucacugaaca

SEQ ID NO: 2352743 - RNA, 19 nt, Artificial Sequence
  Description of Artificial Sequence: Synthetic oligonucleotide
  Antisense strand to SEQ ID NO: 2352742
uguucagugacauuuccaa

SEQ ID NO: 2352744 - RNA, 19 nt, Artificial Sequence
  Description of Artificial Sequence: Synthetic oligonucleotide
  Sense strand starting at position 3364 of SEQ ID NO: 1885578
uggaaaugucacugaacau

SEQ ID NO: 2352745 - RNA, 19 nt, Artificial Sequence
  Description of Artificial Sequence: Synthetic oligonucleotide
  Antisense strand to SEQ ID NO: 2352744
auguucagugacauuucca

SEQ ID NO: 2352746 - RNA, 19 nt, Artificial Sequence
  Description of Artificial Sequence: Synthetic oligonucleotide
  Sense strand starting at position 3381 of SEQ ID NO: 1885578
auaguacuguacuugagaa

SEQ ID NO: 2352747 - RNA, 19 nt, Artificial Sequence
  Description of Artificial Sequence: Synthetic oligonucleotide
  Antisense strand to SEQ ID NO: 2352746
uucucaaguacaguacuau

SEQ ID NO: 2352748 - RNA, 19 nt, Artificial Sequence
  Description of Artificial Sequence: Synthetic oligonucleotide
  Sense strand starting at position 3509 of SEQ ID NO: 1885578
guagcuggagccuaggaau

SEQ ID NO: 2352749 - RNA, 19 nt, Artificial Sequence
  Description of Artificial Sequence: Synthetic oligonucleotide
  Antisense strand to SEQ ID NO: 2352748
auuccuaggcuccagcuac

SEQ ID NO: 2352750 - RNA, 19 nt, Artificial Sequence
  Description of Artificial Sequence: Synthetic oligonucleotide
  Sense strand starting at position 3701 of SEQ ID NO: 1885578
uggaaucuguacuuuggaa

SEQ ID NO: 2352751 - RNA, 19 nt, Artificial Sequence
  Description of Artificial Sequence: Synthetic oligonucleotide
  Antisense strand to SEQ ID NO: 2352750
uuccaaaguacagauucca

SEQ ID NO: 2352752 - RNA, 19 nt, Artificial Sequence
  Description of Artificial Sequence: Synthetic oligonucleotide
  Sense strand starting at position 3703 of SEQ ID NO: 1885578
gaaucuguacuuuggaaau

SEQ ID NO: 2352753 - RNA, 19 nt, Artificial Sequence
  Description of Artificial Sequence: Synthetic oligonucleotide
  Antisense strand to SEQ ID NO: 2352752
auuuccaaaguacagauuc

SEQ ID NO: 2352754 - RNA, 19 nt, Artificial Sequence
  Description of Artificial Sequence: Synthetic oligonucleotide
  Sense strand starting at position 3727 of SEQ ID NO: 1885578
caugauuaucaagagcagu

SEQ ID NO: 2352755 - RNA, 19 nt, Artificial Sequence
  Description of Artificial Sequence: Synthetic oligonucleotide
  Antisense strand to SEQ ID NO: 2352754
acugcucuugauaaucaug

SEQ ID NO: 2352756 - RNA, 19 nt, Artificial Sequence
  Description of Artificial Sequence: Synthetic oligonucleotide
  Sense strand starting at position 3786 of SEQ ID NO: 1885578
cuugcuaggcucuaacauu

SEQ ID NO: 2352757 - RNA, 19 nt, Artificial Sequence
  Description of Artificial Sequence: Synthetic oligonucleotide
  Antisense strand to SEQ ID NO: 2352756
aauguuagagccuagcaag

SEQ ID NO: 2352758 - RNA, 19 nt, Artificial Sequence
  Description of Artificial Sequence: Synthetic oligonucleotide
  Sense strand starting at position 3873 of SEQ ID NO: 1885578
gucagcucccaugagcaaa

SEQ ID NO: 2352759 - RNA, 19 nt, Artificial Sequence
  Description of Artificial Sequence: Synthetic oligonucleotide
  Antisense strand to SEQ ID NO: 2352758
uuugcucaugggagcugac

SEQ ID NO: 2352760 - RNA, 19 nt, Artificial Sequence
  Description of Artificial Sequence: Synthetic oligonucleotide
  Sense strand starting at position 3948 of SEQ ID NO: 1885578
ucuguuucuugguuaauuu

SEQ ID NO: 2352761 - RNA, 19 nt, Artificial Sequence
  Description of Artificial Sequence: Synthetic oligonucleotide
  Antisense strand to SEQ ID NO: 2352760
aaauuaaccaagaaacaga

SEQ ID NO: 2352762 - RNA, 19 nt, Artificial Sequence
  Description of Artificial Sequence: Synthetic oligonucleotide
  Sense strand starting at position 162 of SEQ ID NO: 1885582
cagucacauugcucaggaa

SEQ ID NO: 2352763 - RNA, 19 nt, Artificial Sequence
  Description of Artificial Sequence: Synthetic oligonucleotide
  Antisense strand to SEQ ID NO: 2352762
uuccugagcaaugugacug

SEQ ID NO: 2352764 - RNA, 19 nt, Artificial Sequence
  Description of Artificial Sequence: Synthetic oligonucleotide
  Sense strand starting at position 163 of SEQ ID NO: 1885582
agucacauugcucaggaaa

SEQ ID NO: 2352765 - RNA, 19 nt, Artificial Sequence
  Description of Artificial Sequence: Synthetic oligonucleotide
  Antisense strand to SEQ ID NO: 2352764
uuuccugagcaaugugacu

SEQ ID NO: 2352766 - RNA, 19 nt, Artificial Sequence
  Description of Artificial Sequence: Synthetic oligonucleotide
  Sense strand starting at position 175 of SEQ ID NO: 1885582
caggaaagaguuugcaauu

SEQ ID NO: 2352767 - RNA, 19 nt, Artificial Sequence
  Description of Artificial Sequence: Synthetic oligonucleotide
  Antisense strand to SEQ ID NO: 2352766
aauugcaaacucuuuccug

SEQ ID NO: 2352768 - RNA, 19 nt, Artificial Sequence
  Description of Artificial Sequence: Synthetic oligonucleotide
  Sense strand starting at position 206 of SEQ ID NO: 1885582
aggcuuugcuuucuggaaa

SEQ ID NO: 2352769 - RNA, 19 nt, Artificial Sequence
  Description of Artificial Sequence: Synthetic oligonucleotide
  Antisense strand to SEQ ID NO: 2352768
uuuccagaaagcaaagccu

SEQ ID NO: 2352770 - RNA, 19 nt, Artificial Sequence
  Description of Artificial Sequence: Synthetic oligonucleotide
  Sense strand starting at position 252 of SEQ ID NO: 1885582
ugguguauuugaucuuccu

SEQ ID NO: 2352771 - RNA, 19 nt, Artificial Sequence
  Description of Artificial Sequence: Synthetic oligonucleotide
  Antisense strand to SEQ ID NO: 2352770
aggaagaucaaauacacca

SEQ ID NO: 2352772 - RNA, 19 nt, Artificial Sequence
  Description of Artificial Sequence: Synthetic oligonucleotide
  Sense strand starting at position 332 of SEQ ID NO: 1885582
guuacaugccaucaaugca

SEQ ID NO: 2352773 - RNA, 19 nt, Artificial Sequence
  Description of Artificial Sequence: Synthetic oligonucleotide
  Antisense strand to SEQ ID NO: 2352772
ugcauugauggcauguaac

SEQ ID NO: 2352774 - RNA, 19 nt, Artificial Sequence
  Description of Artificial Sequence: Synthetic oligonucleotide
  Sense strand starting at position 386 of SEQ ID NO: 1885582
gugcgagcuguccuuccua

SEQ ID NO: 2352775 - RNA, 19 nt, Artificial Sequence
  Description of Artificial Sequence: Synthetic oligonucleotide
  Antisense strand to SEQ ID NO: 2352774
uaggaaggacagcucgcac

SEQ ID NO: 2352776 - RNA, 19 nt, Artificial Sequence
  Description of Artificial Sequence: Synthetic oligonucleotide
  Sense strand starting at position 398 of SEQ ID NO: 1885582
cuuccuagccuugaguuau

SEQ ID NO: 2352777 - RNA, 19 nt, Artificial Sequence
  Description of Artificial Sequence: Synthetic oligonucleotide
  Antisense strand to SEQ ID NO: 2352776
auaacucaaggcuaggaag

SEQ ID NO: 2352778 - RNA, 19 nt, Artificial Sequence
  Description of Artificial Sequence: Synthetic oligonucleotide
  Sense strand starting at position 404 of SEQ ID NO: 1885582
agccuugaguuaucuacaa

SEQ ID NO: 2352779 - RNA, 19 nt, Artificial Sequence
  Description of Artificial Sequence: Synthetic oligonucleotide
  Antisense strand to SEQ ID NO: 2352778
uuguagauaacucaaggcu

SEQ ID NO: 2352780 - RNA, 19 nt, Artificial Sequence
  Description of Artificial Sequence: Synthetic oligonucleotide
  Sense strand starting at position 625 of SEQ ID NO: 1885582
auggacaucuccuuguuau

SEQ ID NO: 2352781 - RNA, 19 nt, Artificial Sequence
  Description of Artificial Sequence: Synthetic oligonucleotide
  Antisense strand to SEQ ID NO: 2352780
auaacaaggagauguccau

SEQ ID NO: 2352782 - RNA, 19 nt, Artificial Sequence
  Description of Artificial Sequence: Synthetic oligonucleotide
  Sense strand starting at position 626 of SEQ ID NO: 1885582
uggacaucuccuuguuaua

SEQ ID NO: 2352783 - RNA, 19 nt, Artificial Sequence
  Description of Artificial Sequence: Synthetic oligonucleotide
  Antisense strand to SEQ ID NO: 2352782
uauaacaaggagaugucca

SEQ ID NO: 2352784 - RNA, 19 nt, Artificial Sequence
  Description of Artificial Sequence: Synthetic oligonucleotide
  Sense strand starting at position 725 of SEQ ID NO: 1885582
ccaugaguacuaugccuca

SEQ ID NO: 2352785 - RNA, 19 nt, Artificial Sequence
  Description of Artificial Sequence: Synthetic oligonucleotide
  Antisense strand to SEQ ID NO: 2352784
ugaggcauaguacucaugg

SEQ ID NO: 2352786 - RNA, 19 nt, Artificial Sequence
  Description of Artificial Sequence: Synthetic oligonucleotide
  Sense strand starting at position 728 of SEQ ID NO: 1885582
ugaguacuaugccucauuu

SEQ ID NO: 2352787 - RNA, 19 nt, Artificial Sequence
  Description of Artificial Sequence: Synthetic oligonucleotide
  Antisense strand to SEQ ID NO: 2352786
aaaugaggcauaguacuca

SEQ ID NO: 2352788 - RNA, 19 nt, Artificial Sequence
  Description of Artificial Sequence: Synthetic oligonucleotide
  Sense strand starting at position 1081 of SEQ ID NO: 1885582
uccuaauuagggugaaauc

SEQ ID NO: 2352789 - RNA, 19 nt, Artificial Sequence
  Description of Artificial Sequence: Synthetic oligonucleotide
  Antisense strand to SEQ ID NO: 2352788
gauuucacccuaauuagga

SEQ ID NO: 2352790 - RNA, 19 nt, Artificial Sequence
  Description of Artificial Sequence: Synthetic oligonucleotide
  Sense strand starting at position 1270 of SEQ ID NO: 1885582
ucucuugugcaucaucauu

SEQ ID NO: 2352791 - RNA, 19 nt, Artificial Sequence
  Description of Artificial Sequence: Synthetic oligonucleotide
  Antisense strand to SEQ ID NO: 2352790
aaugaugaugcacaagaga

SEQ ID NO: 2352792 - RNA, 19 nt, Artificial Sequence
  Description of Artificial Sequence: Synthetic oligonucleotide
  Sense strand starting at position 1462 of SEQ ID NO: 1885582
gagggaauggcuugugucu

SEQ ID NO: 2352793 - RNA, 19 nt, Artificial Sequence
  Description of Artificial Sequence: Synthetic oligonucleotide
  Antisense strand to SEQ ID NO: 2352792
agacacaagccauucccuc

SEQ ID NO: 2352794 - RNA, 19 nt, Artificial Sequence
  Description of Artificial Sequence: Synthetic oligonucleotide
  Sense strand starting at position 1516 of SEQ ID NO: 1885582
gugccuggugcauaacaau

SEQ ID NO: 2352795 - RNA, 19 nt, Artificial Sequence
  Description of Artificial Sequence: Synthetic oligonucleotide
  Antisense strand to SEQ ID NO: 2352794
auuguuaugcaccaggcac

SEQ ID NO: 2352796 - RNA, 19 nt, Artificial Sequence
  Description of Artificial Sequence: Synthetic oligonucleotide
  Sense strand starting at position 1618 of SEQ ID NO: 1885582
gucuuauaucuugagcaau

SEQ ID NO: 2352797 - RNA, 19 nt, Artificial Sequence
  Description of Artificial Sequence: Synthetic oligonucleotide
  Antisense strand to SEQ ID NO: 2352796
auugcucaagauauaagac

SEQ ID NO: 2352798 - RNA, 19 nt, Artificial Sequence
  Description of Artificial Sequence: Synthetic oligonucleotide
  Sense strand starting at position 1620 of SEQ ID NO: 1885582
cuuauaucuugagcaaugu

SEQ ID NO: 2352799 - RNA, 19 nt, Artificial Sequence
  Description of Artificial Sequence: Synthetic oligonucleotide
  Antisense strand to SEQ ID NO: 2352798
acauugcucaagauauaag

SEQ ID NO: 2352800 - RNA, 19 nt, Artificial Sequence
  Description of Artificial Sequence: Synthetic oligonucleotide
  Sense strand starting at position 1628 of SEQ ID NO: 1885582
uugagcaaugucuaaauaa

SEQ ID NO: 2352801 - RNA, 19 nt, Artificial Sequence
  Description of Artificial Sequence: Synthetic oligonucleotide
  Antisense strand to SEQ ID NO: 2352800
uuauuuagacauugcucaa

SEQ ID NO: 2352802 - RNA, 19 nt, Artificial Sequence
  Description of Artificial Sequence: Synthetic oligonucleotide
  Sense strand starting at position 1851 of SEQ ID NO: 1885582
agauauguagcagguacuu

SEQ ID NO: 2352803 - RNA, 19 nt, Artificial Sequence
  Description of Artificial Sequence: Synthetic oligonucleotide
  Antisense strand to SEQ ID NO: 2352802
aaguaccugcuacauaucu

SEQ ID NO: 2352804 - RNA, 19 nt, Artificial Sequence
  Description of Artificial Sequence: Synthetic oligonucleotide
  Sense strand starting at position 1950 of SEQ ID NO: 1885582
gccauagauuccucagcau

SEQ ID NO: 2352805 - RNA, 19 nt, Artificial Sequence
  Description of Artificial Sequence: Synthetic oligonucleotide
  Antisense strand to SEQ ID NO: 2352804
augcugaggaaucuauggc

SEQ ID NO: 2352806 - RNA, 19 nt, Artificial Sequence
  Description of Artificial Sequence: Synthetic oligonucleotide
  Sense strand starting at position 2050 of SEQ ID NO: 1885582
gggcuuagggcauaaucuu

SEQ ID NO: 2352807 - RNA, 19 nt, Artificial Sequence
  Description of Artificial Sequence: Synthetic oligonucleotide
  Antisense strand to SEQ ID NO: 2352806
aagauuaugcccuaagccc

SEQ ID NO: 2352808 - RNA, 19 nt, Artificial Sequence
  Description of Artificial Sequence: Synthetic oligonucleotide
  Sense strand starting at position 2056 of SEQ ID NO: 1885582
agggcauaaucuuccacaa

SEQ ID NO: 2352809 - RNA, 19 nt, Artificial Sequence
  Description of Artificial Sequence: Synthetic oligonucleotide
  Antisense strand to SEQ ID NO: 2352808
uuguggaagauuaugcccu

SEQ ID NO: 2352810 - RNA, 19 nt, Artificial Sequence
  Description of Artificial Sequence: Synthetic oligonucleotide
  Sense strand starting at position 2364 of SEQ ID NO: 1885582
guuguuguugaauaugaca

SEQ ID NO: 2352811 - RNA, 19 nt, Artificial Sequence
  Description of Artificial Sequence: Synthetic oligonucleotide
  Antisense strand to SEQ ID NO: 2352810
ugucauauucaacaacaac

SEQ ID NO: 2352812 - RNA, 19 nt, Artificial Sequence
  Description of Artificial Sequence: Synthetic oligonucleotide
  Sense strand starting at position 2502 of SEQ ID NO: 1885582
cccggacugacagaucuuu

SEQ ID NO: 2352813 - RNA, 19 nt, Artificial Sequence
  Description of Artificial Sequence: Synthetic oligonucleotide
  Antisense strand to SEQ ID NO: 2352812
aaagaucugucaguccggg

SEQ ID NO: 2352814 - RNA, 19 nt, Artificial Sequence
  Description of Artificial Sequence: Synthetic oligonucleotide
  Sense strand starting at position 2717 of SEQ ID NO: 1885582
gagagaaaguccuuuguuc

SEQ ID NO: 2352815 - RNA, 19 nt, Artificial Sequence
  Description of Artificial Sequence: Synthetic oligonucleotide
  Antisense strand to SEQ ID NO: 2352814
gaacaaaggacuuucucuc

SEQ ID NO: 2352816 - RNA, 19 nt, Artificial Sequence
  Description of Artificial Sequence: Synthetic oligonucleotide
  Sense strand starting at position 2719 of SEQ ID NO: 1885582
gagaaaguccuuuguucca

SEQ ID NO: 2352817 - RNA, 19 nt, Artificial Sequence
  Description of Artificial Sequence: Synthetic oligonucleotide
  Antisense strand to SEQ ID NO: 2352816
uggaacaaaggacuuucuc

SEQ ID NO: 2352818 - RNA, 19 nt, Artificial Sequence
  Description of Artificial Sequence: Synthetic oligonucleotide
  Sense strand starting at position 2745 of SEQ ID NO: 1885582
cuccaagggcucugugauu

SEQ ID NO: 2352819 - RNA, 19 nt, Artificial Sequence
  Description of Artificial Sequence: Synthetic oligonucleotide
  Antisense strand to SEQ ID NO: 2352818
aaucacagagcccuuggag

SEQ ID NO: 2352820 - RNA, 19 nt, Artificial Sequence
  Description of Artificial Sequence: Synthetic oligonucleotide
  Sense strand starting at position 2832 of SEQ ID NO: 1885582
gucacuuaagcucaggaga

SEQ ID NO: 2352821 - RNA, 19 nt, Artificial Sequence
  Description of Artificial Sequence: Synthetic oligonucleotide
  Antisense strand to SEQ ID NO: 2352820
ucuccugagcuuaagugac

SEQ ID NO: 2352822 - RNA, 19 nt, Artificial Sequence
  Description of Artificial Sequence: Synthetic oligonucleotide
  Sense strand starting at position 3026 of SEQ ID NO: 1885582
gugagacccuaucccgaaa

SEQ ID NO: 2352823 - RNA, 19 nt, Artificial Sequence
  Description of Artificial Sequence: Synthetic oligonucleotide
  Antisense strand to SEQ ID NO: 2352822
uuucgggauagggucucac

SEQ ID NO: 2352824 - RNA, 19 nt, Artificial Sequence
  Description of Artificial Sequence: Synthetic oligonucleotide
  Sense strand starting at position 3146 of SEQ ID NO: 1885582
cagcaaguccucugggaua

SEQ ID NO: 2352825 - RNA, 19 nt, Artificial Sequence
  Description of Artificial Sequence: Synthetic oligonucleotide
  Antisense strand to SEQ ID NO: 2352824
uaucccagaggacuugcug

SEQ ID NO: 2352826 - RNA, 19 nt, Artificial Sequence
  Description of Artificial Sequence: Synthetic oligonucleotide
  Sense strand starting at position 3148 of SEQ ID NO: 1885582
gcaaguccucugggauacu

SEQ ID NO: 2352827 - RNA, 19 nt, Artificial Sequence
  Description of Artificial Sequence: Synthetic oligonucleotide
  Antisense strand to SEQ ID NO: 2352826
aguaucccagaggacuugc

SEQ ID NO: 2352828 - RNA, 19 nt, Artificial Sequence
  Description of Artificial Sequence: Synthetic oligonucleotide
  Sense strand starting at position 3151 of SEQ ID NO: 1885582
aguccucugggauacugua

SEQ ID NO: 2352829 - RNA, 19 nt, Artificial Sequence
  Description of Artificial Sequence: Synthetic oligonucleotide
  Antisense strand to SEQ ID NO: 2352828
uacaguaucccagaggacu

SEQ ID NO: 2352830 - RNA, 19 nt, Artificial Sequence
  Description of Artificial Sequence: Synthetic oligonucleotide
  Sense strand starting at position 3159 of SEQ ID NO: 1885582
gggauacuguaauucucca

SEQ ID NO: 2352831 - RNA, 19 nt, Artificial Sequence
  Description of Artificial Sequence: Synthetic oligonucleotide
  Antisense strand to SEQ ID NO: 2352830
uggagaauuacaguauccc

SEQ ID NO: 2352832 - RNA, 19 nt, Artificial Sequence
  Description of Artificial Sequence: Synthetic oligonucleotide
  Sense strand starting at position 3304 of SEQ ID NO: 1885582
uugggugaccgaugagaga

SEQ ID NO: 2352833 - RNA, 19 nt, Artificial Sequence
  Description of Artificial Sequence: Synthetic oligonucleotide
  Antisense strand to SEQ ID NO: 2352832
ucucucaucggucacccaa

SEQ ID NO: 2352834 - RNA, 19 nt, Artificial Sequence
  Description of Artificial Sequence: Synthetic oligonucleotide
  Sense strand starting at position 3328 of SEQ ID NO: 1885582
acuagaguccuggaguuug

SEQ ID NO: 2352835 - RNA, 19 nt, Artificial Sequence
  Description of Artificial Sequence: Synthetic oligonucleotide
  Antisense strand to SEQ ID NO: 2352834
caaacuccaggacucuagu

SEQ ID NO: 2352836 - RNA, 19 nt, Artificial Sequence
  Description of Artificial Sequence: Synthetic oligonucleotide
  Sense strand starting at position 3491 of SEQ ID NO: 1885582
gagccaugauuguuccaca

SEQ ID NO: 2352837 - RNA, 19 nt, Artificial Sequence
  Description of Artificial Sequence: Synthetic oligonucleotide
  Antisense strand to SEQ ID NO: 2352836
uguggaacaaucauggcuc

SEQ ID NO: 2352838 - RNA, 19 nt, Artificial Sequence
  Description of Artificial Sequence: Synthetic oligonucleotide
  Sense strand starting at position 3496 of SEQ ID NO: 1885582
augauuguuccacagcacu

SEQ ID NO: 2352839 - RNA, 19 nt, Artificial Sequence
  Description of Artificial Sequence: Synthetic oligonucleotide
  Antisense strand to SEQ ID NO: 2352838
agugcuguggaacaaucau

SEQ ID NO: 2352840 - RNA, 19 nt, Artificial Sequence
  Description of Artificial Sequence: Synthetic oligonucleotide
  Sense strand starting at position 3565 of SEQ ID NO: 1885582
aaagguuguuaacuagaua

SEQ ID NO: 2352841 - RNA, 19 nt, Artificial Sequence
  Description of Artificial Sequence: Synthetic oligonucleotide
  Antisense strand to SEQ ID NO: 2352840
uaucuaguuaacaaccuuu

SEQ ID NO: 2352842 - RNA, 19 nt, Artificial Sequence
  Description of Artificial Sequence: Synthetic oligonucleotide
  Sense strand starting at position 81 of SEQ ID NO: 1885583
gcagaaagugcuggauaua

SEQ ID NO: 2352843 - RNA, 19 nt, Artificial Sequence
  Description of Artificial Sequence: Synthetic oligonucleotide
  Antisense strand to SEQ ID NO: 2352842
uauauccagcacuuucugc

SEQ ID NO: 2352844 - RNA, 19 nt, Artificial Sequence
  Description of Artificial Sequence: Synthetic oligonucleotide
  Sense strand starting at position 90 of SEQ ID NO: 1885583
gcuggauauagaggugaga

SEQ ID NO: 2352845 - RNA, 19 nt, Artificial Sequence
  Description of Artificial Sequence: Synthetic oligonucleotide
  Antisense strand to SEQ ID NO: 2352844
ucucaccucuauauccagc

SEQ ID NO: 2352846 - RNA, 19 nt, Artificial Sequence
  Description of Artificial Sequence: Synthetic oligonucleotide
  Sense strand starting at position 103 of SEQ ID NO: 1885583
gugagaggcuauccuuuaa

SEQ ID NO: 2352847 - RNA, 19 nt, Artificial Sequence
  Description of Artificial Sequence: Synthetic oligonucleotide
  Antisense strand to SEQ ID NO: 2352846
uuaaaggauagccucucac

SEQ ID NO: 2352848 - RNA, 19 nt, Artificial Sequence
  Description of Artificial Sequence: Synthetic oligonucleotide
  Sense strand starting at position 116 of SEQ ID NO: 1885583
cuuuaaagggcucagagua

SEQ ID NO: 2352849 - RNA, 19 nt, Artificial Sequence
  Description of Artificial Sequence: Synthetic oligonucleotide
  Antisense strand to SEQ ID NO: 2352848
uacucugagcccuuuaaag

SEQ ID NO: 2352850 - RNA, 19 nt, Artificial Sequence
  Description of Artificial Sequence: Synthetic oligonucleotide
  Sense strand starting at position 524 of SEQ ID NO: 1885583
gacucuuuggcuugaggau

SEQ ID NO: 2352851 - RNA, 19 nt, Artificial Sequence
  Description of Artificial Sequence: Synthetic oligonucleotide
  Antisense strand to SEQ ID NO: 2352850
auccucaagccaaagaguc

SEQ ID NO: 2352852 - RNA, 19 nt, Artificial Sequence
  Description of Artificial Sequence: Synthetic oligonucleotide
  Sense strand starting at position 525 of SEQ ID NO: 1885583
acucuuuggcuugaggaua

SEQ ID NO: 2352853 - RNA, 19 nt, Artificial Sequence
  Description of Artificial Sequence: Synthetic oligonucleotide
  Antisense strand to SEQ ID NO: 2352852
uauccucaagccaaagagu

SEQ ID NO: 2352854 - RNA, 19 nt, Artificial Sequence
  Description of Artificial Sequence: Synthetic oligonucleotide
  Sense strand starting at position 625 of SEQ ID NO: 1885583
aagagucauguaugcaaac

SEQ ID NO: 2352855 - RNA, 19 nt, Artificial Sequence
  Description of Artificial Sequence: Synthetic oligonucleotide
  Antisense strand to SEQ ID NO: 2352854
guuugcauacaugacucuu

SEQ ID NO: 2352856 - RNA, 19 nt, Artificial Sequence
  Description of Artificial Sequence: Synthetic oligonucleotide
  Sense strand starting at position 642 of SEQ ID NO: 1885583
acccuugaucuuggcugaa

SEQ ID NO: 2352857 - RNA, 19 nt, Artificial Sequence
  Description of Artificial Sequence: Synthetic oligonucleotide
  Antisense strand to SEQ ID NO: 2352856
uucagccaagaucaagggu

SEQ ID NO: 2352858 - RNA, 19 nt, Artificial Sequence
  Description of Artificial Sequence: Synthetic oligonucleotide
  Sense strand starting at position 644 of SEQ ID NO: 1885583
ccuugaucuuggcugaaca

SEQ ID NO: 2352859 - RNA, 19 nt, Artificial Sequence
  Description of Artificial Sequence: Synthetic oligonucleotide
  Antisense strand to SEQ ID NO: 2352858
uguucagccaagaucaagg

SEQ ID NO: 2352860 - RNA, 19 nt, Artificial Sequence
  Description of Artificial Sequence: Synthetic oligonucleotide
  Sense strand starting at position 778 of SEQ ID NO: 1885583
agguucuuauugucuauuu

SEQ ID NO: 2352861 - RNA, 19 nt, Artificial Sequence
  Description of Artificial Sequence: Synthetic oligonucleotide
  Antisense strand to SEQ ID NO: 2352860
aaauagacaauaagaaccu

SEQ ID NO: 2352862 - RNA, 19 nt, Artificial Sequence
  Description of Artificial Sequence: Synthetic oligonucleotide
  Sense strand starting at position 789 of SEQ ID NO: 1885583
gucuauuucuauucuguuu

SEQ ID NO: 2352863 - RNA, 19 nt, Artificial Sequence
  Description of Artificial Sequence: Synthetic oligonucleotide
  Antisense strand to SEQ ID NO: 2352862
aaacagaauagaaauagac

SEQ ID NO: 2352864 - RNA, 19 nt, Artificial Sequence
  Description of Artificial Sequence: Synthetic oligonucleotide
  Sense strand starting at position 926 of SEQ ID NO: 1885583
gagguaggauuguuauuag

SEQ ID NO: 2352865 - RNA, 19 nt, Artificial Sequence
  Description of Artificial Sequence: Synthetic oligonucleotide
  Antisense strand to SEQ ID NO: 2352864
cuaauaacaauccuaccuc

SEQ ID NO: 2352866 - RNA, 19 nt, Artificial Sequence
  Description of Artificial Sequence: Synthetic oligonucleotide
  Sense strand starting at position 1021 of SEQ ID NO: 1885583
ccuagugcugacuaagaaa

SEQ ID NO: 2352867 - RNA, 19 nt, Artificial Sequence
  Description of Artificial Sequence: Synthetic oligonucleotide
  Antisense strand to SEQ ID NO: 2352866
uuucuuagucagcacuagg

SEQ ID NO: 2352868 - RNA, 19 nt, Artificial Sequence
  Description of Artificial Sequence: Synthetic oligonucleotide
  Sense strand starting at position 1069 of SEQ ID NO: 1885583
ccauuuaaaucugcaacgu

SEQ ID NO: 2352869 - RNA, 19 nt, Artificial Sequence
  Description of Artificial Sequence: Synthetic oligonucleotide
  Antisense strand to SEQ ID NO: 2352868
acguugcagauuuaaaugg

SEQ ID NO: 2352870 - RNA, 19 nt, Artificial Sequence
  Description of Artificial Sequence: Synthetic oligonucleotide
  Sense strand starting at position 1121 of SEQ ID NO: 1885583
ccauuuauuuaaugugaga

SEQ ID NO: 2352871 - RNA, 19 nt, Artificial Sequence
  Description of Artificial Sequence: Synthetic oligonucleotide
  Antisense strand to SEQ ID NO: 2352870
ucucacauuaaauaaaugg

SEQ ID NO: 2352872 - RNA, 19 nt, Artificial Sequence
  Description of Artificial Sequence: Synthetic oligonucleotide
  Sense strand starting at position 1135 of SEQ ID NO: 1885583
ugagacugcuuauuuguuu

SEQ ID NO: 2352873 - RNA, 19 nt, Artificial Sequence
  Description of Artificial Sequence: Synthetic oligonucleotide
  Antisense strand to SEQ ID NO: 2352872
aaacaaauaagcagucuca

SEQ ID NO: 2352874 - RNA, 19 nt, Artificial Sequence
  Description of Artificial Sequence: Synthetic oligonucleotide
  Sense strand starting at position 1432 of SEQ ID NO: 1885583
cugcuugucaaaggagaca

SEQ ID NO: 2352875 - RNA, 19 nt, Artificial Sequence
  Description of Artificial Sequence: Synthetic oligonucleotide
  Antisense strand to SEQ ID NO: 2352874
ugucuccuuugacaagcag

SEQ ID NO: 2352876 - RNA, 19 nt, Artificial Sequence
  Description of Artificial Sequence: Synthetic oligonucleotide
  Sense strand starting at position 1451 of SEQ ID NO: 1885583
gaaguuugagaaugcauua

SEQ ID NO: 2352877 - RNA, 19 nt, Artificial Sequence
  Description of Artificial Sequence: Synthetic oligonucleotide
  Antisense strand to SEQ ID NO: 2352876
uaaugcauucucaaacuuc

SEQ ID NO: 2352878 - RNA, 19 nt, Artificial Sequence
  Description of Artificial Sequence: Synthetic oligonucleotide
  Sense strand starting at position 1540 of SEQ ID NO: 1885583
cauaguucuagagggugga

SEQ ID NO: 2352879 - RNA, 19 nt, Artificial Sequence
  Description of Artificial Sequence: Synthetic oligonucleotide
  Antisense strand to SEQ ID NO: 2352878
uccacccucuagaacuaug

SEQ ID NO: 2352880 - RNA, 19 nt, Artificial Sequence
  Description of Artificial Sequence: Synthetic oligonucleotide
  Sense strand starting at position 1541 of SEQ ID NO: 1885583
auaguucuagaggguggaa

SEQ ID NO: 2352881 - RNA, 19 nt, Artificial Sequence
  Description of Artificial Sequence: Synthetic oligonucleotide
  Antisense strand to SEQ ID NO: 2352880
uuccacccucuagaacuau

SEQ ID NO: 2352882 - RNA, 19 nt, Artificial Sequence
  Description of Artificial Sequence: Synthetic oligonucleotide
  Sense strand starting at position 1638 of SEQ ID NO: 1885583
uguugcuugcaacaggaua

SEQ ID NO: 2352883 - RNA, 19 nt, Artificial Sequence
  Description of Artificial Sequence: Synthetic oligonucleotide
  Antisense strand to SEQ ID NO: 2352882
uauccuguugcaagcaaca

SEQ ID NO: 2352884 - RNA, 19 nt, Artificial Sequence
  Description of Artificial Sequence: Synthetic oligonucleotide
  Sense strand starting at position 1893 of SEQ ID NO: 1885583
uugauccaucaauggauua

SEQ ID NO: 2352885 - RNA, 19 nt, Artificial Sequence
  Description of Artificial Sequence: Synthetic oligonucleotide
  Antisense strand to SEQ ID NO: 2352884
uaauccauugauggaucaa

SEQ ID NO: 2352886 - RNA, 19 nt, Artificial Sequence
  Description of Artificial Sequence: Synthetic oligonucleotide
  Sense strand starting at position 2025 of SEQ ID NO: 1885583
gcgucaucaaccguuggua

SEQ ID NO: 2352887 - RNA, 19 nt, Artificial Sequence
  Description of Artificial Sequence: Synthetic oligonucleotide
  Antisense strand to SEQ ID NO: 2352886
uaccaacgguugaugacgc

SEQ ID NO: 2352888 - RNA, 19 nt, Artificial Sequence
  Description of Artificial Sequence: Synthetic oligonucleotide
  Sense strand starting at position 2028 of SEQ ID NO: 1885583
ucaucaaccguugguauuu

SEQ ID NO: 2352889 - RNA, 19 nt, Artificial Sequence
  Description of Artificial Sequence: Synthetic oligonucleotide
  Antisense strand to SEQ ID NO: 2352888
aaauaccaacgguugauga

SEQ ID NO: 2352890 - RNA, 19 nt, Artificial Sequence
  Description of Artificial Sequence: Synthetic oligonucleotide
  Sense strand starting at position 2040 of SEQ ID NO: 1885583
gguauuucuuggcuugcca

SEQ ID NO: 2352891 - RNA, 19 nt, Artificial Sequence
  Description of Artificial Sequence: Synthetic oligonucleotide
  Antisense strand to SEQ ID NO: 2352890
uggcaagccaagaaauacc

SEQ ID NO: 2352892 - RNA, 19 nt, Artificial Sequence
  Description of Artificial Sequence: Synthetic oligonucleotide
  Sense strand starting at position 2187 of SEQ ID NO: 1885583
ucucaaugagauuguauug

SEQ ID NO: 2352893 - RNA, 19 nt, Artificial Sequence
  Description of Artificial Sequence: Synthetic oligonucleotide
  Antisense strand to SEQ ID NO: 2352892
caauacaaucucauugaga

SEQ ID NO: 2352894 - RNA, 19 nt, Artificial Sequence
  Description of Artificial Sequence: Synthetic oligonucleotide
  Sense strand starting at position 2193 of SEQ ID NO: 1885583
ugagauuguauuggucaac

SEQ ID NO: 2352895 - RNA, 19 nt, Artificial Sequence
  Description of Artificial Sequence: Synthetic oligonucleotide
  Antisense strand to SEQ ID NO: 2352894
guugaccaauacaaucuca

SEQ ID NO: 2352896 - RNA, 19 nt, Artificial Sequence
  Description of Artificial Sequence: Synthetic oligonucleotide
  Sense strand starting at position 2194 of SEQ ID NO: 1885583
gagauuguauuggucaaca

SEQ ID NO: 2352897 - RNA, 19 nt, Artificial Sequence
  Description of Artificial Sequence: Synthetic oligonucleotide
  Antisense strand to SEQ ID NO: 2352896
uguugaccaauacaaucuc

SEQ ID NO: 2352898 - RNA, 19 nt, Artificial Sequence
  Description of Artificial Sequence: Synthetic oligonucleotide
  Sense strand starting at position 2199 of SEQ ID NO: 1885583
uguauuggucaacacccua

SEQ ID NO: 2352899 - RNA, 19 nt, Artificial Sequence
  Description of Artificial Sequence: Synthetic oligonucleotide
  Antisense strand to SEQ ID NO: 2352898
uaggguguugaccaauaca

SEQ ID NO: 2352900 - RNA, 19 nt, Artificial Sequence
  Description of Artificial Sequence: Synthetic oligonucleotide
  Sense strand starting at position 3064 of SEQ ID NO: 1885583
auaaguacauuguuaguga

SEQ ID NO: 2352901 - RNA, 19 nt, Artificial Sequence
  Description of Artificial Sequence: Synthetic oligonucleotide
  Antisense strand to SEQ ID NO: 2352900
ucacuaacaauguacuuau

SEQ ID NO: 2352902 - RNA, 19 nt, Artificial Sequence
  Description of Artificial Sequence: Synthetic oligonucleotide
  Sense strand starting at position 3067 of SEQ ID NO: 1885583
aguacauuguuagugaaga

SEQ ID NO: 2352903 - RNA, 19 nt, Artificial Sequence
  Description of Artificial Sequence: Synthetic oligonucleotide
  Antisense strand to SEQ ID NO: 2352902
ucuucacuaacaauguacu

SEQ ID NO: 2352904 - RNA, 19 nt, Artificial Sequence
  Description of Artificial Sequence: Synthetic oligonucleotide
  Sense strand starting at position 3083 of SEQ ID NO: 1885583
agaggucaccuguguagaa

SEQ ID NO: 2352905 - RNA, 19 nt, Artificial Sequence
  Description of Artificial Sequence: Synthetic oligonucleotide
  Antisense strand to SEQ ID NO: 2352904
uucuacacaggugaccucu

SEQ ID NO: 2352906 - RNA, 19 nt, Artificial Sequence
  Description of Artificial Sequence: Synthetic oligonucleotide
  Sense strand starting at position 3084 of SEQ ID NO: 1885583
gaggucaccuguguagaaa

SEQ ID NO: 2352907 - RNA, 19 nt, Artificial Sequence
  Description of Artificial Sequence: Synthetic oligonucleotide
  Antisense strand to SEQ ID NO: 2352906
uuucuacacaggugaccuc

SEQ ID NO: 2352908 - RNA, 19 nt, Artificial Sequence
  Description of Artificial Sequence: Synthetic oligonucleotide
  Sense strand starting at position 3157 of SEQ ID NO: 1885583
gauggagucucauucuaug

SEQ ID NO: 2352909 - RNA, 19 nt, Artificial Sequence
  Description of Artificial Sequence: Synthetic oligonucleotide
  Antisense strand to SEQ ID NO: 2352908
cauagaaugagacuccauc

SEQ ID NO: 2352910 - RNA, 19 nt, Artificial Sequence
  Description of Artificial Sequence: Synthetic oligonucleotide
  Sense strand starting at position 3196 of SEQ ID NO: 1885583
gcaugaucauagcugaaug

SEQ ID NO: 2352911 - RNA, 19 nt, Artificial Sequence
  Description of Artificial Sequence: Synthetic oligonucleotide
  Antisense strand to SEQ ID NO: 2352910
cauucagcuaugaucaugc

SEQ ID NO: 2352912 - RNA, 19 nt, Artificial Sequence
  Description of Artificial Sequence: Synthetic oligonucleotide
  Sense strand starting at position 3247 of SEQ ID NO: 1885583
ccaccuagaucuccugagu

SEQ ID NO: 2352913 - RNA, 19 nt, Artificial Sequence
  Description of Artificial Sequence: Synthetic oligonucleotide
  Antisense strand to SEQ ID NO: 2352912
acucaggagaucuaggugg

SEQ ID NO: 2352914 - RNA, 19 nt, Artificial Sequence
  Description of Artificial Sequence: Synthetic oligonucleotide
  Sense strand starting at position 3452 of SEQ ID NO: 1885583
gcaucacugccacaagacu

SEQ ID NO: 2352915 - RNA, 19 nt, Artificial Sequence
  Description of Artificial Sequence: Synthetic oligonucleotide
  Antisense strand to SEQ ID NO: 2352914
agucuuguggcagugaugc

SEQ ID NO: 2352916 - RNA, 19 nt, Artificial Sequence
  Description of Artificial Sequence: Synthetic oligonucleotide
  Sense strand starting at position 3580 of SEQ ID NO: 1885583
acugaaucacugugagauu

SEQ ID NO: 2352917 - RNA, 19 nt, Artificial Sequence
  Description of Artificial Sequence: Synthetic oligonucleotide
  Antisense strand to SEQ ID NO: 2352916
aaucucacagugauucagu

SEQ ID NO: 2352918 - RNA, 19 nt, Artificial Sequence
  Description of Artificial Sequence: Synthetic oligonucleotide
  Sense strand starting at position 3898 of SEQ ID NO: 1885583
augguucaagguugaaaug

SEQ ID NO: 2352919 - RNA, 19 nt, Artificial Sequence
  Description of Artificial Sequence: Synthetic oligonucleotide
  Antisense strand to SEQ ID NO: 2352918
cauuucaaccuugaaccau

SEQ ID NO: 2352920 - RNA, 19 nt, Artificial Sequence
  Description of Artificial Sequence: Synthetic oligonucleotide
  Sense strand starting at position 3961 of SEQ ID NO: 1885583
cauucuuuagcuuauggga

SEQ ID NO: 2352921 - RNA, 19 nt, Artificial Sequence
  Description of Artificial Sequence: Synthetic oligonucleotide
  Antisense strand to SEQ ID NO: 2352920
ucccauaagcuaaagaaug

SEQ ID NO: 2352922 - RNA, 19 nt, Artificial Sequence
  Description of Artificial Sequence: Synthetic oligonucleotide
  Sense strand starting at position 33 of SEQ ID NO: 1885584
auuguaagaggguaguaau

SEQ ID NO: 2352923 - RNA, 19 nt, Artificial Sequence
  Description of Artificial Sequence: Synthetic oligonucleotide
  Antisense strand to SEQ ID NO: 2352922
auuacuacccucuuacaau

SEQ ID NO: 2352924 - RNA, 19 nt, Artificial Sequence
  Description of Artificial Sequence: Synthetic oligonucleotide
  Sense strand starting at position 41 of SEQ ID NO: 1885584
aggguaguaauauguacau

SEQ ID NO: 2352925 - RNA, 19 nt, Artificial Sequence
  Description of Artificial Sequence: Synthetic oligonucleotide
  Antisense strand to SEQ ID NO: 2352924
auguacauauuacuacccu

SEQ ID NO: 2352926 - RNA, 19 nt, Artificial Sequence
  Description of Artificial Sequence: Synthetic oligonucleotide
  Sense strand starting at position 71 of SEQ ID NO: 1885584
uauauaggugcauauguau

SEQ ID NO: 2352927 - RNA, 19 nt, Artificial Sequence
  Description of Artificial Sequence: Synthetic oligonucleotide
  Antisense strand to SEQ ID NO: 2352926
auacauaugcaccuauaua

SEQ ID NO: 2352928 - RNA, 19 nt, Artificial Sequence
  Description of Artificial Sequence: Synthetic oligonucleotide
  Sense strand starting at position 113 of SEQ ID NO: 1885584
uauacuuaacaacgaguga

SEQ ID NO: 2352929 - RNA, 19 nt, Artificial Sequence
  Description of Artificial Sequence: Synthetic oligonucleotide
  Antisense strand to SEQ ID NO: 2352928
ucacucguuguuaaguaua

SEQ ID NO: 2352930 - RNA, 19 nt, Artificial Sequence
  Description of Artificial Sequence: Synthetic oligonucleotide
  Sense strand starting at position 124 of SEQ ID NO: 1885584
acgagugagguccaugaaa

SEQ ID NO: 2352931 - RNA, 19 nt, Artificial Sequence
  Description of Artificial Sequence: Synthetic oligonucleotide
  Antisense strand to SEQ ID NO: 2352930
uuucauggaccucacucgu

SEQ ID NO: 2352932 - RNA, 19 nt, Artificial Sequence
  Description of Artificial Sequence: Synthetic oligonucleotide
  Sense strand starting at position 126 of SEQ ID NO: 1885584
gagugagguccaugaaauu

SEQ ID NO: 2352933 - RNA, 19 nt, Artificial Sequence
  Description of Artificial Sequence: Synthetic oligonucleotide
  Antisense strand to SEQ ID NO: 2352932
aauuucauggaccucacuc

SEQ ID NO: 2352934 - RNA, 19 nt, Artificial Sequence
  Description of Artificial Sequence: Synthetic oligonucleotide
  Sense strand starting at position 132 of SEQ ID NO: 1885584
gguccaugaaauuggguua

SEQ ID NO: 2352935 - RNA, 19 nt, Artificial Sequence
  Description of Artificial Sequence: Synthetic oligonucleotide
  Antisense strand to SEQ ID NO: 2352934
uaacccaauuucauggacc

SEQ ID NO: 2352936 - RNA, 19 nt, Artificial Sequence
  Description of Artificial Sequence: Synthetic oligonucleotide
  Sense strand starting at position 133 of SEQ ID NO: 1885584
guccaugaaauuggguuau

SEQ ID NO: 2352937 - RNA, 19 nt, Artificial Sequence
  Description of Artificial Sequence: Synthetic oligonucleotide
  Antisense strand to SEQ ID NO: 2352936
auaacccaauuucauggac

SEQ ID NO: 2352938 - RNA, 19 nt, Artificial Sequence
  Description of Artificial Sequence: Synthetic oligonucleotide
  Sense strand starting at position 206 of SEQ ID NO: 1885584
acgggaucacaguguggaa

SEQ ID NO: 2352939 - RNA, 19 nt, Artificial Sequence
  Description of Artificial Sequence: Synthetic oligonucleotide
  Antisense strand to SEQ ID NO: 2352938
uuccacacugugaucccgu

SEQ ID NO: 2352940 - RNA, 19 nt, Artificial Sequence
  Description of Artificial Sequence: Synthetic oligonucleotide
  Sense strand starting at position 667 of SEQ ID NO: 1885584
ugaguaauacaauguucua

SEQ ID NO: 2352941 - RNA, 19 nt, Artificial Sequence
  Description of Artificial Sequence: Synthetic oligonucleotide
  Antisense strand to SEQ ID NO: 2352940
uagaacauuguauuacuca

SEQ ID NO: 2352942 - RNA, 19 nt, Artificial Sequence
  Description of Artificial Sequence: Synthetic oligonucleotide
  Sense strand starting at position 780 of SEQ ID NO: 1885584
uuuaauacacagugucuaa

SEQ ID NO: 2352943 - RNA, 19 nt, Artificial Sequence
  Description of Artificial Sequence: Synthetic oligonucleotide
  Antisense strand to SEQ ID NO: 2352942
uuagacacuguguauuaaa

SEQ ID NO: 2352944 - RNA, 19 nt, Artificial Sequence
  Description of Artificial Sequence: Synthetic oligonucleotide
  Sense strand starting at position 812 of SEQ ID NO: 1885584
uguguaauaccuuauaccu

SEQ ID NO: 2352945 - RNA, 19 nt, Artificial Sequence
  Description of Artificial Sequence: Synthetic oligonucleotide
  Antisense strand to SEQ ID NO: 2352944
agguauaagguauuacaca

SEQ ID NO: 2352946 - RNA, 19 nt, Artificial Sequence
  Description of Artificial Sequence: Synthetic oligonucleotide
  Sense strand starting at position 1023 of SEQ ID NO: 1885584
gcuacaagagguuacauca

SEQ ID NO: 2352947 - RNA, 19 nt, Artificial Sequence
  Description of Artificial Sequence: Synthetic oligonucleotide
  Antisense strand to SEQ ID NO: 2352946
ugauguaaccucuuguagc

SEQ ID NO: 2352948 - RNA, 19 nt, Artificial Sequence
  Description of Artificial Sequence: Synthetic oligonucleotide
  Sense strand starting at position 1094 of SEQ ID NO: 1885584
ugauuuguuuaggaggaag

SEQ ID NO: 2352949 - RNA, 19 nt, Artificial Sequence
  Description of Artificial Sequence: Synthetic oligonucleotide
  Antisense strand to SEQ ID NO: 2352948
cuuccuccuaaacaaauca

SEQ ID NO: 2352950 - RNA, 19 nt, Artificial Sequence
  Description of Artificial Sequence: Synthetic oligonucleotide
  Sense strand starting at position 1097 of SEQ ID NO: 1885584
uuuguuuaggaggaaguau

SEQ ID NO: 2352951 - RNA, 19 nt, Artificial Sequence
  Description of Artificial Sequence: Synthetic oligonucleotide
  Antisense strand to SEQ ID NO: 2352950
auacuuccuccuaaacaaa

SEQ ID NO: 2352952 - RNA, 19 nt, Artificial Sequence
  Description of Artificial Sequence: Synthetic oligonucleotide
  Sense strand starting at position 1140 of SEQ ID NO: 1885584
caaaguacuugagugagaa

SEQ ID NO: 2352953 - RNA, 19 nt, Artificial Sequence
  Description of Artificial Sequence: Synthetic oligonucleotide
  Antisense strand to SEQ ID NO: 2352952
uucucacucaaguacuuug

SEQ ID NO: 2352954 - RNA, 19 nt, Artificial Sequence
  Description of Artificial Sequence: Synthetic oligonucleotide
  Sense strand starting at position 1200 of SEQ ID NO: 1885584
uauauaugagauggguuau

SEQ ID NO: 2352955 - RNA, 19 nt, Artificial Sequence
  Description of Artificial Sequence: Synthetic oligonucleotide
  Antisense strand to SEQ ID NO: 2352954
auaacccaucucauauaua

SEQ ID NO: 2352956 - RNA, 19 nt, Artificial Sequence
  Description of Artificial Sequence: Synthetic oligonucleotide
  Sense strand starting at position 1201 of SEQ ID NO: 1885584
auauaugagauggguuauc

SEQ ID NO: 2352957 - RNA, 19 nt, Artificial Sequence
  Description of Artificial Sequence: Synthetic oligonucleotide
  Antisense strand to SEQ ID NO: 2352956
gauaacccaucucauauau

SEQ ID NO: 2352958 - RNA, 19 nt, Artificial Sequence
  Description of Artificial Sequence: Synthetic oligonucleotide
  Sense strand starting at position 1206 of SEQ ID NO: 1885584
ugagauggguuauccuuua

SEQ ID NO: 2352959 - RNA, 19 nt, Artificial Sequence
  Description of Artificial Sequence: Synthetic oligonucleotide
  Antisense strand to SEQ ID NO: 2352958
uaaaggauaacccaucuca

SEQ ID NO: 2352960 - RNA, 19 nt, Artificial Sequence
  Description of Artificial Sequence: Synthetic oligonucleotide
  Sense strand starting at position 1211 of SEQ ID NO: 1885584
uggguuauccuuuacaccu

SEQ ID NO: 2352961 - RNA, 19 nt, Artificial Sequence
  Description of Artificial Sequence: Synthetic oligonucleotide
  Antisense strand to SEQ ID NO: 2352960
agguguaaaggauaaccca

SEQ ID NO: 2352962 - RNA, 19 nt, Artificial Sequence
  Description of Artificial Sequence: Synthetic oligonucleotide
  Sense strand starting at position 1965 of SEQ ID NO: 1885584
gguggcuucgccagguaga

SEQ ID NO: 2352963 - RNA, 19 nt, Artificial Sequence
  Description of Artificial Sequence: Synthetic oligonucleotide
  Antisense strand to SEQ ID NO: 2352962
ucuaccuggcgaagccacc

SEQ ID NO: 2352964 - RNA, 19 nt, Artificial Sequence
  Description of Artificial Sequence: Synthetic oligonucleotide
  Sense strand starting at position 2606 of SEQ ID NO: 1885584
guguucgaggcaguaguua

SEQ ID NO: 2352965 - RNA, 19 nt, Artificial Sequence
  Description of Artificial Sequence: Synthetic oligonucleotide
  Antisense strand to SEQ ID NO: 2352964
uaacuacugccucgaacac

SEQ ID NO: 2352966 - RNA, 19 nt, Artificial Sequence
  Description of Artificial Sequence: Synthetic oligonucleotide
  Sense strand starting at position 2751 of SEQ ID NO: 1885584
uuagccuuuccgcuauguu

SEQ ID NO: 2352967 - RNA, 19 nt, Artificial Sequence
  Description of Artificial Sequence: Synthetic oligonucleotide
  Antisense strand to SEQ ID NO: 2352966
aacauagcggaaaggcuaa

SEQ ID NO: 2352968 - RNA, 19 nt, Artificial Sequence
  Description of Artificial Sequence: Synthetic oligonucleotide
  Sense strand starting at position 2816 of SEQ ID NO: 1885584
ugaggacuguuccuuuaaa

SEQ ID NO: 2352969 - RNA, 19 nt, Artificial Sequence
  Description of Artificial Sequence: Synthetic oligonucleotide
  Antisense strand to SEQ ID NO: 2352968
uuuaaaggaacaguccuca

SEQ ID NO: 2352970 - RNA, 19 nt, Artificial Sequence
  Description of Artificial Sequence: Synthetic oligonucleotide
  Sense strand starting at position 2817 of SEQ ID NO: 1885584
gaggacuguuccuuuaaau

SEQ ID NO: 2352971 - RNA, 19 nt, Artificial Sequence
  Description of Artificial Sequence: Synthetic oligonucleotide
  Antisense strand to SEQ ID NO: 2352970
auuuaaaggaacaguccuc

SEQ ID NO: 2352972 - RNA, 19 nt, Artificial Sequence
  Description of Artificial Sequence: Synthetic oligonucleotide
  Sense strand starting at position 2860 of SEQ ID NO: 1885584
cucguugaaccuugaaaga

SEQ ID NO: 2352973 - RNA, 19 nt, Artificial Sequence
  Description of Artificial Sequence: Synthetic oligonucleotide
  Antisense strand to SEQ ID NO: 2352972
ucuuucaagguucaacgag

SEQ ID NO: 2352974 - RNA, 19 nt, Artificial Sequence
  Description of Artificial Sequence: Synthetic oligonucleotide
  Sense strand starting at position 2962 of SEQ ID NO: 1885584
cucuaccaugagugagauu

SEQ ID NO: 2352975 - RNA, 19 nt, Artificial Sequence
  Description of Artificial Sequence: Synthetic oligonucleotide
  Antisense strand to SEQ ID NO: 2352974
aaucucacucaugguagag

SEQ ID NO: 2352976 - RNA, 19 nt, Artificial Sequence
  Description of Artificial Sequence: Synthetic oligonucleotide
  Sense strand starting at position 2985 of SEQ ID NO: 1885584
uucgcuucugucuuguuaa

SEQ ID NO: 2352977 - RNA, 19 nt, Artificial Sequence
  Description of Artificial Sequence: Synthetic oligonucleotide
  Antisense strand to SEQ ID NO: 2352976
uuaacaagacagaagcgaa

SEQ ID NO: 2352978 - RNA, 19 nt, Artificial Sequence
  Description of Artificial Sequence: Synthetic oligonucleotide
  Sense strand starting at position 3057 of SEQ ID NO: 1885584
ucaggucuaguuuauaauc

SEQ ID NO: 2352979 - RNA, 19 nt, Artificial Sequence
  Description of Artificial Sequence: Synthetic oligonucleotide
  Antisense strand to SEQ ID NO: 2352978
gauuauaaacuagaccuga

SEQ ID NO: 2352980 - RNA, 19 nt, Artificial Sequence
  Description of Artificial Sequence: Synthetic oligonucleotide
  Sense strand starting at position 3227 of SEQ ID NO: 1885584
gugaauuaaagguaguguu

SEQ ID NO: 2352981 - RNA, 19 nt, Artificial Sequence
  Description of Artificial Sequence: Synthetic oligonucleotide
  Antisense strand to SEQ ID NO: 2352980
aacacuaccuuuaauucac

SEQ ID NO: 2352982 - RNA, 19 nt, Artificial Sequence
  Description of Artificial Sequence: Synthetic oligonucleotide
  Sense strand starting at position 3422 of SEQ ID NO: 1885584
ugaugaagugcuuaccuaa

SEQ ID NO: 2352983 - RNA, 19 nt, Artificial Sequence
  Description of Artificial Sequence: Synthetic oligonucleotide
  Antisense strand to SEQ ID NO: 2352982
uuagguaagcacuucauca

SEQ ID NO: 2352984 - RNA, 19 nt, Artificial Sequence
  Description of Artificial Sequence: Synthetic oligonucleotide
  Sense strand starting at position 3460 of SEQ ID NO: 1885584
ggaacuaggagcuguauua

SEQ ID NO: 2352985 - RNA, 19 nt, Artificial Sequence
  Description of Artificial Sequence: Synthetic oligonucleotide
  Antisense strand to SEQ ID NO: 2352984
uaauacagcuccuaguucc

SEQ ID NO: 2352986 - RNA, 19 nt, Artificial Sequence
  Description of Artificial Sequence: Synthetic oligonucleotide
  Sense strand starting at position 3467 of SEQ ID NO: 1885584
ggagcuguauuacuuagag

SEQ ID NO: 2352987 - RNA, 19 nt, Artificial Sequence
  Description of Artificial Sequence: Synthetic oligonucleotide
  Antisense strand to SEQ ID NO: 2352986
cucuaaguaauacagcucc

SEQ ID NO: 2352988 - RNA, 19 nt, Artificial Sequence
  Description of Artificial Sequence: Synthetic oligonucleotide
  Sense strand starting at position 3469 of SEQ ID NO: 1885584
agcuguauuacuuagagug

SEQ ID NO: 2352989 - RNA, 19 nt, Artificial Sequence
  Description of Artificial Sequence: Synthetic oligonucleotide
  Antisense strand to SEQ ID NO: 2352988
cacucuaaguaauacagcu

SEQ ID NO: 2352990 - RNA, 19 nt, Artificial Sequence
  Description of Artificial Sequence: Synthetic oligonucleotide
  Sense strand starting at position 3474 of SEQ ID NO: 1885584
uauuacuuagaguguaaag

SEQ ID NO: 2352991 - RNA, 19 nt, Artificial Sequence
  Description of Artificial Sequence: Synthetic oligonucleotide
  Antisense strand to SEQ ID NO: 2352990
cuuuacacucuaaguaaua

SEQ ID NO: 2352992 - RNA, 19 nt, Artificial Sequence
  Description of Artificial Sequence: Synthetic oligonucleotide
  Sense strand starting at position 3529 of SEQ ID NO: 1885584
agauguaaguagguuccaa

SEQ ID NO: 2352993 - RNA, 19 nt, Artificial Sequence
  Description of Artificial Sequence: Synthetic oligonucleotide
  Antisense strand to SEQ ID NO: 2352992
uuggaaccuacuuacaucu

SEQ ID NO: 2352994 - RNA, 19 nt, Artificial Sequence
  Description of Artificial Sequence: Synthetic oligonucleotide
  Sense strand starting at position 3561 of SEQ ID NO: 1885584
uggagagcucuugaaggcu

SEQ ID NO: 2352995 - RNA, 19 nt, Artificial Sequence
  Description of Artificial Sequence: Synthetic oligonucleotide
  Antisense strand to SEQ ID NO: 2352994
agccuucaagagcucucca

SEQ ID NO: 2352996 - RNA, 19 nt, Artificial Sequence
  Description of Artificial Sequence: Synthetic oligonucleotide
  Sense strand starting at position 3706 of SEQ ID NO: 1885584
gaggguacuguguggagaa

SEQ ID NO: 2352997 - RNA, 19 nt, Artificial Sequence
  Description of Artificial Sequence: Synthetic oligonucleotide
  Antisense strand to SEQ ID NO: 2352996
uucuccacacaguacccuc

SEQ ID NO: 2352998 - RNA, 19 nt, Artificial Sequence
  Description of Artificial Sequence: Synthetic oligonucleotide
  Sense strand starting at position 3708 of SEQ ID NO: 1885584
ggguacuguguggagaaau

SEQ ID NO: 2352999 - RNA, 19 nt, Artificial Sequence
  Description of Artificial Sequence: Synthetic oligonucleotide
  Antisense strand to SEQ ID NO: 2352998
auuucuccacacaguaccc

SEQ ID NO: 2353000 - RNA, 19 nt, Artificial Sequence
  Description of Artificial Sequence: Synthetic oligonucleotide
  Sense strand starting at position 3765 of SEQ ID NO: 1885584
gcaugugaagggugagaga

SEQ ID NO: 2353001 - RNA, 19 nt, Artificial Sequence
  Description of Artificial Sequence: Synthetic oligonucleotide
  Antisense strand to SEQ ID NO: 2353000
ucucucacccuucacaugc

SEQ ID NO: 2353002 - RNA, 19 nt, Artificial Sequence
  Description of Artificial Sequence: Synthetic oligonucleotide
  Sense strand starting at position 45 of SEQ ID NO: 1885585
uggacaagcuuaucccuua

SEQ ID NO: 2353003 - RNA, 19 nt, Artificial Sequence
  Description of Artificial Sequence: Synthetic oligonucleotide
  Antisense strand to SEQ ID NO: 2353002
uaagggauaagcuugucca

SEQ ID NO: 2353004 - RNA, 19 nt, Artificial Sequence
  Description of Artificial Sequence: Synthetic oligonucleotide
  Sense strand starting at position 784 of SEQ ID NO: 1885585
ugcagaaaucuguauucca

SEQ ID NO: 2353005 - RNA, 19 nt, Artificial Sequence
  Description of Artificial Sequence: Synthetic oligonucleotide
  Antisense strand to SEQ ID NO: 2353004
uggaauacagauuucugca

SEQ ID NO: 2353006 - RNA, 19 nt, Artificial Sequence
  Description of Artificial Sequence: Synthetic oligonucleotide
  Sense strand starting at position 1036 of SEQ ID NO: 1885585
aguuucuccuaauuaguaa

SEQ ID NO: 2353007 - RNA, 19 nt, Artificial Sequence
  Description of Artificial Sequence: Synthetic oligonucleotide
  Antisense strand to SEQ ID NO: 2353006
uuacuaauuaggagaaacu

SEQ ID NO: 2353008 - RNA, 19 nt, Artificial Sequence
  Description of Artificial Sequence: Synthetic oligonucleotide
  Sense strand starting at position 1055 of SEQ ID NO: 1885585
ucuucugggugucuaagaa

SEQ ID NO: 2353009 - RNA, 19 nt, Artificial Sequence
  Description of Artificial Sequence: Synthetic oligonucleotide
  Antisense strand to SEQ ID NO: 2353008
uucuuagacacccagaaga

SEQ ID NO: 2353010 - RNA, 19 nt, Artificial Sequence
  Description of Artificial Sequence: Synthetic oligonucleotide
  Sense strand starting at position 2012 of SEQ ID NO: 1885585
ggucgaggcgucgcgagau

SEQ ID NO: 2353011 - RNA, 19 nt, Artificial Sequence
  Description of Artificial Sequence: Synthetic oligonucleotide
  Antisense strand to SEQ ID NO: 2353010
aucucgcgacgccucgacc

SEQ ID NO: 2353012 - RNA, 19 nt, Artificial Sequence
  Description of Artificial Sequence: Synthetic oligonucleotide
  Sense strand starting at position 2275 of SEQ ID NO: 1885585
guaaccuggccucauuaga

SEQ ID NO: 2353013 - RNA, 19 nt, Artificial Sequence
  Description of Artificial Sequence: Synthetic oligonucleotide
  Antisense strand to SEQ ID NO: 2353012
ucuaaugaggccagguuac

SEQ ID NO: 2353014 - RNA, 19 nt, Artificial Sequence
  Description of Artificial Sequence: Synthetic oligonucleotide
  Sense strand starting at position 2314 of SEQ ID NO: 1885585
ucauaacaucacuguguaa

SEQ ID NO: 2353015 - RNA, 19 nt, Artificial Sequence
  Description of Artificial Sequence: Synthetic oligonucleotide
  Antisense strand to SEQ ID NO: 2353014
uuacacagugauguuauga

SEQ ID NO: 2353016 - RNA, 19 nt, Artificial Sequence
  Description of Artificial Sequence: Synthetic oligonucleotide
  Sense strand starting at position 2316 of SEQ ID NO: 1885585
auaacaucacuguguaaac

SEQ ID NO: 2353017 - RNA, 19 nt, Artificial Sequence
  Description of Artificial Sequence: Synthetic oligonucleotide
  Antisense strand to SEQ ID NO: 2353016
guuuacacagugauguuau

SEQ ID NO: 2353018 - RNA, 19 nt, Artificial Sequence
  Description of Artificial Sequence: Synthetic oligonucleotide
  Sense strand starting at position 2392 of SEQ ID NO: 1885585
ugcuauuaucucgauugaa

SEQ ID NO: 2353019 - RNA, 19 nt, Artificial Sequence
  Description of Artificial Sequence: Synthetic oligonucleotide
  Antisense strand to SEQ ID NO: 2353018
uucaaucgagauaauagca

SEQ ID NO: 2353020 - RNA, 19 nt, Artificial Sequence
  Description of Artificial Sequence: Synthetic oligonucleotide
  Sense strand starting at position 2402 of SEQ ID NO: 1885585
ucgauugaauuacuuucua

SEQ ID NO: 2353021 - RNA, 19 nt, Artificial Sequence
  Description of Artificial Sequence: Synthetic oligonucleotide
  Antisense strand to SEQ ID NO: 2353020
uagaaaguaauucaaucga

SEQ ID NO: 2353022 - RNA, 19 nt, Artificial Sequence
  Description of Artificial Sequence: Synthetic oligonucleotide
  Sense strand starting at position 2577 of SEQ ID NO: 1885585
uuuagaacugggugaauua

SEQ ID NO: 2353023 - RNA, 19 nt, Artificial Sequence
  Description of Artificial Sequence: Synthetic oligonucleotide
  Antisense strand to SEQ ID NO: 2353022
uaauucacccaguucuaaa

SEQ ID NO: 2353024 - RNA, 19 nt, Artificial Sequence
  Description of Artificial Sequence: Synthetic oligonucleotide
  Sense strand starting at position 2586 of SEQ ID NO: 1885585
gggugaauuaucugcuaag

SEQ ID NO: 2353025 - RNA, 19 nt, Artificial Sequence
  Description of Artificial Sequence: Synthetic oligonucleotide
  Antisense strand to SEQ ID NO: 2353024
cuuagcagauaauucaccc

SEQ ID NO: 2353026 - RNA, 19 nt, Artificial Sequence
  Description of Artificial Sequence: Synthetic oligonucleotide
  Sense strand starting at position 2831 of SEQ ID NO: 1885585
uaauguguuguagaauacu

SEQ ID NO: 2353027 - RNA, 19 nt, Artificial Sequence
  Description of Artificial Sequence: Synthetic oligonucleotide
  Antisense strand to SEQ ID NO: 2353026
aguauucuacaacacauua

SEQ ID NO: 2353028 - RNA, 19 nt, Artificial Sequence
  Description of Artificial Sequence: Synthetic oligonucleotide
  Sense strand starting at position 2834 of SEQ ID NO: 1885585
uguguuguagaauacucuu

SEQ ID NO: 2353029 - RNA, 19 nt, Artificial Sequence
  Description of Artificial Sequence: Synthetic oligonucleotide
  Antisense strand to SEQ ID NO: 2353028
aagaguauucuacaacaca

SEQ ID NO: 2353030 - RNA, 19 nt, Artificial Sequence
  Description of Artificial Sequence: Synthetic oligonucleotide
  Sense strand starting at position 2837 of SEQ ID NO: 1885585
guuguagaauacucuucua

SEQ ID NO: 2353031 - RNA, 19 nt, Artificial Sequence
  Description of Artificial Sequence: Synthetic oligonucleotide
  Antisense strand to SEQ ID NO: 2353030
uagaagaguauucuacaac

SEQ ID NO: 2353032 - RNA, 19 nt, Artificial Sequence
  Description of Artificial Sequence: Synthetic oligonucleotide
  Sense strand starting at position 2840 of SEQ ID NO: 1885585
guagaauacucuucuaaag

SEQ ID NO: 2353033 - RNA, 19 nt, Artificial Sequence
  Description of Artificial Sequence: Synthetic oligonucleotide
  Antisense strand to SEQ ID NO: 2353032
cuuuagaagaguauucuac

SEQ ID NO: 2353034 - RNA, 19 nt, Artificial Sequence
  Description of Artificial Sequence: Synthetic oligonucleotide
  Sense strand starting at position 2851 of SEQ ID NO: 1885585
uucuaaagccaauguuaag

SEQ ID NO: 2353035 - RNA, 19 nt, Artificial Sequence
  Description of Artificial Sequence: Synthetic oligonucleotide
  Antisense strand to SEQ ID NO: 2353034
cuuaacauuggcuuuagaa

SEQ ID NO: 2353036 - RNA, 19 nt, Artificial Sequence
  Description of Artificial Sequence: Synthetic oligonucleotide
  Sense strand starting at position 2887 of SEQ ID NO: 1885585
uuaggaauuugaggaucca

SEQ ID NO: 2353037 - RNA, 19 nt, Artificial Sequence
  Description of Artificial Sequence: Synthetic oligonucleotide
  Antisense strand to SEQ ID NO: 2353036
uggauccucaaauuccuaa

SEQ ID NO: 2353038 - RNA, 19 nt, Artificial Sequence
  Description of Artificial Sequence: Synthetic oligonucleotide
  Sense strand starting at position 2951 of SEQ ID NO: 1885585
uguagugaaaggugagauu

SEQ ID NO: 2353039 - RNA, 19 nt, Artificial Sequence
  Description of Artificial Sequence: Synthetic oligonucleotide
  Antisense strand to SEQ ID NO: 2353038
aaucucaccuuucacuaca

SEQ ID NO: 2353040 - RNA, 19 nt, Artificial Sequence
  Description of Artificial Sequence: Synthetic oligonucleotide
  Sense strand starting at position 2963 of SEQ ID NO: 1885585
ugagauuccuguguaacua

SEQ ID NO: 2353041 - RNA, 19 nt, Artificial Sequence
  Description of Artificial Sequence: Synthetic oligonucleotide
  Antisense strand to SEQ ID NO: 2353040
uaguuacacaggaaucuca

SEQ ID NO: 2353042 - RNA, 19 nt, Artificial Sequence
  Description of Artificial Sequence: Synthetic oligonucleotide
  Sense strand starting at position 2964 of SEQ ID NO: 1885585
gagauuccuguguaacuag

SEQ ID NO: 2353043 - RNA, 19 nt, Artificial Sequence
  Description of Artificial Sequence: Synthetic oligonucleotide
  Antisense strand to SEQ ID NO: 2353042
cuaguuacacaggaaucuc

SEQ ID NO: 2353044 - RNA, 19 nt, Artificial Sequence
  Description of Artificial Sequence: Synthetic oligonucleotide
  Sense strand starting at position 2967 of SEQ ID NO: 1885585
auuccuguguaacuagaua

SEQ ID NO: 2353045 - RNA, 19 nt, Artificial Sequence
  Description of Artificial Sequence: Synthetic oligonucleotide
  Antisense strand to SEQ ID NO: 2353044
uaucuaguuacacaggaau

SEQ ID NO: 2353046 - RNA, 19 nt, Artificial Sequence
  Description of Artificial Sequence: Synthetic oligonucleotide
  Sense strand starting at position 3168 of SEQ ID NO: 1885585
cucgaaaugauagacggua

SEQ ID NO: 2353047 - RNA, 19 nt, Artificial Sequence
  Description of Artificial Sequence: Synthetic oligonucleotide
  Antisense strand to SEQ ID NO: 2353046
uaccgucuaucauuucgag

SEQ ID NO: 2353048 - RNA, 19 nt, Artificial Sequence
  Description of Artificial Sequence: Synthetic oligonucleotide
  Sense strand starting at position 3173 of SEQ ID NO: 1885585
aaugauagacgguauguga

SEQ ID NO: 2353049 - RNA, 19 nt, Artificial Sequence
  Description of Artificial Sequence: Synthetic oligonucleotide
  Antisense strand to SEQ ID NO: 2353048
ucacauaccgucuaucauu

SEQ ID NO: 2353050 - RNA, 19 nt, Artificial Sequence
  Description of Artificial Sequence: Synthetic oligonucleotide
  Sense strand starting at position 3194 of SEQ ID NO: 1885585
gguggauggcugcauugaa

SEQ ID NO: 2353051 - RNA, 19 nt, Artificial Sequence
  Description of Artificial Sequence: Synthetic oligonucleotide
  Antisense strand to SEQ ID NO: 2353050
uucaaugcagccauccacc

SEQ ID NO: 2353052 - RNA, 19 nt, Artificial Sequence
  Description of Artificial Sequence: Synthetic oligonucleotide
  Sense strand starting at position 3201 of SEQ ID NO: 1885585
ggcugcauugaacaauuau

SEQ ID NO: 2353053 - RNA, 19 nt, Artificial Sequence
  Description of Artificial Sequence: Synthetic oligonucleotide
  Antisense strand to SEQ ID NO: 2353052
auaauuguucaaugcagcc

SEQ ID NO: 2353054 - RNA, 19 nt, Artificial Sequence
  Description of Artificial Sequence: Synthetic oligonucleotide
  Sense strand starting at position 3247 of SEQ ID NO: 1885585
gucauuagcagugaugauu

SEQ ID NO: 2353055 - RNA, 19 nt, Artificial Sequence
  Description of Artificial Sequence: Synthetic oligonucleotide
  Antisense strand to SEQ ID NO: 2353054
aaucaucacugcuaaugac

SEQ ID NO: 2353056 - RNA, 19 nt, Artificial Sequence
  Description of Artificial Sequence: Synthetic oligonucleotide
  Sense strand starting at position 3308 of SEQ ID NO: 1885585
ccaguuguucuugaugaau

SEQ ID NO: 2353057 - RNA, 19 nt, Artificial Sequence
  Description of Artificial Sequence: Synthetic oligonucleotide
  Antisense strand to SEQ ID NO: 2353056
auucaucaagaacaacugg

SEQ ID NO: 2353058 - RNA, 19 nt, Artificial Sequence
  Description of Artificial Sequence: Synthetic oligonucleotide
  Sense strand starting at position 3311 of SEQ ID NO: 1885585
guuguucuugaugaaucua

SEQ ID NO: 2353059 - RNA, 19 nt, Artificial Sequence
  Description of Artificial Sequence: Synthetic oligonucleotide
  Antisense strand to SEQ ID NO: 2353058
uagauucaucaagaacaac

SEQ ID NO: 2353060 - RNA, 19 nt, Artificial Sequence
  Description of Artificial Sequence: Synthetic oligonucleotide
  Sense strand starting at position 3323 of SEQ ID NO: 1885585
gaaucuauaugagucauag

SEQ ID NO: 2353061 - RNA, 19 nt, Artificial Sequence
  Description of Artificial Sequence: Synthetic oligonucleotide
  Antisense strand to SEQ ID NO: 2353060
cuaugacucauauagauuc

SEQ ID NO: 2353062 - RNA, 19 nt, Artificial Sequence
  Description of Artificial Sequence: Synthetic oligonucleotide
  Sense strand starting at position 3364 of SEQ ID NO: 1885585
ucauuagaauggcuuguga

SEQ ID NO: 2353063 - RNA, 19 nt, Artificial Sequence
  Description of Artificial Sequence: Synthetic oligonucleotide
  Antisense strand to SEQ ID NO: 2353062
ucacaagccauucuaauga

SEQ ID NO: 2353064 - RNA, 19 nt, Artificial Sequence
  Description of Artificial Sequence: Synthetic oligonucleotide
  Sense strand starting at position 3366 of SEQ ID NO: 1885585
auuagaauggcuugugaua

SEQ ID NO: 2353065 - RNA, 19 nt, Artificial Sequence
  Description of Artificial Sequence: Synthetic oligonucleotide
  Antisense strand to SEQ ID NO: 2353064
uaucacaagccauucuaau

SEQ ID NO: 2353066 - RNA, 19 nt, Artificial Sequence
  Description of Artificial Sequence: Synthetic oligonucleotide
  Sense strand starting at position 3381 of SEQ ID NO: 1885585
gauaucugauggcuugaac

SEQ ID NO: 2353067 - RNA, 19 nt, Artificial Sequence
  Description of Artificial Sequence: Synthetic oligonucleotide
  Antisense strand to SEQ ID NO: 2353066
guucaagccaucagauauc

SEQ ID NO: 2353068 - RNA, 19 nt, Artificial Sequence
  Description of Artificial Sequence: Synthetic oligonucleotide
  Sense strand starting at position 3418 of SEQ ID NO: 1885585
aagugcugucauugcauuu

SEQ ID NO: 2353069 - RNA, 19 nt, Artificial Sequence
  Description of Artificial Sequence: Synthetic oligonucleotide
  Antisense strand to SEQ ID NO: 2353068
aaaugcaaugacagcacuu

SEQ ID NO: 2353070 - RNA, 19 nt, Artificial Sequence
  Description of Artificial Sequence: Synthetic oligonucleotide
  Sense strand starting at position 3438 of SEQ ID NO: 1885585
uuccauugugaauacgaau

SEQ ID NO: 2353071 - RNA, 19 nt, Artificial Sequence
  Description of Artificial Sequence: Synthetic oligonucleotide
  Antisense strand to SEQ ID NO: 2353070
auucguauucacaauggaa

SEQ ID NO: 2353072 - RNA, 19 nt, Artificial Sequence
  Description of Artificial Sequence: Synthetic oligonucleotide
  Sense strand starting at position 3465 of SEQ ID NO: 1885585
ucagaaaugcuccaccugu

SEQ ID NO: 2353073 - RNA, 19 nt, Artificial Sequence
  Description of Artificial Sequence: Synthetic oligonucleotide
  Antisense strand to SEQ ID NO: 2353072
acagguggagcauuucuga

SEQ ID NO: 2353074 - RNA, 19 nt, Artificial Sequence
  Description of Artificial Sequence: Synthetic oligonucleotide
  Sense strand starting at position 3585 of SEQ ID NO: 1885585
aaaguuaauggguagcuaa

SEQ ID NO: 2353075 - RNA, 19 nt, Artificial Sequence
  Description of Artificial Sequence: Synthetic oligonucleotide
  Antisense strand to SEQ ID NO: 2353074
uuagcuacccauuaacuuu

SEQ ID NO: 2353076 - RNA, 19 nt, Artificial Sequence
  Description of Artificial Sequence: Synthetic oligonucleotide
  Sense strand starting at position 3812 of SEQ ID NO: 1885585
uggccuuaugacgaggagu

SEQ ID NO: 2353077 - RNA, 19 nt, Artificial Sequence
  Description of Artificial Sequence: Synthetic oligonucleotide
  Antisense strand to SEQ ID NO: 2353076
acuccucgucauaaggcca

SEQ ID NO: 2353078 - RNA, 19 nt, Artificial Sequence
  Description of Artificial Sequence: Synthetic oligonucleotide
  Sense strand starting at position 3930 of SEQ ID NO: 1885585
cuguguuugccggucuaga

SEQ ID NO: 2353079 - RNA, 19 nt, Artificial Sequence
  Description of Artificial Sequence: Synthetic oligonucleotide
  Antisense strand to SEQ ID NO: 2353078
ucuagaccggcaaacacag

SEQ ID NO: 2353080 - RNA, 19 nt, Artificial Sequence
  Description of Artificial Sequence: Synthetic oligonucleotide
  Sense strand starting at position 3931 of SEQ ID NO: 1885585
uguguuugccggucuagac

SEQ ID NO: 2353081 - RNA, 19 nt, Artificial Sequence
  Description of Artificial Sequence: Synthetic oligonucleotide
  Antisense strand to SEQ ID NO: 2353080
gucuagaccggcaaacaca

SEQ ID NO: 2353082 - RNA, 19 nt, Artificial Sequence
  Description of Artificial Sequence: Synthetic oligonucleotide
  Sense strand starting at position 126 of SEQ ID NO: 1885586
gcuauaaagugauuagguu

SEQ ID NO: 2353083 - RNA, 19 nt, Artificial Sequence
  Description of Artificial Sequence: Synthetic oligonucleotide
  Antisense strand to SEQ ID NO: 2353082
aaccuaaucacuuuauagc

SEQ ID NO: 2353084 - RNA, 19 nt, Artificial Sequence
  Description of Artificial Sequence: Synthetic oligonucleotide
  Sense strand starting at position 130 of SEQ ID NO: 1885586
uaaagugauuagguugauu

SEQ ID NO: 2353085 - RNA, 19 nt, Artificial Sequence
  Description of Artificial Sequence: Synthetic oligonucleotide
  Antisense strand to SEQ ID NO: 2353084
aaucaaccuaaucacuuua

SEQ ID NO: 2353086 - RNA, 19 nt, Artificial Sequence
  Description of Artificial Sequence: Synthetic oligonucleotide
  Sense strand starting at position 132 of SEQ ID NO: 1885586
aagugauuagguugauuaa

SEQ ID NO: 2353087 - RNA, 19 nt, Artificial Sequence
  Description of Artificial Sequence: Synthetic oligonucleotide
  Antisense strand to SEQ ID NO: 2353086
uuaaucaaccuaaucacuu

SEQ ID NO: 2353088 - RNA, 19 nt, Artificial Sequence
  Description of Artificial Sequence: Synthetic oligonucleotide
  Sense strand starting at position 161 of SEQ ID NO: 1885586
gcuggacuacaccaauauu

SEQ ID NO: 2353089 - RNA, 19 nt, Artificial Sequence
  Description of Artificial Sequence: Synthetic oligonucleotide
  Antisense strand to SEQ ID NO: 2353088
aauauugguguaguccagc

SEQ ID NO: 2353090 - RNA, 19 nt, Artificial Sequence
  Description of Artificial Sequence: Synthetic oligonucleotide
  Sense strand starting at position 170 of SEQ ID NO: 1885586
caccaauauugauucguga

SEQ ID NO: 2353091 - RNA, 19 nt, Artificial Sequence
  Description of Artificial Sequence: Synthetic oligonucleotide
  Antisense strand to SEQ ID NO: 2353090
ucacgaaucaauauuggug

SEQ ID NO: 2353092 - RNA, 19 nt, Artificial Sequence
  Description of Artificial Sequence: Synthetic oligonucleotide
  Sense strand starting at position 487 of SEQ ID NO: 1885586
auuggacauuguuccaagu

SEQ ID NO: 2353093 - RNA, 19 nt, Artificial Sequence
  Description of Artificial Sequence: Synthetic oligonucleotide
  Antisense strand to SEQ ID NO: 2353092
acuuggaacaauguccaau

SEQ ID NO: 2353094 - RNA, 19 nt, Artificial Sequence
  Description of Artificial Sequence: Synthetic oligonucleotide
  Sense strand starting at position 649 of SEQ ID NO: 1885586
gcauuagauagaugguacu

SEQ ID NO: 2353095 - RNA, 19 nt, Artificial Sequence
  Description of Artificial Sequence: Synthetic oligonucleotide
  Antisense strand to SEQ ID NO: 2353094
aguaccaucuaucuaaugc

SEQ ID NO: 2353096 - RNA, 19 nt, Artificial Sequence
  Description of Artificial Sequence: Synthetic oligonucleotide
  Sense strand starting at position 655 of SEQ ID NO: 1885586
gauagaugguacucuacac

SEQ ID NO: 2353097 - RNA, 19 nt, Artificial Sequence
  Description of Artificial Sequence: Synthetic oligonucleotide
  Antisense strand to SEQ ID NO: 2353096
guguagaguaccaucuauc

SEQ ID NO: 2353098 - RNA, 19 nt, Artificial Sequence
  Description of Artificial Sequence: Synthetic oligonucleotide
  Sense strand starting at position 968 of SEQ ID NO: 1885586
gccagacccugucugagaa

SEQ ID NO: 2353099 - RNA, 19 nt, Artificial Sequence
  Description of Artificial Sequence: Synthetic oligonucleotide
  Antisense strand to SEQ ID NO: 2353098
uucucagacagggucuggc

SEQ ID NO: 2353100 - RNA, 19 nt, Artificial Sequence
  Description of Artificial Sequence: Synthetic oligonucleotide
  Sense strand starting at position 969 of SEQ ID NO: 1885586
ccagacccugucugagaaa

SEQ ID NO: 2353101 - RNA, 19 nt, Artificial Sequence
  Description of Artificial Sequence: Synthetic oligonucleotide
  Antisense strand to SEQ ID NO: 2353100
uuucucagacagggucugg

SEQ ID NO: 2353102 - RNA, 19 nt, Artificial Sequence
  Description of Artificial Sequence: Synthetic oligonucleotide
  Sense strand starting at position 1049 of SEQ ID NO: 1885586
guauuauuacccuaaaugu

SEQ ID NO: 2353103 - RNA, 19 nt, Artificial Sequence
  Description of Artificial Sequence: Synthetic oligonucleotide
  Antisense strand to SEQ ID NO: 2353102
acauuuaggguaauaauac

SEQ ID NO: 2353104 - RNA, 19 nt, Artificial Sequence
  Description of Artificial Sequence: Synthetic oligonucleotide
  Sense strand starting at position 1083 of SEQ ID NO: 1885586
gccuucuaguaacuaaagu

SEQ ID NO: 2353105 - RNA, 19 nt, Artificial Sequence
  Description of Artificial Sequence: Synthetic oligonucleotide
  Antisense strand to SEQ ID NO: 2353104
acuuuaguuacuagaaggc

SEQ ID NO: 2353106 - RNA, 19 nt, Artificial Sequence
  Description of Artificial Sequence: Synthetic oligonucleotide
  Sense strand starting at position 1131 of SEQ ID NO: 1885586
ggaagaaauuacuccaguu

SEQ ID NO: 2353107 - RNA, 19 nt, Artificial Sequence
  Description of Artificial Sequence: Synthetic oligonucleotide
  Antisense strand to SEQ ID NO: 2353106
aacuggaguaauuucuucc

SEQ ID NO: 2353108 - RNA, 19 nt, Artificial Sequence
  Description of Artificial Sequence: Synthetic oligonucleotide
  Sense strand starting at position 1196 of SEQ ID NO: 1885586
uugggauuauaggcugaca

SEQ ID NO: 2353109 - RNA, 19 nt, Artificial Sequence
  Description of Artificial Sequence: Synthetic oligonucleotide
  Antisense strand to SEQ ID NO: 2353108
ugucagccuauaaucccaa

SEQ ID NO: 2353110 - RNA, 19 nt, Artificial Sequence
  Description of Artificial Sequence: Synthetic oligonucleotide
  Sense strand starting at position 1225 of SEQ ID NO: 1885586
auuagacaguuugccaaua

SEQ ID NO: 2353111 - RNA, 19 nt, Artificial Sequence
  Description of Artificial Sequence: Synthetic oligonucleotide
  Antisense strand to SEQ ID NO: 2353110
uauuggcaaacugucuaau

SEQ ID NO: 2353112 - RNA, 19 nt, Artificial Sequence
  Description of Artificial Sequence: Synthetic oligonucleotide
  Sense strand starting at position 1226 of SEQ ID NO: 1885586
uuagacaguuugccaauau

SEQ ID NO: 2353113 - RNA, 19 nt, Artificial Sequence
  Description of Artificial Sequence: Synthetic oligonucleotide
  Antisense strand to SEQ ID NO: 2353112
auauuggcaaacugucuaa

SEQ ID NO: 2353114 - RNA, 19 nt, Artificial Sequence
  Description of Artificial Sequence: Synthetic oligonucleotide
  Sense strand starting at position 1230 of SEQ ID NO: 1885586
acaguuugccaauauaaag

SEQ ID NO: 2353115 - RNA, 19 nt, Artificial Sequence
  Description of Artificial Sequence: Synthetic oligonucleotide
  Antisense strand to SEQ ID NO: 2353114
cuuuauauuggcaaacugu

SEQ ID NO: 2353116 - RNA, 19 nt, Artificial Sequence
  Description of Artificial Sequence: Synthetic oligonucleotide
  Sense strand starting at position 1364 of SEQ ID NO: 1885586
gcuuuaauggauugugacu

SEQ ID NO: 2353117 - RNA, 19 nt, Artificial Sequence
  Description of Artificial Sequence: Synthetic oligonucleotide
  Antisense strand to SEQ ID NO: 2353116
agucacaauccauuaaagc

SEQ ID NO: 2353118 - RNA, 19 nt, Artificial Sequence
  Description of Artificial Sequence: Synthetic oligonucleotide
  Sense strand starting at position 1378 of SEQ ID NO: 1885586
ugacucugacuccaguaua

SEQ ID NO: 2353119 - RNA, 19 nt, Artificial Sequence
  Description of Artificial Sequence: Synthetic oligonucleotide
  Antisense strand to SEQ ID NO: 2353118
uauacuggagucagaguca

SEQ ID NO: 2353120 - RNA, 19 nt, Artificial Sequence
  Description of Artificial Sequence: Synthetic oligonucleotide
  Sense strand starting at position 1390 of SEQ ID NO: 1885586
caguauacuguuugaugca

SEQ ID NO: 2353121 - RNA, 19 nt, Artificial Sequence
  Description of Artificial Sequence: Synthetic oligonucleotide
  Antisense strand to SEQ ID NO: 2353120
ugcaucaaacaguauacug

SEQ ID NO: 2353122 - RNA, 19 nt, Artificial Sequence
  Description of Artificial Sequence: Synthetic oligonucleotide
  Sense strand starting at position 1494 of SEQ ID NO: 1885586
uucuauuccuaguuuauag

SEQ ID NO: 2353123 - RNA, 19 nt, Artificial Sequence
  Description of Artificial Sequence: Synthetic oligonucleotide
  Antisense strand to SEQ ID NO: 2353122
cuauaaacuaggaauagaa

SEQ ID NO: 2353124 - RNA, 19 nt, Artificial Sequence
  Description of Artificial Sequence: Synthetic oligonucleotide
  Sense strand starting at position 1515 of SEQ ID NO: 1885586
guguucugucauuaaugga

SEQ ID NO: 2353125 - RNA, 19 nt, Artificial Sequence
  Description of Artificial Sequence: Synthetic oligonucleotide
  Antisense strand to SEQ ID NO: 2353124
uccauuaaugacagaacac

SEQ ID NO: 2353126 - RNA, 19 nt, Artificial Sequence
  Description of Artificial Sequence: Synthetic oligonucleotide
  Sense strand starting at position 1563 of SEQ ID NO: 1885586
agugaugacuuaccuguua

SEQ ID NO: 2353127 - RNA, 19 nt, Artificial Sequence
  Description of Artificial Sequence: Synthetic oligonucleotide
  Antisense strand to SEQ ID NO: 2353126
uaacagguaagucaucacu

SEQ ID NO: 2353128 - RNA, 19 nt, Artificial Sequence
  Description of Artificial Sequence: Synthetic oligonucleotide
  Sense strand starting at position 1587 of SEQ ID NO: 1885586
gcgaauuacagauauagca

SEQ ID NO: 2353129 - RNA, 19 nt, Artificial Sequence
  Description of Artificial Sequence: Synthetic oligonucleotide
  Antisense strand to SEQ ID NO: 2353128
ugcuauaucuguaauucgc

SEQ ID NO: 2353130 - RNA, 19 nt, Artificial Sequence
  Description of Artificial Sequence: Synthetic oligonucleotide
  Sense strand starting at position 1604 of SEQ ID NO: 1885586
cagaguuucugguuuggac

SEQ ID NO: 2353131 - RNA, 19 nt, Artificial Sequence
  Description of Artificial Sequence: Synthetic oligonucleotide
  Antisense strand to SEQ ID NO: 2353130
guccaaaccagaaacucug

SEQ ID NO: 2353132 - RNA, 19 nt, Artificial Sequence
  Description of Artificial Sequence: Synthetic oligonucleotide
  Sense strand starting at position 1640 of SEQ ID NO: 1885586
cgucacaaugacugugaaa

SEQ ID NO: 2353133 - RNA, 19 nt, Artificial Sequence
  Description of Artificial Sequence: Synthetic oligonucleotide
  Antisense strand to SEQ ID NO: 2353132
uuucacagucauugugacg

SEQ ID NO: 2353134 - RNA, 19 nt, Artificial Sequence
  Description of Artificial Sequence: Synthetic oligonucleotide
  Sense strand starting at position 1689 of SEQ ID NO: 1885586
agaaauuaguaagcaguuu

SEQ ID NO: 2353135 - RNA, 19 nt, Artificial Sequence
  Description of Artificial Sequence: Synthetic oligonucleotide
  Antisense strand to SEQ ID NO: 2353134
aaacugcuuacuaauuucu

SEQ ID NO: 2353136 - RNA, 19 nt, Artificial Sequence
  Description of Artificial Sequence: Synthetic oligonucleotide
  Sense strand starting at position 1718 of SEQ ID NO: 1885586
uauguaacaguguauggaa

SEQ ID NO: 2353137 - RNA, 19 nt, Artificial Sequence
  Description of Artificial Sequence: Synthetic oligonucleotide
  Antisense strand to SEQ ID NO: 2353136
uuccauacacuguuacaua

SEQ ID NO: 2353138 - RNA, 19 nt, Artificial Sequence
  Description of Artificial Sequence: Synthetic oligonucleotide
  Sense strand starting at position 3254 of SEQ ID NO: 1885586
gacacaaguuuaucgaaua

SEQ ID NO: 2353139 - RNA, 19 nt, Artificial Sequence
  Description of Artificial Sequence: Synthetic oligonucleotide
  Antisense strand to SEQ ID NO: 2353138
uauucgauaaacuuguguc

SEQ ID NO: 2353140 - RNA, 19 nt, Artificial Sequence
  Description of Artificial Sequence: Synthetic oligonucleotide
  Sense strand starting at position 3273 of SEQ ID NO: 1885586
ccuacuguccuaggcauua

SEQ ID NO: 2353141 - RNA, 19 nt, Artificial Sequence
  Description of Artificial Sequence: Synthetic oligonucleotide
  Antisense strand to SEQ ID NO: 2353140
uaaugccuaggacaguagg

SEQ ID NO: 2353142 - RNA, 19 nt, Artificial Sequence
  Description of Artificial Sequence: Synthetic oligonucleotide
  Sense strand starting at position 3390 of SEQ ID NO: 1885586
uugugaaguugguuccuau

SEQ ID NO: 2353143 - RNA, 19 nt, Artificial Sequence
  Description of Artificial Sequence: Synthetic oligonucleotide
  Antisense strand to SEQ ID NO: 2353142
auaggaaccaacuucacaa

SEQ ID NO: 2353144 - RNA, 19 nt, Artificial Sequence
  Description of Artificial Sequence: Synthetic oligonucleotide
  Sense strand starting at position 3393 of SEQ ID NO: 1885586
ugaaguugguuccuaugaa

SEQ ID NO: 2353145 - RNA, 19 nt, Artificial Sequence
  Description of Artificial Sequence: Synthetic oligonucleotide
  Antisense strand to SEQ ID NO: 2353144
uucauaggaaccaacuuca

SEQ ID NO: 2353146 - RNA, 19 nt, Artificial Sequence
  Description of Artificial Sequence: Synthetic oligonucleotide
  Sense strand starting at position 3429 of SEQ ID NO: 1885586
cccuuaaugugacuuagau

SEQ ID NO: 2353147 - RNA, 19 nt, Artificial Sequence
  Description of Artificial Sequence: Synthetic oligonucleotide
  Antisense strand to SEQ ID NO: 2353146
aucuaagucacauuaaggg

SEQ ID NO: 2353148 - RNA, 19 nt, Artificial Sequence
  Description of Artificial Sequence: Synthetic oligonucleotide
  Sense strand starting at position 3438 of SEQ ID NO: 1885586
ugacuuagaugauucgcuu

SEQ ID NO: 2353149 - RNA, 19 nt, Artificial Sequence
  Description of Artificial Sequence: Synthetic oligonucleotide
  Antisense strand to SEQ ID NO: 2353148
aagcgaaucaucuaaguca

SEQ ID NO: 2353150 - RNA, 19 nt, Artificial Sequence
  Description of Artificial Sequence: Synthetic oligonucleotide
  Sense strand starting at position 3442 of SEQ ID NO: 1885586
uuagaugauucgcuuacca

SEQ ID NO: 2353151 - RNA, 19 nt, Artificial Sequence
  Description of Artificial Sequence: Synthetic oligonucleotide
  Antisense strand to SEQ ID NO: 2353150
ugguaagcgaaucaucuaa

SEQ ID NO: 2353152 - RNA, 19 nt, Artificial Sequence
  Description of Artificial Sequence: Synthetic oligonucleotide
  Sense strand starting at position 3444 of SEQ ID NO: 1885586
agaugauucgcuuaccaag

SEQ ID NO: 2353153 - RNA, 19 nt, Artificial Sequence
  Description of Artificial Sequence: Synthetic oligonucleotide
  Antisense strand to SEQ ID NO: 2353152
cuugguaagcgaaucaucu

SEQ ID NO: 2353154 - RNA, 19 nt, Artificial Sequence
  Description of Artificial Sequence: Synthetic oligonucleotide
  Sense strand starting at position 3512 of SEQ ID NO: 1885586
uucuaaagauagguccuau

SEQ ID NO: 2353155 - RNA, 19 nt, Artificial Sequence
  Description of Artificial Sequence: Synthetic oligonucleotide
  Antisense strand to SEQ ID NO: 2353154
auaggaccuaucuuuagaa

SEQ ID NO: 2353156 - RNA, 19 nt, Artificial Sequence
  Description of Artificial Sequence: Synthetic oligonucleotide
  Sense strand starting at position 3563 of SEQ ID NO: 1885586
uguguuaacugguuagaau

SEQ ID NO: 2353157 - RNA, 19 nt, Artificial Sequence
  Description of Artificial Sequence: Synthetic oligonucleotide
  Antisense strand to SEQ ID NO: 2353156
auucuaaccaguuaacaca

SEQ ID NO: 2353158 - RNA, 19 nt, Artificial Sequence
  Description of Artificial Sequence: Synthetic oligonucleotide
  Sense strand starting at position 3564 of SEQ ID NO: 1885586
guguuaacugguuagaaua

SEQ ID NO: 2353159 - RNA, 19 nt, Artificial Sequence
  Description of Artificial Sequence: Synthetic oligonucleotide
  Antisense strand to SEQ ID NO: 2353158
uauucuaaccaguuaacac

SEQ ID NO: 2353160 - RNA, 19 nt, Artificial Sequence
  Description of Artificial Sequence: Synthetic oligonucleotide
  Sense strand starting at position 3589 of SEQ ID NO: 1885586
uccaguaaaucuucugagu

SEQ ID NO: 2353161 - RNA, 19 nt, Artificial Sequence
  Description of Artificial Sequence: Synthetic oligonucleotide
  Antisense strand to SEQ ID NO: 2353160
acucagaagauuuacugga

SEQ ID NO: 2353162 - RNA, 19 nt, Artificial Sequence
  Description of Artificial Sequence: Synthetic oligonucleotide
  Sense strand starting at position 10 of SEQ ID NO: 1885587
ggcacuauccuagauacug

SEQ ID NO: 2353163 - RNA, 19 nt, Artificial Sequence
  Description of Artificial Sequence: Synthetic oligonucleotide
  Antisense strand to SEQ ID NO: 2353162
caguaucuaggauagugcc

SEQ ID NO: 2353164 - RNA, 19 nt, Artificial Sequence
  Description of Artificial Sequence: Synthetic oligonucleotide
  Sense strand starting at position 16 of SEQ ID NO: 1885587
auccuagauacugggagua

SEQ ID NO: 2353165 - RNA, 19 nt, Artificial Sequence
  Description of Artificial Sequence: Synthetic oligonucleotide
  Antisense strand to SEQ ID NO: 2353164
uacucccaguaucuaggau

SEQ ID NO: 2353166 - RNA, 19 nt, Artificial Sequence
  Description of Artificial Sequence: Synthetic oligonucleotide
  Sense strand starting at position 217 of SEQ ID NO: 1885587
uuagcaaagcuuugaacaa

SEQ ID NO: 2353167 - RNA, 19 nt, Artificial Sequence
  Description of Artificial Sequence: Synthetic oligonucleotide
  Antisense strand to SEQ ID NO: 2353166
uuguucaaagcuuugcuaa

SEQ ID NO: 2353168 - RNA, 19 nt, Artificial Sequence
  Description of Artificial Sequence: Synthetic oligonucleotide
  Sense strand starting at position 484 of SEQ ID NO: 1885587
uugagaauuuacuagauac

SEQ ID NO: 2353169 - RNA, 19 nt, Artificial Sequence
  Description of Artificial Sequence: Synthetic oligonucleotide
  Antisense strand to SEQ ID NO: 2353168
guaucuaguaaauucucaa

SEQ ID NO: 2353170 - RNA, 19 nt, Artificial Sequence
  Description of Artificial Sequence: Synthetic oligonucleotide
  Sense strand starting at position 550 of SEQ ID NO: 1885587
uccuacugacagugaauga

SEQ ID NO: 2353171 - RNA, 19 nt, Artificial Sequence
  Description of Artificial Sequence: Synthetic oligonucleotide
  Antisense strand to SEQ ID NO: 2353170
ucauucacugucaguagga

SEQ ID NO: 2353172 - RNA, 19 nt, Artificial Sequence
  Description of Artificial Sequence: Synthetic oligonucleotide
  Sense strand starting at position 569 of SEQ ID NO: 1885587
aggaaaugucuauaagcuc

SEQ ID NO: 2353173 - RNA, 19 nt, Artificial Sequence
  Description of Artificial Sequence: Synthetic oligonucleotide
  Antisense strand to SEQ ID NO: 2353172
gagcuuauagacauuuccu

SEQ ID NO: 2353174 - RNA, 19 nt, Artificial Sequence
  Description of Artificial Sequence: Synthetic oligonucleotide
  Sense strand starting at position 631 of SEQ ID NO: 1885587
auaggugccgugagucgaa

SEQ ID NO: 2353175 - RNA, 19 nt, Artificial Sequence
  Description of Artificial Sequence: Synthetic oligonucleotide
  Antisense strand to SEQ ID NO: 2353174
uucgacucacggcaccuau

SEQ ID NO: 2353176 - RNA, 19 nt, Artificial Sequence
  Description of Artificial Sequence: Synthetic oligonucleotide
  Sense strand starting at position 638 of SEQ ID NO: 1885587
ccgugagucgaacagaaua

SEQ ID NO: 2353177 - RNA, 19 nt, Artificial Sequence
  Description of Artificial Sequence: Synthetic oligonucleotide
  Antisense strand to SEQ ID NO: 2353176
uauucuguucgacucacgg

SEQ ID NO: 2353178 - RNA, 19 nt, Artificial Sequence
  Description of Artificial Sequence: Synthetic oligonucleotide
  Sense strand starting at position 640 of SEQ ID NO: 1885587
gugagucgaacagaauauu

SEQ ID NO: 2353179 - RNA, 19 nt, Artificial Sequence
  Description of Artificial Sequence: Synthetic oligonucleotide
  Antisense strand to SEQ ID NO: 2353178
aauauucuguucgacucac

SEQ ID NO: 2353180 - RNA, 19 nt, Artificial Sequence
  Description of Artificial Sequence: Synthetic oligonucleotide
  Sense strand starting at position 667 of SEQ ID NO: 1885587
uuagacuuaucaguucuca

SEQ ID NO: 2353181 - RNA, 19 nt, Artificial Sequence
  Description of Artificial Sequence: Synthetic oligonucleotide
  Antisense strand to SEQ ID NO: 2353180
ugagaacugauaagucuaa

SEQ ID NO: 2353182 - RNA, 19 nt, Artificial Sequence
  Description of Artificial Sequence: Synthetic oligonucleotide
  Sense strand starting at position 730 of SEQ ID NO: 1885587
auaggcucauucuuagauu

SEQ ID NO: 2353183 - RNA, 19 nt, Artificial Sequence
  Description of Artificial Sequence: Synthetic oligonucleotide
  Antisense strand to SEQ ID NO: 2353182
aaucuaagaaugagccuau

SEQ ID NO: 2353184 - RNA, 19 nt, Artificial Sequence
  Description of Artificial Sequence: Synthetic oligonucleotide
  Sense strand starting at position 745 of SEQ ID NO: 1885587
gauugugguaauuaagguu

SEQ ID NO: 2353185 - RNA, 19 nt, Artificial Sequence
  Description of Artificial Sequence: Synthetic oligonucleotide
  Antisense strand to SEQ ID NO: 2353184
aaccuuaauuaccacaauc

SEQ ID NO: 2353186 - RNA, 19 nt, Artificial Sequence
  Description of Artificial Sequence: Synthetic oligonucleotide
  Sense strand starting at position 1188 of SEQ ID NO: 1885587
ggcguuugagaccaaccua

SEQ ID NO: 2353187 - RNA, 19 nt, Artificial Sequence
  Description of Artificial Sequence: Synthetic oligonucleotide
  Antisense strand to SEQ ID NO: 2353186
uagguuggucucaaacgcc

SEQ ID NO: 2353188 - RNA, 19 nt, Artificial Sequence
  Description of Artificial Sequence: Synthetic oligonucleotide
  Sense strand starting at position 1480 of SEQ ID NO: 1885587
acagcaguuguauaaggua

SEQ ID NO: 2353189 - RNA, 19 nt, Artificial Sequence
  Description of Artificial Sequence: Synthetic oligonucleotide
  Antisense strand to SEQ ID NO: 2353188
uaccuuauacaacugcugu

SEQ ID NO: 2353190 - RNA, 19 nt, Artificial Sequence
  Description of Artificial Sequence: Synthetic oligonucleotide
  Sense strand starting at position 1485 of SEQ ID NO: 1885587
aguuguauaagguauggua

SEQ ID NO: 2353191 - RNA, 19 nt, Artificial Sequence
  Description of Artificial Sequence: Synthetic oligonucleotide
  Antisense strand to SEQ ID NO: 2353190
uaccauaccuuauacaacu

SEQ ID NO: 2353192 - RNA, 19 nt, Artificial Sequence
  Description of Artificial Sequence: Synthetic oligonucleotide
  Sense strand starting at position 1500 of SEQ ID NO: 1885587
gguacuguuauuugacagu

SEQ ID NO: 2353193 - RNA, 19 nt, Artificial Sequence
  Description of Artificial Sequence: Synthetic oligonucleotide
  Antisense strand to SEQ ID NO: 2353192
acugucaaauaacaguacc

SEQ ID NO: 2353194 - RNA, 19 nt, Artificial Sequence
  Description of Artificial Sequence: Synthetic oligonucleotide
  Sense strand starting at position 1536 of SEQ ID NO: 1885587
gcuccugucaguguuguua

SEQ ID NO: 2353195 - RNA, 19 nt, Artificial Sequence
  Description of Artificial Sequence: Synthetic oligonucleotide
  Antisense strand to SEQ ID NO: 2353194
uaacaacacugacaggagc

SEQ ID NO: 2353196 - RNA, 19 nt, Artificial Sequence
  Description of Artificial Sequence: Synthetic oligonucleotide
  Sense strand starting at position 1647 of SEQ ID NO: 1885587
guguaagcaguuuaaggau

SEQ ID NO: 2353197 - RNA, 19 nt, Artificial Sequence
  Description of Artificial Sequence: Synthetic oligonucleotide
  Antisense strand to SEQ ID NO: 2353196
auccuuaaacugcuuacac

SEQ ID NO: 2353198 - RNA, 19 nt, Artificial Sequence
  Description of Artificial Sequence: Synthetic oligonucleotide
  Sense strand starting at position 1722 of SEQ ID NO: 1885587
ccuggauaggccuauuaau

SEQ ID NO: 2353199 - RNA, 19 nt, Artificial Sequence
  Description of Artificial Sequence: Synthetic oligonucleotide
  Antisense strand to SEQ ID NO: 2353198
auuaauaggccuauccagg

SEQ ID NO: 2353200 - RNA, 19 nt, Artificial Sequence
  Description of Artificial Sequence: Synthetic oligonucleotide
  Sense strand starting at position 1807 of SEQ ID NO: 1885587
cacugaaaugcaggguauu

SEQ ID NO: 2353201 - RNA, 19 nt, Artificial Sequence
  Description of Artificial Sequence: Synthetic oligonucleotide
  Antisense strand to SEQ ID NO: 2353200
aauacccugcauuucagug

SEQ ID NO: 2353202 - RNA, 19 nt, Artificial Sequence
  Description of Artificial Sequence: Synthetic oligonucleotide
  Sense strand starting at position 1808 of SEQ ID NO: 1885587
acugaaaugcaggguauua

SEQ ID NO: 2353203 - RNA, 19 nt, Artificial Sequence
  Description of Artificial Sequence: Synthetic oligonucleotide
  Antisense strand to SEQ ID NO: 2353202
uaauacccugcauuucagu

SEQ ID NO: 2353204 - RNA, 19 nt, Artificial Sequence
  Description of Artificial Sequence: Synthetic oligonucleotide
  Sense strand starting at position 1869 of SEQ ID NO: 1885587
uugcucugagcucaagaaa

SEQ ID NO: 2353205 - RNA, 19 nt, Artificial Sequence
  Description of Artificial Sequence: Synthetic oligonucleotide
  Antisense strand to SEQ ID NO: 2353204
uuucuugagcucagagcaa

SEQ ID NO: 2353206 - RNA, 19 nt, Artificial Sequence
  Description of Artificial Sequence: Synthetic oligonucleotide
  Sense strand starting at position 2019 of SEQ ID NO: 1885587
guuguuccacugggaacaa

SEQ ID NO: 2353207 - RNA, 19 nt, Artificial Sequence
  Description of Artificial Sequence: Synthetic oligonucleotide
  Antisense strand to SEQ ID NO: 2353206
uuguucccaguggaacaac

SEQ ID NO: 2353208 - RNA, 19 nt, Artificial Sequence
  Description of Artificial Sequence: Synthetic oligonucleotide
  Sense strand starting at position 2218 of SEQ ID NO: 1885587
gggaguguuacacaauggu

SEQ ID NO: 2353209 - RNA, 19 nt, Artificial Sequence
  Description of Artificial Sequence: Synthetic oligonucleotide
  Antisense strand to SEQ ID NO: 2353208
accauuguguaacacuccc

SEQ ID NO: 2353210 - RNA, 19 nt, Artificial Sequence
  Description of Artificial Sequence: Synthetic oligonucleotide
  Sense strand starting at position 2336 of SEQ ID NO: 1885587
guaccugagccagaaugau

SEQ ID NO: 2353211 - RNA, 19 nt, Artificial Sequence
  Description of Artificial Sequence: Synthetic oligonucleotide
  Antisense strand to SEQ ID NO: 2353210
aucauucuggcucagguac

SEQ ID NO: 2353212 - RNA, 19 nt, Artificial Sequence
  Description of Artificial Sequence: Synthetic oligonucleotide
  Sense strand starting at position 2416 of SEQ ID NO: 1885587
ugccauuuguagcucuaca

SEQ ID NO: 2353213 - RNA, 19 nt, Artificial Sequence
  Description of Artificial Sequence: Synthetic oligonucleotide
  Antisense strand to SEQ ID NO: 2353212
uguagagcuacaaauggca

SEQ ID NO: 2353214 - RNA, 19 nt, Artificial Sequence
  Description of Artificial Sequence: Synthetic oligonucleotide
  Sense strand starting at position 2429 of SEQ ID NO: 1885587
ucuacagugguuuauagua

SEQ ID NO: 2353215 - RNA, 19 nt, Artificial Sequence
  Description of Artificial Sequence: Synthetic oligonucleotide
  Antisense strand to SEQ ID NO: 2353214
uacuauaaaccacuguaga

SEQ ID NO: 2353216 - RNA, 19 nt, Artificial Sequence
  Description of Artificial Sequence: Synthetic oligonucleotide
  Sense strand starting at position 2470 of SEQ ID NO: 1885587
cccucagugccuguuguua

SEQ ID NO: 2353217 - RNA, 19 nt, Artificial Sequence
  Description of Artificial Sequence: Synthetic oligonucleotide
  Antisense strand to SEQ ID NO: 2353216
uaacaacaggcacugaggg

SEQ ID NO: 2353218 - RNA, 19 nt, Artificial Sequence
  Description of Artificial Sequence: Synthetic oligonucleotide
  Sense strand starting at position 2512 of SEQ ID NO: 1885587
aguugagcucugcauuucu

SEQ ID NO: 2353219 - RNA, 19 nt, Artificial Sequence
  Description of Artificial Sequence: Synthetic oligonucleotide
  Antisense strand to SEQ ID NO: 2353218
agaaaugcagagcucaacu

SEQ ID NO: 2353220 - RNA, 19 nt, Artificial Sequence
  Description of Artificial Sequence: Synthetic oligonucleotide
  Sense strand starting at position 2541 of SEQ ID NO: 1885587
gagagcuguguuggagaga

SEQ ID NO: 2353221 - RNA, 19 nt, Artificial Sequence
  Description of Artificial Sequence: Synthetic oligonucleotide
  Antisense strand to SEQ ID NO: 2353220
ucucuccaacacagcucuc

SEQ ID NO: 2353222 - RNA, 19 nt, Artificial Sequence
  Description of Artificial Sequence: Synthetic oligonucleotide
  Sense strand starting at position 2725 of SEQ ID NO: 1885587
uugcucagccauuaaagaa

SEQ ID NO: 2353223 - RNA, 19 nt, Artificial Sequence
  Description of Artificial Sequence: Synthetic oligonucleotide
  Antisense strand to SEQ ID NO: 2353222
uucuuuaauggcugagcaa

SEQ ID NO: 2353224 - RNA, 19 nt, Artificial Sequence
  Description of Artificial Sequence: Synthetic oligonucleotide
  Sense strand starting at position 2971 of SEQ ID NO: 1885587
uuaacagguagauguugaa

SEQ ID NO: 2353225 - RNA, 19 nt, Artificial Sequence
  Description of Artificial Sequence: Synthetic oligonucleotide
  Antisense strand to SEQ ID NO: 2353224
uucaacaucuaccuguuaa

SEQ ID NO: 2353226 - RNA, 19 nt, Artificial Sequence
  Description of Artificial Sequence: Synthetic oligonucleotide
  Sense strand starting at position 3006 of SEQ ID NO: 1885587
cccuuauggcagggaacau

SEQ ID NO: 2353227 - RNA, 19 nt, Artificial Sequence
  Description of Artificial Sequence: Synthetic oligonucleotide
  Antisense strand to SEQ ID NO: 2353226
auguucccugccauaaggg

SEQ ID NO: 2353228 - RNA, 19 nt, Artificial Sequence
  Description of Artificial Sequence: Synthetic oligonucleotide
  Sense strand starting at position 3173 of SEQ ID NO: 1885587
cagggagaaugucuccuuu

SEQ ID NO: 2353229 - RNA, 19 nt, Artificial Sequence
  Description of Artificial Sequence: Synthetic oligonucleotide
  Antisense strand to SEQ ID NO: 2353228
aaaggagacauucucccug

SEQ ID NO: 2353230 - RNA, 19 nt, Artificial Sequence
  Description of Artificial Sequence: Synthetic oligonucleotide
  Sense strand starting at position 3349 of SEQ ID NO: 1885587
augucuauagcauaucuga

SEQ ID NO: 2353231 - RNA, 19 nt, Artificial Sequence
  Description of Artificial Sequence: Synthetic oligonucleotide
  Antisense strand to SEQ ID NO: 2353230
ucagauaugcuauagacau

SEQ ID NO: 2353232 - RNA, 19 nt, Artificial Sequence
  Description of Artificial Sequence: Synthetic oligonucleotide
  Sense strand starting at position 3377 of SEQ ID NO: 1885587
gggauugucguuuaaauga

SEQ ID NO: 2353233 - RNA, 19 nt, Artificial Sequence
  Description of Artificial Sequence: Synthetic oligonucleotide
  Antisense strand to SEQ ID NO: 2353232
ucauuuaaacgacaauccc

SEQ ID NO: 2353234 - RNA, 19 nt, Artificial Sequence
  Description of Artificial Sequence: Synthetic oligonucleotide
  Sense strand starting at position 3440 of SEQ ID NO: 1885587
gguuauauuagcuagucag

SEQ ID NO: 2353235 - RNA, 19 nt, Artificial Sequence
  Description of Artificial Sequence: Synthetic oligonucleotide
  Antisense strand to SEQ ID NO: 2353234
cugacuagcuaauauaacc

SEQ ID NO: 2353236 - RNA, 19 nt, Artificial Sequence
  Description of Artificial Sequence: Synthetic oligonucleotide
  Sense strand starting at position 3460 of SEQ ID NO: 1885587
cuccaacuugggcaauuau

SEQ ID NO: 2353237 - RNA, 19 nt, Artificial Sequence
  Description of Artificial Sequence: Synthetic oligonucleotide
  Antisense strand to SEQ ID NO: 2353236
auaauugcccaaguuggag

SEQ ID NO: 2353238 - RNA, 19 nt, Artificial Sequence
  Description of Artificial Sequence: Synthetic oligonucleotide
  Sense strand starting at position 3625 of SEQ ID NO: 1885587
uuagguaaggacugguauu

SEQ ID NO: 2353239 - RNA, 19 nt, Artificial Sequence
  Description of Artificial Sequence: Synthetic oligonucleotide
  Antisense strand to SEQ ID NO: 2353238
aauaccaguccuuaccuaa

SEQ ID NO: 2353240 - RNA, 19 nt, Artificial Sequence
  Description of Artificial Sequence: Synthetic oligonucleotide
  Sense strand starting at position 3642 of SEQ ID NO: 1885587
uuccauguucuguaaauaa

SEQ ID NO: 2353241 - RNA, 19 nt, Artificial Sequence
  Description of Artificial Sequence: Synthetic oligonucleotide
  Antisense strand to SEQ ID NO: 2353240
uuauuuacagaacauggaa

SEQ ID NO: 2353242 - RNA, 19 nt, Artificial Sequence
  Description of Artificial Sequence: Synthetic oligonucleotide
  Sense strand starting at position 63 of SEQ ID NO: 1885588
cagugaguguucccagaga

SEQ ID NO: 2353243 - RNA, 19 nt, Artificial Sequence
  Description of Artificial Sequence: Synthetic oligonucleotide
  Antisense strand to SEQ ID NO: 2353242
ucucugggaacacucacug

SEQ ID NO: 2353244 - RNA, 19 nt, Artificial Sequence
  Description of Artificial Sequence: Synthetic oligonucleotide
  Sense strand starting at position 68 of SEQ ID NO: 1885588
aguguucccagagagugaa

SEQ ID NO: 2353245 - RNA, 19 nt, Artificial Sequence
  Description of Artificial Sequence: Synthetic oligonucleotide
  Antisense strand to SEQ ID NO: 2353244
uucacucucugggaacacu

SEQ ID NO: 2353246 - RNA, 19 nt, Artificial Sequence
  Description of Artificial Sequence: Synthetic oligonucleotide
  Sense strand starting at position 235 of SEQ ID NO: 1885588
guaugaauaccuggaggca

SEQ ID NO: 2353247 - RNA, 19 nt, Artificial Sequence
  Description of Artificial Sequence: Synthetic oligonucleotide
  Antisense strand to SEQ ID NO: 2353246
ugccuccagguauucauac

SEQ ID NO: 2353248 - RNA, 19 nt, Artificial Sequence
  Description of Artificial Sequence: Synthetic oligonucleotide
  Sense strand starting at position 514 of SEQ ID NO: 1885588
ucacaugauugccuuuaga

SEQ ID NO: 2353249 - RNA, 19 nt, Artificial Sequence
  Description of Artificial Sequence: Synthetic oligonucleotide
  Antisense strand to SEQ ID NO: 2353248
ucuaaaggcaaucauguga

SEQ ID NO: 2353250 - RNA, 19 nt, Artificial Sequence
  Description of Artificial Sequence: Synthetic oligonucleotide
  Sense strand starting at position 528 of SEQ ID NO: 1885588
uuagaagccuggcuaacau

SEQ ID NO: 2353251 - RNA, 19 nt, Artificial Sequence
  Description of Artificial Sequence: Synthetic oligonucleotide
  Antisense strand to SEQ ID NO: 2353250
auguuagccaggcuucuaa

SEQ ID NO: 2353252 - RNA, 19 nt, Artificial Sequence
  Description of Artificial Sequence: Synthetic oligonucleotide
  Sense strand starting at position 637 of SEQ ID NO: 1885588
ccacaauagcgugauguaa

SEQ ID NO: 2353253 - RNA, 19 nt, Artificial Sequence
  Description of Artificial Sequence: Synthetic oligonucleotide
  Antisense strand to SEQ ID NO: 2353252
uuacaucacgcuauugugg

SEQ ID NO: 2353254 - RNA, 19 nt, Artificial Sequence
  Description of Artificial Sequence: Synthetic oligonucleotide
  Sense strand starting at position 865 of SEQ ID NO: 1885588
uguggcuuuccaugagaga

SEQ ID NO: 2353255 - RNA, 19 nt, Artificial Sequence
  Description of Artificial Sequence: Synthetic oligonucleotide
  Antisense strand to SEQ ID NO: 2353254
ucucucauggaaagccaca

SEQ ID NO: 2353256 - RNA, 19 nt, Artificial Sequence
  Description of Artificial Sequence: Synthetic oligonucleotide
  Sense strand starting at position 866 of SEQ ID NO: 1885588
guggcuuuccaugagagau

SEQ ID NO: 2353257 - RNA, 19 nt, Artificial Sequence
  Description of Artificial Sequence: Synthetic oligonucleotide
  Antisense strand to SEQ ID NO: 2353256
aucucucauggaaagccac

SEQ ID NO: 2353258 - RNA, 19 nt, Artificial Sequence
  Description of Artificial Sequence: Synthetic oligonucleotide
  Sense strand starting at position 898 of SEQ ID NO: 1885588
gggaucauuucccaaaugu

SEQ ID NO: 2353259 - RNA, 19 nt, Artificial Sequence
  Description of Artificial Sequence: Synthetic oligonucleotide
  Antisense strand to SEQ ID NO: 2353258
acauuugggaaaugauccc

SEQ ID NO: 2353260 - RNA, 19 nt, Artificial Sequence
  Description of Artificial Sequence: Synthetic oligonucleotide
  Sense strand starting at position 1071 of SEQ ID NO: 1885588
auuguugagcccuaacuga

SEQ ID NO: 2353261 - RNA, 19 nt, Artificial Sequence
  Description of Artificial Sequence: Synthetic oligonucleotide
  Antisense strand to SEQ ID NO: 2353260
ucaguuagggcucaacaau

SEQ ID NO: 2353262 - RNA, 19 nt, Artificial Sequence
  Description of Artificial Sequence: Synthetic oligonucleotide
  Sense strand starting at position 1230 of SEQ ID NO: 1885588
uuucuccagccuuaugaga

SEQ ID NO: 2353263 - RNA, 19 nt, Artificial Sequence
  Description of Artificial Sequence: Synthetic oligonucleotide
  Antisense strand to SEQ ID NO: 2353262
ucucauaaggcuggagaaa

SEQ ID NO: 2353264 - RNA, 19 nt, Artificial Sequence
  Description of Artificial Sequence: Synthetic oligonucleotide
  Sense strand starting at position 1238 of SEQ ID NO: 1885588
gccuuaugagaucaggagu

SEQ ID NO: 2353265 - RNA, 19 nt, Artificial Sequence
  Description of Artificial Sequence: Synthetic oligonucleotide
  Antisense strand to SEQ ID NO: 2353264
acuccugaucucauaaggc

SEQ ID NO: 2353266 - RNA, 19 nt, Artificial Sequence
  Description of Artificial Sequence: Synthetic oligonucleotide
  Sense strand starting at position 1251 of SEQ ID NO: 1885588
aggaguucuuccuugaaga

SEQ ID NO: 2353267 - RNA, 19 nt, Artificial Sequence
  Description of Artificial Sequence: Synthetic oligonucleotide
  Antisense strand to SEQ ID NO: 2353266
ucuucaaggaagaacuccu

SEQ ID NO: 2353268 - RNA, 19 nt, Artificial Sequence
  Description of Artificial Sequence: Synthetic oligonucleotide
  Sense strand starting at position 1252 of SEQ ID NO: 1885588
ggaguucuuccuugaagac

SEQ ID NO: 2353269 - RNA, 19 nt, Artificial Sequence
  Description of Artificial Sequence: Synthetic oligonucleotide
  Antisense strand to SEQ ID NO: 2353268
gucuucaaggaagaacucc

SEQ ID NO: 2353270 - RNA, 19 nt, Artificial Sequence
  Description of Artificial Sequence: Synthetic oligonucleotide
  Sense strand starting at position 1253 of SEQ ID NO: 1885588
gaguucuuccuugaagacu

SEQ ID NO: 2353271 - RNA, 19 nt, Artificial Sequence
  Description of Artificial Sequence: Synthetic oligonucleotide
  Antisense strand to SEQ ID NO: 2353270
agucuucaaggaagaacuc

SEQ ID NO: 2353272 - RNA, 19 nt, Artificial Sequence
  Description of Artificial Sequence: Synthetic oligonucleotide
  Sense strand starting at position 1306 of SEQ ID NO: 1885588
gguggcuuuccguuguacu

SEQ ID NO: 2353273 - RNA, 19 nt, Artificial Sequence
  Description of Artificial Sequence: Synthetic oligonucleotide
  Antisense strand to SEQ ID NO: 2353272
aguacaacggaaagccacc

SEQ ID NO: 2353274 - RNA, 19 nt, Artificial Sequence
  Description of Artificial Sequence: Synthetic oligonucleotide
  Sense strand starting at position 1370 of SEQ ID NO: 1885588
ggauuacuauugccugaag

SEQ ID NO: 2353275 - RNA, 19 nt, Artificial Sequence
  Description of Artificial Sequence: Synthetic oligonucleotide
  Antisense strand to SEQ ID NO: 2353274
cuucaggcaauaguaaucc

SEQ ID NO: 2353276 - RNA, 19 nt, Artificial Sequence
  Description of Artificial Sequence: Synthetic oligonucleotide
  Sense strand starting at position 1472 of SEQ ID NO: 1885588
gugaguugaguguaaagag

SEQ ID NO: 2353277 - RNA, 19 nt, Artificial Sequence
  Description of Artificial Sequence: Synthetic oligonucleotide
  Antisense strand to SEQ ID NO: 2353276
cucuuuacacucaacucac

SEQ ID NO: 2353278 - RNA, 19 nt, Artificial Sequence
  Description of Artificial Sequence: Synthetic oligonucleotide
  Sense strand starting at position 1480 of SEQ ID NO: 1885588
aguguaaagagguggaaau

SEQ ID NO: 2353279 - RNA, 19 nt, Artificial Sequence
  Description of Artificial Sequence: Synthetic oligonucleotide
  Antisense strand to SEQ ID NO: 2353278
auuuccaccucuuuacacu

SEQ ID NO: 2353280 - RNA, 19 nt, Artificial Sequence
  Description of Artificial Sequence: Synthetic oligonucleotide
  Sense strand starting at position 1780 of SEQ ID NO: 1885588
guuuguguacugguguuua

SEQ ID NO: 2353281 - RNA, 19 nt, Artificial Sequence
  Description of Artificial Sequence: Synthetic oligonucleotide
  Antisense strand to SEQ ID NO: 2353280
uaaacaccaguacacaaac

SEQ ID NO: 2353282 - RNA, 19 nt, Artificial Sequence
  Description of Artificial Sequence: Synthetic oligonucleotide
  Sense strand starting at position 1788 of SEQ ID NO: 1885588
acugguguuuacccuggaa

SEQ ID NO: 2353283 - RNA, 19 nt, Artificial Sequence
  Description of Artificial Sequence: Synthetic oligonucleotide
  Antisense strand to SEQ ID NO: 2353282
uuccaggguaaacaccagu

SEQ ID NO: 2353284 - RNA, 19 nt, Artificial Sequence
  Description of Artificial Sequence: Synthetic oligonucleotide
  Sense strand starting at position 2625 of SEQ ID NO: 1885588
ggugcuucccugggaaaug

SEQ ID NO: 2353285 - RNA, 19 nt, Artificial Sequence
  Description of Artificial Sequence: Synthetic oligonucleotide
  Antisense strand to SEQ ID NO: 2353284
cauuucccagggaagcacc

SEQ ID NO: 2353286 - RNA, 19 nt, Artificial Sequence
  Description of Artificial Sequence: Synthetic oligonucleotide
  Sense strand starting at position 2818 of SEQ ID NO: 1885588
ugaaaugaaucgcuccuga

SEQ ID NO: 2353287 - RNA, 19 nt, Artificial Sequence
  Description of Artificial Sequence: Synthetic oligonucleotide
  Antisense strand to SEQ ID NO: 2353286
ucaggagcgauucauuuca

SEQ ID NO: 2353288 - RNA, 19 nt, Artificial Sequence
  Description of Artificial Sequence: Synthetic oligonucleotide
  Sense strand starting at position 3112 of SEQ ID NO: 1885588
agcugagaaguuugggaca

SEQ ID NO: 2353289 - RNA, 19 nt, Artificial Sequence
  Description of Artificial Sequence: Synthetic oligonucleotide
  Antisense strand to SEQ ID NO: 2353288
ugucccaaacuucucagcu

SEQ ID NO: 2353290 - RNA, 19 nt, Artificial Sequence
  Description of Artificial Sequence: Synthetic oligonucleotide
  Sense strand starting at position 3125 of SEQ ID NO: 1885588
gggacauuccugcagagua

SEQ ID NO: 2353291 - RNA, 19 nt, Artificial Sequence
  Description of Artificial Sequence: Synthetic oligonucleotide
  Antisense strand to SEQ ID NO: 2353290
uacucugcaggaauguccc

SEQ ID NO: 2353292 - RNA, 19 nt, Artificial Sequence
  Description of Artificial Sequence: Synthetic oligonucleotide
  Sense strand starting at position 3127 of SEQ ID NO: 1885588
gacauuccugcagaguaac

SEQ ID NO: 2353293 - RNA, 19 nt, Artificial Sequence
  Description of Artificial Sequence: Synthetic oligonucleotide
  Antisense strand to SEQ ID NO: 2353292
guuacucugcaggaauguc

SEQ ID NO: 2353294 - RNA, 19 nt, Artificial Sequence
  Description of Artificial Sequence: Synthetic oligonucleotide
  Sense strand starting at position 3254 of SEQ ID NO: 1885588
ggguguccuagagguugaa

SEQ ID NO: 2353295 - RNA, 19 nt, Artificial Sequence
  Description of Artificial Sequence: Synthetic oligonucleotide
  Antisense strand to SEQ ID NO: 2353294
uucaaccucuaggacaccc

SEQ ID NO: 2353296 - RNA, 19 nt, Artificial Sequence
  Description of Artificial Sequence: Synthetic oligonucleotide
  Sense strand starting at position 3399 of SEQ ID NO: 1885588
cgcagcuuugcacugcaaa

SEQ ID NO: 2353297 - RNA, 19 nt, Artificial Sequence
  Description of Artificial Sequence: Synthetic oligonucleotide
  Antisense strand to SEQ ID NO: 2353296
uuugcagugcaaagcugcg

SEQ ID NO: 2353298 - RNA, 19 nt, Artificial Sequence
  Description of Artificial Sequence: Synthetic oligonucleotide
  Sense strand starting at position 3412 of SEQ ID NO: 1885588
ugcaaaugcccaggauaga

SEQ ID NO: 2353299 - RNA, 19 nt, Artificial Sequence
  Description of Artificial Sequence: Synthetic oligonucleotide
  Antisense strand to SEQ ID NO: 2353298
ucuauccugggcauuugca

SEQ ID NO: 2353300 - RNA, 19 nt, Artificial Sequence
  Description of Artificial Sequence: Synthetic oligonucleotide
  Sense strand starting at position 3413 of SEQ ID NO: 1885588
gcaaaugcccaggauagau

SEQ ID NO: 2353301 - RNA, 19 nt, Artificial Sequence
  Description of Artificial Sequence: Synthetic oligonucleotide
  Antisense strand to SEQ ID NO: 2353300
aucuauccugggcauuugc

SEQ ID NO: 2353302 - RNA, 19 nt, Artificial Sequence
  Description of Artificial Sequence: Synthetic oligonucleotide
  Sense strand starting at position 3421 of SEQ ID NO: 1885588
ccaggauagaucugggucu

SEQ ID NO: 2353303 - RNA, 19 nt, Artificial Sequence
  Description of Artificial Sequence: Synthetic oligonucleotide
  Antisense strand to SEQ ID NO: 2353302
agacccagaucuauccugg

SEQ ID NO: 2353304 - RNA, 19 nt, Artificial Sequence
  Description of Artificial Sequence: Synthetic oligonucleotide
  Sense strand starting at position 3423 of SEQ ID NO: 1885588
aggauagaucugggucuga

SEQ ID NO: 2353305 - RNA, 19 nt, Artificial Sequence
  Description of Artificial Sequence: Synthetic oligonucleotide
  Antisense strand to SEQ ID NO: 2353304
ucagacccagaucuauccu

SEQ ID NO: 2353306 - RNA, 19 nt, Artificial Sequence
  Description of Artificial Sequence: Synthetic oligonucleotide
  Sense strand starting at position 3523 of SEQ ID NO: 1885588
uguccaaagccugagaugu

SEQ ID NO: 2353307 - RNA, 19 nt, Artificial Sequence
  Description of Artificial Sequence: Synthetic oligonucleotide
  Antisense strand to SEQ ID NO: 2353306
acaucucaggcuuuggaca

SEQ ID NO: 2353308 - RNA, 19 nt, Artificial Sequence
  Description of Artificial Sequence: Synthetic oligonucleotide
  Sense strand starting at position 3607 of SEQ ID NO: 1885588
acccuuauuugucuccgga

SEQ ID NO: 2353309 - RNA, 19 nt, Artificial Sequence
  Description of Artificial Sequence: Synthetic oligonucleotide
  Antisense strand to SEQ ID NO: 2353308
uccggagacaaauaagggu

SEQ ID NO: 2353310 - RNA, 19 nt, Artificial Sequence
  Description of Artificial Sequence: Synthetic oligonucleotide
  Sense strand starting at position 3634 of SEQ ID NO: 1885588
gggaugacgucaguaggaa

SEQ ID NO: 2353311 - RNA, 19 nt, Artificial Sequence
  Description of Artificial Sequence: Synthetic oligonucleotide
  Antisense strand to SEQ ID NO: 2353310
uuccuacugacgucauccc

SEQ ID NO: 2353312 - RNA, 19 nt, Artificial Sequence
  Description of Artificial Sequence: Synthetic oligonucleotide
  Sense strand starting at position 3688 of SEQ ID NO: 1885588
gggaaagcuguuugaauua

SEQ ID NO: 2353313 - RNA, 19 nt, Artificial Sequence
  Description of Artificial Sequence: Synthetic oligonucleotide
  Antisense strand to SEQ ID NO: 2353312
uaauucaaacagcuuuccc

SEQ ID NO: 2353314 - RNA, 19 nt, Artificial Sequence
  Description of Artificial Sequence: Synthetic oligonucleotide
  Sense strand starting at position 3787 of SEQ ID NO: 1885588
agacuuuaagccuggaagu

SEQ ID NO: 2353315 - RNA, 19 nt, Artificial Sequence
  Description of Artificial Sequence: Synthetic oligonucleotide
  Antisense strand to SEQ ID NO: 2353314
acuuccaggcuuaaagucu

SEQ ID NO: 2353316 - RNA, 19 nt, Artificial Sequence
  Description of Artificial Sequence: Synthetic oligonucleotide
  Sense strand starting at position 3788 of SEQ ID NO: 1885588
gacuuuaagccuggaagug

SEQ ID NO: 2353317 - RNA, 19 nt, Artificial Sequence
  Description of Artificial Sequence: Synthetic oligonucleotide
  Antisense strand to SEQ ID NO: 2353316
cacuuccaggcuuaaaguc

SEQ ID NO: 2353318 - RNA, 19 nt, Artificial Sequence
  Description of Artificial Sequence: Synthetic oligonucleotide
  Sense strand starting at position 3789 of SEQ ID NO: 1885588
acuuuaagccuggaagugu

SEQ ID NO: 2353319 - RNA, 19 nt, Artificial Sequence
  Description of Artificial Sequence: Synthetic oligonucleotide
  Antisense strand to SEQ ID NO: 2353318
acacuuccaggcuuaaagu

SEQ ID NO: 2353320 - RNA, 19 nt, Artificial Sequence
  Description of Artificial Sequence: Synthetic oligonucleotide
  Sense strand starting at position 3834 of SEQ ID NO: 1885588
gguccuaauuccuuuauug

SEQ ID NO: 2353321 - RNA, 19 nt, Artificial Sequence
  Description of Artificial Sequence: Synthetic oligonucleotide
  Antisense strand to SEQ ID NO: 2353320
caauaaaggaauuaggacc

SEQ ID NO: 2353322 - RNA, 19 nt, Artificial Sequence
  Description of Artificial Sequence: Synthetic oligonucleotide
  Sense strand starting at position 9 of SEQ ID NO: 1885589
acuagacuucccuggcuga

SEQ ID NO: 2353323 - RNA, 19 nt, Artificial Sequence
  Description of Artificial Sequence: Synthetic oligonucleotide
  Antisense strand to SEQ ID NO: 2353322
ucagccagggaagucuagu

SEQ ID NO: 2353324 - RNA, 19 nt, Artificial Sequence
  Description of Artificial Sequence: Synthetic oligonucleotide
  Sense strand starting at position 264 of SEQ ID NO: 1885589
cugcccaauguuugggaga

SEQ ID NO: 2353325 - RNA, 19 nt, Artificial Sequence
  Description of Artificial Sequence: Synthetic oligonucleotide
  Antisense strand to SEQ ID NO: 2353324
ucucccaaacauugggcag

SEQ ID NO: 2353326 - RNA, 19 nt, Artificial Sequence
  Description of Artificial Sequence: Synthetic oligonucleotide
  Sense strand starting at position 615 of SEQ ID NO: 1885589
guucucuggcaaugaauga

SEQ ID NO: 2353327 - RNA, 19 nt, Artificial Sequence
  Description of Artificial Sequence: Synthetic oligonucleotide
  Antisense strand to SEQ ID NO: 2353326
ucauucauugccagagaac

SEQ ID NO: 2353328 - RNA, 19 nt, Artificial Sequence
  Description of Artificial Sequence: Synthetic oligonucleotide
  Sense strand starting at position 772 of SEQ ID NO: 1885589
agugaagagucaucuccaa

SEQ ID NO: 2353329 - RNA, 19 nt, Artificial Sequence
  Description of Artificial Sequence: Synthetic oligonucleotide
  Antisense strand to SEQ ID NO: 2353328
uuggagaugacucuucacu

SEQ ID NO: 2353330 - RNA, 19 nt, Artificial Sequence
  Description of Artificial Sequence: Synthetic oligonucleotide
  Sense strand starting at position 842 of SEQ ID NO: 1885589
accauccuggcauaguuaa

SEQ ID NO: 2353331 - RNA, 19 nt, Artificial Sequence
  Description of Artificial Sequence: Synthetic oligonucleotide
  Antisense strand to SEQ ID NO: 2353330
uuaacuaugccaggauggu

SEQ ID NO: 2353332 - RNA, 19 nt, Artificial Sequence
  Description of Artificial Sequence: Synthetic oligonucleotide
  Sense strand starting at position 866 of SEQ ID NO: 1885589
ucuccuucugacugagaag

SEQ ID NO: 2353333 - RNA, 19 nt, Artificial Sequence
  Description of Artificial Sequence: Synthetic oligonucleotide
  Antisense strand to SEQ ID NO: 2353332
cuucucagucagaaggaga

SEQ ID NO: 2353334 - RNA, 19 nt, Artificial Sequence
  Description of Artificial Sequence: Synthetic oligonucleotide
  Sense strand starting at position 880 of SEQ ID NO: 1885589
agaagcugaaagugauauu

SEQ ID NO: 2353335 - RNA, 19 nt, Artificial Sequence
  Description of Artificial Sequence: Synthetic oligonucleotide
  Antisense strand to SEQ ID NO: 2353334
aauaucacuuucagcuucu

SEQ ID NO: 2353336 - RNA, 19 nt, Artificial Sequence
  Description of Artificial Sequence: Synthetic oligonucleotide
  Sense strand starting at position 960 of SEQ ID NO: 1885589
gcaugagcuggucauuaca

SEQ ID NO: 2353337 - RNA, 19 nt, Artificial Sequence
  Description of Artificial Sequence: Synthetic oligonucleotide
  Antisense strand to SEQ ID NO: 2353336
uguaaugaccagcucaugc

SEQ ID NO: 2353338 - RNA, 19 nt, Artificial Sequence
  Description of Artificial Sequence: Synthetic oligonucleotide
  Sense strand starting at position 987 of SEQ ID NO: 1885589
uugugaaccaguugugaaa

SEQ ID NO: 2353339 - RNA, 19 nt, Artificial Sequence
  Description of Artificial Sequence: Synthetic oligonucleotide
  Antisense strand to SEQ ID NO: 2353338
uuucacaacugguucacaa

SEQ ID NO: 2353340 - RNA, 19 nt, Artificial Sequence
  Description of Artificial Sequence: Synthetic oligonucleotide
  Sense strand starting at position 998 of SEQ ID NO: 1885589
uugugaaacccuugguaac

SEQ ID NO: 2353341 - RNA, 19 nt, Artificial Sequence
  Description of Artificial Sequence: Synthetic oligonucleotide
  Antisense strand to SEQ ID NO: 2353340
guuaccaaggguuucacaa

SEQ ID NO: 2353342 - RNA, 19 nt, Artificial Sequence
  Description of Artificial Sequence: Synthetic oligonucleotide
  Sense strand starting at position 1049 of SEQ ID NO: 1885589
acagaaauuggccaaugcu

SEQ ID NO: 2353343 - RNA, 19 nt, Artificial Sequence
  Description of Artificial Sequence: Synthetic oligonucleotide
  Antisense strand to SEQ ID NO: 2353342
agcauuggccaauuucugu

SEQ ID NO: 2353344 - RNA, 19 nt, Artificial Sequence
  Description of Artificial Sequence: Synthetic oligonucleotide
  Sense strand starting at position 1057 of SEQ ID NO: 1885589
uggccaaugcugcaaauca

SEQ ID NO: 2353345 - RNA, 19 nt, Artificial Sequence
  Description of Artificial Sequence: Synthetic oligonucleotide
  Antisense strand to SEQ ID NO: 2353344
ugauuugcagcauuggcca

SEQ ID NO: 2353346 - RNA, 19 nt, Artificial Sequence
  Description of Artificial Sequence: Synthetic oligonucleotide
  Sense strand starting at position 1171 of SEQ ID NO: 1885589
agcagaguugaggauguuu

SEQ ID NO: 2353347 - RNA, 19 nt, Artificial Sequence
  Description of Artificial Sequence: Synthetic oligonucleotide
  Antisense strand to SEQ ID NO: 2353346
aaacauccucaacucugcu

SEQ ID NO: 2353348 - RNA, 19 nt, Artificial Sequence
  Description of Artificial Sequence: Synthetic oligonucleotide
  Sense strand starting at position 1440 of SEQ ID NO: 1885589
gaggcagcccaaugaucaa

SEQ ID NO: 2353349 - RNA, 19 nt, Artificial Sequence
  Description of Artificial Sequence: Synthetic oligonucleotide
  Antisense strand to SEQ ID NO: 2353348
uugaucauugggcugccuc

SEQ ID NO: 2353350 - RNA, 19 nt, Artificial Sequence
  Description of Artificial Sequence: Synthetic oligonucleotide
  Sense strand starting at position 1453 of SEQ ID NO: 1885589
gaucaaaggugucuuccuu

SEQ ID NO: 2353351 - RNA, 19 nt, Artificial Sequence
  Description of Artificial Sequence: Synthetic oligonucleotide
  Antisense strand to SEQ ID NO: 2353350
aaggaagacaccuuugauc

SEQ ID NO: 2353352 - RNA, 19 nt, Artificial Sequence
  Description of Artificial Sequence: Synthetic oligonucleotide
  Sense strand starting at position 1610 of SEQ ID NO: 1885589
ugagaaggauaauaaauga

SEQ ID NO: 2353353 - RNA, 19 nt, Artificial Sequence
  Description of Artificial Sequence: Synthetic oligonucleotide
  Antisense strand to SEQ ID NO: 2353352
ucauuuauuauccuucuca

SEQ ID NO: 2353354 - RNA, 19 nt, Artificial Sequence
  Description of Artificial Sequence: Synthetic oligonucleotide
  Sense strand starting at position 1684 of SEQ ID NO: 1885589
ggaagaaagugcuucuaga

SEQ ID NO: 2353355 - RNA, 19 nt, Artificial Sequence
  Description of Artificial Sequence: Synthetic oligonucleotide
  Antisense strand to SEQ ID NO: 2353354
ucuagaagcacuuucuucc

SEQ ID NO: 2353356 - RNA, 19 nt, Artificial Sequence
  Description of Artificial Sequence: Synthetic oligonucleotide
  Sense strand starting at position 1886 of SEQ ID NO: 1885589
acugaacucugagugggau

SEQ ID NO: 2353357 - RNA, 19 nt, Artificial Sequence
  Description of Artificial Sequence: Synthetic oligonucleotide
  Antisense strand to SEQ ID NO: 2353356
aucccacucagaguucagu

SEQ ID NO: 2353358 - RNA, 19 nt, Artificial Sequence
  Description of Artificial Sequence: Synthetic oligonucleotide
  Sense strand starting at position 1889 of SEQ ID NO: 1885589
gaacucugagugggaucuu

SEQ ID NO: 2353359 - RNA, 19 nt, Artificial Sequence
  Description of Artificial Sequence: Synthetic oligonucleotide
  Antisense strand to SEQ ID NO: 2353358
aagaucccacucagaguuc

SEQ ID NO: 2353360 - RNA, 19 nt, Artificial Sequence
  Description of Artificial Sequence: Synthetic oligonucleotide
  Sense strand starting at position 2093 of SEQ ID NO: 1885589
ccaggaugccauugcacaa

SEQ ID NO: 2353361 - RNA, 19 nt, Artificial Sequence
  Description of Artificial Sequence: Synthetic oligonucleotide
  Antisense strand to SEQ ID NO: 2353360
uugugcaauggcauccugg

SEQ ID NO: 2353362 - RNA, 19 nt, Artificial Sequence
  Description of Artificial Sequence: Synthetic oligonucleotide
  Sense strand starting at position 2286 of SEQ ID NO: 1885589
ccuacuuucggccagaaug

SEQ ID NO: 2353363 - RNA, 19 nt, Artificial Sequence
  Description of Artificial Sequence: Synthetic oligonucleotide
  Antisense strand to SEQ ID NO: 2353362
cauucuggccgaaaguagg

SEQ ID NO: 2353364 - RNA, 19 nt, Artificial Sequence
  Description of Artificial Sequence: Synthetic oligonucleotide
  Sense strand starting at position 2583 of SEQ ID NO: 1885589
aucaaauggucccugccaa

SEQ ID NO: 2353365 - RNA, 19 nt, Artificial Sequence
  Description of Artificial Sequence: Synthetic oligonucleotide
  Antisense strand to SEQ ID NO: 2353364
uuggcagggaccauuugau

SEQ ID NO: 2353366 - RNA, 19 nt, Artificial Sequence
  Description of Artificial Sequence: Synthetic oligonucleotide
  Sense strand starting at position 2771 of SEQ ID NO: 1885589
gugugagucacuuaccuag

SEQ ID NO: 2353367 - RNA, 19 nt, Artificial Sequence
  Description of Artificial Sequence: Synthetic oligonucleotide
  Antisense strand to SEQ ID NO: 2353366
cuagguaagugacucacac

SEQ ID NO: 2353368 - RNA, 19 nt, Artificial Sequence
  Description of Artificial Sequence: Synthetic oligonucleotide
  Sense strand starting at position 2773 of SEQ ID NO: 1885589
gugagucacuuaccuagga

SEQ ID NO: 2353369 - RNA, 19 nt, Artificial Sequence
  Description of Artificial Sequence: Synthetic oligonucleotide
  Antisense strand to SEQ ID NO: 2353368
uccuagguaagugacucac

SEQ ID NO: 2353370 - RNA, 19 nt, Artificial Sequence
  Description of Artificial Sequence: Synthetic oligonucleotide
  Sense strand starting at position 2774 of SEQ ID NO: 1885589
ugagucacuuaccuaggaa

SEQ ID NO: 2353371 - RNA, 19 nt, Artificial Sequence
  Description of Artificial Sequence: Synthetic oligonucleotide
  Antisense strand to SEQ ID NO: 2353370
uuccuagguaagugacuca

SEQ ID NO: 2353372 - RNA, 19 nt, Artificial Sequence
  Description of Artificial Sequence: Synthetic oligonucleotide
  Sense strand starting at position 2872 of SEQ ID NO: 1885589
acacauagauuguccuaga

SEQ ID NO: 2353373 - RNA, 19 nt, Artificial Sequence
  Description of Artificial Sequence: Synthetic oligonucleotide
  Antisense strand to SEQ ID NO: 2353372
ucuaggacaaucuaugugu

SEQ ID NO: 2353374 - RNA, 19 nt, Artificial Sequence
  Description of Artificial Sequence: Synthetic oligonucleotide
  Sense strand starting at position 2941 of SEQ ID NO: 1885589
auccgugauuugcccaauu

SEQ ID NO: 2353375 - RNA, 19 nt, Artificial Sequence
  Description of Artificial Sequence: Synthetic oligonucleotide
  Antisense strand to SEQ ID NO: 2353374
aauugggcaaaucacggau

SEQ ID NO: 2353376 - RNA, 19 nt, Artificial Sequence
  Description of Artificial Sequence: Synthetic oligonucleotide
  Sense strand starting at position 3025 of SEQ ID NO: 1885589
augaaacauugcuuugcca

SEQ ID NO: 2353377 - RNA, 19 nt, Artificial Sequence
  Description of Artificial Sequence: Synthetic oligonucleotide
  Antisense strand to SEQ ID NO: 2353376
uggcaaagcaauguuucau

SEQ ID NO: 2353378 - RNA, 19 nt, Artificial Sequence
  Description of Artificial Sequence: Synthetic oligonucleotide
  Sense strand starting at position 3128 of SEQ ID NO: 1885589
gucuucuaguaacuaaauu

SEQ ID NO: 2353379 - RNA, 19 nt, Artificial Sequence
  Description of Artificial Sequence: Synthetic oligonucleotide
  Antisense strand to SEQ ID NO: 2353378
aauuuaguuacuagaagac

SEQ ID NO: 2353380 - RNA, 19 nt, Artificial Sequence
  Description of Artificial Sequence: Synthetic oligonucleotide
  Sense strand starting at position 3220 of SEQ ID NO: 1885589
ggaauagauucugcacaag

SEQ ID NO: 2353381 - RNA, 19 nt, Artificial Sequence
  Description of Artificial Sequence: Synthetic oligonucleotide
  Antisense strand to SEQ ID NO: 2353380
cuugugcagaaucuauucc

SEQ ID NO: 2353382 - RNA, 19 nt, Artificial Sequence
  Description of Artificial Sequence: Synthetic oligonucleotide
  Sense strand starting at position 3223 of SEQ ID NO: 1885589
auagauucugcacaagucu

SEQ ID NO: 2353383 - RNA, 19 nt, Artificial Sequence
  Description of Artificial Sequence: Synthetic oligonucleotide
  Antisense strand to SEQ ID NO: 2353382
agacuugugcagaaucuau

SEQ ID NO: 2353384 - RNA, 19 nt, Artificial Sequence
  Description of Artificial Sequence: Synthetic oligonucleotide
  Sense strand starting at position 3261 of SEQ ID NO: 1885589
ucaugacaucuaggcaguu

SEQ ID NO: 2353385 - RNA, 19 nt, Artificial Sequence
  Description of Artificial Sequence: Synthetic oligonucleotide
  Antisense strand to SEQ ID NO: 2353384
aacugccuagaugucauga

SEQ ID NO: 2353386 - RNA, 19 nt, Artificial Sequence
  Description of Artificial Sequence: Synthetic oligonucleotide
  Sense strand starting at position 3262 of SEQ ID NO: 1885589
caugacaucuaggcaguuu

SEQ ID NO: 2353387 - RNA, 19 nt, Artificial Sequence
  Description of Artificial Sequence: Synthetic oligonucleotide
  Antisense strand to SEQ ID NO: 2353386
aaacugccuagaugucaug

SEQ ID NO: 2353388 - RNA, 19 nt, Artificial Sequence
  Description of Artificial Sequence: Synthetic oligonucleotide
  Sense strand starting at position 3312 of SEQ ID NO: 1885589
aggauuauucuguggaaac

SEQ ID NO: 2353389 - RNA, 19 nt, Artificial Sequence
  Description of Artificial Sequence: Synthetic oligonucleotide
  Antisense strand to SEQ ID NO: 2353388
guuuccacagaauaauccu

SEQ ID NO: 2353390 - RNA, 19 nt, Artificial Sequence
  Description of Artificial Sequence: Synthetic oligonucleotide
  Sense strand starting at position 3449 of SEQ ID NO: 1885589
ucuuguaagcuggaacaca

SEQ ID NO: 2353391 - RNA, 19 nt, Artificial Sequence
  Description of Artificial Sequence: Synthetic oligonucleotide
  Antisense strand to SEQ ID NO: 2353390
uguguuccagcuuacaaga

SEQ ID NO: 2353392 - RNA, 19 nt, Artificial Sequence
  Description of Artificial Sequence: Synthetic oligonucleotide
  Sense strand starting at position 3559 of SEQ ID NO: 1885589
uugaaagguccugauguug

SEQ ID NO: 2353393 - RNA, 19 nt, Artificial Sequence
  Description of Artificial Sequence: Synthetic oligonucleotide
  Antisense strand to SEQ ID NO: 2353392
caacaucaggaccuuucaa

SEQ ID NO: 2353394 - RNA, 19 nt, Artificial Sequence
  Description of Artificial Sequence: Synthetic oligonucleotide
  Sense strand starting at position 3674 of SEQ ID NO: 1885589
gaggguagcuguccugaaa

SEQ ID NO: 2353395 - RNA, 19 nt, Artificial Sequence
  Description of Artificial Sequence: Synthetic oligonucleotide
  Antisense strand to SEQ ID NO: 2353394
uuucaggacagcuacccuc

SEQ ID NO: 2353396 - RNA, 19 nt, Artificial Sequence
  Description of Artificial Sequence: Synthetic oligonucleotide
  Sense strand starting at position 3726 of SEQ ID NO: 1885589
agguauggucuugauccua

SEQ ID NO: 2353397 - RNA, 19 nt, Artificial Sequence
  Description of Artificial Sequence: Synthetic oligonucleotide
  Antisense strand to SEQ ID NO: 2353396
uaggaucaagaccauaccu

SEQ ID NO: 2353398 - RNA, 19 nt, Artificial Sequence
  Description of Artificial Sequence: Synthetic oligonucleotide
  Sense strand starting at position 3880 of SEQ ID NO: 1885589
uacccugcuguugagaaua

SEQ ID NO: 2353399 - RNA, 19 nt, Artificial Sequence
  Description of Artificial Sequence: Synthetic oligonucleotide
  Antisense strand to SEQ ID NO: 2353398
uauucucaacagcagggua

SEQ ID NO: 2353400 - RNA, 19 nt, Artificial Sequence
  Description of Artificial Sequence: Synthetic oligonucleotide
  Sense strand starting at position 3885 of SEQ ID NO: 1885589
ugcuguugagaauauaaac

SEQ ID NO: 2353401 - RNA, 19 nt, Artificial Sequence
  Description of Artificial Sequence: Synthetic oligonucleotide
  Antisense strand to SEQ ID NO: 2353400
guuuauauucucaacagca

SEQ ID NO: 2353402 - RNA, 19 nt, Artificial Sequence
  Description of Artificial Sequence: Synthetic oligonucleotide
  Sense strand starting at position 141 of SEQ ID NO: 1885590
ggcccauaccuggaacagu

SEQ ID NO: 2353403 - RNA, 19 nt, Artificial Sequence
  Description of Artificial Sequence: Synthetic oligonucleotide
  Antisense strand to SEQ ID NO: 2353402
acuguuccagguaugggcc

SEQ ID NO: 2353404 - RNA, 19 nt, Artificial Sequence
  Description of Artificial Sequence: Synthetic oligonucleotide
  Sense strand starting at position 157 of SEQ ID NO: 1885590
agucuugucuagcacauuu

SEQ ID NO: 2353405 - RNA, 19 nt, Artificial Sequence
  Description of Artificial Sequence: Synthetic oligonucleotide
  Antisense strand to SEQ ID NO: 2353404
aaaugugcuagacaagacu

SEQ ID NO: 2353406 - RNA, 19 nt, Artificial Sequence
  Description of Artificial Sequence: Synthetic oligonucleotide
  Sense strand starting at position 169 of SEQ ID NO: 1885590
cacauuugcucaggaggga

SEQ ID NO: 2353407 - RNA, 19 nt, Artificial Sequence
  Description of Artificial Sequence: Synthetic oligonucleotide
  Antisense strand to SEQ ID NO: 2353406
ucccuccugagcaaaugug

SEQ ID NO: 2353408 - RNA, 19 nt, Artificial Sequence
  Description of Artificial Sequence: Synthetic oligonucleotide
  Sense strand starting at position 416 of SEQ ID NO: 1885590
aggacuaaguucuaguauu

SEQ ID NO: 2353409 - RNA, 19 nt, Artificial Sequence
  Description of Artificial Sequence: Synthetic oligonucleotide
  Antisense strand to SEQ ID NO: 2353408
aauacuagaacuuaguccu

SEQ ID NO: 2353410 - RNA, 19 nt, Artificial Sequence
  Description of Artificial Sequence: Synthetic oligonucleotide
  Sense strand starting at position 534 of SEQ ID NO: 1885590
ugaggugauaaauguccuu

SEQ ID NO: 2353411 - RNA, 19 nt, Artificial Sequence
  Description of Artificial Sequence: Synthetic oligonucleotide
  Antisense strand to SEQ ID NO: 2353410
aaggacauuuaucaccuca

SEQ ID NO: 2353412 - RNA, 19 nt, Artificial Sequence
  Description of Artificial Sequence: Synthetic oligonucleotide
  Sense strand starting at position 537 of SEQ ID NO: 1885590
ggugauaaauguccuuaaa

SEQ ID NO: 2353413 - RNA, 19 nt, Artificial Sequence
  Description of Artificial Sequence: Synthetic oligonucleotide
  Antisense strand to SEQ ID NO: 2353412
uuuaaggacauuuaucacc

SEQ ID NO: 2353414 - RNA, 19 nt, Artificial Sequence
  Description of Artificial Sequence: Synthetic oligonucleotide
  Sense strand starting at position 550 of SEQ ID NO: 1885590
cuuaaauauccugacuggu

SEQ ID NO: 2353415 - RNA, 19 nt, Artificial Sequence
  Description of Artificial Sequence: Synthetic oligonucleotide
  Antisense strand to SEQ ID NO: 2353414
accagucaggauauuuaag

SEQ ID NO: 2353416 - RNA, 19 nt, Artificial Sequence
  Description of Artificial Sequence: Synthetic oligonucleotide
  Sense strand starting at position 559 of SEQ ID NO: 1885590
ccugacuggucauuacacu

SEQ ID NO: 2353417 - RNA, 19 nt, Artificial Sequence
  Description of Artificial Sequence: Synthetic oligonucleotide
  Antisense strand to SEQ ID NO: 2353416
aguguaaugaccagucagg

SEQ ID NO: 2353418 - RNA, 19 nt, Artificial Sequence
  Description of Artificial Sequence: Synthetic oligonucleotide
  Sense strand starting at position 560 of SEQ ID NO: 1885590
cugacuggucauuacacuu

SEQ ID NO: 2353419 - RNA, 19 nt, Artificial Sequence
  Description of Artificial Sequence: Synthetic oligonucleotide
  Antisense strand to SEQ ID NO: 2353418
aaguguaaugaccagucag

SEQ ID NO: 2353420 - RNA, 19 nt, Artificial Sequence
  Description of Artificial Sequence: Synthetic oligonucleotide
  Sense strand starting at position 757 of SEQ ID NO: 1885590
ccuucuuggucuccaguua

SEQ ID NO: 2353421 - RNA, 19 nt, Artificial Sequence
  Description of Artificial Sequence: Synthetic oligonucleotide
  Antisense strand to SEQ ID NO: 2353420
uaacuggagaccaagaagg

SEQ ID NO: 2353422 - RNA, 19 nt, Artificial Sequence
  Description of Artificial Sequence: Synthetic oligonucleotide
  Sense strand starting at position 758 of SEQ ID NO: 1885590
cuucuuggucuccaguuaa

SEQ ID NO: 2353423 - RNA, 19 nt, Artificial Sequence
  Description of Artificial Sequence: Synthetic oligonucleotide
  Antisense strand to SEQ ID NO: 2353422
uuaacuggagaccaagaag

SEQ ID NO: 2353424 - RNA, 19 nt, Artificial Sequence
  Description of Artificial Sequence: Synthetic oligonucleotide
  Sense strand starting at position 854 of SEQ ID NO: 1885590
ccuggaaaggcuugugaga

SEQ ID NO: 2353425 - RNA, 19 nt, Artificial Sequence
  Description of Artificial Sequence: Synthetic oligonucleotide
  Antisense strand to SEQ ID NO: 2353424
ucucacaagccuuuccagg

SEQ ID NO: 2353426 - RNA, 19 nt, Artificial Sequence
  Description of Artificial Sequence: Synthetic oligonucleotide
  Sense strand starting at position 932 of SEQ ID NO: 1885590
uguuuccucagguguaaag

SEQ ID NO: 2353427 - RNA, 19 nt, Artificial Sequence
  Description of Artificial Sequence: Synthetic oligonucleotide
  Antisense strand to SEQ ID NO: 2353426
cuuuacaccugaggaaaca

SEQ ID NO: 2353428 - RNA, 19 nt, Artificial Sequence
  Description of Artificial Sequence: Synthetic oligonucleotide
  Sense strand starting at position 1011 of SEQ ID NO: 1885590
guggaaguacugugcaaac

SEQ ID NO: 2353429 - RNA, 19 nt, Artificial Sequence
  Description of Artificial Sequence: Synthetic oligonucleotide
  Antisense strand to SEQ ID NO: 2353428
guuugcacaguacuuccac

SEQ ID NO: 2353430 - RNA, 19 nt, Artificial Sequence
  Description of Artificial Sequence: Synthetic oligonucleotide
  Sense strand starting at position 1013 of SEQ ID NO: 1885590
ggaaguacugugcaaacuu

SEQ ID NO: 2353431 - RNA, 19 nt, Artificial Sequence
  Description of Artificial Sequence: Synthetic oligonucleotide
  Antisense strand to SEQ ID NO: 2353430
aaguuugcacaguacuucc

SEQ ID NO: 2353432 - RNA, 19 nt, Artificial Sequence
  Description of Artificial Sequence: Synthetic oligonucleotide
  Sense strand starting at position 1033 of SEQ ID NO: 1885590
acagaagugcuguggagau

SEQ ID NO: 2353433 - RNA, 19 nt, Artificial Sequence
  Description of Artificial Sequence: Synthetic oligonucleotide
  Antisense strand to SEQ ID NO: 2353432
aucuccacagcacuucugu

SEQ ID NO: 2353434 - RNA, 19 nt, Artificial Sequence
  Description of Artificial Sequence: Synthetic oligonucleotide
  Sense strand starting at position 1046 of SEQ ID NO: 1885590
ggagaugcuaacugacuga

SEQ ID NO: 2353435 - RNA, 19 nt, Artificial Sequence
  Description of Artificial Sequence: Synthetic oligonucleotide
  Antisense strand to SEQ ID NO: 2353434
ucagucaguuagcaucucc

SEQ ID NO: 2353436 - RNA, 19 nt, Artificial Sequence
  Description of Artificial Sequence: Synthetic oligonucleotide
  Sense strand starting at position 1213 of SEQ ID NO: 1885590
cuggaauucuuagcaccuu

SEQ ID NO: 2353437 - RNA, 19 nt, Artificial Sequence
  Description of Artificial Sequence: Synthetic oligonucleotide
  Antisense strand to SEQ ID NO: 2353436
aaggugcuaagaauuccag

SEQ ID NO: 2353438 - RNA, 19 nt, Artificial Sequence
  Description of Artificial Sequence: Synthetic oligonucleotide
  Sense strand starting at position 1396 of SEQ ID NO: 1885590
ugauguuucuaauuccuag

SEQ ID NO: 2353439 - RNA, 19 nt, Artificial Sequence
  Description of Artificial Sequence: Synthetic oligonucleotide
  Antisense strand to SEQ ID NO: 2353438
cuaggaauuagaaacauca

SEQ ID NO: 2353440 - RNA, 19 nt, Artificial Sequence
  Description of Artificial Sequence: Synthetic oligonucleotide
  Sense strand starting at position 1403 of SEQ ID NO: 1885590
ucuaauuccuagcugaguu

SEQ ID NO: 2353441 - RNA, 19 nt, Artificial Sequence
  Description of Artificial Sequence: Synthetic oligonucleotide
  Antisense strand to SEQ ID NO: 2353440
aacucagcuaggaauuaga

SEQ ID NO: 2353442 - RNA, 19 nt, Artificial Sequence
  Description of Artificial Sequence: Synthetic oligonucleotide
  Sense strand starting at position 1798 of SEQ ID NO: 1885590
gcaaccaaguggcuuuaaa

SEQ ID NO: 2353443 - RNA, 19 nt, Artificial Sequence
  Description of Artificial Sequence: Synthetic oligonucleotide
  Antisense strand to SEQ ID NO: 2353442
uuuaaagccacuugguugc

SEQ ID NO: 2353444 - RNA, 19 nt, Artificial Sequence
  Description of Artificial Sequence: Synthetic oligonucleotide
  Sense strand starting at position 1820 of SEQ ID NO: 1885590
aucagauucucagagacug

SEQ ID NO: 2353445 - RNA, 19 nt, Artificial Sequence
  Description of Artificial Sequence: Synthetic oligonucleotide
  Antisense strand to SEQ ID NO: 2353444
cagucucugagaaucugau

SEQ ID NO: 2353446 - RNA, 19 nt, Artificial Sequence
  Description of Artificial Sequence: Synthetic oligonucleotide
  Sense strand starting at position 1861 of SEQ ID NO: 1885590
cugggaaccuguucaggua

SEQ ID NO: 2353447 - RNA, 19 nt, Artificial Sequence
  Description of Artificial Sequence: Synthetic oligonucleotide
  Antisense strand to SEQ ID NO: 2353446
uaccugaacagguucccag

SEQ ID NO: 2353448 - RNA, 19 nt, Artificial Sequence
  Description of Artificial Sequence: Synthetic oligonucleotide
  Sense strand starting at position 2060 of SEQ ID NO: 1885590
agaaauagaugcucagcaa

SEQ ID NO: 2353449 - RNA, 19 nt, Artificial Sequence
  Description of Artificial Sequence: Synthetic oligonucleotide
  Antisense strand to SEQ ID NO: 2353448
uugcugagcaucuauuucu

SEQ ID NO: 2353450 - RNA, 19 nt, Artificial Sequence
  Description of Artificial Sequence: Synthetic oligonucleotide
  Sense strand starting at position 2665 of SEQ ID NO: 1885590
agcugcauuucccagcaga

SEQ ID NO: 2353451 - RNA, 19 nt, Artificial Sequence
  Description of Artificial Sequence: Synthetic oligonucleotide
  Antisense strand to SEQ ID NO: 2353450
ucugcugggaaaugcagcu

SEQ ID NO: 2353452 - RNA, 19 nt, Artificial Sequence
  Description of Artificial Sequence: Synthetic oligonucleotide
  Sense strand starting at position 2887 of SEQ ID NO: 1885590
auggaaagcuucuaaccau

SEQ ID NO: 2353453 - RNA, 19 nt, Artificial Sequence
  Description of Artificial Sequence: Synthetic oligonucleotide
  Antisense strand to SEQ ID NO: 2353452
augguuagaagcuuuccau

SEQ ID NO: 2353454 - RNA, 19 nt, Artificial Sequence
  Description of Artificial Sequence: Synthetic oligonucleotide
  Sense strand starting at position 2894 of SEQ ID NO: 1885590
gcuucuaaccaugaaugca

SEQ ID NO: 2353455 - RNA, 19 nt, Artificial Sequence
  Description of Artificial Sequence: Synthetic oligonucleotide
  Antisense strand to SEQ ID NO: 2353454
ugcauucaugguuagaagc

SEQ ID NO: 2353456 - RNA, 19 nt, Artificial Sequence
  Description of Artificial Sequence: Synthetic oligonucleotide
  Sense strand starting at position 2972 of SEQ ID NO: 1885590
gcuuacugucccgaacuca

SEQ ID NO: 2353457 - RNA, 19 nt, Artificial Sequence
  Description of Artificial Sequence: Synthetic oligonucleotide
  Antisense strand to SEQ ID NO: 2353456
ugaguucgggacaguaagc

SEQ ID NO: 2353458 - RNA, 19 nt, Artificial Sequence
  Description of Artificial Sequence: Synthetic oligonucleotide
  Sense strand starting at position 3071 of SEQ ID NO: 1885590
cacucugacuuagggagau

SEQ ID NO: 2353459 - RNA, 19 nt, Artificial Sequence
  Description of Artificial Sequence: Synthetic oligonucleotide
  Antisense strand to SEQ ID NO: 2353458
aucucccuaagucagagug

SEQ ID NO: 2353460 - RNA, 19 nt, Artificial Sequence
  Description of Artificial Sequence: Synthetic oligonucleotide
  Sense strand starting at position 3326 of SEQ ID NO: 1885590
ggcaguuuggccugagcua

SEQ ID NO: 2353461 - RNA, 19 nt, Artificial Sequence
  Description of Artificial Sequence: Synthetic oligonucleotide
  Antisense strand to SEQ ID NO: 2353460
uagcucaggccaaacugcc

SEQ ID NO: 2353462 - RNA, 19 nt, Artificial Sequence
  Description of Artificial Sequence: Synthetic oligonucleotide
  Sense strand starting at position 3327 of SEQ ID NO: 1885590
gcaguuuggccugagcuaa

SEQ ID NO: 2353463 - RNA, 19 nt, Artificial Sequence
  Description of Artificial Sequence: Synthetic oligonucleotide
  Antisense strand to SEQ ID NO: 2353462
uuagcucaggccaaacugc

SEQ ID NO: 2353464 - RNA, 19 nt, Artificial Sequence
  Description of Artificial Sequence: Synthetic oligonucleotide
  Sense strand starting at position 3461 of SEQ ID NO: 1885590
agagaaucagcuuaggucu

SEQ ID NO: 2353465 - RNA, 19 nt, Artificial Sequence
  Description of Artificial Sequence: Synthetic oligonucleotide
  Antisense strand to SEQ ID NO: 2353464
agaccuaagcugauucucu

SEQ ID NO: 2353466 - RNA, 19 nt, Artificial Sequence
  Description of Artificial Sequence: Synthetic oligonucleotide
  Sense strand starting at position 3561 of SEQ ID NO: 1885590
ugcagaguccagugaaaca

SEQ ID NO: 2353467 - RNA, 19 nt, Artificial Sequence
  Description of Artificial Sequence: Synthetic oligonucleotide
  Antisense strand to SEQ ID NO: 2353466
uguuucacuggacucugca

SEQ ID NO: 2353468 - RNA, 19 nt, Artificial Sequence
  Description of Artificial Sequence: Synthetic oligonucleotide
  Sense strand starting at position 3577 of SEQ ID NO: 1885590
acaagaguuuccugaagac

SEQ ID NO: 2353469 - RNA, 19 nt, Artificial Sequence
  Description of Artificial Sequence: Synthetic oligonucleotide
  Antisense strand to SEQ ID NO: 2353468
gucuucaggaaacucuugu

SEQ ID NO: 2353470 - RNA, 19 nt, Artificial Sequence
  Description of Artificial Sequence: Synthetic oligonucleotide
  Sense strand starting at position 3706 of SEQ ID NO: 1885590
agggauggcccuugugaaa

SEQ ID NO: 2353471 - RNA, 19 nt, Artificial Sequence
  Description of Artificial Sequence: Synthetic oligonucleotide
  Antisense strand to SEQ ID NO: 2353470
uuucacaagggccaucccu

SEQ ID NO: 2353472 - RNA, 19 nt, Artificial Sequence
  Description of Artificial Sequence: Synthetic oligonucleotide
  Sense strand starting at position 3719 of SEQ ID NO: 1885590
gugaaauuacaccaggucu

SEQ ID NO: 2353473 - RNA, 19 nt, Artificial Sequence
  Description of Artificial Sequence: Synthetic oligonucleotide
  Antisense strand to SEQ ID NO: 2353472
agaccugguguaauuucac

SEQ ID NO: 2353474 - RNA, 19 nt, Artificial Sequence
  Description of Artificial Sequence: Synthetic oligonucleotide
  Sense strand starting at position 3721 of SEQ ID NO: 1885590
gaaauuacaccaggucugu

SEQ ID NO: 2353475 - RNA, 19 nt, Artificial Sequence
  Description of Artificial Sequence: Synthetic oligonucleotide
  Antisense strand to SEQ ID NO: 2353474
acagaccugguguaauuuc

SEQ ID NO: 2353476 - RNA, 19 nt, Artificial Sequence
  Description of Artificial Sequence: Synthetic oligonucleotide
  Sense strand starting at position 3855 of SEQ ID NO: 1885590
ccugguuggcaggaugaau

SEQ ID NO: 2353477 - RNA, 19 nt, Artificial Sequence
  Description of Artificial Sequence: Synthetic oligonucleotide
  Antisense strand to SEQ ID NO: 2353476
auucauccugccaaccagg

SEQ ID NO: 2353478 - RNA, 19 nt, Artificial Sequence
  Description of Artificial Sequence: Synthetic oligonucleotide
  Sense strand starting at position 3864 of SEQ ID NO: 1885590
caggaugaaugccuaauga

SEQ ID NO: 2353479 - RNA, 19 nt, Artificial Sequence
  Description of Artificial Sequence: Synthetic oligonucleotide
  Antisense strand to SEQ ID NO: 2353478
ucauuaggcauucauccug

SEQ ID NO: 2353480 - RNA, 19 nt, Artificial Sequence
  Description of Artificial Sequence: Synthetic oligonucleotide
  Sense strand starting at position 3868 of SEQ ID NO: 1885590
augaaugccuaaugaaaca

SEQ ID NO: 2353481 - RNA, 19 nt, Artificial Sequence
  Description of Artificial Sequence: Synthetic oligonucleotide
  Antisense strand to SEQ ID NO: 2353480
uguuucauuaggcauucau

SEQ ID NO: 2353482 - RNA, 19 nt, Artificial Sequence
  Description of Artificial Sequence: Synthetic oligonucleotide
  Sense strand starting at position 343 of SEQ ID NO: 1885591
auguuucucgaauggaaac

SEQ ID NO: 2353483 - RNA, 19 nt, Artificial Sequence
  Description of Artificial Sequence: Synthetic oligonucleotide
  Antisense strand to SEQ ID NO: 2353482
guuuccauucgagaaacau

SEQ ID NO: 2353484 - RNA, 19 nt, Artificial Sequence
  Description of Artificial Sequence: Synthetic oligonucleotide
  Sense strand starting at position 349 of SEQ ID NO: 1885591
cucgaauggaaacgugaaa

SEQ ID NO: 2353485 - RNA, 19 nt, Artificial Sequence
  Description of Artificial Sequence: Synthetic oligonucleotide
  Antisense strand to SEQ ID NO: 2353484
uuucacguuuccauucgag

SEQ ID NO: 2353486 - RNA, 19 nt, Artificial Sequence
  Description of Artificial Sequence: Synthetic oligonucleotide
  Sense strand starting at position 637 of SEQ ID NO: 1885591
agggcaaccucuguaugau

SEQ ID NO: 2353487 - RNA, 19 nt, Artificial Sequence
  Description of Artificial Sequence: Synthetic oligonucleotide
  Antisense strand to SEQ ID NO: 2353486
aucauacagagguugcccu

SEQ ID NO: 2353488 - RNA, 19 nt, Artificial Sequence
  Description of Artificial Sequence: Synthetic oligonucleotide
  Sense strand starting at position 638 of SEQ ID NO: 1885591
gggcaaccucuguaugauu

SEQ ID NO: 2353489 - RNA, 19 nt, Artificial Sequence
  Description of Artificial Sequence: Synthetic oligonucleotide
  Antisense strand to SEQ ID NO: 2353488
aaucauacagagguugccc

SEQ ID NO: 2353490 - RNA, 19 nt, Artificial Sequence
  Description of Artificial Sequence: Synthetic oligonucleotide
  Sense strand starting at position 745 of SEQ ID NO: 1885591
cccaaaguguaacuuugau

SEQ ID NO: 2353491 - RNA, 19 nt, Artificial Sequence
  Description of Artificial Sequence: Synthetic oligonucleotide
  Antisense strand to SEQ ID NO: 2353490
aucaaaguuacacuuuggg

SEQ ID NO: 2353492 - RNA, 19 nt, Artificial Sequence
  Description of Artificial Sequence: Synthetic oligonucleotide
  Sense strand starting at position 800 of SEQ ID NO: 1885591
gggaaugcuuaauuaaugu

SEQ ID NO: 2353493 - RNA, 19 nt, Artificial Sequence
  Description of Artificial Sequence: Synthetic oligonucleotide
  Antisense strand to SEQ ID NO: 2353492
acauuaauuaagcauuccc

SEQ ID NO: 2353494 - RNA, 19 nt, Artificial Sequence
  Description of Artificial Sequence: Synthetic oligonucleotide
  Sense strand starting at position 855 of SEQ ID NO: 1885591
gcuauuguugagggagacu

SEQ ID NO: 2353495 - RNA, 19 nt, Artificial Sequence
  Description of Artificial Sequence: Synthetic oligonucleotide
  Antisense strand to SEQ ID NO: 2353494
agucucccucaacaauagc

SEQ ID NO: 2353496 - RNA, 19 nt, Artificial Sequence
  Description of Artificial Sequence: Synthetic oligonucleotide
  Sense strand starting at position 867 of SEQ ID NO: 1885591
ggagacugcuauccuugaa

SEQ ID NO: 2353497 - RNA, 19 nt, Artificial Sequence
  Description of Artificial Sequence: Synthetic oligonucleotide
  Antisense strand to SEQ ID NO: 2353496
uucaaggauagcagucucc

SEQ ID NO: 2353498 - RNA, 19 nt, Artificial Sequence
  Description of Artificial Sequence: Synthetic oligonucleotide
  Sense strand starting at position 871 of SEQ ID NO: 1885591
acugcuauccuugaaagca

SEQ ID NO: 2353499 - RNA, 19 nt, Artificial Sequence
  Description of Artificial Sequence: Synthetic oligonucleotide
  Antisense strand to SEQ ID NO: 2353498
ugcuuucaaggauagcagu

SEQ ID NO: 2353500 - RNA, 19 nt, Artificial Sequence
  Description of Artificial Sequence: Synthetic oligonucleotide
  Sense strand starting at position 889 of SEQ ID NO: 1885591
acagaauugcuugaugcua

SEQ ID NO: 2353501 - RNA, 19 nt, Artificial Sequence
  Description of Artificial Sequence: Synthetic oligonucleotide
  Antisense strand to SEQ ID NO: 2353500
uagcaucaagcaauucugu

SEQ ID NO: 2353502 - RNA, 19 nt, Artificial Sequence
  Description of Artificial Sequence: Synthetic oligonucleotide
  Sense strand starting at position 921 of SEQ ID NO: 1885591
gcagaucagugauugauuc

SEQ ID NO: 2353503 - RNA, 19 nt, Artificial Sequence
  Description of Artificial Sequence: Synthetic oligonucleotide
  Antisense strand to SEQ ID NO: 2353502
gaaucaaucacugaucugc

SEQ ID NO: 2353504 - RNA, 19 nt, Artificial Sequence
  Description of Artificial Sequence: Synthetic oligonucleotide
  Sense strand starting at position 922 of SEQ ID NO: 1885591
cagaucagugauugauucu

SEQ ID NO: 2353505 - RNA, 19 nt, Artificial Sequence
  Description of Artificial Sequence: Synthetic oligonucleotide
  Antisense strand to SEQ ID NO: 2353504
agaaucaaucacugaucug

SEQ ID NO: 2353506 - RNA, 19 nt, Artificial Sequence
  Description of Artificial Sequence: Synthetic oligonucleotide
  Sense strand starting at position 925 of SEQ ID NO: 1885591
aucagugauugauucucca

SEQ ID NO: 2353507 - RNA, 19 nt, Artificial Sequence
  Description of Artificial Sequence: Synthetic oligonucleotide
  Antisense strand to SEQ ID NO: 2353506
uggagaaucaaucacugau

SEQ ID NO: 2353508 - RNA, 19 nt, Artificial Sequence
  Description of Artificial Sequence: Synthetic oligonucleotide
  Sense strand starting at position 928 of SEQ ID NO: 1885591
agugauugauucuccaauc

SEQ ID NO: 2353509 - RNA, 19 nt, Artificial Sequence
  Description of Artificial Sequence: Synthetic oligonucleotide
  Antisense strand to SEQ ID NO: 2353508
gauuggagaaucaaucacu

SEQ ID NO: 2353510 - RNA, 19 nt, Artificial Sequence
  Description of Artificial Sequence: Synthetic oligonucleotide
  Sense strand starting at position 929 of SEQ ID NO: 1885591
gugauugauucuccaaucu

SEQ ID NO: 2353511 - RNA, 19 nt, Artificial Sequence
  Description of Artificial Sequence: Synthetic oligonucleotide
  Antisense strand to SEQ ID NO: 2353510
agauuggagaaucaaucac

SEQ ID NO: 2353512 - RNA, 19 nt, Artificial Sequence
  Description of Artificial Sequence: Synthetic oligonucleotide
  Sense strand starting at position 968 of SEQ ID NO: 1885591
acucucaguccagaguuga

SEQ ID NO: 2353513 - RNA, 19 nt, Artificial Sequence
  Description of Artificial Sequence: Synthetic oligonucleotide
  Antisense strand to SEQ ID NO: 2353512
ucaacucuggacugagagu

SEQ ID NO: 2353514 - RNA, 19 nt, Artificial Sequence
  Description of Artificial Sequence: Synthetic oligonucleotide
  Sense strand starting at position 994 of SEQ ID NO: 1885591
ccaauaagucugggaggca

SEQ ID NO: 2353515 - RNA, 19 nt, Artificial Sequence
  Description of Artificial Sequence: Synthetic oligonucleotide
  Antisense strand to SEQ ID NO: 2353514
ugccucccagacuuauugg

SEQ ID NO: 2353516 - RNA, 19 nt, Artificial Sequence
  Description of Artificial Sequence: Synthetic oligonucleotide
  Sense strand starting at position 1191 of SEQ ID NO: 1885591
uggauugagccaugaacuu

SEQ ID NO: 2353517 - RNA, 19 nt, Artificial Sequence
  Description of Artificial Sequence: Synthetic oligonucleotide
  Antisense strand to SEQ ID NO: 2353516
aaguucauggcucaaucca

SEQ ID NO: 2353518 - RNA, 19 nt, Artificial Sequence
  Description of Artificial Sequence: Synthetic oligonucleotide
  Sense strand starting at position 1379 of SEQ ID NO: 1885591
auauauacugagugcuaag

SEQ ID NO: 2353519 - RNA, 19 nt, Artificial Sequence
  Description of Artificial Sequence: Synthetic oligonucleotide
  Antisense strand to SEQ ID NO: 2353518
cuuagcacucaguauauau

SEQ ID NO: 2353520 - RNA, 19 nt, Artificial Sequence
  Description of Artificial Sequence: Synthetic oligonucleotide
  Sense strand starting at position 1411 of SEQ ID NO: 1885591
caucgucaagcugaaucau

SEQ ID NO: 2353521 - RNA, 19 nt, Artificial Sequence
  Description of Artificial Sequence: Synthetic oligonucleotide
  Antisense strand to SEQ ID NO: 2353520
augauucagcuugacgaug

SEQ ID NO: 2353522 - RNA, 19 nt, Artificial Sequence
  Description of Artificial Sequence: Synthetic oligonucleotide
  Sense strand starting at position 1476 of SEQ ID NO: 1885591
gggagaagucaagggcuua

SEQ ID NO: 2353523 - RNA, 19 nt, Artificial Sequence
  Description of Artificial Sequence: Synthetic oligonucleotide
  Antisense strand to SEQ ID NO: 2353522
uaagcccuugacuucuccc

SEQ ID NO: 2353524 - RNA, 19 nt, Artificial Sequence
  Description of Artificial Sequence: Synthetic oligonucleotide
  Sense strand starting at position 1604 of SEQ ID NO: 1885591
gagaucuuggaaugcagau

SEQ ID NO: 2353525 - RNA, 19 nt, Artificial Sequence
  Description of Artificial Sequence: Synthetic oligonucleotide
  Antisense strand to SEQ ID NO: 2353524
aucugcauuccaagaucuc

SEQ ID NO: 2353526 - RNA, 19 nt, Artificial Sequence
  Description of Artificial Sequence: Synthetic oligonucleotide
  Sense strand starting at position 1877 of SEQ ID NO: 1885591
agguaauaucugcagguuc

SEQ ID NO: 2353527 - RNA, 19 nt, Artificial Sequence
  Description of Artificial Sequence: Synthetic oligonucleotide
  Antisense strand to SEQ ID NO: 2353526
gaaccugcagauauuaccu

SEQ ID NO: 2353528 - RNA, 19 nt, Artificial Sequence
  Description of Artificial Sequence: Synthetic oligonucleotide
  Sense strand starting at position 1894 of SEQ ID NO: 1885591
ucuugaggauacuccauua

SEQ ID NO: 2353529 - RNA, 19 nt, Artificial Sequence
  Description of Artificial Sequence: Synthetic oligonucleotide
  Antisense strand to SEQ ID NO: 2353528
uaauggaguauccucaaga

SEQ ID NO: 2353530 - RNA, 19 nt, Artificial Sequence
  Description of Artificial Sequence: Synthetic oligonucleotide
  Sense strand starting at position 2024 of SEQ ID NO: 1885591
accuguuuccuugaaauag

SEQ ID NO: 2353531 - RNA, 19 nt, Artificial Sequence
  Description of Artificial Sequence: Synthetic oligonucleotide
  Antisense strand to SEQ ID NO: 2353530
cuauuucaaggaaacaggu

SEQ ID NO: 2353532 - RNA, 19 nt, Artificial Sequence
  Description of Artificial Sequence: Synthetic oligonucleotide
  Sense strand starting at position 2392 of SEQ ID NO: 1885591
guaagugaugcauaaacaa

SEQ ID NO: 2353533 - RNA, 19 nt, Artificial Sequence
  Description of Artificial Sequence: Synthetic oligonucleotide
  Antisense strand to SEQ ID NO: 2353532
uuguuuaugcaucacuuac

SEQ ID NO: 2353534 - RNA, 19 nt, Artificial Sequence
  Description of Artificial Sequence: Synthetic oligonucleotide
  Sense strand starting at position 2458 of SEQ ID NO: 1885591
ucccguuuccaagagguaa

SEQ ID NO: 2353535 - RNA, 19 nt, Artificial Sequence
  Description of Artificial Sequence: Synthetic oligonucleotide
  Antisense strand to SEQ ID NO: 2353534
uuaccucuuggaaacggga

SEQ ID NO: 2353536 - RNA, 19 nt, Artificial Sequence
  Description of Artificial Sequence: Synthetic oligonucleotide
  Sense strand starting at position 2583 of SEQ ID NO: 1885591
ugcaucauagaauauaagu

SEQ ID NO: 2353537 - RNA, 19 nt, Artificial Sequence
  Description of Artificial Sequence: Synthetic oligonucleotide
  Antisense strand to SEQ ID NO: 2353536
acuuauauucuaugaugca

SEQ ID NO: 2353538 - RNA, 19 nt, Artificial Sequence
  Description of Artificial Sequence: Synthetic oligonucleotide
  Sense strand starting at position 2663 of SEQ ID NO: 1885591
ucuggaaacuugucuggaa

SEQ ID NO: 2353539 - RNA, 19 nt, Artificial Sequence
  Description of Artificial Sequence: Synthetic oligonucleotide
  Antisense strand to SEQ ID NO: 2353538
uuccagacaaguuuccaga

SEQ ID NO: 2353540 - RNA, 19 nt, Artificial Sequence
  Description of Artificial Sequence: Synthetic oligonucleotide
  Sense strand starting at position 2664 of SEQ ID NO: 1885591
cuggaaacuugucuggaaa

SEQ ID NO: 2353541 - RNA, 19 nt, Artificial Sequence
  Description of Artificial Sequence: Synthetic oligonucleotide
  Antisense strand to SEQ ID NO: 2353540
uuuccagacaaguuuccag

SEQ ID NO: 2353542 - RNA, 19 nt, Artificial Sequence
  Description of Artificial Sequence: Synthetic oligonucleotide
  Sense strand starting at position 2665 of SEQ ID NO: 1885591
uggaaacuugucuggaaau

SEQ ID NO: 2353543 - RNA, 19 nt, Artificial Sequence
  Description of Artificial Sequence: Synthetic oligonucleotide
  Antisense strand to SEQ ID NO: 2353542
auuuccagacaaguuucca

SEQ ID NO: 2353544 - RNA, 19 nt, Artificial Sequence
  Description of Artificial Sequence: Synthetic oligonucleotide
  Sense strand starting at position 2713 of SEQ ID NO: 1885591
uugagauugacaggucuca

SEQ ID NO: 2353545 - RNA, 19 nt, Artificial Sequence
  Description of Artificial Sequence: Synthetic oligonucleotide
  Antisense strand to SEQ ID NO: 2353544
ugagaccugucaaucucaa

SEQ ID NO: 2353546 - RNA, 19 nt, Artificial Sequence
  Description of Artificial Sequence: Synthetic oligonucleotide
  Sense strand starting at position 2747 of SEQ ID NO: 1885591
augagaauuucucagggag

SEQ ID NO: 2353547 - RNA, 19 nt, Artificial Sequence
  Description of Artificial Sequence: Synthetic oligonucleotide
  Antisense strand to SEQ ID NO: 2353546
cucccugagaaauucucau

SEQ ID NO: 2353548 - RNA, 19 nt, Artificial Sequence
  Description of Artificial Sequence: Synthetic oligonucleotide
  Sense strand starting at position 3106 of SEQ ID NO: 1885591
auaccuggccuauauugau

SEQ ID NO: 2353549 - RNA, 19 nt, Artificial Sequence
  Description of Artificial Sequence: Synthetic oligonucleotide
  Antisense strand to SEQ ID NO: 2353548
aucaauauaggccagguau

SEQ ID NO: 2353550 - RNA, 19 nt, Artificial Sequence
  Description of Artificial Sequence: Synthetic oligonucleotide
  Sense strand starting at position 3145 of SEQ ID NO: 1885591
gugauucuuacgggaaaua

SEQ ID NO: 2353551 - RNA, 19 nt, Artificial Sequence
  Description of Artificial Sequence: Synthetic oligonucleotide
  Antisense strand to SEQ ID NO: 2353550
uauuucccguaagaaucac

SEQ ID NO: 2353552 - RNA, 19 nt, Artificial Sequence
  Description of Artificial Sequence: Synthetic oligonucleotide
  Sense strand starting at position 3323 of SEQ ID NO: 1885591
guaggauaauucccuagga

SEQ ID NO: 2353553 - RNA, 19 nt, Artificial Sequence
  Description of Artificial Sequence: Synthetic oligonucleotide
  Antisense strand to SEQ ID NO: 2353552
uccuagggaauuauccuac

SEQ ID NO: 2353554 - RNA, 19 nt, Artificial Sequence
  Description of Artificial Sequence: Synthetic oligonucleotide
  Sense strand starting at position 3390 of SEQ ID NO: 1885591
gacugcucguauuugaauc

SEQ ID NO: 2353555 - RNA, 19 nt, Artificial Sequence
  Description of Artificial Sequence: Synthetic oligonucleotide
  Antisense strand to SEQ ID NO: 2353554
gauucaaauacgagcaguc

SEQ ID NO: 2353556 - RNA, 19 nt, Artificial Sequence
  Description of Artificial Sequence: Synthetic oligonucleotide
  Sense strand starting at position 3442 of SEQ ID NO: 1885591
cuguguaaagaccaauacu

SEQ ID NO: 2353557 - RNA, 19 nt, Artificial Sequence
  Description of Artificial Sequence: Synthetic oligonucleotide
  Antisense strand to SEQ ID NO: 2353556
aguauuggucuuuacacag

SEQ ID NO: 2353558 - RNA, 19 nt, Artificial Sequence
  Description of Artificial Sequence: Synthetic oligonucleotide
  Sense strand starting at position 3755 of SEQ ID NO: 1885591
auaggaaaggccuguaauc

SEQ ID NO: 2353559 - RNA, 19 nt, Artificial Sequence
  Description of Artificial Sequence: Synthetic oligonucleotide
  Antisense strand to SEQ ID NO: 2353558
gauuacaggccuuuccuau

SEQ ID NO: 2353560 - RNA, 19 nt, Artificial Sequence
  Description of Artificial Sequence: Synthetic oligonucleotide
  Sense strand starting at position 3757 of SEQ ID NO: 1885591
aggaaaggccuguaauccu

SEQ ID NO: 2353561 - RNA, 19 nt, Artificial Sequence
  Description of Artificial Sequence: Synthetic oligonucleotide
  Antisense strand to SEQ ID NO: 2353560
aggauuacaggccuuuccu

SEQ ID NO: 2353562 - RNA, 19 nt, Artificial Sequence
  Description of Artificial Sequence: Synthetic oligonucleotide
  Sense strand starting at position 114 of SEQ ID NO: 1885592
uugagaguuuacuaaacgu

SEQ ID NO: 2353563 - RNA, 19 nt, Artificial Sequence
  Description of Artificial Sequence: Synthetic oligonucleotide
  Antisense strand to SEQ ID NO: 2353562
acguuuaguaaacucucaa

SEQ ID NO: 2353564 - RNA, 19 nt, Artificial Sequence
  Description of Artificial Sequence: Synthetic oligonucleotide
  Sense strand starting at position 388 of SEQ ID NO: 1885592
cuggguucucagggugaag

SEQ ID NO: 2353565 - RNA, 19 nt, Artificial Sequence
  Description of Artificial Sequence: Synthetic oligonucleotide
  Antisense strand to SEQ ID NO: 2353564
cuucacccugagaacccag

SEQ ID NO: 2353566 - RNA, 19 nt, Artificial Sequence
  Description of Artificial Sequence: Synthetic oligonucleotide
  Sense strand starting at position 399 of SEQ ID NO: 1885592
gggugaagcucguccauuu

SEQ ID NO: 2353567 - RNA, 19 nt, Artificial Sequence
  Description of Artificial Sequence: Synthetic oligonucleotide
  Antisense strand to SEQ ID NO: 2353566
aaauggacgagcuucaccc

SEQ ID NO: 2353568 - RNA, 19 nt, Artificial Sequence
  Description of Artificial Sequence: Synthetic oligonucleotide
  Sense strand starting at position 410 of SEQ ID NO: 1885592
guccauuucugggauggca

SEQ ID NO: 2353569 - RNA, 19 nt, Artificial Sequence
  Description of Artificial Sequence: Synthetic oligonucleotide
  Antisense strand to SEQ ID NO: 2353568
ugccaucccagaaauggac

SEQ ID NO: 2353570 - RNA, 19 nt, Artificial Sequence
  Description of Artificial Sequence: Synthetic oligonucleotide
  Sense strand starting at position 498 of SEQ ID NO: 1885592
ugguguuucuggcuaacuu

SEQ ID NO: 2353571 - RNA, 19 nt, Artificial Sequence
  Description of Artificial Sequence: Synthetic oligonucleotide
  Antisense strand to SEQ ID NO: 2353570
aaguuagccagaaacacca

SEQ ID NO: 2353572 - RNA, 19 nt, Artificial Sequence
  Description of Artificial Sequence: Synthetic oligonucleotide
  Sense strand starting at position 499 of SEQ ID NO: 1885592
gguguuucuggcuaacuuu

SEQ ID NO: 2353573 - RNA, 19 nt, Artificial Sequence
  Description of Artificial Sequence: Synthetic oligonucleotide
  Antisense strand to SEQ ID NO: 2353572
aaaguuagccagaaacacc

SEQ ID NO: 2353574 - RNA, 19 nt, Artificial Sequence
  Description of Artificial Sequence: Synthetic oligonucleotide
  Sense strand starting at position 564 of SEQ ID NO: 1885592
ugcuuuccugcugaggaga

SEQ ID NO: 2353575 - RNA, 19 nt, Artificial Sequence
  Description of Artificial Sequence: Synthetic oligonucleotide
  Antisense strand to SEQ ID NO: 2353574
ucuccucagcaggaaagca

SEQ ID NO: 2353576 - RNA, 19 nt, Artificial Sequence
  Description of Artificial Sequence: Synthetic oligonucleotide
  Sense strand starting at position 752 of SEQ ID NO: 1885592
ggauguguccugggaccca

SEQ ID NO: 2353577 - RNA, 19 nt, Artificial Sequence
  Description of Artificial Sequence: Synthetic oligonucleotide
  Antisense strand to SEQ ID NO: 2353576
ugggucccaggacacaucc

SEQ ID NO: 2353578 - RNA, 19 nt, Artificial Sequence
  Description of Artificial Sequence: Synthetic oligonucleotide
  Sense strand starting at position 907 of SEQ ID NO: 1885592
uggcuuuccucccagcaca

SEQ ID NO: 2353579 - RNA, 19 nt, Artificial Sequence
  Description of Artificial Sequence: Synthetic oligonucleotide
  Antisense strand to SEQ ID NO: 2353578
ugugcugggaggaaagcca

SEQ ID NO: 2353580 - RNA, 19 nt, Artificial Sequence
  Description of Artificial Sequence: Synthetic oligonucleotide
  Sense strand starting at position 1088 of SEQ ID NO: 1885592
ggaugucccaaguagaugu

SEQ ID NO: 2353581 - RNA, 19 nt, Artificial Sequence
  Description of Artificial Sequence: Synthetic oligonucleotide
  Antisense strand to SEQ ID NO: 2353580
acaucuacuugggacaucc

SEQ ID NO: 2353582 - RNA, 19 nt, Artificial Sequence
  Description of Artificial Sequence: Synthetic oligonucleotide
  Sense strand starting at position 1322 of SEQ ID NO: 1885592
ggacucuccucuccuuaga

SEQ ID NO: 2353583 - RNA, 19 nt, Artificial Sequence
  Description of Artificial Sequence: Synthetic oligonucleotide
  Antisense strand to SEQ ID NO: 2353582
ucuaaggagaggagagucc

SEQ ID NO: 2353584 - RNA, 19 nt, Artificial Sequence
  Description of Artificial Sequence: Synthetic oligonucleotide
  Sense strand starting at position 1333 of SEQ ID NO: 1885592
uccuuagaccugugcacaa

SEQ ID NO: 2353585 - RNA, 19 nt, Artificial Sequence
  Description of Artificial Sequence: Synthetic oligonucleotide
  Antisense strand to SEQ ID NO: 2353584
uugugcacaggucuaagga

SEQ ID NO: 2353586 - RNA, 19 nt, Artificial Sequence
  Description of Artificial Sequence: Synthetic oligonucleotide
  Sense strand starting at position 1602 of SEQ ID NO: 1885592
cgaccaccuguccagagau

SEQ ID NO: 2353587 - RNA, 19 nt, Artificial Sequence
  Description of Artificial Sequence: Synthetic oligonucleotide
  Antisense strand to SEQ ID NO: 2353586
aucucuggacagguggucg

SEQ ID NO: 2353588 - RNA, 19 nt, Artificial Sequence
  Description of Artificial Sequence: Synthetic oligonucleotide
  Sense strand starting at position 3109 of SEQ ID NO: 1885592
ggucgugugcauuccauca

SEQ ID NO: 2353589 - RNA, 19 nt, Artificial Sequence
  Description of Artificial Sequence: Synthetic oligonucleotide
  Antisense strand to SEQ ID NO: 2353588
ugauggaaugcacacgacc

SEQ ID NO: 2353590 - RNA, 19 nt, Artificial Sequence
  Description of Artificial Sequence: Synthetic oligonucleotide
  Sense strand starting at position 3111 of SEQ ID NO: 1885592
ucgugugcauuccaucauu

SEQ ID NO: 2353591 - RNA, 19 nt, Artificial Sequence
  Description of Artificial Sequence: Synthetic oligonucleotide
  Antisense strand to SEQ ID NO: 2353590
aaugauggaaugcacacga

SEQ ID NO: 2353592 - RNA, 19 nt, Artificial Sequence
  Description of Artificial Sequence: Synthetic oligonucleotide
  Sense strand starting at position 3114 of SEQ ID NO: 1885592
ugugcauuccaucauucca

SEQ ID NO: 2353593 - RNA, 19 nt, Artificial Sequence
  Description of Artificial Sequence: Synthetic oligonucleotide
  Antisense strand to SEQ ID NO: 2353592
uggaaugauggaaugcaca

SEQ ID NO: 2353594 - RNA, 19 nt, Artificial Sequence
  Description of Artificial Sequence: Synthetic oligonucleotide
  Sense strand starting at position 3349 of SEQ ID NO: 1885592
cggccaguccugugaccuu

SEQ ID NO: 2353595 - RNA, 19 nt, Artificial Sequence
  Description of Artificial Sequence: Synthetic oligonucleotide
  Antisense strand to SEQ ID NO: 2353594
aaggucacaggacuggccg

SEQ ID NO: 2353596 - RNA, 19 nt, Artificial Sequence
  Description of Artificial Sequence: Synthetic oligonucleotide
  Sense strand starting at position 3386 of SEQ ID NO: 1885592
cuacaucccgucugugaga

SEQ ID NO: 2353597 - RNA, 19 nt, Artificial Sequence
  Description of Artificial Sequence: Synthetic oligonucleotide
  Antisense strand to SEQ ID NO: 2353596
ucucacagacgggauguag

SEQ ID NO: 2353598 - RNA, 19 nt, Artificial Sequence
  Description of Artificial Sequence: Synthetic oligonucleotide
  Sense strand starting at position 3729 of SEQ ID NO: 1885592
ugggauuggucccaagaag

SEQ ID NO: 2353599 - RNA, 19 nt, Artificial Sequence
  Description of Artificial Sequence: Synthetic oligonucleotide
  Antisense strand to SEQ ID NO: 2353598
cuucuugggaccaauccca

SEQ ID NO: 2353600 - RNA, 19 nt, Artificial Sequence
  Description of Artificial Sequence: Synthetic oligonucleotide
  Sense strand starting at position 1782 of SEQ ID NO: 1885593
uggcguguggcuguaagua

SEQ ID NO: 2353601 - RNA, 19 nt, Artificial Sequence
  Description of Artificial Sequence: Synthetic oligonucleotide
  Antisense strand to SEQ ID NO: 2353600
uacuuacagccacacgcca

SEQ ID NO: 2353602 - RNA, 19 nt, Artificial Sequence
  Description of Artificial Sequence: Synthetic oligonucleotide
  Sense strand starting at position 1994 of SEQ ID NO: 1885593
acaugcuugucccaauaag

SEQ ID NO: 2353603 - RNA, 19 nt, Artificial Sequence
  Description of Artificial Sequence: Synthetic oligonucleotide
  Antisense strand to SEQ ID NO: 2353602
cuuauugggacaagcaugu

SEQ ID NO: 2353604 - RNA, 19 nt, Artificial Sequence
  Description of Artificial Sequence: Synthetic oligonucleotide
  Sense strand starting at position 983 of SEQ ID NO: 1885594
acgagcuauggugaucuca

SEQ ID NO: 2353605 - RNA, 19 nt, Artificial Sequence
  Description of Artificial Sequence: Synthetic oligonucleotide
  Antisense strand to SEQ ID NO: 2353604
ugagaucaccauagcucgu

SEQ ID NO: 2353606 - RNA, 19 nt, Artificial Sequence
  Description of Artificial Sequence: Synthetic oligonucleotide
  Sense strand starting at position 985 of SEQ ID NO: 1885594
gagcuauggugaucucagu

SEQ ID NO: 2353607 - RNA, 19 nt, Artificial Sequence
  Description of Artificial Sequence: Synthetic oligonucleotide
  Antisense strand to SEQ ID NO: 2353606
acugagaucaccauagcuc

SEQ ID NO: 2353608 - RNA, 19 nt, Artificial Sequence
  Description of Artificial Sequence: Synthetic oligonucleotide
  Sense strand starting at position 1168 of SEQ ID NO: 1885594
cuacuuugcuuucucagga

SEQ ID NO: 2353609 - RNA, 19 nt, Artificial Sequence
  Description of Artificial Sequence: Synthetic oligonucleotide
  Antisense strand to SEQ ID NO: 2353608
uccugagaaagcaaaguag

SEQ ID NO: 2353610 - RNA, 19 nt, Artificial Sequence
  Description of Artificial Sequence: Synthetic oligonucleotide
  Sense strand starting at position 1473 of SEQ ID NO: 1885594
guguguuuaggcguuuauu

SEQ ID NO: 2353611 - RNA, 19 nt, Artificial Sequence
  Description of Artificial Sequence: Synthetic oligonucleotide
  Antisense strand to SEQ ID NO: 2353610
aauaaacgccuaaacacac

SEQ ID NO: 2353612 - RNA, 19 nt, Artificial Sequence
  Description of Artificial Sequence: Synthetic oligonucleotide
  Sense strand starting at position 1476 of SEQ ID NO: 1885594
uguuuaggcguuuauuuac

SEQ ID NO: 2353613 - RNA, 19 nt, Artificial Sequence
  Description of Artificial Sequence: Synthetic oligonucleotide
  Antisense strand to SEQ ID NO: 2353612
guaaauaaacgccuaaaca

SEQ ID NO: 2353614 - RNA, 19 nt, Artificial Sequence
  Description of Artificial Sequence: Synthetic oligonucleotide
  Sense strand starting at position 1540 of SEQ ID NO: 1885594
ggaaguaguagcugaguua

SEQ ID NO: 2353615 - RNA, 19 nt, Artificial Sequence
  Description of Artificial Sequence: Synthetic oligonucleotide
  Antisense strand to SEQ ID NO: 2353614
uaacucagcuacuacuucc

SEQ ID NO: 2353616 - RNA, 19 nt, Artificial Sequence
  Description of Artificial Sequence: Synthetic oligonucleotide
  Sense strand starting at position 1541 of SEQ ID NO: 1885594
gaaguaguagcugaguuag

SEQ ID NO: 2353617 - RNA, 19 nt, Artificial Sequence
  Description of Artificial Sequence: Synthetic oligonucleotide
  Antisense strand to SEQ ID NO: 2353616
cuaacucagcuacuacuuc

SEQ ID NO: 2353618 - RNA, 19 nt, Artificial Sequence
  Description of Artificial Sequence: Synthetic oligonucleotide
  Sense strand starting at position 1702 of SEQ ID NO: 1885594
gacauuacauggcugcaua

SEQ ID NO: 2353619 - RNA, 19 nt, Artificial Sequence
  Description of Artificial Sequence: Synthetic oligonucleotide
  Antisense strand to SEQ ID NO: 2353618
uaugcagccauguaauguc

SEQ ID NO: 2353620 - RNA, 19 nt, Artificial Sequence
  Description of Artificial Sequence: Synthetic oligonucleotide
  Sense strand starting at position 1703 of SEQ ID NO: 1885594
acauuacauggcugcauaa

SEQ ID NO: 2353621 - RNA, 19 nt, Artificial Sequence
  Description of Artificial Sequence: Synthetic oligonucleotide
  Antisense strand to SEQ ID NO: 2353620
uuaugcagccauguaaugu

SEQ ID NO: 2353622 - RNA, 19 nt, Artificial Sequence
  Description of Artificial Sequence: Synthetic oligonucleotide
  Sense strand starting at position 1728 of SEQ ID NO: 1885594
cgacucaggaucugauaau

SEQ ID NO: 2353623 - RNA, 19 nt, Artificial Sequence
  Description of Artificial Sequence: Synthetic oligonucleotide
  Antisense strand to SEQ ID NO: 2353622
auuaucagauccugagucg

SEQ ID NO: 2353624 - RNA, 19 nt, Artificial Sequence
  Description of Artificial Sequence: Synthetic oligonucleotide
  Sense strand starting at position 1740 of SEQ ID NO: 1885594
ugauaaugaaagcgugaag

SEQ ID NO: 2353625 - RNA, 19 nt, Artificial Sequence
  Description of Artificial Sequence: Synthetic oligonucleotide
  Antisense strand to SEQ ID NO: 2353624
cuucacgcuuucauuauca

SEQ ID NO: 2353626 - RNA, 19 nt, Artificial Sequence
  Description of Artificial Sequence: Synthetic oligonucleotide
  Sense strand starting at position 2005 of SEQ ID NO: 1885594
cuaagcauucugggagauu

SEQ ID NO: 2353627 - RNA, 19 nt, Artificial Sequence
  Description of Artificial Sequence: Synthetic oligonucleotide
  Antisense strand to SEQ ID NO: 2353626
aaucucccagaaugcuuag

SEQ ID NO: 2353628 - RNA, 19 nt, Artificial Sequence
  Description of Artificial Sequence: Synthetic oligonucleotide
  Sense strand starting at position 2020 of SEQ ID NO: 1885594
gauugaaguucgucaggaa

SEQ ID NO: 2353629 - RNA, 19 nt, Artificial Sequence
  Description of Artificial Sequence: Synthetic oligonucleotide
  Antisense strand to SEQ ID NO: 2353628
uuccugacgaacuucaauc

SEQ ID NO: 2353630 - RNA, 19 nt, Artificial Sequence
  Description of Artificial Sequence: Synthetic oligonucleotide
  Sense strand starting at position 2021 of SEQ ID NO: 1885594
auugaaguucgucaggaac

SEQ ID NO: 2353631 - RNA, 19 nt, Artificial Sequence
  Description of Artificial Sequence: Synthetic oligonucleotide
  Antisense strand to SEQ ID NO: 2353630
guuccugacgaacuucaau

SEQ ID NO: 2353632 - RNA, 19 nt, Artificial Sequence
  Description of Artificial Sequence: Synthetic oligonucleotide
  Sense strand starting at position 2042 of SEQ ID NO: 1885594
gacccugagauugguggau

SEQ ID NO: 2353633 - RNA, 19 nt, Artificial Sequence
  Description of Artificial Sequence: Synthetic oligonucleotide
  Antisense strand to SEQ ID NO: 2353632
auccaccaaucucaggguc

SEQ ID NO: 2353634 - RNA, 19 nt, Artificial Sequence
  Description of Artificial Sequence: Synthetic oligonucleotide
  Sense strand starting at position 2183 of SEQ ID NO: 1885594
cuaguuugacuuugugauu

SEQ ID NO: 2353635 - RNA, 19 nt, Artificial Sequence
  Description of Artificial Sequence: Synthetic oligonucleotide
  Antisense strand to SEQ ID NO: 2353634
aaucacaaagucaaacuag

SEQ ID NO: 2353636 - RNA, 19 nt, Artificial Sequence
  Description of Artificial Sequence: Synthetic oligonucleotide
  Sense strand starting at position 2188 of SEQ ID NO: 1885594
uugacuuugugauuggcua

SEQ ID NO: 2353637 - RNA, 19 nt, Artificial Sequence
  Description of Artificial Sequence: Synthetic oligonucleotide
  Antisense strand to SEQ ID NO: 2353636
uagccaaucacaaagucaa

SEQ ID NO: 2353638 - RNA, 19 nt, Artificial Sequence
  Description of Artificial Sequence: Synthetic oligonucleotide
  Sense strand starting at position 2420 of SEQ ID NO: 1885594
acuagucaucccggagaag

SEQ ID NO: 2353639 - RNA, 19 nt, Artificial Sequence
  Description of Artificial Sequence: Synthetic oligonucleotide
  Antisense strand to SEQ ID NO: 2353638
cuucuccgggaugacuagu

SEQ ID NO: 2353640 - RNA, 19 nt, Artificial Sequence
  Description of Artificial Sequence: Synthetic oligonucleotide
  Sense strand starting at position 2507 of SEQ ID NO: 1885594
gacccaguaacgugaggaa

SEQ ID NO: 2353641 - RNA, 19 nt, Artificial Sequence
  Description of Artificial Sequence: Synthetic oligonucleotide
  Antisense strand to SEQ ID NO: 2353640
uuccucacguuacuggguc

SEQ ID NO: 2353642 - RNA, 19 nt, Artificial Sequence
  Description of Artificial Sequence: Synthetic oligonucleotide
  Sense strand starting at position 2565 of SEQ ID NO: 1885594
uugggagaguuguugggua

SEQ ID NO: 2353643 - RNA, 19 nt, Artificial Sequence
  Description of Artificial Sequence: Synthetic oligonucleotide
  Antisense strand to SEQ ID NO: 2353642
uacccaacaacucucccaa

SEQ ID NO: 2353644 - RNA, 19 nt, Artificial Sequence
  Description of Artificial Sequence: Synthetic oligonucleotide
  Sense strand starting at position 2567 of SEQ ID NO: 1885594
gggagaguuguuggguaaa

SEQ ID NO: 2353645 - RNA, 19 nt, Artificial Sequence
  Description of Artificial Sequence: Synthetic oligonucleotide
  Antisense strand to SEQ ID NO: 2353644
uuuacccaacaacucuccc

SEQ ID NO: 2353646 - RNA, 19 nt, Artificial Sequence
  Description of Artificial Sequence: Synthetic oligonucleotide
  Sense strand starting at position 2569 of SEQ ID NO: 1885594
gagaguuguuggguaaacu

SEQ ID NO: 2353647 - RNA, 19 nt, Artificial Sequence
  Description of Artificial Sequence: Synthetic oligonucleotide
  Antisense strand to SEQ ID NO: 2353646
aguuuacccaacaacucuc

SEQ ID NO: 2353648 - RNA, 19 nt, Artificial Sequence
  Description of Artificial Sequence: Synthetic oligonucleotide
  Sense strand starting at position 2570 of SEQ ID NO: 1885594
agaguuguuggguaaacuc

SEQ ID NO: 2353649 - RNA, 19 nt, Artificial Sequence
  Description of Artificial Sequence: Synthetic oligonucleotide
  Antisense strand to SEQ ID NO: 2353648
gaguuuacccaacaacucu

SEQ ID NO: 2353650 - RNA, 19 nt, Artificial Sequence
  Description of Artificial Sequence: Synthetic oligonucleotide
  Sense strand starting at position 2597 of SEQ ID NO: 1885594
ccuggaggucgcgauuauu

SEQ ID NO: 2353651 - RNA, 19 nt, Artificial Sequence
  Description of Artificial Sequence: Synthetic oligonucleotide
  Antisense strand to SEQ ID NO: 2353650
aauaaucgcgaccuccagg

SEQ ID NO: 2353652 - RNA, 19 nt, Artificial Sequence
  Description of Artificial Sequence: Synthetic oligonucleotide
  Sense strand starting at position 2695 of SEQ ID NO: 1885594
ggcaaaucuggaugugaug

SEQ ID NO: 2353653 - RNA, 19 nt, Artificial Sequence
  Description of Artificial Sequence: Synthetic oligonucleotide
  Antisense strand to SEQ ID NO: 2353652
caucacauccagauuugcc

SEQ ID NO: 2353654 - RNA, 19 nt, Artificial Sequence
  Description of Artificial Sequence: Synthetic oligonucleotide
  Sense strand starting at position 2984 of SEQ ID NO: 1885594
cgcgguuguagguuugauu

SEQ ID NO: 2353655 - RNA, 19 nt, Artificial Sequence
  Description of Artificial Sequence: Synthetic oligonucleotide
  Antisense strand to SEQ ID NO: 2353654
aaucaaaccuacaaccgcg

SEQ ID NO: 2353656 - RNA, 19 nt, Artificial Sequence
  Description of Artificial Sequence: Synthetic oligonucleotide
  Sense strand starting at position 2993 of SEQ ID NO: 1885594
agguuugauuuccucugca

SEQ ID NO: 2353657 - RNA, 19 nt, Artificial Sequence
  Description of Artificial Sequence: Synthetic oligonucleotide
  Antisense strand to SEQ ID NO: 2353656
ugcagaggaaaucaaaccu

SEQ ID NO: 2353658 - RNA, 19 nt, Artificial Sequence
  Description of Artificial Sequence: Synthetic oligonucleotide
  Sense strand starting at position 3210 of SEQ ID NO: 1885594
uuuguuagucccugggaua

SEQ ID NO: 2353659 - RNA, 19 nt, Artificial Sequence
  Description of Artificial Sequence: Synthetic oligonucleotide
  Antisense strand to SEQ ID NO: 2353658
uaucccagggacuaacaaa

SEQ ID NO: 2353660 - RNA, 19 nt, Artificial Sequence
  Description of Artificial Sequence: Synthetic oligonucleotide
  Sense strand starting at position 3211 of SEQ ID NO: 1885594
uuguuagucccugggauau

SEQ ID NO: 2353661 - RNA, 19 nt, Artificial Sequence
  Description of Artificial Sequence: Synthetic oligonucleotide
  Antisense strand to SEQ ID NO: 2353660
auaucccagggacuaacaa

SEQ ID NO: 2353662 - RNA, 19 nt, Artificial Sequence
  Description of Artificial Sequence: Synthetic oligonucleotide
  Sense strand starting at position 3273 of SEQ ID NO: 1885594
aucccaugucuauguagaa

SEQ ID NO: 2353663 - RNA, 19 nt, Artificial Sequence
  Description of Artificial Sequence: Synthetic oligonucleotide
  Antisense strand to SEQ ID NO: 2353662
uucuacauagacaugggau

SEQ ID NO: 2353664 - RNA, 19 nt, Artificial Sequence
  Description of Artificial Sequence: Synthetic oligonucleotide
  Sense strand starting at position 3274 of SEQ ID NO: 1885594
ucccaugucuauguagaaa

SEQ ID NO: 2353665 - RNA, 19 nt, Artificial Sequence
  Description of Artificial Sequence: Synthetic oligonucleotide
  Antisense strand to SEQ ID NO: 2353664
uuucuacauagacauggga

SEQ ID NO: 2353666 - RNA, 19 nt, Artificial Sequence
  Description of Artificial Sequence: Synthetic oligonucleotide
  Sense strand starting at position 3344 of SEQ ID NO: 1885594
aaguaaagugcugaaccuu

SEQ ID NO: 2353667 - RNA, 19 nt, Artificial Sequence
  Description of Artificial Sequence: Synthetic oligonucleotide
  Antisense strand to SEQ ID NO: 2353666
aagguucagcacuuuacuu

SEQ ID NO: 2353668 - RNA, 19 nt, Artificial Sequence
  Description of Artificial Sequence: Synthetic oligonucleotide
  Sense strand starting at position 3389 of SEQ ID NO: 1885594
gggagugcagacuggaaua

SEQ ID NO: 2353669 - RNA, 19 nt, Artificial Sequence
  Description of Artificial Sequence: Synthetic oligonucleotide
  Antisense strand to SEQ ID NO: 2353668
uauuccagucugcacuccc

SEQ ID NO: 2353670 - RNA, 19 nt, Artificial Sequence
  Description of Artificial Sequence: Synthetic oligonucleotide
  Sense strand starting at position 3399 of SEQ ID NO: 1885594
acuggaauacgcuaauugu

SEQ ID NO: 2353671 - RNA, 19 nt, Artificial Sequence
  Description of Artificial Sequence: Synthetic oligonucleotide
  Antisense strand to SEQ ID NO: 2353670
acaauuagcguauuccagu

SEQ ID NO: 2353672 - RNA, 19 nt, Artificial Sequence
  Description of Artificial Sequence: Synthetic oligonucleotide
  Sense strand starting at position 3417 of SEQ ID NO: 1885594
ugggaaagcuuucuccaug

SEQ ID NO: 2353673 - RNA, 19 nt, Artificial Sequence
  Description of Artificial Sequence: Synthetic oligonucleotide
  Antisense strand to SEQ ID NO: 2353672
cauggagaaagcuuuccca

SEQ ID NO: 2353674 - RNA, 19 nt, Artificial Sequence
  Description of Artificial Sequence: Synthetic oligonucleotide
  Sense strand starting at position 3432 of SEQ ID NO: 1885594
cauggauucguccagacuc

SEQ ID NO: 2353675 - RNA, 19 nt, Artificial Sequence
  Description of Artificial Sequence: Synthetic oligonucleotide
  Antisense strand to SEQ ID NO: 2353674
gagucuggacgaauccaug

SEQ ID NO: 2353676 - RNA, 19 nt, Artificial Sequence
  Description of Artificial Sequence: Synthetic oligonucleotide
  Sense strand starting at position 3434 of SEQ ID NO: 1885594
uggauucguccagacucaa

SEQ ID NO: 2353677 - RNA, 19 nt, Artificial Sequence
  Description of Artificial Sequence: Synthetic oligonucleotide
  Antisense strand to SEQ ID NO: 2353676
uugagucuggacgaaucca

SEQ ID NO: 2353678 - RNA, 19 nt, Artificial Sequence
  Description of Artificial Sequence: Synthetic oligonucleotide
  Sense strand starting at position 3456 of SEQ ID NO: 1885594
uggagaagauucgcaggaa

SEQ ID NO: 2353679 - RNA, 19 nt, Artificial Sequence
  Description of Artificial Sequence: Synthetic oligonucleotide
  Antisense strand to SEQ ID NO: 2353678
uuccugcgaaucuucucca

SEQ ID NO: 2353680 - RNA, 19 nt, Artificial Sequence
  Description of Artificial Sequence: Synthetic oligonucleotide
  Sense strand starting at position 3459 of SEQ ID NO: 1885594
agaagauucgcaggaacuc

SEQ ID NO: 2353681 - RNA, 19 nt, Artificial Sequence
  Description of Artificial Sequence: Synthetic oligonucleotide
  Antisense strand to SEQ ID NO: 2353680
gaguuccugcgaaucuucu

SEQ ID NO: 2353682 - RNA, 19 nt, Artificial Sequence
  Description of Artificial Sequence: Synthetic oligonucleotide
  Sense strand starting at position 3483 of SEQ ID NO: 1885594
cgguaagacuguuugacuu

SEQ ID NO: 2353683 - RNA, 19 nt, Artificial Sequence
  Description of Artificial Sequence: Synthetic oligonucleotide
  Antisense strand to SEQ ID NO: 2353682
aagucaaacagucuuaccg

SEQ ID NO: 2353684 - RNA, 19 nt, Artificial Sequence
  Description of Artificial Sequence: Synthetic oligonucleotide
  Sense strand starting at position 1115 of SEQ ID NO: 1885595
agauaaaucugggagagau

SEQ ID NO: 2353685 - RNA, 19 nt, Artificial Sequence
  Description of Artificial Sequence: Synthetic oligonucleotide
  Antisense strand to SEQ ID NO: 2353684
aucucucccagauuuaucu

SEQ ID NO: 2353686 - RNA, 19 nt, Artificial Sequence
  Description of Artificial Sequence: Synthetic oligonucleotide
  Sense strand starting at position 1155 of SEQ ID NO: 1885595
guuucagacguccaagaag

SEQ ID NO: 2353687 - RNA, 19 nt, Artificial Sequence
  Description of Artificial Sequence: Synthetic oligonucleotide
  Antisense strand to SEQ ID NO: 2353686
cuucuuggacgucugaaac

SEQ ID NO: 2353688 - RNA, 19 nt, Artificial Sequence
  Description of Artificial Sequence: Synthetic oligonucleotide
  Sense strand starting at position 1222 of SEQ ID NO: 1885595
auccgaguugcauaggaga

SEQ ID NO: 2353689 - RNA, 19 nt, Artificial Sequence
  Description of Artificial Sequence: Synthetic oligonucleotide
  Antisense strand to SEQ ID NO: 2353688
ucuccuaugcaacucggau

SEQ ID NO: 2353690 - RNA, 19 nt, Artificial Sequence
  Description of Artificial Sequence: Synthetic oligonucleotide
  Sense strand starting at position 1224 of SEQ ID NO: 1885595
ccgaguugcauaggagauu

SEQ ID NO: 2353691 - RNA, 19 nt, Artificial Sequence
  Description of Artificial Sequence: Synthetic oligonucleotide
  Antisense strand to SEQ ID NO: 2353690
aaucuccuaugcaacucgg

SEQ ID NO: 2353692 - RNA, 19 nt, Artificial Sequence
  Description of Artificial Sequence: Synthetic oligonucleotide
  Sense strand starting at position 1253 of SEQ ID NO: 1885595
ucuguuaaagccugguaac

SEQ ID NO: 2353693 - RNA, 19 nt, Artificial Sequence
  Description of Artificial Sequence: Synthetic oligonucleotide
  Antisense strand to SEQ ID NO: 2353692
guuaccaggcuuuaacaga

SEQ ID NO: 2353694 - RNA, 19 nt, Artificial Sequence
  Description of Artificial Sequence: Synthetic oligonucleotide
  Sense strand starting at position 1254 of SEQ ID NO: 1885595
cuguuaaagccugguaacu

SEQ ID NO: 2353695 - RNA, 19 nt, Artificial Sequence
  Description of Artificial Sequence: Synthetic oligonucleotide
  Antisense strand to SEQ ID NO: 2353694
aguuaccaggcuuuaacag

SEQ ID NO: 2353696 - RNA, 19 nt, Artificial Sequence
  Description of Artificial Sequence: Synthetic oligonucleotide
  Sense strand starting at position 1281 of SEQ ID NO: 1885595
ggcauagaugccuagggua

SEQ ID NO: 2353697 - RNA, 19 nt, Artificial Sequence
  Description of Artificial Sequence: Synthetic oligonucleotide
  Antisense strand to SEQ ID NO: 2353696
uacccuaggcaucuaugcc

SEQ ID NO: 2353698 - RNA, 19 nt, Artificial Sequence
  Description of Artificial Sequence: Synthetic oligonucleotide
  Sense strand starting at position 1283 of SEQ ID NO: 1885595
cauagaugccuaggguaaa

SEQ ID NO: 2353699 - RNA, 19 nt, Artificial Sequence
  Description of Artificial Sequence: Synthetic oligonucleotide
  Antisense strand to SEQ ID NO: 2353698
uuuacccuaggcaucuaug

SEQ ID NO: 2353700 - RNA, 19 nt, Artificial Sequence
  Description of Artificial Sequence: Synthetic oligonucleotide
  Sense strand starting at position 1295 of SEQ ID NO: 1885595
ggguaaagugcagauugga

SEQ ID NO: 2353701 - RNA, 19 nt, Artificial Sequence
  Description of Artificial Sequence: Synthetic oligonucleotide
  Antisense strand to SEQ ID NO: 2353700
uccaaucugcacuuuaccc

SEQ ID NO: 2353702 - RNA, 19 nt, Artificial Sequence
  Description of Artificial Sequence: Synthetic oligonucleotide
  Sense strand starting at position 1413 of SEQ ID NO: 1885595
ccgagaagagaaugucuuu

SEQ ID NO: 2353703 - RNA, 19 nt, Artificial Sequence
  Description of Artificial Sequence: Synthetic oligonucleotide
  Antisense strand to SEQ ID NO: 2353702
aaagacauucucuucucgg

SEQ ID NO: 2353704 - RNA, 19 nt, Artificial Sequence
  Description of Artificial Sequence: Synthetic oligonucleotide
  Sense strand starting at position 1518 of SEQ ID NO: 1885595
gggauuagauuuggugaca

SEQ ID NO: 2353705 - RNA, 19 nt, Artificial Sequence
  Description of Artificial Sequence: Synthetic oligonucleotide
  Antisense strand to SEQ ID NO: 2353704
ugucaccaaaucuaauccc

SEQ ID NO: 2353706 - RNA, 19 nt, Artificial Sequence
  Description of Artificial Sequence: Synthetic oligonucleotide
  Sense strand starting at position 1541 of SEQ ID NO: 1885595
ggaaacuuauguucuugga

SEQ ID NO: 2353707 - RNA, 19 nt, Artificial Sequence
  Description of Artificial Sequence: Synthetic oligonucleotide
  Antisense strand to SEQ ID NO: 2353706
uccaagaacauaaguuucc

SEQ ID NO: 2353708 - RNA, 19 nt, Artificial Sequence
  Description of Artificial Sequence: Synthetic oligonucleotide
  Sense strand starting at position 1543 of SEQ ID NO: 1885595
aaacuuauguucuuggaga

SEQ ID NO: 2353709 - RNA, 19 nt, Artificial Sequence
  Description of Artificial Sequence: Synthetic oligonucleotide
  Antisense strand to SEQ ID NO: 2353708
ucuccaagaacauaaguuu

SEQ ID NO: 2353710 - RNA, 19 nt, Artificial Sequence
  Description of Artificial Sequence: Synthetic oligonucleotide
  Sense strand starting at position 1545 of SEQ ID NO: 1885595
acuuauguucuuggagagu

SEQ ID NO: 2353711 - RNA, 19 nt, Artificial Sequence
  Description of Artificial Sequence: Synthetic oligonucleotide
  Antisense strand to SEQ ID NO: 2353710
acucuccaagaacauaagu

SEQ ID NO: 2353712 - RNA, 19 nt, Artificial Sequence
  Description of Artificial Sequence: Synthetic oligonucleotide
  Sense strand starting at position 1551 of SEQ ID NO: 1885595
guucuuggagagugaggaa

SEQ ID NO: 2353713 - RNA, 19 nt, Artificial Sequence
  Description of Artificial Sequence: Synthetic oligonucleotide
  Antisense strand to SEQ ID NO: 2353712
uuccucacucuccaagaac

SEQ ID NO: 2353714 - RNA, 19 nt, Artificial Sequence
  Description of Artificial Sequence: Synthetic oligonucleotide
  Sense strand starting at position 1583 of SEQ ID NO: 1885595
gcacaaacccuauaggagu

SEQ ID NO: 2353715 - RNA, 19 nt, Artificial Sequence
  Description of Artificial Sequence: Synthetic oligonucleotide
  Antisense strand to SEQ ID NO: 2353714
acuccuauaggguuugugc

SEQ ID NO: 2353716 - RNA, 19 nt, Artificial Sequence
  Description of Artificial Sequence: Synthetic oligonucleotide
  Sense strand starting at position 1589 of SEQ ID NO: 1885595
acccuauaggagugaagua

SEQ ID NO: 2353717 - RNA, 19 nt, Artificial Sequence
  Description of Artificial Sequence: Synthetic oligonucleotide
  Antisense strand to SEQ ID NO: 2353716
uacuucacuccuauagggu

SEQ ID NO: 2353718 - RNA, 19 nt, Artificial Sequence
  Description of Artificial Sequence: Synthetic oligonucleotide
  Sense strand starting at position 1625 of SEQ ID NO: 1885595
accacacuugugggaaguu

SEQ ID NO: 2353719 - RNA, 19 nt, Artificial Sequence
  Description of Artificial Sequence: Synthetic oligonucleotide
  Antisense strand to SEQ ID NO: 2353718
aacuucccacaaguguggu

SEQ ID NO: 2353720 - RNA, 19 nt, Artificial Sequence
  Description of Artificial Sequence: Synthetic oligonucleotide
  Sense strand starting at position 1635 of SEQ ID NO: 1885595
ugggaaguuuggcuaugaa

SEQ ID NO: 2353721 - RNA, 19 nt, Artificial Sequence
  Description of Artificial Sequence: Synthetic oligonucleotide
  Antisense strand to SEQ ID NO: 2353720
uucauagccaaacuuccca

SEQ ID NO: 2353722 - RNA, 19 nt, Artificial Sequence
  Description of Artificial Sequence: Synthetic oligonucleotide
  Sense strand starting at position 1722 of SEQ ID NO: 1885595
ggaucuuuggaauguuuaa

SEQ ID NO: 2353723 - RNA, 19 nt, Artificial Sequence
  Description of Artificial Sequence: Synthetic oligonucleotide
  Antisense strand to SEQ ID NO: 2353722
uuaaacauuccaaagaucc

SEQ ID NO: 2353724 - RNA, 19 nt, Artificial Sequence
  Description of Artificial Sequence: Synthetic oligonucleotide
  Sense strand starting at position 2128 of SEQ ID NO: 1885595
gcgucugaggugagguaaa

SEQ ID NO: 2353725 - RNA, 19 nt, Artificial Sequence
  Description of Artificial Sequence: Synthetic oligonucleotide
  Antisense strand to SEQ ID NO: 2353724
uuuaccucaccucagacgc

SEQ ID NO: 2353726 - RNA, 19 nt, Artificial Sequence
  Description of Artificial Sequence: Synthetic oligonucleotide
  Sense strand starting at position 2234 of SEQ ID NO: 1885595
ggcuuagucggagauugag

SEQ ID NO: 2353727 - RNA, 19 nt, Artificial Sequence
  Description of Artificial Sequence: Synthetic oligonucleotide
  Antisense strand to SEQ ID NO: 2353726
cucaaucuccgacuaagcc

SEQ ID NO: 2353728 - RNA, 19 nt, Artificial Sequence
  Description of Artificial Sequence: Synthetic oligonucleotide
  Sense strand starting at position 2609 of SEQ ID NO: 1885595
guaaguccauccucuggaa

SEQ ID NO: 2353729 - RNA, 19 nt, Artificial Sequence
  Description of Artificial Sequence: Synthetic oligonucleotide
  Antisense strand to SEQ ID NO: 2353728
uuccagaggauggacuuac

SEQ ID NO: 2353730 - RNA, 19 nt, Artificial Sequence
  Description of Artificial Sequence: Synthetic oligonucleotide
  Sense strand starting at position 2679 of SEQ ID NO: 1885595
ugcuuucuccgacaggaug

SEQ ID NO: 2353731 - RNA, 19 nt, Artificial Sequence
  Description of Artificial Sequence: Synthetic oligonucleotide
  Antisense strand to SEQ ID NO: 2353730
cauccugucggagaaagca

SEQ ID NO: 2353732 - RNA, 19 nt, Artificial Sequence
  Description of Artificial Sequence: Synthetic oligonucleotide
  Sense strand starting at position 2842 of SEQ ID NO: 1885595
accugugagcuauggguaa

SEQ ID NO: 2353733 - RNA, 19 nt, Artificial Sequence
  Description of Artificial Sequence: Synthetic oligonucleotide
  Antisense strand to SEQ ID NO: 2353732
uuacccauagcucacaggu

SEQ ID NO: 2353734 - RNA, 19 nt, Artificial Sequence
  Description of Artificial Sequence: Synthetic oligonucleotide
  Sense strand starting at position 2844 of SEQ ID NO: 1885595
cugugagcuauggguaaug

SEQ ID NO: 2353735 - RNA, 19 nt, Artificial Sequence
  Description of Artificial Sequence: Synthetic oligonucleotide
  Antisense strand to SEQ ID NO: 2353734
cauuacccauagcucacag

SEQ ID NO: 2353736 - RNA, 19 nt, Artificial Sequence
  Description of Artificial Sequence: Synthetic oligonucleotide
  Sense strand starting at position 2846 of SEQ ID NO: 1885595
gugagcuauggguaaugga

SEQ ID NO: 2353737 - RNA, 19 nt, Artificial Sequence
  Description of Artificial Sequence: Synthetic oligonucleotide
  Antisense strand to SEQ ID NO: 2353736
uccauuacccauagcucac

SEQ ID NO: 2353738 - RNA, 19 nt, Artificial Sequence
  Description of Artificial Sequence: Synthetic oligonucleotide
  Sense strand starting at position 2957 of SEQ ID NO: 1885595
ggcuuaaguccucacguau

SEQ ID NO: 2353739 - RNA, 19 nt, Artificial Sequence
  Description of Artificial Sequence: Synthetic oligonucleotide
  Antisense strand to SEQ ID NO: 2353738
auacgugaggacuuaagcc

SEQ ID NO: 2353740 - RNA, 19 nt, Artificial Sequence
  Description of Artificial Sequence: Synthetic oligonucleotide
  Sense strand starting at position 3023 of SEQ ID NO: 1885595
guugacuguuucucuuaag

SEQ ID NO: 2353741 - RNA, 19 nt, Artificial Sequence
  Description of Artificial Sequence: Synthetic oligonucleotide
  Antisense strand to SEQ ID NO: 2353740
cuuaagagaaacagucaac

SEQ ID NO: 2353742 - RNA, 19 nt, Artificial Sequence
  Description of Artificial Sequence: Synthetic oligonucleotide
  Sense strand starting at position 3059 of SEQ ID NO: 1885595
acaagaaauugguaugaaa

SEQ ID NO: 2353743 - RNA, 19 nt, Artificial Sequence
  Description of Artificial Sequence: Synthetic oligonucleotide
  Antisense strand to SEQ ID NO: 2353742
uuucauaccaauuucuugu

SEQ ID NO: 2353744 - RNA, 19 nt, Artificial Sequence
  Description of Artificial Sequence: Synthetic oligonucleotide
  Sense strand starting at position 3062 of SEQ ID NO: 1885595
agaaauugguaugaaauag

SEQ ID NO: 2353745 - RNA, 19 nt, Artificial Sequence
  Description of Artificial Sequence: Synthetic oligonucleotide
  Antisense strand to SEQ ID NO: 2353744
cuauuucauaccaauuucu

SEQ ID NO: 2353746 - RNA, 19 nt, Artificial Sequence
  Description of Artificial Sequence: Synthetic oligonucleotide
  Sense strand starting at position 3101 of SEQ ID NO: 1885595
gagggauaugugcacuuau

SEQ ID NO: 2353747 - RNA, 19 nt, Artificial Sequence
  Description of Artificial Sequence: Synthetic oligonucleotide
  Antisense strand to SEQ ID NO: 2353746
auaagugcacauaucccuc

SEQ ID NO: 2353748 - RNA, 19 nt, Artificial Sequence
  Description of Artificial Sequence: Synthetic oligonucleotide
  Sense strand starting at position 3108 of SEQ ID NO: 1885595
augugcacuuauguauuua

SEQ ID NO: 2353749 - RNA, 19 nt, Artificial Sequence
  Description of Artificial Sequence: Synthetic oligonucleotide
  Antisense strand to SEQ ID NO: 2353748
uaaauacauaagugcacau

SEQ ID NO: 2353750 - RNA, 19 nt, Artificial Sequence
  Description of Artificial Sequence: Synthetic oligonucleotide
  Sense strand starting at position 3146 of SEQ ID NO: 1885595
guuucuccugcagauggaa

SEQ ID NO: 2353751 - RNA, 19 nt, Artificial Sequence
  Description of Artificial Sequence: Synthetic oligonucleotide
  Antisense strand to SEQ ID NO: 2353750
uuccaucugcaggagaaac

SEQ ID NO: 2353752 - RNA, 19 nt, Artificial Sequence
  Description of Artificial Sequence: Synthetic oligonucleotide
  Sense strand starting at position 3219 of SEQ ID NO: 1885595
ggcuaaagccaucaccaaa

SEQ ID NO: 2353753 - RNA, 19 nt, Artificial Sequence
  Description of Artificial Sequence: Synthetic oligonucleotide
  Antisense strand to SEQ ID NO: 2353752
uuuggugauggcuuuagcc

SEQ ID NO: 2353754 - RNA, 19 nt, Artificial Sequence
  Description of Artificial Sequence: Synthetic oligonucleotide
  Sense strand starting at position 3332 of SEQ ID NO: 1885595
cucagaccucuguagcuau

SEQ ID NO: 2353755 - RNA, 19 nt, Artificial Sequence
  Description of Artificial Sequence: Synthetic oligonucleotide
  Antisense strand to SEQ ID NO: 2353754
auagcuacagaggucugag

SEQ ID NO: 2353756 - RNA, 19 nt, Artificial Sequence
  Description of Artificial Sequence: Synthetic oligonucleotide
  Sense strand starting at position 3531 of SEQ ID NO: 1885595
acaccauaguucuuuagga

SEQ ID NO: 2353757 - RNA, 19 nt, Artificial Sequence
  Description of Artificial Sequence: Synthetic oligonucleotide
  Antisense strand to SEQ ID NO: 2353756
uccuaaagaacuauggugu

SEQ ID NO: 2353758 - RNA, 19 nt, Artificial Sequence
  Description of Artificial Sequence: Synthetic oligonucleotide
  Sense strand starting at position 3539 of SEQ ID NO: 1885595
guucuuuaggaacagaguu

SEQ ID NO: 2353759 - RNA, 19 nt, Artificial Sequence
  Description of Artificial Sequence: Synthetic oligonucleotide
  Antisense strand to SEQ ID NO: 2353758
aacucuguuccuaaagaac

SEQ ID NO: 2353760 - RNA, 19 nt, Artificial Sequence
  Description of Artificial Sequence: Synthetic oligonucleotide
  Sense strand starting at position 3551 of SEQ ID NO: 1885595
cagaguuccuggucaccuu

SEQ ID NO: 2353761 - RNA, 19 nt, Artificial Sequence
  Description of Artificial Sequence: Synthetic oligonucleotide
  Antisense strand to SEQ ID NO: 2353760
aaggugaccaggaacucug

SEQ ID NO: 2353762 - RNA, 19 nt, Artificial Sequence
  Description of Artificial Sequence: Synthetic oligonucleotide
  Sense strand starting at position 3571 of SEQ ID NO: 1885595
gggaccaaguaauugcaaa

SEQ ID NO: 2353763 - RNA, 19 nt, Artificial Sequence
  Description of Artificial Sequence: Synthetic oligonucleotide
  Antisense strand to SEQ ID NO: 2353762
uuugcaauuacuugguccc

SEQ ID NO: 2353764 - RNA, 19 nt, Artificial Sequence
  Description of Artificial Sequence: Synthetic oligonucleotide
  Sense strand starting at position 85 of SEQ ID NO: 1885596
ugacucaagcuguauacau

SEQ ID NO: 2353765 - RNA, 19 nt, Artificial Sequence
  Description of Artificial Sequence: Synthetic oligonucleotide
  Antisense strand to SEQ ID NO: 2353764
auguauacagcuugaguca

SEQ ID NO: 2353766 - RNA, 19 nt, Artificial Sequence
  Description of Artificial Sequence: Synthetic oligonucleotide
  Sense strand starting at position 179 of SEQ ID NO: 1885596
gacuguucccuugaguaua

SEQ ID NO: 2353767 - RNA, 19 nt, Artificial Sequence
  Description of Artificial Sequence: Synthetic oligonucleotide
  Antisense strand to SEQ ID NO: 2353766
uauacucaagggaacaguc

SEQ ID NO: 2353768 - RNA, 19 nt, Artificial Sequence
  Description of Artificial Sequence: Synthetic oligonucleotide
  Sense strand starting at position 290 of SEQ ID NO: 1885596
ugauucuauugaguuaaca

SEQ ID NO: 2353769 - RNA, 19 nt, Artificial Sequence
  Description of Artificial Sequence: Synthetic oligonucleotide
  Antisense strand to SEQ ID NO: 2353768
uguuaacucaauagaauca

SEQ ID NO: 2353770 - RNA, 19 nt, Artificial Sequence
  Description of Artificial Sequence: Synthetic oligonucleotide
  Sense strand starting at position 573 of SEQ ID NO: 1885596
gaagacucauauguugaua

SEQ ID NO: 2353771 - RNA, 19 nt, Artificial Sequence
  Description of Artificial Sequence: Synthetic oligonucleotide
  Antisense strand to SEQ ID NO: 2353770
uaucaacauaugagucuuc

SEQ ID NO: 2353772 - RNA, 19 nt, Artificial Sequence
  Description of Artificial Sequence: Synthetic oligonucleotide
  Sense strand starting at position 581 of SEQ ID NO: 1885596
auauguugauauccaguaa

SEQ ID NO: 2353773 - RNA, 19 nt, Artificial Sequence
  Description of Artificial Sequence: Synthetic oligonucleotide
  Antisense strand to SEQ ID NO: 2353772
uuacuggauaucaacauau

SEQ ID NO: 2353774 - RNA, 19 nt, Artificial Sequence
  Description of Artificial Sequence: Synthetic oligonucleotide
  Sense strand starting at position 585 of SEQ ID NO: 1885596
guugauauccaguaaaucc

SEQ ID NO: 2353775 - RNA, 19 nt, Artificial Sequence
  Description of Artificial Sequence: Synthetic oligonucleotide
  Antisense strand to SEQ ID NO: 2353774
ggauuuacuggauaucaac

SEQ ID NO: 2353776 - RNA, 19 nt, Artificial Sequence
  Description of Artificial Sequence: Synthetic oligonucleotide
  Sense strand starting at position 764 of SEQ ID NO: 1885596
acuauuccggcauaacaca

SEQ ID NO: 2353777 - RNA, 19 nt, Artificial Sequence
  Description of Artificial Sequence: Synthetic oligonucleotide
  Antisense strand to SEQ ID NO: 2353776
uguguuaugccggaauagu

SEQ ID NO: 2353778 - RNA, 19 nt, Artificial Sequence
  Description of Artificial Sequence: Synthetic oligonucleotide
  Sense strand starting at position 1010 of SEQ ID NO: 1885596
gaauaucugugacucauga

SEQ ID NO: 2353779 - RNA, 19 nt, Artificial Sequence
  Description of Artificial Sequence: Synthetic oligonucleotide
  Antisense strand to SEQ ID NO: 2353778
ucaugagucacagauauuc

SEQ ID NO: 2353780 - RNA, 19 nt, Artificial Sequence
  Description of Artificial Sequence: Synthetic oligonucleotide
  Sense strand starting at position 1107 of SEQ ID NO: 1885596
ggaguugcuagugaacaua

SEQ ID NO: 2353781 - RNA, 19 nt, Artificial Sequence
  Description of Artificial Sequence: Synthetic oligonucleotide
  Antisense strand to SEQ ID NO: 2353780
uauguucacuagcaacucc

SEQ ID NO: 2353782 - RNA, 19 nt, Artificial Sequence
  Description of Artificial Sequence: Synthetic oligonucleotide
  Sense strand starting at position 1121 of SEQ ID NO: 1885596
acauaaggagcuugagacu

SEQ ID NO: 2353783 - RNA, 19 nt, Artificial Sequence
  Description of Artificial Sequence: Synthetic oligonucleotide
  Antisense strand to SEQ ID NO: 2353782
agucucaagcuccuuaugu

SEQ ID NO: 2353784 - RNA, 19 nt, Artificial Sequence
  Description of Artificial Sequence: Synthetic oligonucleotide
  Sense strand starting at position 1273 of SEQ ID NO: 1885596
gcuuguguuagcuugucua

SEQ ID NO: 2353785 - RNA, 19 nt, Artificial Sequence
  Description of Artificial Sequence: Synthetic oligonucleotide
  Antisense strand to SEQ ID NO: 2353784
uagacaagcuaacacaagc

SEQ ID NO: 2353786 - RNA, 19 nt, Artificial Sequence
  Description of Artificial Sequence: Synthetic oligonucleotide
  Sense strand starting at position 1297 of SEQ ID NO: 1885596
uuguaauugguaugaaaca

SEQ ID NO: 2353787 - RNA, 19 nt, Artificial Sequence
  Description of Artificial Sequence: Synthetic oligonucleotide
  Antisense strand to SEQ ID NO: 2353786
uguuucauaccaauuacaa

SEQ ID NO: 2353788 - RNA, 19 nt, Artificial Sequence
  Description of Artificial Sequence: Synthetic oligonucleotide
  Sense strand starting at position 1308 of SEQ ID NO: 1885596
augaaacagcuuugauaau

SEQ ID NO: 2353789 - RNA, 19 nt, Artificial Sequence
  Description of Artificial Sequence: Synthetic oligonucleotide
  Antisense strand to SEQ ID NO: 2353788
auuaucaaagcuguuucau

SEQ ID NO: 2353790 - RNA, 19 nt, Artificial Sequence
  Description of Artificial Sequence: Synthetic oligonucleotide
  Sense strand starting at position 1514 of SEQ ID NO: 1885596
aucguuuaccacuauuaua

SEQ ID NO: 2353791 - RNA, 19 nt, Artificial Sequence
  Description of Artificial Sequence: Synthetic oligonucleotide
  Antisense strand to SEQ ID NO: 2353790
uauaauagugguaaacgau

SEQ ID NO: 2353792 - RNA, 19 nt, Artificial Sequence
  Description of Artificial Sequence: Synthetic oligonucleotide
  Sense strand starting at position 1898 of SEQ ID NO: 1885596
gugguucucagguauaaga

SEQ ID NO: 2353793 - RNA, 19 nt, Artificial Sequence
  Description of Artificial Sequence: Synthetic oligonucleotide
  Antisense strand to SEQ ID NO: 2353792
ucuuauaccugagaaccac

SEQ ID NO: 2353794 - RNA, 19 nt, Artificial Sequence
  Description of Artificial Sequence: Synthetic oligonucleotide
  Sense strand starting at position 2116 of SEQ ID NO: 1885596
ccuuaauaauuugagggau

SEQ ID NO: 2353795 - RNA, 19 nt, Artificial Sequence
  Description of Artificial Sequence: Synthetic oligonucleotide
  Antisense strand to SEQ ID NO: 2353794
aucccucaaauuauuaagg

SEQ ID NO: 2353796 - RNA, 19 nt, Artificial Sequence
  Description of Artificial Sequence: Synthetic oligonucleotide
  Sense strand starting at position 2287 of SEQ ID NO: 1885596
agucaaauuggaggagagu

SEQ ID NO: 2353797 - RNA, 19 nt, Artificial Sequence
  Description of Artificial Sequence: Synthetic oligonucleotide
  Antisense strand to SEQ ID NO: 2353796
acucuccuccaauuugacu

SEQ ID NO: 2353798 - RNA, 19 nt, Artificial Sequence
  Description of Artificial Sequence: Synthetic oligonucleotide
  Sense strand starting at position 2385 of SEQ ID NO: 1885596
guauuaauuccagaaagca

SEQ ID NO: 2353799 - RNA, 19 nt, Artificial Sequence
  Description of Artificial Sequence: Synthetic oligonucleotide
  Antisense strand to SEQ ID NO: 2353798
ugcuuucuggaauuaauac

SEQ ID NO: 2353800 - RNA, 19 nt, Artificial Sequence
  Description of Artificial Sequence: Synthetic oligonucleotide
  Sense strand starting at position 2438 of SEQ ID NO: 1885596
gcagguagugaugaaggau

SEQ ID NO: 2353801 - RNA, 19 nt, Artificial Sequence
  Description of Artificial Sequence: Synthetic oligonucleotide
  Antisense strand to SEQ ID NO: 2353800
auccuucaucacuaccugc

SEQ ID NO: 2353802 - RNA, 19 nt, Artificial Sequence
  Description of Artificial Sequence: Synthetic oligonucleotide
  Sense strand starting at position 2595 of SEQ ID NO: 1885596
gcagaauggaguuaggguu

SEQ ID NO: 2353803 - RNA, 19 nt, Artificial Sequence
  Description of Artificial Sequence: Synthetic oligonucleotide
  Antisense strand to SEQ ID NO: 2353802
aacccuaacuccauucugc

SEQ ID NO: 2353804 - RNA, 19 nt, Artificial Sequence
  Description of Artificial Sequence: Synthetic oligonucleotide
  Sense strand starting at position 2611 of SEQ ID NO: 1885596
guuaaauuagacugaguua

SEQ ID NO: 2353805 - RNA, 19 nt, Artificial Sequence
  Description of Artificial Sequence: Synthetic oligonucleotide
  Antisense strand to SEQ ID NO: 2353804
uaacucagucuaauuuaac

SEQ ID NO: 2353806 - RNA, 19 nt, Artificial Sequence
  Description of Artificial Sequence: Synthetic oligonucleotide
  Sense strand starting at position 2791 of SEQ ID NO: 1885596
gguaaauuccaucagccua

SEQ ID NO: 2353807 - RNA, 19 nt, Artificial Sequence
  Description of Artificial Sequence: Synthetic oligonucleotide
  Antisense strand to SEQ ID NO: 2353806
uaggcugauggaauuuacc

SEQ ID NO: 2353808 - RNA, 19 nt, Artificial Sequence
  Description of Artificial Sequence: Synthetic oligonucleotide
  Sense strand starting at position 2833 of SEQ ID NO: 1885596
uugacuuaugcugaaguua

SEQ ID NO: 2353809 - RNA, 19 nt, Artificial Sequence
  Description of Artificial Sequence: Synthetic oligonucleotide
  Antisense strand to SEQ ID NO: 2353808
uaacuucagcauaagucaa

SEQ ID NO: 2353810 - RNA, 19 nt, Artificial Sequence
  Description of Artificial Sequence: Synthetic oligonucleotide
  Sense strand starting at position 2931 of SEQ ID NO: 1885596
uccacuugaagugguagaa

SEQ ID NO: 2353811 - RNA, 19 nt, Artificial Sequence
  Description of Artificial Sequence: Synthetic oligonucleotide
  Antisense strand to SEQ ID NO: 2353810
uucuaccacuucaagugga

SEQ ID NO: 2353812 - RNA, 19 nt, Artificial Sequence
  Description of Artificial Sequence: Synthetic oligonucleotide
  Sense strand starting at position 3189 of SEQ ID NO: 1885596
ucugaucucggugauacaa

SEQ ID NO: 2353813 - RNA, 19 nt, Artificial Sequence
  Description of Artificial Sequence: Synthetic oligonucleotide
  Antisense strand to SEQ ID NO: 2353812
uuguaucaccgagaucaga

SEQ ID NO: 2353814 - RNA, 19 nt, Artificial Sequence
  Description of Artificial Sequence: Synthetic oligonucleotide
  Sense strand starting at position 3199 of SEQ ID NO: 1885596
gugauacaaucuuuacuga

SEQ ID NO: 2353815 - RNA, 19 nt, Artificial Sequence
  Description of Artificial Sequence: Synthetic oligonucleotide
  Antisense strand to SEQ ID NO: 2353814
ucaguaaagauuguaucac

SEQ ID NO: 2353816 - RNA, 19 nt, Artificial Sequence
  Description of Artificial Sequence: Synthetic oligonucleotide
  Sense strand starting at position 3230 of SEQ ID NO: 1885596
guaugcugccuucugcuua

SEQ ID NO: 2353817 - RNA, 19 nt, Artificial Sequence
  Description of Artificial Sequence: Synthetic oligonucleotide
  Antisense strand to SEQ ID NO: 2353816
uaagcagaaggcagcauac

SEQ ID NO: 2353818 - RNA, 19 nt, Artificial Sequence
  Description of Artificial Sequence: Synthetic oligonucleotide
  Sense strand starting at position 3374 of SEQ ID NO: 1885596
auuauuggauguguuagaa

SEQ ID NO: 2353819 - RNA, 19 nt, Artificial Sequence
  Description of Artificial Sequence: Synthetic oligonucleotide
  Antisense strand to SEQ ID NO: 2353818
uucuaacacauccaauaau

SEQ ID NO: 2353820 - RNA, 19 nt, Artificial Sequence
  Description of Artificial Sequence: Synthetic oligonucleotide
  Sense strand starting at position 3393 of SEQ ID NO: 1885596
cugaguuuauaucuagaag

SEQ ID NO: 2353821 - RNA, 19 nt, Artificial Sequence
  Description of Artificial Sequence: Synthetic oligonucleotide
  Antisense strand to SEQ ID NO: 2353820
cuucuagauauaaacucag

SEQ ID NO: 2353822 - RNA, 19 nt, Artificial Sequence
  Description of Artificial Sequence: Synthetic oligonucleotide
  Sense strand starting at position 3396 of SEQ ID NO: 1885596
aguuuauaucuagaagcca

SEQ ID NO: 2353823 - RNA, 19 nt, Artificial Sequence
  Description of Artificial Sequence: Synthetic oligonucleotide
  Antisense strand to SEQ ID NO: 2353822
uggcuucuagauauaaacu

SEQ ID NO: 2353824 - RNA, 19 nt, Artificial Sequence
  Description of Artificial Sequence: Synthetic oligonucleotide
  Sense strand starting at position 3524 of SEQ ID NO: 1885596
gugccuugugcauuccuga

SEQ ID NO: 2353825 - RNA, 19 nt, Artificial Sequence
  Description of Artificial Sequence: Synthetic oligonucleotide
  Antisense strand to SEQ ID NO: 2353824
ucaggaaugcacaaggcac

SEQ ID NO: 2353826 - RNA, 19 nt, Artificial Sequence
  Description of Artificial Sequence: Synthetic oligonucleotide
  Sense strand starting at position 3636 of SEQ ID NO: 1885596
ugugcuugucuucuguaau

SEQ ID NO: 2353827 - RNA, 19 nt, Artificial Sequence
  Description of Artificial Sequence: Synthetic oligonucleotide
  Antisense strand to SEQ ID NO: 2353826
auuacagaagacaagcaca

SEQ ID NO: 2353828 - RNA, 19 nt, Artificial Sequence
  Description of Artificial Sequence: Synthetic oligonucleotide
  Sense strand starting at position 3676 of SEQ ID NO: 1885596
uauaguaagguuuggaaac

SEQ ID NO: 2353829 - RNA, 19 nt, Artificial Sequence
  Description of Artificial Sequence: Synthetic oligonucleotide
  Antisense strand to SEQ ID NO: 2353828
guuuccaaaccuuacuaua

SEQ ID NO: 2353830 - RNA, 19 nt, Artificial Sequence
  Description of Artificial Sequence: Synthetic oligonucleotide
  Sense strand starting at position 3739 of SEQ ID NO: 1885596
ugaggauuaugguccaagu

SEQ ID NO: 2353831 - RNA, 19 nt, Artificial Sequence
  Description of Artificial Sequence: Synthetic oligonucleotide
  Antisense strand to SEQ ID NO: 2353830
acuuggaccauaauccuca

SEQ ID NO: 2353832 - RNA, 19 nt, Artificial Sequence
  Description of Artificial Sequence: Synthetic oligonucleotide
  Sense strand starting at position 3833 of SEQ ID NO: 1885596
aacacuguucuagacguaa

SEQ ID NO: 2353833 - RNA, 19 nt, Artificial Sequence
  Description of Artificial Sequence: Synthetic oligonucleotide
  Antisense strand to SEQ ID NO: 2353832
uuacgucuagaacaguguu

SEQ ID NO: 2353834 - RNA, 19 nt, Artificial Sequence
  Description of Artificial Sequence: Synthetic oligonucleotide
  Sense strand starting at position 3837 of SEQ ID NO: 1885596
cuguucuagacguaaagau

SEQ ID NO: 2353835 - RNA, 19 nt, Artificial Sequence
  Description of Artificial Sequence: Synthetic oligonucleotide
  Antisense strand to SEQ ID NO: 2353834
aucuuuacgucuagaacag

SEQ ID NO: 2353836 - RNA, 19 nt, Artificial Sequence
  Description of Artificial Sequence: Synthetic oligonucleotide
  Sense strand starting at position 3845 of SEQ ID NO: 1885596
gacguaaagaugggauagu

SEQ ID NO: 2353837 - RNA, 19 nt, Artificial Sequence
  Description of Artificial Sequence: Synthetic oligonucleotide
  Antisense strand to SEQ ID NO: 2353836
acuaucccaucuuuacguc

SEQ ID NO: 2353838 - RNA, 19 nt, Artificial Sequence
  Description of Artificial Sequence: Synthetic oligonucleotide
  Sense strand starting at position 3954 of SEQ ID NO: 1885596
gaucauuaagacugauggu

SEQ ID NO: 2353839 - RNA, 19 nt, Artificial Sequence
  Description of Artificial Sequence: Synthetic oligonucleotide
  Antisense strand to SEQ ID NO: 2353838
accaucagucuuaaugauc

SEQ ID NO: 2353840 - RNA, 19 nt, Artificial Sequence
  Description of Artificial Sequence: Synthetic oligonucleotide
  Sense strand starting at position 3964 of SEQ ID NO: 1885596
acugauggucaaugaaugu

SEQ ID NO: 2353841 - RNA, 19 nt, Artificial Sequence
  Description of Artificial Sequence: Synthetic oligonucleotide
  Antisense strand to SEQ ID NO: 2353840
acauucauugaccaucagu

SEQ ID NO: 2353842 - RNA, 19 nt, Artificial Sequence
  Description of Artificial Sequence: Synthetic oligonucleotide
  Sense strand starting at position 3973 of SEQ ID NO: 1885596
caaugaauguccuucugag

SEQ ID NO: 2353843 - RNA, 19 nt, Artificial Sequence
  Description of Artificial Sequence: Synthetic oligonucleotide
  Antisense strand to SEQ ID NO: 2353842
cucagaaggacauucauug

SEQ ID NO: 2353844 - RNA, 19 nt, Artificial Sequence
  Description of Artificial Sequence: Synthetic oligonucleotide
  Sense strand starting at position 485 of SEQ ID NO: 1885597
agaauaacuacgugagcaa

SEQ ID NO: 2353845 - RNA, 19 nt, Artificial Sequence
  Description of Artificial Sequence: Synthetic oligonucleotide
  Antisense strand to SEQ ID NO: 2353844
uugcucacguaguuauucu

SEQ ID NO: 2353846 - RNA, 19 nt, Artificial Sequence
  Description of Artificial Sequence: Synthetic oligonucleotide
  Sense strand starting at position 486 of SEQ ID NO: 1885597
gaauaacuacgugagcaaa

SEQ ID NO: 2353847 - RNA, 19 nt, Artificial Sequence
  Description of Artificial Sequence: Synthetic oligonucleotide
  Antisense strand to SEQ ID NO: 2353846
uuugcucacguaguuauuc

SEQ ID NO: 2353848 - RNA, 19 nt, Artificial Sequence
  Description of Artificial Sequence: Synthetic oligonucleotide
  Sense strand starting at position 533 of SEQ ID NO: 1885597
uggauaucagugcaauuac

SEQ ID NO: 2353849 - RNA, 19 nt, Artificial Sequence
  Description of Artificial Sequence: Synthetic oligonucleotide
  Antisense strand to SEQ ID NO: 2353848
guaauugcacugauaucca

SEQ ID NO: 2353850 - RNA, 19 nt, Artificial Sequence
  Description of Artificial Sequence: Synthetic oligonucleotide
  Sense strand starting at position 567 of SEQ ID NO: 1885597
ccagaugaguuguuauuaa

SEQ ID NO: 2353851 - RNA, 19 nt, Artificial Sequence
  Description of Artificial Sequence: Synthetic oligonucleotide
  Antisense strand to SEQ ID NO: 2353850
uuaauaacaacucaucugg

SEQ ID NO: 2353852 - RNA, 19 nt, Artificial Sequence
  Description of Artificial Sequence: Synthetic oligonucleotide
  Sense strand starting at position 850 of SEQ ID NO: 1885597
cagagagguuuaguaacaa

SEQ ID NO: 2353853 - RNA, 19 nt, Artificial Sequence
  Description of Artificial Sequence: Synthetic oligonucleotide
  Antisense strand to SEQ ID NO: 2353852
uuguuacuaaaccucucug

SEQ ID NO: 2353854 - RNA, 19 nt, Artificial Sequence
  Description of Artificial Sequence: Synthetic oligonucleotide
  Sense strand starting at position 927 of SEQ ID NO: 1885597
acaauaaugucacuugagu

SEQ ID NO: 2353855 - RNA, 19 nt, Artificial Sequence
  Description of Artificial Sequence: Synthetic oligonucleotide
  Antisense strand to SEQ ID NO: 2353854
acucaagugacauuauugu

SEQ ID NO: 2353856 - RNA, 19 nt, Artificial Sequence
  Description of Artificial Sequence: Synthetic oligonucleotide
  Sense strand starting at position 932 of SEQ ID NO: 1885597
aaugucacuugaguaauag

SEQ ID NO: 2353857 - RNA, 19 nt, Artificial Sequence
  Description of Artificial Sequence: Synthetic oligonucleotide
  Antisense strand to SEQ ID NO: 2353856
cuauuacucaagugacauu

SEQ ID NO: 2353858 - RNA, 19 nt, Artificial Sequence
  Description of Artificial Sequence: Synthetic oligonucleotide
  Sense strand starting at position 933 of SEQ ID NO: 1885597
augucacuugaguaauagu

SEQ ID NO: 2353859 - RNA, 19 nt, Artificial Sequence
  Description of Artificial Sequence: Synthetic oligonucleotide
  Antisense strand to SEQ ID NO: 2353858
acuauuacucaagugacau

SEQ ID NO: 2353860 - RNA, 19 nt, Artificial Sequence
  Description of Artificial Sequence: Synthetic oligonucleotide
  Sense strand starting at position 941 of SEQ ID NO: 1885597
ugaguaauagucuauacuc

SEQ ID NO: 2353861 - RNA, 19 nt, Artificial Sequence
  Description of Artificial Sequence: Synthetic oligonucleotide
  Antisense strand to SEQ ID NO: 2353860
gaguauagacuauuacuca

SEQ ID NO: 2353862 - RNA, 19 nt, Artificial Sequence
  Description of Artificial Sequence: Synthetic oligonucleotide
  Sense strand starting at position 1079 of SEQ ID NO: 1885597
gugaaugaauaccucgaua

SEQ ID NO: 2353863 - RNA, 19 nt, Artificial Sequence
  Description of Artificial Sequence: Synthetic oligonucleotide
  Antisense strand to SEQ ID NO: 2353862
uaucgagguauucauucac

SEQ ID NO: 2353864 - RNA, 19 nt, Artificial Sequence
  Description of Artificial Sequence: Synthetic oligonucleotide
  Sense strand starting at position 1081 of SEQ ID NO: 1885597
gaaugaauaccucgauagc

SEQ ID NO: 2353865 - RNA, 19 nt, Artificial Sequence
  Description of Artificial Sequence: Synthetic oligonucleotide
  Antisense strand to SEQ ID NO: 2353864
gcuaucgagguauucauuc

SEQ ID NO: 2353866 - RNA, 19 nt, Artificial Sequence
  Description of Artificial Sequence: Synthetic oligonucleotide
  Sense strand starting at position 1094 of SEQ ID NO: 1885597
gauagcuugguauggaaga

SEQ ID NO: 2353867 - RNA, 19 nt, Artificial Sequence
  Description of Artificial Sequence: Synthetic oligonucleotide
  Antisense strand to SEQ ID NO: 2353866
ucuuccauaccaagcuauc

SEQ ID NO: 2353868 - RNA, 19 nt, Artificial Sequence
  Description of Artificial Sequence: Synthetic oligonucleotide
  Sense strand starting at position 1285 of SEQ ID NO: 1885597
agaauuacuugcuuuggaa

SEQ ID NO: 2353869 - RNA, 19 nt, Artificial Sequence
  Description of Artificial Sequence: Synthetic oligonucleotide
  Antisense strand to SEQ ID NO: 2353868
uuccaaagcaaguaauucu

SEQ ID NO: 2353870 - RNA, 19 nt, Artificial Sequence
  Description of Artificial Sequence: Synthetic oligonucleotide
  Sense strand starting at position 1334 of SEQ ID NO: 1885597
caaaucuaggcuggaugaa

SEQ ID NO: 2353871 - RNA, 19 nt, Artificial Sequence
  Description of Artificial Sequence: Synthetic oligonucleotide
  Antisense strand to SEQ ID NO: 2353870
uucauccagccuagauuug

SEQ ID NO: 2353872 - RNA, 19 nt, Artificial Sequence
  Description of Artificial Sequence: Synthetic oligonucleotide
  Sense strand starting at position 1388 of SEQ ID NO: 1885597
ggauguaucgacugaacau

SEQ ID NO: 2353873 - RNA, 19 nt, Artificial Sequence
  Description of Artificial Sequence: Synthetic oligonucleotide
  Antisense strand to SEQ ID NO: 2353872
auguucagucgauacaucc

SEQ ID NO: 2353874 - RNA, 19 nt, Artificial Sequence
  Description of Artificial Sequence: Synthetic oligonucleotide
  Sense strand starting at position 1529 of SEQ ID NO: 1885597
uguagugaauaguuggaaa

SEQ ID NO: 2353875 - RNA, 19 nt, Artificial Sequence
  Description of Artificial Sequence: Synthetic oligonucleotide
  Antisense strand to SEQ ID NO: 2353874
uuuccaacuauucacuaca

SEQ ID NO: 2353876 - RNA, 19 nt, Artificial Sequence
  Description of Artificial Sequence: Synthetic oligonucleotide
  Sense strand starting at position 1567 of SEQ ID NO: 1885597
ucauaucuugacugacaag

SEQ ID NO: 2353877 - RNA, 19 nt, Artificial Sequence
  Description of Artificial Sequence: Synthetic oligonucleotide
  Antisense strand to SEQ ID NO: 2353876
cuugucagucaagauauga

SEQ ID NO: 2353878 - RNA, 19 nt, Artificial Sequence
  Description of Artificial Sequence: Synthetic oligonucleotide
  Sense strand starting at position 2145 of SEQ ID NO: 1885597
agaacagcuccuugcauuu

SEQ ID NO: 2353879 - RNA, 19 nt, Artificial Sequence
  Description of Artificial Sequence: Synthetic oligonucleotide
  Antisense strand to SEQ ID NO: 2353878
aaaugcaaggagcuguucu

SEQ ID NO: 2353880 - RNA, 19 nt, Artificial Sequence
  Description of Artificial Sequence: Synthetic oligonucleotide
  Sense strand starting at position 2218 of SEQ ID NO: 1885597
ccuagaauugaggguguga

SEQ ID NO: 2353881 - RNA, 19 nt, Artificial Sequence
  Description of Artificial Sequence: Synthetic oligonucleotide
  Antisense strand to SEQ ID NO: 2353880
ucacacccucaauucuagg

SEQ ID NO: 2353882 - RNA, 19 nt, Artificial Sequence
  Description of Artificial Sequence: Synthetic oligonucleotide
  Sense strand starting at position 2220 of SEQ ID NO: 1885597
uagaauugagggugugaua

SEQ ID NO: 2353883 - RNA, 19 nt, Artificial Sequence
  Description of Artificial Sequence: Synthetic oligonucleotide
  Antisense strand to SEQ ID NO: 2353882
uaucacacccucaauucua

SEQ ID NO: 2353884 - RNA, 19 nt, Artificial Sequence
  Description of Artificial Sequence: Synthetic oligonucleotide
  Sense strand starting at position 2292 of SEQ ID NO: 1885597
ugcagaaugcaauaauugu

SEQ ID NO: 2353885 - RNA, 19 nt, Artificial Sequence
  Description of Artificial Sequence: Synthetic oligonucleotide
  Antisense strand to SEQ ID NO: 2353884
acaauuauugcauucugca

SEQ ID NO: 2353886 - RNA, 19 nt, Artificial Sequence
  Description of Artificial Sequence: Synthetic oligonucleotide
  Sense strand starting at position 2425 of SEQ ID NO: 1885597
gcuugacgucauucugcau

SEQ ID NO: 2353887 - RNA, 19 nt, Artificial Sequence
  Description of Artificial Sequence: Synthetic oligonucleotide
  Antisense strand to SEQ ID NO: 2353886
augcagaaugacgucaagc

SEQ ID NO: 2353888 - RNA, 19 nt, Artificial Sequence
  Description of Artificial Sequence: Synthetic oligonucleotide
  Sense strand starting at position 2486 of SEQ ID NO: 1885597
gaaagagauuaugcaggua

SEQ ID NO: 2353889 - RNA, 19 nt, Artificial Sequence
  Description of Artificial Sequence: Synthetic oligonucleotide
  Antisense strand to SEQ ID NO: 2353888
uaccugcauaaucucuuuc

SEQ ID NO: 2353890 - RNA, 19 nt, Artificial Sequence
  Description of Artificial Sequence: Synthetic oligonucleotide
  Sense strand starting at position 2491 of SEQ ID NO: 1885597
agauuaugcagguauguga

SEQ ID NO: 2353891 - RNA, 19 nt, Artificial Sequence
  Description of Artificial Sequence: Synthetic oligonucleotide
  Antisense strand to SEQ ID NO: 2353890
ucacauaccugcauaaucu

SEQ ID NO: 2353892 - RNA, 19 nt, Artificial Sequence
  Description of Artificial Sequence: Synthetic oligonucleotide
  Sense strand starting at position 2505 of SEQ ID NO: 1885597
ugugaaaguaaggguacau

SEQ ID NO: 2353893 - RNA, 19 nt, Artificial Sequence
  Description of Artificial Sequence: Synthetic oligonucleotide
  Antisense strand to SEQ ID NO: 2353892
auguacccuuacuuucaca

SEQ ID NO: 2353894 - RNA, 19 nt, Artificial Sequence
  Description of Artificial Sequence: Synthetic oligonucleotide
  Sense strand starting at position 2581 of SEQ ID NO: 1885597
uuucuuguggcacagaauu

SEQ ID NO: 2353895 - RNA, 19 nt, Artificial Sequence
  Description of Artificial Sequence: Synthetic oligonucleotide
  Antisense strand to SEQ ID NO: 2353894
aauucugugccacaagaaa

SEQ ID NO: 2353896 - RNA, 19 nt, Artificial Sequence
  Description of Artificial Sequence: Synthetic oligonucleotide
  Sense strand starting at position 2921 of SEQ ID NO: 1885597
acacuuaauuuagagguau

SEQ ID NO: 2353897 - RNA, 19 nt, Artificial Sequence
  Description of Artificial Sequence: Synthetic oligonucleotide
  Antisense strand to SEQ ID NO: 2353896
auaccucuaaauuaagugu

SEQ ID NO: 2353898 - RNA, 19 nt, Artificial Sequence
  Description of Artificial Sequence: Synthetic oligonucleotide
  Sense strand starting at position 2929 of SEQ ID NO: 1885597
uuuagagguaucugaagua

SEQ ID NO: 2353899 - RNA, 19 nt, Artificial Sequence
  Description of Artificial Sequence: Synthetic oligonucleotide
  Antisense strand to SEQ ID NO: 2353898
uacuucagauaccucuaaa

SEQ ID NO: 2353900 - RNA, 19 nt, Artificial Sequence
  Description of Artificial Sequence: Synthetic oligonucleotide
  Sense strand starting at position 3113 of SEQ ID NO: 1885597
cccugauacuuaucaggag

SEQ ID NO: 2353901 - RNA, 19 nt, Artificial Sequence
  Description of Artificial Sequence: Synthetic oligonucleotide
  Antisense strand to SEQ ID NO: 2353900
cuccugauaaguaucaggg

SEQ ID NO: 2353902 - RNA, 19 nt, Artificial Sequence
  Description of Artificial Sequence: Synthetic oligonucleotide
  Sense strand starting at position 3127 of SEQ ID NO: 1885597
aggagaguuugccucaaua

SEQ ID NO: 2353903 - RNA, 19 nt, Artificial Sequence
  Description of Artificial Sequence: Synthetic oligonucleotide
  Antisense strand to SEQ ID NO: 2353902
uauugaggcaaacucuccu

SEQ ID NO: 2353904 - RNA, 19 nt, Artificial Sequence
  Description of Artificial Sequence: Synthetic oligonucleotide
  Sense strand starting at position 3129 of SEQ ID NO: 1885597
gagaguuugccucaauauu

SEQ ID NO: 2353905 - RNA, 19 nt, Artificial Sequence
  Description of Artificial Sequence: Synthetic oligonucleotide
  Antisense strand to SEQ ID NO: 2353904
aauauugaggcaaacucuc

SEQ ID NO: 2353906 - RNA, 19 nt, Artificial Sequence
  Description of Artificial Sequence: Synthetic oligonucleotide
  Sense strand starting at position 3397 of SEQ ID NO: 1885597
accuaugguuuauuaggaa

SEQ ID NO: 2353907 - RNA, 19 nt, Artificial Sequence
  Description of Artificial Sequence: Synthetic oligonucleotide
  Antisense strand to SEQ ID NO: 2353906
uuccuaauaaaccauaggu

SEQ ID NO: 2353908 - RNA, 19 nt, Artificial Sequence
  Description of Artificial Sequence: Synthetic oligonucleotide
  Sense strand starting at position 3539 of SEQ ID NO: 1885597
acuguugcccgugucauua

SEQ ID NO: 2353909 - RNA, 19 nt, Artificial Sequence
  Description of Artificial Sequence: Synthetic oligonucleotide
  Antisense strand to SEQ ID NO: 2353908
uaaugacacgggcaacagu

SEQ ID NO: 2353910 - RNA, 19 nt, Artificial Sequence
  Description of Artificial Sequence: Synthetic oligonucleotide
  Sense strand starting at position 3567 of SEQ ID NO: 1885597
uugugcauggaauauaaau

SEQ ID NO: 2353911 - RNA, 19 nt, Artificial Sequence
  Description of Artificial Sequence: Synthetic oligonucleotide
  Antisense strand to SEQ ID NO: 2353910
auuuauauuccaugcacaa

SEQ ID NO: 2353912 - RNA, 19 nt, Artificial Sequence
  Description of Artificial Sequence: Synthetic oligonucleotide
  Sense strand starting at position 3644 of SEQ ID NO: 1885597
uaauuaagugccugggaua

SEQ ID NO: 2353913 - RNA, 19 nt, Artificial Sequence
  Description of Artificial Sequence: Synthetic oligonucleotide
  Antisense strand to SEQ ID NO: 2353912
uaucccaggcacuuaauua

SEQ ID NO: 2353914 - RNA, 19 nt, Artificial Sequence
  Description of Artificial Sequence: Synthetic oligonucleotide
  Sense strand starting at position 3763 of SEQ ID NO: 1885597
ccacuaaaugcucagcuga

SEQ ID NO: 2353915 - RNA, 19 nt, Artificial Sequence
  Description of Artificial Sequence: Synthetic oligonucleotide
  Antisense strand to SEQ ID NO: 2353914
ucagcugagcauuuagugg

SEQ ID NO: 2353916 - RNA, 19 nt, Artificial Sequence
  Description of Artificial Sequence: Synthetic oligonucleotide
  Sense strand starting at position 3765 of SEQ ID NO: 1885597
acuaaaugcucagcugaaa

SEQ ID NO: 2353917 - RNA, 19 nt, Artificial Sequence
  Description of Artificial Sequence: Synthetic oligonucleotide
  Antisense strand to SEQ ID NO: 2353916
uuucagcugagcauuuagu

SEQ ID NO: 2353918 - RNA, 19 nt, Artificial Sequence
  Description of Artificial Sequence: Synthetic oligonucleotide
  Sense strand starting at position 3819 of SEQ ID NO: 1885597
ucuacuugugauuaaaggu

SEQ ID NO: 2353919 - RNA, 19 nt, Artificial Sequence
  Description of Artificial Sequence: Synthetic oligonucleotide
  Antisense strand to SEQ ID NO: 2353918
accuuuaaucacaaguaga

SEQ ID NO: 2353920 - RNA, 19 nt, Artificial Sequence
  Description of Artificial Sequence: Synthetic oligonucleotide
  Sense strand starting at position 3825 of SEQ ID NO: 1885597
ugugauuaaaggugagagu

SEQ ID NO: 2353921 - RNA, 19 nt, Artificial Sequence
  Description of Artificial Sequence: Synthetic oligonucleotide
  Antisense strand to SEQ ID NO: 2353920
acucucaccuuuaaucaca

SEQ ID NO: 2353922 - RNA, 19 nt, Artificial Sequence
  Description of Artificial Sequence: Synthetic oligonucleotide
  Sense strand starting at position 3919 of SEQ ID NO: 1885597
cuuugucucccagaacaag

SEQ ID NO: 2353923 - RNA, 19 nt, Artificial Sequence
  Description of Artificial Sequence: Synthetic oligonucleotide
  Antisense strand to SEQ ID NO: 2353922
cuuguucugggagacaaag

SEQ ID NO: 2353924 - RNA, 19 nt, Artificial Sequence
  Description of Artificial Sequence: Synthetic oligonucleotide
  Sense strand starting at position 462 of SEQ ID NO: 1885598
gugagcugugaucagacua

SEQ ID NO: 2353925 - RNA, 19 nt, Artificial Sequence
  Description of Artificial Sequence: Synthetic oligonucleotide
  Antisense strand to SEQ ID NO: 2353924
uagucugaucacagcucac

SEQ ID NO: 2353926 - RNA, 19 nt, Artificial Sequence
  Description of Artificial Sequence: Synthetic oligonucleotide
  Sense strand starting at position 512 of SEQ ID NO: 1885598
cuugucuucuugucucaaa

SEQ ID NO: 2353927 - RNA, 19 nt, Artificial Sequence
  Description of Artificial Sequence: Synthetic oligonucleotide
  Antisense strand to SEQ ID NO: 2353926
uuugagacaagaagacaag

SEQ ID NO: 2353928 - RNA, 19 nt, Artificial Sequence
  Description of Artificial Sequence: Synthetic oligonucleotide
  Sense strand starting at position 593 of SEQ ID NO: 1885598
cuugucuucuugucuuaaa

SEQ ID NO: 2353929 - RNA, 19 nt, Artificial Sequence
  Description of Artificial Sequence: Synthetic oligonucleotide
  Antisense strand to SEQ ID NO: 2353928
uuuaagacaagaagacaag

SEQ ID NO: 2353930 - RNA, 19 nt, Artificial Sequence
  Description of Artificial Sequence: Synthetic oligonucleotide
  Sense strand starting at position 1257 of SEQ ID NO: 1885598
ugucauaccuagcuaaaug

SEQ ID NO: 2353931 - RNA, 19 nt, Artificial Sequence
  Description of Artificial Sequence: Synthetic oligonucleotide
  Antisense strand to SEQ ID NO: 2353930
cauuuagcuagguaugaca

SEQ ID NO: 2353932 - RNA, 19 nt, Artificial Sequence
  Description of Artificial Sequence: Synthetic oligonucleotide
  Sense strand starting at position 1283 of SEQ ID NO: 1885598
gaguaaauaucagacagac

SEQ ID NO: 2353933 - RNA, 19 nt, Artificial Sequence
  Description of Artificial Sequence: Synthetic oligonucleotide
  Antisense strand to SEQ ID NO: 2353932
gucugucugauauuuacuc

SEQ ID NO: 2353934 - RNA, 19 nt, Artificial Sequence
  Description of Artificial Sequence: Synthetic oligonucleotide
  Sense strand starting at position 1343 of SEQ ID NO: 1885598
cuuuaacagcgucaagaau

SEQ ID NO: 2353935 - RNA, 19 nt, Artificial Sequence
  Description of Artificial Sequence: Synthetic oligonucleotide
  Antisense strand to SEQ ID NO: 2353934
auucuugacgcuguuaaag

SEQ ID NO: 2353936 - RNA, 19 nt, Artificial Sequence
  Description of Artificial Sequence: Synthetic oligonucleotide
  Sense strand starting at position 1349 of SEQ ID NO: 1885598
cagcgucaagaauaugaaa

SEQ ID NO: 2353937 - RNA, 19 nt, Artificial Sequence
  Description of Artificial Sequence: Synthetic oligonucleotide
  Antisense strand to SEQ ID NO: 2353936
uuucauauucuugacgcug

SEQ ID NO: 2353938 - RNA, 19 nt, Artificial Sequence
  Description of Artificial Sequence: Synthetic oligonucleotide
  Sense strand starting at position 1383 of SEQ ID NO: 1885598
agaguuccaguuugaagag

SEQ ID NO: 2353939 - RNA, 19 nt, Artificial Sequence
  Description of Artificial Sequence: Synthetic oligonucleotide
  Antisense strand to SEQ ID NO: 2353938
cucuucaaacuggaacucu

SEQ ID NO: 2353940 - RNA, 19 nt, Artificial Sequence
  Description of Artificial Sequence: Synthetic oligonucleotide
  Sense strand starting at position 1701 of SEQ ID NO: 1885598
acgcacaugacucaaggua

SEQ ID NO: 2353941 - RNA, 19 nt, Artificial Sequence
  Description of Artificial Sequence: Synthetic oligonucleotide
  Antisense strand to SEQ ID NO: 2353940
uaccuugagucaugugcgu

SEQ ID NO: 2353942 - RNA, 19 nt, Artificial Sequence
  Description of Artificial Sequence: Synthetic oligonucleotide
  Sense strand starting at position 1714 of SEQ ID NO: 1885598
aagguaagaggcuauuagu

SEQ ID NO: 2353943 - RNA, 19 nt, Artificial Sequence
  Description of Artificial Sequence: Synthetic oligonucleotide
  Antisense strand to SEQ ID NO: 2353942
acuaauagccucuuaccuu

SEQ ID NO: 2353944 - RNA, 19 nt, Artificial Sequence
  Description of Artificial Sequence: Synthetic oligonucleotide
  Sense strand starting at position 1720 of SEQ ID NO: 1885598
agaggcuauuagucucagu

SEQ ID NO: 2353945 - RNA, 19 nt, Artificial Sequence
  Description of Artificial Sequence: Synthetic oligonucleotide
  Antisense strand to SEQ ID NO: 2353944
acugagacuaauagccucu

SEQ ID NO: 2353946 - RNA, 19 nt, Artificial Sequence
  Description of Artificial Sequence: Synthetic oligonucleotide
  Sense strand starting at position 2431 of SEQ ID NO: 1885598
caaugugaucgcgaaagaa

SEQ ID NO: 2353947 - RNA, 19 nt, Artificial Sequence
  Description of Artificial Sequence: Synthetic oligonucleotide
  Antisense strand to SEQ ID NO: 2353946
uucuuucgcgaucacauug

SEQ ID NO: 2353948 - RNA, 19 nt, Artificial Sequence
  Description of Artificial Sequence: Synthetic oligonucleotide
  Sense strand starting at position 2847 of SEQ ID NO: 1885598
uguggauauuugcuuucua

SEQ ID NO: 2353949 - RNA, 19 nt, Artificial Sequence
  Description of Artificial Sequence: Synthetic oligonucleotide
  Antisense strand to SEQ ID NO: 2353948
uagaaagcaaauauccaca

SEQ ID NO: 2353950 - RNA, 19 nt, Artificial Sequence
  Description of Artificial Sequence: Synthetic oligonucleotide
  Sense strand starting at position 2871 of SEQ ID NO: 1885598
ugcaguucucuccaggaaa

SEQ ID NO: 2353951 - RNA, 19 nt, Artificial Sequence
  Description of Artificial Sequence: Synthetic oligonucleotide
  Antisense strand to SEQ ID NO: 2353950
uuuccuggagagaacugca

SEQ ID NO: 2353952 - RNA, 19 nt, Artificial Sequence
  Description of Artificial Sequence: Synthetic oligonucleotide
  Sense strand starting at position 3034 of SEQ ID NO: 1885598
aauggauaccucuggcaag

SEQ ID NO: 2353953 - RNA, 19 nt, Artificial Sequence
  Description of Artificial Sequence: Synthetic oligonucleotide
  Antisense strand to SEQ ID NO: 2353952
cuugccagagguauccauu

SEQ ID NO: 2353954 - RNA, 19 nt, Artificial Sequence
  Description of Artificial Sequence: Synthetic oligonucleotide
  Sense strand starting at position 3117 of SEQ ID NO: 1885598
ggucauaguuauccauugu

SEQ ID NO: 2353955 - RNA, 19 nt, Artificial Sequence
  Description of Artificial Sequence: Synthetic oligonucleotide
  Antisense strand to SEQ ID NO: 2353954
acaauggauaacuaugacc

SEQ ID NO: 2353956 - RNA, 19 nt, Artificial Sequence
  Description of Artificial Sequence: Synthetic oligonucleotide
  Sense strand starting at position 3209 of SEQ ID NO: 1885598
ccugaaagauauuagaagu

SEQ ID NO: 2353957 - RNA, 19 nt, Artificial Sequence
  Description of Artificial Sequence: Synthetic oligonucleotide
  Antisense strand to SEQ ID NO: 2353956
acuucuaauaucuuucagg

SEQ ID NO: 2353958 - RNA, 19 nt, Artificial Sequence
  Description of Artificial Sequence: Synthetic oligonucleotide
  Sense strand starting at position 3295 of SEQ ID NO: 1885598
uuacuuaagcuguagggaa

SEQ ID NO: 2353959 - RNA, 19 nt, Artificial Sequence
  Description of Artificial Sequence: Synthetic oligonucleotide
  Antisense strand to SEQ ID NO: 2353958
uucccuacagcuuaaguaa

SEQ ID NO: 2353960 - RNA, 19 nt, Artificial Sequence
  Description of Artificial Sequence: Synthetic oligonucleotide
  Sense strand starting at position 3315 of SEQ ID NO: 1885598
gcagaagugugguuagaau

SEQ ID NO: 2353961 - RNA, 19 nt, Artificial Sequence
  Description of Artificial Sequence: Synthetic oligonucleotide
  Antisense strand to SEQ ID NO: 2353960
auucuaaccacacuucugc

SEQ ID NO: 2353962 - RNA, 19 nt, Artificial Sequence
  Description of Artificial Sequence: Synthetic oligonucleotide
  Sense strand starting at position 3322 of SEQ ID NO: 1885598
ugugguuagaauugagcau

SEQ ID NO: 2353963 - RNA, 19 nt, Artificial Sequence
  Description of Artificial Sequence: Synthetic oligonucleotide
  Antisense strand to SEQ ID NO: 2353962
augcucaauucuaaccaca

SEQ ID NO: 2353964 - RNA, 19 nt, Artificial Sequence
  Description of Artificial Sequence: Synthetic oligonucleotide
  Sense strand starting at position 3323 of SEQ ID NO: 1885598
gugguuagaauugagcauu

SEQ ID NO: 2353965 - RNA, 19 nt, Artificial Sequence
  Description of Artificial Sequence: Synthetic oligonucleotide
  Antisense strand to SEQ ID NO: 2353964
aaugcucaauucuaaccac

SEQ ID NO: 2353966 - RNA, 19 nt, Artificial Sequence
  Description of Artificial Sequence: Synthetic oligonucleotide
  Sense strand starting at position 3326 of SEQ ID NO: 1885598
guuagaauugagcauuagu

SEQ ID NO: 2353967 - RNA, 19 nt, Artificial Sequence
  Description of Artificial Sequence: Synthetic oligonucleotide
  Antisense strand to SEQ ID NO: 2353966
acuaaugcucaauucuaac

SEQ ID NO: 2353968 - RNA, 19 nt, Artificial Sequence
  Description of Artificial Sequence: Synthetic oligonucleotide
  Sense strand starting at position 3331 of SEQ ID NO: 1885598
aauugagcauuaguuggau

SEQ ID NO: 2353969 - RNA, 19 nt, Artificial Sequence
  Description of Artificial Sequence: Synthetic oligonucleotide
  Antisense strand to SEQ ID NO: 2353968
auccaacuaaugcucaauu

SEQ ID NO: 2353970 - RNA, 19 nt, Artificial Sequence
  Description of Artificial Sequence: Synthetic oligonucleotide
  Sense strand starting at position 3387 of SEQ ID NO: 1885598
uagaaaguaugucuuugag

SEQ ID NO: 2353971 - RNA, 19 nt, Artificial Sequence
  Description of Artificial Sequence: Synthetic oligonucleotide
  Antisense strand to SEQ ID NO: 2353970
cucaaagacauacuuucua

SEQ ID NO: 2353972 - RNA, 19 nt, Artificial Sequence
  Description of Artificial Sequence: Synthetic oligonucleotide
  Sense strand starting at position 3389 of SEQ ID NO: 1885598
gaaaguaugucuuugagaa

SEQ ID NO: 2353973 - RNA, 19 nt, Artificial Sequence
  Description of Artificial Sequence: Synthetic oligonucleotide
  Antisense strand to SEQ ID NO: 2353972
uucucaaagacauacuuuc

SEQ ID NO: 2353974 - RNA, 19 nt, Artificial Sequence
  Description of Artificial Sequence: Synthetic oligonucleotide
  Sense strand starting at position 3390 of SEQ ID NO: 1885598
aaaguaugucuuugagaaa

SEQ ID NO: 2353975 - RNA, 19 nt, Artificial Sequence
  Description of Artificial Sequence: Synthetic oligonucleotide
  Antisense strand to SEQ ID NO: 2353974
uuucucaaagacauacuuu

SEQ ID NO: 2353976 - RNA, 19 nt, Artificial Sequence
  Description of Artificial Sequence: Synthetic oligonucleotide
  Sense strand starting at position 3422 of SEQ ID NO: 1885598
aaguaucgaagccgagauu

SEQ ID NO: 2353977 - RNA, 19 nt, Artificial Sequence
  Description of Artificial Sequence: Synthetic oligonucleotide
  Antisense strand to SEQ ID NO: 2353976
aaucucggcuucgauacuu

SEQ ID NO: 2353978 - RNA, 19 nt, Artificial Sequence
  Description of Artificial Sequence: Synthetic oligonucleotide
  Sense strand starting at position 3429 of SEQ ID NO: 1885598
gaagccgagauuuguguua

SEQ ID NO: 2353979 - RNA, 19 nt, Artificial Sequence
  Description of Artificial Sequence: Synthetic oligonucleotide
  Antisense strand to SEQ ID NO: 2353978
uaacacaaaucucggcuuc

SEQ ID NO: 2353980 - RNA, 19 nt, Artificial Sequence
  Description of Artificial Sequence: Synthetic oligonucleotide
  Sense strand starting at position 3434 of SEQ ID NO: 1885598
cgagauuuguguuacauuu

SEQ ID NO: 2353981 - RNA, 19 nt, Artificial Sequence
  Description of Artificial Sequence: Synthetic oligonucleotide
  Antisense strand to SEQ ID NO: 2353980
aaauguaacacaaaucucg

SEQ ID NO: 2353982 - RNA, 19 nt, Artificial Sequence
  Description of Artificial Sequence: Synthetic oligonucleotide
  Sense strand starting at position 3482 of SEQ ID NO: 1885598
cugauaagcaggcaggauu

SEQ ID NO: 2353983 - RNA, 19 nt, Artificial Sequence
  Description of Artificial Sequence: Synthetic oligonucleotide
  Antisense strand to SEQ ID NO: 2353982
aauccugccugcuuaucag

SEQ ID NO: 2353984 - RNA, 19 nt, Artificial Sequence
  Description of Artificial Sequence: Synthetic oligonucleotide
  Sense strand starting at position 3535 of SEQ ID NO: 1885598
guaguauggauuuguugug

SEQ ID NO: 2353985 - RNA, 19 nt, Artificial Sequence
  Description of Artificial Sequence: Synthetic oligonucleotide
  Antisense strand to SEQ ID NO: 2353984
cacaacaaauccauacuac

SEQ ID NO: 2353986 - RNA, 19 nt, Artificial Sequence
  Description of Artificial Sequence: Synthetic oligonucleotide
  Sense strand starting at position 3545 of SEQ ID NO: 1885598
uuuguugugccuuggaaug

SEQ ID NO: 2353987 - RNA, 19 nt, Artificial Sequence
  Description of Artificial Sequence: Synthetic oligonucleotide
  Antisense strand to SEQ ID NO: 2353986
cauuccaaggcacaacaaa

SEQ ID NO: 2353988 - RNA, 19 nt, Artificial Sequence
  Description of Artificial Sequence: Synthetic oligonucleotide
  Sense strand starting at position 3583 of SEQ ID NO: 1885598
acuauagaauaggagaaua

SEQ ID NO: 2353989 - RNA, 19 nt, Artificial Sequence
  Description of Artificial Sequence: Synthetic oligonucleotide
  Antisense strand to SEQ ID NO: 2353988
uauucuccuauucuauagu

SEQ ID NO: 2353990 - RNA, 19 nt, Artificial Sequence
  Description of Artificial Sequence: Synthetic oligonucleotide
  Sense strand starting at position 3633 of SEQ ID NO: 1885598
ccugaauucuagcuuaagu

SEQ ID NO: 2353991 - RNA, 19 nt, Artificial Sequence
  Description of Artificial Sequence: Synthetic oligonucleotide
  Antisense strand to SEQ ID NO: 2353990
acuuaagcuagaauucagg

SEQ ID NO: 2353992 - RNA, 19 nt, Artificial Sequence
  Description of Artificial Sequence: Synthetic oligonucleotide
  Sense strand starting at position 3635 of SEQ ID NO: 1885598
ugaauucuagcuuaaguuc

SEQ ID NO: 2353993 - RNA, 19 nt, Artificial Sequence
  Description of Artificial Sequence: Synthetic oligonucleotide
  Antisense strand to SEQ ID NO: 2353992
gaacuuaagcuagaauuca

SEQ ID NO: 2353994 - RNA, 19 nt, Artificial Sequence
  Description of Artificial Sequence: Synthetic oligonucleotide
  Sense strand starting at position 3670 of SEQ ID NO: 1885598
auguuagauuaggucacuu

SEQ ID NO: 2353995 - RNA, 19 nt, Artificial Sequence
  Description of Artificial Sequence: Synthetic oligonucleotide
  Antisense strand to SEQ ID NO: 2353994
aagugaccuaaucuaacau

SEQ ID NO: 2353996 - RNA, 19 nt, Artificial Sequence
  Description of Artificial Sequence: Synthetic oligonucleotide
  Sense strand starting at position 3701 of SEQ ID NO: 1885598
ucauuauuguaucugacuu

SEQ ID NO: 2353997 - RNA, 19 nt, Artificial Sequence
  Description of Artificial Sequence: Synthetic oligonucleotide
  Antisense strand to SEQ ID NO: 2353996
aagucagauacaauaauga

SEQ ID NO: 2353998 - RNA, 19 nt, Artificial Sequence
  Description of Artificial Sequence: Synthetic oligonucleotide
  Sense strand starting at position 3711 of SEQ ID NO: 1885598
aucugacuuuagucacaga

SEQ ID NO: 2353999 - RNA, 19 nt, Artificial Sequence
  Description of Artificial Sequence: Synthetic oligonucleotide
  Antisense strand to SEQ ID NO: 2353998
ucugugacuaaagucagau

SEQ ID NO: 2354000 - RNA, 19 nt, Artificial Sequence
  Description of Artificial Sequence: Synthetic oligonucleotide
  Sense strand starting at position 3928 of SEQ ID NO: 1885598
aggguuaaauucugaauuu

SEQ ID NO: 2354001 - RNA, 19 nt, Artificial Sequence
  Description of Artificial Sequence: Synthetic oligonucleotide
  Antisense strand to SEQ ID NO: 2354000
aaauucagaauuuaacccu

SEQ ID NO: 2354002 - RNA, 19 nt, Artificial Sequence
  Description of Artificial Sequence: Synthetic oligonucleotide
  Sense strand starting at position 3968 of SEQ ID NO: 1885598
gaauuaagcguuuaaugac

SEQ ID NO: 2354003 - RNA, 19 nt, Artificial Sequence
  Description of Artificial Sequence: Synthetic oligonucleotide
  Antisense strand to SEQ ID NO: 2354002
gucauuaaacgcuuaauuc

SEQ ID NO: 2354004 - RNA, 19 nt, Artificial Sequence
  Description of Artificial Sequence: Synthetic oligonucleotide
  Sense strand starting at position 2086 of SEQ ID NO: 1885599
auaguugaaauacgaaagu

SEQ ID NO: 2354005 - RNA, 19 nt, Artificial Sequence
  Description of Artificial Sequence: Synthetic oligonucleotide
  Antisense strand to SEQ ID NO: 2354004
acuuucguauuucaacuau

SEQ ID NO: 2354006 - RNA, 19 nt, Artificial Sequence
  Description of Artificial Sequence: Synthetic oligonucleotide
  Sense strand starting at position 2133 of SEQ ID NO: 1885599
acugucagcuuauguuuaa

SEQ ID NO: 2354007 - RNA, 19 nt, Artificial Sequence
  Description of Artificial Sequence: Synthetic oligonucleotide
  Antisense strand to SEQ ID NO: 2354006
uuaaacauaagcugacagu

SEQ ID NO: 2354008 - RNA, 19 nt, Artificial Sequence
  Description of Artificial Sequence: Synthetic oligonucleotide
  Sense strand starting at position 2134 of SEQ ID NO: 1885599
cugucagcuuauguuuaaa

SEQ ID NO: 2354009 - RNA, 19 nt, Artificial Sequence
  Description of Artificial Sequence: Synthetic oligonucleotide
  Antisense strand to SEQ ID NO: 2354008
uuuaaacauaagcugacag

SEQ ID NO: 2354010 - RNA, 19 nt, Artificial Sequence
  Description of Artificial Sequence: Synthetic oligonucleotide
  Sense strand starting at position 2179 of SEQ ID NO: 1885599
ucaaaucaguuuggucuaa

SEQ ID NO: 2354011 - RNA, 19 nt, Artificial Sequence
  Description of Artificial Sequence: Synthetic oligonucleotide
  Antisense strand to SEQ ID NO: 2354010
uuagaccaaacugauuuga

SEQ ID NO: 2354012 - RNA, 19 nt, Artificial Sequence
  Description of Artificial Sequence: Synthetic oligonucleotide
  Sense strand starting at position 2183 of SEQ ID NO: 1885599
aucaguuuggucuaauuaa

SEQ ID NO: 2354013 - RNA, 19 nt, Artificial Sequence
  Description of Artificial Sequence: Synthetic oligonucleotide
  Antisense strand to SEQ ID NO: 2354012
uuaauuagaccaaacugau

SEQ ID NO: 2354014 - RNA, 19 nt, Artificial Sequence
  Description of Artificial Sequence: Synthetic oligonucleotide
  Sense strand starting at position 2594 of SEQ ID NO: 1885599
agcacuacaucacguagau

SEQ ID NO: 2354015 - RNA, 19 nt, Artificial Sequence
  Description of Artificial Sequence: Synthetic oligonucleotide
  Antisense strand to SEQ ID NO: 2354014
aucuacgugauguagugcu

SEQ ID NO: 2354016 - RNA, 19 nt, Artificial Sequence
  Description of Artificial Sequence: Synthetic oligonucleotide
  Sense strand starting at position 2650 of SEQ ID NO: 1885599
ucagauuaagucuaagcua

SEQ ID NO: 2354017 - RNA, 19 nt, Artificial Sequence
  Description of Artificial Sequence: Synthetic oligonucleotide
  Antisense strand to SEQ ID NO: 2354016
uagcuuagacuuaaucuga

SEQ ID NO: 2354018 - RNA, 19 nt, Artificial Sequence
  Description of Artificial Sequence: Synthetic oligonucleotide
  Sense strand starting at position 2702 of SEQ ID NO: 1885599
ucaauuguagggugucagu

SEQ ID NO: 2354019 - RNA, 19 nt, Artificial Sequence
  Description of Artificial Sequence: Synthetic oligonucleotide
  Antisense strand to SEQ ID NO: 2354018
acugacacccuacaauuga

SEQ ID NO: 2354020 - RNA, 19 nt, Artificial Sequence
  Description of Artificial Sequence: Synthetic oligonucleotide
  Sense strand starting at position 2715 of SEQ ID NO: 1885599
gucagucuauucgguugaa

SEQ ID NO: 2354021 - RNA, 19 nt, Artificial Sequence
  Description of Artificial Sequence: Synthetic oligonucleotide
  Antisense strand to SEQ ID NO: 2354020
uucaaccgaauagacugac

SEQ ID NO: 2354022 - RNA, 19 nt, Artificial Sequence
  Description of Artificial Sequence: Synthetic oligonucleotide
  Sense strand starting at position 2716 of SEQ ID NO: 1885599
ucagucuauucgguugaau

SEQ ID NO: 2354023 - RNA, 19 nt, Artificial Sequence
  Description of Artificial Sequence: Synthetic oligonucleotide
  Antisense strand to SEQ ID NO: 2354022
auucaaccgaauagacuga

SEQ ID NO: 2354024 - RNA, 19 nt, Artificial Sequence
  Description of Artificial Sequence: Synthetic oligonucleotide
  Sense strand starting at position 2718 of SEQ ID NO: 1885599
agucuauucgguugaauag

SEQ ID NO: 2354025 - RNA, 19 nt, Artificial Sequence
  Description of Artificial Sequence: Synthetic oligonucleotide
  Antisense strand to SEQ ID NO: 2354024
cuauucaaccgaauagacu

SEQ ID NO: 2354026 - RNA, 19 nt, Artificial Sequence
  Description of Artificial Sequence: Synthetic oligonucleotide
  Sense strand starting at position 2727 of SEQ ID NO: 1885599
gguugaauagguugguuca

SEQ ID NO: 2354027 - RNA, 19 nt, Artificial Sequence
  Description of Artificial Sequence: Synthetic oligonucleotide
  Antisense strand to SEQ ID NO: 2354026
ugaaccaaccuauucaacc

SEQ ID NO: 2354028 - RNA, 19 nt, Artificial Sequence
  Description of Artificial Sequence: Synthetic oligonucleotide
  Sense strand starting at position 2728 of SEQ ID NO: 1885599
guugaauagguugguucau

SEQ ID NO: 2354029 - RNA, 19 nt, Artificial Sequence
  Description of Artificial Sequence: Synthetic oligonucleotide
  Antisense strand to SEQ ID NO: 2354028
augaaccaaccuauucaac

SEQ ID NO: 2354030 - RNA, 19 nt, Artificial Sequence
  Description of Artificial Sequence: Synthetic oligonucleotide
  Sense strand starting at position 2755 of SEQ ID NO: 1885599
ugauauauagcauaguuag

SEQ ID NO: 2354031 - RNA, 19 nt, Artificial Sequence
  Description of Artificial Sequence: Synthetic oligonucleotide
  Antisense strand to SEQ ID NO: 2354030
cuaacuaugcuauauauca

SEQ ID NO: 2354032 - RNA, 19 nt, Artificial Sequence
  Description of Artificial Sequence: Synthetic oligonucleotide
  Sense strand starting at position 2829 of SEQ ID NO: 1885599
acaacuuaguagggaaguu

SEQ ID NO: 2354033 - RNA, 19 nt, Artificial Sequence
  Description of Artificial Sequence: Synthetic oligonucleotide
  Antisense strand to SEQ ID NO: 2354032
aacuucccuacuaaguugu

SEQ ID NO: 2354034 - RNA, 19 nt, Artificial Sequence
  Description of Artificial Sequence: Synthetic oligonucleotide
  Sense strand starting at position 2861 of SEQ ID NO: 1885599
acaguauuaugacagaugu

SEQ ID NO: 2354035 - RNA, 19 nt, Artificial Sequence
  Description of Artificial Sequence: Synthetic oligonucleotide
  Antisense strand to SEQ ID NO: 2354034
acaucugucauaauacugu

SEQ ID NO: 2354036 - RNA, 19 nt, Artificial Sequence
  Description of Artificial Sequence: Synthetic oligonucleotide
  Sense strand starting at position 2946 of SEQ ID NO: 1885599
uguauuggacccugcagaa

SEQ ID NO: 2354037 - RNA, 19 nt, Artificial Sequence
  Description of Artificial Sequence: Synthetic oligonucleotide
  Antisense strand to SEQ ID NO: 2354036
uucugcaggguccaauaca

SEQ ID NO: 2354038 - RNA, 19 nt, Artificial Sequence
  Description of Artificial Sequence: Synthetic oligonucleotide
  Sense strand starting at position 2971 of SEQ ID NO: 1885599
gucaguacacagugaguaa

SEQ ID NO: 2354039 - RNA, 19 nt, Artificial Sequence
  Description of Artificial Sequence: Synthetic oligonucleotide
  Antisense strand to SEQ ID NO: 2354038
uuacucacuguguacugac

SEQ ID NO: 2354040 - RNA, 19 nt, Artificial Sequence
  Description of Artificial Sequence: Synthetic oligonucleotide
  Sense strand starting at position 3008 of SEQ ID NO: 1885599
gggcuugcuugagaauaga

SEQ ID NO: 2354041 - RNA, 19 nt, Artificial Sequence
  Description of Artificial Sequence: Synthetic oligonucleotide
  Antisense strand to SEQ ID NO: 2354040
ucuauucucaagcaagccc

SEQ ID NO: 2354042 - RNA, 19 nt, Artificial Sequence
  Description of Artificial Sequence: Synthetic oligonucleotide
  Sense strand starting at position 3041 of SEQ ID NO: 1885599
cuaguauaauagcccagau

SEQ ID NO: 2354043 - RNA, 19 nt, Artificial Sequence
  Description of Artificial Sequence: Synthetic oligonucleotide
  Antisense strand to SEQ ID NO: 2354042
aucugggcuauuauacuag

SEQ ID NO: 2354044 - RNA, 19 nt, Artificial Sequence
  Description of Artificial Sequence: Synthetic oligonucleotide
  Sense strand starting at position 3082 of SEQ ID NO: 1885599
ggcuuacaguguuaagaaa

SEQ ID NO: 2354045 - RNA, 19 nt, Artificial Sequence
  Description of Artificial Sequence: Synthetic oligonucleotide
  Antisense strand to SEQ ID NO: 2354044
uuucuuaacacuguaagcc

SEQ ID NO: 2354046 - RNA, 19 nt, Artificial Sequence
  Description of Artificial Sequence: Synthetic oligonucleotide
  Sense strand starting at position 3199 of SEQ ID NO: 1885599
augcuccagugacaauaaa

SEQ ID NO: 2354047 - RNA, 19 nt, Artificial Sequence
  Description of Artificial Sequence: Synthetic oligonucleotide
  Antisense strand to SEQ ID NO: 2354046
uuuauugucacuggagcau

SEQ ID NO: 2354048 - RNA, 19 nt, Artificial Sequence
  Description of Artificial Sequence: Synthetic oligonucleotide
  Sense strand starting at position 3285 of SEQ ID NO: 1885599
cugaauugcugcccucuau

SEQ ID NO: 2354049 - RNA, 19 nt, Artificial Sequence
  Description of Artificial Sequence: Synthetic oligonucleotide
  Antisense strand to SEQ ID NO: 2354048
auagagggcagcaauucag

SEQ ID NO: 2354050 - RNA, 19 nt, Artificial Sequence
  Description of Artificial Sequence: Synthetic oligonucleotide
  Sense strand starting at position 3304 of SEQ ID NO: 1885599
uugcuugaagaauagcaga

SEQ ID NO: 2354051 - RNA, 19 nt, Artificial Sequence
  Description of Artificial Sequence: Synthetic oligonucleotide
  Antisense strand to SEQ ID NO: 2354050
ucugcuauucuucaagcaa

SEQ ID NO: 2354052 - RNA, 19 nt, Artificial Sequence
  Description of Artificial Sequence: Synthetic oligonucleotide
  Sense strand starting at position 3402 of SEQ ID NO: 1885599
gagcauggaugcugcaauu

SEQ ID NO: 2354053 - RNA, 19 nt, Artificial Sequence
  Description of Artificial Sequence: Synthetic oligonucleotide
  Antisense strand to SEQ ID NO: 2354052
aauugcagcauccaugcuc

SEQ ID NO: 2354054 - RNA, 19 nt, Artificial Sequence
  Description of Artificial Sequence: Synthetic oligonucleotide
  Sense strand starting at position 3428 of SEQ ID NO: 1885599
uuacaaagaugaggagauu

SEQ ID NO: 2354055 - RNA, 19 nt, Artificial Sequence
  Description of Artificial Sequence: Synthetic oligonucleotide
  Antisense strand to SEQ ID NO: 2354054
aaucuccucaucuuuguaa

SEQ ID NO: 2354056 - RNA, 19 nt, Artificial Sequence
  Description of Artificial Sequence: Synthetic oligonucleotide
  Sense strand starting at position 3461 of SEQ ID NO: 1885599
gguuaaguguucuguccaa

SEQ ID NO: 2354057 - RNA, 19 nt, Artificial Sequence
  Description of Artificial Sequence: Synthetic oligonucleotide
  Antisense strand to SEQ ID NO: 2354056
uuggacagaacacuuaacc

SEQ ID NO: 2354058 - RNA, 19 nt, Artificial Sequence
  Description of Artificial Sequence: Synthetic oligonucleotide
  Sense strand starting at position 3465 of SEQ ID NO: 1885599
aaguguucuguccaagguu

SEQ ID NO: 2354059 - RNA, 19 nt, Artificial Sequence
  Description of Artificial Sequence: Synthetic oligonucleotide
  Antisense strand to SEQ ID NO: 2354058
aaccuuggacagaacacuu

SEQ ID NO: 2354060 - RNA, 19 nt, Artificial Sequence
  Description of Artificial Sequence: Synthetic oligonucleotide
  Sense strand starting at position 3639 of SEQ ID NO: 1885599
gcauuaacaccuggcacau

SEQ ID NO: 2354061 - RNA, 19 nt, Artificial Sequence
  Description of Artificial Sequence: Synthetic oligonucleotide
  Antisense strand to SEQ ID NO: 2354060
augugccagguguuaaugc

SEQ ID NO: 2354062 - RNA, 19 nt, Artificial Sequence
  Description of Artificial Sequence: Synthetic oligonucleotide
  Sense strand starting at position 3717 of SEQ ID NO: 1885599
caguccaugugcucuaagu

SEQ ID NO: 2354063 - RNA, 19 nt, Artificial Sequence
  Description of Artificial Sequence: Synthetic oligonucleotide
  Antisense strand to SEQ ID NO: 2354062
acuuagagcacauggacug

SEQ ID NO: 2354064 - RNA, 19 nt, Artificial Sequence
  Description of Artificial Sequence: Synthetic oligonucleotide
  Sense strand starting at position 3719 of SEQ ID NO: 1885599
guccaugugcucuaaguau

SEQ ID NO: 2354065 - RNA, 19 nt, Artificial Sequence
  Description of Artificial Sequence: Synthetic oligonucleotide
  Antisense strand to SEQ ID NO: 2354064
auacuuagagcacauggac

SEQ ID NO: 2354066 - RNA, 19 nt, Artificial Sequence
  Description of Artificial Sequence: Synthetic oligonucleotide
  Sense strand starting at position 3853 of SEQ ID NO: 1885599
gcacacagaucauaggaaa

SEQ ID NO: 2354067 - RNA, 19 nt, Artificial Sequence
  Description of Artificial Sequence: Synthetic oligonucleotide
  Antisense strand to SEQ ID NO: 2354066
uuuccuaugaucugugugc

SEQ ID NO: 2354068 - RNA, 19 nt, Artificial Sequence
  Description of Artificial Sequence: Synthetic oligonucleotide
  Sense strand starting at position 3936 of SEQ ID NO: 1885599
ugaaaugccuagcauaaga

SEQ ID NO: 2354069 - RNA, 19 nt, Artificial Sequence
  Description of Artificial Sequence: Synthetic oligonucleotide
  Antisense strand to SEQ ID NO: 2354068
ucuuaugcuaggcauuuca

SEQ ID NO: 2354070 - RNA, 19 nt, Artificial Sequence
  Description of Artificial Sequence: Synthetic oligonucleotide
  Sense strand starting at position 3947 of SEQ ID NO: 1885599
gcauaagagagcuacaugu

SEQ ID NO: 2354071 - RNA, 19 nt, Artificial Sequence
  Description of Artificial Sequence: Synthetic oligonucleotide
  Antisense strand to SEQ ID NO: 2354070
acauguagcucucuuaugc

SEQ ID NO: 2354072 - RNA, 19 nt, Artificial Sequence
  Description of Artificial Sequence: Synthetic oligonucleotide
  Sense strand starting at position 3957 of SEQ ID NO: 1885599
gcuacauguugggcaguua

SEQ ID NO: 2354073 - RNA, 19 nt, Artificial Sequence
  Description of Artificial Sequence: Synthetic oligonucleotide
  Antisense strand to SEQ ID NO: 2354072
uaacugcccaacauguagc

SEQ ID NO: 2354074 - RNA, 19 nt, Artificial Sequence
  Description of Artificial Sequence: Synthetic oligonucleotide
  Sense strand starting at position 125 of SEQ ID NO: 1885600
ggaggaaguuaguaagaag

SEQ ID NO: 2354075 - RNA, 19 nt, Artificial Sequence
  Description of Artificial Sequence: Synthetic oligonucleotide
  Antisense strand to SEQ ID NO: 2354074
cuucuuacuaacuuccucc

SEQ ID NO: 2354076 - RNA, 19 nt, Artificial Sequence
  Description of Artificial Sequence: Synthetic oligonucleotide
  Sense strand starting at position 142 of SEQ ID NO: 1885600
agccaucuguaacuagaua

SEQ ID NO: 2354077 - RNA, 19 nt, Artificial Sequence
  Description of Artificial Sequence: Synthetic oligonucleotide
  Antisense strand to SEQ ID NO: 2354076
uaucuaguuacagauggcu

SEQ ID NO: 2354078 - RNA, 19 nt, Artificial Sequence
  Description of Artificial Sequence: Synthetic oligonucleotide
  Sense strand starting at position 164 of SEQ ID NO: 1885600
ucuuuauaugcugaggaug

SEQ ID NO: 2354079 - RNA, 19 nt, Artificial Sequence
  Description of Artificial Sequence: Synthetic oligonucleotide
  Antisense strand to SEQ ID NO: 2354078
cauccucagcauauaaaga

SEQ ID NO: 2354080 - RNA, 19 nt, Artificial Sequence
  Description of Artificial Sequence: Synthetic oligonucleotide
  Sense strand starting at position 167 of SEQ ID NO: 1885600
uuauaugcugaggauguaa

SEQ ID NO: 2354081 - RNA, 19 nt, Artificial Sequence
  Description of Artificial Sequence: Synthetic oligonucleotide
  Antisense strand to SEQ ID NO: 2354080
uuacauccucagcauauaa

SEQ ID NO: 2354082 - RNA, 19 nt, Artificial Sequence
  Description of Artificial Sequence: Synthetic oligonucleotide
  Sense strand starting at position 169 of SEQ ID NO: 1885600
auaugcugaggauguaauu

SEQ ID NO: 2354083 - RNA, 19 nt, Artificial Sequence
  Description of Artificial Sequence: Synthetic oligonucleotide
  Antisense strand to SEQ ID NO: 2354082
aauuacauccucagcauau

SEQ ID NO: 2354084 - RNA, 19 nt, Artificial Sequence
  Description of Artificial Sequence: Synthetic oligonucleotide
  Sense strand starting at position 244 of SEQ ID NO: 1885600
auaagaucuucugcaaggu

SEQ ID NO: 2354085 - RNA, 19 nt, Artificial Sequence
  Description of Artificial Sequence: Synthetic oligonucleotide
  Antisense strand to SEQ ID NO: 2354084
accuugcagaagaucuuau

SEQ ID NO: 2354086 - RNA, 19 nt, Artificial Sequence
  Description of Artificial Sequence: Synthetic oligonucleotide
  Sense strand starting at position 245 of SEQ ID NO: 1885600
uaagaucuucugcaaggua

SEQ ID NO: 2354087 - RNA, 19 nt, Artificial Sequence
  Description of Artificial Sequence: Synthetic oligonucleotide
  Antisense strand to SEQ ID NO: 2354086
uaccuugcagaagaucuua

SEQ ID NO: 2354088 - RNA, 19 nt, Artificial Sequence
  Description of Artificial Sequence: Synthetic oligonucleotide
  Sense strand starting at position 248 of SEQ ID NO: 1885600
gaucuucugcaagguauca

SEQ ID NO: 2354089 - RNA, 19 nt, Artificial Sequence
  Description of Artificial Sequence: Synthetic oligonucleotide
  Antisense strand to SEQ ID NO: 2354088
ugauaccuugcagaagauc

SEQ ID NO: 2354090 - RNA, 19 nt, Artificial Sequence
  Description of Artificial Sequence: Synthetic oligonucleotide
  Sense strand starting at position 341 of SEQ ID NO: 1885600
gagcuuugggagcaaauua

SEQ ID NO: 2354091 - RNA, 19 nt, Artificial Sequence
  Description of Artificial Sequence: Synthetic oligonucleotide
  Antisense strand to SEQ ID NO: 2354090
uaauuugcucccaaagcuc

SEQ ID NO: 2354092 - RNA, 19 nt, Artificial Sequence
  Description of Artificial Sequence: Synthetic oligonucleotide
  Sense strand starting at position 367 of SEQ ID NO: 1885600
aggcaaguuagccauagua

SEQ ID NO: 2354093 - RNA, 19 nt, Artificial Sequence
  Description of Artificial Sequence: Synthetic oligonucleotide
  Antisense strand to SEQ ID NO: 2354092
uacuauggcuaacuugccu

SEQ ID NO: 2354094 - RNA, 19 nt, Artificial Sequence
  Description of Artificial Sequence: Synthetic oligonucleotide
  Sense strand starting at position 369 of SEQ ID NO: 1885600
gcaaguuagccauaguaga

SEQ ID NO: 2354095 - RNA, 19 nt, Artificial Sequence
  Description of Artificial Sequence: Synthetic oligonucleotide
  Antisense strand to SEQ ID NO: 2354094
ucuacuauggcuaacuugc

SEQ ID NO: 2354096 - RNA, 19 nt, Artificial Sequence
  Description of Artificial Sequence: Synthetic oligonucleotide
  Sense strand starting at position 380 of SEQ ID NO: 1885600
auaguagaaucagaaacuu

SEQ ID NO: 2354097 - RNA, 19 nt, Artificial Sequence
  Description of Artificial Sequence: Synthetic oligonucleotide
  Antisense strand to SEQ ID NO: 2354096
aaguuucugauucuacuau

SEQ ID NO: 2354098 - RNA, 19 nt, Artificial Sequence
  Description of Artificial Sequence: Synthetic oligonucleotide
  Sense strand starting at position 753 of SEQ ID NO: 1885600
cccggccuaucuuugaauu

SEQ ID NO: 2354099 - RNA, 19 nt, Artificial Sequence
  Description of Artificial Sequence: Synthetic oligonucleotide
  Antisense strand to SEQ ID NO: 2354098
aauucaaagauaggccggg

SEQ ID NO: 2354100 - RNA, 19 nt, Artificial Sequence
  Description of Artificial Sequence: Synthetic oligonucleotide
  Sense strand starting at position 754 of SEQ ID NO: 1885600
ccggccuaucuuugaauuu

SEQ ID NO: 2354101 - RNA, 19 nt, Artificial Sequence
  Description of Artificial Sequence: Synthetic oligonucleotide
  Antisense strand to SEQ ID NO: 2354100
aaauucaaagauaggccgg

SEQ ID NO: 2354102 - RNA, 19 nt, Artificial Sequence
  Description of Artificial Sequence: Synthetic oligonucleotide
  Sense strand starting at position 778 of SEQ ID NO: 1885600
acacucauuucgcaauaug

SEQ ID NO: 2354103 - RNA, 19 nt, Artificial Sequence
  Description of Artificial Sequence: Synthetic oligonucleotide
  Antisense strand to SEQ ID NO: 2354102
cauauugcgaaaugagugu

SEQ ID NO: 2354104 - RNA, 19 nt, Artificial Sequence
  Description of Artificial Sequence: Synthetic oligonucleotide
  Sense strand starting at position 911 of SEQ ID NO: 1885600
uacauaauccagugauugg

SEQ ID NO: 2354105 - RNA, 19 nt, Artificial Sequence
  Description of Artificial Sequence: Synthetic oligonucleotide
  Antisense strand to SEQ ID NO: 2354104
ccaaucacuggauuaugua

SEQ ID NO: 2354106 - RNA, 19 nt, Artificial Sequence
  Description of Artificial Sequence: Synthetic oligonucleotide
  Sense strand starting at position 920 of SEQ ID NO: 1885600
cagugauuggcucacacug

SEQ ID NO: 2354107 - RNA, 19 nt, Artificial Sequence
  Description of Artificial Sequence: Synthetic oligonucleotide
  Antisense strand to SEQ ID NO: 2354106
cagugugagccaaucacug

SEQ ID NO: 2354108 - RNA, 19 nt, Artificial Sequence
  Description of Artificial Sequence: Synthetic oligonucleotide
  Sense strand starting at position 959 of SEQ ID NO: 1885600
cuagcauggcucuacagua

SEQ ID NO: 2354109 - RNA, 19 nt, Artificial Sequence
  Description of Artificial Sequence: Synthetic oligonucleotide
  Antisense strand to SEQ ID NO: 2354108
uacuguagagccaugcuag

SEQ ID NO: 2354110 - RNA, 19 nt, Artificial Sequence
  Description of Artificial Sequence: Synthetic oligonucleotide
  Sense strand starting at position 1019 of SEQ ID NO: 1885600
agaaguguauacuccugga

SEQ ID NO: 2354111 - RNA, 19 nt, Artificial Sequence
  Description of Artificial Sequence: Synthetic oligonucleotide
  Antisense strand to SEQ ID NO: 2354110
uccaggaguauacacuucu

SEQ ID NO: 2354112 - RNA, 19 nt, Artificial Sequence
  Description of Artificial Sequence: Synthetic oligonucleotide
  Sense strand starting at position 1056 of SEQ ID NO: 1885600
agagauaauuaacaugaca

SEQ ID NO: 2354113 - RNA, 19 nt, Artificial Sequence
  Description of Artificial Sequence: Synthetic oligonucleotide
  Antisense strand to SEQ ID NO: 2354112
ugucauguuaauuaucucu

SEQ ID NO: 2354114 - RNA, 19 nt, Artificial Sequence
  Description of Artificial Sequence: Synthetic oligonucleotide
  Sense strand starting at position 1457 of SEQ ID NO: 1885600
caguaaguaucuccgcaua

SEQ ID NO: 2354115 - RNA, 19 nt, Artificial Sequence
  Description of Artificial Sequence: Synthetic oligonucleotide
  Antisense strand to SEQ ID NO: 2354114
uaugcggagauacuuacug

SEQ ID NO: 2354116 - RNA, 19 nt, Artificial Sequence
  Description of Artificial Sequence: Synthetic oligonucleotide
  Sense strand starting at position 1539 of SEQ ID NO: 1885600
cugaccugagcucaaguua

SEQ ID NO: 2354117 - RNA, 19 nt, Artificial Sequence
  Description of Artificial Sequence: Synthetic oligonucleotide
  Antisense strand to SEQ ID NO: 2354116
uaacuugagcucaggucag

SEQ ID NO: 2354118 - RNA, 19 nt, Artificial Sequence
  Description of Artificial Sequence: Synthetic oligonucleotide
  Sense strand starting at position 1567 of SEQ ID NO: 1885600
cagguuaaggcuuggagaa

SEQ ID NO: 2354119 - RNA, 19 nt, Artificial Sequence
  Description of Artificial Sequence: Synthetic oligonucleotide
  Antisense strand to SEQ ID NO: 2354118
uucuccaagccuuaaccug

SEQ ID NO: 2354120 - RNA, 19 nt, Artificial Sequence
  Description of Artificial Sequence: Synthetic oligonucleotide
  Sense strand starting at position 1568 of SEQ ID NO: 1885600
agguuaaggcuuggagaaa

SEQ ID NO: 2354121 - RNA, 19 nt, Artificial Sequence
  Description of Artificial Sequence: Synthetic oligonucleotide
  Antisense strand to SEQ ID NO: 2354120
uuucuccaagccuuaaccu

SEQ ID NO: 2354122 - RNA, 19 nt, Artificial Sequence
  Description of Artificial Sequence: Synthetic oligonucleotide
  Sense strand starting at position 1651 of SEQ ID NO: 1885600
agaacaagguaauaucaga

SEQ ID NO: 2354123 - RNA, 19 nt, Artificial Sequence
  Description of Artificial Sequence: Synthetic oligonucleotide
  Antisense strand to SEQ ID NO: 2354122
ucugauauuaccuuguucu

SEQ ID NO: 2354124 - RNA, 19 nt, Artificial Sequence
  Description of Artificial Sequence: Synthetic oligonucleotide
  Sense strand starting at position 1816 of SEQ ID NO: 1885600
gaaauacuauggcagggua

SEQ ID NO: 2354125 - RNA, 19 nt, Artificial Sequence
  Description of Artificial Sequence: Synthetic oligonucleotide
  Antisense strand to SEQ ID NO: 2354124
uacccugccauaguauuuc

SEQ ID NO: 2354126 - RNA, 19 nt, Artificial Sequence
  Description of Artificial Sequence: Synthetic oligonucleotide
  Sense strand starting at position 2771 of SEQ ID NO: 1885600
gcacuuugugucuaucuca

SEQ ID NO: 2354127 - RNA, 19 nt, Artificial Sequence
  Description of Artificial Sequence: Synthetic oligonucleotide
  Antisense strand to SEQ ID NO: 2354126
ugagauagacacaaagugc

SEQ ID NO: 2354128 - RNA, 19 nt, Artificial Sequence
  Description of Artificial Sequence: Synthetic oligonucleotide
  Sense strand starting at position 2885 of SEQ ID NO: 1885600
uggagaacuuccuugucua

SEQ ID NO: 2354129 - RNA, 19 nt, Artificial Sequence
  Description of Artificial Sequence: Synthetic oligonucleotide
  Antisense strand to SEQ ID NO: 2354128
uagacaaggaaguucucca

SEQ ID NO: 2354130 - RNA, 19 nt, Artificial Sequence
  Description of Artificial Sequence: Synthetic oligonucleotide
  Sense strand starting at position 2886 of SEQ ID NO: 1885600
ggagaacuuccuugucuag

SEQ ID NO: 2354131 - RNA, 19 nt, Artificial Sequence
  Description of Artificial Sequence: Synthetic oligonucleotide
  Antisense strand to SEQ ID NO: 2354130
cuagacaaggaaguucucc

SEQ ID NO: 2354132 - RNA, 19 nt, Artificial Sequence
  Description of Artificial Sequence: Synthetic oligonucleotide
  Sense strand starting at position 3154 of SEQ ID NO: 1885600
ugcaguuugcaguaaucuu

SEQ ID NO: 2354133 - RNA, 19 nt, Artificial Sequence
  Description of Artificial Sequence: Synthetic oligonucleotide
  Antisense strand to SEQ ID NO: 2354132
aagauuacugcaaacugca

SEQ ID NO: 2354134 - RNA, 19 nt, Artificial Sequence
  Description of Artificial Sequence: Synthetic oligonucleotide
  Sense strand starting at position 3203 of SEQ ID NO: 1885600
cuuuaugggcucuaacacu

SEQ ID NO: 2354135 - RNA, 19 nt, Artificial Sequence
  Description of Artificial Sequence: Synthetic oligonucleotide
  Antisense strand to SEQ ID NO: 2354134
aguguuagagcccauaaag

SEQ ID NO: 2354136 - RNA, 19 nt, Artificial Sequence
  Description of Artificial Sequence: Synthetic oligonucleotide
  Sense strand starting at position 3332 of SEQ ID NO: 1885600
acuagaaugcuauaagccu

SEQ ID NO: 2354137 - RNA, 19 nt, Artificial Sequence
  Description of Artificial Sequence: Synthetic oligonucleotide
  Antisense strand to SEQ ID NO: 2354136
aggcuuauagcauucuagu

SEQ ID NO: 2354138 - RNA, 19 nt, Artificial Sequence
  Description of Artificial Sequence: Synthetic oligonucleotide
  Sense strand starting at position 3443 of SEQ ID NO: 1885600
uucucuuucugauaauagg

SEQ ID NO: 2354139 - RNA, 19 nt, Artificial Sequence
  Description of Artificial Sequence: Synthetic oligonucleotide
  Antisense strand to SEQ ID NO: 2354138
ccuauuaucagaaagagaa

SEQ ID NO: 2354140 - RNA, 19 nt, Artificial Sequence
  Description of Artificial Sequence: Synthetic oligonucleotide
  Sense strand starting at position 3446 of SEQ ID NO: 1885600
ucuuucugauaauagggaa

SEQ ID NO: 2354141 - RNA, 19 nt, Artificial Sequence
  Description of Artificial Sequence: Synthetic oligonucleotide
  Antisense strand to SEQ ID NO: 2354140
uucccuauuaucagaaaga

SEQ ID NO: 2354142 - RNA, 19 nt, Artificial Sequence
  Description of Artificial Sequence: Synthetic oligonucleotide
  Sense strand starting at position 3449 of SEQ ID NO: 1885600
uucugauaauagggaauau

SEQ ID NO: 2354143 - RNA, 19 nt, Artificial Sequence
  Description of Artificial Sequence: Synthetic oligonucleotide
  Antisense strand to SEQ ID NO: 2354142
auauucccuauuaucagaa

SEQ ID NO: 2354144 - RNA, 19 nt, Artificial Sequence
  Description of Artificial Sequence: Synthetic oligonucleotide
  Sense strand starting at position 3484 of SEQ ID NO: 1885600
ggauaagccuucuuuacua

SEQ ID NO: 2354145 - RNA, 19 nt, Artificial Sequence
  Description of Artificial Sequence: Synthetic oligonucleotide
  Antisense strand to SEQ ID NO: 2354144
uaguaaagaaggcuuaucc

SEQ ID NO: 2354146 - RNA, 19 nt, Artificial Sequence
  Description of Artificial Sequence: Synthetic oligonucleotide
  Sense strand starting at position 3839 of SEQ ID NO: 1885600
cuuuaagcacuugguaaau

SEQ ID NO: 2354147 - RNA, 19 nt, Artificial Sequence
  Description of Artificial Sequence: Synthetic oligonucleotide
  Antisense strand to SEQ ID NO: 2354146
auuuaccaagugcuuaaag

SEQ ID NO: 2354148 - RNA, 19 nt, Artificial Sequence
  Description of Artificial Sequence: Synthetic oligonucleotide
  Sense strand starting at position 3850 of SEQ ID NO: 1885600
ugguaaauguccgcuggaa

SEQ ID NO: 2354149 - RNA, 19 nt, Artificial Sequence
  Description of Artificial Sequence: Synthetic oligonucleotide
  Antisense strand to SEQ ID NO: 2354148
uuccagcggacauuuacca

SEQ ID NO: 2354150 - RNA, 19 nt, Artificial Sequence
  Description of Artificial Sequence: Synthetic oligonucleotide
  Sense strand starting at position 3852 of SEQ ID NO: 1885600
guaaauguccgcuggaauu

SEQ ID NO: 2354151 - RNA, 19 nt, Artificial Sequence
  Description of Artificial Sequence: Synthetic oligonucleotide
  Antisense strand to SEQ ID NO: 2354150
aauuccagcggacauuuac

SEQ ID NO: 2354152 - RNA, 19 nt, Artificial Sequence
  Description of Artificial Sequence: Synthetic oligonucleotide
  Sense strand starting at position 3927 of SEQ ID NO: 1885600
guagaagcuccacggcaua

SEQ ID NO: 2354153 - RNA, 19 nt, Artificial Sequence
  Description of Artificial Sequence: Synthetic oligonucleotide
  Antisense strand to SEQ ID NO: 2354152
uaugccguggagcuucuac

SEQ ID NO: 2354154 - RNA, 19 nt, Artificial Sequence
  Description of Artificial Sequence: Synthetic oligonucleotide
  Sense strand starting at position 215 of SEQ ID NO: 1885601
aacggaaauuguguaguca

SEQ ID NO: 2354155 - RNA, 19 nt, Artificial Sequence
  Description of Artificial Sequence: Synthetic oligonucleotide
  Antisense strand to SEQ ID NO: 2354154
ugacuacacaauuuccguu

SEQ ID NO: 2354156 - RNA, 19 nt, Artificial Sequence
  Description of Artificial Sequence: Synthetic oligonucleotide
  Sense strand starting at position 216 of SEQ ID NO: 1885601
acggaaauuguguagucaa

SEQ ID NO: 2354157 - RNA, 19 nt, Artificial Sequence
  Description of Artificial Sequence: Synthetic oligonucleotide
  Antisense strand to SEQ ID NO: 2354156
uugacuacacaauuuccgu

SEQ ID NO: 2354158 - RNA, 19 nt, Artificial Sequence
  Description of Artificial Sequence: Synthetic oligonucleotide
  Sense strand starting at position 219 of SEQ ID NO: 1885601
gaaauuguguagucaagag

SEQ ID NO: 2354159 - RNA, 19 nt, Artificial Sequence
  Description of Artificial Sequence: Synthetic oligonucleotide
  Antisense strand to SEQ ID NO: 2354158
cucuugacuacacaauuuc

SEQ ID NO: 2354160 - RNA, 19 nt, Artificial Sequence
  Description of Artificial Sequence: Synthetic oligonucleotide
  Sense strand starting at position 223 of SEQ ID NO: 1885601
uuguguagucaagaguuaa

SEQ ID NO: 2354161 - RNA, 19 nt, Artificial Sequence
  Description of Artificial Sequence: Synthetic oligonucleotide
  Antisense strand to SEQ ID NO: 2354160
uuaacucuugacuacacaa

SEQ ID NO: 2354162 - RNA, 19 nt, Artificial Sequence
  Description of Artificial Sequence: Synthetic oligonucleotide
  Sense strand starting at position 259 of SEQ ID NO: 1885601
cugaccagauaguuauaua

SEQ ID NO: 2354163 - RNA, 19 nt, Artificial Sequence
  Description of Artificial Sequence: Synthetic oligonucleotide
  Antisense strand to SEQ ID NO: 2354162
uauauaacuaucuggucag

SEQ ID NO: 2354164 - RNA, 19 nt, Artificial Sequence
  Description of Artificial Sequence: Synthetic oligonucleotide
  Sense strand starting at position 271 of SEQ ID NO: 1885601
uuauauaguuaggcuacau

SEQ ID NO: 2354165 - RNA, 19 nt, Artificial Sequence
  Description of Artificial Sequence: Synthetic oligonucleotide
  Antisense strand to SEQ ID NO: 2354164
auguagccuaacuauauaa

SEQ ID NO: 2354166 - RNA, 19 nt, Artificial Sequence
  Description of Artificial Sequence: Synthetic oligonucleotide
  Sense strand starting at position 275 of SEQ ID NO: 1885601
auaguuaggcuacauucua

SEQ ID NO: 2354167 - RNA, 19 nt, Artificial Sequence
  Description of Artificial Sequence: Synthetic oligonucleotide
  Antisense strand to SEQ ID NO: 2354166
uagaauguagccuaacuau

SEQ ID NO: 2354168 - RNA, 19 nt, Artificial Sequence
  Description of Artificial Sequence: Synthetic oligonucleotide
  Sense strand starting at position 464 of SEQ ID NO: 1885601
ucucuuauaguagaaguua

SEQ ID NO: 2354169 - RNA, 19 nt, Artificial Sequence
  Description of Artificial Sequence: Synthetic oligonucleotide
  Antisense strand to SEQ ID NO: 2354168
uaacuucuacuauaagaga

SEQ ID NO: 2354170 - RNA, 19 nt, Artificial Sequence
  Description of Artificial Sequence: Synthetic oligonucleotide
  Sense strand starting at position 498 of SEQ ID NO: 1885601
gcauauagguggccagaca

SEQ ID NO: 2354171 - RNA, 19 nt, Artificial Sequence
  Description of Artificial Sequence: Synthetic oligonucleotide
  Antisense strand to SEQ ID NO: 2354170
ugucuggccaccuauaugc

SEQ ID NO: 2354172 - RNA, 19 nt, Artificial Sequence
  Description of Artificial Sequence: Synthetic oligonucleotide
  Sense strand starting at position 592 of SEQ ID NO: 1885601
gcauauugucaauagaaau

SEQ ID NO: 2354173 - RNA, 19 nt, Artificial Sequence
  Description of Artificial Sequence: Synthetic oligonucleotide
  Antisense strand to SEQ ID NO: 2354172
auuucuauugacaauaugc

SEQ ID NO: 2354174 - RNA, 19 nt, Artificial Sequence
  Description of Artificial Sequence: Synthetic oligonucleotide
  Sense strand starting at position 688 of SEQ ID NO: 1885601
cagucagagcugcaguaua

SEQ ID NO: 2354175 - RNA, 19 nt, Artificial Sequence
  Description of Artificial Sequence: Synthetic oligonucleotide
  Antisense strand to SEQ ID NO: 2354174
uauacugcagcucugacug

SEQ ID NO: 2354176 - RNA, 19 nt, Artificial Sequence
  Description of Artificial Sequence: Synthetic oligonucleotide
  Sense strand starting at position 699 of SEQ ID NO: 1885601
gcaguauacaguuggauag

SEQ ID NO: 2354177 - RNA, 19 nt, Artificial Sequence
  Description of Artificial Sequence: Synthetic oligonucleotide
  Antisense strand to SEQ ID NO: 2354176
cuauccaacuguauacugc

SEQ ID NO: 2354178 - RNA, 19 nt, Artificial Sequence
  Description of Artificial Sequence: Synthetic oligonucleotide
  Sense strand starting at position 924 of SEQ ID NO: 1885601
guuacaucucaggagcaag

SEQ ID NO: 2354179 - RNA, 19 nt, Artificial Sequence
  Description of Artificial Sequence: Synthetic oligonucleotide
  Antisense strand to SEQ ID NO: 2354178
cuugcuccugagauguaac

SEQ ID NO: 2354180 - RNA, 19 nt, Artificial Sequence
  Description of Artificial Sequence: Synthetic oligonucleotide
  Sense strand starting at position 985 of SEQ ID NO: 1885601
aauagugaagacugucuau

SEQ ID NO: 2354181 - RNA, 19 nt, Artificial Sequence
  Description of Artificial Sequence: Synthetic oligonucleotide
  Antisense strand to SEQ ID NO: 2354180
auagacagucuucacuauu

SEQ ID NO: 2354182 - RNA, 19 nt, Artificial Sequence
  Description of Artificial Sequence: Synthetic oligonucleotide
  Sense strand starting at position 988 of SEQ ID NO: 1885601
agugaagacugucuauucu

SEQ ID NO: 2354183 - RNA, 19 nt, Artificial Sequence
  Description of Artificial Sequence: Synthetic oligonucleotide
  Antisense strand to SEQ ID NO: 2354182
agaauagacagucuucacu

SEQ ID NO: 2354184 - RNA, 19 nt, Artificial Sequence
  Description of Artificial Sequence: Synthetic oligonucleotide
  Sense strand starting at position 1194 of SEQ ID NO: 1885601
auagaauuccauugcuaga

SEQ ID NO: 2354185 - RNA, 19 nt, Artificial Sequence
  Description of Artificial Sequence: Synthetic oligonucleotide
  Antisense strand to SEQ ID NO: 2354184
ucuagcaauggaauucuau

SEQ ID NO: 2354186 - RNA, 19 nt, Artificial Sequence
  Description of Artificial Sequence: Synthetic oligonucleotide
  Sense strand starting at position 1223 of SEQ ID NO: 1885601
gauaucaucugguccaaga

SEQ ID NO: 2354187 - RNA, 19 nt, Artificial Sequence
  Description of Artificial Sequence: Synthetic oligonucleotide
  Antisense strand to SEQ ID NO: 2354186
ucuuggaccagaugauauc

SEQ ID NO: 2354188 - RNA, 19 nt, Artificial Sequence
  Description of Artificial Sequence: Synthetic oligonucleotide
  Sense strand starting at position 1286 of SEQ ID NO: 1885601
augugauuugccuguggau

SEQ ID NO: 2354189 - RNA, 19 nt, Artificial Sequence
  Description of Artificial Sequence: Synthetic oligonucleotide
  Antisense strand to SEQ ID NO: 2354188
auccacaggcaaaucacau

SEQ ID NO: 2354190 - RNA, 19 nt, Artificial Sequence
  Description of Artificial Sequence: Synthetic oligonucleotide
  Sense strand starting at position 1370 of SEQ ID NO: 1885601
gcugguuggacuugacauc

SEQ ID NO: 2354191 - RNA, 19 nt, Artificial Sequence
  Description of Artificial Sequence: Synthetic oligonucleotide
  Antisense strand to SEQ ID NO: 2354190
gaugucaaguccaaccagc

SEQ ID NO: 2354192 - RNA, 19 nt, Artificial Sequence
  Description of Artificial Sequence: Synthetic oligonucleotide
  Sense strand starting at position 1441 of SEQ ID NO: 1885601
uggacuugguuuccaucaa

SEQ ID NO: 2354193 - RNA, 19 nt, Artificial Sequence
  Description of Artificial Sequence: Synthetic oligonucleotide
  Antisense strand to SEQ ID NO: 2354192
uugauggaaaccaagucca

SEQ ID NO: 2354194 - RNA, 19 nt, Artificial Sequence
  Description of Artificial Sequence: Synthetic oligonucleotide
  Sense strand starting at position 1514 of SEQ ID NO: 1885601
auaauaugagauggcauau

SEQ ID NO: 2354195 - RNA, 19 nt, Artificial Sequence
  Description of Artificial Sequence: Synthetic oligonucleotide
  Antisense strand to SEQ ID NO: 2354194
auaugccaucucauauuau

SEQ ID NO: 2354196 - RNA, 19 nt, Artificial Sequence
  Description of Artificial Sequence: Synthetic oligonucleotide
  Sense strand starting at position 1598 of SEQ ID NO: 1885601
gguggagugcccucguauc

SEQ ID NO: 2354197 - RNA, 19 nt, Artificial Sequence
  Description of Artificial Sequence: Synthetic oligonucleotide
  Antisense strand to SEQ ID NO: 2354196
gauacgagggcacuccacc

SEQ ID NO: 2354198 - RNA, 19 nt, Artificial Sequence
  Description of Artificial Sequence: Synthetic oligonucleotide
  Sense strand starting at position 2246 of SEQ ID NO: 1885601
gucuccacagcaugaauua

SEQ ID NO: 2354199 - RNA, 19 nt, Artificial Sequence
  Description of Artificial Sequence: Synthetic oligonucleotide
  Antisense strand to SEQ ID NO: 2354198
uaauucaugcuguggagac

SEQ ID NO: 2354200 - RNA, 19 nt, Artificial Sequence
  Description of Artificial Sequence: Synthetic oligonucleotide
  Sense strand starting at position 2511 of SEQ ID NO: 1885601
ugacgagaacuaugacuuc

SEQ ID NO: 2354201 - RNA, 19 nt, Artificial Sequence
  Description of Artificial Sequence: Synthetic oligonucleotide
  Antisense strand to SEQ ID NO: 2354200
gaagucauaguucucguca

SEQ ID NO: 2354202 - RNA, 19 nt, Artificial Sequence
  Description of Artificial Sequence: Synthetic oligonucleotide
  Sense strand starting at position 2921 of SEQ ID NO: 1885601
ccuccaguuccggagaaga

SEQ ID NO: 2354203 - RNA, 19 nt, Artificial Sequence
  Description of Artificial Sequence: Synthetic oligonucleotide
  Antisense strand to SEQ ID NO: 2354202
ucuucuccggaacuggagg

SEQ ID NO: 2354204 - RNA, 19 nt, Artificial Sequence
  Description of Artificial Sequence: Synthetic oligonucleotide
  Sense strand starting at position 3167 of SEQ ID NO: 1885601
ggacuggucgccgcgaaga

SEQ ID NO: 2354205 - RNA, 19 nt, Artificial Sequence
  Description of Artificial Sequence: Synthetic oligonucleotide
  Antisense strand to SEQ ID NO: 2354204
ucuucgcggcgaccagucc

SEQ ID NO: 2354206 - RNA, 19 nt, Artificial Sequence
  Description of Artificial Sequence: Synthetic oligonucleotide
  Sense strand starting at position 3508 of SEQ ID NO: 1885601
agaggaucugcucgagaau

SEQ ID NO: 2354207 - RNA, 19 nt, Artificial Sequence
  Description of Artificial Sequence: Synthetic oligonucleotide
  Antisense strand to SEQ ID NO: 2354206
auucucgagcagauccucu

SEQ ID NO: 2354208 - RNA, 19 nt, Artificial Sequence
  Description of Artificial Sequence: Synthetic oligonucleotide
  Sense strand starting at position 3509 of SEQ ID NO: 1885601
gaggaucugcucgagaauc

SEQ ID NO: 2354209 - RNA, 19 nt, Artificial Sequence
  Description of Artificial Sequence: Synthetic oligonucleotide
  Antisense strand to SEQ ID NO: 2354208
gauucucgagcagauccuc

SEQ ID NO: 2354210 - RNA, 19 nt, Artificial Sequence
  Description of Artificial Sequence: Synthetic oligonucleotide
  Sense strand starting at position 3511 of SEQ ID NO: 1885601
ggaucugcucgagaaucaa

SEQ ID NO: 2354211 - RNA, 19 nt, Artificial Sequence
  Description of Artificial Sequence: Synthetic oligonucleotide
  Antisense strand to SEQ ID NO: 2354210
uugauucucgagcagaucc

SEQ ID NO: 2354212 - RNA, 19 nt, Artificial Sequence
  Description of Artificial Sequence: Synthetic oligonucleotide
  Sense strand starting at position 3579 of SEQ ID NO: 1885601
gagauagguuguucccacu

SEQ ID NO: 2354213 - RNA, 19 nt, Artificial Sequence
  Description of Artificial Sequence: Synthetic oligonucleotide
  Antisense strand to SEQ ID NO: 2354212
agugggaacaaccuaucuc

SEQ ID NO: 2354214 - RNA, 19 nt, Artificial Sequence
  Description of Artificial Sequence: Synthetic oligonucleotide
  Sense strand starting at position 3598 of SEQ ID NO: 1885601
ggguguguucggagaggug

SEQ ID NO: 2354215 - RNA, 19 nt, Artificial Sequence
  Description of Artificial Sequence: Synthetic oligonucleotide
  Antisense strand to SEQ ID NO: 2354214
caccucuccgaacacaccc

SEQ ID NO: 2354216 - RNA, 19 nt, Artificial Sequence
  Description of Artificial Sequence: Synthetic oligonucleotide
  Sense strand starting at position 3688 of SEQ ID NO: 1885601
gguccucauuuacauauuu

SEQ ID NO: 2354217 - RNA, 19 nt, Artificial Sequence
  Description of Artificial Sequence: Synthetic oligonucleotide
  Antisense strand to SEQ ID NO: 2354216
aaauauguaaaugaggacc

SEQ ID NO: 2354218 - RNA, 19 nt, Artificial Sequence
  Description of Artificial Sequence: Synthetic oligonucleotide
  Sense strand starting at position 3750 of SEQ ID NO: 1885601
ucgucuuccucauuuguaa

SEQ ID NO: 2354219 - RNA, 19 nt, Artificial Sequence
  Description of Artificial Sequence: Synthetic oligonucleotide
  Antisense strand to SEQ ID NO: 2354218
uuacaaaugaggaagacga

SEQ ID NO: 2354220 - RNA, 19 nt, Artificial Sequence
  Description of Artificial Sequence: Synthetic oligonucleotide
  Sense strand starting at position 3839 of SEQ ID NO: 1885601
ggaacuaugguugguacuu

SEQ ID NO: 2354221 - RNA, 19 nt, Artificial Sequence
  Description of Artificial Sequence: Synthetic oligonucleotide
  Antisense strand to SEQ ID NO: 2354220
aaguaccaaccauaguucc

SEQ ID NO: 2354222 - RNA, 19 nt, Artificial Sequence
  Description of Artificial Sequence: Synthetic oligonucleotide
  Sense strand starting at position 3840 of SEQ ID NO: 1885601
gaacuaugguugguacuua

SEQ ID NO: 2354223 - RNA, 19 nt, Artificial Sequence
  Description of Artificial Sequence: Synthetic oligonucleotide
  Antisense strand to SEQ ID NO: 2354222
uaaguaccaaccauaguuc

SEQ ID NO: 2354224 - RNA, 19 nt, Artificial Sequence
  Description of Artificial Sequence: Synthetic oligonucleotide
  Sense strand starting at position 3898 of SEQ ID NO: 1885601
cacagacggguuuauaguu

SEQ ID NO: 2354225 - RNA, 19 nt, Artificial Sequence
  Description of Artificial Sequence: Synthetic oligonucleotide
  Antisense strand to SEQ ID NO: 2354224
aacuauaaacccgucugug

SEQ ID NO: 2354226 - RNA, 19 nt, Artificial Sequence
  Description of Artificial Sequence: Synthetic oligonucleotide
  Sense strand starting at position 3903 of SEQ ID NO: 1885601
acggguuuauaguuagaau

SEQ ID NO: 2354227 - RNA, 19 nt, Artificial Sequence
  Description of Artificial Sequence: Synthetic oligonucleotide
  Antisense strand to SEQ ID NO: 2354226
auucuaacuauaaacccgu

SEQ ID NO: 2354228 - RNA, 19 nt, Artificial Sequence
  Description of Artificial Sequence: Synthetic oligonucleotide
  Sense strand starting at position 3904 of SEQ ID NO: 1885601
cggguuuauaguuagaaua

SEQ ID NO: 2354229 - RNA, 19 nt, Artificial Sequence
  Description of Artificial Sequence: Synthetic oligonucleotide
  Antisense strand to SEQ ID NO: 2354228
uauucuaacuauaaacccg

SEQ ID NO: 2354230 - RNA, 19 nt, Artificial Sequence
  Description of Artificial Sequence: Synthetic oligonucleotide
  Sense strand starting at position 3924 of SEQ ID NO: 1885601
gaggaaggugaccguaaau

SEQ ID NO: 2354231 - RNA, 19 nt, Artificial Sequence
  Description of Artificial Sequence: Synthetic oligonucleotide
  Antisense strand to SEQ ID NO: 2354230
auuuacggucaccuuccuc

SEQ ID NO: 2354232 - RNA, 19 nt, Artificial Sequence
  Description of Artificial Sequence: Synthetic oligonucleotide
  Sense strand starting at position 3969 of SEQ ID NO: 1885601
acguauguaauauauagga

SEQ ID NO: 2354233 - RNA, 19 nt, Artificial Sequence
  Description of Artificial Sequence: Synthetic oligonucleotide
  Antisense strand to SEQ ID NO: 2354232
uccuauauauuacauacgu

SEQ ID NO: 2354234 - RNA, 19 nt, Artificial Sequence
  Description of Artificial Sequence: Synthetic oligonucleotide
  Sense strand starting at position 267 of SEQ ID NO: 1885603
ugagaagcggccuguauuu

SEQ ID NO: 2354235 - RNA, 19 nt, Artificial Sequence
  Description of Artificial Sequence: Synthetic oligonucleotide
  Antisense strand to SEQ ID NO: 2354234
aaauacaggccgcuucuca

SEQ ID NO: 2354236 - RNA, 19 nt, Artificial Sequence
  Description of Artificial Sequence: Synthetic oligonucleotide
  Sense strand starting at position 357 of SEQ ID NO: 1885603
aggcaacugccagauugaa

SEQ ID NO: 2354237 - RNA, 19 nt, Artificial Sequence
  Description of Artificial Sequence: Synthetic oligonucleotide
  Antisense strand to SEQ ID NO: 2354236
uucaaucuggcaguugccu

SEQ ID NO: 2354238 - RNA, 19 nt, Artificial Sequence
  Description of Artificial Sequence: Synthetic oligonucleotide
  Sense strand starting at position 488 of SEQ ID NO: 1885603
ucggcuucugcucuguaaa

SEQ ID NO: 2354239 - RNA, 19 nt, Artificial Sequence
  Description of Artificial Sequence: Synthetic oligonucleotide
  Antisense strand to SEQ ID NO: 2354238
uuuacagagcagaagccga

SEQ ID NO: 2354240 - RNA, 19 nt, Artificial Sequence
  Description of Artificial Sequence: Synthetic oligonucleotide
  Sense strand starting at position 629 of SEQ ID NO: 1885603
ccaaauaucugcucuggga

SEQ ID NO: 2354241 - RNA, 19 nt, Artificial Sequence
  Description of Artificial Sequence: Synthetic oligonucleotide
  Antisense strand to SEQ ID NO: 2354240
ucccagagcagauauuugg

SEQ ID NO: 2354242 - RNA, 19 nt, Artificial Sequence
  Description of Artificial Sequence: Synthetic oligonucleotide
  Sense strand starting at position 709 of SEQ ID NO: 1885603
cuaggacaaucuguugaaa

SEQ ID NO: 2354243 - RNA, 19 nt, Artificial Sequence
  Description of Artificial Sequence: Synthetic oligonucleotide
  Antisense strand to SEQ ID NO: 2354242
uuucaacagauuguccuag

SEQ ID NO: 2354244 - RNA, 19 nt, Artificial Sequence
  Description of Artificial Sequence: Synthetic oligonucleotide
  Sense strand starting at position 733 of SEQ ID NO: 1885603
gggcucuuacccuagacaa

SEQ ID NO: 2354245 - RNA, 19 nt, Artificial Sequence
  Description of Artificial Sequence: Synthetic oligonucleotide
  Antisense strand to SEQ ID NO: 2354244
uugucuaggguaagagccc

SEQ ID NO: 2354246 - RNA, 19 nt, Artificial Sequence
  Description of Artificial Sequence: Synthetic oligonucleotide
  Sense strand starting at position 818 of SEQ ID NO: 1885603
guuuaacaucuguaaucua

SEQ ID NO: 2354247 - RNA, 19 nt, Artificial Sequence
  Description of Artificial Sequence: Synthetic oligonucleotide
  Antisense strand to SEQ ID NO: 2354246
uagauuacagauguuaaac

SEQ ID NO: 2354248 - RNA, 19 nt, Artificial Sequence
  Description of Artificial Sequence: Synthetic oligonucleotide
  Sense strand starting at position 971 of SEQ ID NO: 1885603
gcacucucaggagggaaau

SEQ ID NO: 2354249 - RNA, 19 nt, Artificial Sequence
  Description of Artificial Sequence: Synthetic oligonucleotide
  Antisense strand to SEQ ID NO: 2354248
auuucccuccugagagugc

SEQ ID NO: 2354250 - RNA, 19 nt, Artificial Sequence
  Description of Artificial Sequence: Synthetic oligonucleotide
  Sense strand starting at position 1513 of SEQ ID NO: 1885603
cucaaauuguggcugagaa

SEQ ID NO: 2354251 - RNA, 19 nt, Artificial Sequence
  Description of Artificial Sequence: Synthetic oligonucleotide
  Antisense strand to SEQ ID NO: 2354250
uucucagccacaauuugag

SEQ ID NO: 2354252 - RNA, 19 nt, Artificial Sequence
  Description of Artificial Sequence: Synthetic oligonucleotide
  Sense strand starting at position 1514 of SEQ ID NO: 1885603
ucaaauuguggcugagaac

SEQ ID NO: 2354253 - RNA, 19 nt, Artificial Sequence
  Description of Artificial Sequence: Synthetic oligonucleotide
  Antisense strand to SEQ ID NO: 2354252
guucucagccacaauuuga

SEQ ID NO: 2354254 - RNA, 19 nt, Artificial Sequence
  Description of Artificial Sequence: Synthetic oligonucleotide
  Sense strand starting at position 1535 of SEQ ID NO: 1885603
gcgacaucccaucaccaga

SEQ ID NO: 2354255 - RNA, 19 nt, Artificial Sequence
  Description of Artificial Sequence: Synthetic oligonucleotide
  Antisense strand to SEQ ID NO: 2354254
ucuggugaugggaugucgc

SEQ ID NO: 2354256 - RNA, 19 nt, Artificial Sequence
  Description of Artificial Sequence: Synthetic oligonucleotide
  Sense strand starting at position 1669 of SEQ ID NO: 1885603
ugauaaugaucauuagagu

SEQ ID NO: 2354257 - RNA, 19 nt, Artificial Sequence
  Description of Artificial Sequence: Synthetic oligonucleotide
  Antisense strand to SEQ ID NO: 2354256
acucuaaugaucauuauca

SEQ ID NO: 2354258 - RNA, 19 nt, Artificial Sequence
  Description of Artificial Sequence: Synthetic oligonucleotide
  Sense strand starting at position 1743 of SEQ ID NO: 1885603
ccaagcucugcucauaaga

SEQ ID NO: 2354259 - RNA, 19 nt, Artificial Sequence
  Description of Artificial Sequence: Synthetic oligonucleotide
  Antisense strand to SEQ ID NO: 2354258
ucuuaugagcagagcuugg

SEQ ID NO: 2354260 - RNA, 19 nt, Artificial Sequence
  Description of Artificial Sequence: Synthetic oligonucleotide
  Sense strand starting at position 2411 of SEQ ID NO: 1885603
gaaagacauccuugauguu

SEQ ID NO: 2354261 - RNA, 19 nt, Artificial Sequence
  Description of Artificial Sequence: Synthetic oligonucleotide
  Antisense strand to SEQ ID NO: 2354260
aacaucaaggaugucuuuc

SEQ ID NO: 2354262 - RNA, 19 nt, Artificial Sequence
  Description of Artificial Sequence: Synthetic oligonucleotide
  Sense strand starting at position 2444 of SEQ ID NO: 1885603
uugcuaagagcuggaaacu

SEQ ID NO: 2354263 - RNA, 19 nt, Artificial Sequence
  Description of Artificial Sequence: Synthetic oligonucleotide
  Antisense strand to SEQ ID NO: 2354262
aguuuccagcucuuagcaa

SEQ ID NO: 2354264 - RNA, 19 nt, Artificial Sequence
  Description of Artificial Sequence: Synthetic oligonucleotide
  Sense strand starting at position 2471 of SEQ ID NO: 1885603
ggaaauggcucaccuugaa

SEQ ID NO: 2354265 - RNA, 19 nt, Artificial Sequence
  Description of Artificial Sequence: Synthetic oligonucleotide
  Antisense strand to SEQ ID NO: 2354264
uucaaggugagccauuucc

SEQ ID NO: 2354266 - RNA, 19 nt, Artificial Sequence
  Description of Artificial Sequence: Synthetic oligonucleotide
  Sense strand starting at position 2642 of SEQ ID NO: 1885603
uuaugcuuccauggagauu

SEQ ID NO: 2354267 - RNA, 19 nt, Artificial Sequence
  Description of Artificial Sequence: Synthetic oligonucleotide
  Antisense strand to SEQ ID NO: 2354266
aaucuccauggaagcauaa

SEQ ID NO: 2354268 - RNA, 19 nt, Artificial Sequence
  Description of Artificial Sequence: Synthetic oligonucleotide
  Sense strand starting at position 2746 of SEQ ID NO: 1885603
cuuagaauccuggauuagc

SEQ ID NO: 2354269 - RNA, 19 nt, Artificial Sequence
  Description of Artificial Sequence: Synthetic oligonucleotide
  Antisense strand to SEQ ID NO: 2354268
gcuaauccaggauucuaag

SEQ ID NO: 2354270 - RNA, 19 nt, Artificial Sequence
  Description of Artificial Sequence: Synthetic oligonucleotide
  Sense strand starting at position 2809 of SEQ ID NO: 1885603
ccacgugaaacguagaaua

SEQ ID NO: 2354271 - RNA, 19 nt, Artificial Sequence
  Description of Artificial Sequence: Synthetic oligonucleotide
  Antisense strand to SEQ ID NO: 2354270
uauucuacguuucacgugg

SEQ ID NO: 2354272 - RNA, 19 nt, Artificial Sequence
  Description of Artificial Sequence: Synthetic oligonucleotide
  Sense strand starting at position 2811 of SEQ ID NO: 1885603
acgugaaacguagaauaaa

SEQ ID NO: 2354273 - RNA, 19 nt, Artificial Sequence
  Description of Artificial Sequence: Synthetic oligonucleotide
  Antisense strand to SEQ ID NO: 2354272
uuuauucuacguuucacgu

SEQ ID NO: 2354274 - RNA, 19 nt, Artificial Sequence
  Description of Artificial Sequence: Synthetic oligonucleotide
  Sense strand starting at position 2845 of SEQ ID NO: 1885603
cauagauauugggcaguuu

SEQ ID NO: 2354275 - RNA, 19 nt, Artificial Sequence
  Description of Artificial Sequence: Synthetic oligonucleotide
  Antisense strand to SEQ ID NO: 2354274
aaacugcccaauaucuaug

SEQ ID NO: 2354276 - RNA, 19 nt, Artificial Sequence
  Description of Artificial Sequence: Synthetic oligonucleotide
  Sense strand starting at position 2846 of SEQ ID NO: 1885603
auagauauugggcaguuua

SEQ ID NO: 2354277 - RNA, 19 nt, Artificial Sequence
  Description of Artificial Sequence: Synthetic oligonucleotide
  Antisense strand to SEQ ID NO: 2354276
uaaacugcccaauaucuau

SEQ ID NO: 2354278 - RNA, 19 nt, Artificial Sequence
  Description of Artificial Sequence: Synthetic oligonucleotide
  Sense strand starting at position 2853 of SEQ ID NO: 1885603
uugggcaguuuauuauaga

SEQ ID NO: 2354279 - RNA, 19 nt, Artificial Sequence
  Description of Artificial Sequence: Synthetic oligonucleotide
  Antisense strand to SEQ ID NO: 2354278
ucuauaauaaacugcccaa

SEQ ID NO: 2354280 - RNA, 19 nt, Artificial Sequence
  Description of Artificial Sequence: Synthetic oligonucleotide
  Sense strand starting at position 3084 of SEQ ID NO: 1885603
ggaucucauccuuaaugca

SEQ ID NO: 2354281 - RNA, 19 nt, Artificial Sequence
  Description of Artificial Sequence: Synthetic oligonucleotide
  Antisense strand to SEQ ID NO: 2354280
ugcauuaaggaugagaucc

SEQ ID NO: 2354282 - RNA, 19 nt, Artificial Sequence
  Description of Artificial Sequence: Synthetic oligonucleotide
  Sense strand starting at position 3113 of SEQ ID NO: 1885603
acuguucuggaguagucua

SEQ ID NO: 2354283 - RNA, 19 nt, Artificial Sequence
  Description of Artificial Sequence: Synthetic oligonucleotide
  Antisense strand to SEQ ID NO: 2354282
uagacuacuccagaacagu

SEQ ID NO: 2354284 - RNA, 19 nt, Artificial Sequence
  Description of Artificial Sequence: Synthetic oligonucleotide
  Sense strand starting at position 3118 of SEQ ID NO: 1885603
ucuggaguagucuaccaua

SEQ ID NO: 2354285 - RNA, 19 nt, Artificial Sequence
  Description of Artificial Sequence: Synthetic oligonucleotide
  Antisense strand to SEQ ID NO: 2354284
uaugguagacuacuccaga

SEQ ID NO: 2354286 - RNA, 19 nt, Artificial Sequence
  Description of Artificial Sequence: Synthetic oligonucleotide
  Sense strand starting at position 3205 of SEQ ID NO: 1885603
cagauagaucaguagccuu

SEQ ID NO: 2354287 - RNA, 19 nt, Artificial Sequence
  Description of Artificial Sequence: Synthetic oligonucleotide
  Antisense strand to SEQ ID NO: 2354286
aaggcuacugaucuaucug

SEQ ID NO: 2354288 - RNA, 19 nt, Artificial Sequence
  Description of Artificial Sequence: Synthetic oligonucleotide
  Sense strand starting at position 3293 of SEQ ID NO: 1885603
uggguugaccuagacagua

SEQ ID NO: 2354289 - RNA, 19 nt, Artificial Sequence
  Description of Artificial Sequence: Synthetic oligonucleotide
  Antisense strand to SEQ ID NO: 2354288
uacugucuaggucaaccca

SEQ ID NO: 2354290 - RNA, 19 nt, Artificial Sequence
  Description of Artificial Sequence: Synthetic oligonucleotide
  Sense strand starting at position 3301 of SEQ ID NO: 1885603
ccuagacaguagucucuaa

SEQ ID NO: 2354291 - RNA, 19 nt, Artificial Sequence
  Description of Artificial Sequence: Synthetic oligonucleotide
  Antisense strand to SEQ ID NO: 2354290
uuagagacuacugucuagg

SEQ ID NO: 2354292 - RNA, 19 nt, Artificial Sequence
  Description of Artificial Sequence: Synthetic oligonucleotide
  Sense strand starting at position 3305 of SEQ ID NO: 1885603
gacaguagucucuaaguag

SEQ ID NO: 2354293 - RNA, 19 nt, Artificial Sequence
  Description of Artificial Sequence: Synthetic oligonucleotide
  Antisense strand to SEQ ID NO: 2354292
cuacuuagagacuacuguc

SEQ ID NO: 2354294 - RNA, 19 nt, Artificial Sequence
  Description of Artificial Sequence: Synthetic oligonucleotide
  Sense strand starting at position 3589 of SEQ ID NO: 1885603
guagaaugugcucaaauca

SEQ ID NO: 2354295 - RNA, 19 nt, Artificial Sequence
  Description of Artificial Sequence: Synthetic oligonucleotide
  Antisense strand to SEQ ID NO: 2354294
ugauuugagcacauucuac

SEQ ID NO: 2354296 - RNA, 19 nt, Artificial Sequence
  Description of Artificial Sequence: Synthetic oligonucleotide
  Sense strand starting at position 3759 of SEQ ID NO: 1885603
cuggaauaucaguagucau

SEQ ID NO: 2354297 - RNA, 19 nt, Artificial Sequence
  Description of Artificial Sequence: Synthetic oligonucleotide
  Antisense strand to SEQ ID NO: 2354296
augacuacugauauuccag

SEQ ID NO: 2354298 - RNA, 19 nt, Artificial Sequence
  Description of Artificial Sequence: Synthetic oligonucleotide
  Sense strand starting at position 3762 of SEQ ID NO: 1885603
gaauaucaguagucauuga

SEQ ID NO: 2354299 - RNA, 19 nt, Artificial Sequence
  Description of Artificial Sequence: Synthetic oligonucleotide
  Antisense strand to SEQ ID NO: 2354298
ucaaugacuacugauauuc

SEQ ID NO: 2354300 - RNA, 19 nt, Artificial Sequence
  Description of Artificial Sequence: Synthetic oligonucleotide
  Sense strand starting at position 3766 of SEQ ID NO: 1885603
aucaguagucauugaccaa

SEQ ID NO: 2354301 - RNA, 19 nt, Artificial Sequence
  Description of Artificial Sequence: Synthetic oligonucleotide
  Antisense strand to SEQ ID NO: 2354300
uuggucaaugacuacugau

SEQ ID NO: 2354302 - RNA, 19 nt, Artificial Sequence
  Description of Artificial Sequence: Synthetic oligonucleotide
  Sense strand starting at position 3769 of SEQ ID NO: 1885603
aguagucauugaccaauaa

SEQ ID NO: 2354303 - RNA, 19 nt, Artificial Sequence
  Description of Artificial Sequence: Synthetic oligonucleotide
  Antisense strand to SEQ ID NO: 2354302
uuauuggucaaugacuacu

SEQ ID NO: 2354304 - RNA, 19 nt, Artificial Sequence
  Description of Artificial Sequence: Synthetic oligonucleotide
  Sense strand starting at position 3773 of SEQ ID NO: 1885603
gucauugaccaauaaggcu

SEQ ID NO: 2354305 - RNA, 19 nt, Artificial Sequence
  Description of Artificial Sequence: Synthetic oligonucleotide
  Antisense strand to SEQ ID NO: 2354304
agccuuauuggucaaugac

SEQ ID NO: 2354306 - RNA, 19 nt, Artificial Sequence
  Description of Artificial Sequence: Synthetic oligonucleotide
  Sense strand starting at position 3801 of SEQ ID NO: 1885603
gaaucagagcaguauucug

SEQ ID NO: 2354307 - RNA, 19 nt, Artificial Sequence
  Description of Artificial Sequence: Synthetic oligonucleotide
  Antisense strand to SEQ ID NO: 2354306
cagaauacugcucugauuc

SEQ ID NO: 2354308 - RNA, 19 nt, Artificial Sequence
  Description of Artificial Sequence: Synthetic oligonucleotide
  Sense strand starting at position 3900 of SEQ ID NO: 1885603
caagcaguugugucugcua

SEQ ID NO: 2354309 - RNA, 19 nt, Artificial Sequence
  Description of Artificial Sequence: Synthetic oligonucleotide
  Antisense strand to SEQ ID NO: 2354308
uagcagacacaacugcuug

SEQ ID NO: 2354310 - RNA, 19 nt, Artificial Sequence
  Description of Artificial Sequence: Synthetic oligonucleotide
  Sense strand starting at position 3929 of SEQ ID NO: 1885603
acuuguaguaggcauuaga

SEQ ID NO: 2354311 - RNA, 19 nt, Artificial Sequence
  Description of Artificial Sequence: Synthetic oligonucleotide
  Antisense strand to SEQ ID NO: 2354310
ucuaaugccuacuacaagu

SEQ ID NO: 2354312 - RNA, 19 nt, Artificial Sequence
  Description of Artificial Sequence: Synthetic oligonucleotide
  Sense strand starting at position 3932 of SEQ ID NO: 1885603
uguaguaggcauuagagau

SEQ ID NO: 2354313 - RNA, 19 nt, Artificial Sequence
  Description of Artificial Sequence: Synthetic oligonucleotide
  Antisense strand to SEQ ID NO: 2354312
aucucuaaugccuacuaca

SEQ ID NO: 2354314 - RNA, 19 nt, Artificial Sequence
  Description of Artificial Sequence: Synthetic oligonucleotide
  Sense strand starting at position 271 of SEQ ID NO: 1885602
uagaucuaucgaggaauug

SEQ ID NO: 2354315 - RNA, 19 nt, Artificial Sequence
  Description of Artificial Sequence: Synthetic oligonucleotide
  Antisense strand to SEQ ID NO: 2354314
caauuccucgauagaucua

SEQ ID NO: 2354316 - RNA, 19 nt, Artificial Sequence
  Description of Artificial Sequence: Synthetic oligonucleotide
  Sense strand starting at position 726 of SEQ ID NO: 1885602
ugagaagcggccuguauuu

SEQ ID NO: 2354317 - RNA, 19 nt, Artificial Sequence
  Description of Artificial Sequence: Synthetic oligonucleotide
  Antisense strand to SEQ ID NO: 2354316
aaauacaggccgcuucuca

SEQ ID NO: 2354318 - RNA, 19 nt, Artificial Sequence
  Description of Artificial Sequence: Synthetic oligonucleotide
  Sense strand starting at position 795 of SEQ ID NO: 1885602
cgcaaaugucuugcgcuuu

SEQ ID NO: 2354319 - RNA, 19 nt, Artificial Sequence
  Description of Artificial Sequence: Synthetic oligonucleotide
  Antisense strand to SEQ ID NO: 2354318
aaagcgcaagacauuugcg

SEQ ID NO: 2354320 - RNA, 19 nt, Artificial Sequence
  Description of Artificial Sequence: Synthetic oligonucleotide
  Sense strand starting at position 816 of SEQ ID NO: 1885602
aggcaacugccagauugaa

SEQ ID NO: 2354321 - RNA, 19 nt, Artificial Sequence
  Description of Artificial Sequence: Synthetic oligonucleotide
  Antisense strand to SEQ ID NO: 2354320
uucaaucuggcaguugccu

SEQ ID NO: 2354322 - RNA, 19 nt, Artificial Sequence
  Description of Artificial Sequence: Synthetic oligonucleotide
  Sense strand starting at position 947 of SEQ ID NO: 1885602
ucggcuucugcucuguaaa

SEQ ID NO: 2354323 - RNA, 19 nt, Artificial Sequence
  Description of Artificial Sequence: Synthetic oligonucleotide
  Antisense strand to SEQ ID NO: 2354322
uuuacagagcagaagccga

SEQ ID NO: 2354324 - RNA, 19 nt, Artificial Sequence
  Description of Artificial Sequence: Synthetic oligonucleotide
  Sense strand starting at position 1077 of SEQ ID NO: 1885602
agccuagugcuccaaauau

SEQ ID NO: 2354325 - RNA, 19 nt, Artificial Sequence
  Description of Artificial Sequence: Synthetic oligonucleotide
  Antisense strand to SEQ ID NO: 2354324
auauuuggagcacuaggcu

SEQ ID NO: 2354326 - RNA, 19 nt, Artificial Sequence
  Description of Artificial Sequence: Synthetic oligonucleotide
  Sense strand starting at position 1088 of SEQ ID NO: 1885602
ccaaauaucugcucuggga

SEQ ID NO: 2354327 - RNA, 19 nt, Artificial Sequence
  Description of Artificial Sequence: Synthetic oligonucleotide
  Antisense strand to SEQ ID NO: 2354326
ucccagagcagauauuugg

SEQ ID NO: 2354328 - RNA, 19 nt, Artificial Sequence
  Description of Artificial Sequence: Synthetic oligonucleotide
  Sense strand starting at position 1168 of SEQ ID NO: 1885602
cuaggacaaucuguugaaa

SEQ ID NO: 2354329 - RNA, 19 nt, Artificial Sequence
  Description of Artificial Sequence: Synthetic oligonucleotide
  Antisense strand to SEQ ID NO: 2354328
uuucaacagauuguccuag

SEQ ID NO: 2354330 - RNA, 19 nt, Artificial Sequence
  Description of Artificial Sequence: Synthetic oligonucleotide
  Sense strand starting at position 1192 of SEQ ID NO: 1885602
gggcucuuacccuagacaa

SEQ ID NO: 2354331 - RNA, 19 nt, Artificial Sequence
  Description of Artificial Sequence: Synthetic oligonucleotide
  Antisense strand to SEQ ID NO: 2354330
uugucuaggguaagagccc

SEQ ID NO: 2354332 - RNA, 19 nt, Artificial Sequence
  Description of Artificial Sequence: Synthetic oligonucleotide
  Sense strand starting at position 1276 of SEQ ID NO: 1885602
gguuuaacaucuguaaucu

SEQ ID NO: 2354333 - RNA, 19 nt, Artificial Sequence
  Description of Artificial Sequence: Synthetic oligonucleotide
  Antisense strand to SEQ ID NO: 2354332
agauuacagauguuaaacc

SEQ ID NO: 2354334 - RNA, 19 nt, Artificial Sequence
  Description of Artificial Sequence: Synthetic oligonucleotide
  Sense strand starting at position 1277 of SEQ ID NO: 1885602
guuuaacaucuguaaucua

SEQ ID NO: 2354335 - RNA, 19 nt, Artificial Sequence
  Description of Artificial Sequence: Synthetic oligonucleotide
  Antisense strand to SEQ ID NO: 2354334
uagauuacagauguuaaac

SEQ ID NO: 2354336 - RNA, 19 nt, Artificial Sequence
  Description of Artificial Sequence: Synthetic oligonucleotide
  Sense strand starting at position 1430 of SEQ ID NO: 1885602
gcacucucaggagggaaau

SEQ ID NO: 2354337 - RNA, 19 nt, Artificial Sequence
  Description of Artificial Sequence: Synthetic oligonucleotide
  Antisense strand to SEQ ID NO: 2354336
auuucccuccugagagugc

SEQ ID NO: 2354338 - RNA, 19 nt, Artificial Sequence
  Description of Artificial Sequence: Synthetic oligonucleotide
  Sense strand starting at position 1972 of SEQ ID NO: 1885602
cucaaauuguggcugagaa

SEQ ID NO: 2354339 - RNA, 19 nt, Artificial Sequence
  Description of Artificial Sequence: Synthetic oligonucleotide
  Antisense strand to SEQ ID NO: 2354338
uucucagccacaauuugag

SEQ ID NO: 2354340 - RNA, 19 nt, Artificial Sequence
  Description of Artificial Sequence: Synthetic oligonucleotide
  Sense strand starting at position 1973 of SEQ ID NO: 1885602
ucaaauuguggcugagaac

SEQ ID NO: 2354341 - RNA, 19 nt, Artificial Sequence
  Description of Artificial Sequence: Synthetic oligonucleotide
  Antisense strand to SEQ ID NO: 2354340
guucucagccacaauuuga

SEQ ID NO: 2354342 - RNA, 19 nt, Artificial Sequence
  Description of Artificial Sequence: Synthetic oligonucleotide
  Sense strand starting at position 1994 of SEQ ID NO: 1885602
gcgacaucccaucaccaga

SEQ ID NO: 2354343 - RNA, 19 nt, Artificial Sequence
  Description of Artificial Sequence: Synthetic oligonucleotide
  Antisense strand to SEQ ID NO: 2354342
ucuggugaugggaugucgc

SEQ ID NO: 2354344 - RNA, 19 nt, Artificial Sequence
  Description of Artificial Sequence: Synthetic oligonucleotide
  Sense strand starting at position 2128 of SEQ ID NO: 1885602
ugauaaugaucauuagagu

SEQ ID NO: 2354345 - RNA, 19 nt, Artificial Sequence
  Description of Artificial Sequence: Synthetic oligonucleotide
  Antisense strand to SEQ ID NO: 2354344
acucuaaugaucauuauca

SEQ ID NO: 2354346 - RNA, 19 nt, Artificial Sequence
  Description of Artificial Sequence: Synthetic oligonucleotide
  Sense strand starting at position 2202 of SEQ ID NO: 1885602
ccaagcucugcucauaaga

SEQ ID NO: 2354347 - RNA, 19 nt, Artificial Sequence
  Description of Artificial Sequence: Synthetic oligonucleotide
  Antisense strand to SEQ ID NO: 2354346
ucuuaugagcagagcuugg

SEQ ID NO: 2354348 - RNA, 19 nt, Artificial Sequence
  Description of Artificial Sequence: Synthetic oligonucleotide
  Sense strand starting at position 2338 of SEQ ID NO: 1885602
gucuucuauuuggagauaa

SEQ ID NO: 2354349 - RNA, 19 nt, Artificial Sequence
  Description of Artificial Sequence: Synthetic oligonucleotide
  Antisense strand to SEQ ID NO: 2354348
uuaucuccaaauagaagac

SEQ ID NO: 2354350 - RNA, 19 nt, Artificial Sequence
  Description of Artificial Sequence: Synthetic oligonucleotide
  Sense strand starting at position 2585 of SEQ ID NO: 1885602
agugacuuccaguguggga

SEQ ID NO: 2354351 - RNA, 19 nt, Artificial Sequence
  Description of Artificial Sequence: Synthetic oligonucleotide
  Antisense strand to SEQ ID NO: 2354350
ucccacacuggaagucacu

SEQ ID NO: 2354352 - RNA, 19 nt, Artificial Sequence
  Description of Artificial Sequence: Synthetic oligonucleotide
  Sense strand starting at position 2870 of SEQ ID NO: 1885602
gaaagacauccuugauguu

SEQ ID NO: 2354353 - RNA, 19 nt, Artificial Sequence
  Description of Artificial Sequence: Synthetic oligonucleotide
  Antisense strand to SEQ ID NO: 2354352
aacaucaaggaugucuuuc

SEQ ID NO: 2354354 - RNA, 19 nt, Artificial Sequence
  Description of Artificial Sequence: Synthetic oligonucleotide
  Sense strand starting at position 2903 of SEQ ID NO: 1885602
uugcuaagagcuggaaacu

SEQ ID NO: 2354355 - RNA, 19 nt, Artificial Sequence
  Description of Artificial Sequence: Synthetic oligonucleotide
  Antisense strand to SEQ ID NO: 2354354
aguuuccagcucuuagcaa

SEQ ID NO: 2354356 - RNA, 19 nt, Artificial Sequence
  Description of Artificial Sequence: Synthetic oligonucleotide
  Sense strand starting at position 2930 of SEQ ID NO: 1885602
ggaaauggcucaccuugaa

SEQ ID NO: 2354357 - RNA, 19 nt, Artificial Sequence
  Description of Artificial Sequence: Synthetic oligonucleotide
  Antisense strand to SEQ ID NO: 2354356
uucaaggugagccauuucc

SEQ ID NO: 2354358 - RNA, 19 nt, Artificial Sequence
  Description of Artificial Sequence: Synthetic oligonucleotide
  Sense strand starting at position 3058 of SEQ ID NO: 1885602
aucuuuaccucgguggaca

SEQ ID NO: 2354359 - RNA, 19 nt, Artificial Sequence
  Description of Artificial Sequence: Synthetic oligonucleotide
  Antisense strand to SEQ ID NO: 2354358
uguccaccgagguaaagau

SEQ ID NO: 2354360 - RNA, 19 nt, Artificial Sequence
  Description of Artificial Sequence: Synthetic oligonucleotide
  Sense strand starting at position 3101 of SEQ ID NO: 1885602
uuaugcuuccauggagauu

SEQ ID NO: 2354361 - RNA, 19 nt, Artificial Sequence
  Description of Artificial Sequence: Synthetic oligonucleotide
  Antisense strand to SEQ ID NO: 2354360
aaucuccauggaagcauaa

SEQ ID NO: 2354362 - RNA, 19 nt, Artificial Sequence
  Description of Artificial Sequence: Synthetic oligonucleotide
  Sense strand starting at position 3205 of SEQ ID NO: 1885602
cuuagaauccuggauuagc

SEQ ID NO: 2354363 - RNA, 19 nt, Artificial Sequence
  Description of Artificial Sequence: Synthetic oligonucleotide
  Antisense strand to SEQ ID NO: 2354362
gcuaauccaggauucuaag

SEQ ID NO: 2354364 - RNA, 19 nt, Artificial Sequence
  Description of Artificial Sequence: Synthetic oligonucleotide
  Sense strand starting at position 3222 of SEQ ID NO: 1885602
gcaagagaauaagaaagau

SEQ ID NO: 2354365 - RNA, 19 nt, Artificial Sequence
  Description of Artificial Sequence: Synthetic oligonucleotide
  Antisense strand to SEQ ID NO: 2354364
aucuuucuuauucucuugc

SEQ ID NO: 2354366 - RNA, 19 nt, Artificial Sequence
  Description of Artificial Sequence: Synthetic oligonucleotide
  Sense strand starting at position 3268 of SEQ ID NO: 1885602
ccacgugaaacguagaaua

SEQ ID NO: 2354367 - RNA, 19 nt, Artificial Sequence
  Description of Artificial Sequence: Synthetic oligonucleotide
  Antisense strand to SEQ ID NO: 2354366
uauucuacguuucacgugg

SEQ ID NO: 2354368 - RNA, 19 nt, Artificial Sequence
  Description of Artificial Sequence: Synthetic oligonucleotide
  Sense strand starting at position 3270 of SEQ ID NO: 1885602
acgugaaacguagaauaaa

SEQ ID NO: 2354369 - RNA, 19 nt, Artificial Sequence
  Description of Artificial Sequence: Synthetic oligonucleotide
  Antisense strand to SEQ ID NO: 2354368
uuuauucuacguuucacgu

SEQ ID NO: 2354370 - RNA, 19 nt, Artificial Sequence
  Description of Artificial Sequence: Synthetic oligonucleotide
  Sense strand starting at position 3304 of SEQ ID NO: 1885602
cauagauauugggcaguuu

SEQ ID NO: 2354371 - RNA, 19 nt, Artificial Sequence
  Description of Artificial Sequence: Synthetic oligonucleotide
  Antisense strand to SEQ ID NO: 2354370
aaacugcccaauaucuaug

SEQ ID NO: 2354372 - RNA, 19 nt, Artificial Sequence
  Description of Artificial Sequence: Synthetic oligonucleotide
  Sense strand starting at position 3305 of SEQ ID NO: 1885602
auagauauugggcaguuua

SEQ ID NO: 2354373 - RNA, 19 nt, Artificial Sequence
  Description of Artificial Sequence: Synthetic oligonucleotide
  Antisense strand to SEQ ID NO: 2354372
uaaacugcccaauaucuau

SEQ ID NO: 2354374 - RNA, 19 nt, Artificial Sequence
  Description of Artificial Sequence: Synthetic oligonucleotide
  Sense strand starting at position 3312 of SEQ ID NO: 1885602
uugggcaguuuauuauaga

SEQ ID NO: 2354375 - RNA, 19 nt, Artificial Sequence
  Description of Artificial Sequence: Synthetic oligonucleotide
  Antisense strand to SEQ ID NO: 2354374
ucuauaauaaacugcccaa

SEQ ID NO: 2354376 - RNA, 19 nt, Artificial Sequence
  Description of Artificial Sequence: Synthetic oligonucleotide
  Sense strand starting at position 3543 of SEQ ID NO: 1885602
ggaucucauccuuaaugca

SEQ ID NO: 2354377 - RNA, 19 nt, Artificial Sequence
  Description of Artificial Sequence: Synthetic oligonucleotide
  Antisense strand to SEQ ID NO: 2354376
ugcauuaaggaugagaucc

SEQ ID NO: 2354378 - RNA, 19 nt, Artificial Sequence
  Description of Artificial Sequence: Synthetic oligonucleotide
  Sense strand starting at position 3572 of SEQ ID NO: 1885602
acuguucuggaguagucua

SEQ ID NO: 2354379 - RNA, 19 nt, Artificial Sequence
  Description of Artificial Sequence: Synthetic oligonucleotide
  Antisense strand to SEQ ID NO: 2354378
uagacuacuccagaacagu

SEQ ID NO: 2354380 - RNA, 19 nt, Artificial Sequence
  Description of Artificial Sequence: Synthetic oligonucleotide
  Sense strand starting at position 3577 of SEQ ID NO: 1885602
ucuggaguagucuaccaua

SEQ ID NO: 2354381 - RNA, 19 nt, Artificial Sequence
  Description of Artificial Sequence: Synthetic oligonucleotide
  Antisense strand to SEQ ID NO: 2354380
uaugguagacuacuccaga

SEQ ID NO: 2354382 - RNA, 19 nt, Artificial Sequence
  Description of Artificial Sequence: Synthetic oligonucleotide
  Sense strand starting at position 3664 of SEQ ID NO: 1885602
cagauagaucaguagccuu

SEQ ID NO: 2354383 - RNA, 19 nt, Artificial Sequence
  Description of Artificial Sequence: Synthetic oligonucleotide
  Antisense strand to SEQ ID NO: 2354382
aaggcuacugaucuaucug

SEQ ID NO: 2354384 - RNA, 19 nt, Artificial Sequence
  Description of Artificial Sequence: Synthetic oligonucleotide
  Sense strand starting at position 3752 of SEQ ID NO: 1885602
uggguugaccuagacagua

SEQ ID NO: 2354385 - RNA, 19 nt, Artificial Sequence
  Description of Artificial Sequence: Synthetic oligonucleotide
  Antisense strand to SEQ ID NO: 2354384
uacugucuaggucaaccca

SEQ ID NO: 2354386 - RNA, 19 nt, Artificial Sequence
  Description of Artificial Sequence: Synthetic oligonucleotide
  Sense strand starting at position 3760 of SEQ ID NO: 1885602
ccuagacaguagucucuaa

SEQ ID NO: 2354387 - RNA, 19 nt, Artificial Sequence
  Description of Artificial Sequence: Synthetic oligonucleotide
  Antisense strand to SEQ ID NO: 2354386
uuagagacuacugucuagg

SEQ ID NO: 2354388 - RNA, 19 nt, Artificial Sequence
  Description of Artificial Sequence: Synthetic oligonucleotide
  Sense strand starting at position 3764 of SEQ ID NO: 1885602
gacaguagucucuaaguag

SEQ ID NO: 2354389 - RNA, 19 nt, Artificial Sequence
  Description of Artificial Sequence: Synthetic oligonucleotide
  Antisense strand to SEQ ID NO: 2354388
cuacuuagagacuacuguc

SEQ ID NO: 2354390 - RNA, 19 nt, Artificial Sequence
  Description of Artificial Sequence: Synthetic oligonucleotide
  Sense strand starting at position 3954 of SEQ ID NO: 1885602
aggaucuuucuguguuaga

SEQ ID NO: 2354391 - RNA, 19 nt, Artificial Sequence
  Description of Artificial Sequence: Synthetic oligonucleotide
  Antisense strand to SEQ ID NO: 2354390
ucuaacacagaaagauccu

SEQ ID NO: 2354392 - RNA, 19 nt, Artificial Sequence
  Description of Artificial Sequence: Synthetic oligonucleotide
  Sense strand starting at position 3967 of SEQ ID NO: 1885602
guuagaucucacugccaag

SEQ ID NO: 2354393 - RNA, 19 nt, Artificial Sequence
  Description of Artificial Sequence: Synthetic oligonucleotide
  Antisense strand to SEQ ID NO: 2354392
cuuggcagugagaucuaac

SEQ ID NO: 2354394 - RNA, 19 nt, Artificial Sequence
  Description of Artificial Sequence: Synthetic oligonucleotide
  Sense strand starting at position 11 of SEQ ID NO: 1885604
auguuaagugcuuaaccca

SEQ ID NO: 2354395 - RNA, 19 nt, Artificial Sequence
  Description of Artificial Sequence: Synthetic oligonucleotide
  Antisense strand to SEQ ID NO: 2354394
uggguuaagcacuuaacau

SEQ ID NO: 2354396 - RNA, 19 nt, Artificial Sequence
  Description of Artificial Sequence: Synthetic oligonucleotide
  Sense strand starting at position 117 of SEQ ID NO: 1885604
auagaagaaugcuuaagua

SEQ ID NO: 2354397 - RNA, 19 nt, Artificial Sequence
  Description of Artificial Sequence: Synthetic oligonucleotide
  Antisense strand to SEQ ID NO: 2354396
uacuuaagcauucuucuau

SEQ ID NO: 2354398 - RNA, 19 nt, Artificial Sequence
  Description of Artificial Sequence: Synthetic oligonucleotide
  Sense strand starting at position 127 of SEQ ID NO: 1885604
gcuuaaguacacuauggua

SEQ ID NO: 2354399 - RNA, 19 nt, Artificial Sequence
  Description of Artificial Sequence: Synthetic oligonucleotide
  Antisense strand to SEQ ID NO: 2354398
uaccauaguguacuuaagc

SEQ ID NO: 2354400 - RNA, 19 nt, Artificial Sequence
  Description of Artificial Sequence: Synthetic oligonucleotide
  Sense strand starting at position 143 of SEQ ID NO: 1885604
guacacuuacaguggaauu

SEQ ID NO: 2354401 - RNA, 19 nt, Artificial Sequence
  Description of Artificial Sequence: Synthetic oligonucleotide
  Antisense strand to SEQ ID NO: 2354400
aauuccacuguaaguguac

SEQ ID NO: 2354402 - RNA, 19 nt, Artificial Sequence
  Description of Artificial Sequence: Synthetic oligonucleotide
  Sense strand starting at position 460 of SEQ ID NO: 1885604
ggccacuuacaauggaaua

SEQ ID NO: 2354403 - RNA, 19 nt, Artificial Sequence
  Description of Artificial Sequence: Synthetic oligonucleotide
  Antisense strand to SEQ ID NO: 2354402
uauuccauuguaaguggcc

SEQ ID NO: 2354404 - RNA, 19 nt, Artificial Sequence
  Description of Artificial Sequence: Synthetic oligonucleotide
  Sense strand starting at position 632 of SEQ ID NO: 1885604
gcaacuucucaggaggcua

SEQ ID NO: 2354405 - RNA, 19 nt, Artificial Sequence
  Description of Artificial Sequence: Synthetic oligonucleotide
  Antisense strand to SEQ ID NO: 2354404
uagccuccugagaaguugc

SEQ ID NO: 2354406 - RNA, 19 nt, Artificial Sequence
  Description of Artificial Sequence: Synthetic oligonucleotide
  Sense strand starting at position 808 of SEQ ID NO: 1885604
uuguguauauuguuccaua

SEQ ID NO: 2354407 - RNA, 19 nt, Artificial Sequence
  Description of Artificial Sequence: Synthetic oligonucleotide
  Antisense strand to SEQ ID NO: 2354406
uauggaacaauauacacaa

SEQ ID NO: 2354408 - RNA, 19 nt, Artificial Sequence
  Description of Artificial Sequence: Synthetic oligonucleotide
  Sense strand starting at position 809 of SEQ ID NO: 1885604
uguguauauuguuccauac

SEQ ID NO: 2354409 - RNA, 19 nt, Artificial Sequence
  Description of Artificial Sequence: Synthetic oligonucleotide
  Antisense strand to SEQ ID NO: 2354408
guauggaacaauauacaca

SEQ ID NO: 2354410 - RNA, 19 nt, Artificial Sequence
  Description of Artificial Sequence: Synthetic oligonucleotide
  Sense strand starting at position 826 of SEQ ID NO: 1885604
accacuuauguuggcuaaa

SEQ ID NO: 2354411 - RNA, 19 nt, Artificial Sequence
  Description of Artificial Sequence: Synthetic oligonucleotide
  Antisense strand to SEQ ID NO: 2354410
uuuagccaacauaaguggu

SEQ ID NO: 2354412 - RNA, 19 nt, Artificial Sequence
  Description of Artificial Sequence: Synthetic oligonucleotide
  Sense strand starting at position 863 of SEQ ID NO: 1885604
auagaugccuaggaaacaa

SEQ ID NO: 2354413 - RNA, 19 nt, Artificial Sequence
  Description of Artificial Sequence: Synthetic oligonucleotide
  Antisense strand to SEQ ID NO: 2354412
uuguuuccuaggcaucuau

SEQ ID NO: 2354414 - RNA, 19 nt, Artificial Sequence
  Description of Artificial Sequence: Synthetic oligonucleotide
  Sense strand starting at position 874 of SEQ ID NO: 1885604
ggaaacaacugguaggaau

SEQ ID NO: 2354415 - RNA, 19 nt, Artificial Sequence
  Description of Artificial Sequence: Synthetic oligonucleotide
  Antisense strand to SEQ ID NO: 2354414
auuccuaccaguuguuucc

SEQ ID NO: 2354416 - RNA, 19 nt, Artificial Sequence
  Description of Artificial Sequence: Synthetic oligonucleotide
  Sense strand starting at position 913 of SEQ ID NO: 1885604
gaauacaacuggguguaga

SEQ ID NO: 2354417 - RNA, 19 nt, Artificial Sequence
  Description of Artificial Sequence: Synthetic oligonucleotide
  Antisense strand to SEQ ID NO: 2354416
ucuacacccaguuguauuc

SEQ ID NO: 2354418 - RNA, 19 nt, Artificial Sequence
  Description of Artificial Sequence: Synthetic oligonucleotide
  Sense strand starting at position 1043 of SEQ ID NO: 1885604
gguuaguaggugugggauu

SEQ ID NO: 2354419 - RNA, 19 nt, Artificial Sequence
  Description of Artificial Sequence: Synthetic oligonucleotide
  Antisense strand to SEQ ID NO: 2354418
aaucccacaccuacuaacc

SEQ ID NO: 2354420 - RNA, 19 nt, Artificial Sequence
  Description of Artificial Sequence: Synthetic oligonucleotide
  Sense strand starting at position 1068 of SEQ ID NO: 1885604
uucugcauuucugauaggu

SEQ ID NO: 2354421 - RNA, 19 nt, Artificial Sequence
  Description of Artificial Sequence: Synthetic oligonucleotide
  Antisense strand to SEQ ID NO: 2354420
accuaucagaaaugcagaa

SEQ ID NO: 2354422 - RNA, 19 nt, Artificial Sequence
  Description of Artificial Sequence: Synthetic oligonucleotide
  Sense strand starting at position 1070 of SEQ ID NO: 1885604
cugcauuucugauagguuc

SEQ ID NO: 2354423 - RNA, 19 nt, Artificial Sequence
  Description of Artificial Sequence: Synthetic oligonucleotide
  Antisense strand to SEQ ID NO: 2354422
gaaccuaucagaaaugcag

SEQ ID NO: 2354424 - RNA, 19 nt, Artificial Sequence
  Description of Artificial Sequence: Synthetic oligonucleotide
  Sense strand starting at position 1078 of SEQ ID NO: 1885604
cugauagguucuccuguga

SEQ ID NO: 2354425 - RNA, 19 nt, Artificial Sequence
  Description of Artificial Sequence: Synthetic oligonucleotide
  Antisense strand to SEQ ID NO: 2354424
ucacaggagaaccuaucag

SEQ ID NO: 2354426 - RNA, 19 nt, Artificial Sequence
  Description of Artificial Sequence: Synthetic oligonucleotide
  Sense strand starting at position 1082 of SEQ ID NO: 1885604
uagguucuccugugaugcu

SEQ ID NO: 2354427 - RNA, 19 nt, Artificial Sequence
  Description of Artificial Sequence: Synthetic oligonucleotide
  Antisense strand to SEQ ID NO: 2354426
agcaucacaggagaaccua

SEQ ID NO: 2354428 - RNA, 19 nt, Artificial Sequence
  Description of Artificial Sequence: Synthetic oligonucleotide
  Sense strand starting at position 1089 of SEQ ID NO: 1885604
uccugugaugcugaugaua

SEQ ID NO: 2354429 - RNA, 19 nt, Artificial Sequence
  Description of Artificial Sequence: Synthetic oligonucleotide
  Antisense strand to SEQ ID NO: 2354428
uaucaucagcaucacagga

SEQ ID NO: 2354430 - RNA, 19 nt, Artificial Sequence
  Description of Artificial Sequence: Synthetic oligonucleotide
  Sense strand starting at position 1161 of SEQ ID NO: 1885604
ccaauauacugguuaacug

SEQ ID NO: 2354431 - RNA, 19 nt, Artificial Sequence
  Description of Artificial Sequence: Synthetic oligonucleotide
  Antisense strand to SEQ ID NO: 2354430
caguuaaccaguauauugg

SEQ ID NO: 2354432 - RNA, 19 nt, Artificial Sequence
  Description of Artificial Sequence: Synthetic oligonucleotide
  Sense strand starting at position 1195 of SEQ ID NO: 1885604
guuucugauuucuuaaguc

SEQ ID NO: 2354433 - RNA, 19 nt, Artificial Sequence
  Description of Artificial Sequence: Synthetic oligonucleotide
  Antisense strand to SEQ ID NO: 2354432
gacuuaagaaaucagaaac

SEQ ID NO: 2354434 - RNA, 19 nt, Artificial Sequence
  Description of Artificial Sequence: Synthetic oligonucleotide
  Sense strand starting at position 1215 of SEQ ID NO: 1885604
ggaguaggauccuaggauu

SEQ ID NO: 2354435 - RNA, 19 nt, Artificial Sequence
  Description of Artificial Sequence: Synthetic oligonucleotide
  Antisense strand to SEQ ID NO: 2354434
aauccuaggauccuacucc

SEQ ID NO: 2354436 - RNA, 19 nt, Artificial Sequence
  Description of Artificial Sequence: Synthetic oligonucleotide
  Sense strand starting at position 1243 of SEQ ID NO: 1885604
aacuguuucccaggugaug

SEQ ID NO: 2354437 - RNA, 19 nt, Artificial Sequence
  Description of Artificial Sequence: Synthetic oligonucleotide
  Antisense strand to SEQ ID NO: 2354436
caucaccugggaaacaguu

SEQ ID NO: 2354438 - RNA, 19 nt, Artificial Sequence
  Description of Artificial Sequence: Synthetic oligonucleotide
  Sense strand starting at position 1296 of SEQ ID NO: 1885604
accggugcucuagaaucuu

SEQ ID NO: 2354439 - RNA, 19 nt, Artificial Sequence
  Description of Artificial Sequence: Synthetic oligonucleotide
  Antisense strand to SEQ ID NO: 2354438
aagauucuagagcaccggu

SEQ ID NO: 2354440 - RNA, 19 nt, Artificial Sequence
  Description of Artificial Sequence: Synthetic oligonucleotide
  Sense strand starting at position 1737 of SEQ ID NO: 1885604
guguaucuucgccuguaga

SEQ ID NO: 2354441 - RNA, 19 nt, Artificial Sequence
  Description of Artificial Sequence: Synthetic oligonucleotide
  Antisense strand to SEQ ID NO: 2354440
ucuacaggcgaagauacac

SEQ ID NO: 2354442 - RNA, 19 nt, Artificial Sequence
  Description of Artificial Sequence: Synthetic oligonucleotide
  Sense strand starting at position 1747 of SEQ ID NO: 1885604
gccuguagacugggaguuu

SEQ ID NO: 2354443 - RNA, 19 nt, Artificial Sequence
  Description of Artificial Sequence: Synthetic oligonucleotide
  Antisense strand to SEQ ID NO: 2354442
aaacucccagucuacaggc

SEQ ID NO: 2354444 - RNA, 19 nt, Artificial Sequence
  Description of Artificial Sequence: Synthetic oligonucleotide
  Sense strand starting at position 1758 of SEQ ID NO: 1885604
gggaguuucuugaggucag

SEQ ID NO: 2354445 - RNA, 19 nt, Artificial Sequence
  Description of Artificial Sequence: Synthetic oligonucleotide
  Antisense strand to SEQ ID NO: 2354444
cugaccucaagaaacuccc

SEQ ID NO: 2354446 - RNA, 19 nt, Artificial Sequence
  Description of Artificial Sequence: Synthetic oligonucleotide
  Sense strand starting at position 1777 of SEQ ID NO: 1885604
gggagugacuugccuaucu

SEQ ID NO: 2354447 - RNA, 19 nt, Artificial Sequence
  Description of Artificial Sequence: Synthetic oligonucleotide
  Antisense strand to SEQ ID NO: 2354446
agauaggcaagucacuccc

SEQ ID NO: 2354448 - RNA, 19 nt, Artificial Sequence
  Description of Artificial Sequence: Synthetic oligonucleotide
  Sense strand starting at position 1779 of SEQ ID NO: 1885604
gagugacuugccuaucuuu

SEQ ID NO: 2354449 - RNA, 19 nt, Artificial Sequence
  Description of Artificial Sequence: Synthetic oligonucleotide
  Antisense strand to SEQ ID NO: 2354448
aaagauaggcaagucacuc

SEQ ID NO: 2354450 - RNA, 19 nt, Artificial Sequence
  Description of Artificial Sequence: Synthetic oligonucleotide
  Sense strand starting at position 1798 of SEQ ID NO: 1885604
gccucuuagccuuagcaga

SEQ ID NO: 2354451 - RNA, 19 nt, Artificial Sequence
  Description of Artificial Sequence: Synthetic oligonucleotide
  Antisense strand to SEQ ID NO: 2354450
ucugcuaaggcuaagaggc

SEQ ID NO: 2354452 - RNA, 19 nt, Artificial Sequence
  Description of Artificial Sequence: Synthetic oligonucleotide
  Sense strand starting at position 2413 of SEQ ID NO: 1885604
cgucuuugucauuaauccu

SEQ ID NO: 2354453 - RNA, 19 nt, Artificial Sequence
  Description of Artificial Sequence: Synthetic oligonucleotide
  Antisense strand to SEQ ID NO: 2354452
aggauuaaugacaaagacg

SEQ ID NO: 2354454 - RNA, 19 nt, Artificial Sequence
  Description of Artificial Sequence: Synthetic oligonucleotide
  Sense strand starting at position 2453 of SEQ ID NO: 1885604
gcuucuuccgggucagcga

SEQ ID NO: 2354455 - RNA, 19 nt, Artificial Sequence
  Description of Artificial Sequence: Synthetic oligonucleotide
  Antisense strand to SEQ ID NO: 2354454
ucgcugacccggaagaagc

SEQ ID NO: 2354456 - RNA, 19 nt, Artificial Sequence
  Description of Artificial Sequence: Synthetic oligonucleotide
  Sense strand starting at position 3439 of SEQ ID NO: 1885604
gcuagcauacaucguaaau

SEQ ID NO: 2354457 - RNA, 19 nt, Artificial Sequence
  Description of Artificial Sequence: Synthetic oligonucleotide
  Antisense strand to SEQ ID NO: 2354456
auuuacgauguaugcuagc

SEQ ID NO: 2354458 - RNA, 19 nt, Artificial Sequence
  Description of Artificial Sequence: Synthetic oligonucleotide
  Sense strand starting at position 3450 of SEQ ID NO: 1885604
ucguaaaucucaccuagaa

SEQ ID NO: 2354459 - RNA, 19 nt, Artificial Sequence
  Description of Artificial Sequence: Synthetic oligonucleotide
  Antisense strand to SEQ ID NO: 2354458
uucuaggugagauuuacga

SEQ ID NO: 2354460 - RNA, 19 nt, Artificial Sequence
  Description of Artificial Sequence: Synthetic oligonucleotide
  Sense strand starting at position 3661 of SEQ ID NO: 1885604
aggauugguccucgccuuu

SEQ ID NO: 2354461 - RNA, 19 nt, Artificial Sequence
  Description of Artificial Sequence: Synthetic oligonucleotide
  Antisense strand to SEQ ID NO: 2354460
aaaggcgaggaccaauccu

SEQ ID NO: 2354462 - RNA, 19 nt, Artificial Sequence
  Description of Artificial Sequence: Synthetic oligonucleotide
  Sense strand starting at position 3690 of SEQ ID NO: 1885604
accgcaucccuguagguaa

SEQ ID NO: 2354463 - RNA, 19 nt, Artificial Sequence
  Description of Artificial Sequence: Synthetic oligonucleotide
  Antisense strand to SEQ ID NO: 2354462
uuaccuacagggaugcggu

SEQ ID NO: 2354464 - RNA, 19 nt, Artificial Sequence
  Description of Artificial Sequence: Synthetic oligonucleotide
  Sense strand starting at position 3829 of SEQ ID NO: 1885604
ccgguugccaggugaagau

SEQ ID NO: 2354465 - RNA, 19 nt, Artificial Sequence
  Description of Artificial Sequence: Synthetic oligonucleotide
  Antisense strand to SEQ ID NO: 2354464
aucuucaccuggcaaccgg

SEQ ID NO: 2354466 - RNA, 19 nt, Artificial Sequence
  Description of Artificial Sequence: Synthetic oligonucleotide
  Sense strand starting at position 3838 of SEQ ID NO: 1885604
aggugaagaucucuaucuc

SEQ ID NO: 2354467 - RNA, 19 nt, Artificial Sequence
  Description of Artificial Sequence: Synthetic oligonucleotide
  Antisense strand to SEQ ID NO: 2354466
gagauagagaucuucaccu

SEQ ID NO: 2354468 - RNA, 19 nt, Artificial Sequence
  Description of Artificial Sequence: Synthetic oligonucleotide
  Sense strand starting at position 3872 of SEQ ID NO: 1885604
caugguugggcuugaacua

SEQ ID NO: 2354469 - RNA, 19 nt, Artificial Sequence
  Description of Artificial Sequence: Synthetic oligonucleotide
  Antisense strand to SEQ ID NO: 2354468
uaguucaagcccaaccaug

SEQ ID NO: 2354470 - RNA, 19 nt, Artificial Sequence
  Description of Artificial Sequence: Synthetic oligonucleotide
  Sense strand starting at position 3873 of SEQ ID NO: 1885604
augguugggcuugaacuau

SEQ ID NO: 2354471 - RNA, 19 nt, Artificial Sequence
  Description of Artificial Sequence: Synthetic oligonucleotide
  Antisense strand to SEQ ID NO: 2354470
auaguucaagcccaaccau

SEQ ID NO: 2354472 - RNA, 19 nt, Artificial Sequence
  Description of Artificial Sequence: Synthetic oligonucleotide
  Sense strand starting at position 3982 of SEQ ID NO: 1885604
ggcccuacucuugggcaaa

SEQ ID NO: 2354473 - RNA, 19 nt, Artificial Sequence
  Description of Artificial Sequence: Synthetic oligonucleotide
  Antisense strand to SEQ ID NO: 2354472
uuugcccaagaguagggcc

SEQ ID NO: 2354474 - RNA, 19 nt, Artificial Sequence
  Description of Artificial Sequence: Synthetic oligonucleotide
  Sense strand starting at position 17 of SEQ ID NO: 1885605
ggcaaauaaguacauguaa

SEQ ID NO: 2354475 - RNA, 19 nt, Artificial Sequence
  Description of Artificial Sequence: Synthetic oligonucleotide
  Antisense strand to SEQ ID NO: 2354474
uuacauguacuuauuugcc

SEQ ID NO: 2354476 - RNA, 19 nt, Artificial Sequence
  Description of Artificial Sequence: Synthetic oligonucleotide
  Sense strand starting at position 31 of SEQ ID NO: 1885605
uguaaagaugcucaacauu

SEQ ID NO: 2354477 - RNA, 19 nt, Artificial Sequence
  Description of Artificial Sequence: Synthetic oligonucleotide
  Antisense strand to SEQ ID NO: 2354476
aauguugagcaucuuuaca

SEQ ID NO: 2354478 - RNA, 19 nt, Artificial Sequence
  Description of Artificial Sequence: Synthetic oligonucleotide
  Sense strand starting at position 43 of SEQ ID NO: 1885605
caacauugguugucauuag

SEQ ID NO: 2354479 - RNA, 19 nt, Artificial Sequence
  Description of Artificial Sequence: Synthetic oligonucleotide
  Antisense strand to SEQ ID NO: 2354478
cuaaugacaaccaauguug

SEQ ID NO: 2354480 - RNA, 19 nt, Artificial Sequence
  Description of Artificial Sequence: Synthetic oligonucleotide
  Sense strand starting at position 47 of SEQ ID NO: 1885605
auugguugucauuagguau

SEQ ID NO: 2354481 - RNA, 19 nt, Artificial Sequence
  Description of Artificial Sequence: Synthetic oligonucleotide
  Antisense strand to SEQ ID NO: 2354480
auaccuaaugacaaccaau

SEQ ID NO: 2354482 - RNA, 19 nt, Artificial Sequence
  Description of Artificial Sequence: Synthetic oligonucleotide
  Sense strand starting at position 50 of SEQ ID NO: 1885605
gguugucauuagguauaua

SEQ ID NO: 2354483 - RNA, 19 nt, Artificial Sequence
  Description of Artificial Sequence: Synthetic oligonucleotide
  Antisense strand to SEQ ID NO: 2354482
uauauaccuaaugacaacc

SEQ ID NO: 2354484 - RNA, 19 nt, Artificial Sequence
  Description of Artificial Sequence: Synthetic oligonucleotide
  Sense strand starting at position 51 of SEQ ID NO: 1885605
guugucauuagguauauaa

SEQ ID NO: 2354485 - RNA, 19 nt, Artificial Sequence
  Description of Artificial Sequence: Synthetic oligonucleotide
  Antisense strand to SEQ ID NO: 2354484
uuauauaccuaaugacaac

SEQ ID NO: 2354486 - RNA, 19 nt, Artificial Sequence
  Description of Artificial Sequence: Synthetic oligonucleotide
  Sense strand starting at position 101 of SEQ ID NO: 1885605
auguauuaagagggcuaaa

SEQ ID NO: 2354487 - RNA, 19 nt, Artificial Sequence
  Description of Artificial Sequence: Synthetic oligonucleotide
  Antisense strand to SEQ ID NO: 2354486
uuuagcccucuuaauacau

SEQ ID NO: 2354488 - RNA, 19 nt, Artificial Sequence
  Description of Artificial Sequence: Synthetic oligonucleotide
  Sense strand starting at position 137 of SEQ ID NO: 1885605
acuaaauacugguuaggau

SEQ ID NO: 2354489 - RNA, 19 nt, Artificial Sequence
  Description of Artificial Sequence: Synthetic oligonucleotide
  Antisense strand to SEQ ID NO: 2354488
auccuaaccaguauuuagu

SEQ ID NO: 2354490 - RNA, 19 nt, Artificial Sequence
  Description of Artificial Sequence: Synthetic oligonucleotide
  Sense strand starting at position 295 of SEQ ID NO: 1885605
ccuagaugauuugagaaau

SEQ ID NO: 2354491 - RNA, 19 nt, Artificial Sequence
  Description of Artificial Sequence: Synthetic oligonucleotide
  Antisense strand to SEQ ID NO: 2354490
auuucucaaaucaucuagg

SEQ ID NO: 2354492 - RNA, 19 nt, Artificial Sequence
  Description of Artificial Sequence: Synthetic oligonucleotide
  Sense strand starting at position 332 of SEQ ID NO: 1885605
ucacaugaauguuuauaga

SEQ ID NO: 2354493 - RNA, 19 nt, Artificial Sequence
  Description of Artificial Sequence: Synthetic oligonucleotide
  Antisense strand to SEQ ID NO: 2354492
ucuauaaacauucauguga

SEQ ID NO: 2354494 - RNA, 19 nt, Artificial Sequence
  Description of Artificial Sequence: Synthetic oligonucleotide
  Sense strand starting at position 377 of SEQ ID NO: 1885605
gaaagcuaucaagauguuc

SEQ ID NO: 2354495 - RNA, 19 nt, Artificial Sequence
  Description of Artificial Sequence: Synthetic oligonucleotide
  Antisense strand to SEQ ID NO: 2354494
gaacaucuugauagcuuuc

SEQ ID NO: 2354496 - RNA, 19 nt, Artificial Sequence
  Description of Artificial Sequence: Synthetic oligonucleotide
  Sense strand starting at position 545 of SEQ ID NO: 1885605
ugcauacugcaugauuaua

SEQ ID NO: 2354497 - RNA, 19 nt, Artificial Sequence
  Description of Artificial Sequence: Synthetic oligonucleotide
  Antisense strand to SEQ ID NO: 2354496
uauaaucaugcaguaugca

SEQ ID NO: 2354498 - RNA, 19 nt, Artificial Sequence
  Description of Artificial Sequence: Synthetic oligonucleotide
  Sense strand starting at position 595 of SEQ ID NO: 1885605
ggguaaagauaucauuuga

SEQ ID NO: 2354499 - RNA, 19 nt, Artificial Sequence
  Description of Artificial Sequence: Synthetic oligonucleotide
  Antisense strand to SEQ ID NO: 2354498
ucaaaugauaucuuuaccc

SEQ ID NO: 2354500 - RNA, 19 nt, Artificial Sequence
  Description of Artificial Sequence: Synthetic oligonucleotide
  Sense strand starting at position 896 of SEQ ID NO: 1885605
acaagagauugccuagagu

SEQ ID NO: 2354501 - RNA, 19 nt, Artificial Sequence
  Description of Artificial Sequence: Synthetic oligonucleotide
  Antisense strand to SEQ ID NO: 2354500
acucuaggcaaucucuugu

SEQ ID NO: 2354502 - RNA, 19 nt, Artificial Sequence
  Description of Artificial Sequence: Synthetic oligonucleotide
  Sense strand starting at position 899 of SEQ ID NO: 1885605
agagauugccuagaguggu

SEQ ID NO: 2354503 - RNA, 19 nt, Artificial Sequence
  Description of Artificial Sequence: Synthetic oligonucleotide
  Antisense strand to SEQ ID NO: 2354502
accacucuaggcaaucucu

SEQ ID NO: 2354504 - RNA, 19 nt, Artificial Sequence
  Description of Artificial Sequence: Synthetic oligonucleotide
  Sense strand starting at position 903 of SEQ ID NO: 1885605
auugccuagaguggugaaa

SEQ ID NO: 2354505 - RNA, 19 nt, Artificial Sequence
  Description of Artificial Sequence: Synthetic oligonucleotide
  Antisense strand to SEQ ID NO: 2354504
uuucaccacucuaggcaau

SEQ ID NO: 2354506 - RNA, 19 nt, Artificial Sequence
  Description of Artificial Sequence: Synthetic oligonucleotide
  Sense strand starting at position 1062 of SEQ ID NO: 1885605
caagguaaacugugacuau

SEQ ID NO: 2354507 - RNA, 19 nt, Artificial Sequence
  Description of Artificial Sequence: Synthetic oligonucleotide
  Antisense strand to SEQ ID NO: 2354506
auagucacaguuuaccuug

SEQ ID NO: 2354508 - RNA, 19 nt, Artificial Sequence
  Description of Artificial Sequence: Synthetic oligonucleotide
  Sense strand starting at position 1065 of SEQ ID NO: 1885605
gguaaacugugacuauaca

SEQ ID NO: 2354509 - RNA, 19 nt, Artificial Sequence
  Description of Artificial Sequence: Synthetic oligonucleotide
  Antisense strand to SEQ ID NO: 2354508
uguauagucacaguuuacc

SEQ ID NO: 2354510 - RNA, 19 nt, Artificial Sequence
  Description of Artificial Sequence: Synthetic oligonucleotide
  Sense strand starting at position 1155 of SEQ ID NO: 1885605
ugggauaacugguuaguau

SEQ ID NO: 2354511 - RNA, 19 nt, Artificial Sequence
  Description of Artificial Sequence: Synthetic oligonucleotide
  Antisense strand to SEQ ID NO: 2354510
auacuaaccaguuauccca

SEQ ID NO: 2354512 - RNA, 19 nt, Artificial Sequence
  Description of Artificial Sequence: Synthetic oligonucleotide
  Sense strand starting at position 1588 of SEQ ID NO: 1885605
augaaagaaugcuugucau

SEQ ID NO: 2354513 - RNA, 19 nt, Artificial Sequence
  Description of Artificial Sequence: Synthetic oligonucleotide
  Antisense strand to SEQ ID NO: 2354512
augacaagcauucuuucau

SEQ ID NO: 2354514 - RNA, 19 nt, Artificial Sequence
  Description of Artificial Sequence: Synthetic oligonucleotide
  Sense strand starting at position 2174 of SEQ ID NO: 1885605
augggccugauugguuaaa

SEQ ID NO: 2354515 - RNA, 19 nt, Artificial Sequence
  Description of Artificial Sequence: Synthetic oligonucleotide
  Antisense strand to SEQ ID NO: 2354514
uuuaaccaaucaggcccau

SEQ ID NO: 2354516 - RNA, 19 nt, Artificial Sequence
  Description of Artificial Sequence: Synthetic oligonucleotide
  Sense strand starting at position 2310 of SEQ ID NO: 1885605
guuuaaaucccuuagcuug

SEQ ID NO: 2354517 - RNA, 19 nt, Artificial Sequence
  Description of Artificial Sequence: Synthetic oligonucleotide
  Antisense strand to SEQ ID NO: 2354516
caagcuaagggauuuaaac

SEQ ID NO: 2354518 - RNA, 19 nt, Artificial Sequence
  Description of Artificial Sequence: Synthetic oligonucleotide
  Sense strand starting at position 2419 of SEQ ID NO: 1885605
ucaccauuacuggguauau

SEQ ID NO: 2354519 - RNA, 19 nt, Artificial Sequence
  Description of Artificial Sequence: Synthetic oligonucleotide
  Antisense strand to SEQ ID NO: 2354518
auauacccaguaaugguga

SEQ ID NO: 2354520 - RNA, 19 nt, Artificial Sequence
  Description of Artificial Sequence: Synthetic oligonucleotide
  Sense strand starting at position 2512 of SEQ ID NO: 1885605
agcaaagacauaugugaug

SEQ ID NO: 2354521 - RNA, 19 nt, Artificial Sequence
  Description of Artificial Sequence: Synthetic oligonucleotide
  Antisense strand to SEQ ID NO: 2354520
caucacauaugucuuugcu

SEQ ID NO: 2354522 - RNA, 19 nt, Artificial Sequence
  Description of Artificial Sequence: Synthetic oligonucleotide
  Sense strand starting at position 2518 of SEQ ID NO: 1885605
gacauaugugaugguuaau

SEQ ID NO: 2354523 - RNA, 19 nt, Artificial Sequence
  Description of Artificial Sequence: Synthetic oligonucleotide
  Antisense strand to SEQ ID NO: 2354522
auuaaccaucacauauguc

SEQ ID NO: 2354524 - RNA, 19 nt, Artificial Sequence
  Description of Artificial Sequence: Synthetic oligonucleotide
  Sense strand starting at position 2655 of SEQ ID NO: 1885605
ccuuaaucuggguggcaca

SEQ ID NO: 2354525 - RNA, 19 nt, Artificial Sequence
  Description of Artificial Sequence: Synthetic oligonucleotide
  Antisense strand to SEQ ID NO: 2354524
ugugccacccagauuaagg

SEQ ID NO: 2354526 - RNA, 19 nt, Artificial Sequence
  Description of Artificial Sequence: Synthetic oligonucleotide
  Sense strand starting at position 2684 of SEQ ID NO: 1885605
cugccagguggcuagaaua

SEQ ID NO: 2354527 - RNA, 19 nt, Artificial Sequence
  Description of Artificial Sequence: Synthetic oligonucleotide
  Antisense strand to SEQ ID NO: 2354526
uauucuagccaccuggcag

SEQ ID NO: 2354528 - RNA, 19 nt, Artificial Sequence
  Description of Artificial Sequence: Synthetic oligonucleotide
  Sense strand starting at position 2953 of SEQ ID NO: 1885605
cccugauacagauguuggu

SEQ ID NO: 2354529 - RNA, 19 nt, Artificial Sequence
  Description of Artificial Sequence: Synthetic oligonucleotide
  Antisense strand to SEQ ID NO: 2354528
accaacaucuguaucaggg

SEQ ID NO: 2354530 - RNA, 19 nt, Artificial Sequence
  Description of Artificial Sequence: Synthetic oligonucleotide
  Sense strand starting at position 2978 of SEQ ID NO: 1885605
aguggucuucuagaggaac

SEQ ID NO: 2354531 - RNA, 19 nt, Artificial Sequence
  Description of Artificial Sequence: Synthetic oligonucleotide
  Antisense strand to SEQ ID NO: 2354530
guuccucuagaagaccacu

SEQ ID NO: 2354532 - RNA, 19 nt, Artificial Sequence
  Description of Artificial Sequence: Synthetic oligonucleotide
  Sense strand starting at position 2998 of SEQ ID NO: 1885605
gaauauuaaggauguaguu

SEQ ID NO: 2354533 - RNA, 19 nt, Artificial Sequence
  Description of Artificial Sequence: Synthetic oligonucleotide
  Antisense strand to SEQ ID NO: 2354532
aacuacauccuuaauauuc

SEQ ID NO: 2354534 - RNA, 19 nt, Artificial Sequence
  Description of Artificial Sequence: Synthetic oligonucleotide
  Sense strand starting at position 3120 of SEQ ID NO: 1885605
gcaugaacuguucgagaaa

SEQ ID NO: 2354535 - RNA, 19 nt, Artificial Sequence
  Description of Artificial Sequence: Synthetic oligonucleotide
  Antisense strand to SEQ ID NO: 2354534
uuucucgaacaguucaugc

SEQ ID NO: 2354536 - RNA, 19 nt, Artificial Sequence
  Description of Artificial Sequence: Synthetic oligonucleotide
  Sense strand starting at position 3127 of SEQ ID NO: 1885605
cuguucgagaaauaugcaa

SEQ ID NO: 2354537 - RNA, 19 nt, Artificial Sequence
  Description of Artificial Sequence: Synthetic oligonucleotide
  Antisense strand to SEQ ID NO: 2354536
uugcauauuucucgaacag

SEQ ID NO: 2354538 - RNA, 19 nt, Artificial Sequence
  Description of Artificial Sequence: Synthetic oligonucleotide
  Sense strand starting at position 3384 of SEQ ID NO: 1885605
cuuaucuuccuguagagaa

SEQ ID NO: 2354539 - RNA, 19 nt, Artificial Sequence
  Description of Artificial Sequence: Synthetic oligonucleotide
  Antisense strand to SEQ ID NO: 2354538
uucucuacaggaagauaag

SEQ ID NO: 2354540 - RNA, 19 nt, Artificial Sequence
  Description of Artificial Sequence: Synthetic oligonucleotide
  Sense strand starting at position 3445 of SEQ ID NO: 1885605
uaggcugaccuguaaugaa

SEQ ID NO: 2354541 - RNA, 19 nt, Artificial Sequence
  Description of Artificial Sequence: Synthetic oligonucleotide
  Antisense strand to SEQ ID NO: 2354540
uucauuacaggucagccua

SEQ ID NO: 2354542 - RNA, 19 nt, Artificial Sequence
  Description of Artificial Sequence: Synthetic oligonucleotide
  Sense strand starting at position 3765 of SEQ ID NO: 1885605
agguaaaguugauuaucuu

SEQ ID NO: 2354543 - RNA, 19 nt, Artificial Sequence
  Description of Artificial Sequence: Synthetic oligonucleotide
  Antisense strand to SEQ ID NO: 2354542
aagauaaucaacuuuaccu

SEQ ID NO: 2354544 - RNA, 19 nt, Artificial Sequence
  Description of Artificial Sequence: Synthetic oligonucleotide
  Sense strand starting at position 3766 of SEQ ID NO: 1885605
gguaaaguugauuaucuuc

SEQ ID NO: 2354545 - RNA, 19 nt, Artificial Sequence
  Description of Artificial Sequence: Synthetic oligonucleotide
  Antisense strand to SEQ ID NO: 2354544
gaagauaaucaacuuuacc

SEQ ID NO: 2354546 - RNA, 19 nt, Artificial Sequence
  Description of Artificial Sequence: Synthetic oligonucleotide
  Sense strand starting at position 3806 of SEQ ID NO: 1885605
uguuuccuucuagaccuau

SEQ ID NO: 2354547 - RNA, 19 nt, Artificial Sequence
  Description of Artificial Sequence: Synthetic oligonucleotide
  Antisense strand to SEQ ID NO: 2354546
auaggucuagaaggaaaca

SEQ ID NO: 2354548 - RNA, 19 nt, Artificial Sequence
  Description of Artificial Sequence: Synthetic oligonucleotide
  Sense strand starting at position 3867 of SEQ ID NO: 1885605
gagugugacccaugagaug

SEQ ID NO: 2354549 - RNA, 19 nt, Artificial Sequence
  Description of Artificial Sequence: Synthetic oligonucleotide
  Antisense strand to SEQ ID NO: 2354548
caucucaugggucacacuc

SEQ ID NO: 2354550 - RNA, 19 nt, Artificial Sequence
  Description of Artificial Sequence: Synthetic oligonucleotide
  Sense strand starting at position 3898 of SEQ ID NO: 1885605
aaagaauugcuugaguuua

SEQ ID NO: 2354551 - RNA, 19 nt, Artificial Sequence
  Description of Artificial Sequence: Synthetic oligonucleotide
  Antisense strand to SEQ ID NO: 2354550
uaaacucaagcaauucuuu

SEQ ID NO: 2354552 - RNA, 19 nt, Artificial Sequence
  Description of Artificial Sequence: Synthetic oligonucleotide
  Sense strand starting at position 3900 of SEQ ID NO: 1885605
agaauugcuugaguuuaaa

SEQ ID NO: 2354553 - RNA, 19 nt, Artificial Sequence
  Description of Artificial Sequence: Synthetic oligonucleotide
  Antisense strand to SEQ ID NO: 2354552
uuuaaacucaagcaauucu

SEQ ID NO: 2354554 - RNA, 19 nt, Artificial Sequence
  Description of Artificial Sequence: Synthetic oligonucleotide
  Sense strand starting at position 526 of SEQ ID NO: 1885606
ugcuuaucccugggaauga

SEQ ID NO: 2354555 - RNA, 19 nt, Artificial Sequence
  Description of Artificial Sequence: Synthetic oligonucleotide
  Antisense strand to SEQ ID NO: 2354554
ucauucccagggauaagca

SEQ ID NO: 2354556 - RNA, 19 nt, Artificial Sequence
  Description of Artificial Sequence: Synthetic oligonucleotide
  Sense strand starting at position 1056 of SEQ ID NO: 1885606
aaaugaauucguggcaaau

SEQ ID NO: 2354557 - RNA, 19 nt, Artificial Sequence
  Description of Artificial Sequence: Synthetic oligonucleotide
  Antisense strand to SEQ ID NO: 2354556
auuugccacgaauucauuu

SEQ ID NO: 2354558 - RNA, 19 nt, Artificial Sequence
  Description of Artificial Sequence: Synthetic oligonucleotide
  Sense strand starting at position 1213 of SEQ ID NO: 1885606
acauaacaucccuaugugu

SEQ ID NO: 2354559 - RNA, 19 nt, Artificial Sequence
  Description of Artificial Sequence: Synthetic oligonucleotide
  Antisense strand to SEQ ID NO: 2354558
acacauagggauguuaugu

SEQ ID NO: 2354560 - RNA, 19 nt, Artificial Sequence
  Description of Artificial Sequence: Synthetic oligonucleotide
  Sense strand starting at position 1229 of SEQ ID NO: 1885606
uguccagugaguuaugaaa

SEQ ID NO: 2354561 - RNA, 19 nt, Artificial Sequence
  Description of Artificial Sequence: Synthetic oligonucleotide
  Antisense strand to SEQ ID NO: 2354560
uuucauaacucacuggaca

SEQ ID NO: 2354562 - RNA, 19 nt, Artificial Sequence
  Description of Artificial Sequence: Synthetic oligonucleotide
  Sense strand starting at position 1322 of SEQ ID NO: 1885606
auaauagaaccaggcuuau

SEQ ID NO: 2354563 - RNA, 19 nt, Artificial Sequence
  Description of Artificial Sequence: Synthetic oligonucleotide
  Antisense strand to SEQ ID NO: 2354562
auaagccugguucuauuau

SEQ ID NO: 2354564 - RNA, 19 nt, Artificial Sequence
  Description of Artificial Sequence: Synthetic oligonucleotide
  Sense strand starting at position 1608 of SEQ ID NO: 1885606
ugcugagaacuccacaucu

SEQ ID NO: 2354565 - RNA, 19 nt, Artificial Sequence
  Description of Artificial Sequence: Synthetic oligonucleotide
  Antisense strand to SEQ ID NO: 2354564
agauguggaguucucagca

SEQ ID NO: 2354566 - RNA, 19 nt, Artificial Sequence
  Description of Artificial Sequence: Synthetic oligonucleotide
  Sense strand starting at position 1843 of SEQ ID NO: 1885606
uguugaguaacggaucuua

SEQ ID NO: 2354567 - RNA, 19 nt, Artificial Sequence
  Description of Artificial Sequence: Synthetic oligonucleotide
  Antisense strand to SEQ ID NO: 2354566
uaagauccguuacucaaca

SEQ ID NO: 2354568 - RNA, 19 nt, Artificial Sequence
  Description of Artificial Sequence: Synthetic oligonucleotide
  Sense strand starting at position 1855 of SEQ ID NO: 1885606
gaucuuaauuaggucgaga

SEQ ID NO: 2354569 - RNA, 19 nt, Artificial Sequence
  Description of Artificial Sequence: Synthetic oligonucleotide
  Antisense strand to SEQ ID NO: 2354568
ucucgaccuaauuaagauc

SEQ ID NO: 2354570 - RNA, 19 nt, Artificial Sequence
  Description of Artificial Sequence: Synthetic oligonucleotide
  Sense strand starting at position 1857 of SEQ ID NO: 1885606
ucuuaauuaggucgagaug

SEQ ID NO: 2354571 - RNA, 19 nt, Artificial Sequence
  Description of Artificial Sequence: Synthetic oligonucleotide
  Antisense strand to SEQ ID NO: 2354570
caucucgaccuaauuaaga

SEQ ID NO: 2354572 - RNA, 19 nt, Artificial Sequence
  Description of Artificial Sequence: Synthetic oligonucleotide
  Sense strand starting at position 1904 of SEQ ID NO: 1885606
gaggucuuugcauauaccu

SEQ ID NO: 2354573 - RNA, 19 nt, Artificial Sequence
  Description of Artificial Sequence: Synthetic oligonucleotide
  Antisense strand to SEQ ID NO: 2354572
agguauaugcaaagaccuc

SEQ ID NO: 2354574 - RNA, 19 nt, Artificial Sequence
  Description of Artificial Sequence: Synthetic oligonucleotide
  Sense strand starting at position 2091 of SEQ ID NO: 1885606
guguguucagcuuugugau

SEQ ID NO: 2354575 - RNA, 19 nt, Artificial Sequence
  Description of Artificial Sequence: Synthetic oligonucleotide
  Antisense strand to SEQ ID NO: 2354574
aucacaaagcugaacacac

SEQ ID NO: 2354576 - RNA, 19 nt, Artificial Sequence
  Description of Artificial Sequence: Synthetic oligonucleotide
  Sense strand starting at position 2186 of SEQ ID NO: 1885606
uuauaagucuauguaugga

SEQ ID NO: 2354577 - RNA, 19 nt, Artificial Sequence
  Description of Artificial Sequence: Synthetic oligonucleotide
  Antisense strand to SEQ ID NO: 2354576
uccauacauagacuuauaa

SEQ ID NO: 2354578 - RNA, 19 nt, Artificial Sequence
  Description of Artificial Sequence: Synthetic oligonucleotide
  Sense strand starting at position 2189 of SEQ ID NO: 1885606
uaagucuauguauggaauu

SEQ ID NO: 2354579 - RNA, 19 nt, Artificial Sequence
  Description of Artificial Sequence: Synthetic oligonucleotide
  Antisense strand to SEQ ID NO: 2354578
aauuccauacauagacuua

SEQ ID NO: 2354580 - RNA, 19 nt, Artificial Sequence
  Description of Artificial Sequence: Synthetic oligonucleotide
  Sense strand starting at position 2218 of SEQ ID NO: 1885606
uuccuaaaugcugacugua

SEQ ID NO: 2354581 - RNA, 19 nt, Artificial Sequence
  Description of Artificial Sequence: Synthetic oligonucleotide
  Antisense strand to SEQ ID NO: 2354580
uacagucagcauuuaggaa

SEQ ID NO: 2354582 - RNA, 19 nt, Artificial Sequence
  Description of Artificial Sequence: Synthetic oligonucleotide
  Sense strand starting at position 2255 of SEQ ID NO: 1885606
uauaaacugugccugagaa

SEQ ID NO: 2354583 - RNA, 19 nt, Artificial Sequence
  Description of Artificial Sequence: Synthetic oligonucleotide
  Antisense strand to SEQ ID NO: 2354582
uucucaggcacaguuuaua

SEQ ID NO: 2354584 - RNA, 19 nt, Artificial Sequence
  Description of Artificial Sequence: Synthetic oligonucleotide
  Sense strand starting at position 2256 of SEQ ID NO: 1885606
auaaacugugccugagaaa

SEQ ID NO: 2354585 - RNA, 19 nt, Artificial Sequence
  Description of Artificial Sequence: Synthetic oligonucleotide
  Antisense strand to SEQ ID NO: 2354584
uuucucaggcacaguuuau

SEQ ID NO: 2354586 - RNA, 19 nt, Artificial Sequence
  Description of Artificial Sequence: Synthetic oligonucleotide
  Sense strand starting at position 2622 of SEQ ID NO: 1885606
gccucugagaccuaaacga

SEQ ID NO: 2354587 - RNA, 19 nt, Artificial Sequence
  Description of Artificial Sequence: Synthetic oligonucleotide
  Antisense strand to SEQ ID NO: 2354586
ucguuuaggucucagaggc

SEQ ID NO: 2354588 - RNA, 19 nt, Artificial Sequence
  Description of Artificial Sequence: Synthetic oligonucleotide
  Sense strand starting at position 2641 of SEQ ID NO: 1885606
cugagugggcauugaucaa

SEQ ID NO: 2354589 - RNA, 19 nt, Artificial Sequence
  Description of Artificial Sequence: Synthetic oligonucleotide
  Antisense strand to SEQ ID NO: 2354588
uugaucaaugcccacucag

SEQ ID NO: 2354590 - RNA, 19 nt, Artificial Sequence
  Description of Artificial Sequence: Synthetic oligonucleotide
  Sense strand starting at position 2645 of SEQ ID NO: 1885606
gugggcauugaucaagagu

SEQ ID NO: 2354591 - RNA, 19 nt, Artificial Sequence
  Description of Artificial Sequence: Synthetic oligonucleotide
  Antisense strand to SEQ ID NO: 2354590
acucuugaucaaugcccac

SEQ ID NO: 2354592 - RNA, 19 nt, Artificial Sequence
  Description of Artificial Sequence: Synthetic oligonucleotide
  Sense strand starting at position 2717 of SEQ ID NO: 1885606
augaaaguaguucaguguu

SEQ ID NO: 2354593 - RNA, 19 nt, Artificial Sequence
  Description of Artificial Sequence: Synthetic oligonucleotide
  Antisense strand to SEQ ID NO: 2354592
aacacugaacuacuuucau

SEQ ID NO: 2354594 - RNA, 19 nt, Artificial Sequence
  Description of Artificial Sequence: Synthetic oligonucleotide
  Sense strand starting at position 2814 of SEQ ID NO: 1885606
guuguaaguagaugaauga

SEQ ID NO: 2354595 - RNA, 19 nt, Artificial Sequence
  Description of Artificial Sequence: Synthetic oligonucleotide
  Antisense strand to SEQ ID NO: 2354594
ucauucaucuacuuacaac

SEQ ID NO: 2354596 - RNA, 19 nt, Artificial Sequence
  Description of Artificial Sequence: Synthetic oligonucleotide
  Sense strand starting at position 2846 of SEQ ID NO: 1885606
gugcuuuaggaagauuacu

SEQ ID NO: 2354597 - RNA, 19 nt, Artificial Sequence
  Description of Artificial Sequence: Synthetic oligonucleotide
  Antisense strand to SEQ ID NO: 2354596
aguaaucuuccuaaagcac

SEQ ID NO: 2354598 - RNA, 19 nt, Artificial Sequence
  Description of Artificial Sequence: Synthetic oligonucleotide
  Sense strand starting at position 2870 of SEQ ID NO: 1885606
cucaguguccaauauaggu

SEQ ID NO: 2354599 - RNA, 19 nt, Artificial Sequence
  Description of Artificial Sequence: Synthetic oligonucleotide
  Antisense strand to SEQ ID NO: 2354598
accuauauuggacacugag

SEQ ID NO: 2354600 - RNA, 19 nt, Artificial Sequence
  Description of Artificial Sequence: Synthetic oligonucleotide
  Sense strand starting at position 2955 of SEQ ID NO: 1885606
aggcaagauucaguggaga

SEQ ID NO: 2354601 - RNA, 19 nt, Artificial Sequence
  Description of Artificial Sequence: Synthetic oligonucleotide
  Antisense strand to SEQ ID NO: 2354600
ucuccacugaaucuugccu

SEQ ID NO: 2354602 - RNA, 19 nt, Artificial Sequence
  Description of Artificial Sequence: Synthetic oligonucleotide
  Sense strand starting at position 3093 of SEQ ID NO: 1885606
auggucugggaauaguauu

SEQ ID NO: 2354603 - RNA, 19 nt, Artificial Sequence
  Description of Artificial Sequence: Synthetic oligonucleotide
  Antisense strand to SEQ ID NO: 2354602
aauacuauucccagaccau

SEQ ID NO: 2354604 - RNA, 19 nt, Artificial Sequence
  Description of Artificial Sequence: Synthetic oligonucleotide
  Sense strand starting at position 3198 of SEQ ID NO: 1885606
gggaacauucacuguggca

SEQ ID NO: 2354605 - RNA, 19 nt, Artificial Sequence
  Description of Artificial Sequence: Synthetic oligonucleotide
  Antisense strand to SEQ ID NO: 2354604
ugccacagugaauguuccc

SEQ ID NO: 2354606 - RNA, 19 nt, Artificial Sequence
  Description of Artificial Sequence: Synthetic oligonucleotide
  Sense strand starting at position 3274 of SEQ ID NO: 1885606
ccugaauuagauuguacaa

SEQ ID NO: 2354607 - RNA, 19 nt, Artificial Sequence
  Description of Artificial Sequence: Synthetic oligonucleotide
  Antisense strand to SEQ ID NO: 2354606
uuguacaaucuaauucagg

SEQ ID NO: 2354608 - RNA, 19 nt, Artificial Sequence
  Description of Artificial Sequence: Synthetic oligonucleotide
  Sense strand starting at position 3347 of SEQ ID NO: 1885606
guaauaugaggaugcauua

SEQ ID NO: 2354609 - RNA, 19 nt, Artificial Sequence
  Description of Artificial Sequence: Synthetic oligonucleotide
  Antisense strand to SEQ ID NO: 2354608
uaaugcauccucauauuac

SEQ ID NO: 2354610 - RNA, 19 nt, Artificial Sequence
  Description of Artificial Sequence: Synthetic oligonucleotide
  Sense strand starting at position 3356 of SEQ ID NO: 1885606
ggaugcauuauaggucuaa

SEQ ID NO: 2354611 - RNA, 19 nt, Artificial Sequence
  Description of Artificial Sequence: Synthetic oligonucleotide
  Antisense strand to SEQ ID NO: 2354610
uuagaccuauaaugcaucc

SEQ ID NO: 2354612 - RNA, 19 nt, Artificial Sequence
  Description of Artificial Sequence: Synthetic oligonucleotide
  Sense strand starting at position 3357 of SEQ ID NO: 1885606
gaugcauuauaggucuaac

SEQ ID NO: 2354613 - RNA, 19 nt, Artificial Sequence
  Description of Artificial Sequence: Synthetic oligonucleotide
  Antisense strand to SEQ ID NO: 2354612
guuagaccuauaaugcauc

SEQ ID NO: 2354614 - RNA, 19 nt, Artificial Sequence
  Description of Artificial Sequence: Synthetic oligonucleotide
  Sense strand starting at position 3381 of SEQ ID NO: 1885606
ccagguaugacugauugcu

SEQ ID NO: 2354615 - RNA, 19 nt, Artificial Sequence
  Description of Artificial Sequence: Synthetic oligonucleotide
  Antisense strand to SEQ ID NO: 2354614
agcaaucagucauaccugg

SEQ ID NO: 2354616 - RNA, 19 nt, Artificial Sequence
  Description of Artificial Sequence: Synthetic oligonucleotide
  Sense strand starting at position 3480 of SEQ ID NO: 1885606
ccuccaauuggucaaaggu

SEQ ID NO: 2354617 - RNA, 19 nt, Artificial Sequence
  Description of Artificial Sequence: Synthetic oligonucleotide
  Antisense strand to SEQ ID NO: 2354616
accuuugaccaauuggagg

SEQ ID NO: 2354618 - RNA, 19 nt, Artificial Sequence
  Description of Artificial Sequence: Synthetic oligonucleotide
  Sense strand starting at position 3552 of SEQ ID NO: 1885606
gcaacaggguucuuauaua

SEQ ID NO: 2354619 - RNA, 19 nt, Artificial Sequence
  Description of Artificial Sequence: Synthetic oligonucleotide
  Antisense strand to SEQ ID NO: 2354618
uauauaagaacccuguugc

SEQ ID NO: 2354620 - RNA, 19 nt, Artificial Sequence
  Description of Artificial Sequence: Synthetic oligonucleotide
  Sense strand starting at position 3566 of SEQ ID NO: 1885606
auauaaguaucaucagggu

SEQ ID NO: 2354621 - RNA, 19 nt, Artificial Sequence
  Description of Artificial Sequence: Synthetic oligonucleotide
  Antisense strand to SEQ ID NO: 2354620
acccugaugauacuuauau

SEQ ID NO: 2354622 - RNA, 19 nt, Artificial Sequence
  Description of Artificial Sequence: Synthetic oligonucleotide
  Sense strand starting at position 3631 of SEQ ID NO: 1885606
uugcaugcaagugaucaga

SEQ ID NO: 2354623 - RNA, 19 nt, Artificial Sequence
  Description of Artificial Sequence: Synthetic oligonucleotide
  Antisense strand to SEQ ID NO: 2354622
ucugaucacuugcaugcaa

SEQ ID NO: 2354624 - RNA, 19 nt, Artificial Sequence
  Description of Artificial Sequence: Synthetic oligonucleotide
  Sense strand starting at position 3686 of SEQ ID NO: 1885606
gaaugaaaucggugagcca

SEQ ID NO: 2354625 - RNA, 19 nt, Artificial Sequence
  Description of Artificial Sequence: Synthetic oligonucleotide
  Antisense strand to SEQ ID NO: 2354624
uggcucaccgauuucauuc

SEQ ID NO: 2354626 - RNA, 19 nt, Artificial Sequence
  Description of Artificial Sequence: Synthetic oligonucleotide
  Sense strand starting at position 3687 of SEQ ID NO: 1885606
aaugaaaucggugagccaa

SEQ ID NO: 2354627 - RNA, 19 nt, Artificial Sequence
  Description of Artificial Sequence: Synthetic oligonucleotide
  Antisense strand to SEQ ID NO: 2354626
uuggcucaccgauuucauu

SEQ ID NO: 2354628 - RNA, 19 nt, Artificial Sequence
  Description of Artificial Sequence: Synthetic oligonucleotide
  Sense strand starting at position 3825 of SEQ ID NO: 1885606
gagaauaaguuguccuuau

SEQ ID NO: 2354629 - RNA, 19 nt, Artificial Sequence
  Description of Artificial Sequence: Synthetic oligonucleotide
  Antisense strand to SEQ ID NO: 2354628
auaaggacaacuuauucuc

SEQ ID NO: 2354630 - RNA, 19 nt, Artificial Sequence
  Description of Artificial Sequence: Synthetic oligonucleotide
  Sense strand starting at position 3826 of SEQ ID NO: 1885606
agaauaaguuguccuuauc

SEQ ID NO: 2354631 - RNA, 19 nt, Artificial Sequence
  Description of Artificial Sequence: Synthetic oligonucleotide
  Antisense strand to SEQ ID NO: 2354630
gauaaggacaacuuauucu

SEQ ID NO: 2354632 - RNA, 19 nt, Artificial Sequence
  Description of Artificial Sequence: Synthetic oligonucleotide
  Sense strand starting at position 3829 of SEQ ID NO: 1885606
auaaguuguccuuaucuau

SEQ ID NO: 2354633 - RNA, 19 nt, Artificial Sequence
  Description of Artificial Sequence: Synthetic oligonucleotide
  Antisense strand to SEQ ID NO: 2354632
auagauaaggacaacuuau

SEQ ID NO: 2354634 - RNA, 19 nt, Artificial Sequence
  Description of Artificial Sequence: Synthetic oligonucleotide
  Sense strand starting at position 59 of SEQ ID NO: 1885607
ucaucuugggcauaaucaa

SEQ ID NO: 2354635 - RNA, 19 nt, Artificial Sequence
  Description of Artificial Sequence: Synthetic oligonucleotide
  Antisense strand to SEQ ID NO: 2354634
uugauuaugcccaagauga

SEQ ID NO: 2354636 - RNA, 19 nt, Artificial Sequence
  Description of Artificial Sequence: Synthetic oligonucleotide
  Sense strand starting at position 102 of SEQ ID NO: 1885607
augagaaaguguuuacuca

SEQ ID NO: 2354637 - RNA, 19 nt, Artificial Sequence
  Description of Artificial Sequence: Synthetic oligonucleotide
  Antisense strand to SEQ ID NO: 2354636
ugaguaaacacuuucucau

SEQ ID NO: 2354638 - RNA, 19 nt, Artificial Sequence
  Description of Artificial Sequence: Synthetic oligonucleotide
  Sense strand starting at position 106 of SEQ ID NO: 1885607
gaaaguguuuacucaggga

SEQ ID NO: 2354639 - RNA, 19 nt, Artificial Sequence
  Description of Artificial Sequence: Synthetic oligonucleotide
  Antisense strand to SEQ ID NO: 2354638
ucccugaguaaacacuuuc

SEQ ID NO: 2354640 - RNA, 19 nt, Artificial Sequence
  Description of Artificial Sequence: Synthetic oligonucleotide
  Sense strand starting at position 110 of SEQ ID NO: 1885607
guguuuacucagggagaag

SEQ ID NO: 2354641 - RNA, 19 nt, Artificial Sequence
  Description of Artificial Sequence: Synthetic oligonucleotide
  Antisense strand to SEQ ID NO: 2354640
cuucucccugaguaaacac

SEQ ID NO: 2354642 - RNA, 19 nt, Artificial Sequence
  Description of Artificial Sequence: Synthetic oligonucleotide
  Sense strand starting at position 164 of SEQ ID NO: 1885607
gaaacagggucuccuguau

SEQ ID NO: 2354643 - RNA, 19 nt, Artificial Sequence
  Description of Artificial Sequence: Synthetic oligonucleotide
  Antisense strand to SEQ ID NO: 2354642
auacaggagacccuguuuc

SEQ ID NO: 2354644 - RNA, 19 nt, Artificial Sequence
  Description of Artificial Sequence: Synthetic oligonucleotide
  Sense strand starting at position 168 of SEQ ID NO: 1885607
cagggucuccuguaucacu

SEQ ID NO: 2354645 - RNA, 19 nt, Artificial Sequence
  Description of Artificial Sequence: Synthetic oligonucleotide
  Antisense strand to SEQ ID NO: 2354644
agugauacaggagacccug

SEQ ID NO: 2354646 - RNA, 19 nt, Artificial Sequence
  Description of Artificial Sequence: Synthetic oligonucleotide
  Sense strand starting at position 176 of SEQ ID NO: 1885607
ccuguaucacucuaucagu

SEQ ID NO: 2354647 - RNA, 19 nt, Artificial Sequence
  Description of Artificial Sequence: Synthetic oligonucleotide
  Antisense strand to SEQ ID NO: 2354646
acugauagagugauacagg

SEQ ID NO: 2354648 - RNA, 19 nt, Artificial Sequence
  Description of Artificial Sequence: Synthetic oligonucleotide
  Sense strand starting at position 534 of SEQ ID NO: 1885607
cucugaacaucaucgacau

SEQ ID NO: 2354649 - RNA, 19 nt, Artificial Sequence
  Description of Artificial Sequence: Synthetic oligonucleotide
  Antisense strand to SEQ ID NO: 2354648
augucgaugauguucagag

SEQ ID NO: 2354650 - RNA, 19 nt, Artificial Sequence
  Description of Artificial Sequence: Synthetic oligonucleotide
  Sense strand starting at position 547 of SEQ ID NO: 1885607
cgacauggcccugagugaa

SEQ ID NO: 2354651 - RNA, 19 nt, Artificial Sequence
  Description of Artificial Sequence: Synthetic oligonucleotide
  Antisense strand to SEQ ID NO: 2354650
uucacucagggccaugucg

SEQ ID NO: 2354652 - RNA, 19 nt, Artificial Sequence
  Description of Artificial Sequence: Synthetic oligonucleotide
  Sense strand starting at position 682 of SEQ ID NO: 1885607
ccuggcagucaauaauaua

SEQ ID NO: 2354653 - RNA, 19 nt, Artificial Sequence
  Description of Artificial Sequence: Synthetic oligonucleotide
  Antisense strand to SEQ ID NO: 2354652
uauauuauugacugccagg

SEQ ID NO: 2354654 - RNA, 19 nt, Artificial Sequence
  Description of Artificial Sequence: Synthetic oligonucleotide
  Sense strand starting at position 1663 of SEQ ID NO: 1885607
gaacuccagugggugaaau

SEQ ID NO: 2354655 - RNA, 19 nt, Artificial Sequence
  Description of Artificial Sequence: Synthetic oligonucleotide
  Antisense strand to SEQ ID NO: 2354654
auuucacccacuggaguuc

SEQ ID NO: 2354656 - RNA, 19 nt, Artificial Sequence
  Description of Artificial Sequence: Synthetic oligonucleotide
  Sense strand starting at position 1740 of SEQ ID NO: 1885607
cucggugauucuccuauuu

SEQ ID NO: 2354657 - RNA, 19 nt, Artificial Sequence
  Description of Artificial Sequence: Synthetic oligonucleotide
  Antisense strand to SEQ ID NO: 2354656
aaauaggagaaucaccgag

SEQ ID NO: 2354658 - RNA, 19 nt, Artificial Sequence
  Description of Artificial Sequence: Synthetic oligonucleotide
  Sense strand starting at position 1873 of SEQ ID NO: 1885607
ugucauaugcuagaaucau

SEQ ID NO: 2354659 - RNA, 19 nt, Artificial Sequence
  Description of Artificial Sequence: Synthetic oligonucleotide
  Antisense strand to SEQ ID NO: 2354658
augauucuagcauaugaca

SEQ ID NO: 2354660 - RNA, 19 nt, Artificial Sequence
  Description of Artificial Sequence: Synthetic oligonucleotide
  Sense strand starting at position 2070 of SEQ ID NO: 1885607
ucugauugucuacagaguu

SEQ ID NO: 2354661 - RNA, 19 nt, Artificial Sequence
  Description of Artificial Sequence: Synthetic oligonucleotide
  Antisense strand to SEQ ID NO: 2354660
aacucuguagacaaucaga

SEQ ID NO: 2354662 - RNA, 19 nt, Artificial Sequence
  Description of Artificial Sequence: Synthetic oligonucleotide
  Sense strand starting at position 2342 of SEQ ID NO: 1885607
acuucuucccaucgagaga

SEQ ID NO: 2354663 - RNA, 19 nt, Artificial Sequence
  Description of Artificial Sequence: Synthetic oligonucleotide
  Antisense strand to SEQ ID NO: 2354662
ucucucgaugggaagaagu

SEQ ID NO: 2354664 - RNA, 19 nt, Artificial Sequence
  Description of Artificial Sequence: Synthetic oligonucleotide
  Sense strand starting at position 2345 of SEQ ID NO: 1885607
ucuucccaucgagagaauu

SEQ ID NO: 2354665 - RNA, 19 nt, Artificial Sequence
  Description of Artificial Sequence: Synthetic oligonucleotide
  Antisense strand to SEQ ID NO: 2354664
aauucucucgaugggaaga

SEQ ID NO: 2354666 - RNA, 19 nt, Artificial Sequence
  Description of Artificial Sequence: Synthetic oligonucleotide
  Sense strand starting at position 2353 of SEQ ID NO: 1885607
ucgagagaauucuuguuau

SEQ ID NO: 2354667 - RNA, 19 nt, Artificial Sequence
  Description of Artificial Sequence: Synthetic oligonucleotide
  Antisense strand to SEQ ID NO: 2354666
auaacaagaauucucucga

SEQ ID NO: 2354668 - RNA, 19 nt, Artificial Sequence
  Description of Artificial Sequence: Synthetic oligonucleotide
  Sense strand starting at position 2366 of SEQ ID NO: 1885607
uguuauaauccaggaaacc

SEQ ID NO: 2354669 - RNA, 19 nt, Artificial Sequence
  Description of Artificial Sequence: Synthetic oligonucleotide
  Antisense strand to SEQ ID NO: 2354668
gguuuccuggauuauaaca

SEQ ID NO: 2354670 - RNA, 19 nt, Artificial Sequence
  Description of Artificial Sequence: Synthetic oligonucleotide
  Sense strand starting at position 2402 of SEQ ID NO: 1885607
uuuguaggcucagcuauuu

SEQ ID NO: 2354671 - RNA, 19 nt, Artificial Sequence
  Description of Artificial Sequence: Synthetic oligonucleotide
  Antisense strand to SEQ ID NO: 2354670
aaauagcugagccuacaaa

SEQ ID NO: 2354672 - RNA, 19 nt, Artificial Sequence
  Description of Artificial Sequence: Synthetic oligonucleotide
  Sense strand starting at position 2411 of SEQ ID NO: 1885607
ucagcuauuuaugcagagu

SEQ ID NO: 2354673 - RNA, 19 nt, Artificial Sequence
  Description of Artificial Sequence: Synthetic oligonucleotide
  Antisense strand to SEQ ID NO: 2354672
acucugcauaaauagcuga

SEQ ID NO: 2354674 - RNA, 19 nt, Artificial Sequence
  Description of Artificial Sequence: Synthetic oligonucleotide
  Sense strand starting at position 2578 of SEQ ID NO: 1885607
uuuaaccaucgguaaagua

SEQ ID NO: 2354675 - RNA, 19 nt, Artificial Sequence
  Description of Artificial Sequence: Synthetic oligonucleotide
  Antisense strand to SEQ ID NO: 2354674
uacuuuaccgaugguuaaa

SEQ ID NO: 2354676 - RNA, 19 nt, Artificial Sequence
  Description of Artificial Sequence: Synthetic oligonucleotide
  Sense strand starting at position 2618 of SEQ ID NO: 1885607
agugucucucaucaauauu

SEQ ID NO: 2354677 - RNA, 19 nt, Artificial Sequence
  Description of Artificial Sequence: Synthetic oligonucleotide
  Antisense strand to SEQ ID NO: 2354676
aauauugaugagagacacu

SEQ ID NO: 2354678 - RNA, 19 nt, Artificial Sequence
  Description of Artificial Sequence: Synthetic oligonucleotide
  Sense strand starting at position 2775 of SEQ ID NO: 1885607
agaggaggcuuauuaaacu

SEQ ID NO: 2354679 - RNA, 19 nt, Artificial Sequence
  Description of Artificial Sequence: Synthetic oligonucleotide
  Antisense strand to SEQ ID NO: 2354678
aguuuaauaagccuccucu

SEQ ID NO: 2354680 - RNA, 19 nt, Artificial Sequence
  Description of Artificial Sequence: Synthetic oligonucleotide
  Sense strand starting at position 2838 of SEQ ID NO: 1885607
ugguaaugccuccaaguga

SEQ ID NO: 2354681 - RNA, 19 nt, Artificial Sequence
  Description of Artificial Sequence: Synthetic oligonucleotide
  Antisense strand to SEQ ID NO: 2354680
ucacuuggaggcauuacca

SEQ ID NO: 2354682 - RNA, 19 nt, Artificial Sequence
  Description of Artificial Sequence: Synthetic oligonucleotide
  Sense strand starting at position 3018 of SEQ ID NO: 1885607
uuuguauuucuuugcgaug

SEQ ID NO: 2354683 - RNA, 19 nt, Artificial Sequence
  Description of Artificial Sequence: Synthetic oligonucleotide
  Antisense strand to SEQ ID NO: 2354682
caucgcaaagaaauacaaa

SEQ ID NO: 2354684 - RNA, 19 nt, Artificial Sequence
  Description of Artificial Sequence: Synthetic oligonucleotide
  Sense strand starting at position 3035 of SEQ ID NO: 1885607
ugggaaacuucuucccaag

SEQ ID NO: 2354685 - RNA, 19 nt, Artificial Sequence
  Description of Artificial Sequence: Synthetic oligonucleotide
  Antisense strand to SEQ ID NO: 2354684
cuugggaagaaguuuccca

SEQ ID NO: 2354686 - RNA, 19 nt, Artificial Sequence
  Description of Artificial Sequence: Synthetic oligonucleotide
  Sense strand starting at position 3075 of SEQ ID NO: 1885607
gccagauguaaucagugga

SEQ ID NO: 2354687 - RNA, 19 nt, Artificial Sequence
  Description of Artificial Sequence: Synthetic oligonucleotide
  Antisense strand to SEQ ID NO: 2354686
uccacugauuacaucuggc

SEQ ID NO: 2354688 - RNA, 19 nt, Artificial Sequence
  Description of Artificial Sequence: Synthetic oligonucleotide
  Sense strand starting at position 3143 of SEQ ID NO: 1885607
acaagauuaagugggcacu

SEQ ID NO: 2354689 - RNA, 19 nt, Artificial Sequence
  Description of Artificial Sequence: Synthetic oligonucleotide
  Antisense strand to SEQ ID NO: 2354688
agugcccacuuaaucuugu

SEQ ID NO: 2354690 - RNA, 19 nt, Artificial Sequence
  Description of Artificial Sequence: Synthetic oligonucleotide
  Sense strand starting at position 3272 of SEQ ID NO: 1885607
ggccuugauggaggugaaa

SEQ ID NO: 2354691 - RNA, 19 nt, Artificial Sequence
  Description of Artificial Sequence: Synthetic oligonucleotide
  Antisense strand to SEQ ID NO: 2354690
uuucaccuccaucaaggcc

SEQ ID NO: 2354692 - RNA, 19 nt, Artificial Sequence
  Description of Artificial Sequence: Synthetic oligonucleotide
  Sense strand starting at position 3329 of SEQ ID NO: 1885607
gcaguuaguagaggagaca

SEQ ID NO: 2354693 - RNA, 19 nt, Artificial Sequence
  Description of Artificial Sequence: Synthetic oligonucleotide
  Antisense strand to SEQ ID NO: 2354692
ugucuccucuacuaacugc

SEQ ID NO: 2354694 - RNA, 19 nt, Artificial Sequence
  Description of Artificial Sequence: Synthetic oligonucleotide
  Sense strand starting at position 3534 of SEQ ID NO: 1885607
uugagaagauguuucuaac

SEQ ID NO: 2354695 - RNA, 19 nt, Artificial Sequence
  Description of Artificial Sequence: Synthetic oligonucleotide
  Antisense strand to SEQ ID NO: 2354694
guuagaaacaucuucucaa

SEQ ID NO: 2354696 - RNA, 19 nt, Artificial Sequence
  Description of Artificial Sequence: Synthetic oligonucleotide
  Sense strand starting at position 3543 of SEQ ID NO: 1885607
uguuucuaaccguagggau

SEQ ID NO: 2354697 - RNA, 19 nt, Artificial Sequence
  Description of Artificial Sequence: Synthetic oligonucleotide
  Antisense strand to SEQ ID NO: 2354696
aucccuacgguuagaaaca

SEQ ID NO: 2354698 - RNA, 19 nt, Artificial Sequence
  Description of Artificial Sequence: Synthetic oligonucleotide
  Sense strand starting at position 3605 of SEQ ID NO: 1885607
ggcucacuacucuggagaa

SEQ ID NO: 2354699 - RNA, 19 nt, Artificial Sequence
  Description of Artificial Sequence: Synthetic oligonucleotide
  Antisense strand to SEQ ID NO: 2354698
uucuccagaguagugagcc

SEQ ID NO: 2354700 - RNA, 19 nt, Artificial Sequence
  Description of Artificial Sequence: Synthetic oligonucleotide
  Sense strand starting at position 3648 of SEQ ID NO: 1885607
ggguuaguccaguauggaa

SEQ ID NO: 2354701 - RNA, 19 nt, Artificial Sequence
  Description of Artificial Sequence: Synthetic oligonucleotide
  Antisense strand to SEQ ID NO: 2354700
uuccauacuggacuaaccc

SEQ ID NO: 2354702 - RNA, 19 nt, Artificial Sequence
  Description of Artificial Sequence: Synthetic oligonucleotide
  Sense strand starting at position 3708 of SEQ ID NO: 1885607
gcagucuuacaaugggaca

SEQ ID NO: 2354703 - RNA, 19 nt, Artificial Sequence
  Description of Artificial Sequence: Synthetic oligonucleotide
  Antisense strand to SEQ ID NO: 2354702
ugucccauuguaagacugc

SEQ ID NO: 2354704 - RNA, 19 nt, Artificial Sequence
  Description of Artificial Sequence: Synthetic oligonucleotide
  Sense strand starting at position 3774 of SEQ ID NO: 1885607
ugagcaagucacuaaaucu

SEQ ID NO: 2354705 - RNA, 19 nt, Artificial Sequence
  Description of Artificial Sequence: Synthetic oligonucleotide
  Antisense strand to SEQ ID NO: 2354704
agauuuagugacuugcuca

SEQ ID NO: 2354706 - RNA, 19 nt, Artificial Sequence
  Description of Artificial Sequence: Synthetic oligonucleotide
  Sense strand starting at position 3847 of SEQ ID NO: 1885607
gacaguuguggucagaauu

SEQ ID NO: 2354707 - RNA, 19 nt, Artificial Sequence
  Description of Artificial Sequence: Synthetic oligonucleotide
  Antisense strand to SEQ ID NO: 2354706
aauucugaccacaacuguc

SEQ ID NO: 2354708 - RNA, 19 nt, Artificial Sequence
  Description of Artificial Sequence: Synthetic oligonucleotide
  Sense strand starting at position 3863 of SEQ ID NO: 1885607
auugauuuagcuggugcau

SEQ ID NO: 2354709 - RNA, 19 nt, Artificial Sequence
  Description of Artificial Sequence: Synthetic oligonucleotide
  Antisense strand to SEQ ID NO: 2354708
augcaccagcuaaaucaau

SEQ ID NO: 2354710 - RNA, 19 nt, Artificial Sequence
  Description of Artificial Sequence: Synthetic oligonucleotide
  Sense strand starting at position 3876 of SEQ ID NO: 1885607
gugcauuugaggcauugua

SEQ ID NO: 2354711 - RNA, 19 nt, Artificial Sequence
  Description of Artificial Sequence: Synthetic oligonucleotide
  Antisense strand to SEQ ID NO: 2354710
uacaaugccucaaaugcac

SEQ ID NO: 2354712 - RNA, 19 nt, Artificial Sequence
  Description of Artificial Sequence: Synthetic oligonucleotide
  Sense strand starting at position 3905 of SEQ ID NO: 1885607
acguaauaauugguagaaa

SEQ ID NO: 2354713 - RNA, 19 nt, Artificial Sequence
  Description of Artificial Sequence: Synthetic oligonucleotide
  Antisense strand to SEQ ID NO: 2354712
uuucuaccaauuauuacgu

SEQ ID NO: 2354714 - RNA, 19 nt, Artificial Sequence
  Description of Artificial Sequence: Synthetic oligonucleotide
  Sense strand starting at position 170 of SEQ ID NO: 1885608
gggaugggugcuugaagua

SEQ ID NO: 2354715 - RNA, 19 nt, Artificial Sequence
  Description of Artificial Sequence: Synthetic oligonucleotide
  Antisense strand to SEQ ID NO: 2354714
uacuucaagcacccauccc

SEQ ID NO: 2354716 - RNA, 19 nt, Artificial Sequence
  Description of Artificial Sequence: Synthetic oligonucleotide
  Sense strand starting at position 175 of SEQ ID NO: 1885608
gggugcuugaaguaacaua

SEQ ID NO: 2354717 - RNA, 19 nt, Artificial Sequence
  Description of Artificial Sequence: Synthetic oligonucleotide
  Antisense strand to SEQ ID NO: 2354716
uauguuacuucaagcaccc

SEQ ID NO: 2354718 - RNA, 19 nt, Artificial Sequence
  Description of Artificial Sequence: Synthetic oligonucleotide
  Sense strand starting at position 224 of SEQ ID NO: 1885608
cucggaucuggucaaucau

SEQ ID NO: 2354719 - RNA, 19 nt, Artificial Sequence
  Description of Artificial Sequence: Synthetic oligonucleotide
  Antisense strand to SEQ ID NO: 2354718
augauugaccagauccgag

SEQ ID NO: 2354720 - RNA, 19 nt, Artificial Sequence
  Description of Artificial Sequence: Synthetic oligonucleotide
  Sense strand starting at position 272 of SEQ ID NO: 1885608
ggcuaaucugcauaggaga

SEQ ID NO: 2354721 - RNA, 19 nt, Artificial Sequence
  Description of Artificial Sequence: Synthetic oligonucleotide
  Antisense strand to SEQ ID NO: 2354720
ucuccuaugcagauuagcc

SEQ ID NO: 2354722 - RNA, 19 nt, Artificial Sequence
  Description of Artificial Sequence: Synthetic oligonucleotide
  Sense strand starting at position 312 of SEQ ID NO: 1885608
ggugaaaugagcuguacaa

SEQ ID NO: 2354723 - RNA, 19 nt, Artificial Sequence
  Description of Artificial Sequence: Synthetic oligonucleotide
  Antisense strand to SEQ ID NO: 2354722
uuguacagcucauuucacc

SEQ ID NO: 2354724 - RNA, 19 nt, Artificial Sequence
  Description of Artificial Sequence: Synthetic oligonucleotide
  Sense strand starting at position 522 of SEQ ID NO: 1885608
agcgaugcugccuucagua

SEQ ID NO: 2354725 - RNA, 19 nt, Artificial Sequence
  Description of Artificial Sequence: Synthetic oligonucleotide
  Antisense strand to SEQ ID NO: 2354724
uacugaaggcagcaucgcu

SEQ ID NO: 2354726 - RNA, 19 nt, Artificial Sequence
  Description of Artificial Sequence: Synthetic oligonucleotide
  Sense strand starting at position 650 of SEQ ID NO: 1885608
ccacaucacguguauauua

SEQ ID NO: 2354727 - RNA, 19 nt, Artificial Sequence
  Description of Artificial Sequence: Synthetic oligonucleotide
  Antisense strand to SEQ ID NO: 2354726
uaauauacacgugaugugg

SEQ ID NO: 2354728 - RNA, 19 nt, Artificial Sequence
  Description of Artificial Sequence: Synthetic oligonucleotide
  Sense strand starting at position 1020 of SEQ ID NO: 1885608
agagguaccgaguggauau

SEQ ID NO: 2354729 - RNA, 19 nt, Artificial Sequence
  Description of Artificial Sequence: Synthetic oligonucleotide
  Antisense strand to SEQ ID NO: 2354728
auauccacucgguaccucu

SEQ ID NO: 2354730 - RNA, 19 nt, Artificial Sequence
  Description of Artificial Sequence: Synthetic oligonucleotide
  Sense strand starting at position 1104 of SEQ ID NO: 1885608
uuuguaaaggaucgaauaa

SEQ ID NO: 2354731 - RNA, 19 nt, Artificial Sequence
  Description of Artificial Sequence: Synthetic oligonucleotide
  Antisense strand to SEQ ID NO: 2354730
uuauucgauccuuuacaaa

SEQ ID NO: 2354732 - RNA, 19 nt, Artificial Sequence
  Description of Artificial Sequence: Synthetic oligonucleotide
  Sense strand starting at position 1117 of SEQ ID NO: 1885608
gaauaaaugcugugaaugu

SEQ ID NO: 2354733 - RNA, 19 nt, Artificial Sequence
  Description of Artificial Sequence: Synthetic oligonucleotide
  Antisense strand to SEQ ID NO: 2354732
acauucacagcauuuauuc

SEQ ID NO: 2354734 - RNA, 19 nt, Artificial Sequence
  Description of Artificial Sequence: Synthetic oligonucleotide
  Sense strand starting at position 1133 of SEQ ID NO: 1885608
uguacugaucuaugauaag

SEQ ID NO: 2354735 - RNA, 19 nt, Artificial Sequence
  Description of Artificial Sequence: Synthetic oligonucleotide
  Antisense strand to SEQ ID NO: 2354734
cuuaucauagaucaguaca

SEQ ID NO: 2354736 - RNA, 19 nt, Artificial Sequence
  Description of Artificial Sequence: Synthetic oligonucleotide
  Sense strand starting at position 1204 of SEQ ID NO: 1885608
agaauuuacugagaaaucg

SEQ ID NO: 2354737 - RNA, 19 nt, Artificial Sequence
  Description of Artificial Sequence: Synthetic oligonucleotide
  Antisense strand to SEQ ID NO: 2354736
cgauuucucaguaaauucu

SEQ ID NO: 2354738 - RNA, 19 nt, Artificial Sequence
  Description of Artificial Sequence: Synthetic oligonucleotide
  Sense strand starting at position 1226 of SEQ ID NO: 1885608
uguaucucacaagagcaaa

SEQ ID NO: 2354739 - RNA, 19 nt, Artificial Sequence
  Description of Artificial Sequence: Synthetic oligonucleotide
  Antisense strand to SEQ ID NO: 2354738
uuugcucuugugagauaca

SEQ ID NO: 2354740 - RNA, 19 nt, Artificial Sequence
  Description of Artificial Sequence: Synthetic oligonucleotide
  Sense strand starting at position 1821 of SEQ ID NO: 1885608
acaucaagccucugacaug

SEQ ID NO: 2354741 - RNA, 19 nt, Artificial Sequence
  Description of Artificial Sequence: Synthetic oligonucleotide
  Antisense strand to SEQ ID NO: 2354740
caugucagaggcuugaugu

SEQ ID NO: 2354742 - RNA, 19 nt, Artificial Sequence
  Description of Artificial Sequence: Synthetic oligonucleotide
  Sense strand starting at position 1898 of SEQ ID NO: 1885608
agaauugaacucuguauac

SEQ ID NO: 2354743 - RNA, 19 nt, Artificial Sequence
  Description of Artificial Sequence: Synthetic oligonucleotide
  Antisense strand to SEQ ID NO: 2354742
guauacagaguucaauucu

SEQ ID NO: 2354744 - RNA, 19 nt, Artificial Sequence
  Description of Artificial Sequence: Synthetic oligonucleotide
  Sense strand starting at position 1908 of SEQ ID NO: 1885608
ucuguauaccuguauacac

SEQ ID NO: 2354745 - RNA, 19 nt, Artificial Sequence
  Description of Artificial Sequence: Synthetic oligonucleotide
  Antisense strand to SEQ ID NO: 2354744
guguauacagguauacaga

SEQ ID NO: 2354746 - RNA, 19 nt, Artificial Sequence
  Description of Artificial Sequence: Synthetic oligonucleotide
  Sense strand starting at position 2058 of SEQ ID NO: 1885608
caggaaucuugucugucau

SEQ ID NO: 2354747 - RNA, 19 nt, Artificial Sequence
  Description of Artificial Sequence: Synthetic oligonucleotide
  Antisense strand to SEQ ID NO: 2354746
augacagacaagauuccug

SEQ ID NO: 2354748 - RNA, 19 nt, Artificial Sequence
  Description of Artificial Sequence: Synthetic oligonucleotide
  Sense strand starting at position 2059 of SEQ ID NO: 1885608
aggaaucuugucugucaug

SEQ ID NO: 2354749 - RNA, 19 nt, Artificial Sequence
  Description of Artificial Sequence: Synthetic oligonucleotide
  Antisense strand to SEQ ID NO: 2354748
caugacagacaagauuccu

SEQ ID NO: 2354750 - RNA, 19 nt, Artificial Sequence
  Description of Artificial Sequence: Synthetic oligonucleotide
  Sense strand starting at position 2298 of SEQ ID NO: 1885608
uucuguguuuaugcauuua

SEQ ID NO: 2354751 - RNA, 19 nt, Artificial Sequence
  Description of Artificial Sequence: Synthetic oligonucleotide
  Antisense strand to SEQ ID NO: 2354750
uaaaugcauaaacacagaa

SEQ ID NO: 2354752 - RNA, 19 nt, Artificial Sequence
  Description of Artificial Sequence: Synthetic oligonucleotide
  Sense strand starting at position 2343 of SEQ ID NO: 1885608
aucagaucagcaugaauga

SEQ ID NO: 2354753 - RNA, 19 nt, Artificial Sequence
  Description of Artificial Sequence: Synthetic oligonucleotide
  Antisense strand to SEQ ID NO: 2354752
ucauucaugcugaucugau

SEQ ID NO: 2354754 - RNA, 19 nt, Artificial Sequence
  Description of Artificial Sequence: Synthetic oligonucleotide
  Sense strand starting at position 2356 of SEQ ID NO: 1885608
gaaugaagcuuuccagaug

SEQ ID NO: 2354755 - RNA, 19 nt, Artificial Sequence
  Description of Artificial Sequence: Synthetic oligonucleotide
  Antisense strand to SEQ ID NO: 2354754
caucuggaaagcuucauuc

SEQ ID NO: 2354756 - RNA, 19 nt, Artificial Sequence
  Description of Artificial Sequence: Synthetic oligonucleotide
  Sense strand starting at position 2400 of SEQ ID NO: 1885608
ucgugucuugcuuucucaa

SEQ ID NO: 2354757 - RNA, 19 nt, Artificial Sequence
  Description of Artificial Sequence: Synthetic oligonucleotide
  Antisense strand to SEQ ID NO: 2354756
uugagaaagcaagacacga

SEQ ID NO: 2354758 - RNA, 19 nt, Artificial Sequence
  Description of Artificial Sequence: Synthetic oligonucleotide
  Sense strand starting at position 2473 of SEQ ID NO: 1885608
uuagaaucaugagcuaauu

SEQ ID NO: 2354759 - RNA, 19 nt, Artificial Sequence
  Description of Artificial Sequence: Synthetic oligonucleotide
  Antisense strand to SEQ ID NO: 2354758
aauuagcucaugauucuaa

SEQ ID NO: 2354760 - RNA, 19 nt, Artificial Sequence
  Description of Artificial Sequence: Synthetic oligonucleotide
  Sense strand starting at position 2491 of SEQ ID NO: 1885608
uaaugagacugcuuugagu

SEQ ID NO: 2354761 - RNA, 19 nt, Artificial Sequence
  Description of Artificial Sequence: Synthetic oligonucleotide
  Antisense strand to SEQ ID NO: 2354760
acucaaagcagucucauua

SEQ ID NO: 2354762 - RNA, 19 nt, Artificial Sequence
  Description of Artificial Sequence: Synthetic oligonucleotide
  Sense strand starting at position 2513 of SEQ ID NO: 1885608
ugugcuuugcuuguaggua

SEQ ID NO: 2354763 - RNA, 19 nt, Artificial Sequence
  Description of Artificial Sequence: Synthetic oligonucleotide
  Antisense strand to SEQ ID NO: 2354762
uaccuacaagcaaagcaca

SEQ ID NO: 2354764 - RNA, 19 nt, Artificial Sequence
  Description of Artificial Sequence: Synthetic oligonucleotide
  Sense strand starting at position 2636 of SEQ ID NO: 1885608
caguaaauucccgguggag

SEQ ID NO: 2354765 - RNA, 19 nt, Artificial Sequence
  Description of Artificial Sequence: Synthetic oligonucleotide
  Antisense strand to SEQ ID NO: 2354764
cuccaccgggaauuuacug

SEQ ID NO: 2354766 - RNA, 19 nt, Artificial Sequence
  Description of Artificial Sequence: Synthetic oligonucleotide
  Sense strand starting at position 2638 of SEQ ID NO: 1885608
guaaauucccgguggagga

SEQ ID NO: 2354767 - RNA, 19 nt, Artificial Sequence
  Description of Artificial Sequence: Synthetic oligonucleotide
  Antisense strand to SEQ ID NO: 2354766
uccuccaccgggaauuuac

SEQ ID NO: 2354768 - RNA, 19 nt, Artificial Sequence
  Description of Artificial Sequence: Synthetic oligonucleotide
  Sense strand starting at position 2797 of SEQ ID NO: 1885608
agacccauaugagaaacaa

SEQ ID NO: 2354769 - RNA, 19 nt, Artificial Sequence
  Description of Artificial Sequence: Synthetic oligonucleotide
  Antisense strand to SEQ ID NO: 2354768
uuguuucucauaugggucu

SEQ ID NO: 2354770 - RNA, 19 nt, Artificial Sequence
  Description of Artificial Sequence: Synthetic oligonucleotide
  Sense strand starting at position 2899 of SEQ ID NO: 1885608
cucaucacagauuguguua

SEQ ID NO: 2354771 - RNA, 19 nt, Artificial Sequence
  Description of Artificial Sequence: Synthetic oligonucleotide
  Antisense strand to SEQ ID NO: 2354770
uaacacaaucugugaugag

SEQ ID NO: 2354772 - RNA, 19 nt, Artificial Sequence
  Description of Artificial Sequence: Synthetic oligonucleotide
  Sense strand starting at position 2983 of SEQ ID NO: 1885608
ccauguuagaguugugaga

SEQ ID NO: 2354773 - RNA, 19 nt, Artificial Sequence
  Description of Artificial Sequence: Synthetic oligonucleotide
  Antisense strand to SEQ ID NO: 2354772
ucucacaacucuaacaugg

SEQ ID NO: 2354774 - RNA, 19 nt, Artificial Sequence
  Description of Artificial Sequence: Synthetic oligonucleotide
  Sense strand starting at position 3097 of SEQ ID NO: 1885608
ggagaauaacacugccaug

SEQ ID NO: 2354775 - RNA, 19 nt, Artificial Sequence
  Description of Artificial Sequence: Synthetic oligonucleotide
  Antisense strand to SEQ ID NO: 2354774
cauggcaguguuauucucc

SEQ ID NO: 2354776 - RNA, 19 nt, Artificial Sequence
  Description of Artificial Sequence: Synthetic oligonucleotide
  Sense strand starting at position 3109 of SEQ ID NO: 1885608
ugccaugaauacuccugaa

SEQ ID NO: 2354777 - RNA, 19 nt, Artificial Sequence
  Description of Artificial Sequence: Synthetic oligonucleotide
  Antisense strand to SEQ ID NO: 2354776
uucaggaguauucauggca

SEQ ID NO: 2354778 - RNA, 19 nt, Artificial Sequence
  Description of Artificial Sequence: Synthetic oligonucleotide
  Sense strand starting at position 3140 of SEQ ID NO: 1885608
ggaauauauuuguacacuu

SEQ ID NO: 2354779 - RNA, 19 nt, Artificial Sequence
  Description of Artificial Sequence: Synthetic oligonucleotide
  Antisense strand to SEQ ID NO: 2354778
aaguguacaaauauauucc

SEQ ID NO: 2354780 - RNA, 19 nt, Artificial Sequence
  Description of Artificial Sequence: Synthetic oligonucleotide
  Sense strand starting at position 3470 of SEQ ID NO: 1885608
uacacuucuggugagugua

SEQ ID NO: 2354781 - RNA, 19 nt, Artificial Sequence
  Description of Artificial Sequence: Synthetic oligonucleotide
  Antisense strand to SEQ ID NO: 2354780
uacacucaccagaagugua

SEQ ID NO: 2354782 - RNA, 19 nt, Artificial Sequence
  Description of Artificial Sequence: Synthetic oligonucleotide
  Sense strand starting at position 3496 of SEQ ID NO: 1885608
agugaaauucuugggucau

SEQ ID NO: 2354783 - RNA, 19 nt, Artificial Sequence
  Description of Artificial Sequence: Synthetic oligonucleotide
  Antisense strand to SEQ ID NO: 2354782
augacccaagaauuucacu

SEQ ID NO: 2354784 - RNA, 19 nt, Artificial Sequence
  Description of Artificial Sequence: Synthetic oligonucleotide
  Sense strand starting at position 3498 of SEQ ID NO: 1885608
ugaaauucuugggucauaa

SEQ ID NO: 2354785 - RNA, 19 nt, Artificial Sequence
  Description of Artificial Sequence: Synthetic oligonucleotide
  Antisense strand to SEQ ID NO: 2354784
uuaugacccaagaauuuca

SEQ ID NO: 2354786 - RNA, 19 nt, Artificial Sequence
  Description of Artificial Sequence: Synthetic oligonucleotide
  Sense strand starting at position 3510 of SEQ ID NO: 1885608
gucauaagguuugcacaaa

SEQ ID NO: 2354787 - RNA, 19 nt, Artificial Sequence
  Description of Artificial Sequence: Synthetic oligonucleotide
  Antisense strand to SEQ ID NO: 2354786
uuugugcaaaccuuaugac

SEQ ID NO: 2354788 - RNA, 19 nt, Artificial Sequence
  Description of Artificial Sequence: Synthetic oligonucleotide
  Sense strand starting at position 3696 of SEQ ID NO: 1885608
uaagaucacccuggagagu

SEQ ID NO: 2354789 - RNA, 19 nt, Artificial Sequence
  Description of Artificial Sequence: Synthetic oligonucleotide
  Antisense strand to SEQ ID NO: 2354788
acucuccagggugaucuua

SEQ ID NO: 2354790 - RNA, 19 nt, Artificial Sequence
  Description of Artificial Sequence: Synthetic oligonucleotide
  Sense strand starting at position 3930 of SEQ ID NO: 1885608
gaaauucuuguaugggauc

SEQ ID NO: 2354791 - RNA, 19 nt, Artificial Sequence
  Description of Artificial Sequence: Synthetic oligonucleotide
  Antisense strand to SEQ ID NO: 2354790
gaucccauacaagaauuuc

SEQ ID NO: 2354792 - RNA, 19 nt, Artificial Sequence
  Description of Artificial Sequence: Synthetic oligonucleotide
  Sense strand starting at position 3965 of SEQ ID NO: 1885608
ucaggugauacaggugaua

SEQ ID NO: 2354793 - RNA, 19 nt, Artificial Sequence
  Description of Artificial Sequence: Synthetic oligonucleotide
  Antisense strand to SEQ ID NO: 2354792
uaucaccuguaucaccuga

SEQ ID NO: 2354794 - RNA, 19 nt, Artificial Sequence
  Description of Artificial Sequence: Synthetic oligonucleotide
  Sense strand starting at position 184 of SEQ ID NO: 1885609
uuacuuccucuggaaguau

SEQ ID NO: 2354795 - RNA, 19 nt, Artificial Sequence
  Description of Artificial Sequence: Synthetic oligonucleotide
  Antisense strand to SEQ ID NO: 2354794
auacuuccagaggaaguaa

SEQ ID NO: 2354796 - RNA, 19 nt, Artificial Sequence
  Description of Artificial Sequence: Synthetic oligonucleotide
  Sense strand starting at position 291 of SEQ ID NO: 1885609
uaggaaugguaagaauaag

SEQ ID NO: 2354797 - RNA, 19 nt, Artificial Sequence
  Description of Artificial Sequence: Synthetic oligonucleotide
  Antisense strand to SEQ ID NO: 2354796
cuuauucuuaccauuccua

SEQ ID NO: 2354798 - RNA, 19 nt, Artificial Sequence
  Description of Artificial Sequence: Synthetic oligonucleotide
  Sense strand starting at position 354 of SEQ ID NO: 1885609
ucuuuagacucuuuguuau

SEQ ID NO: 2354799 - RNA, 19 nt, Artificial Sequence
  Description of Artificial Sequence: Synthetic oligonucleotide
  Antisense strand to SEQ ID NO: 2354798
auaacaaagagucuaaaga

SEQ ID NO: 2354800 - RNA, 19 nt, Artificial Sequence
  Description of Artificial Sequence: Synthetic oligonucleotide
  Sense strand starting at position 367 of SEQ ID NO: 1885609
uguuauauugacugcauua

SEQ ID NO: 2354801 - RNA, 19 nt, Artificial Sequence
  Description of Artificial Sequence: Synthetic oligonucleotide
  Antisense strand to SEQ ID NO: 2354800
uaaugcagucaauauaaca

SEQ ID NO: 2354802 - RNA, 19 nt, Artificial Sequence
  Description of Artificial Sequence: Synthetic oligonucleotide
  Sense strand starting at position 450 of SEQ ID NO: 1885609
uauguugugguuuaugaca

SEQ ID NO: 2354803 - RNA, 19 nt, Artificial Sequence
  Description of Artificial Sequence: Synthetic oligonucleotide
  Antisense strand to SEQ ID NO: 2354802
ugucauaaaccacaacaua

SEQ ID NO: 2354804 - RNA, 19 nt, Artificial Sequence
  Description of Artificial Sequence: Synthetic oligonucleotide
  Sense strand starting at position 563 of SEQ ID NO: 1885609
cacaauuucugggauugga

SEQ ID NO: 2354805 - RNA, 19 nt, Artificial Sequence
  Description of Artificial Sequence: Synthetic oligonucleotide
  Antisense strand to SEQ ID NO: 2354804
uccaaucccagaaauugug

SEQ ID NO: 2354806 - RNA, 19 nt, Artificial Sequence
  Description of Artificial Sequence: Synthetic oligonucleotide
  Sense strand starting at position 692 of SEQ ID NO: 1885609
uguuauguuggacauucuu

SEQ ID NO: 2354807 - RNA, 19 nt, Artificial Sequence
  Description of Artificial Sequence: Synthetic oligonucleotide
  Antisense strand to SEQ ID NO: 2354806
aagaauguccaacauaaca

SEQ ID NO: 2354808 - RNA, 19 nt, Artificial Sequence
  Description of Artificial Sequence: Synthetic oligonucleotide
  Sense strand starting at position 700 of SEQ ID NO: 1885609
uggacauucuugcuguaau

SEQ ID NO: 2354809 - RNA, 19 nt, Artificial Sequence
  Description of Artificial Sequence: Synthetic oligonucleotide
  Antisense strand to SEQ ID NO: 2354808
auuacagcaagaaugucca

SEQ ID NO: 2354810 - RNA, 19 nt, Artificial Sequence
  Description of Artificial Sequence: Synthetic oligonucleotide
  Sense strand starting at position 710 of SEQ ID NO: 1885609
ugcuguaauggcuauauau

SEQ ID NO: 2354811 - RNA, 19 nt, Artificial Sequence
  Description of Artificial Sequence: Synthetic oligonucleotide
  Antisense strand to SEQ ID NO: 2354810
auauauagccauuacagca

SEQ ID NO: 2354812 - RNA, 19 nt, Artificial Sequence
  Description of Artificial Sequence: Synthetic oligonucleotide
  Sense strand starting at position 849 of SEQ ID NO: 1885609
cuagguucgagugaucuuc

SEQ ID NO: 2354813 - RNA, 19 nt, Artificial Sequence
  Description of Artificial Sequence: Synthetic oligonucleotide
  Antisense strand to SEQ ID NO: 2354812
gaagaucacucgaaccuag

SEQ ID NO: 2354814 - RNA, 19 nt, Artificial Sequence
  Description of Artificial Sequence: Synthetic oligonucleotide
  Sense strand starting at position 957 of SEQ ID NO: 1885609
ggucuugucacguugcuca

SEQ ID NO: 2354815 - RNA, 19 nt, Artificial Sequence
  Description of Artificial Sequence: Synthetic oligonucleotide
  Antisense strand to SEQ ID NO: 2354814
ugagcaacgugacaagacc

SEQ ID NO: 2354816 - RNA, 19 nt, Artificial Sequence
  Description of Artificial Sequence: Synthetic oligonucleotide
  Sense strand starting at position 1055 of SEQ ID NO: 1885609
cuaaaccuggccuguuaua

SEQ ID NO: 2354817 - RNA, 19 nt, Artificial Sequence
  Description of Artificial Sequence: Synthetic oligonucleotide
  Antisense strand to SEQ ID NO: 2354816
uauaacaggccagguuuag

SEQ ID NO: 2354818 - RNA, 19 nt, Artificial Sequence
  Description of Artificial Sequence: Synthetic oligonucleotide
  Sense strand starting at position 1124 of SEQ ID NO: 1885609
guacuuaagguccgaauau

SEQ ID NO: 2354819 - RNA, 19 nt, Artificial Sequence
  Description of Artificial Sequence: Synthetic oligonucleotide
  Antisense strand to SEQ ID NO: 2354818
auauucggaccuuaaguac

SEQ ID NO: 2354820 - RNA, 19 nt, Artificial Sequence
  Description of Artificial Sequence: Synthetic oligonucleotide
  Sense strand starting at position 2131 of SEQ ID NO: 1885609
gcugcuucgccagugacaa

SEQ ID NO: 2354821 - RNA, 19 nt, Artificial Sequence
  Description of Artificial Sequence: Synthetic oligonucleotide
  Antisense strand to SEQ ID NO: 2354820
uugucacuggcgaagcagc

SEQ ID NO: 2354822 - RNA, 19 nt, Artificial Sequence
  Description of Artificial Sequence: Synthetic oligonucleotide
  Sense strand starting at position 2185 of SEQ ID NO: 1885609
gcuagacaacuugguaaug

SEQ ID NO: 2354823 - RNA, 19 nt, Artificial Sequence
  Description of Artificial Sequence: Synthetic oligonucleotide
  Antisense strand to SEQ ID NO: 2354822
cauuaccaaguugucuagc

SEQ ID NO: 2354824 - RNA, 19 nt, Artificial Sequence
  Description of Artificial Sequence: Synthetic oligonucleotide
  Sense strand starting at position 2186 of SEQ ID NO: 1885609
cuagacaacuugguaaugu

SEQ ID NO: 2354825 - RNA, 19 nt, Artificial Sequence
  Description of Artificial Sequence: Synthetic oligonucleotide
  Antisense strand to SEQ ID NO: 2354824
acauuaccaaguugucuag

SEQ ID NO: 2354826 - RNA, 19 nt, Artificial Sequence
  Description of Artificial Sequence: Synthetic oligonucleotide
  Sense strand starting at position 2254 of SEQ ID NO: 1885609
auaagagcucguuaaagga

SEQ ID NO: 2354827 - RNA, 19 nt, Artificial Sequence
  Description of Artificial Sequence: Synthetic oligonucleotide
  Antisense strand to SEQ ID NO: 2354826
uccuuuaacgagcucuuau

SEQ ID NO: 2354828 - RNA, 19 nt, Artificial Sequence
  Description of Artificial Sequence: Synthetic oligonucleotide
  Sense strand starting at position 2383 of SEQ ID NO: 1885609
uuaaauugcuaaucgaggu

SEQ ID NO: 2354829 - RNA, 19 nt, Artificial Sequence
  Description of Artificial Sequence: Synthetic oligonucleotide
  Antisense strand to SEQ ID NO: 2354828
accucgauuagcaauuuaa

SEQ ID NO: 2354830 - RNA, 19 nt, Artificial Sequence
  Description of Artificial Sequence: Synthetic oligonucleotide
  Sense strand starting at position 2388 of SEQ ID NO: 1885609
uugcuaaucgagguuucgu

SEQ ID NO: 2354831 - RNA, 19 nt, Artificial Sequence
  Description of Artificial Sequence: Synthetic oligonucleotide
  Antisense strand to SEQ ID NO: 2354830
acgaaaccucgauuagcaa

SEQ ID NO: 2354832 - RNA, 19 nt, Artificial Sequence
  Description of Artificial Sequence: Synthetic oligonucleotide
  Sense strand starting at position 2396 of SEQ ID NO: 1885609
cgagguuucgugaggucug

SEQ ID NO: 2354833 - RNA, 19 nt, Artificial Sequence
  Description of Artificial Sequence: Synthetic oligonucleotide
  Antisense strand to SEQ ID NO: 2354832
cagaccucacgaaaccucg

SEQ ID NO: 2354834 - RNA, 19 nt, Artificial Sequence
  Description of Artificial Sequence: Synthetic oligonucleotide
  Sense strand starting at position 2489 of SEQ ID NO: 1885609
cugagugucgugcuagcaa

SEQ ID NO: 2354835 - RNA, 19 nt, Artificial Sequence
  Description of Artificial Sequence: Synthetic oligonucleotide
  Antisense strand to SEQ ID NO: 2354834
uugcuagcacgacacucag

SEQ ID NO: 2354836 - RNA, 19 nt, Artificial Sequence
  Description of Artificial Sequence: Synthetic oligonucleotide
  Sense strand starting at position 2538 of SEQ ID NO: 1885609
gcuaauuucucugaggaaa

SEQ ID NO: 2354837 - RNA, 19 nt, Artificial Sequence
  Description of Artificial Sequence: Synthetic oligonucleotide
  Antisense strand to SEQ ID NO: 2354836
uuuccucagagaaauuagc

SEQ ID NO: 2354838 - RNA, 19 nt, Artificial Sequence
  Description of Artificial Sequence: Synthetic oligonucleotide
  Sense strand starting at position 2690 of SEQ ID NO: 1885609
ggacacaugcucugaccuu

SEQ ID NO: 2354839 - RNA, 19 nt, Artificial Sequence
  Description of Artificial Sequence: Synthetic oligonucleotide
  Antisense strand to SEQ ID NO: 2354838
aaggucagagcaugugucc

SEQ ID NO: 2354840 - RNA, 19 nt, Artificial Sequence
  Description of Artificial Sequence: Synthetic oligonucleotide
  Sense strand starting at position 2696 of SEQ ID NO: 1885609
augcucugaccuuggaaga

SEQ ID NO: 2354841 - RNA, 19 nt, Artificial Sequence
  Description of Artificial Sequence: Synthetic oligonucleotide
  Antisense strand to SEQ ID NO: 2354840
ucuuccaaggucagagcau

SEQ ID NO: 2354842 - RNA, 19 nt, Artificial Sequence
  Description of Artificial Sequence: Synthetic oligonucleotide
  Sense strand starting at position 2697 of SEQ ID NO: 1885609
ugcucugaccuuggaagaa

SEQ ID NO: 2354843 - RNA, 19 nt, Artificial Sequence
  Description of Artificial Sequence: Synthetic oligonucleotide
  Antisense strand to SEQ ID NO: 2354842
uucuuccaaggucagagca

SEQ ID NO: 2354844 - RNA, 19 nt, Artificial Sequence
  Description of Artificial Sequence: Synthetic oligonucleotide
  Sense strand starting at position 2797 of SEQ ID NO: 1885609
gugguacagagucagacuu

SEQ ID NO: 2354845 - RNA, 19 nt, Artificial Sequence
  Description of Artificial Sequence: Synthetic oligonucleotide
  Antisense strand to SEQ ID NO: 2354844
aagucugacucuguaccac

SEQ ID NO: 2354846 - RNA, 19 nt, Artificial Sequence
  Description of Artificial Sequence: Synthetic oligonucleotide
  Sense strand starting at position 2834 of SEQ ID NO: 1885609
agcgugauugguuugcguu

SEQ ID NO: 2354847 - RNA, 19 nt, Artificial Sequence
  Description of Artificial Sequence: Synthetic oligonucleotide
  Antisense strand to SEQ ID NO: 2354846
aacgcaaaccaaucacgcu

SEQ ID NO: 2354848 - RNA, 19 nt, Artificial Sequence
  Description of Artificial Sequence: Synthetic oligonucleotide
  Sense strand starting at position 2976 of SEQ ID NO: 1885609
ugcuguuugaugcuugcaa

SEQ ID NO: 2354849 - RNA, 19 nt, Artificial Sequence
  Description of Artificial Sequence: Synthetic oligonucleotide
  Antisense strand to SEQ ID NO: 2354848
uugcaagcaucaaacagca

SEQ ID NO: 2354850 - RNA, 19 nt, Artificial Sequence
  Description of Artificial Sequence: Synthetic oligonucleotide
  Sense strand starting at position 3014 of SEQ ID NO: 1885609
cucucugcuccauaaaggu

SEQ ID NO: 2354851 - RNA, 19 nt, Artificial Sequence
  Description of Artificial Sequence: Synthetic oligonucleotide
  Antisense strand to SEQ ID NO: 2354850
accuuuauggagcagagag

SEQ ID NO: 2354852 - RNA, 19 nt, Artificial Sequence
  Description of Artificial Sequence: Synthetic oligonucleotide
  Sense strand starting at position 3022 of SEQ ID NO: 1885609
uccauaaaggucuggaaua

SEQ ID NO: 2354853 - RNA, 19 nt, Artificial Sequence
  Description of Artificial Sequence: Synthetic oligonucleotide
  Antisense strand to SEQ ID NO: 2354852
uauuccagaccuuuaugga

SEQ ID NO: 2354854 - RNA, 19 nt, Artificial Sequence
  Description of Artificial Sequence: Synthetic oligonucleotide
  Sense strand starting at position 3060 of SEQ ID NO: 1885609
aaagcugucuaguuaggau

SEQ ID NO: 2354855 - RNA, 19 nt, Artificial Sequence
  Description of Artificial Sequence: Synthetic oligonucleotide
  Antisense strand to SEQ ID NO: 2354854
auccuaacuagacagcuuu

SEQ ID NO: 2354856 - RNA, 19 nt, Artificial Sequence
  Description of Artificial Sequence: Synthetic oligonucleotide
  Sense strand starting at position 3103 of SEQ ID NO: 1885609
acaggcgauccucaacuau

SEQ ID NO: 2354857 - RNA, 19 nt, Artificial Sequence
  Description of Artificial Sequence: Synthetic oligonucleotide
  Antisense strand to SEQ ID NO: 2354856
auaguugaggaucgccugu

SEQ ID NO: 2354858 - RNA, 19 nt, Artificial Sequence
  Description of Artificial Sequence: Synthetic oligonucleotide
  Sense strand starting at position 3172 of SEQ ID NO: 1885609
aucauugcagcgggaugaa

SEQ ID NO: 2354859 - RNA, 19 nt, Artificial Sequence
  Description of Artificial Sequence: Synthetic oligonucleotide
  Antisense strand to SEQ ID NO: 2354858
uucaucccgcugcaaugau

SEQ ID NO: 2354860 - RNA, 19 nt, Artificial Sequence
  Description of Artificial Sequence: Synthetic oligonucleotide
  Sense strand starting at position 3221 of SEQ ID NO: 1885609
cacaauuaacguuauccga

SEQ ID NO: 2354861 - RNA, 19 nt, Artificial Sequence
  Description of Artificial Sequence: Synthetic oligonucleotide
  Antisense strand to SEQ ID NO: 2354860
ucggauaacguuaauugug

SEQ ID NO: 2354862 - RNA, 19 nt, Artificial Sequence
  Description of Artificial Sequence: Synthetic oligonucleotide
  Sense strand starting at position 3319 of SEQ ID NO: 1885609
ccuagaaugagguggucaa

SEQ ID NO: 2354863 - RNA, 19 nt, Artificial Sequence
  Description of Artificial Sequence: Synthetic oligonucleotide
  Antisense strand to SEQ ID NO: 2354862
uugaccaccucauucuagg

SEQ ID NO: 2354864 - RNA, 19 nt, Artificial Sequence
  Description of Artificial Sequence: Synthetic oligonucleotide
  Sense strand starting at position 3320 of SEQ ID NO: 1885609
cuagaaugagguggucaaa

SEQ ID NO: 2354865 - RNA, 19 nt, Artificial Sequence
  Description of Artificial Sequence: Synthetic oligonucleotide
  Antisense strand to SEQ ID NO: 2354864
uuugaccaccucauucuag

SEQ ID NO: 2354866 - RNA, 19 nt, Artificial Sequence
  Description of Artificial Sequence: Synthetic oligonucleotide
  Sense strand starting at position 3376 of SEQ ID NO: 1885609
gacagcucagcaugguaaa

SEQ ID NO: 2354867 - RNA, 19 nt, Artificial Sequence
  Description of Artificial Sequence: Synthetic oligonucleotide
  Antisense strand to SEQ ID NO: 2354866
uuuaccaugcugagcuguc

SEQ ID NO: 2354868 - RNA, 19 nt, Artificial Sequence
  Description of Artificial Sequence: Synthetic oligonucleotide
  Sense strand starting at position 3377 of SEQ ID NO: 1885609
acagcucagcaugguaaau

SEQ ID NO: 2354869 - RNA, 19 nt, Artificial Sequence
  Description of Artificial Sequence: Synthetic oligonucleotide
  Antisense strand to SEQ ID NO: 2354868
auuuaccaugcugagcugu

SEQ ID NO: 2354870 - RNA, 19 nt, Artificial Sequence
  Description of Artificial Sequence: Synthetic oligonucleotide
  Sense strand starting at position 3622 of SEQ ID NO: 1885609
acccaaggaggcugugauu

SEQ ID NO: 2354871 - RNA, 19 nt, Artificial Sequence
  Description of Artificial Sequence: Synthetic oligonucleotide
  Antisense strand to SEQ ID NO: 2354870
aaucacagccuccuugggu

SEQ ID NO: 2354872 - RNA, 19 nt, Artificial Sequence
  Description of Artificial Sequence: Synthetic oligonucleotide
  Sense strand starting at position 3879 of SEQ ID NO: 1885609
guccuccugccugauauca

SEQ ID NO: 2354873 - RNA, 19 nt, Artificial Sequence
  Description of Artificial Sequence: Synthetic oligonucleotide
  Antisense strand to SEQ ID NO: 2354872
ugauaucaggcaggaggac

SEQ ID NO: 2354874 - RNA, 19 nt, Artificial Sequence
  Description of Artificial Sequence: Synthetic oligonucleotide
  Sense strand starting at position 266 of SEQ ID NO: 1885610
ugugaaucaaagcgaaaug

SEQ ID NO: 2354875 - RNA, 19 nt, Artificial Sequence
  Description of Artificial Sequence: Synthetic oligonucleotide
  Antisense strand to SEQ ID NO: 2354874
cauuucgcuuugauucaca

SEQ ID NO: 2354876 - RNA, 19 nt, Artificial Sequence
  Description of Artificial Sequence: Synthetic oligonucleotide
  Sense strand starting at position 366 of SEQ ID NO: 1885610
auaacauguuuggugcaaa

SEQ ID NO: 2354877 - RNA, 19 nt, Artificial Sequence
  Description of Artificial Sequence: Synthetic oligonucleotide
  Antisense strand to SEQ ID NO: 2354876
uuugcaccaaacauguuau

SEQ ID NO: 2354878 - RNA, 19 nt, Artificial Sequence
  Description of Artificial Sequence: Synthetic oligonucleotide
  Sense strand starting at position 413 of SEQ ID NO: 1885610
gacagaaugucagcuugcu

SEQ ID NO: 2354879 - RNA, 19 nt, Artificial Sequence
  Description of Artificial Sequence: Synthetic oligonucleotide
  Antisense strand to SEQ ID NO: 2354878
agcaagcugacauucuguc

SEQ ID NO: 2354880 - RNA, 19 nt, Artificial Sequence
  Description of Artificial Sequence: Synthetic oligonucleotide
  Sense strand starting at position 478 of SEQ ID NO: 1885610
ccaugucagccggaauuga

SEQ ID NO: 2354881 - RNA, 19 nt, Artificial Sequence
  Description of Artificial Sequence: Synthetic oligonucleotide
  Antisense strand to SEQ ID NO: 2354880
ucaauuccggcugacaugg

SEQ ID NO: 2354882 - RNA, 19 nt, Artificial Sequence
  Description of Artificial Sequence: Synthetic oligonucleotide
  Sense strand starting at position 486 of SEQ ID NO: 1885610
gccggaauugaacaucaau

SEQ ID NO: 2354883 - RNA, 19 nt, Artificial Sequence
  Description of Artificial Sequence: Synthetic oligonucleotide
  Antisense strand to SEQ ID NO: 2354882
auugauguucaauuccggc

SEQ ID NO: 2354884 - RNA, 19 nt, Artificial Sequence
  Description of Artificial Sequence: Synthetic oligonucleotide
  Sense strand starting at position 557 of SEQ ID NO: 1885610
gaaggcucauugguccaaa

SEQ ID NO: 2354885 - RNA, 19 nt, Artificial Sequence
  Description of Artificial Sequence: Synthetic oligonucleotide
  Antisense strand to SEQ ID NO: 2354884
uuuggaccaaugagccuuc

SEQ ID NO: 2354886 - RNA, 19 nt, Artificial Sequence
  Description of Artificial Sequence: Synthetic oligonucleotide
  Sense strand starting at position 560 of SEQ ID NO: 1885610
ggcucauugguccaaacca

SEQ ID NO: 2354887 - RNA, 19 nt, Artificial Sequence
  Description of Artificial Sequence: Synthetic oligonucleotide
  Antisense strand to SEQ ID NO: 2354886
ugguuuggaccaaugagcc

SEQ ID NO: 2354888 - RNA, 19 nt, Artificial Sequence
  Description of Artificial Sequence: Synthetic oligonucleotide
  Sense strand starting at position 660 of SEQ ID NO: 1885610
augagauauuuaggaauac

SEQ ID NO: 2354889 - RNA, 19 nt, Artificial Sequence
  Description of Artificial Sequence: Synthetic oligonucleotide
  Antisense strand to SEQ ID NO: 2354888
guauuccuaaauaucucau

SEQ ID NO: 2354890 - RNA, 19 nt, Artificial Sequence
  Description of Artificial Sequence: Synthetic oligonucleotide
  Sense strand starting at position 859 of SEQ ID NO: 1885610
cauaaaguuuaggaagaga

SEQ ID NO: 2354891 - RNA, 19 nt, Artificial Sequence
  Description of Artificial Sequence: Synthetic oligonucleotide
  Antisense strand to SEQ ID NO: 2354890
ucucuuccuaaacuuuaug

SEQ ID NO: 2354892 - RNA, 19 nt, Artificial Sequence
  Description of Artificial Sequence: Synthetic oligonucleotide
  Sense strand starting at position 1108 of SEQ ID NO: 1885610
gucacaugcccucgauuua

SEQ ID NO: 2354893 - RNA, 19 nt, Artificial Sequence
  Description of Artificial Sequence: Synthetic oligonucleotide
  Antisense strand to SEQ ID NO: 2354892
uaaaucgagggcaugugac

SEQ ID NO: 2354894 - RNA, 19 nt, Artificial Sequence
  Description of Artificial Sequence: Synthetic oligonucleotide
  Sense strand starting at position 1182 of SEQ ID NO: 1885610
ugcagaauguacucauaag

SEQ ID NO: 2354895 - RNA, 19 nt, Artificial Sequence
  Description of Artificial Sequence: Synthetic oligonucleotide
  Antisense strand to SEQ ID NO: 2354894
cuuaugaguacauucugca

SEQ ID NO: 2354896 - RNA, 19 nt, Artificial Sequence
  Description of Artificial Sequence: Synthetic oligonucleotide
  Sense strand starting at position 1188 of SEQ ID NO: 1885610
auguacucauaaguggaua

SEQ ID NO: 2354897 - RNA, 19 nt, Artificial Sequence
  Description of Artificial Sequence: Synthetic oligonucleotide
  Antisense strand to SEQ ID NO: 2354896
uauccacuuaugaguacau

SEQ ID NO: 2354898 - RNA, 19 nt, Artificial Sequence
  Description of Artificial Sequence: Synthetic oligonucleotide
  Sense strand starting at position 1196 of SEQ ID NO: 1885610
auaaguggauaggauaaua

SEQ ID NO: 2354899 - RNA, 19 nt, Artificial Sequence
  Description of Artificial Sequence: Synthetic oligonucleotide
  Antisense strand to SEQ ID NO: 2354898
uauuauccuauccacuuau

SEQ ID NO: 2354900 - RNA, 19 nt, Artificial Sequence
  Description of Artificial Sequence: Synthetic oligonucleotide
  Sense strand starting at position 1418 of SEQ ID NO: 1885610
agugaauuacuuuagguua

SEQ ID NO: 2354901 - RNA, 19 nt, Artificial Sequence
  Description of Artificial Sequence: Synthetic oligonucleotide
  Antisense strand to SEQ ID NO: 2354900
uaaccuaaaguaauucacu

SEQ ID NO: 2354902 - RNA, 19 nt, Artificial Sequence
  Description of Artificial Sequence: Synthetic oligonucleotide
  Sense strand starting at position 1421 of SEQ ID NO: 1885610
gaauuacuuuagguuaguu

SEQ ID NO: 2354903 - RNA, 19 nt, Artificial Sequence
  Description of Artificial Sequence: Synthetic oligonucleotide
  Antisense strand to SEQ ID NO: 2354902
aacuaaccuaaaguaauuc

SEQ ID NO: 2354904 - RNA, 19 nt, Artificial Sequence
  Description of Artificial Sequence: Synthetic oligonucleotide
  Sense strand starting at position 2255 of SEQ ID NO: 1885610
ggcucagcagauuaucaua

SEQ ID NO: 2354905 - RNA, 19 nt, Artificial Sequence
  Description of Artificial Sequence: Synthetic oligonucleotide
  Antisense strand to SEQ ID NO: 2354904
uaugauaaucugcugagcc

SEQ ID NO: 2354906 - RNA, 19 nt, Artificial Sequence
  Description of Artificial Sequence: Synthetic oligonucleotide
  Sense strand starting at position 2311 of SEQ ID NO: 1885610
uaugcuaccugauuguaga

SEQ ID NO: 2354907 - RNA, 19 nt, Artificial Sequence
  Description of Artificial Sequence: Synthetic oligonucleotide
  Antisense strand to SEQ ID NO: 2354906
ucuacaaucagguagcaua

SEQ ID NO: 2354908 - RNA, 19 nt, Artificial Sequence
  Description of Artificial Sequence: Synthetic oligonucleotide
  Sense strand starting at position 2631 of SEQ ID NO: 1885610
gagacaggagcuuguuauu

SEQ ID NO: 2354909 - RNA, 19 nt, Artificial Sequence
  Description of Artificial Sequence: Synthetic oligonucleotide
  Antisense strand to SEQ ID NO: 2354908
aauaacaagcuccugucuc

SEQ ID NO: 2354910 - RNA, 19 nt, Artificial Sequence
  Description of Artificial Sequence: Synthetic oligonucleotide
  Sense strand starting at position 2883 of SEQ ID NO: 1885610
cgagguuguguguuugcca

SEQ ID NO: 2354911 - RNA, 19 nt, Artificial Sequence
  Description of Artificial Sequence: Synthetic oligonucleotide
  Antisense strand to SEQ ID NO: 2354910
uggcaaacacacaaccucg

SEQ ID NO: 2354912 - RNA, 19 nt, Artificial Sequence
  Description of Artificial Sequence: Synthetic oligonucleotide
  Sense strand starting at position 2910 of SEQ ID NO: 1885610
aucuaaugagauugucugu

SEQ ID NO: 2354913 - RNA, 19 nt, Artificial Sequence
  Description of Artificial Sequence: Synthetic oligonucleotide
  Antisense strand to SEQ ID NO: 2354912
acagacaaucucauuagau

SEQ ID NO: 2354914 - RNA, 19 nt, Artificial Sequence
  Description of Artificial Sequence: Synthetic oligonucleotide
  Sense strand starting at position 2913 of SEQ ID NO: 1885610
uaaugagauugucuguuug

SEQ ID NO: 2354915 - RNA, 19 nt, Artificial Sequence
  Description of Artificial Sequence: Synthetic oligonucleotide
  Antisense strand to SEQ ID NO: 2354914
caaacagacaaucucauua

SEQ ID NO: 2354916 - RNA, 19 nt, Artificial Sequence
  Description of Artificial Sequence: Synthetic oligonucleotide
  Sense strand starting at position 2917 of SEQ ID NO: 1885610
gagauugucuguuuggcag

SEQ ID NO: 2354917 - RNA, 19 nt, Artificial Sequence
  Description of Artificial Sequence: Synthetic oligonucleotide
  Antisense strand to SEQ ID NO: 2354916
cugccaaacagacaaucuc

SEQ ID NO: 2354918 - RNA, 19 nt, Artificial Sequence
  Description of Artificial Sequence: Synthetic oligonucleotide
  Sense strand starting at position 2920 of SEQ ID NO: 1885610
auugucuguuuggcagaaa

SEQ ID NO: 2354919 - RNA, 19 nt, Artificial Sequence
  Description of Artificial Sequence: Synthetic oligonucleotide
  Antisense strand to SEQ ID NO: 2354918
uuucugccaaacagacaau

SEQ ID NO: 2354920 - RNA, 19 nt, Artificial Sequence
  Description of Artificial Sequence: Synthetic oligonucleotide
  Sense strand starting at position 2923 of SEQ ID NO: 1885610
gucuguuuggcagaaagag

SEQ ID NO: 2354921 - RNA, 19 nt, Artificial Sequence
  Description of Artificial Sequence: Synthetic oligonucleotide
  Antisense strand to SEQ ID NO: 2354920
cucuuucugccaaacagac

SEQ ID NO: 2354922 - RNA, 19 nt, Artificial Sequence
  Description of Artificial Sequence: Synthetic oligonucleotide
  Sense strand starting at position 2971 of SEQ ID NO: 1885610
ugaacuuugcagggauucu

SEQ ID NO: 2354923 - RNA, 19 nt, Artificial Sequence
  Description of Artificial Sequence: Synthetic oligonucleotide
  Antisense strand to SEQ ID NO: 2354922
agaaucccugcaaaguuca

SEQ ID NO: 2354924 - RNA, 19 nt, Artificial Sequence
  Description of Artificial Sequence: Synthetic oligonucleotide
  Sense strand starting at position 2980 of SEQ ID NO: 1885610
cagggauucugagcaauuc

SEQ ID NO: 2354925 - RNA, 19 nt, Artificial Sequence
  Description of Artificial Sequence: Synthetic oligonucleotide
  Antisense strand to SEQ ID NO: 2354924
gaauugcucagaaucccug

SEQ ID NO: 2354926 - RNA, 19 nt, Artificial Sequence
  Description of Artificial Sequence: Synthetic oligonucleotide
  Sense strand starting at position 3042 of SEQ ID NO: 1885610
ugaggugaauacucagcua

SEQ ID NO: 2354927 - RNA, 19 nt, Artificial Sequence
  Description of Artificial Sequence: Synthetic oligonucleotide
  Antisense strand to SEQ ID NO: 2354926
uagcugaguauucaccuca

SEQ ID NO: 2354928 - RNA, 19 nt, Artificial Sequence
  Description of Artificial Sequence: Synthetic oligonucleotide
  Sense strand starting at position 3045 of SEQ ID NO: 1885610
ggugaauacucagcuaagg

SEQ ID NO: 2354929 - RNA, 19 nt, Artificial Sequence
  Description of Artificial Sequence: Synthetic oligonucleotide
  Antisense strand to SEQ ID NO: 2354928
ccuuagcugaguauucacc

SEQ ID NO: 2354930 - RNA, 19 nt, Artificial Sequence
  Description of Artificial Sequence: Synthetic oligonucleotide
  Sense strand starting at position 3122 of SEQ ID NO: 1885610
augggaaguuuaccaggua

SEQ ID NO: 2354931 - RNA, 19 nt, Artificial Sequence
  Description of Artificial Sequence: Synthetic oligonucleotide
  Antisense strand to SEQ ID NO: 2354930
uaccugguaaacuucccau

SEQ ID NO: 2354932 - RNA, 19 nt, Artificial Sequence
  Description of Artificial Sequence: Synthetic oligonucleotide
  Sense strand starting at position 3125 of SEQ ID NO: 1885610
ggaaguuuaccagguagaa

SEQ ID NO: 2354933 - RNA, 19 nt, Artificial Sequence
  Description of Artificial Sequence: Synthetic oligonucleotide
  Antisense strand to SEQ ID NO: 2354932
uucuaccugguaaacuucc

SEQ ID NO: 2354934 - RNA, 19 nt, Artificial Sequence
  Description of Artificial Sequence: Synthetic oligonucleotide
  Sense strand starting at position 3304 of SEQ ID NO: 1885610
aagggcuuccuguaauauu

SEQ ID NO: 2354935 - RNA, 19 nt, Artificial Sequence
  Description of Artificial Sequence: Synthetic oligonucleotide
  Antisense strand to SEQ ID NO: 2354934
aauauuacaggaagcccuu

SEQ ID NO: 2354936 - RNA, 19 nt, Artificial Sequence
  Description of Artificial Sequence: Synthetic oligonucleotide
  Sense strand starting at position 3625 of SEQ ID NO: 1885610
aggacuaggugggaaauau

SEQ ID NO: 2354937 - RNA, 19 nt, Artificial Sequence
  Description of Artificial Sequence: Synthetic oligonucleotide
  Antisense strand to SEQ ID NO: 2354936
auauuucccaccuaguccu

SEQ ID NO: 2354938 - RNA, 19 nt, Artificial Sequence
  Description of Artificial Sequence: Synthetic oligonucleotide
  Sense strand starting at position 3702 of SEQ ID NO: 1885610
ugugaaagccaccagaauu

SEQ ID NO: 2354939 - RNA, 19 nt, Artificial Sequence
  Description of Artificial Sequence: Synthetic oligonucleotide
  Antisense strand to SEQ ID NO: 2354938
aauucugguggcuuucaca

SEQ ID NO: 2354940 - RNA, 19 nt, Artificial Sequence
  Description of Artificial Sequence: Synthetic oligonucleotide
  Sense strand starting at position 3713 of SEQ ID NO: 1885610
ccagaauuauauguaagca

SEQ ID NO: 2354941 - RNA, 19 nt, Artificial Sequence
  Description of Artificial Sequence: Synthetic oligonucleotide
  Antisense strand to SEQ ID NO: 2354940
ugcuuacauauaauucugg

SEQ ID NO: 2354942 - RNA, 19 nt, Artificial Sequence
  Description of Artificial Sequence: Synthetic oligonucleotide
  Sense strand starting at position 3771 of SEQ ID NO: 1885610
ugccauaaugcagauugga

SEQ ID NO: 2354943 - RNA, 19 nt, Artificial Sequence
  Description of Artificial Sequence: Synthetic oligonucleotide
  Antisense strand to SEQ ID NO: 2354942
uccaaucugcauuauggca

SEQ ID NO: 2354944 - RNA, 19 nt, Artificial Sequence
  Description of Artificial Sequence: Synthetic oligonucleotide
  Sense strand starting at position 3786 of SEQ ID NO: 1885610
uggauuuagucuguagccu

SEQ ID NO: 2354945 - RNA, 19 nt, Artificial Sequence
  Description of Artificial Sequence: Synthetic oligonucleotide
  Antisense strand to SEQ ID NO: 2354944
aggcuacagacuaaaucca

SEQ ID NO: 2354946 - RNA, 19 nt, Artificial Sequence
  Description of Artificial Sequence: Synthetic oligonucleotide
  Sense strand starting at position 3822 of SEQ ID NO: 1885610
auggaagguucuuuacuau

SEQ ID NO: 2354947 - RNA, 19 nt, Artificial Sequence
  Description of Artificial Sequence: Synthetic oligonucleotide
  Antisense strand to SEQ ID NO: 2354946
auaguaaagaaccuuccau

SEQ ID NO: 2354948 - RNA, 19 nt, Artificial Sequence
  Description of Artificial Sequence: Synthetic oligonucleotide
  Sense strand starting at position 3828 of SEQ ID NO: 1885610
gguucuuuacuauguaaag

SEQ ID NO: 2354949 - RNA, 19 nt, Artificial Sequence
  Description of Artificial Sequence: Synthetic oligonucleotide
  Antisense strand to SEQ ID NO: 2354948
cuuuacauaguaaagaacc

SEQ ID NO: 2354950 - RNA, 19 nt, Artificial Sequence
  Description of Artificial Sequence: Synthetic oligonucleotide
  Sense strand starting at position 3829 of SEQ ID NO: 1885610
guucuuuacuauguaaaga

SEQ ID NO: 2354951 - RNA, 19 nt, Artificial Sequence
  Description of Artificial Sequence: Synthetic oligonucleotide
  Antisense strand to SEQ ID NO: 2354950
ucuuuacauaguaaagaac

SEQ ID NO: 2354952 - RNA, 19 nt, Artificial Sequence
  Description of Artificial Sequence: Synthetic oligonucleotide
  Sense strand starting at position 3885 of SEQ ID NO: 1885610
augguuuccuugucauaca

SEQ ID NO: 2354953 - RNA, 19 nt, Artificial Sequence
  Description of Artificial Sequence: Synthetic oligonucleotide
  Antisense strand to SEQ ID NO: 2354952
uguaugacaaggaaaccau

SEQ ID NO: 2354954 - RNA, 19 nt, Artificial Sequence
  Description of Artificial Sequence: Synthetic oligonucleotide
  Sense strand starting at position 99 of SEQ ID NO: 1885611
uggccuauccuguaaugaa

SEQ ID NO: 2354955 - RNA, 19 nt, Artificial Sequence
  Description of Artificial Sequence: Synthetic oligonucleotide
  Antisense strand to SEQ ID NO: 2354954
uucauuacaggauaggcca

SEQ ID NO: 2354956 - RNA, 19 nt, Artificial Sequence
  Description of Artificial Sequence: Synthetic oligonucleotide
  Sense strand starting at position 114 of SEQ ID NO: 1885611
ugaagagcuuccucagauu

SEQ ID NO: 2354957 - RNA, 19 nt, Artificial Sequence
  Description of Artificial Sequence: Synthetic oligonucleotide
  Antisense strand to SEQ ID NO: 2354956
aaucugaggaagcucuuca

SEQ ID NO: 2354958 - RNA, 19 nt, Artificial Sequence
  Description of Artificial Sequence: Synthetic oligonucleotide
  Sense strand starting at position 206 of SEQ ID NO: 1885611
cuucgcuguaaugaugaau

SEQ ID NO: 2354959 - RNA, 19 nt, Artificial Sequence
  Description of Artificial Sequence: Synthetic oligonucleotide
  Antisense strand to SEQ ID NO: 2354958
auucaucauuacagcgaag

SEQ ID NO: 2354960 - RNA, 19 nt, Artificial Sequence
  Description of Artificial Sequence: Synthetic oligonucleotide
  Sense strand starting at position 224 of SEQ ID NO: 1885611
uguguaagcugaucauuaa

SEQ ID NO: 2354961 - RNA, 19 nt, Artificial Sequence
  Description of Artificial Sequence: Synthetic oligonucleotide
  Antisense strand to SEQ ID NO: 2354960
uuaaugaucagcuuacaca

SEQ ID NO: 2354962 - RNA, 19 nt, Artificial Sequence
  Description of Artificial Sequence: Synthetic oligonucleotide
  Sense strand starting at position 225 of SEQ ID NO: 1885611
guguaagcugaucauuaaa

SEQ ID NO: 2354963 - RNA, 19 nt, Artificial Sequence
  Description of Artificial Sequence: Synthetic oligonucleotide
  Antisense strand to SEQ ID NO: 2354962
uuuaaugaucagcuuacac

SEQ ID NO: 2354964 - RNA, 19 nt, Artificial Sequence
  Description of Artificial Sequence: Synthetic oligonucleotide
  Sense strand starting at position 272 of SEQ ID NO: 1885611
agcccuuugcuauaaugau

SEQ ID NO: 2354965 - RNA, 19 nt, Artificial Sequence
  Description of Artificial Sequence: Synthetic oligonucleotide
  Antisense strand to SEQ ID NO: 2354964
aucauuauagcaaagggcu

SEQ ID NO: 2354966 - RNA, 19 nt, Artificial Sequence
  Description of Artificial Sequence: Synthetic oligonucleotide
  Sense strand starting at position 279 of SEQ ID NO: 1885611
ugcuauaaugaugaaugua

SEQ ID NO: 2354967 - RNA, 19 nt, Artificial Sequence
  Description of Artificial Sequence: Synthetic oligonucleotide
  Antisense strand to SEQ ID NO: 2354966
uacauucaucauuauagca

SEQ ID NO: 2354968 - RNA, 19 nt, Artificial Sequence
  Description of Artificial Sequence: Synthetic oligonucleotide
  Sense strand starting at position 346 of SEQ ID NO: 1885611
ggaaacuggugccugagua

SEQ ID NO: 2354969 - RNA, 19 nt, Artificial Sequence
  Description of Artificial Sequence: Synthetic oligonucleotide
  Antisense strand to SEQ ID NO: 2354968
uacucaggcaccaguuucc

SEQ ID NO: 2354970 - RNA, 19 nt, Artificial Sequence
  Description of Artificial Sequence: Synthetic oligonucleotide
  Sense strand starting at position 362 of SEQ ID NO: 1885611
guacgaaagccagaauaca

SEQ ID NO: 2354971 - RNA, 19 nt, Artificial Sequence
  Description of Artificial Sequence: Synthetic oligonucleotide
  Antisense strand to SEQ ID NO: 2354970
uguauucuggcuuucguac

SEQ ID NO: 2354972 - RNA, 19 nt, Artificial Sequence
  Description of Artificial Sequence: Synthetic oligonucleotide
  Sense strand starting at position 423 of SEQ ID NO: 1885611
cucagaucuagcugaguga

SEQ ID NO: 2354973 - RNA, 19 nt, Artificial Sequence
  Description of Artificial Sequence: Synthetic oligonucleotide
  Antisense strand to SEQ ID NO: 2354972
ucacucagcuagaucugag

SEQ ID NO: 2354974 - RNA, 19 nt, Artificial Sequence
  Description of Artificial Sequence: Synthetic oligonucleotide
  Sense strand starting at position 424 of SEQ ID NO: 1885611
ucagaucuagcugagugau

SEQ ID NO: 2354975 - RNA, 19 nt, Artificial Sequence
  Description of Artificial Sequence: Synthetic oligonucleotide
  Antisense strand to SEQ ID NO: 2354974
aucacucagcuagaucuga

SEQ ID NO: 2354976 - RNA, 19 nt, Artificial Sequence
  Description of Artificial Sequence: Synthetic oligonucleotide
  Sense strand starting at position 426 of SEQ ID NO: 1885611
agaucuagcugagugauaa

SEQ ID NO: 2354977 - RNA, 19 nt, Artificial Sequence
  Description of Artificial Sequence: Synthetic oligonucleotide
  Antisense strand to SEQ ID NO: 2354976
uuaucacucagcuagaucu

SEQ ID NO: 2354978 - RNA, 19 nt, Artificial Sequence
  Description of Artificial Sequence: Synthetic oligonucleotide
  Sense strand starting at position 427 of SEQ ID NO: 1885611
gaucuagcugagugauaaa

SEQ ID NO: 2354979 - RNA, 19 nt, Artificial Sequence
  Description of Artificial Sequence: Synthetic oligonucleotide
  Antisense strand to SEQ ID NO: 2354978
uuuaucacucagcuagauc

SEQ ID NO: 2354980 - RNA, 19 nt, Artificial Sequence
  Description of Artificial Sequence: Synthetic oligonucleotide
  Sense strand starting at position 598 of SEQ ID NO: 1885611
cuuucuggugccgaugaau

SEQ ID NO: 2354981 - RNA, 19 nt, Artificial Sequence
  Description of Artificial Sequence: Synthetic oligonucleotide
  Antisense strand to SEQ ID NO: 2354980
auucaucggcaccagaaag

SEQ ID NO: 2354982 - RNA, 19 nt, Artificial Sequence
  Description of Artificial Sequence: Synthetic oligonucleotide
  Sense strand starting at position 714 of SEQ ID NO: 1885611
cguaaacagcauuagcaau

SEQ ID NO: 2354983 - RNA, 19 nt, Artificial Sequence
  Description of Artificial Sequence: Synthetic oligonucleotide
  Antisense strand to SEQ ID NO: 2354982
auugcuaaugcuguuuacg

SEQ ID NO: 2354984 - RNA, 19 nt, Artificial Sequence
  Description of Artificial Sequence: Synthetic oligonucleotide
  Sense strand starting at position 859 of SEQ ID NO: 1885611
gaaacauucccgcagguag

SEQ ID NO: 2354985 - RNA, 19 nt, Artificial Sequence
  Description of Artificial Sequence: Synthetic oligonucleotide
  Antisense strand to SEQ ID NO: 2354984
cuaccugcgggaauguuuc

SEQ ID NO: 2354986 - RNA, 19 nt, Artificial Sequence
  Description of Artificial Sequence: Synthetic oligonucleotide
  Sense strand starting at position 876 of SEQ ID NO: 1885611
agucauagagcuugaauug

SEQ ID NO: 2354987 - RNA, 19 nt, Artificial Sequence
  Description of Artificial Sequence: Synthetic oligonucleotide
  Antisense strand to SEQ ID NO: 2354986
caauucaagcucuaugacu

SEQ ID NO: 2354988 - RNA, 19 nt, Artificial Sequence
  Description of Artificial Sequence: Synthetic oligonucleotide
  Sense strand starting at position 877 of SEQ ID NO: 1885611
gucauagagcuugaauugu

SEQ ID NO: 2354989 - RNA, 19 nt, Artificial Sequence
  Description of Artificial Sequence: Synthetic oligonucleotide
  Antisense strand to SEQ ID NO: 2354988
acaauucaagcucuaugac

SEQ ID NO: 2354990 - RNA, 19 nt, Artificial Sequence
  Description of Artificial Sequence: Synthetic oligonucleotide
  Sense strand starting at position 1053 of SEQ ID NO: 1885611
cuguaagaaucauccagua

SEQ ID NO: 2354991 - RNA, 19 nt, Artificial Sequence
  Description of Artificial Sequence: Synthetic oligonucleotide
  Antisense strand to SEQ ID NO: 2354990
uacuggaugauucuuacag

SEQ ID NO: 2354992 - RNA, 19 nt, Artificial Sequence
  Description of Artificial Sequence: Synthetic oligonucleotide
  Sense strand starting at position 1284 of SEQ ID NO: 1885611
agaguauguaugggaaaug

SEQ ID NO: 2354993 - RNA, 19 nt, Artificial Sequence
  Description of Artificial Sequence: Synthetic oligonucleotide
  Antisense strand to SEQ ID NO: 2354992
cauuucccauacauacucu

SEQ ID NO: 2354994 - RNA, 19 nt, Artificial Sequence
  Description of Artificial Sequence: Synthetic oligonucleotide
  Sense strand starting at position 1360 of SEQ ID NO: 1885611
ucucuauauccagguagaa

SEQ ID NO: 2354995 - RNA, 19 nt, Artificial Sequence
  Description of Artificial Sequence: Synthetic oligonucleotide
  Antisense strand to SEQ ID NO: 2354994
uucuaccuggauauagaga

SEQ ID NO: 2354996 - RNA, 19 nt, Artificial Sequence
  Description of Artificial Sequence: Synthetic oligonucleotide
  Sense strand starting at position 1450 of SEQ ID NO: 1885611
ugucuuaaaccuuaaaugu

SEQ ID NO: 2354997 - RNA, 19 nt, Artificial Sequence
  Description of Artificial Sequence: Synthetic oligonucleotide
  Antisense strand to SEQ ID NO: 2354996
acauuuaagguuuaagaca

SEQ ID NO: 2354998 - RNA, 19 nt, Artificial Sequence
  Description of Artificial Sequence: Synthetic oligonucleotide
  Sense strand starting at position 1512 of SEQ ID NO: 1885611
guuguaacaguauaaaugu

SEQ ID NO: 2354999 - RNA, 19 nt, Artificial Sequence
  Description of Artificial Sequence: Synthetic oligonucleotide
  Antisense strand to SEQ ID NO: 2354998
acauuuauacuguuacaac

SEQ ID NO: 2355000 - RNA, 19 nt, Artificial Sequence
  Description of Artificial Sequence: Synthetic oligonucleotide
  Sense strand starting at position 1529 of SEQ ID NO: 1885611
guuguaauaccagacaucu

SEQ ID NO: 2355001 - RNA, 19 nt, Artificial Sequence
  Description of Artificial Sequence: Synthetic oligonucleotide
  Antisense strand to SEQ ID NO: 2355000
agaugucugguauuacaac

SEQ ID NO: 2355002 - RNA, 19 nt, Artificial Sequence
  Description of Artificial Sequence: Synthetic oligonucleotide
  Sense strand starting at position 1657 of SEQ ID NO: 1885611
aaggguaguucccucaugu

SEQ ID NO: 2355003 - RNA, 19 nt, Artificial Sequence
  Description of Artificial Sequence: Synthetic oligonucleotide
  Antisense strand to SEQ ID NO: 2355002
acaugagggaacuacccuu

SEQ ID NO: 2355004 - RNA, 19 nt, Artificial Sequence
  Description of Artificial Sequence: Synthetic oligonucleotide
  Sense strand starting at position 1676 of SEQ ID NO: 1885611
ggguacuaguucccacaga

SEQ ID NO: 2355005 - RNA, 19 nt, Artificial Sequence
  Description of Artificial Sequence: Synthetic oligonucleotide
  Antisense strand to SEQ ID NO: 2355004
ucugugggaacuaguaccc

SEQ ID NO: 2355006 - RNA, 19 nt, Artificial Sequence
  Description of Artificial Sequence: Synthetic oligonucleotide
  Sense strand starting at position 1820 of SEQ ID NO: 1885611
gaaggcuuagaucaaacgu

SEQ ID NO: 2355007 - RNA, 19 nt, Artificial Sequence
  Description of Artificial Sequence: Synthetic oligonucleotide
  Antisense strand to SEQ ID NO: 2355006
acguuugaucuaagccuuc

SEQ ID NO: 2355008 - RNA, 19 nt, Artificial Sequence
  Description of Artificial Sequence: Synthetic oligonucleotide
  Sense strand starting at position 1833 of SEQ ID NO: 1885611
aaacguccugagugagaca

SEQ ID NO: 2355009 - RNA, 19 nt, Artificial Sequence
  Description of Artificial Sequence: Synthetic oligonucleotide
  Antisense strand to SEQ ID NO: 2355008
ugucucacucaggacguuu

SEQ ID NO: 2355010 - RNA, 19 nt, Artificial Sequence
  Description of Artificial Sequence: Synthetic oligonucleotide
  Sense strand starting at position 1953 of SEQ ID NO: 1885611
uagcucuuggauuagucau

SEQ ID NO: 2355011 - RNA, 19 nt, Artificial Sequence
  Description of Artificial Sequence: Synthetic oligonucleotide
  Antisense strand to SEQ ID NO: 2355010
augacuaauccaagagcua

SEQ ID NO: 2355012 - RNA, 19 nt, Artificial Sequence
  Description of Artificial Sequence: Synthetic oligonucleotide
  Sense strand starting at position 1965 of SEQ ID NO: 1885611
uagucaugccauugaagag

SEQ ID NO: 2355013 - RNA, 19 nt, Artificial Sequence
  Description of Artificial Sequence: Synthetic oligonucleotide
  Antisense strand to SEQ ID NO: 2355012
cucuucaauggcaugacua

SEQ ID NO: 2355014 - RNA, 19 nt, Artificial Sequence
  Description of Artificial Sequence: Synthetic oligonucleotide
  Sense strand starting at position 2023 of SEQ ID NO: 1885611
uggaguuucugguuuccaa

SEQ ID NO: 2355015 - RNA, 19 nt, Artificial Sequence
  Description of Artificial Sequence: Synthetic oligonucleotide
  Antisense strand to SEQ ID NO: 2355014
uuggaaaccagaaacucca

SEQ ID NO: 2355016 - RNA, 19 nt, Artificial Sequence
  Description of Artificial Sequence: Synthetic oligonucleotide
  Sense strand starting at position 2428 of SEQ ID NO: 1885611
gccugagucucaccucaac

SEQ ID NO: 2355017 - RNA, 19 nt, Artificial Sequence
  Description of Artificial Sequence: Synthetic oligonucleotide
  Antisense strand to SEQ ID NO: 2355016
guugaggugagacucaggc

SEQ ID NO: 2355018 - RNA, 19 nt, Artificial Sequence
  Description of Artificial Sequence: Synthetic oligonucleotide
  Sense strand starting at position 2452 of SEQ ID NO: 1885611
ccugauaccuugcucugau

SEQ ID NO: 2355019 - RNA, 19 nt, Artificial Sequence
  Description of Artificial Sequence: Synthetic oligonucleotide
  Antisense strand to SEQ ID NO: 2355018
aucagagcaagguaucagg

SEQ ID NO: 2355020 - RNA, 19 nt, Artificial Sequence
  Description of Artificial Sequence: Synthetic oligonucleotide
  Sense strand starting at position 2453 of SEQ ID NO: 1885611
cugauaccuugcucugauu

SEQ ID NO: 2355021 - RNA, 19 nt, Artificial Sequence
  Description of Artificial Sequence: Synthetic oligonucleotide
  Antisense strand to SEQ ID NO: 2355020
aaucagagcaagguaucag

SEQ ID NO: 2355022 - RNA, 19 nt, Artificial Sequence
  Description of Artificial Sequence: Synthetic oligonucleotide
  Sense strand starting at position 2831 of SEQ ID NO: 1885611
ucuugugugggauggugaa

SEQ ID NO: 2355023 - RNA, 19 nt, Artificial Sequence
  Description of Artificial Sequence: Synthetic oligonucleotide
  Antisense strand to SEQ ID NO: 2355022
uucaccaucccacacaaga

SEQ ID NO: 2355024 - RNA, 19 nt, Artificial Sequence
  Description of Artificial Sequence: Synthetic oligonucleotide
  Sense strand starting at position 2845 of SEQ ID NO: 1885611
gugaaagcaagucagauua

SEQ ID NO: 2355025 - RNA, 19 nt, Artificial Sequence
  Description of Artificial Sequence: Synthetic oligonucleotide
  Antisense strand to SEQ ID NO: 2355024
uaaucugacuugcuuucac

SEQ ID NO: 2355026 - RNA, 19 nt, Artificial Sequence
  Description of Artificial Sequence: Synthetic oligonucleotide
  Sense strand starting at position 2853 of SEQ ID NO: 1885611
aagucagauuaggcuuuaa

SEQ ID NO: 2355027 - RNA, 19 nt, Artificial Sequence
  Description of Artificial Sequence: Synthetic oligonucleotide
  Antisense strand to SEQ ID NO: 2355026
uuaaagccuaaucugacuu

SEQ ID NO: 2355028 - RNA, 19 nt, Artificial Sequence
  Description of Artificial Sequence: Synthetic oligonucleotide
  Sense strand starting at position 3265 of SEQ ID NO: 1885611
uugagauucugucccuuag

SEQ ID NO: 2355029 - RNA, 19 nt, Artificial Sequence
  Description of Artificial Sequence: Synthetic oligonucleotide
  Antisense strand to SEQ ID NO: 2355028
cuaagggacagaaucucaa

SEQ ID NO: 2355030 - RNA, 19 nt, Artificial Sequence
  Description of Artificial Sequence: Synthetic oligonucleotide
  Sense strand starting at position 3393 of SEQ ID NO: 1885611
cugccuuccgaguucuagu

SEQ ID NO: 2355031 - RNA, 19 nt, Artificial Sequence
  Description of Artificial Sequence: Synthetic oligonucleotide
  Antisense strand to SEQ ID NO: 2355030
acuagaacucggaaggcag

SEQ ID NO: 2355032 - RNA, 19 nt, Artificial Sequence
  Description of Artificial Sequence: Synthetic oligonucleotide
  Sense strand starting at position 3615 of SEQ ID NO: 1885611
ggcauucuuguuguugcau

SEQ ID NO: 2355033 - RNA, 19 nt, Artificial Sequence
  Description of Artificial Sequence: Synthetic oligonucleotide
  Antisense strand to SEQ ID NO: 2355032
augcaacaacaagaaugcc

SEQ ID NO: 2355034 - RNA, 19 nt, Artificial Sequence
  Description of Artificial Sequence: Synthetic oligonucleotide
  Sense strand starting at position 19 of SEQ ID NO: 1885612
cggugaggcuucucagacu

SEQ ID NO: 2355035 - RNA, 19 nt, Artificial Sequence
  Description of Artificial Sequence: Synthetic oligonucleotide
  Antisense strand to SEQ ID NO: 2355034
agucugagaagccucaccg

SEQ ID NO: 2355036 - RNA, 19 nt, Artificial Sequence
  Description of Artificial Sequence: Synthetic oligonucleotide
  Sense strand starting at position 22 of SEQ ID NO: 1885612
ugaggcuucucagacucau

SEQ ID NO: 2355037 - RNA, 19 nt, Artificial Sequence
  Description of Artificial Sequence: Synthetic oligonucleotide
  Antisense strand to SEQ ID NO: 2355036
augagucugagaagccuca

SEQ ID NO: 2355038 - RNA, 19 nt, Artificial Sequence
  Description of Artificial Sequence: Synthetic oligonucleotide
  Sense strand starting at position 60 of SEQ ID NO: 1885612
gcgagaucaauuuggccga

SEQ ID NO: 2355039 - RNA, 19 nt, Artificial Sequence
  Description of Artificial Sequence: Synthetic oligonucleotide
  Antisense strand to SEQ ID NO: 2355038
ucggccaaauugaucucgc

SEQ ID NO: 2355040 - RNA, 19 nt, Artificial Sequence
  Description of Artificial Sequence: Synthetic oligonucleotide
  Sense strand starting at position 160 of SEQ ID NO: 1885612
aagggugaauuugagaguu

SEQ ID NO: 2355041 - RNA, 19 nt, Artificial Sequence
  Description of Artificial Sequence: Synthetic oligonucleotide
  Antisense strand to SEQ ID NO: 2355040
aacucucaaauucacccuu

SEQ ID NO: 2355042 - RNA, 19 nt, Artificial Sequence
  Description of Artificial Sequence: Synthetic oligonucleotide
  Sense strand starting at position 162 of SEQ ID NO: 1885612
gggugaauuugagaguuga

SEQ ID NO: 2355043 - RNA, 19 nt, Artificial Sequence
  Description of Artificial Sequence: Synthetic oligonucleotide
  Antisense strand to SEQ ID NO: 2355042
ucaacucucaaauucaccc

SEQ ID NO: 2355044 - RNA, 19 nt, Artificial Sequence
  Description of Artificial Sequence: Synthetic oligonucleotide
  Sense strand starting at position 199 of SEQ ID NO: 1885612
gcaguuaagucccugggaa

SEQ ID NO: 2355045 - RNA, 19 nt, Artificial Sequence
  Description of Artificial Sequence: Synthetic oligonucleotide
  Antisense strand to SEQ ID NO: 2355044
uucccagggacuuaacugc

SEQ ID NO: 2355046 - RNA, 19 nt, Artificial Sequence
  Description of Artificial Sequence: Synthetic oligonucleotide
  Sense strand starting at position 200 of SEQ ID NO: 1885612
caguuaagucccugggaaa

SEQ ID NO: 2355047 - RNA, 19 nt, Artificial Sequence
  Description of Artificial Sequence: Synthetic oligonucleotide
  Antisense strand to SEQ ID NO: 2355046
uuucccagggacuuaacug

SEQ ID NO: 2355048 - RNA, 19 nt, Artificial Sequence
  Description of Artificial Sequence: Synthetic oligonucleotide
  Sense strand starting at position 201 of SEQ ID NO: 1885612
aguuaagucccugggaaac

SEQ ID NO: 2355049 - RNA, 19 nt, Artificial Sequence
  Description of Artificial Sequence: Synthetic oligonucleotide
  Antisense strand to SEQ ID NO: 2355048
guuucccagggacuuaacu

SEQ ID NO: 2355050 - RNA, 19 nt, Artificial Sequence
  Description of Artificial Sequence: Synthetic oligonucleotide
  Sense strand starting at position 333 of SEQ ID NO: 1885612
gugggaaacuucuguaaca

SEQ ID NO: 2355051 - RNA, 19 nt, Artificial Sequence
  Description of Artificial Sequence: Synthetic oligonucleotide
  Antisense strand to SEQ ID NO: 2355050
uguuacagaaguuucccac

SEQ ID NO: 2355052 - RNA, 19 nt, Artificial Sequence
  Description of Artificial Sequence: Synthetic oligonucleotide
  Sense strand starting at position 334 of SEQ ID NO: 1885612
ugggaaacuucuguaacaa

SEQ ID NO: 2355053 - RNA, 19 nt, Artificial Sequence
  Description of Artificial Sequence: Synthetic oligonucleotide
  Antisense strand to SEQ ID NO: 2355052
uuguuacagaaguuuccca

SEQ ID NO: 2355054 - RNA, 19 nt, Artificial Sequence
  Description of Artificial Sequence: Synthetic oligonucleotide
  Sense strand starting at position 371 of SEQ ID NO: 1885612
caccuuuaccugugaggag

SEQ ID NO: 2355055 - RNA, 19 nt, Artificial Sequence
  Description of Artificial Sequence: Synthetic oligonucleotide
  Antisense strand to SEQ ID NO: 2355054
cuccucacagguaaaggug

SEQ ID NO: 2355056 - RNA, 19 nt, Artificial Sequence
  Description of Artificial Sequence: Synthetic oligonucleotide
  Sense strand starting at position 659 of SEQ ID NO: 1885612
ucaggugauguccaucaca

SEQ ID NO: 2355057 - RNA, 19 nt, Artificial Sequence
  Description of Artificial Sequence: Synthetic oligonucleotide
  Antisense strand to SEQ ID NO: 2355056
ugugauggacaucaccuga

SEQ ID NO: 2355058 - RNA, 19 nt, Artificial Sequence
  Description of Artificial Sequence: Synthetic oligonucleotide
  Sense strand starting at position 662 of SEQ ID NO: 1885612
ggugauguccaucacaucu

SEQ ID NO: 2355059 - RNA, 19 nt, Artificial Sequence
  Description of Artificial Sequence: Synthetic oligonucleotide
  Antisense strand to SEQ ID NO: 2355058
agaugugauggacaucacc

SEQ ID NO: 2355060 - RNA, 19 nt, Artificial Sequence
  Description of Artificial Sequence: Synthetic oligonucleotide
  Sense strand starting at position 678 of SEQ ID NO: 1885612
ucucuuucuguuggugaga

SEQ ID NO: 2355061 - RNA, 19 nt, Artificial Sequence
  Description of Artificial Sequence: Synthetic oligonucleotide
  Antisense strand to SEQ ID NO: 2355060
ucucaccaacagaaagaga

SEQ ID NO: 2355062 - RNA, 19 nt, Artificial Sequence
  Description of Artificial Sequence: Synthetic oligonucleotide
  Sense strand starting at position 811 of SEQ ID NO: 1885612
auaccaggcaucugggaaa

SEQ ID NO: 2355063 - RNA, 19 nt, Artificial Sequence
  Description of Artificial Sequence: Synthetic oligonucleotide
  Antisense strand to SEQ ID NO: 2355062
uuucccagaugccugguau

SEQ ID NO: 2355064 - RNA, 19 nt, Artificial Sequence
  Description of Artificial Sequence: Synthetic oligonucleotide
  Sense strand starting at position 910 of SEQ ID NO: 1885612
ucaagauuagaaggucuau

SEQ ID NO: 2355065 - RNA, 19 nt, Artificial Sequence
  Description of Artificial Sequence: Synthetic oligonucleotide
  Antisense strand to SEQ ID NO: 2355064
auagaccuucuaaucuuga

SEQ ID NO: 2355066 - RNA, 19 nt, Artificial Sequence
  Description of Artificial Sequence: Synthetic oligonucleotide
  Sense strand starting at position 922 of SEQ ID NO: 1885612
ggucuauggugagaccacu

SEQ ID NO: 2355067 - RNA, 19 nt, Artificial Sequence
  Description of Artificial Sequence: Synthetic oligonucleotide
  Antisense strand to SEQ ID NO: 2355066
aguggucucaccauagacc

SEQ ID NO: 2355068 - RNA, 19 nt, Artificial Sequence
  Description of Artificial Sequence: Synthetic oligonucleotide
  Sense strand starting at position 928 of SEQ ID NO: 1885612
uggugagaccacugaugga

SEQ ID NO: 2355069 - RNA, 19 nt, Artificial Sequence
  Description of Artificial Sequence: Synthetic oligonucleotide
  Antisense strand to SEQ ID NO: 2355068
uccaucaguggucucacca

SEQ ID NO: 2355070 - RNA, 19 nt, Artificial Sequence
  Description of Artificial Sequence: Synthetic oligonucleotide
  Sense strand starting at position 965 of SEQ ID NO: 1885612
ucuggagagugguugauga

SEQ ID NO: 2355071 - RNA, 19 nt, Artificial Sequence
  Description of Artificial Sequence: Synthetic oligonucleotide
  Antisense strand to SEQ ID NO: 2355070
ucaucaaccacucuccaga

SEQ ID NO: 2355072 - RNA, 19 nt, Artificial Sequence
  Description of Artificial Sequence: Synthetic oligonucleotide
  Sense strand starting at position 975 of SEQ ID NO: 1885612
gguugaugauacguaucaa

SEQ ID NO: 2355073 - RNA, 19 nt, Artificial Sequence
  Description of Artificial Sequence: Synthetic oligonucleotide
  Antisense strand to SEQ ID NO: 2355072
uugauacguaucaucaacc

SEQ ID NO: 2355074 - RNA, 19 nt, Artificial Sequence
  Description of Artificial Sequence: Synthetic oligonucleotide
  Sense strand starting at position 976 of SEQ ID NO: 1885612
guugaugauacguaucaag

SEQ ID NO: 2355075 - RNA, 19 nt, Artificial Sequence
  Description of Artificial Sequence: Synthetic oligonucleotide
  Antisense strand to SEQ ID NO: 2355074
cuugauacguaucaucaac

SEQ ID NO: 2355076 - RNA, 19 nt, Artificial Sequence
  Description of Artificial Sequence: Synthetic oligonucleotide
  Sense strand starting at position 979 of SEQ ID NO: 1885612
gaugauacguaucaagaau

SEQ ID NO: 2355077 - RNA, 19 nt, Artificial Sequence
  Description of Artificial Sequence: Synthetic oligonucleotide
  Antisense strand to SEQ ID NO: 2355076
auucuugauacguaucauc

SEQ ID NO: 2355078 - RNA, 19 nt, Artificial Sequence
  Description of Artificial Sequence: Synthetic oligonucleotide
  Sense strand starting at position 1161 of SEQ ID NO: 1885612
gagaaucacuuggccuuga

SEQ ID NO: 2355079 - RNA, 19 nt, Artificial Sequence
  Description of Artificial Sequence: Synthetic oligonucleotide
  Antisense strand to SEQ ID NO: 2355078
ucaaggccaagugauucuc

SEQ ID NO: 2355080 - RNA, 19 nt, Artificial Sequence
  Description of Artificial Sequence: Synthetic oligonucleotide
  Sense strand starting at position 1165 of SEQ ID NO: 1885612
aucacuuggccuugaguga

SEQ ID NO: 2355081 - RNA, 19 nt, Artificial Sequence
  Description of Artificial Sequence: Synthetic oligonucleotide
  Antisense strand to SEQ ID NO: 2355080
ucacucaaggccaagugau

SEQ ID NO: 2355082 - RNA, 19 nt, Artificial Sequence
  Description of Artificial Sequence: Synthetic oligonucleotide
  Sense strand starting at position 1166 of SEQ ID NO: 1885612
ucacuuggccuugagugau

SEQ ID NO: 2355083 - RNA, 19 nt, Artificial Sequence
  Description of Artificial Sequence: Synthetic oligonucleotide
  Antisense strand to SEQ ID NO: 2355082
aucacucaaggccaaguga

SEQ ID NO: 2355084 - RNA, 19 nt, Artificial Sequence
  Description of Artificial Sequence: Synthetic oligonucleotide
  Sense strand starting at position 1172 of SEQ ID NO: 1885612
ggccuugagugauugcagu

SEQ ID NO: 2355085 - RNA, 19 nt, Artificial Sequence
  Description of Artificial Sequence: Synthetic oligonucleotide
  Antisense strand to SEQ ID NO: 2355084
acugcaaucacucaaggcc

SEQ ID NO: 2355086 - RNA, 19 nt, Artificial Sequence
  Description of Artificial Sequence: Synthetic oligonucleotide
  Sense strand starting at position 1178 of SEQ ID NO: 1885612
gagugauugcagugagcag

SEQ ID NO: 2355087 - RNA, 19 nt, Artificial Sequence
  Description of Artificial Sequence: Synthetic oligonucleotide
  Antisense strand to SEQ ID NO: 2355086
cugcucacugcaaucacuc

SEQ ID NO: 2355088 - RNA, 19 nt, Artificial Sequence
  Description of Artificial Sequence: Synthetic oligonucleotide
  Sense strand starting at position 1179 of SEQ ID NO: 1885612
agugauugcagugagcaga

SEQ ID NO: 2355089 - RNA, 19 nt, Artificial Sequence
  Description of Artificial Sequence: Synthetic oligonucleotide
  Antisense strand to SEQ ID NO: 2355088
ucugcucacugcaaucacu

SEQ ID NO: 2355090 - RNA, 19 nt, Artificial Sequence
  Description of Artificial Sequence: Synthetic oligonucleotide
  Sense strand starting at position 1233 of SEQ ID NO: 1885612
ugaagugagucucuaaaua

SEQ ID NO: 2355091 - RNA, 19 nt, Artificial Sequence
  Description of Artificial Sequence: Synthetic oligonucleotide
  Antisense strand to SEQ ID NO: 2355090
uauuuagagacucacuuca

SEQ ID NO: 2355092 - RNA, 19 nt, Artificial Sequence
  Description of Artificial Sequence: Synthetic oligonucleotide
  Sense strand starting at position 1282 of SEQ ID NO: 1885612
ucuguuuaauggcucaaga

SEQ ID NO: 2355093 - RNA, 19 nt, Artificial Sequence
  Description of Artificial Sequence: Synthetic oligonucleotide
  Antisense strand to SEQ ID NO: 2355092
ucuugagccauuaaacaga

SEQ ID NO: 2355094 - RNA, 19 nt, Artificial Sequence
  Description of Artificial Sequence: Synthetic oligonucleotide
  Sense strand starting at position 1284 of SEQ ID NO: 1885612
uguuuaauggcucaagaug

SEQ ID NO: 2355095 - RNA, 19 nt, Artificial Sequence
  Description of Artificial Sequence: Synthetic oligonucleotide
  Antisense strand to SEQ ID NO: 2355094
caucuugagccauuaaaca

SEQ ID NO: 2355096 - RNA, 19 nt, Artificial Sequence
  Description of Artificial Sequence: Synthetic oligonucleotide
  Sense strand starting at position 1292 of SEQ ID NO: 1885612
ggcucaagauguuaucuuu

SEQ ID NO: 2355097 - RNA, 19 nt, Artificial Sequence
  Description of Artificial Sequence: Synthetic oligonucleotide
  Antisense strand to SEQ ID NO: 2355096
aaagauaacaucuugagcc

SEQ ID NO: 2355098 - RNA, 19 nt, Artificial Sequence
  Description of Artificial Sequence: Synthetic oligonucleotide
  Sense strand starting at position 1461 of SEQ ID NO: 1885612
ggcauuucucccuggugca

SEQ ID NO: 2355099 - RNA, 19 nt, Artificial Sequence
  Description of Artificial Sequence: Synthetic oligonucleotide
  Antisense strand to SEQ ID NO: 2355098
ugcaccagggagaaaugcc

SEQ ID NO: 2355100 - RNA, 19 nt, Artificial Sequence
  Description of Artificial Sequence: Synthetic oligonucleotide
  Sense strand starting at position 3457 of SEQ ID NO: 1885612
ggacgcuaaugacuguaau

SEQ ID NO: 2355101 - RNA, 19 nt, Artificial Sequence
  Description of Artificial Sequence: Synthetic oligonucleotide
  Antisense strand to SEQ ID NO: 2355100
auuacagucauuagcgucc

SEQ ID NO: 2355102 - RNA, 19 nt, Artificial Sequence
  Description of Artificial Sequence: Synthetic oligonucleotide
  Sense strand starting at position 3458 of SEQ ID NO: 1885612
gacgcuaaugacuguaauu

SEQ ID NO: 2355103 - RNA, 19 nt, Artificial Sequence
  Description of Artificial Sequence: Synthetic oligonucleotide
  Antisense strand to SEQ ID NO: 2355102
aauuacagucauuagcguc

SEQ ID NO: 2355104 - RNA, 19 nt, Artificial Sequence
  Description of Artificial Sequence: Synthetic oligonucleotide
  Sense strand starting at position 3838 of SEQ ID NO: 1885612
gcuccuuuguggucagaag

SEQ ID NO: 2355105 - RNA, 19 nt, Artificial Sequence
  Description of Artificial Sequence: Synthetic oligonucleotide
  Antisense strand to SEQ ID NO: 2355104
cuucugaccacaaaggagc

SEQ ID NO: 2355106 - RNA, 19 nt, Artificial Sequence
  Description of Artificial Sequence: Synthetic oligonucleotide
  Sense strand starting at position 3849 of SEQ ID NO: 1885612
gucagaagcccaggacauu

SEQ ID NO: 2355107 - RNA, 19 nt, Artificial Sequence
  Description of Artificial Sequence: Synthetic oligonucleotide
  Antisense strand to SEQ ID NO: 2355106
aauguccugggcuucugac

SEQ ID NO: 2355108 - RNA, 19 nt, Artificial Sequence
  Description of Artificial Sequence: Synthetic oligonucleotide
  Sense strand starting at position 3860 of SEQ ID NO: 1885612
aggacauucugggaucugu

SEQ ID NO: 2355109 - RNA, 19 nt, Artificial Sequence
  Description of Artificial Sequence: Synthetic oligonucleotide
  Antisense strand to SEQ ID NO: 2355108
acagaucccagaauguccu

SEQ ID NO: 2355110 - RNA, 19 nt, Artificial Sequence
  Description of Artificial Sequence: Synthetic oligonucleotide
  Sense strand starting at position 3939 of SEQ ID NO: 1885612
ggcaguuguggcugccgaa

SEQ ID NO: 2355111 - RNA, 19 nt, Artificial Sequence
  Description of Artificial Sequence: Synthetic oligonucleotide
  Antisense strand to SEQ ID NO: 2355110
uucggcagccacaacugcc

SEQ ID NO: 2355112 - RNA, 19 nt, Artificial Sequence
  Description of Artificial Sequence: Synthetic oligonucleotide
  Sense strand starting at position 3940 of SEQ ID NO: 1885612
gcaguuguggcugccgaau

SEQ ID NO: 2355113 - RNA, 19 nt, Artificial Sequence
  Description of Artificial Sequence: Synthetic oligonucleotide
  Antisense strand to SEQ ID NO: 2355112
auucggcagccacaacugc

SEQ ID NO: 2355114 - RNA, 19 nt, Artificial Sequence
  Description of Artificial Sequence: Synthetic oligonucleotide
  Sense strand starting at position 167 of SEQ ID NO: 1885613
ggguaugucagguagugga

SEQ ID NO: 2355115 - RNA, 19 nt, Artificial Sequence
  Description of Artificial Sequence: Synthetic oligonucleotide
  Antisense strand to SEQ ID NO: 2355114
uccacuaccugacauaccc

SEQ ID NO: 2355116 - RNA, 19 nt, Artificial Sequence
  Description of Artificial Sequence: Synthetic oligonucleotide
  Sense strand starting at position 279 of SEQ ID NO: 1885613
gagauugaggccuggcaga

SEQ ID NO: 2355117 - RNA, 19 nt, Artificial Sequence
  Description of Artificial Sequence: Synthetic oligonucleotide
  Antisense strand to SEQ ID NO: 2355116
ucugccaggccucaaucuc

SEQ ID NO: 2355118 - RNA, 19 nt, Artificial Sequence
  Description of Artificial Sequence: Synthetic oligonucleotide
  Sense strand starting at position 314 of SEQ ID NO: 1885613
gugggaugaagguagcauu

SEQ ID NO: 2355119 - RNA, 19 nt, Artificial Sequence
  Description of Artificial Sequence: Synthetic oligonucleotide
  Antisense strand to SEQ ID NO: 2355118
aaugcuaccuucaucccac

SEQ ID NO: 2355120 - RNA, 19 nt, Artificial Sequence
  Description of Artificial Sequence: Synthetic oligonucleotide
  Sense strand starting at position 326 of SEQ ID NO: 1885613
uagcauuaucugggugauc

SEQ ID NO: 2355121 - RNA, 19 nt, Artificial Sequence
  Description of Artificial Sequence: Synthetic oligonucleotide
  Antisense strand to SEQ ID NO: 2355120
gaucacccagauaaugcua

SEQ ID NO: 2355122 - RNA, 19 nt, Artificial Sequence
  Description of Artificial Sequence: Synthetic oligonucleotide
  Sense strand starting at position 327 of SEQ ID NO: 1885613
agcauuaucugggugauca

SEQ ID NO: 2355123 - RNA, 19 nt, Artificial Sequence
  Description of Artificial Sequence: Synthetic oligonucleotide
  Antisense strand to SEQ ID NO: 2355122
ugaucacccagauaaugcu

SEQ ID NO: 2355124 - RNA, 19 nt, Artificial Sequence
  Description of Artificial Sequence: Synthetic oligonucleotide
  Sense strand starting at position 328 of SEQ ID NO: 1885613
gcauuaucugggugaucag

SEQ ID NO: 2355125 - RNA, 19 nt, Artificial Sequence
  Description of Artificial Sequence: Synthetic oligonucleotide
  Antisense strand to SEQ ID NO: 2355124
cugaucacccagauaaugc

SEQ ID NO: 2355126 - RNA, 19 nt, Artificial Sequence
  Description of Artificial Sequence: Synthetic oligonucleotide
  Sense strand starting at position 398 of SEQ ID NO: 1885613
gaccucacccauugaugga

SEQ ID NO: 2355127 - RNA, 19 nt, Artificial Sequence
  Description of Artificial Sequence: Synthetic oligonucleotide
  Antisense strand to SEQ ID NO: 2355126
uccaucaaugggugagguc

SEQ ID NO: 2355128 - RNA, 19 nt, Artificial Sequence
  Description of Artificial Sequence: Synthetic oligonucleotide
  Sense strand starting at position 531 of SEQ ID NO: 1885613
acgcgauuuaauggacuuu

SEQ ID NO: 2355129 - RNA, 19 nt, Artificial Sequence
  Description of Artificial Sequence: Synthetic oligonucleotide
  Antisense strand to SEQ ID NO: 2355128
aaaguccauuaaaucgcgu

SEQ ID NO: 2355130 - RNA, 19 nt, Artificial Sequence
  Description of Artificial Sequence: Synthetic oligonucleotide
  Sense strand starting at position 652 of SEQ ID NO: 1885613
ccaaauguucuggagucaa

SEQ ID NO: 2355131 - RNA, 19 nt, Artificial Sequence
  Description of Artificial Sequence: Synthetic oligonucleotide
  Antisense strand to SEQ ID NO: 2355130
uugacuccagaacauuugg

SEQ ID NO: 2355132 - RNA, 19 nt, Artificial Sequence
  Description of Artificial Sequence: Synthetic oligonucleotide
  Sense strand starting at position 907 of SEQ ID NO: 1885613
uagugcagaguuuauuaaa

SEQ ID NO: 2355133 - RNA, 19 nt, Artificial Sequence
  Description of Artificial Sequence: Synthetic oligonucleotide
  Antisense strand to SEQ ID NO: 2355132
uuuaauaaacucugcacua

SEQ ID NO: 2355134 - RNA, 19 nt, Artificial Sequence
  Description of Artificial Sequence: Synthetic oligonucleotide
  Sense strand starting at position 1076 of SEQ ID NO: 1885613
uugagauauuaggucauga

SEQ ID NO: 2355135 - RNA, 19 nt, Artificial Sequence
  Description of Artificial Sequence: Synthetic oligonucleotide
  Antisense strand to SEQ ID NO: 2355134
ucaugaccuaauaucucaa

SEQ ID NO: 2355136 - RNA, 19 nt, Artificial Sequence
  Description of Artificial Sequence: Synthetic oligonucleotide
  Sense strand starting at position 1169 of SEQ ID NO: 1885613
cugauaaauggcugagugu

SEQ ID NO: 2355137 - RNA, 19 nt, Artificial Sequence
  Description of Artificial Sequence: Synthetic oligonucleotide
  Antisense strand to SEQ ID NO: 2355136
acacucagccauuuaucag

SEQ ID NO: 2355138 - RNA, 19 nt, Artificial Sequence
  Description of Artificial Sequence: Synthetic oligonucleotide
  Sense strand starting at position 1643 of SEQ ID NO: 1885613
acaagcuuugaccauguua

SEQ ID NO: 2355139 - RNA, 19 nt, Artificial Sequence
  Description of Artificial Sequence: Synthetic oligonucleotide
  Antisense strand to SEQ ID NO: 2355138
uaacauggucaaagcuugu

SEQ ID NO: 2355140 - RNA, 19 nt, Artificial Sequence
  Description of Artificial Sequence: Synthetic oligonucleotide
  Sense strand starting at position 1669 of SEQ ID NO: 1885613
gucuucaugcccgugguaa

SEQ ID NO: 2355141 - RNA, 19 nt, Artificial Sequence
  Description of Artificial Sequence: Synthetic oligonucleotide
  Antisense strand to SEQ ID NO: 2355140
uuaccacgggcaugaagac

SEQ ID NO: 2355142 - RNA, 19 nt, Artificial Sequence
  Description of Artificial Sequence: Synthetic oligonucleotide
  Sense strand starting at position 1744 of SEQ ID NO: 1885613
guuguccucauguagacau

SEQ ID NO: 2355143 - RNA, 19 nt, Artificial Sequence
  Description of Artificial Sequence: Synthetic oligonucleotide
  Antisense strand to SEQ ID NO: 2355142
augucuacaugaggacaac

SEQ ID NO: 2355144 - RNA, 19 nt, Artificial Sequence
  Description of Artificial Sequence: Synthetic oligonucleotide
  Sense strand starting at position 1931 of SEQ ID NO: 1885613
agaacaguuguacaucuau

SEQ ID NO: 2355145 - RNA, 19 nt, Artificial Sequence
  Description of Artificial Sequence: Synthetic oligonucleotide
  Antisense strand to SEQ ID NO: 2355144
auagauguacaacuguucu

SEQ ID NO: 2355146 - RNA, 19 nt, Artificial Sequence
  Description of Artificial Sequence: Synthetic oligonucleotide
  Sense strand starting at position 1949 of SEQ ID NO: 1885613
uggugugaccuccaugaga

SEQ ID NO: 2355147 - RNA, 19 nt, Artificial Sequence
  Description of Artificial Sequence: Synthetic oligonucleotide
  Antisense strand to SEQ ID NO: 2355146
ucucauggaggucacacca

SEQ ID NO: 2355148 - RNA, 19 nt, Artificial Sequence
  Description of Artificial Sequence: Synthetic oligonucleotide
  Sense strand starting at position 1951 of SEQ ID NO: 1885613
gugugaccuccaugagaga

SEQ ID NO: 2355149 - RNA, 19 nt, Artificial Sequence
  Description of Artificial Sequence: Synthetic oligonucleotide
  Antisense strand to SEQ ID NO: 2355148
ucucucauggaggucacac

SEQ ID NO: 2355150 - RNA, 19 nt, Artificial Sequence
  Description of Artificial Sequence: Synthetic oligonucleotide
  Sense strand starting at position 1965 of SEQ ID NO: 1885613
agagaauacuugccuugug

SEQ ID NO: 2355151 - RNA, 19 nt, Artificial Sequence
  Description of Artificial Sequence: Synthetic oligonucleotide
  Antisense strand to SEQ ID NO: 2355150
cacaaggcaaguauucucu

SEQ ID NO: 2355152 - RNA, 19 nt, Artificial Sequence
  Description of Artificial Sequence: Synthetic oligonucleotide
  Sense strand starting at position 2179 of SEQ ID NO: 1885613
ugaaauaaacaagguguua

SEQ ID NO: 2355153 - RNA, 19 nt, Artificial Sequence
  Description of Artificial Sequence: Synthetic oligonucleotide
  Antisense strand to SEQ ID NO: 2355152
uaacaccuuguuuauuuca

SEQ ID NO: 2355154 - RNA, 19 nt, Artificial Sequence
  Description of Artificial Sequence: Synthetic oligonucleotide
  Sense strand starting at position 2208 of SEQ ID NO: 1885613
agaaauucuuguguaucau

SEQ ID NO: 2355155 - RNA, 19 nt, Artificial Sequence
  Description of Artificial Sequence: Synthetic oligonucleotide
  Antisense strand to SEQ ID NO: 2355154
augauacacaagaauuucu

SEQ ID NO: 2355156 - RNA, 19 nt, Artificial Sequence
  Description of Artificial Sequence: Synthetic oligonucleotide
  Sense strand starting at position 2214 of SEQ ID NO: 1885613
ucuuguguaucaucaucaa

SEQ ID NO: 2355157 - RNA, 19 nt, Artificial Sequence
  Description of Artificial Sequence: Synthetic oligonucleotide
  Antisense strand to SEQ ID NO: 2355156
uugaugaugauacacaaga

SEQ ID NO: 2355158 - RNA, 19 nt, Artificial Sequence
  Description of Artificial Sequence: Synthetic oligonucleotide
  Sense strand starting at position 2217 of SEQ ID NO: 1885613
uguguaucaucaucaagga

SEQ ID NO: 2355159 - RNA, 19 nt, Artificial Sequence
  Description of Artificial Sequence: Synthetic oligonucleotide
  Antisense strand to SEQ ID NO: 2355158
uccuugaugaugauacaca

SEQ ID NO: 2355160 - RNA, 19 nt, Artificial Sequence
  Description of Artificial Sequence: Synthetic oligonucleotide
  Sense strand starting at position 2676 of SEQ ID NO: 1885613
uggagugguguuuaauauu

SEQ ID NO: 2355161 - RNA, 19 nt, Artificial Sequence
  Description of Artificial Sequence: Synthetic oligonucleotide
  Antisense strand to SEQ ID NO: 2355160
aauauuaaacaccacucca

SEQ ID NO: 2355162 - RNA, 19 nt, Artificial Sequence
  Description of Artificial Sequence: Synthetic oligonucleotide
  Sense strand starting at position 2724 of SEQ ID NO: 1885613
aauggaaguguuuaaugca

SEQ ID NO: 2355163 - RNA, 19 nt, Artificial Sequence
  Description of Artificial Sequence: Synthetic oligonucleotide
  Antisense strand to SEQ ID NO: 2355162
ugcauuaaacacuuccauu

SEQ ID NO: 2355164 - RNA, 19 nt, Artificial Sequence
  Description of Artificial Sequence: Synthetic oligonucleotide
  Sense strand starting at position 2732 of SEQ ID NO: 1885613
uguuuaaugcaauaaugug

SEQ ID NO: 2355165 - RNA, 19 nt, Artificial Sequence
  Description of Artificial Sequence: Synthetic oligonucleotide
  Antisense strand to SEQ ID NO: 2355164
cacauuauugcauuaaaca

SEQ ID NO: 2355166 - RNA, 19 nt, Artificial Sequence
  Description of Artificial Sequence: Synthetic oligonucleotide
  Sense strand starting at position 2925 of SEQ ID NO: 1885613
gcucacauacuaugaguua

SEQ ID NO: 2355167 - RNA, 19 nt, Artificial Sequence
  Description of Artificial Sequence: Synthetic oligonucleotide
  Antisense strand to SEQ ID NO: 2355166
uaacucauaguaugugagc

SEQ ID NO: 2355168 - RNA, 19 nt, Artificial Sequence
  Description of Artificial Sequence: Synthetic oligonucleotide
  Sense strand starting at position 3015 of SEQ ID NO: 1885613
augauuacgguuugacaac

SEQ ID NO: 2355169 - RNA, 19 nt, Artificial Sequence
  Description of Artificial Sequence: Synthetic oligonucleotide
  Antisense strand to SEQ ID NO: 2355168
guugucaaaccguaaucau

SEQ ID NO: 2355170 - RNA, 19 nt, Artificial Sequence
  Description of Artificial Sequence: Synthetic oligonucleotide
  Sense strand starting at position 3105 of SEQ ID NO: 1885613
cugauugagacuuguuugu

SEQ ID NO: 2355171 - RNA, 19 nt, Artificial Sequence
  Description of Artificial Sequence: Synthetic oligonucleotide
  Antisense strand to SEQ ID NO: 2355170
acaaacaagucucaaucag

SEQ ID NO: 2355172 - RNA, 19 nt, Artificial Sequence
  Description of Artificial Sequence: Synthetic oligonucleotide
  Sense strand starting at position 3107 of SEQ ID NO: 1885613
gauugagacuuguuuguuu

SEQ ID NO: 2355173 - RNA, 19 nt, Artificial Sequence
  Description of Artificial Sequence: Synthetic oligonucleotide
  Antisense strand to SEQ ID NO: 2355172
aaacaaacaagucucaauc

SEQ ID NO: 2355174 - RNA, 19 nt, Artificial Sequence
  Description of Artificial Sequence: Synthetic oligonucleotide
  Sense strand starting at position 3109 of SEQ ID NO: 1885613
uugagacuuguuuguuuga

SEQ ID NO: 2355175 - RNA, 19 nt, Artificial Sequence
  Description of Artificial Sequence: Synthetic oligonucleotide
  Antisense strand to SEQ ID NO: 2355174
ucaaacaaacaagucucaa

SEQ ID NO: 2355176 - RNA, 19 nt, Artificial Sequence
  Description of Artificial Sequence: Synthetic oligonucleotide
  Sense strand starting at position 3110 of SEQ ID NO: 1885613
ugagacuuguuuguuugaa

SEQ ID NO: 2355177 - RNA, 19 nt, Artificial Sequence
  Description of Artificial Sequence: Synthetic oligonucleotide
  Antisense strand to SEQ ID NO: 2355176
uucaaacaaacaagucuca

SEQ ID NO: 2355178 - RNA, 19 nt, Artificial Sequence
  Description of Artificial Sequence: Synthetic oligonucleotide
  Sense strand starting at position 3112 of SEQ ID NO: 1885613
agacuuguuuguuugaaca

SEQ ID NO: 2355179 - RNA, 19 nt, Artificial Sequence
  Description of Artificial Sequence: Synthetic oligonucleotide
  Antisense strand to SEQ ID NO: 2355178
uguucaaacaaacaagucu

SEQ ID NO: 2355180 - RNA, 19 nt, Artificial Sequence
  Description of Artificial Sequence: Synthetic oligonucleotide
  Sense strand starting at position 3190 of SEQ ID NO: 1885613
aacagauguuuaucaggca

SEQ ID NO: 2355181 - RNA, 19 nt, Artificial Sequence
  Description of Artificial Sequence: Synthetic oligonucleotide
  Antisense strand to SEQ ID NO: 2355180
ugccugauaaacaucuguu

SEQ ID NO: 2355182 - RNA, 19 nt, Artificial Sequence
  Description of Artificial Sequence: Synthetic oligonucleotide
  Sense strand starting at position 3241 of SEQ ID NO: 1885613
gaggcuuugguauaaguuu

SEQ ID NO: 2355183 - RNA, 19 nt, Artificial Sequence
  Description of Artificial Sequence: Synthetic oligonucleotide
  Antisense strand to SEQ ID NO: 2355182
aaacuuauaccaaagccuc

SEQ ID NO: 2355184 - RNA, 19 nt, Artificial Sequence
  Description of Artificial Sequence: Synthetic oligonucleotide
  Sense strand starting at position 3276 of SEQ ID NO: 1885613
ccaaacaccuguuuaugua

SEQ ID NO: 2355185 - RNA, 19 nt, Artificial Sequence
  Description of Artificial Sequence: Synthetic oligonucleotide
  Antisense strand to SEQ ID NO: 2355184
uacauaaacagguguuugg

SEQ ID NO: 2355186 - RNA, 19 nt, Artificial Sequence
  Description of Artificial Sequence: Synthetic oligonucleotide
  Sense strand starting at position 3286 of SEQ ID NO: 1885613
guuuauguaccagauucua

SEQ ID NO: 2355187 - RNA, 19 nt, Artificial Sequence
  Description of Artificial Sequence: Synthetic oligonucleotide
  Antisense strand to SEQ ID NO: 2355186
uagaaucugguacauaaac

SEQ ID NO: 2355188 - RNA, 19 nt, Artificial Sequence
  Description of Artificial Sequence: Synthetic oligonucleotide
  Sense strand starting at position 3467 of SEQ ID NO: 1885613
auacucaagucccuguaua

SEQ ID NO: 2355189 - RNA, 19 nt, Artificial Sequence
  Description of Artificial Sequence: Synthetic oligonucleotide
  Antisense strand to SEQ ID NO: 2355188
uauacagggacuugaguau

SEQ ID NO: 2355190 - RNA, 19 nt, Artificial Sequence
  Description of Artificial Sequence: Synthetic oligonucleotide
  Sense strand starting at position 3705 of SEQ ID NO: 1885613
acgguauuugcauguaacu

SEQ ID NO: 2355191 - RNA, 19 nt, Artificial Sequence
  Description of Artificial Sequence: Synthetic oligonucleotide
  Antisense strand to SEQ ID NO: 2355190
aguuacaugcaaauaccgu

SEQ ID NO: 2355192 - RNA, 19 nt, Artificial Sequence
  Description of Artificial Sequence: Synthetic oligonucleotide
  Sense strand starting at position 3932 of SEQ ID NO: 1885613
guugguugacuuuacggau

SEQ ID NO: 2355193 - RNA, 19 nt, Artificial Sequence
  Description of Artificial Sequence: Synthetic oligonucleotide
  Antisense strand to SEQ ID NO: 2355192
auccguaaagucaaccaac

SEQ ID NO: 2355194 - RNA, 19 nt, Artificial Sequence
  Description of Artificial Sequence: Synthetic oligonucleotide
  Sense strand starting at position 17 of SEQ ID NO: 1885614
ugagauguauccuauccac

SEQ ID NO: 2355195 - RNA, 19 nt, Artificial Sequence
  Description of Artificial Sequence: Synthetic oligonucleotide
  Antisense strand to SEQ ID NO: 2355194
guggauaggauacaucuca

SEQ ID NO: 2355196 - RNA, 19 nt, Artificial Sequence
  Description of Artificial Sequence: Synthetic oligonucleotide
  Sense strand starting at position 42 of SEQ ID NO: 1885614
agccuauugcuugccugua

SEQ ID NO: 2355197 - RNA, 19 nt, Artificial Sequence
  Description of Artificial Sequence: Synthetic oligonucleotide
  Antisense strand to SEQ ID NO: 2355196
uacaggcaagcaauaggcu

SEQ ID NO: 2355198 - RNA, 19 nt, Artificial Sequence
  Description of Artificial Sequence: Synthetic oligonucleotide
  Sense strand starting at position 43 of SEQ ID NO: 1885614
gccuauugcuugccuguau

SEQ ID NO: 2355199 - RNA, 19 nt, Artificial Sequence
  Description of Artificial Sequence: Synthetic oligonucleotide
  Antisense strand to SEQ ID NO: 2355198
auacaggcaagcaauaggc

SEQ ID NO: 2355200 - RNA, 19 nt, Artificial Sequence
  Description of Artificial Sequence: Synthetic oligonucleotide
  Sense strand starting at position 118 of SEQ ID NO: 1885614
gcucucaucuucgcccaua

SEQ ID NO: 2355201 - RNA, 19 nt, Artificial Sequence
  Description of Artificial Sequence: Synthetic oligonucleotide
  Antisense strand to SEQ ID NO: 2355200
uaugggcgaagaugagagc

SEQ ID NO: 2355202 - RNA, 19 nt, Artificial Sequence
  Description of Artificial Sequence: Synthetic oligonucleotide
  Sense strand starting at position 162 of SEQ ID NO: 1885614
ccuacucuuugcuggcgaa

SEQ ID NO: 2355203 - RNA, 19 nt, Artificial Sequence
  Description of Artificial Sequence: Synthetic oligonucleotide
  Antisense strand to SEQ ID NO: 2355202
uucgccagcaaagaguagg

SEQ ID NO: 2355204 - RNA, 19 nt, Artificial Sequence
  Description of Artificial Sequence: Synthetic oligonucleotide
  Sense strand starting at position 165 of SEQ ID NO: 1885614
acucuuugcuggcgaacuu

SEQ ID NO: 2355205 - RNA, 19 nt, Artificial Sequence
  Description of Artificial Sequence: Synthetic oligonucleotide
  Antisense strand to SEQ ID NO: 2355204
aaguucgccagcaaagagu

SEQ ID NO: 2355206 - RNA, 19 nt, Artificial Sequence
  Description of Artificial Sequence: Synthetic oligonucleotide
  Sense strand starting at position 305 of SEQ ID NO: 1885614
auguuuaccuguuuauuag

SEQ ID NO: 2355207 - RNA, 19 nt, Artificial Sequence
  Description of Artificial Sequence: Synthetic oligonucleotide
  Antisense strand to SEQ ID NO: 2355206
cuaauaaacagguaaacau

SEQ ID NO: 2355208 - RNA, 19 nt, Artificial Sequence
  Description of Artificial Sequence: Synthetic oligonucleotide
  Sense strand starting at position 306 of SEQ ID NO: 1885614
uguuuaccuguuuauuaga

SEQ ID NO: 2355209 - RNA, 19 nt, Artificial Sequence
  Description of Artificial Sequence: Synthetic oligonucleotide
  Antisense strand to SEQ ID NO: 2355208
ucuaauaaacagguaaaca

SEQ ID NO: 2355210 - RNA, 19 nt, Artificial Sequence
  Description of Artificial Sequence: Synthetic oligonucleotide
  Sense strand starting at position 431 of SEQ ID NO: 1885614
uauguaaagugaucgcugu

SEQ ID NO: 2355211 - RNA, 19 nt, Artificial Sequence
  Description of Artificial Sequence: Synthetic oligonucleotide
  Antisense strand to SEQ ID NO: 2355210
acagcgaucacuuuacaua

SEQ ID NO: 2355212 - RNA, 19 nt, Artificial Sequence
  Description of Artificial Sequence: Synthetic oligonucleotide
  Sense strand starting at position 435 of SEQ ID NO: 1885614
uaaagugaucgcugucuuu

SEQ ID NO: 2355213 - RNA, 19 nt, Artificial Sequence
  Description of Artificial Sequence: Synthetic oligonucleotide
  Antisense strand to SEQ ID NO: 2355212
aaagacagcgaucacuuua

SEQ ID NO: 2355214 - RNA, 19 nt, Artificial Sequence
  Description of Artificial Sequence: Synthetic oligonucleotide
  Sense strand starting at position 755 of SEQ ID NO: 1885614
ggagccugcuucuaaagau

SEQ ID NO: 2355215 - RNA, 19 nt, Artificial Sequence
  Description of Artificial Sequence: Synthetic oligonucleotide
  Antisense strand to SEQ ID NO: 2355214
aucuuuagaagcaggcucc

SEQ ID NO: 2355216 - RNA, 19 nt, Artificial Sequence
  Description of Artificial Sequence: Synthetic oligonucleotide
  Sense strand starting at position 770 of SEQ ID NO: 1885614
agauuauuaccuggugcca

SEQ ID NO: 2355217 - RNA, 19 nt, Artificial Sequence
  Description of Artificial Sequence: Synthetic oligonucleotide
  Antisense strand to SEQ ID NO: 2355216
uggcaccagguaauaaucu

SEQ ID NO: 2355218 - RNA, 19 nt, Artificial Sequence
  Description of Artificial Sequence: Synthetic oligonucleotide
  Sense strand starting at position 806 of SEQ ID NO: 1885614
guccucacauuccuguuaa

SEQ ID NO: 2355219 - RNA, 19 nt, Artificial Sequence
  Description of Artificial Sequence: Synthetic oligonucleotide
  Antisense strand to SEQ ID NO: 2355218
uuaacaggaaugugaggac

SEQ ID NO: 2355220 - RNA, 19 nt, Artificial Sequence
  Description of Artificial Sequence: Synthetic oligonucleotide
  Sense strand starting at position 833 of SEQ ID NO: 1885614
aagugaaucgcgcuccuuu

SEQ ID NO: 2355221 - RNA, 19 nt, Artificial Sequence
  Description of Artificial Sequence: Synthetic oligonucleotide
  Antisense strand to SEQ ID NO: 2355220
aaaggagcgcgauucacuu

SEQ ID NO: 2355222 - RNA, 19 nt, Artificial Sequence
  Description of Artificial Sequence: Synthetic oligonucleotide
  Sense strand starting at position 857 of SEQ ID NO: 1885614
uaccuucucggaggguuua

SEQ ID NO: 2355223 - RNA, 19 nt, Artificial Sequence
  Description of Artificial Sequence: Synthetic oligonucleotide
  Antisense strand to SEQ ID NO: 2355222
uaaacccuccgagaaggua

SEQ ID NO: 2355224 - RNA, 19 nt, Artificial Sequence
  Description of Artificial Sequence: Synthetic oligonucleotide
  Sense strand starting at position 867 of SEQ ID NO: 1885614
gaggguuuaugccuccaau

SEQ ID NO: 2355225 - RNA, 19 nt, Artificial Sequence
  Description of Artificial Sequence: Synthetic oligonucleotide
  Antisense strand to SEQ ID NO: 2355224
auuggaggcauaaacccuc

SEQ ID NO: 2355226 - RNA, 19 nt, Artificial Sequence
  Description of Artificial Sequence: Synthetic oligonucleotide
  Sense strand starting at position 870 of SEQ ID NO: 1885614
gguuuaugccuccaauauu

SEQ ID NO: 2355227 - RNA, 19 nt, Artificial Sequence
  Description of Artificial Sequence: Synthetic oligonucleotide
  Antisense strand to SEQ ID NO: 2355226
aauauuggaggcauaaacc

SEQ ID NO: 2355228 - RNA, 19 nt, Artificial Sequence
  Description of Artificial Sequence: Synthetic oligonucleotide
  Sense strand starting at position 992 of SEQ ID NO: 1885614
gggugacuuuaugguguuu

SEQ ID NO: 2355229 - RNA, 19 nt, Artificial Sequence
  Description of Artificial Sequence: Synthetic oligonucleotide
  Antisense strand to SEQ ID NO: 2355228
aaacaccauaaagucaccc

SEQ ID NO: 2355230 - RNA, 19 nt, Artificial Sequence
  Description of Artificial Sequence: Synthetic oligonucleotide
  Sense strand starting at position 1004 of SEQ ID NO: 1885614
gguguuucaacgugugggu

SEQ ID NO: 2355231 - RNA, 19 nt, Artificial Sequence
  Description of Artificial Sequence: Synthetic oligonucleotide
  Antisense strand to SEQ ID NO: 2355230
acccacacguugaaacacc

SEQ ID NO: 2355232 - RNA, 19 nt, Artificial Sequence
  Description of Artificial Sequence: Synthetic oligonucleotide
  Sense strand starting at position 1026 of SEQ ID NO: 1885614
gacugauuauauuaugggu

SEQ ID NO: 2355233 - RNA, 19 nt, Artificial Sequence
  Description of Artificial Sequence: Synthetic oligonucleotide
  Antisense strand to SEQ ID NO: 2355232
acccauaauauaaucaguc

SEQ ID NO: 2355234 - RNA, 19 nt, Artificial Sequence
  Description of Artificial Sequence: Synthetic oligonucleotide
  Sense strand starting at position 1028 of SEQ ID NO: 1885614
cugauuauauuauggguuu

SEQ ID NO: 2355235 - RNA, 19 nt, Artificial Sequence
  Description of Artificial Sequence: Synthetic oligonucleotide
  Antisense strand to SEQ ID NO: 2355234
aaacccauaauauaaucag

SEQ ID NO: 2355236 - RNA, 19 nt, Artificial Sequence
  Description of Artificial Sequence: Synthetic oligonucleotide
  Sense strand starting at position 1533 of SEQ ID NO: 1885614
cgaugucuuaacgucguga

SEQ ID NO: 2355237 - RNA, 19 nt, Artificial Sequence
  Description of Artificial Sequence: Synthetic oligonucleotide
  Antisense strand to SEQ ID NO: 2355236
ucacgacguuaagacaucg

SEQ ID NO: 2355238 - RNA, 19 nt, Artificial Sequence
  Description of Artificial Sequence: Synthetic oligonucleotide
  Sense strand starting at position 1535 of SEQ ID NO: 1885614
augucuuaacgucgugauc

SEQ ID NO: 2355239 - RNA, 19 nt, Artificial Sequence
  Description of Artificial Sequence: Synthetic oligonucleotide
  Antisense strand to SEQ ID NO: 2355238
gaucacgacguuaagacau

SEQ ID NO: 2355240 - RNA, 19 nt, Artificial Sequence
  Description of Artificial Sequence: Synthetic oligonucleotide
  Sense strand starting at position 1816 of SEQ ID NO: 1885614
gcuuuauuucuucggugca

SEQ ID NO: 2355241 - RNA, 19 nt, Artificial Sequence
  Description of Artificial Sequence: Synthetic oligonucleotide
  Antisense strand to SEQ ID NO: 2355240
ugcaccgaagaaauaaagc

SEQ ID NO: 2355242 - RNA, 19 nt, Artificial Sequence
  Description of Artificial Sequence: Synthetic oligonucleotide
  Sense strand starting at position 1832 of SEQ ID NO: 1885614
gcaaccaacucagaaugaa

SEQ ID NO: 2355243 - RNA, 19 nt, Artificial Sequence
  Description of Artificial Sequence: Synthetic oligonucleotide
  Antisense strand to SEQ ID NO: 2355242
uucauucugaguugguugc

SEQ ID NO: 2355244 - RNA, 19 nt, Artificial Sequence
  Description of Artificial Sequence: Synthetic oligonucleotide
  Sense strand starting at position 3 of SEQ ID NO: 1885615
agugcauucguguauuaau

SEQ ID NO: 2355245 - RNA, 19 nt, Artificial Sequence
  Description of Artificial Sequence: Synthetic oligonucleotide
  Antisense strand to SEQ ID NO: 2355244
auuaauacacgaaugcacu

SEQ ID NO: 2355246 - RNA, 19 nt, Artificial Sequence
  Description of Artificial Sequence: Synthetic oligonucleotide
  Sense strand starting at position 44 of SEQ ID NO: 1885615
cggugagguagguacuauu

SEQ ID NO: 2355247 - RNA, 19 nt, Artificial Sequence
  Description of Artificial Sequence: Synthetic oligonucleotide
  Antisense strand to SEQ ID NO: 2355246
aauaguaccuaccucaccg

SEQ ID NO: 2355248 - RNA, 19 nt, Artificial Sequence
  Description of Artificial Sequence: Synthetic oligonucleotide
  Sense strand starting at position 109 of SEQ ID NO: 1885615
gguggaguuccuuggucua

SEQ ID NO: 2355249 - RNA, 19 nt, Artificial Sequence
  Description of Artificial Sequence: Synthetic oligonucleotide
  Antisense strand to SEQ ID NO: 2355248
uagaccaaggaacuccacc

SEQ ID NO: 2355250 - RNA, 19 nt, Artificial Sequence
  Description of Artificial Sequence: Synthetic oligonucleotide
  Sense strand starting at position 111 of SEQ ID NO: 1885615
uggaguuccuuggucuaca

SEQ ID NO: 2355251 - RNA, 19 nt, Artificial Sequence
  Description of Artificial Sequence: Synthetic oligonucleotide
  Antisense strand to SEQ ID NO: 2355250
uguagaccaaggaacucca

SEQ ID NO: 2355252 - RNA, 19 nt, Artificial Sequence
  Description of Artificial Sequence: Synthetic oligonucleotide
  Sense strand starting at position 231 of SEQ ID NO: 1885615
ggguuugcccuuugaaaug

SEQ ID NO: 2355253 - RNA, 19 nt, Artificial Sequence
  Description of Artificial Sequence: Synthetic oligonucleotide
  Antisense strand to SEQ ID NO: 2355252
cauuucaaagggcaaaccc

SEQ ID NO: 2355254 - RNA, 19 nt, Artificial Sequence
  Description of Artificial Sequence: Synthetic oligonucleotide
  Sense strand starting at position 275 of SEQ ID NO: 1885615
agggcugcuugaguucaaa

SEQ ID NO: 2355255 - RNA, 19 nt, Artificial Sequence
  Description of Artificial Sequence: Synthetic oligonucleotide
  Antisense strand to SEQ ID NO: 2355254
uuugaacucaagcagcccu

SEQ ID NO: 2355256 - RNA, 19 nt, Artificial Sequence
  Description of Artificial Sequence: Synthetic oligonucleotide
  Sense strand starting at position 316 of SEQ ID NO: 1885615
ggagccagcucugugcuaa

SEQ ID NO: 2355257 - RNA, 19 nt, Artificial Sequence
  Description of Artificial Sequence: Synthetic oligonucleotide
  Antisense strand to SEQ ID NO: 2355256
uuagcacagagcuggcucc

SEQ ID NO: 2355258 - RNA, 19 nt, Artificial Sequence
  Description of Artificial Sequence: Synthetic oligonucleotide
  Sense strand starting at position 327 of SEQ ID NO: 1885615
ugugcuaagcguuccauca

SEQ ID NO: 2355259 - RNA, 19 nt, Artificial Sequence
  Description of Artificial Sequence: Synthetic oligonucleotide
  Antisense strand to SEQ ID NO: 2355258
ugauggaacgcuuagcaca

SEQ ID NO: 2355260 - RNA, 19 nt, Artificial Sequence
  Description of Artificial Sequence: Synthetic oligonucleotide
  Sense strand starting at position 407 of SEQ ID NO: 1885615
ggucuucgcccagaaucca

SEQ ID NO: 2355261 - RNA, 19 nt, Artificial Sequence
  Description of Artificial Sequence: Synthetic oligonucleotide
  Antisense strand to SEQ ID NO: 2355260
uggauucugggcgaagacc

SEQ ID NO: 2355262 - RNA, 19 nt, Artificial Sequence
  Description of Artificial Sequence: Synthetic oligonucleotide
  Sense strand starting at position 719 of SEQ ID NO: 1885615
ugggcauuacuucgggaag

SEQ ID NO: 2355263 - RNA, 19 nt, Artificial Sequence
  Description of Artificial Sequence: Synthetic oligonucleotide
  Antisense strand to SEQ ID NO: 2355262
cuucccgaaguaaugccca

SEQ ID NO: 2355264 - RNA, 19 nt, Artificial Sequence
  Description of Artificial Sequence: Synthetic oligonucleotide
  Sense strand starting at position 766 of SEQ ID NO: 1885615
gcggguggcaaaugaauau

SEQ ID NO: 2355265 - RNA, 19 nt, Artificial Sequence
  Description of Artificial Sequence: Synthetic oligonucleotide
  Antisense strand to SEQ ID NO: 2355264
auauucauuugccacccgc

SEQ ID NO: 2355266 - RNA, 19 nt, Artificial Sequence
  Description of Artificial Sequence: Synthetic oligonucleotide
  Sense strand starting at position 860 of SEQ ID NO: 1885615
gcaagcuguggcgaaacaa

SEQ ID NO: 2355267 - RNA, 19 nt, Artificial Sequence
  Description of Artificial Sequence: Synthetic oligonucleotide
  Antisense strand to SEQ ID NO: 2355266
uuguuucgccacagcuugc

SEQ ID NO: 2355268 - RNA, 19 nt, Artificial Sequence
  Description of Artificial Sequence: Synthetic oligonucleotide
  Sense strand starting at position 2045 of SEQ ID NO: 1885615
ggcaaucagguagguagaa

SEQ ID NO: 2355269 - RNA, 19 nt, Artificial Sequence
  Description of Artificial Sequence: Synthetic oligonucleotide
  Antisense strand to SEQ ID NO: 2355268
uucuaccuaccugauugcc

SEQ ID NO: 2355270 - RNA, 19 nt, Artificial Sequence
  Description of Artificial Sequence: Synthetic oligonucleotide
  Sense strand starting at position 2057 of SEQ ID NO: 1885615
gguagaacaguuugugaau

SEQ ID NO: 2355271 - RNA, 19 nt, Artificial Sequence
  Description of Artificial Sequence: Synthetic oligonucleotide
  Antisense strand to SEQ ID NO: 2355270
auucacaaacuguucuacc

SEQ ID NO: 2355272 - RNA, 19 nt, Artificial Sequence
  Description of Artificial Sequence: Synthetic oligonucleotide
  Sense strand starting at position 2104 of SEQ ID NO: 1885615
cuaacuauuggguguggua

SEQ ID NO: 2355273 - RNA, 19 nt, Artificial Sequence
  Description of Artificial Sequence: Synthetic oligonucleotide
  Antisense strand to SEQ ID NO: 2355272
uaccacacccaauaguuag

SEQ ID NO: 2355274 - RNA, 19 nt, Artificial Sequence
  Description of Artificial Sequence: Synthetic oligonucleotide
  Sense strand starting at position 2135 of SEQ ID NO: 1885615
cugauuguccaacaguguu

SEQ ID NO: 2355275 - RNA, 19 nt, Artificial Sequence
  Description of Artificial Sequence: Synthetic oligonucleotide
  Antisense strand to SEQ ID NO: 2355274
aacacuguuggacaaucag

SEQ ID NO: 2355276 - RNA, 19 nt, Artificial Sequence
  Description of Artificial Sequence: Synthetic oligonucleotide
  Sense strand starting at position 2324 of SEQ ID NO: 1885615
gugucaguccaccaacuua

SEQ ID NO: 2355277 - RNA, 19 nt, Artificial Sequence
  Description of Artificial Sequence: Synthetic oligonucleotide
  Antisense strand to SEQ ID NO: 2355276
uaaguugguggacugacac

SEQ ID NO: 2355278 - RNA, 19 nt, Artificial Sequence
  Description of Artificial Sequence: Synthetic oligonucleotide
  Sense strand starting at position 2355 of SEQ ID NO: 1885615
caggaaugcucuucugucu

SEQ ID NO: 2355279 - RNA, 19 nt, Artificial Sequence
  Description of Artificial Sequence: Synthetic oligonucleotide
  Antisense strand to SEQ ID NO: 2355278
agacagaagagcauuccug

SEQ ID NO: 2355280 - RNA, 19 nt, Artificial Sequence
  Description of Artificial Sequence: Synthetic oligonucleotide
  Sense strand starting at position 2443 of SEQ ID NO: 1885615
ccagcuuuccuagagugca

SEQ ID NO: 2355281 - RNA, 19 nt, Artificial Sequence
  Description of Artificial Sequence: Synthetic oligonucleotide
  Antisense strand to SEQ ID NO: 2355280
ugcacucuaggaaagcugg

SEQ ID NO: 2355282 - RNA, 19 nt, Artificial Sequence
  Description of Artificial Sequence: Synthetic oligonucleotide
  Sense strand starting at position 2618 of SEQ ID NO: 1885615
guagaaaucucacucugag

SEQ ID NO: 2355283 - RNA, 19 nt, Artificial Sequence
  Description of Artificial Sequence: Synthetic oligonucleotide
  Antisense strand to SEQ ID NO: 2355282
cucagagugagauuucuac

SEQ ID NO: 2355284 - RNA, 19 nt, Artificial Sequence
  Description of Artificial Sequence: Synthetic oligonucleotide
  Sense strand starting at position 2634 of SEQ ID NO: 1885615
gaguuuccauggccuagaa

SEQ ID NO: 2355285 - RNA, 19 nt, Artificial Sequence
  Description of Artificial Sequence: Synthetic oligonucleotide
  Antisense strand to SEQ ID NO: 2355284
uucuaggccauggaaacuc

SEQ ID NO: 2355286 - RNA, 19 nt, Artificial Sequence
  Description of Artificial Sequence: Synthetic oligonucleotide
  Sense strand starting at position 2681 of SEQ ID NO: 1885615
cuuucuuucuuauuggaag

SEQ ID NO: 2355287 - RNA, 19 nt, Artificial Sequence
  Description of Artificial Sequence: Synthetic oligonucleotide
  Antisense strand to SEQ ID NO: 2355286
cuuccaauaagaaagaaag

SEQ ID NO: 2355288 - RNA, 19 nt, Artificial Sequence
  Description of Artificial Sequence: Synthetic oligonucleotide
  Sense strand starting at position 2720 of SEQ ID NO: 1885615
aucucaaugugguuaugau

SEQ ID NO: 2355289 - RNA, 19 nt, Artificial Sequence
  Description of Artificial Sequence: Synthetic oligonucleotide
  Antisense strand to SEQ ID NO: 2355288
aucauaaccacauugagau

SEQ ID NO: 2355290 - RNA, 19 nt, Artificial Sequence
  Description of Artificial Sequence: Synthetic oligonucleotide
  Sense strand starting at position 2721 of SEQ ID NO: 1885615
ucucaaugugguuaugauc

SEQ ID NO: 2355291 - RNA, 19 nt, Artificial Sequence
  Description of Artificial Sequence: Synthetic oligonucleotide
  Antisense strand to SEQ ID NO: 2355290
gaucauaaccacauugaga

SEQ ID NO: 2355292 - RNA, 19 nt, Artificial Sequence
  Description of Artificial Sequence: Synthetic oligonucleotide
  Sense strand starting at position 2730 of SEQ ID NO: 1885615
gguuaugauccagaaagcu

SEQ ID NO: 2355293 - RNA, 19 nt, Artificial Sequence
  Description of Artificial Sequence: Synthetic oligonucleotide
  Antisense strand to SEQ ID NO: 2355292
agcuuucuggaucauaacc

SEQ ID NO: 2355294 - RNA, 19 nt, Artificial Sequence
  Description of Artificial Sequence: Synthetic oligonucleotide
  Sense strand starting at position 2775 of SEQ ID NO: 1885615
cuccaaauacucgaagcaa

SEQ ID NO: 2355295 - RNA, 19 nt, Artificial Sequence
  Description of Artificial Sequence: Synthetic oligonucleotide
  Antisense strand to SEQ ID NO: 2355294
uugcuucgaguauuuggag

SEQ ID NO: 2355296 - RNA, 19 nt, Artificial Sequence
  Description of Artificial Sequence: Synthetic oligonucleotide
  Sense strand starting at position 2789 of SEQ ID NO: 1885615
agcaaauauuuaugggaau

SEQ ID NO: 2355297 - RNA, 19 nt, Artificial Sequence
  Description of Artificial Sequence: Synthetic oligonucleotide
  Antisense strand to SEQ ID NO: 2355296
auucccauaaauauuugcu

SEQ ID NO: 2355298 - RNA, 19 nt, Artificial Sequence
  Description of Artificial Sequence: Synthetic oligonucleotide
  Sense strand starting at position 2790 of SEQ ID NO: 1885615
gcaaauauuuaugggaaua

SEQ ID NO: 2355299 - RNA, 19 nt, Artificial Sequence
  Description of Artificial Sequence: Synthetic oligonucleotide
  Antisense strand to SEQ ID NO: 2355298
uauucccauaaauauuugc

SEQ ID NO: 2355300 - RNA, 19 nt, Artificial Sequence
  Description of Artificial Sequence: Synthetic oligonucleotide
  Sense strand starting at position 2877 of SEQ ID NO: 1885615
cuggcuguguguuuaacaa

SEQ ID NO: 2355301 - RNA, 19 nt, Artificial Sequence
  Description of Artificial Sequence: Synthetic oligonucleotide
  Antisense strand to SEQ ID NO: 2355300
uuguuaaacacacagccag

SEQ ID NO: 2355302 - RNA, 19 nt, Artificial Sequence
  Description of Artificial Sequence: Synthetic oligonucleotide
  Sense strand starting at position 2901 of SEQ ID NO: 1885615
ugguaauccugucucacac

SEQ ID NO: 2355303 - RNA, 19 nt, Artificial Sequence
  Description of Artificial Sequence: Synthetic oligonucleotide
  Antisense strand to SEQ ID NO: 2355302
gugugagacaggauuacca

SEQ ID NO: 2355304 - RNA, 19 nt, Artificial Sequence
  Description of Artificial Sequence: Synthetic oligonucleotide
  Sense strand starting at position 3091 of SEQ ID NO: 1885615
caggguggaucucaaagua

SEQ ID NO: 2355305 - RNA, 19 nt, Artificial Sequence
  Description of Artificial Sequence: Synthetic oligonucleotide
  Antisense strand to SEQ ID NO: 2355304
uacuuugagauccacccug

SEQ ID NO: 2355306 - RNA, 19 nt, Artificial Sequence
  Description of Artificial Sequence: Synthetic oligonucleotide
  Sense strand starting at position 3273 of SEQ ID NO: 1885615
ucuggauugccugaagcau

SEQ ID NO: 2355307 - RNA, 19 nt, Artificial Sequence
  Description of Artificial Sequence: Synthetic oligonucleotide
  Antisense strand to SEQ ID NO: 2355306
augcuucaggcaauccaga

SEQ ID NO: 2355308 - RNA, 19 nt, Artificial Sequence
  Description of Artificial Sequence: Synthetic oligonucleotide
  Sense strand starting at position 3432 of SEQ ID NO: 1885615
gggagauguuucucaggac

SEQ ID NO: 2355309 - RNA, 19 nt, Artificial Sequence
  Description of Artificial Sequence: Synthetic oligonucleotide
  Antisense strand to SEQ ID NO: 2355308
guccugagaaacaucuccc

SEQ ID NO: 2355310 - RNA, 19 nt, Artificial Sequence
  Description of Artificial Sequence: Synthetic oligonucleotide
  Sense strand starting at position 3433 of SEQ ID NO: 1885615
ggagauguuucucaggacu

SEQ ID NO: 2355311 - RNA, 19 nt, Artificial Sequence
  Description of Artificial Sequence: Synthetic oligonucleotide
  Antisense strand to SEQ ID NO: 2355310
aguccugagaaacaucucc

SEQ ID NO: 2355312 - RNA, 19 nt, Artificial Sequence
  Description of Artificial Sequence: Synthetic oligonucleotide
  Sense strand starting at position 3548 of SEQ ID NO: 1885615
agaagaaacauuggucgua

SEQ ID NO: 2355313 - RNA, 19 nt, Artificial Sequence
  Description of Artificial Sequence: Synthetic oligonucleotide
  Antisense strand to SEQ ID NO: 2355312
uacgaccaauguuucuucu

SEQ ID NO: 2355314 - RNA, 19 nt, Artificial Sequence
  Description of Artificial Sequence: Synthetic oligonucleotide
  Sense strand starting at position 3550 of SEQ ID NO: 1885615
aagaaacauuggucguaua

SEQ ID NO: 2355315 - RNA, 19 nt, Artificial Sequence
  Description of Artificial Sequence: Synthetic oligonucleotide
  Antisense strand to SEQ ID NO: 2355314
uauacgaccaauguuucuu

SEQ ID NO: 2355316 - RNA, 19 nt, Artificial Sequence
  Description of Artificial Sequence: Synthetic oligonucleotide
  Sense strand starting at position 3551 of SEQ ID NO: 1885615
agaaacauuggucguauag

SEQ ID NO: 2355317 - RNA, 19 nt, Artificial Sequence
  Description of Artificial Sequence: Synthetic oligonucleotide
  Antisense strand to SEQ ID NO: 2355316
cuauacgaccaauguuucu

SEQ ID NO: 2355318 - RNA, 19 nt, Artificial Sequence
  Description of Artificial Sequence: Synthetic oligonucleotide
  Sense strand starting at position 3557 of SEQ ID NO: 1885615
auuggucguauagaaugau

SEQ ID NO: 2355319 - RNA, 19 nt, Artificial Sequence
  Description of Artificial Sequence: Synthetic oligonucleotide
  Antisense strand to SEQ ID NO: 2355318
aucauucuauacgaccaau

SEQ ID NO: 2355320 - RNA, 19 nt, Artificial Sequence
  Description of Artificial Sequence: Synthetic oligonucleotide
  Sense strand starting at position 3741 of SEQ ID NO: 1885615
uuacuuguuuguuugguga

SEQ ID NO: 2355321 - RNA, 19 nt, Artificial Sequence
  Description of Artificial Sequence: Synthetic oligonucleotide
  Antisense strand to SEQ ID NO: 2355320
ucaccaaacaaacaaguaa

SEQ ID NO: 2355322 - RNA, 19 nt, Artificial Sequence
  Description of Artificial Sequence: Synthetic oligonucleotide
  Sense strand starting at position 3744 of SEQ ID NO: 1885615
cuuguuuguuuggugaguu

SEQ ID NO: 2355323 - RNA, 19 nt, Artificial Sequence
  Description of Artificial Sequence: Synthetic oligonucleotide
  Antisense strand to SEQ ID NO: 2355322
aacucaccaaacaaacaag

SEQ ID NO: 2355324 - RNA, 19 nt, Artificial Sequence
  Description of Artificial Sequence: Synthetic oligonucleotide
  Sense strand starting at position 3 of SEQ ID NO: 1885616
gcugacuucucccagaaug

SEQ ID NO: 2355325 - RNA, 19 nt, Artificial Sequence
  Description of Artificial Sequence: Synthetic oligonucleotide
  Antisense strand to SEQ ID NO: 2355324
cauucugggagaagucagc

SEQ ID NO: 2355326 - RNA, 19 nt, Artificial Sequence
  Description of Artificial Sequence: Synthetic oligonucleotide
  Sense strand starting at position 47 of SEQ ID NO: 1885616
gucacaaugucucuuauga

SEQ ID NO: 2355327 - RNA, 19 nt, Artificial Sequence
  Description of Artificial Sequence: Synthetic oligonucleotide
  Antisense strand to SEQ ID NO: 2355326
ucauaagagacauugugac

SEQ ID NO: 2355328 - RNA, 19 nt, Artificial Sequence
  Description of Artificial Sequence: Synthetic oligonucleotide
  Sense strand starting at position 54 of SEQ ID NO: 1885616
ugucucuuaugacuauauu

SEQ ID NO: 2355329 - RNA, 19 nt, Artificial Sequence
  Description of Artificial Sequence: Synthetic oligonucleotide
  Antisense strand to SEQ ID NO: 2355328
aauauagucauaagagaca

SEQ ID NO: 2355330 - RNA, 19 nt, Artificial Sequence
  Description of Artificial Sequence: Synthetic oligonucleotide
  Sense strand starting at position 55 of SEQ ID NO: 1885616
gucucuuaugacuauauua

SEQ ID NO: 2355331 - RNA, 19 nt, Artificial Sequence
  Description of Artificial Sequence: Synthetic oligonucleotide
  Antisense strand to SEQ ID NO: 2355330
uaauauagucauaagagac

SEQ ID NO: 2355332 - RNA, 19 nt, Artificial Sequence
  Description of Artificial Sequence: Synthetic oligonucleotide
  Sense strand starting at position 200 of SEQ ID NO: 1885616
gaaggugcucauuggugaa

SEQ ID NO: 2355333 - RNA, 19 nt, Artificial Sequence
  Description of Artificial Sequence: Synthetic oligonucleotide
  Antisense strand to SEQ ID NO: 2355332
uucaccaaugagcaccuuc

SEQ ID NO: 2355334 - RNA, 19 nt, Artificial Sequence
  Description of Artificial Sequence: Synthetic oligonucleotide
  Sense strand starting at position 204 of SEQ ID NO: 1885616
gugcucauuggugaaacaa

SEQ ID NO: 2355335 - RNA, 19 nt, Artificial Sequence
  Description of Artificial Sequence: Synthetic oligonucleotide
  Antisense strand to SEQ ID NO: 2355334
uuguuucaccaaugagcac

SEQ ID NO: 2355336 - RNA, 19 nt, Artificial Sequence
  Description of Artificial Sequence: Synthetic oligonucleotide
  Sense strand starting at position 218 of SEQ ID NO: 1885616
aacaaugagugggaaagaa

SEQ ID NO: 2355337 - RNA, 19 nt, Artificial Sequence
  Description of Artificial Sequence: Synthetic oligonucleotide
  Antisense strand to SEQ ID NO: 2355336
uucuuucccacucauuguu

SEQ ID NO: 2355338 - RNA, 19 nt, Artificial Sequence
  Description of Artificial Sequence: Synthetic oligonucleotide
  Sense strand starting at position 272 of SEQ ID NO: 1885616
cgcagauguuucuuggcuu

SEQ ID NO: 2355339 - RNA, 19 nt, Artificial Sequence
  Description of Artificial Sequence: Synthetic oligonucleotide
  Antisense strand to SEQ ID NO: 2355338
aagccaagaaacaucugcg

SEQ ID NO: 2355340 - RNA, 19 nt, Artificial Sequence
  Description of Artificial Sequence: Synthetic oligonucleotide
  Sense strand starting at position 400 of SEQ ID NO: 1885616
ggcccacucuagucaagaa

SEQ ID NO: 2355341 - RNA, 19 nt, Artificial Sequence
  Description of Artificial Sequence: Synthetic oligonucleotide
  Antisense strand to SEQ ID NO: 2355340
uucuugacuagagugggcc

SEQ ID NO: 2355342 - RNA, 19 nt, Artificial Sequence
  Description of Artificial Sequence: Synthetic oligonucleotide
  Sense strand starting at position 427 of SEQ ID NO: 1885616
gauuacaacugcgaagacu

SEQ ID NO: 2355343 - RNA, 19 nt, Artificial Sequence
  Description of Artificial Sequence: Synthetic oligonucleotide
  Antisense strand to SEQ ID NO: 2355342
agucuucgcaguuguaauc

SEQ ID NO: 2355344 - RNA, 19 nt, Artificial Sequence
  Description of Artificial Sequence: Synthetic oligonucleotide
  Sense strand starting at position 552 of SEQ ID NO: 1885616
ugccaucagcucugcaaua

SEQ ID NO: 2355345 - RNA, 19 nt, Artificial Sequence
  Description of Artificial Sequence: Synthetic oligonucleotide
  Antisense strand to SEQ ID NO: 2355344
uauugcagagcugauggca

SEQ ID NO: 2355346 - RNA, 19 nt, Artificial Sequence
  Description of Artificial Sequence: Synthetic oligonucleotide
  Sense strand starting at position 610 of SEQ ID NO: 1885616
gagacacaaugaugugaau

SEQ ID NO: 2355347 - RNA, 19 nt, Artificial Sequence
  Description of Artificial Sequence: Synthetic oligonucleotide
  Antisense strand to SEQ ID NO: 2355346
auucacaucauugugucuc

SEQ ID NO: 2355348 - RNA, 19 nt, Artificial Sequence
  Description of Artificial Sequence: Synthetic oligonucleotide
  Sense strand starting at position 619 of SEQ ID NO: 1885616
ugaugugaauaccaggaga

SEQ ID NO: 2355349 - RNA, 19 nt, Artificial Sequence
  Description of Artificial Sequence: Synthetic oligonucleotide
  Antisense strand to SEQ ID NO: 2355348
ucuccugguauucacauca

SEQ ID NO: 2355350 - RNA, 19 nt, Artificial Sequence
  Description of Artificial Sequence: Synthetic oligonucleotide
  Sense strand starting at position 704 of SEQ ID NO: 1885616
gagacagacucccauaugu

SEQ ID NO: 2355351 - RNA, 19 nt, Artificial Sequence
  Description of Artificial Sequence: Synthetic oligonucleotide
  Antisense strand to SEQ ID NO: 2355350
acauaugggagucugucuc

SEQ ID NO: 2355352 - RNA, 19 nt, Artificial Sequence
  Description of Artificial Sequence: Synthetic oligonucleotide
  Sense strand starting at position 787 of SEQ ID NO: 1885616
aauauagaguguggagaau

SEQ ID NO: 2355353 - RNA, 19 nt, Artificial Sequence
  Description of Artificial Sequence: Synthetic oligonucleotide
  Antisense strand to SEQ ID NO: 2355352
auucuccacacucuauauu

SEQ ID NO: 2355354 - RNA, 19 nt, Artificial Sequence
  Description of Artificial Sequence: Synthetic oligonucleotide
  Sense strand starting at position 892 of SEQ ID NO: 1885616
ucaacucaagccuagugau

SEQ ID NO: 2355355 - RNA, 19 nt, Artificial Sequence
  Description of Artificial Sequence: Synthetic oligonucleotide
  Antisense strand to SEQ ID NO: 2355354
aucacuaggcuugaguuga

SEQ ID NO: 2355356 - RNA, 19 nt, Artificial Sequence
  Description of Artificial Sequence: Synthetic oligonucleotide
  Sense strand starting at position 969 of SEQ ID NO: 1885616
acugcauuaggaugaguga

SEQ ID NO: 2355357 - RNA, 19 nt, Artificial Sequence
  Description of Artificial Sequence: Synthetic oligonucleotide
  Antisense strand to SEQ ID NO: 2355356
ucacucauccuaaugcagu

SEQ ID NO: 2355358 - RNA, 19 nt, Artificial Sequence
  Description of Artificial Sequence: Synthetic oligonucleotide
  Sense strand starting at position 993 of SEQ ID NO: 1885616
cugugugaguucuucccau

SEQ ID NO: 2355359 - RNA, 19 nt, Artificial Sequence
  Description of Artificial Sequence: Synthetic oligonucleotide
  Antisense strand to SEQ ID NO: 2355358
augggaagaacucacacag

SEQ ID NO: 2355360 - RNA, 19 nt, Artificial Sequence
  Description of Artificial Sequence: Synthetic oligonucleotide
  Sense strand starting at position 999 of SEQ ID NO: 1885616
gaguucuucccaugggcca

SEQ ID NO: 2355361 - RNA, 19 nt, Artificial Sequence
  Description of Artificial Sequence: Synthetic oligonucleotide
  Antisense strand to SEQ ID NO: 2355360
uggcccaugggaagaacuc

SEQ ID NO: 2355362 - RNA, 19 nt, Artificial Sequence
  Description of Artificial Sequence: Synthetic oligonucleotide
  Sense strand starting at position 1124 of SEQ ID NO: 1885616
ggaagaggaugcuggauuu

SEQ ID NO: 2355363 - RNA, 19 nt, Artificial Sequence
  Description of Artificial Sequence: Synthetic oligonucleotide
  Antisense strand to SEQ ID NO: 2355362
aaauccagcauccucuucc

SEQ ID NO: 2355364 - RNA, 19 nt, Artificial Sequence
  Description of Artificial Sequence: Synthetic oligonucleotide
  Sense strand starting at position 1157 of SEQ ID NO: 1885616
uggagucauagcuguaccu

SEQ ID NO: 2355365 - RNA, 19 nt, Artificial Sequence
  Description of Artificial Sequence: Synthetic oligonucleotide
  Antisense strand to SEQ ID NO: 2355364
agguacagcuaugacucca

SEQ ID NO: 2355366 - RNA, 19 nt, Artificial Sequence
  Description of Artificial Sequence: Synthetic oligonucleotide
  Sense strand starting at position 1159 of SEQ ID NO: 1885616
gagucauagcuguaccuga

SEQ ID NO: 2355367 - RNA, 19 nt, Artificial Sequence
  Description of Artificial Sequence: Synthetic oligonucleotide
  Antisense strand to SEQ ID NO: 2355366
ucagguacagcuaugacuc

SEQ ID NO: 2355368 - RNA, 19 nt, Artificial Sequence
  Description of Artificial Sequence: Synthetic oligonucleotide
  Sense strand starting at position 1533 of SEQ ID NO: 1885616
augggaacuucugaagaac

SEQ ID NO: 2355369 - RNA, 19 nt, Artificial Sequence
  Description of Artificial Sequence: Synthetic oligonucleotide
  Antisense strand to SEQ ID NO: 2355368
guucuucagaaguucccau

SEQ ID NO: 2355370 - RNA, 19 nt, Artificial Sequence
  Description of Artificial Sequence: Synthetic oligonucleotide
  Sense strand starting at position 1811 of SEQ ID NO: 1885616
agauuucucuuugaagaaa

SEQ ID NO: 2355371 - RNA, 19 nt, Artificial Sequence
  Description of Artificial Sequence: Synthetic oligonucleotide
  Antisense strand to SEQ ID NO: 2355370
uuucuucaaagagaaaucu

SEQ ID NO: 2355372 - RNA, 19 nt, Artificial Sequence
  Description of Artificial Sequence: Synthetic oligonucleotide
  Sense strand starting at position 1853 of SEQ ID NO: 1885616
uuggguggcugcuuuaaau

SEQ ID NO: 2355373 - RNA, 19 nt, Artificial Sequence
  Description of Artificial Sequence: Synthetic oligonucleotide
  Antisense strand to SEQ ID NO: 2355372
auuuaaagcagccacccaa

SEQ ID NO: 2355374 - RNA, 19 nt, Artificial Sequence
  Description of Artificial Sequence: Synthetic oligonucleotide
  Sense strand starting at position 1866 of SEQ ID NO: 1885616
uuaaaucucuaagucgaua

SEQ ID NO: 2355375 - RNA, 19 nt, Artificial Sequence
  Description of Artificial Sequence: Synthetic oligonucleotide
  Antisense strand to SEQ ID NO: 2355374
uaucgacuuagagauuuaa

SEQ ID NO: 2355376 - RNA, 19 nt, Artificial Sequence
  Description of Artificial Sequence: Synthetic oligonucleotide
  Sense strand starting at position 1881 of SEQ ID NO: 1885616
gauacuggauuucgugaca

SEQ ID NO: 2355377 - RNA, 19 nt, Artificial Sequence
  Description of Artificial Sequence: Synthetic oligonucleotide
  Antisense strand to SEQ ID NO: 2355376
ugucacgaaauccaguauc

SEQ ID NO: 2355378 - RNA, 19 nt, Artificial Sequence
  Description of Artificial Sequence: Synthetic oligonucleotide
  Sense strand starting at position 1968 of SEQ ID NO: 1885616
ggaaaugcuucccuugcuu

SEQ ID NO: 2355379 - RNA, 19 nt, Artificial Sequence
  Description of Artificial Sequence: Synthetic oligonucleotide
  Antisense strand to SEQ ID NO: 2355378
aagcaagggaagcauuucc

SEQ ID NO: 2355380 - RNA, 19 nt, Artificial Sequence
  Description of Artificial Sequence: Synthetic oligonucleotide
  Sense strand starting at position 2021 of SEQ ID NO: 1885616
gaguuacauguugguucca

SEQ ID NO: 2355381 - RNA, 19 nt, Artificial Sequence
  Description of Artificial Sequence: Synthetic oligonucleotide
  Antisense strand to SEQ ID NO: 2355380
uggaaccaacauguaacuc

SEQ ID NO: 2355382 - RNA, 19 nt, Artificial Sequence
  Description of Artificial Sequence: Synthetic oligonucleotide
  Sense strand starting at position 2051 of SEQ ID NO: 1885616
agggauugguuucaccgaa

SEQ ID NO: 2355383 - RNA, 19 nt, Artificial Sequence
  Description of Artificial Sequence: Synthetic oligonucleotide
  Antisense strand to SEQ ID NO: 2355382
uucggugaaaccaaucccu

SEQ ID NO: 2355384 - RNA, 19 nt, Artificial Sequence
  Description of Artificial Sequence: Synthetic oligonucleotide
  Sense strand starting at position 2185 of SEQ ID NO: 1885616
gaagaauguuuacuauguu

SEQ ID NO: 2355385 - RNA, 19 nt, Artificial Sequence
  Description of Artificial Sequence: Synthetic oligonucleotide
  Antisense strand to SEQ ID NO: 2355384
aacauaguaaacauucuuc

SEQ ID NO: 2355386 - RNA, 19 nt, Artificial Sequence
  Description of Artificial Sequence: Synthetic oligonucleotide
  Sense strand starting at position 2348 of SEQ ID NO: 1885616
gaaacuuccugggaggaua

SEQ ID NO: 2355387 - RNA, 19 nt, Artificial Sequence
  Description of Artificial Sequence: Synthetic oligonucleotide
  Antisense strand to SEQ ID NO: 2355386
uauccucccaggaaguuuc

SEQ ID NO: 2355388 - RNA, 19 nt, Artificial Sequence
  Description of Artificial Sequence: Synthetic oligonucleotide
  Sense strand starting at position 2366 of SEQ ID NO: 1885616
auagcugaccugggaacaa

SEQ ID NO: 2355389 - RNA, 19 nt, Artificial Sequence
  Description of Artificial Sequence: Synthetic oligonucleotide
  Antisense strand to SEQ ID NO: 2355388
uuguucccaggucagcuau

SEQ ID NO: 2355390 - RNA, 19 nt, Artificial Sequence
  Description of Artificial Sequence: Synthetic oligonucleotide
  Sense strand starting at position 2395 of SEQ ID NO: 1885616
uuugaaagcuuugugcaac

SEQ ID NO: 2355391 - RNA, 19 nt, Artificial Sequence
  Description of Artificial Sequence: Synthetic oligonucleotide
  Antisense strand to SEQ ID NO: 2355390
guugcacaaagcuuucaaa

SEQ ID NO: 2355392 - RNA, 19 nt, Artificial Sequence
  Description of Artificial Sequence: Synthetic oligonucleotide
  Sense strand starting at position 2474 of SEQ ID NO: 1885616
gggaacaguucugcuaaac

SEQ ID NO: 2355393 - RNA, 19 nt, Artificial Sequence
  Description of Artificial Sequence: Synthetic oligonucleotide
  Antisense strand to SEQ ID NO: 2355392
guuuagcagaacuguuccc

SEQ ID NO: 2355394 - RNA, 19 nt, Artificial Sequence
  Description of Artificial Sequence: Synthetic oligonucleotide
  Sense strand starting at position 2530 of SEQ ID NO: 1885616
ugauaaguccuuuaaaugu

SEQ ID NO: 2355395 - RNA, 19 nt, Artificial Sequence
  Description of Artificial Sequence: Synthetic oligonucleotide
  Antisense strand to SEQ ID NO: 2355394
acauuuaaaggacuuauca

SEQ ID NO: 2355396 - RNA, 19 nt, Artificial Sequence
  Description of Artificial Sequence: Synthetic oligonucleotide
  Sense strand starting at position 2619 of SEQ ID NO: 1885616
gggacuagcucuguccuuu

SEQ ID NO: 2355397 - RNA, 19 nt, Artificial Sequence
  Description of Artificial Sequence: Synthetic oligonucleotide
  Antisense strand to SEQ ID NO: 2355396
aaaggacagagcuaguccc

SEQ ID NO: 2355398 - RNA, 19 nt, Artificial Sequence
  Description of Artificial Sequence: Synthetic oligonucleotide
  Sense strand starting at position 3232 of SEQ ID NO: 1885616
uccuguuucucuguauuau

SEQ ID NO: 2355399 - RNA, 19 nt, Artificial Sequence
  Description of Artificial Sequence: Synthetic oligonucleotide
  Antisense strand to SEQ ID NO: 2355398
auaauacagagaaacagga

SEQ ID NO: 2355400 - RNA, 19 nt, Artificial Sequence
  Description of Artificial Sequence: Synthetic oligonucleotide
  Sense strand starting at position 3333 of SEQ ID NO: 1885616
agagaaggcuccuaacacu

SEQ ID NO: 2355401 - RNA, 19 nt, Artificial Sequence
  Description of Artificial Sequence: Synthetic oligonucleotide
  Antisense strand to SEQ ID NO: 2355400
aguguuaggagccuucucu

SEQ ID NO: 2355402 - RNA, 19 nt, Artificial Sequence
  Description of Artificial Sequence: Synthetic oligonucleotide
  Sense strand starting at position 3929 of SEQ ID NO: 1885616
agacaaucugccugccaca

SEQ ID NO: 2355403 - RNA, 19 nt, Artificial Sequence
  Description of Artificial Sequence: Synthetic oligonucleotide
  Antisense strand to SEQ ID NO: 2355402
uguggcaggcagauugucu

SEQ ID NO: 2355404 - RNA, 19 nt, Artificial Sequence
  Description of Artificial Sequence: Synthetic oligonucleotide
  Sense strand starting at position 18 of SEQ ID NO: 1885617
uugaaugcugaaugaauua

SEQ ID NO: 2355405 - RNA, 19 nt, Artificial Sequence
  Description of Artificial Sequence: Synthetic oligonucleotide
  Antisense strand to SEQ ID NO: 2355404
uaauucauucagcauucaa

SEQ ID NO: 2355406 - RNA, 19 nt, Artificial Sequence
  Description of Artificial Sequence: Synthetic oligonucleotide
  Sense strand starting at position 123 of SEQ ID NO: 1885617
gagggacccucucacauuu

SEQ ID NO: 2355407 - RNA, 19 nt, Artificial Sequence
  Description of Artificial Sequence: Synthetic oligonucleotide
  Antisense strand to SEQ ID NO: 2355406
aaaugugagagggucccuc

SEQ ID NO: 2355408 - RNA, 19 nt, Artificial Sequence
  Description of Artificial Sequence: Synthetic oligonucleotide
  Sense strand starting at position 139 of SEQ ID NO: 1885617
uuuccauccuguuugguua

SEQ ID NO: 2355409 - RNA, 19 nt, Artificial Sequence
  Description of Artificial Sequence: Synthetic oligonucleotide
  Antisense strand to SEQ ID NO: 2355408
uaaccaaacaggauggaaa

SEQ ID NO: 2355410 - RNA, 19 nt, Artificial Sequence
  Description of Artificial Sequence: Synthetic oligonucleotide
  Sense strand starting at position 151 of SEQ ID NO: 1885617
uugguuaggccauguaguu

SEQ ID NO: 2355411 - RNA, 19 nt, Artificial Sequence
  Description of Artificial Sequence: Synthetic oligonucleotide
  Antisense strand to SEQ ID NO: 2355410
aacuacauggccuaaccaa

SEQ ID NO: 2355412 - RNA, 19 nt, Artificial Sequence
  Description of Artificial Sequence: Synthetic oligonucleotide
  Sense strand starting at position 160 of SEQ ID NO: 1885617
ccauguaguucugaugcuu

SEQ ID NO: 2355413 - RNA, 19 nt, Artificial Sequence
  Description of Artificial Sequence: Synthetic oligonucleotide
  Antisense strand to SEQ ID NO: 2355412
aagcaucagaacuacaugg

SEQ ID NO: 2355414 - RNA, 19 nt, Artificial Sequence
  Description of Artificial Sequence: Synthetic oligonucleotide
  Sense strand starting at position 261 of SEQ ID NO: 1885617
aagggauauugccaggucu

SEQ ID NO: 2355415 - RNA, 19 nt, Artificial Sequence
  Description of Artificial Sequence: Synthetic oligonucleotide
  Antisense strand to SEQ ID NO: 2355414
agaccuggcaauaucccuu

SEQ ID NO: 2355416 - RNA, 19 nt, Artificial Sequence
  Description of Artificial Sequence: Synthetic oligonucleotide
  Sense strand starting at position 488 of SEQ ID NO: 1885617
uuucuuaucccauguagca

SEQ ID NO: 2355417 - RNA, 19 nt, Artificial Sequence
  Description of Artificial Sequence: Synthetic oligonucleotide
  Antisense strand to SEQ ID NO: 2355416
ugcuacaugggauaagaaa

SEQ ID NO: 2355418 - RNA, 19 nt, Artificial Sequence
  Description of Artificial Sequence: Synthetic oligonucleotide
  Sense strand starting at position 564 of SEQ ID NO: 1885617
agggaacugcgaggagauu

SEQ ID NO: 2355419 - RNA, 19 nt, Artificial Sequence
  Description of Artificial Sequence: Synthetic oligonucleotide
  Antisense strand to SEQ ID NO: 2355418
aaucuccucgcaguucccu

SEQ ID NO: 2355420 - RNA, 19 nt, Artificial Sequence
  Description of Artificial Sequence: Synthetic oligonucleotide
  Sense strand starting at position 866 of SEQ ID NO: 1885617
uugaguuucuuuccaggca

SEQ ID NO: 2355421 - RNA, 19 nt, Artificial Sequence
  Description of Artificial Sequence: Synthetic oligonucleotide
  Antisense strand to SEQ ID NO: 2355420
ugccuggaaagaaacucaa

SEQ ID NO: 2355422 - RNA, 19 nt, Artificial Sequence
  Description of Artificial Sequence: Synthetic oligonucleotide
  Sense strand starting at position 867 of SEQ ID NO: 1885617
ugaguuucuuuccaggcau

SEQ ID NO: 2355423 - RNA, 19 nt, Artificial Sequence
  Description of Artificial Sequence: Synthetic oligonucleotide
  Antisense strand to SEQ ID NO: 2355422
augccuggaaagaaacuca

SEQ ID NO: 2355424 - RNA, 19 nt, Artificial Sequence
  Description of Artificial Sequence: Synthetic oligonucleotide
  Sense strand starting at position 931 of SEQ ID NO: 1885617
ugagccaaaucuggguauu

SEQ ID NO: 2355425 - RNA, 19 nt, Artificial Sequence
  Description of Artificial Sequence: Synthetic oligonucleotide
  Antisense strand to SEQ ID NO: 2355424
aauacccagauuuggcuca

SEQ ID NO: 2355426 - RNA, 19 nt, Artificial Sequence
  Description of Artificial Sequence: Synthetic oligonucleotide
  Sense strand starting at position 1106 of SEQ ID NO: 1885617
acacacucuuccggaaaua

SEQ ID NO: 2355427 - RNA, 19 nt, Artificial Sequence
  Description of Artificial Sequence: Synthetic oligonucleotide
  Antisense strand to SEQ ID NO: 2355426
uauuuccggaagagugugu

SEQ ID NO: 2355428 - RNA, 19 nt, Artificial Sequence
  Description of Artificial Sequence: Synthetic oligonucleotide
  Sense strand starting at position 1221 of SEQ ID NO: 1885617
ucaccuguguucuuccaua

SEQ ID NO: 2355429 - RNA, 19 nt, Artificial Sequence
  Description of Artificial Sequence: Synthetic oligonucleotide
  Antisense strand to SEQ ID NO: 2355428
uauggaagaacacagguga

SEQ ID NO: 2355430 - RNA, 19 nt, Artificial Sequence
  Description of Artificial Sequence: Synthetic oligonucleotide
  Sense strand starting at position 2227 of SEQ ID NO: 1885617
cccaguuauucuggcauga

SEQ ID NO: 2355431 - RNA, 19 nt, Artificial Sequence
  Description of Artificial Sequence: Synthetic oligonucleotide
  Antisense strand to SEQ ID NO: 2355430
ucaugccagaauaacuggg

SEQ ID NO: 2355432 - RNA, 19 nt, Artificial Sequence
  Description of Artificial Sequence: Synthetic oligonucleotide
  Sense strand starting at position 2229 of SEQ ID NO: 1885617
caguuauucuggcaugacu

SEQ ID NO: 2355433 - RNA, 19 nt, Artificial Sequence
  Description of Artificial Sequence: Synthetic oligonucleotide
  Antisense strand to SEQ ID NO: 2355432
agucaugccagaauaacug

SEQ ID NO: 2355434 - RNA, 19 nt, Artificial Sequence
  Description of Artificial Sequence: Synthetic oligonucleotide
  Sense strand starting at position 2231 of SEQ ID NO: 1885617
guuauucuggcaugacuua

SEQ ID NO: 2355435 - RNA, 19 nt, Artificial Sequence
  Description of Artificial Sequence: Synthetic oligonucleotide
  Antisense strand to SEQ ID NO: 2355434
uaagucaugccagaauaac

SEQ ID NO: 2355436 - RNA, 19 nt, Artificial Sequence
  Description of Artificial Sequence: Synthetic oligonucleotide
  Sense strand starting at position 2264 of SEQ ID NO: 1885617
ucuauuauggucuguaauu

SEQ ID NO: 2355437 - RNA, 19 nt, Artificial Sequence
  Description of Artificial Sequence: Synthetic oligonucleotide
  Antisense strand to SEQ ID NO: 2355436
aauuacagaccauaauaga

SEQ ID NO: 2355438 - RNA, 19 nt, Artificial Sequence
  Description of Artificial Sequence: Synthetic oligonucleotide
  Sense strand starting at position 2265 of SEQ ID NO: 1885617
cuauuauggucuguaauua

SEQ ID NO: 2355439 - RNA, 19 nt, Artificial Sequence
  Description of Artificial Sequence: Synthetic oligonucleotide
  Antisense strand to SEQ ID NO: 2355438
uaauuacagaccauaauag

SEQ ID NO: 2355440 - RNA, 19 nt, Artificial Sequence
  Description of Artificial Sequence: Synthetic oligonucleotide
  Sense strand starting at position 2546 of SEQ ID NO: 1885617
cuacaugucuacuuuguua

SEQ ID NO: 2355441 - RNA, 19 nt, Artificial Sequence
  Description of Artificial Sequence: Synthetic oligonucleotide
  Antisense strand to SEQ ID NO: 2355440
uaacaaaguagacauguag

SEQ ID NO: 2355442 - RNA, 19 nt, Artificial Sequence
  Description of Artificial Sequence: Synthetic oligonucleotide
  Sense strand starting at position 2548 of SEQ ID NO: 1885617
acaugucuacuuuguuacu

SEQ ID NO: 2355443 - RNA, 19 nt, Artificial Sequence
  Description of Artificial Sequence: Synthetic oligonucleotide
  Antisense strand to SEQ ID NO: 2355442
aguaacaaaguagacaugu

SEQ ID NO: 2355444 - RNA, 19 nt, Artificial Sequence
  Description of Artificial Sequence: Synthetic oligonucleotide
  Sense strand starting at position 2566 of SEQ ID NO: 1885617
uagccuuucgaguagugca

SEQ ID NO: 2355445 - RNA, 19 nt, Artificial Sequence
  Description of Artificial Sequence: Synthetic oligonucleotide
  Antisense strand to SEQ ID NO: 2355444
ugcacuacucgaaaggcua

SEQ ID NO: 2355446 - RNA, 19 nt, Artificial Sequence
  Description of Artificial Sequence: Synthetic oligonucleotide
  Sense strand starting at position 2587 of SEQ ID NO: 1885617
gccaguagguguuuacuca

SEQ ID NO: 2355447 - RNA, 19 nt, Artificial Sequence
  Description of Artificial Sequence: Synthetic oligonucleotide
  Antisense strand to SEQ ID NO: 2355446
ugaguaaacaccuacuggc

SEQ ID NO: 2355448 - RNA, 19 nt, Artificial Sequence
  Description of Artificial Sequence: Synthetic oligonucleotide
  Sense strand starting at position 2588 of SEQ ID NO: 1885617
ccaguagguguuuacucaa

SEQ ID NO: 2355449 - RNA, 19 nt, Artificial Sequence
  Description of Artificial Sequence: Synthetic oligonucleotide
  Antisense strand to SEQ ID NO: 2355448
uugaguaaacaccuacugg

SEQ ID NO: 2355450 - RNA, 19 nt, Artificial Sequence
  Description of Artificial Sequence: Synthetic oligonucleotide
  Sense strand starting at position 2591 of SEQ ID NO: 1885617
guagguguuuacucaauuu

SEQ ID NO: 2355451 - RNA, 19 nt, Artificial Sequence
  Description of Artificial Sequence: Synthetic oligonucleotide
  Antisense strand to SEQ ID NO: 2355450
aaauugaguaaacaccuac

SEQ ID NO: 2355452 - RNA, 19 nt, Artificial Sequence
  Description of Artificial Sequence: Synthetic oligonucleotide
  Sense strand starting at position 2693 of SEQ ID NO: 1885617
ucucaaaguguuugagcgu

SEQ ID NO: 2355453 - RNA, 19 nt, Artificial Sequence
  Description of Artificial Sequence: Synthetic oligonucleotide
  Antisense strand to SEQ ID NO: 2355452
acgcucaaacacuuugaga

SEQ ID NO: 2355454 - RNA, 19 nt, Artificial Sequence
  Description of Artificial Sequence: Synthetic oligonucleotide
  Sense strand starting at position 2699 of SEQ ID NO: 1885617
aguguuugagcgugaggga

SEQ ID NO: 2355455 - RNA, 19 nt, Artificial Sequence
  Description of Artificial Sequence: Synthetic oligonucleotide
  Antisense strand to SEQ ID NO: 2355454
ucccucacgcucaaacacu

SEQ ID NO: 2355456 - RNA, 19 nt, Artificial Sequence
  Description of Artificial Sequence: Synthetic oligonucleotide
  Sense strand starting at position 2836 of SEQ ID NO: 1885617
ugcccaagguuuguaaaga

SEQ ID NO: 2355457 - RNA, 19 nt, Artificial Sequence
  Description of Artificial Sequence: Synthetic oligonucleotide
  Antisense strand to SEQ ID NO: 2355456
ucuuuacaaaccuugggca

SEQ ID NO: 2355458 - RNA, 19 nt, Artificial Sequence
  Description of Artificial Sequence: Synthetic oligonucleotide
  Sense strand starting at position 2837 of SEQ ID NO: 1885617
gcccaagguuuguaaagau

SEQ ID NO: 2355459 - RNA, 19 nt, Artificial Sequence
  Description of Artificial Sequence: Synthetic oligonucleotide
  Antisense strand to SEQ ID NO: 2355458
aucuuuacaaaccuugggc

SEQ ID NO: 2355460 - RNA, 19 nt, Artificial Sequence
  Description of Artificial Sequence: Synthetic oligonucleotide
  Sense strand starting at position 2844 of SEQ ID NO: 1885617
guuuguaaagaucagaguu

SEQ ID NO: 2355461 - RNA, 19 nt, Artificial Sequence
  Description of Artificial Sequence: Synthetic oligonucleotide
  Antisense strand to SEQ ID NO: 2355460
aacucugaucuuuacaaac

SEQ ID NO: 2355462 - RNA, 19 nt, Artificial Sequence
  Description of Artificial Sequence: Synthetic oligonucleotide
  Sense strand starting at position 2921 of SEQ ID NO: 1885617
gacagugugagaugggauu

SEQ ID NO: 2355463 - RNA, 19 nt, Artificial Sequence
  Description of Artificial Sequence: Synthetic oligonucleotide
  Antisense strand to SEQ ID NO: 2355462
aaucccaucucacacuguc

SEQ ID NO: 2355464 - RNA, 19 nt, Artificial Sequence
  Description of Artificial Sequence: Synthetic oligonucleotide
  Sense strand starting at position 2927 of SEQ ID NO: 1885617
gugagaugggauugaguca

SEQ ID NO: 2355465 - RNA, 19 nt, Artificial Sequence
  Description of Artificial Sequence: Synthetic oligonucleotide
  Antisense strand to SEQ ID NO: 2355464
ugacucaaucccaucucac

SEQ ID NO: 2355466 - RNA, 19 nt, Artificial Sequence
  Description of Artificial Sequence: Synthetic oligonucleotide
  Sense strand starting at position 2934 of SEQ ID NO: 1885617
gggauugagucaucuggag

SEQ ID NO: 2355467 - RNA, 19 nt, Artificial Sequence
  Description of Artificial Sequence: Synthetic oligonucleotide
  Antisense strand to SEQ ID NO: 2355466
cuccagaugacucaauccc

SEQ ID NO: 2355468 - RNA, 19 nt, Artificial Sequence
  Description of Artificial Sequence: Synthetic oligonucleotide
  Sense strand starting at position 2983 of SEQ ID NO: 1885617
uguggagccacugaguaua

SEQ ID NO: 2355469 - RNA, 19 nt, Artificial Sequence
  Description of Artificial Sequence: Synthetic oligonucleotide
  Antisense strand to SEQ ID NO: 2355468
uauacucaguggcuccaca

SEQ ID NO: 2355470 - RNA, 19 nt, Artificial Sequence
  Description of Artificial Sequence: Synthetic oligonucleotide
  Sense strand starting at position 3028 of SEQ ID NO: 1885617
gccauacugugcucuguua

SEQ ID NO: 2355471 - RNA, 19 nt, Artificial Sequence
  Description of Artificial Sequence: Synthetic oligonucleotide
  Antisense strand to SEQ ID NO: 2355470
uaacagagcacaguauggc

SEQ ID NO: 2355472 - RNA, 19 nt, Artificial Sequence
  Description of Artificial Sequence: Synthetic oligonucleotide
  Sense strand starting at position 3301 of SEQ ID NO: 1885617
gcaggagaucuuugaggug

SEQ ID NO: 2355473 - RNA, 19 nt, Artificial Sequence
  Description of Artificial Sequence: Synthetic oligonucleotide
  Antisense strand to SEQ ID NO: 2355472
caccucaaagaucuccugc

SEQ ID NO: 2355474 - RNA, 19 nt, Artificial Sequence
  Description of Artificial Sequence: Synthetic oligonucleotide
  Sense strand starting at position 3304 of SEQ ID NO: 1885617
ggagaucuuugaggugaac

SEQ ID NO: 2355475 - RNA, 19 nt, Artificial Sequence
  Description of Artificial Sequence: Synthetic oligonucleotide
  Antisense strand to SEQ ID NO: 2355474
guucaccucaaagaucucc

SEQ ID NO: 2355476 - RNA, 19 nt, Artificial Sequence
  Description of Artificial Sequence: Synthetic oligonucleotide
  Sense strand starting at position 3319 of SEQ ID NO: 1885617
gaacaacuugccuguggaa

SEQ ID NO: 2355477 - RNA, 19 nt, Artificial Sequence
  Description of Artificial Sequence: Synthetic oligonucleotide
  Antisense strand to SEQ ID NO: 2355476
uuccacaggcaaguuguuc

SEQ ID NO: 2355478 - RNA, 19 nt, Artificial Sequence
  Description of Artificial Sequence: Synthetic oligonucleotide
  Sense strand starting at position 3321 of SEQ ID NO: 1885617
acaacuugccuguggaauc

SEQ ID NO: 2355479 - RNA, 19 nt, Artificial Sequence
  Description of Artificial Sequence: Synthetic oligonucleotide
  Antisense strand to SEQ ID NO: 2355478
gauuccacaggcaaguugu

SEQ ID NO: 2355480 - RNA, 19 nt, Artificial Sequence
  Description of Artificial Sequence: Synthetic oligonucleotide
  Sense strand starting at position 3332 of SEQ ID NO: 1885617
guggaaucguggcaguaac

SEQ ID NO: 2355481 - RNA, 19 nt, Artificial Sequence
  Description of Artificial Sequence: Synthetic oligonucleotide
  Antisense strand to SEQ ID NO: 2355480
guuacugccacgauuccac

SEQ ID NO: 2355482 - RNA, 19 nt, Artificial Sequence
  Description of Artificial Sequence: Synthetic oligonucleotide
  Sense strand starting at position 3365 of SEQ ID NO: 1885617
gccugaaauucuccugugu

SEQ ID NO: 2355483 - RNA, 19 nt, Artificial Sequence
  Description of Artificial Sequence: Synthetic oligonucleotide
  Antisense strand to SEQ ID NO: 2355482
acacaggagaauuucaggc

SEQ ID NO: 2355484 - RNA, 19 nt, Artificial Sequence
  Description of Artificial Sequence: Synthetic oligonucleotide
  Sense strand starting at position 127 of SEQ ID NO: 1885618
ucguccuaaauguauagua

SEQ ID NO: 2355485 - RNA, 19 nt, Artificial Sequence
  Description of Artificial Sequence: Synthetic oligonucleotide
  Antisense strand to SEQ ID NO: 2355484
uacuauacauuuaggacga

SEQ ID NO: 2355486 - RNA, 19 nt, Artificial Sequence
  Description of Artificial Sequence: Synthetic oligonucleotide
  Sense strand starting at position 129 of SEQ ID NO: 1885618
guccuaaauguauaguagu

SEQ ID NO: 2355487 - RNA, 19 nt, Artificial Sequence
  Description of Artificial Sequence: Synthetic oligonucleotide
  Antisense strand to SEQ ID NO: 2355486
acuacuauacauuuaggac

SEQ ID NO: 2355488 - RNA, 19 nt, Artificial Sequence
  Description of Artificial Sequence: Synthetic oligonucleotide
  Sense strand starting at position 286 of SEQ ID NO: 1885618
agcauuaguuucucagaaa

SEQ ID NO: 2355489 - RNA, 19 nt, Artificial Sequence
  Description of Artificial Sequence: Synthetic oligonucleotide
  Antisense strand to SEQ ID NO: 2355488
uuucugagaaacuaaugcu

SEQ ID NO: 2355490 - RNA, 19 nt, Artificial Sequence
  Description of Artificial Sequence: Synthetic oligonucleotide
  Sense strand starting at position 407 of SEQ ID NO: 1885618
aaagcaguucuccagaagu

SEQ ID NO: 2355491 - RNA, 19 nt, Artificial Sequence
  Description of Artificial Sequence: Synthetic oligonucleotide
  Antisense strand to SEQ ID NO: 2355490
acuucuggagaacugcuuu

SEQ ID NO: 2355492 - RNA, 19 nt, Artificial Sequence
  Description of Artificial Sequence: Synthetic oligonucleotide
  Sense strand starting at position 409 of SEQ ID NO: 1885618
agcaguucuccagaaguac

SEQ ID NO: 2355493 - RNA, 19 nt, Artificial Sequence
  Description of Artificial Sequence: Synthetic oligonucleotide
  Antisense strand to SEQ ID NO: 2355492
guacuucuggagaacugcu

SEQ ID NO: 2355494 - RNA, 19 nt, Artificial Sequence
  Description of Artificial Sequence: Synthetic oligonucleotide
  Sense strand starting at position 438 of SEQ ID NO: 1885618
gugggaaguauugaauguu

SEQ ID NO: 2355495 - RNA, 19 nt, Artificial Sequence
  Description of Artificial Sequence: Synthetic oligonucleotide
  Antisense strand to SEQ ID NO: 2355494
aacauucaauacuucccac

SEQ ID NO: 2355496 - RNA, 19 nt, Artificial Sequence
  Description of Artificial Sequence: Synthetic oligonucleotide
  Sense strand starting at position 614 of SEQ ID NO: 1885618
auaauaaugugcucagcaa

SEQ ID NO: 2355497 - RNA, 19 nt, Artificial Sequence
  Description of Artificial Sequence: Synthetic oligonucleotide
  Antisense strand to SEQ ID NO: 2355496
uugcugagcacauuauuau

SEQ ID NO: 2355498 - RNA, 19 nt, Artificial Sequence
  Description of Artificial Sequence: Synthetic oligonucleotide
  Sense strand starting at position 632 of SEQ ID NO: 1885618
acagguauaucacugauuc

SEQ ID NO: 2355499 - RNA, 19 nt, Artificial Sequence
  Description of Artificial Sequence: Synthetic oligonucleotide
  Antisense strand to SEQ ID NO: 2355498
gaaucagugauauaccugu

SEQ ID NO: 2355500 - RNA, 19 nt, Artificial Sequence
  Description of Artificial Sequence: Synthetic oligonucleotide
  Sense strand starting at position 636 of SEQ ID NO: 1885618
guauaucacugauuccauc

SEQ ID NO: 2355501 - RNA, 19 nt, Artificial Sequence
  Description of Artificial Sequence: Synthetic oligonucleotide
  Antisense strand to SEQ ID NO: 2355500
gauggaaucagugauauac

SEQ ID NO: 2355502 - RNA, 19 nt, Artificial Sequence
  Description of Artificial Sequence: Synthetic oligonucleotide
  Sense strand starting at position 746 of SEQ ID NO: 1885618
guuaucuaagcaugcauuu

SEQ ID NO: 2355503 - RNA, 19 nt, Artificial Sequence
  Description of Artificial Sequence: Synthetic oligonucleotide
  Antisense strand to SEQ ID NO: 2355502
aaaugcaugcuuagauaac

SEQ ID NO: 2355504 - RNA, 19 nt, Artificial Sequence
  Description of Artificial Sequence: Synthetic oligonucleotide
  Sense strand starting at position 778 of SEQ ID NO: 1885618
aaguuaugauucucgaauu

SEQ ID NO: 2355505 - RNA, 19 nt, Artificial Sequence
  Description of Artificial Sequence: Synthetic oligonucleotide
  Antisense strand to SEQ ID NO: 2355504
aauucgagaaucauaacuu

SEQ ID NO: 2355506 - RNA, 19 nt, Artificial Sequence
  Description of Artificial Sequence: Synthetic oligonucleotide
  Sense strand starting at position 786 of SEQ ID NO: 1885618
auucucgaauucucauaga

SEQ ID NO: 2355507 - RNA, 19 nt, Artificial Sequence
  Description of Artificial Sequence: Synthetic oligonucleotide
  Antisense strand to SEQ ID NO: 2355506
ucuaugagaauucgagaau

SEQ ID NO: 2355508 - RNA, 19 nt, Artificial Sequence
  Description of Artificial Sequence: Synthetic oligonucleotide
  Sense strand starting at position 882 of SEQ ID NO: 1885618
gucacacuauggucaggau

SEQ ID NO: 2355509 - RNA, 19 nt, Artificial Sequence
  Description of Artificial Sequence: Synthetic oligonucleotide
  Antisense strand to SEQ ID NO: 2355508
auccugaccauagugugac

SEQ ID NO: 2355510 - RNA, 19 nt, Artificial Sequence
  Description of Artificial Sequence: Synthetic oligonucleotide
  Sense strand starting at position 907 of SEQ ID NO: 1885618
uuuaguguuguaugaagaa

SEQ ID NO: 2355511 - RNA, 19 nt, Artificial Sequence
  Description of Artificial Sequence: Synthetic oligonucleotide
  Antisense strand to SEQ ID NO: 2355510
uucuucauacaacacuaaa

SEQ ID NO: 2355512 - RNA, 19 nt, Artificial Sequence
  Description of Artificial Sequence: Synthetic oligonucleotide
  Sense strand starting at position 986 of SEQ ID NO: 1885618
gccagugacgcuuugcuuu

SEQ ID NO: 2355513 - RNA, 19 nt, Artificial Sequence
  Description of Artificial Sequence: Synthetic oligonucleotide
  Antisense strand to SEQ ID NO: 2355512
aaagcaaagcgucacuggc

SEQ ID NO: 2355514 - RNA, 19 nt, Artificial Sequence
  Description of Artificial Sequence: Synthetic oligonucleotide
  Sense strand starting at position 1134 of SEQ ID NO: 1885618
ugucauugccaauauauag

SEQ ID NO: 2355515 - RNA, 19 nt, Artificial Sequence
  Description of Artificial Sequence: Synthetic oligonucleotide
  Antisense strand to SEQ ID NO: 2355514
cuauauauuggcaaugaca

SEQ ID NO: 2355516 - RNA, 19 nt, Artificial Sequence
  Description of Artificial Sequence: Synthetic oligonucleotide
  Sense strand starting at position 1221 of SEQ ID NO: 1885618
ucaugccuccuggaaguua

SEQ ID NO: 2355517 - RNA, 19 nt, Artificial Sequence
  Description of Artificial Sequence: Synthetic oligonucleotide
  Antisense strand to SEQ ID NO: 2355516
uaacuuccaggaggcauga

SEQ ID NO: 2355518 - RNA, 19 nt, Artificial Sequence
  Description of Artificial Sequence: Synthetic oligonucleotide
  Sense strand starting at position 1229 of SEQ ID NO: 1885618
ccuggaaguuaaguagaaa

SEQ ID NO: 2355519 - RNA, 19 nt, Artificial Sequence
  Description of Artificial Sequence: Synthetic oligonucleotide
  Antisense strand to SEQ ID NO: 2355518
uuucuacuuaacuuccagg

SEQ ID NO: 2355520 - RNA, 19 nt, Artificial Sequence
  Description of Artificial Sequence: Synthetic oligonucleotide
  Sense strand starting at position 1857 of SEQ ID NO: 1885618
ucuccauggcuacauagau

SEQ ID NO: 2355521 - RNA, 19 nt, Artificial Sequence
  Description of Artificial Sequence: Synthetic oligonucleotide
  Antisense strand to SEQ ID NO: 2355520
aucuauguagccauggaga

SEQ ID NO: 2355522 - RNA, 19 nt, Artificial Sequence
  Description of Artificial Sequence: Synthetic oligonucleotide
  Sense strand starting at position 2137 of SEQ ID NO: 1885618
gcuacagaugacugcuaau

SEQ ID NO: 2355523 - RNA, 19 nt, Artificial Sequence
  Description of Artificial Sequence: Synthetic oligonucleotide
  Antisense strand to SEQ ID NO: 2355522
auuagcagucaucuguagc

SEQ ID NO: 2355524 - RNA, 19 nt, Artificial Sequence
  Description of Artificial Sequence: Synthetic oligonucleotide
  Sense strand starting at position 2325 of SEQ ID NO: 1885618
ugacauaaccuauggucau

SEQ ID NO: 2355525 - RNA, 19 nt, Artificial Sequence
  Description of Artificial Sequence: Synthetic oligonucleotide
  Antisense strand to SEQ ID NO: 2355524
augaccauagguuauguca

SEQ ID NO: 2355526 - RNA, 19 nt, Artificial Sequence
  Description of Artificial Sequence: Synthetic oligonucleotide
  Sense strand starting at position 2362 of SEQ ID NO: 1885618
cuguucuuuggguauucua

SEQ ID NO: 2355527 - RNA, 19 nt, Artificial Sequence
  Description of Artificial Sequence: Synthetic oligonucleotide
  Antisense strand to SEQ ID NO: 2355526
uagaauacccaaagaacag

SEQ ID NO: 2355528 - RNA, 19 nt, Artificial Sequence
  Description of Artificial Sequence: Synthetic oligonucleotide
  Sense strand starting at position 2365 of SEQ ID NO: 1885618
uucuuuggguauucuauaa

SEQ ID NO: 2355529 - RNA, 19 nt, Artificial Sequence
  Description of Artificial Sequence: Synthetic oligonucleotide
  Antisense strand to SEQ ID NO: 2355528
uuauagaauacccaaagaa

SEQ ID NO: 2355530 - RNA, 19 nt, Artificial Sequence
  Description of Artificial Sequence: Synthetic oligonucleotide
  Sense strand starting at position 2558 of SEQ ID NO: 1885618
guauuccaucugcaugaca

SEQ ID NO: 2355531 - RNA, 19 nt, Artificial Sequence
  Description of Artificial Sequence: Synthetic oligonucleotide
  Antisense strand to SEQ ID NO: 2355530
ugucaugcagauggaauac

SEQ ID NO: 2355532 - RNA, 19 nt, Artificial Sequence
  Description of Artificial Sequence: Synthetic oligonucleotide
  Sense strand starting at position 2626 of SEQ ID NO: 1885618
aggugagaauguucuuuaa

SEQ ID NO: 2355533 - RNA, 19 nt, Artificial Sequence
  Description of Artificial Sequence: Synthetic oligonucleotide
  Antisense strand to SEQ ID NO: 2355532
uuaaagaacauucucaccu

SEQ ID NO: 2355534 - RNA, 19 nt, Artificial Sequence
  Description of Artificial Sequence: Synthetic oligonucleotide
  Sense strand starting at position 2839 of SEQ ID NO: 1885618
guccuuuaucuagagaucu

SEQ ID NO: 2355535 - RNA, 19 nt, Artificial Sequence
  Description of Artificial Sequence: Synthetic oligonucleotide
  Antisense strand to SEQ ID NO: 2355534
agaucucuagauaaaggac

SEQ ID NO: 2355536 - RNA, 19 nt, Artificial Sequence
  Description of Artificial Sequence: Synthetic oligonucleotide
  Sense strand starting at position 2904 of SEQ ID NO: 1885618
uuugcucucagagagggau

SEQ ID NO: 2355537 - RNA, 19 nt, Artificial Sequence
  Description of Artificial Sequence: Synthetic oligonucleotide
  Antisense strand to SEQ ID NO: 2355536
aucccucucugagagcaaa

SEQ ID NO: 2355538 - RNA, 19 nt, Artificial Sequence
  Description of Artificial Sequence: Synthetic oligonucleotide
  Sense strand starting at position 3011 of SEQ ID NO: 1885618
aagggaaauugccuuugga

SEQ ID NO: 2355539 - RNA, 19 nt, Artificial Sequence
  Description of Artificial Sequence: Synthetic oligonucleotide
  Antisense strand to SEQ ID NO: 2355538
uccaaaggcaauuucccuu

SEQ ID NO: 2355540 - RNA, 19 nt, Artificial Sequence
  Description of Artificial Sequence: Synthetic oligonucleotide
  Sense strand starting at position 3014 of SEQ ID NO: 1885618
ggaaauugccuuuggaauc

SEQ ID NO: 2355541 - RNA, 19 nt, Artificial Sequence
  Description of Artificial Sequence: Synthetic oligonucleotide
  Antisense strand to SEQ ID NO: 2355540
gauuccaaaggcaauuucc

SEQ ID NO: 2355542 - RNA, 19 nt, Artificial Sequence
  Description of Artificial Sequence: Synthetic oligonucleotide
  Sense strand starting at position 3324 of SEQ ID NO: 1885618
agauaaaugugggcuggua

SEQ ID NO: 2355543 - RNA, 19 nt, Artificial Sequence
  Description of Artificial Sequence: Synthetic oligonucleotide
  Antisense strand to SEQ ID NO: 2355542
uaccagcccacauuuaucu

SEQ ID NO: 2355544 - RNA, 19 nt, Artificial Sequence
  Description of Artificial Sequence: Synthetic oligonucleotide
  Sense strand starting at position 3373 of SEQ ID NO: 1885618
cucagauagucuccauauu

SEQ ID NO: 2355545 - RNA, 19 nt, Artificial Sequence
  Description of Artificial Sequence: Synthetic oligonucleotide
  Antisense strand to SEQ ID NO: 2355544
aauauggagacuaucugag

SEQ ID NO: 2355546 - RNA, 19 nt, Artificial Sequence
  Description of Artificial Sequence: Synthetic oligonucleotide
  Sense strand starting at position 3448 of SEQ ID NO: 1885618
agugaauguugauuaggga

SEQ ID NO: 2355547 - RNA, 19 nt, Artificial Sequence
  Description of Artificial Sequence: Synthetic oligonucleotide
  Antisense strand to SEQ ID NO: 2355546
ucccuaaucaacauucacu

SEQ ID NO: 2355548 - RNA, 19 nt, Artificial Sequence
  Description of Artificial Sequence: Synthetic oligonucleotide
  Sense strand starting at position 3461 of SEQ ID NO: 1885618
uagggacuuuggguguauu

SEQ ID NO: 2355549 - RNA, 19 nt, Artificial Sequence
  Description of Artificial Sequence: Synthetic oligonucleotide
  Antisense strand to SEQ ID NO: 2355548
aauacacccaaagucccua

SEQ ID NO: 2355550 - RNA, 19 nt, Artificial Sequence
  Description of Artificial Sequence: Synthetic oligonucleotide
  Sense strand starting at position 3482 of SEQ ID NO: 1885618
accuguaaugagggcugau

SEQ ID NO: 2355551 - RNA, 19 nt, Artificial Sequence
  Description of Artificial Sequence: Synthetic oligonucleotide
  Antisense strand to SEQ ID NO: 2355550
aucagcccucauuacaggu

SEQ ID NO: 2355552 - RNA, 19 nt, Artificial Sequence
  Description of Artificial Sequence: Synthetic oligonucleotide
  Sense strand starting at position 3494 of SEQ ID NO: 1885618
ggcugaugcaguuaagacu

SEQ ID NO: 2355553 - RNA, 19 nt, Artificial Sequence
  Description of Artificial Sequence: Synthetic oligonucleotide
  Antisense strand to SEQ ID NO: 2355552
agucuuaacugcaucagcc

SEQ ID NO: 2355554 - RNA, 19 nt, Artificial Sequence
  Description of Artificial Sequence: Synthetic oligonucleotide
  Sense strand starting at position 3503 of SEQ ID NO: 1885618
aguuaagacuugcccuaga

SEQ ID NO: 2355555 - RNA, 19 nt, Artificial Sequence
  Description of Artificial Sequence: Synthetic oligonucleotide
  Antisense strand to SEQ ID NO: 2355554
ucuagggcaagucuuaacu

SEQ ID NO: 2355556 - RNA, 19 nt, Artificial Sequence
  Description of Artificial Sequence: Synthetic oligonucleotide
  Sense strand starting at position 3543 of SEQ ID NO: 1885618
gcgcaauuccaugacugaa

SEQ ID NO: 2355557 - RNA, 19 nt, Artificial Sequence
  Description of Artificial Sequence: Synthetic oligonucleotide
  Antisense strand to SEQ ID NO: 2355556
uucagucauggaauugcgc

SEQ ID NO: 2355558 - RNA, 19 nt, Artificial Sequence
  Description of Artificial Sequence: Synthetic oligonucleotide
  Sense strand starting at position 3545 of SEQ ID NO: 1885618
gcaauuccaugacugaaac

SEQ ID NO: 2355559 - RNA, 19 nt, Artificial Sequence
  Description of Artificial Sequence: Synthetic oligonucleotide
  Antisense strand to SEQ ID NO: 2355558
guuucagucauggaauugc

SEQ ID NO: 2355560 - RNA, 19 nt, Artificial Sequence
  Description of Artificial Sequence: Synthetic oligonucleotide
  Sense strand starting at position 3587 of SEQ ID NO: 1885618
ggagaaugcucauagauuu

SEQ ID NO: 2355561 - RNA, 19 nt, Artificial Sequence
  Description of Artificial Sequence: Synthetic oligonucleotide
  Antisense strand to SEQ ID NO: 2355560
aaaucuaugagcauucucc

SEQ ID NO: 2355562 - RNA, 19 nt, Artificial Sequence
  Description of Artificial Sequence: Synthetic oligonucleotide
  Sense strand starting at position 3613 of SEQ ID NO: 1885618
auugauauguaccuagaug

SEQ ID NO: 2355563 - RNA, 19 nt, Artificial Sequence
  Description of Artificial Sequence: Synthetic oligonucleotide
  Antisense strand to SEQ ID NO: 2355562
caucuagguacauaucaau

SEQ ID NO: 2355564 - RNA, 19 nt, Artificial Sequence
  Description of Artificial Sequence: Synthetic oligonucleotide
  Sense strand starting at position 2044 of SEQ ID NO: 1885619
ugagucuuccaaugacaaa

SEQ ID NO: 2355565 - RNA, 19 nt, Artificial Sequence
  Description of Artificial Sequence: Synthetic oligonucleotide
  Antisense strand to SEQ ID NO: 2355564
uuugucauuggaagacuca

SEQ ID NO: 2355566 - RNA, 19 nt, Artificial Sequence
  Description of Artificial Sequence: Synthetic oligonucleotide
  Sense strand starting at position 2073 of SEQ ID NO: 1885619
ucucaauuaugcccuggua

SEQ ID NO: 2355567 - RNA, 19 nt, Artificial Sequence
  Description of Artificial Sequence: Synthetic oligonucleotide
  Antisense strand to SEQ ID NO: 2355566
uaccagggcauaauugaga

SEQ ID NO: 2355568 - RNA, 19 nt, Artificial Sequence
  Description of Artificial Sequence: Synthetic oligonucleotide
  Sense strand starting at position 2075 of SEQ ID NO: 1885619
ucaauuaugcccugguauc

SEQ ID NO: 2355569 - RNA, 19 nt, Artificial Sequence
  Description of Artificial Sequence: Synthetic oligonucleotide
  Antisense strand to SEQ ID NO: 2355568
gauaccagggcauaauuga

SEQ ID NO: 2355570 - RNA, 19 nt, Artificial Sequence
  Description of Artificial Sequence: Synthetic oligonucleotide
  Sense strand starting at position 2086 of SEQ ID NO: 1885619
cugguaucugcaugagguc

SEQ ID NO: 2355571 - RNA, 19 nt, Artificial Sequence
  Description of Artificial Sequence: Synthetic oligonucleotide
  Antisense strand to SEQ ID NO: 2355570
gaccucaugcagauaccag

SEQ ID NO: 2355572 - RNA, 19 nt, Artificial Sequence
  Description of Artificial Sequence: Synthetic oligonucleotide
  Sense strand starting at position 2156 of SEQ ID NO: 1885619
auucuuuaccucugggauc

SEQ ID NO: 2355573 - RNA, 19 nt, Artificial Sequence
  Description of Artificial Sequence: Synthetic oligonucleotide
  Antisense strand to SEQ ID NO: 2355572
gaucccagagguaaagaau

SEQ ID NO: 2355574 - RNA, 19 nt, Artificial Sequence
  Description of Artificial Sequence: Synthetic oligonucleotide
  Sense strand starting at position 2231 of SEQ ID NO: 1885619
gagagcucuagguagucuu

SEQ ID NO: 2355575 - RNA, 19 nt, Artificial Sequence
  Description of Artificial Sequence: Synthetic oligonucleotide
  Antisense strand to SEQ ID NO: 2355574
aagacuaccuagagcucuc

SEQ ID NO: 2355576 - RNA, 19 nt, Artificial Sequence
  Description of Artificial Sequence: Synthetic oligonucleotide
  Sense strand starting at position 2363 of SEQ ID NO: 1885619
gcaacugcccuccaagaau

SEQ ID NO: 2355577 - RNA, 19 nt, Artificial Sequence
  Description of Artificial Sequence: Synthetic oligonucleotide
  Antisense strand to SEQ ID NO: 2355576
auucuuggagggcaguugc

SEQ ID NO: 2355578 - RNA, 19 nt, Artificial Sequence
  Description of Artificial Sequence: Synthetic oligonucleotide
  Sense strand starting at position 2447 of SEQ ID NO: 1885619
gcaugcuuccuaugagaag

SEQ ID NO: 2355579 - RNA, 19 nt, Artificial Sequence
  Description of Artificial Sequence: Synthetic oligonucleotide
  Antisense strand to SEQ ID NO: 2355578
cuucucauaggaagcaugc

SEQ ID NO: 2355580 - RNA, 19 nt, Artificial Sequence
  Description of Artificial Sequence: Synthetic oligonucleotide
  Sense strand starting at position 2459 of SEQ ID NO: 1885619
ugagaagucaggcacuguu

SEQ ID NO: 2355581 - RNA, 19 nt, Artificial Sequence
  Description of Artificial Sequence: Synthetic oligonucleotide
  Antisense strand to SEQ ID NO: 2355580
aacagugccugacuucuca

SEQ ID NO: 2355582 - RNA, 19 nt, Artificial Sequence
  Description of Artificial Sequence: Synthetic oligonucleotide
  Sense strand starting at position 2717 of SEQ ID NO: 1885619
ccagguugaagaggaguaa

SEQ ID NO: 2355583 - RNA, 19 nt, Artificial Sequence
  Description of Artificial Sequence: Synthetic oligonucleotide
  Antisense strand to SEQ ID NO: 2355582
uuacuccucuucaaccugg

SEQ ID NO: 2355584 - RNA, 19 nt, Artificial Sequence
  Description of Artificial Sequence: Synthetic oligonucleotide
  Sense strand starting at position 2797 of SEQ ID NO: 1885619
gugccaucagaagauuaug

SEQ ID NO: 2355585 - RNA, 19 nt, Artificial Sequence
  Description of Artificial Sequence: Synthetic oligonucleotide
  Antisense strand to SEQ ID NO: 2355584
cauaaucuucugauggcac

SEQ ID NO: 2355586 - RNA, 19 nt, Artificial Sequence
  Description of Artificial Sequence: Synthetic oligonucleotide
  Sense strand starting at position 2805 of SEQ ID NO: 1885619
agaagauuauggcagaauu

SEQ ID NO: 2355587 - RNA, 19 nt, Artificial Sequence
  Description of Artificial Sequence: Synthetic oligonucleotide
  Antisense strand to SEQ ID NO: 2355586
aauucugccauaaucuucu

SEQ ID NO: 2355588 - RNA, 19 nt, Artificial Sequence
  Description of Artificial Sequence: Synthetic oligonucleotide
  Sense strand starting at position 2815 of SEQ ID NO: 1885619
ggcagaauuugguacugaa

SEQ ID NO: 2355589 - RNA, 19 nt, Artificial Sequence
  Description of Artificial Sequence: Synthetic oligonucleotide
  Antisense strand to SEQ ID NO: 2355588
uucaguaccaaauucugcc

SEQ ID NO: 2355590 - RNA, 19 nt, Artificial Sequence
  Description of Artificial Sequence: Synthetic oligonucleotide
  Sense strand starting at position 2818 of SEQ ID NO: 1885619
agaauuugguacugaauca

SEQ ID NO: 2355591 - RNA, 19 nt, Artificial Sequence
  Description of Artificial Sequence: Synthetic oligonucleotide
  Antisense strand to SEQ ID NO: 2355590
ugauucaguaccaaauucu

SEQ ID NO: 2355592 - RNA, 19 nt, Artificial Sequence
  Description of Artificial Sequence: Synthetic oligonucleotide
  Sense strand starting at position 2958 of SEQ ID NO: 1885619
gcgccuuuagaagaagcau

SEQ ID NO: 2355593 - RNA, 19 nt, Artificial Sequence
  Description of Artificial Sequence: Synthetic oligonucleotide
  Antisense strand to SEQ ID NO: 2355592
augcuucuucuaaaggcgc

SEQ ID NO: 2355594 - RNA, 19 nt, Artificial Sequence
  Description of Artificial Sequence: Synthetic oligonucleotide
  Sense strand starting at position 2989 of SEQ ID NO: 1885619
uaauuuguagcacguaaua

SEQ ID NO: 2355595 - RNA, 19 nt, Artificial Sequence
  Description of Artificial Sequence: Synthetic oligonucleotide
  Antisense strand to SEQ ID NO: 2355594
uauuacgugcuacaaauua

SEQ ID NO: 2355596 - RNA, 19 nt, Artificial Sequence
  Description of Artificial Sequence: Synthetic oligonucleotide
  Sense strand starting at position 3057 of SEQ ID NO: 1885619
gauuacuuauuggaaagua

SEQ ID NO: 2355597 - RNA, 19 nt, Artificial Sequence
  Description of Artificial Sequence: Synthetic oligonucleotide
  Antisense strand to SEQ ID NO: 2355596
uacuuuccaauaaguaauc

SEQ ID NO: 2355598 - RNA, 19 nt, Artificial Sequence
  Description of Artificial Sequence: Synthetic oligonucleotide
  Sense strand starting at position 3073 of SEQ ID NO: 1885619
guaauaauggugcauuaag

SEQ ID NO: 2355599 - RNA, 19 nt, Artificial Sequence
  Description of Artificial Sequence: Synthetic oligonucleotide
  Antisense strand to SEQ ID NO: 2355598
cuuaaugcaccauuauuac

SEQ ID NO: 2355600 - RNA, 19 nt, Artificial Sequence
  Description of Artificial Sequence: Synthetic oligonucleotide
  Sense strand starting at position 3121 of SEQ ID NO: 1885619
gaaauaauuugucgaaagc

SEQ ID NO: 2355601 - RNA, 19 nt, Artificial Sequence
  Description of Artificial Sequence: Synthetic oligonucleotide
  Antisense strand to SEQ ID NO: 2355600
gcuuucgacaaauuauuuc

SEQ ID NO: 2355602 - RNA, 19 nt, Artificial Sequence
  Description of Artificial Sequence: Synthetic oligonucleotide
  Sense strand starting at position 3128 of SEQ ID NO: 1885619
uuugucgaaagcugaaaua

SEQ ID NO: 2355603 - RNA, 19 nt, Artificial Sequence
  Description of Artificial Sequence: Synthetic oligonucleotide
  Antisense strand to SEQ ID NO: 2355602
uauuucagcuuucgacaaa

SEQ ID NO: 2355604 - RNA, 19 nt, Artificial Sequence
  Description of Artificial Sequence: Synthetic oligonucleotide
  Sense strand starting at position 3193 of SEQ ID NO: 1885619
caagaugguuaggcagauu

SEQ ID NO: 2355605 - RNA, 19 nt, Artificial Sequence
  Description of Artificial Sequence: Synthetic oligonucleotide
  Antisense strand to SEQ ID NO: 2355604
aaucugccuaaccaucuug

SEQ ID NO: 2355606 - RNA, 19 nt, Artificial Sequence
  Description of Artificial Sequence: Synthetic oligonucleotide
  Sense strand starting at position 3233 of SEQ ID NO: 1885619
uguauuugauggcagaaag

SEQ ID NO: 2355607 - RNA, 19 nt, Artificial Sequence
  Description of Artificial Sequence: Synthetic oligonucleotide
  Antisense strand to SEQ ID NO: 2355606
cuuucugccaucaaauaca

SEQ ID NO: 2355608 - RNA, 19 nt, Artificial Sequence
  Description of Artificial Sequence: Synthetic oligonucleotide
  Sense strand starting at position 3287 of SEQ ID NO: 1885619
cuucuuuagcgauagaagu

SEQ ID NO: 2355609 - RNA, 19 nt, Artificial Sequence
  Description of Artificial Sequence: Synthetic oligonucleotide
  Antisense strand to SEQ ID NO: 2355608
acuucuaucgcuaaagaag

SEQ ID NO: 2355610 - RNA, 19 nt, Artificial Sequence
  Description of Artificial Sequence: Synthetic oligonucleotide
  Sense strand starting at position 3289 of SEQ ID NO: 1885619
ucuuuagcgauagaaguau

SEQ ID NO: 2355611 - RNA, 19 nt, Artificial Sequence
  Description of Artificial Sequence: Synthetic oligonucleotide
  Antisense strand to SEQ ID NO: 2355610
auacuucuaucgcuaaaga

SEQ ID NO: 2355612 - RNA, 19 nt, Artificial Sequence
  Description of Artificial Sequence: Synthetic oligonucleotide
  Sense strand starting at position 3350 of SEQ ID NO: 1885619
uugagccucccuugaagau

SEQ ID NO: 2355613 - RNA, 19 nt, Artificial Sequence
  Description of Artificial Sequence: Synthetic oligonucleotide
  Antisense strand to SEQ ID NO: 2355612
aucuucaagggaggcucaa

SEQ ID NO: 2355614 - RNA, 19 nt, Artificial Sequence
  Description of Artificial Sequence: Synthetic oligonucleotide
  Sense strand starting at position 3351 of SEQ ID NO: 1885619
ugagccucccuugaagaua

SEQ ID NO: 2355615 - RNA, 19 nt, Artificial Sequence
  Description of Artificial Sequence: Synthetic oligonucleotide
  Antisense strand to SEQ ID NO: 2355614
uaucuucaagggaggcuca

SEQ ID NO: 2355616 - RNA, 19 nt, Artificial Sequence
  Description of Artificial Sequence: Synthetic oligonucleotide
  Sense strand starting at position 3390 of SEQ ID NO: 1885619
aguagaagucaaugaguag

SEQ ID NO: 2355617 - RNA, 19 nt, Artificial Sequence
  Description of Artificial Sequence: Synthetic oligonucleotide
  Antisense strand to SEQ ID NO: 2355616
cuacucauugacuucuacu

SEQ ID NO: 2355618 - RNA, 19 nt, Artificial Sequence
  Description of Artificial Sequence: Synthetic oligonucleotide
  Sense strand starting at position 3529 of SEQ ID NO: 1885619
cuguguccuuuccugauga

SEQ ID NO: 2355619 - RNA, 19 nt, Artificial Sequence
  Description of Artificial Sequence: Synthetic oligonucleotide
  Antisense strand to SEQ ID NO: 2355618
ucaucaggaaaggacacag

SEQ ID NO: 2355620 - RNA, 19 nt, Artificial Sequence
  Description of Artificial Sequence: Synthetic oligonucleotide
  Sense strand starting at position 3531 of SEQ ID NO: 1885619
guguccuuuccugaugacu

SEQ ID NO: 2355621 - RNA, 19 nt, Artificial Sequence
  Description of Artificial Sequence: Synthetic oligonucleotide
  Antisense strand to SEQ ID NO: 2355620
agucaucaggaaaggacac

SEQ ID NO: 2355622 - RNA, 19 nt, Artificial Sequence
  Description of Artificial Sequence: Synthetic oligonucleotide
  Sense strand starting at position 3536 of SEQ ID NO: 1885619
cuuuccugaugacuugaua

SEQ ID NO: 2355623 - RNA, 19 nt, Artificial Sequence
  Description of Artificial Sequence: Synthetic oligonucleotide
  Antisense strand to SEQ ID NO: 2355622
uaucaagucaucaggaaag

SEQ ID NO: 2355624 - RNA, 19 nt, Artificial Sequence
  Description of Artificial Sequence: Synthetic oligonucleotide
  Sense strand starting at position 3597 of SEQ ID NO: 1885619
uguauagucagauagcugu

SEQ ID NO: 2355625 - RNA, 19 nt, Artificial Sequence
  Description of Artificial Sequence: Synthetic oligonucleotide
  Antisense strand to SEQ ID NO: 2355624
acagcuaucugacuauaca

SEQ ID NO: 2355626 - RNA, 19 nt, Artificial Sequence
  Description of Artificial Sequence: Synthetic oligonucleotide
  Sense strand starting at position 3604 of SEQ ID NO: 1885619
ucagauagcuguuccuacu

SEQ ID NO: 2355627 - RNA, 19 nt, Artificial Sequence
  Description of Artificial Sequence: Synthetic oligonucleotide
  Antisense strand to SEQ ID NO: 2355626
aguaggaacagcuaucuga

SEQ ID NO: 2355628 - RNA, 19 nt, Artificial Sequence
  Description of Artificial Sequence: Synthetic oligonucleotide
  Sense strand starting at position 3613 of SEQ ID NO: 1885619
uguuccuacuagucaaaca

SEQ ID NO: 2355629 - RNA, 19 nt, Artificial Sequence
  Description of Artificial Sequence: Synthetic oligonucleotide
  Antisense strand to SEQ ID NO: 2355628
uguuugacuaguaggaaca

SEQ ID NO: 2355630 - RNA, 19 nt, Artificial Sequence
  Description of Artificial Sequence: Synthetic oligonucleotide
  Sense strand starting at position 3640 of SEQ ID NO: 1885619
auugcagaugcuggagaau

SEQ ID NO: 2355631 - RNA, 19 nt, Artificial Sequence
  Description of Artificial Sequence: Synthetic oligonucleotide
  Antisense strand to SEQ ID NO: 2355630
auucuccagcaucugcaau

SEQ ID NO: 2355632 - RNA, 19 nt, Artificial Sequence
  Description of Artificial Sequence: Synthetic oligonucleotide
  Sense strand starting at position 3643 of SEQ ID NO: 1885619
gcagaugcuggagaauauu

SEQ ID NO: 2355633 - RNA, 19 nt, Artificial Sequence
  Description of Artificial Sequence: Synthetic oligonucleotide
  Antisense strand to SEQ ID NO: 2355632
aauauucuccagcaucugc

SEQ ID NO: 2355634 - RNA, 19 nt, Artificial Sequence
  Description of Artificial Sequence: Synthetic oligonucleotide
  Sense strand starting at position 3662 of SEQ ID NO: 1885619
uaaaguacacaugguaaga

SEQ ID NO: 2355635 - RNA, 19 nt, Artificial Sequence
  Description of Artificial Sequence: Synthetic oligonucleotide
  Antisense strand to SEQ ID NO: 2355634
ucuuaccauguguacuuua

SEQ ID NO: 2355636 - RNA, 19 nt, Artificial Sequence
  Description of Artificial Sequence: Synthetic oligonucleotide
  Sense strand starting at position 3755 of SEQ ID NO: 1885619
aucgcacauccguaugauu

SEQ ID NO: 2355637 - RNA, 19 nt, Artificial Sequence
  Description of Artificial Sequence: Synthetic oligonucleotide
  Antisense strand to SEQ ID NO: 2355636
aaucauacggaugugcgau

SEQ ID NO: 2355638 - RNA, 19 nt, Artificial Sequence
  Description of Artificial Sequence: Synthetic oligonucleotide
  Sense strand starting at position 3757 of SEQ ID NO: 1885619
cgcacauccguaugauuau

SEQ ID NO: 2355639 - RNA, 19 nt, Artificial Sequence
  Description of Artificial Sequence: Synthetic oligonucleotide
  Antisense strand to SEQ ID NO: 2355638
auaaucauacggaugugcg

SEQ ID NO: 2355640 - RNA, 19 nt, Artificial Sequence
  Description of Artificial Sequence: Synthetic oligonucleotide
  Sense strand starting at position 3760 of SEQ ID NO: 1885619
acauccguaugauuaugaa

SEQ ID NO: 2355641 - RNA, 19 nt, Artificial Sequence
  Description of Artificial Sequence: Synthetic oligonucleotide
  Antisense strand to SEQ ID NO: 2355640
uucauaaucauacggaugu

SEQ ID NO: 2355642 - RNA, 19 nt, Artificial Sequence
  Description of Artificial Sequence: Synthetic oligonucleotide
  Sense strand starting at position 3815 of SEQ ID NO: 1885619
uuucuuugggcaggaaaga

SEQ ID NO: 2355643 - RNA, 19 nt, Artificial Sequence
  Description of Artificial Sequence: Synthetic oligonucleotide
  Antisense strand to SEQ ID NO: 2355642
ucuuuccugcccaaagaaa

SEQ ID NO: 2355644 - RNA, 19 nt, Artificial Sequence
  Description of Artificial Sequence: Synthetic oligonucleotide
  Sense strand starting at position 146 of SEQ ID NO: 1885620
ccauaaauucuacaugugu

SEQ ID NO: 2355645 - RNA, 19 nt, Artificial Sequence
  Description of Artificial Sequence: Synthetic oligonucleotide
  Antisense strand to SEQ ID NO: 2355644
acacauguagaauuuaugg

SEQ ID NO: 2355646 - RNA, 19 nt, Artificial Sequence
  Description of Artificial Sequence: Synthetic oligonucleotide
  Sense strand starting at position 210 of SEQ ID NO: 1885620
gacugagauuaagauaaag

SEQ ID NO: 2355647 - RNA, 19 nt, Artificial Sequence
  Description of Artificial Sequence: Synthetic oligonucleotide
  Antisense strand to SEQ ID NO: 2355646
cuuuaucuuaaucucaguc

SEQ ID NO: 2355648 - RNA, 19 nt, Artificial Sequence
  Description of Artificial Sequence: Synthetic oligonucleotide
  Sense strand starting at position 967 of SEQ ID NO: 1885620
agaaaucuuggaugcucaa

SEQ ID NO: 2355649 - RNA, 19 nt, Artificial Sequence
  Description of Artificial Sequence: Synthetic oligonucleotide
  Antisense strand to SEQ ID NO: 2355648
uugagcauccaagauuucu

SEQ ID NO: 2355650 - RNA, 19 nt, Artificial Sequence
  Description of Artificial Sequence: Synthetic oligonucleotide
  Sense strand starting at position 1034 of SEQ ID NO: 1885620
aggguaagaugaguuaugu

SEQ ID NO: 2355651 - RNA, 19 nt, Artificial Sequence
  Description of Artificial Sequence: Synthetic oligonucleotide
  Antisense strand to SEQ ID NO: 2355650
acauaacucaucuuacccu

SEQ ID NO: 2355652 - RNA, 19 nt, Artificial Sequence
  Description of Artificial Sequence: Synthetic oligonucleotide
  Sense strand starting at position 1511 of SEQ ID NO: 1885620
ggucuuagagugagugucu

SEQ ID NO: 2355653 - RNA, 19 nt, Artificial Sequence
  Description of Artificial Sequence: Synthetic oligonucleotide
  Antisense strand to SEQ ID NO: 2355652
agacacucacucuaagacc

SEQ ID NO: 2355654 - RNA, 19 nt, Artificial Sequence
  Description of Artificial Sequence: Synthetic oligonucleotide
  Sense strand starting at position 1516 of SEQ ID NO: 1885620
uagagugagugucucauua

SEQ ID NO: 2355655 - RNA, 19 nt, Artificial Sequence
  Description of Artificial Sequence: Synthetic oligonucleotide
  Antisense strand to SEQ ID NO: 2355654
uaaugagacacucacucua

SEQ ID NO: 2355656 - RNA, 19 nt, Artificial Sequence
  Description of Artificial Sequence: Synthetic oligonucleotide
  Sense strand starting at position 1678 of SEQ ID NO: 1885620
gagccugacuggucugaaa

SEQ ID NO: 2355657 - RNA, 19 nt, Artificial Sequence
  Description of Artificial Sequence: Synthetic oligonucleotide
  Antisense strand to SEQ ID NO: 2355656
uuucagaccagucaggcuc

SEQ ID NO: 2355658 - RNA, 19 nt, Artificial Sequence
  Description of Artificial Sequence: Synthetic oligonucleotide
  Sense strand starting at position 1778 of SEQ ID NO: 1885620
cucuuugugucuccagaag

SEQ ID NO: 2355659 - RNA, 19 nt, Artificial Sequence
  Description of Artificial Sequence: Synthetic oligonucleotide
  Antisense strand to SEQ ID NO: 2355658
cuucuggagacacaaagag

SEQ ID NO: 2355660 - RNA, 19 nt, Artificial Sequence
  Description of Artificial Sequence: Synthetic oligonucleotide
  Sense strand starting at position 1805 of SEQ ID NO: 1885620
aggacuuugagccggacua

SEQ ID NO: 2355661 - RNA, 19 nt, Artificial Sequence
  Description of Artificial Sequence: Synthetic oligonucleotide
  Antisense strand to SEQ ID NO: 2355660
uaguccggcucaaaguccu

SEQ ID NO: 2355662 - RNA, 19 nt, Artificial Sequence
  Description of Artificial Sequence: Synthetic oligonucleotide
  Sense strand starting at position 1807 of SEQ ID NO: 1885620
gacuuugagccggacuacu

SEQ ID NO: 2355663 - RNA, 19 nt, Artificial Sequence
  Description of Artificial Sequence: Synthetic oligonucleotide
  Antisense strand to SEQ ID NO: 2355662
aguaguccggcucaaaguc

SEQ ID NO: 2355664 - RNA, 19 nt, Artificial Sequence
  Description of Artificial Sequence: Synthetic oligonucleotide
  Sense strand starting at position 1889 of SEQ ID NO: 1885620
ugggcauaguauccuuaca

SEQ ID NO: 2355665 - RNA, 19 nt, Artificial Sequence
  Description of Artificial Sequence: Synthetic oligonucleotide
  Antisense strand to SEQ ID NO: 2355664
uguaaggauacuaugccca

SEQ ID NO: 2355666 - RNA, 19 nt, Artificial Sequence
  Description of Artificial Sequence: Synthetic oligonucleotide
  Sense strand starting at position 2039 of SEQ ID NO: 1885620
ccaagucuauuagucuaua

SEQ ID NO: 2355667 - RNA, 19 nt, Artificial Sequence
  Description of Artificial Sequence: Synthetic oligonucleotide
  Antisense strand to SEQ ID NO: 2355666
uauagacuaauagacuugg

SEQ ID NO: 2355668 - RNA, 19 nt, Artificial Sequence
  Description of Artificial Sequence: Synthetic oligonucleotide
  Sense strand starting at position 2091 of SEQ ID NO: 1885620
uauuauagccauuguugga

SEQ ID NO: 2355669 - RNA, 19 nt, Artificial Sequence
  Description of Artificial Sequence: Synthetic oligonucleotide
  Antisense strand to SEQ ID NO: 2355668
uccaacaauggcuauaaua

SEQ ID NO: 2355670 - RNA, 19 nt, Artificial Sequence
  Description of Artificial Sequence: Synthetic oligonucleotide
  Sense strand starting at position 2120 of SEQ ID NO: 1885620
uguauugugagguaguaag

SEQ ID NO: 2355671 - RNA, 19 nt, Artificial Sequence
  Description of Artificial Sequence: Synthetic oligonucleotide
  Antisense strand to SEQ ID NO: 2355670
cuuacuaccucacaauaca

SEQ ID NO: 2355672 - RNA, 19 nt, Artificial Sequence
  Description of Artificial Sequence: Synthetic oligonucleotide
  Sense strand starting at position 2171 of SEQ ID NO: 1885620
uuauguugucacuaauucu

SEQ ID NO: 2355673 - RNA, 19 nt, Artificial Sequence
  Description of Artificial Sequence: Synthetic oligonucleotide
  Antisense strand to SEQ ID NO: 2355672
agaauuagugacaacauaa

SEQ ID NO: 2355674 - RNA, 19 nt, Artificial Sequence
  Description of Artificial Sequence: Synthetic oligonucleotide
  Sense strand starting at position 2226 of SEQ ID NO: 1885620
agacucauacagugaccua

SEQ ID NO: 2355675 - RNA, 19 nt, Artificial Sequence
  Description of Artificial Sequence: Synthetic oligonucleotide
  Antisense strand to SEQ ID NO: 2355674
uaggucacuguaugagucu

SEQ ID NO: 2355676 - RNA, 19 nt, Artificial Sequence
  Description of Artificial Sequence: Synthetic oligonucleotide
  Sense strand starting at position 2368 of SEQ ID NO: 1885620
gcacuuacgcuaguuguua

SEQ ID NO: 2355677 - RNA, 19 nt, Artificial Sequence
  Description of Artificial Sequence: Synthetic oligonucleotide
  Antisense strand to SEQ ID NO: 2355676
uaacaacuagcguaagugc

SEQ ID NO: 2355678 - RNA, 19 nt, Artificial Sequence
  Description of Artificial Sequence: Synthetic oligonucleotide
  Sense strand starting at position 2411 of SEQ ID NO: 1885620
uuccaugcgauugaucaga

SEQ ID NO: 2355679 - RNA, 19 nt, Artificial Sequence
  Description of Artificial Sequence: Synthetic oligonucleotide
  Antisense strand to SEQ ID NO: 2355678
ucugaucaaucgcauggaa

SEQ ID NO: 2355680 - RNA, 19 nt, Artificial Sequence
  Description of Artificial Sequence: Synthetic oligonucleotide
  Sense strand starting at position 2413 of SEQ ID NO: 1885620
ccaugcgauugaucagauu

SEQ ID NO: 2355681 - RNA, 19 nt, Artificial Sequence
  Description of Artificial Sequence: Synthetic oligonucleotide
  Antisense strand to SEQ ID NO: 2355680
aaucugaucaaucgcaugg

SEQ ID NO: 2355682 - RNA, 19 nt, Artificial Sequence
  Description of Artificial Sequence: Synthetic oligonucleotide
  Sense strand starting at position 2450 of SEQ ID NO: 1885620
gauaaucguaagugaagga

SEQ ID NO: 2355683 - RNA, 19 nt, Artificial Sequence
  Description of Artificial Sequence: Synthetic oligonucleotide
  Antisense strand to SEQ ID NO: 2355682
uccuucacuuacgauuauc

SEQ ID NO: 2355684 - RNA, 19 nt, Artificial Sequence
  Description of Artificial Sequence: Synthetic oligonucleotide
  Sense strand starting at position 2476 of SEQ ID NO: 1885620
caaccuugugaguaggcaa

SEQ ID NO: 2355685 - RNA, 19 nt, Artificial Sequence
  Description of Artificial Sequence: Synthetic oligonucleotide
  Antisense strand to SEQ ID NO: 2355684
uugccuacucacaagguug

SEQ ID NO: 2355686 - RNA, 19 nt, Artificial Sequence
  Description of Artificial Sequence: Synthetic oligonucleotide
  Sense strand starting at position 2663 of SEQ ID NO: 1885620
guagguggucccuagcaca

SEQ ID NO: 2355687 - RNA, 19 nt, Artificial Sequence
  Description of Artificial Sequence: Synthetic oligonucleotide
  Antisense strand to SEQ ID NO: 2355686
ugugcuagggaccaccuac

SEQ ID NO: 2355688 - RNA, 19 nt, Artificial Sequence
  Description of Artificial Sequence: Synthetic oligonucleotide
  Sense strand starting at position 2734 of SEQ ID NO: 1885620
ugaaaugcauccuuuaggu

SEQ ID NO: 2355689 - RNA, 19 nt, Artificial Sequence
  Description of Artificial Sequence: Synthetic oligonucleotide
  Antisense strand to SEQ ID NO: 2355688
accuaaaggaugcauuuca

SEQ ID NO: 2355690 - RNA, 19 nt, Artificial Sequence
  Description of Artificial Sequence: Synthetic oligonucleotide
  Sense strand starting at position 2916 of SEQ ID NO: 1885620
uaggauguauccucagagu

SEQ ID NO: 2355691 - RNA, 19 nt, Artificial Sequence
  Description of Artificial Sequence: Synthetic oligonucleotide
  Antisense strand to SEQ ID NO: 2355690
acucugaggauacauccua

SEQ ID NO: 2355692 - RNA, 19 nt, Artificial Sequence
  Description of Artificial Sequence: Synthetic oligonucleotide
  Sense strand starting at position 3062 of SEQ ID NO: 1885620
acagauauauaggaucaga

SEQ ID NO: 2355693 - RNA, 19 nt, Artificial Sequence
  Description of Artificial Sequence: Synthetic oligonucleotide
  Antisense strand to SEQ ID NO: 2355692
ucugauccuauauaucugu

SEQ ID NO: 2355694 - RNA, 19 nt, Artificial Sequence
  Description of Artificial Sequence: Synthetic oligonucleotide
  Sense strand starting at position 3075 of SEQ ID NO: 1885620
aucagagucucauucuguu

SEQ ID NO: 2355695 - RNA, 19 nt, Artificial Sequence
  Description of Artificial Sequence: Synthetic oligonucleotide
  Antisense strand to SEQ ID NO: 2355694
aacagaaugagacucugau

SEQ ID NO: 2355696 - RNA, 19 nt, Artificial Sequence
  Description of Artificial Sequence: Synthetic oligonucleotide
  Sense strand starting at position 3232 of SEQ ID NO: 1885620
uguuguuguagagauggau

SEQ ID NO: 2355697 - RNA, 19 nt, Artificial Sequence
  Description of Artificial Sequence: Synthetic oligonucleotide
  Antisense strand to SEQ ID NO: 2355696
auccaucucuacaacaaca

SEQ ID NO: 2355698 - RNA, 19 nt, Artificial Sequence
  Description of Artificial Sequence: Synthetic oligonucleotide
  Sense strand starting at position 3414 of SEQ ID NO: 1885620
gugaaugcugcccacuuga

SEQ ID NO: 2355699 - RNA, 19 nt, Artificial Sequence
  Description of Artificial Sequence: Synthetic oligonucleotide
  Antisense strand to SEQ ID NO: 2355698
ucaagugggcagcauucac

SEQ ID NO: 2355700 - RNA, 19 nt, Artificial Sequence
  Description of Artificial Sequence: Synthetic oligonucleotide
  Sense strand starting at position 3419 of SEQ ID NO: 1885620
ugcugcccacuugaaauau

SEQ ID NO: 2355701 - RNA, 19 nt, Artificial Sequence
  Description of Artificial Sequence: Synthetic oligonucleotide
  Antisense strand to SEQ ID NO: 2355700
auauuucaagugggcagca

SEQ ID NO: 2355702 - RNA, 19 nt, Artificial Sequence
  Description of Artificial Sequence: Synthetic oligonucleotide
  Sense strand starting at position 3529 of SEQ ID NO: 1885620
uacugaugucaaugguaua

SEQ ID NO: 2355703 - RNA, 19 nt, Artificial Sequence
  Description of Artificial Sequence: Synthetic oligonucleotide
  Antisense strand to SEQ ID NO: 2355702
uauaccauugacaucagua

SEQ ID NO: 2355704 - RNA, 19 nt, Artificial Sequence
  Description of Artificial Sequence: Synthetic oligonucleotide
  Sense strand starting at position 3530 of SEQ ID NO: 1885620
acugaugucaaugguauag

SEQ ID NO: 2355705 - RNA, 19 nt, Artificial Sequence
  Description of Artificial Sequence: Synthetic oligonucleotide
  Antisense strand to SEQ ID NO: 2355704
cuauaccauugacaucagu

SEQ ID NO: 2355706 - RNA, 19 nt, Artificial Sequence
  Description of Artificial Sequence: Synthetic oligonucleotide
  Sense strand starting at position 3536 of SEQ ID NO: 1885620
gucaaugguauaggauaua

SEQ ID NO: 2355707 - RNA, 19 nt, Artificial Sequence
  Description of Artificial Sequence: Synthetic oligonucleotide
  Antisense strand to SEQ ID NO: 2355706
uauauccuauaccauugac

SEQ ID NO: 2355708 - RNA, 19 nt, Artificial Sequence
  Description of Artificial Sequence: Synthetic oligonucleotide
  Sense strand starting at position 3552 of SEQ ID NO: 1885620
auagaaguuuaggaaacaa

SEQ ID NO: 2355709 - RNA, 19 nt, Artificial Sequence
  Description of Artificial Sequence: Synthetic oligonucleotide
  Antisense strand to SEQ ID NO: 2355708
uuguuuccuaaacuucuau

SEQ ID NO: 2355710 - RNA, 19 nt, Artificial Sequence
  Description of Artificial Sequence: Synthetic oligonucleotide
  Sense strand starting at position 3614 of SEQ ID NO: 1885620
guaucaggucuuuggucaa

SEQ ID NO: 2355711 - RNA, 19 nt, Artificial Sequence
  Description of Artificial Sequence: Synthetic oligonucleotide
  Antisense strand to SEQ ID NO: 2355710
uugaccaaagaccugauac

SEQ ID NO: 2355712 - RNA, 19 nt, Artificial Sequence
  Description of Artificial Sequence: Synthetic oligonucleotide
  Sense strand starting at position 3700 of SEQ ID NO: 1885620
ccaauuaaggcuuauguau

SEQ ID NO: 2355713 - RNA, 19 nt, Artificial Sequence
  Description of Artificial Sequence: Synthetic oligonucleotide
  Antisense strand to SEQ ID NO: 2355712
auacauaagccuuaauugg

SEQ ID NO: 2355714 - RNA, 19 nt, Artificial Sequence
  Description of Artificial Sequence: Synthetic oligonucleotide
  Sense strand starting at position 3801 of SEQ ID NO: 1885620
acaucaaaugagugguaua

SEQ ID NO: 2355715 - RNA, 19 nt, Artificial Sequence
  Description of Artificial Sequence: Synthetic oligonucleotide
  Antisense strand to SEQ ID NO: 2355714
uauaccacucauuugaugu

SEQ ID NO: 2355716 - RNA, 19 nt, Artificial Sequence
  Description of Artificial Sequence: Synthetic oligonucleotide
  Sense strand starting at position 3863 of SEQ ID NO: 1885620
aguagacuuaagcggugau

SEQ ID NO: 2355717 - RNA, 19 nt, Artificial Sequence
  Description of Artificial Sequence: Synthetic oligonucleotide
  Antisense strand to SEQ ID NO: 2355716
aucaccgcuuaagucuacu

SEQ ID NO: 2355718 - RNA, 19 nt, Artificial Sequence
  Description of Artificial Sequence: Synthetic oligonucleotide
  Sense strand starting at position 3866 of SEQ ID NO: 1885620
agacuuaagcggugaugaa

SEQ ID NO: 2355719 - RNA, 19 nt, Artificial Sequence
  Description of Artificial Sequence: Synthetic oligonucleotide
  Antisense strand to SEQ ID NO: 2355718
uucaucaccgcuuaagucu

SEQ ID NO: 2355720 - RNA, 19 nt, Artificial Sequence
  Description of Artificial Sequence: Synthetic oligonucleotide
  Sense strand starting at position 3867 of SEQ ID NO: 1885620
gacuuaagcggugaugaaa

SEQ ID NO: 2355721 - RNA, 19 nt, Artificial Sequence
  Description of Artificial Sequence: Synthetic oligonucleotide
  Antisense strand to SEQ ID NO: 2355720
uuucaucaccgcuuaaguc

SEQ ID NO: 2355722 - RNA, 19 nt, Artificial Sequence
  Description of Artificial Sequence: Synthetic oligonucleotide
  Sense strand starting at position 3976 of SEQ ID NO: 1885620
agagauggcauaggguaua

SEQ ID NO: 2355723 - RNA, 19 nt, Artificial Sequence
  Description of Artificial Sequence: Synthetic oligonucleotide
  Antisense strand to SEQ ID NO: 2355722
uauacccuaugccaucucu

SEQ ID NO: 2355724 - RNA, 19 nt, Artificial Sequence
  Description of Artificial Sequence: Synthetic oligonucleotide
  Sense strand starting at position 45 of SEQ ID NO: 1885621
ugcucuuggcaugauuaaa

SEQ ID NO: 2355725 - RNA, 19 nt, Artificial Sequence
  Description of Artificial Sequence: Synthetic oligonucleotide
  Antisense strand to SEQ ID NO: 2355724
uuuaaucaugccaagagca

SEQ ID NO: 2355726 - RNA, 19 nt, Artificial Sequence
  Description of Artificial Sequence: Synthetic oligonucleotide
  Sense strand starting at position 388 of SEQ ID NO: 1885621
auaauacaucugggcuaga

SEQ ID NO: 2355727 - RNA, 19 nt, Artificial Sequence
  Description of Artificial Sequence: Synthetic oligonucleotide
  Antisense strand to SEQ ID NO: 2355726
ucuagcccagauguauuau

SEQ ID NO: 2355728 - RNA, 19 nt, Artificial Sequence
  Description of Artificial Sequence: Synthetic oligonucleotide
  Sense strand starting at position 401 of SEQ ID NO: 1885621
gcuagagguggcgaacauu

SEQ ID NO: 2355729 - RNA, 19 nt, Artificial Sequence
  Description of Artificial Sequence: Synthetic oligonucleotide
  Antisense strand to SEQ ID NO: 2355728
aauguucgccaccucuagc

SEQ ID NO: 2355730 - RNA, 19 nt, Artificial Sequence
  Description of Artificial Sequence: Synthetic oligonucleotide
  Sense strand starting at position 421 of SEQ ID NO: 1885621
aggauagauucuguaucuc

SEQ ID NO: 2355731 - RNA, 19 nt, Artificial Sequence
  Description of Artificial Sequence: Synthetic oligonucleotide
  Antisense strand to SEQ ID NO: 2355730
gagauacagaaucuauccu

SEQ ID NO: 2355732 - RNA, 19 nt, Artificial Sequence
  Description of Artificial Sequence: Synthetic oligonucleotide
  Sense strand starting at position 499 of SEQ ID NO: 1885621
accagaagcccuggauaaa

SEQ ID NO: 2355733 - RNA, 19 nt, Artificial Sequence
  Description of Artificial Sequence: Synthetic oligonucleotide
  Antisense strand to SEQ ID NO: 2355732
uuuauccagggcuucuggu

SEQ ID NO: 2355734 - RNA, 19 nt, Artificial Sequence
  Description of Artificial Sequence: Synthetic oligonucleotide
  Sense strand starting at position 555 of SEQ ID NO: 1885621
ccuugugcucaguacagaa

SEQ ID NO: 2355735 - RNA, 19 nt, Artificial Sequence
  Description of Artificial Sequence: Synthetic oligonucleotide
  Antisense strand to SEQ ID NO: 2355734
uucuguacugagcacaagg

SEQ ID NO: 2355736 - RNA, 19 nt, Artificial Sequence
  Description of Artificial Sequence: Synthetic oligonucleotide
  Sense strand starting at position 568 of SEQ ID NO: 1885621
acagaaacauguccgucaa

SEQ ID NO: 2355737 - RNA, 19 nt, Artificial Sequence
  Description of Artificial Sequence: Synthetic oligonucleotide
  Antisense strand to SEQ ID NO: 2355736
uugacggacauguuucugu

SEQ ID NO: 2355738 - RNA, 19 nt, Artificial Sequence
  Description of Artificial Sequence: Synthetic oligonucleotide
  Sense strand starting at position 569 of SEQ ID NO: 1885621
cagaaacauguccgucaac

SEQ ID NO: 2355739 - RNA, 19 nt, Artificial Sequence
  Description of Artificial Sequence: Synthetic oligonucleotide
  Antisense strand to SEQ ID NO: 2355738
guugacggacauguuucug

SEQ ID NO: 2355740 - RNA, 19 nt, Artificial Sequence
  Description of Artificial Sequence: Synthetic oligonucleotide
  Sense strand starting at position 756 of SEQ ID NO: 1885621
gucgaaaccuaucuugaaa

SEQ ID NO: 2355741 - RNA, 19 nt, Artificial Sequence
  Description of Artificial Sequence: Synthetic oligonucleotide
  Antisense strand to SEQ ID NO: 2355740
uuucaagauagguuucgac

SEQ ID NO: 2355742 - RNA, 19 nt, Artificial Sequence
  Description of Artificial Sequence: Synthetic oligonucleotide
  Sense strand starting at position 858 of SEQ ID NO: 1885621
ggcguuuguugauuauuua

SEQ ID NO: 2355743 - RNA, 19 nt, Artificial Sequence
  Description of Artificial Sequence: Synthetic oligonucleotide
  Antisense strand to SEQ ID NO: 2355742
uaaauaaucaacaaacgcc

SEQ ID NO: 2355744 - RNA, 19 nt, Artificial Sequence
  Description of Artificial Sequence: Synthetic oligonucleotide
  Sense strand starting at position 859 of SEQ ID NO: 1885621
gcguuuguugauuauuuau

SEQ ID NO: 2355745 - RNA, 19 nt, Artificial Sequence
  Description of Artificial Sequence: Synthetic oligonucleotide
  Antisense strand to SEQ ID NO: 2355744
auaaauaaucaacaaacgc

SEQ ID NO: 2355746 - RNA, 19 nt, Artificial Sequence
  Description of Artificial Sequence: Synthetic oligonucleotide
  Sense strand starting at position 901 of SEQ ID NO: 1885621
aggaaauuccagcgagaca

SEQ ID NO: 2355747 - RNA, 19 nt, Artificial Sequence
  Description of Artificial Sequence: Synthetic oligonucleotide
  Antisense strand to SEQ ID NO: 2355746
ugucucgcuggaauuuccu

SEQ ID NO: 2355748 - RNA, 19 nt, Artificial Sequence
  Description of Artificial Sequence: Synthetic oligonucleotide
  Sense strand starting at position 1421 of SEQ ID NO: 1885621
ugggauguuaacgaauguu

SEQ ID NO: 2355749 - RNA, 19 nt, Artificial Sequence
  Description of Artificial Sequence: Synthetic oligonucleotide
  Antisense strand to SEQ ID NO: 2355748
aacauucguuaacauccca

SEQ ID NO: 2355750 - RNA, 19 nt, Artificial Sequence
  Description of Artificial Sequence: Synthetic oligonucleotide
  Sense strand starting at position 1424 of SEQ ID NO: 1885621
gauguuaacgaauguuuag

SEQ ID NO: 2355751 - RNA, 19 nt, Artificial Sequence
  Description of Artificial Sequence: Synthetic oligonucleotide
  Antisense strand to SEQ ID NO: 2355750
cuaaacauucguuaacauc

SEQ ID NO: 2355752 - RNA, 19 nt, Artificial Sequence
  Description of Artificial Sequence: Synthetic oligonucleotide
  Sense strand starting at position 1477 of SEQ ID NO: 1885621
aggaauacugcucaccguu

SEQ ID NO: 2355753 - RNA, 19 nt, Artificial Sequence
  Description of Artificial Sequence: Synthetic oligonucleotide
  Antisense strand to SEQ ID NO: 2355752
aacggugagcaguauuccu

SEQ ID NO: 2355754 - RNA, 19 nt, Artificial Sequence
  Description of Artificial Sequence: Synthetic oligonucleotide
  Sense strand starting at position 1624 of SEQ ID NO: 1885621
accaaaucugaaugugcua

SEQ ID NO: 2355755 - RNA, 19 nt, Artificial Sequence
  Description of Artificial Sequence: Synthetic oligonucleotide
  Antisense strand to SEQ ID NO: 2355754
uagcacauucagauuuggu

SEQ ID NO: 2355756 - RNA, 19 nt, Artificial Sequence
  Description of Artificial Sequence: Synthetic oligonucleotide
  Sense strand starting at position 1657 of SEQ ID NO: 1885621
auuaaaucagacuguguuu

SEQ ID NO: 2355757 - RNA, 19 nt, Artificial Sequence
  Description of Artificial Sequence: Synthetic oligonucleotide
  Antisense strand to SEQ ID NO: 2355756
aaacacagucugauuuaau

SEQ ID NO: 2355758 - RNA, 19 nt, Artificial Sequence
  Description of Artificial Sequence: Synthetic oligonucleotide
  Sense strand starting at position 1679 of SEQ ID NO: 1885621
acggcaguucgugcuaaau

SEQ ID NO: 2355759 - RNA, 19 nt, Artificial Sequence
  Description of Artificial Sequence: Synthetic oligonucleotide
  Antisense strand to SEQ ID NO: 2355758
auuuagcacgaacugccgu

SEQ ID NO: 2355760 - RNA, 19 nt, Artificial Sequence
  Description of Artificial Sequence: Synthetic oligonucleotide
  Sense strand starting at position 1742 of SEQ ID NO: 1885621
uggcgcagcguaaaugaua

SEQ ID NO: 2355761 - RNA, 19 nt, Artificial Sequence
  Description of Artificial Sequence: Synthetic oligonucleotide
  Antisense strand to SEQ ID NO: 2355760
uaucauuuacgcugcgcca

SEQ ID NO: 2355762 - RNA, 19 nt, Artificial Sequence
  Description of Artificial Sequence: Synthetic oligonucleotide
  Sense strand starting at position 1749 of SEQ ID NO: 1885621
gcguaaaugauagaucugu

SEQ ID NO: 2355763 - RNA, 19 nt, Artificial Sequence
  Description of Artificial Sequence: Synthetic oligonucleotide
  Antisense strand to SEQ ID NO: 2355762
acagaucuaucauuuacgc

SEQ ID NO: 2355764 - RNA, 19 nt, Artificial Sequence
  Description of Artificial Sequence: Synthetic oligonucleotide
  Sense strand starting at position 2296 of SEQ ID NO: 1885621
caaggaagugcuuagaggu

SEQ ID NO: 2355765 - RNA, 19 nt, Artificial Sequence
  Description of Artificial Sequence: Synthetic oligonucleotide
  Antisense strand to SEQ ID NO: 2355764
accucuaagcacuuccuug

SEQ ID NO: 2355766 - RNA, 19 nt, Artificial Sequence
  Description of Artificial Sequence: Synthetic oligonucleotide
  Sense strand starting at position 2497 of SEQ ID NO: 1885621
cggcauuuaucaguuccuu

SEQ ID NO: 2355767 - RNA, 19 nt, Artificial Sequence
  Description of Artificial Sequence: Synthetic oligonucleotide
  Antisense strand to SEQ ID NO: 2355766
aaggaacugauaaaugccg

SEQ ID NO: 2355768 - RNA, 19 nt, Artificial Sequence
  Description of Artificial Sequence: Synthetic oligonucleotide
  Sense strand starting at position 2696 of SEQ ID NO: 1885621
aaguacuuagcggaagcua

SEQ ID NO: 2355769 - RNA, 19 nt, Artificial Sequence
  Description of Artificial Sequence: Synthetic oligonucleotide
  Antisense strand to SEQ ID NO: 2355768
uagcuuccgcuaaguacuu

SEQ ID NO: 2355770 - RNA, 19 nt, Artificial Sequence
  Description of Artificial Sequence: Synthetic oligonucleotide
  Sense strand starting at position 2976 of SEQ ID NO: 1885621
gugugaaugcguguggugu

SEQ ID NO: 2355771 - RNA, 19 nt, Artificial Sequence
  Description of Artificial Sequence: Synthetic oligonucleotide
  Antisense strand to SEQ ID NO: 2355770
acaccacacgcauucacac

SEQ ID NO: 2355772 - RNA, 19 nt, Artificial Sequence
  Description of Artificial Sequence: Synthetic oligonucleotide
  Sense strand starting at position 3166 of SEQ ID NO: 1885621
uuucuaagaucuguaggga

SEQ ID NO: 2355773 - RNA, 19 nt, Artificial Sequence
  Description of Artificial Sequence: Synthetic oligonucleotide
  Antisense strand to SEQ ID NO: 2355772
ucccuacagaucuuagaaa

SEQ ID NO: 2355774 - RNA, 19 nt, Artificial Sequence
  Description of Artificial Sequence: Synthetic oligonucleotide
  Sense strand starting at position 3180 of SEQ ID NO: 1885621
agggaagaggguuguuauu

SEQ ID NO: 2355775 - RNA, 19 nt, Artificial Sequence
  Description of Artificial Sequence: Synthetic oligonucleotide
  Antisense strand to SEQ ID NO: 2355774
aauaacaacccucuucccu

SEQ ID NO: 2355776 - RNA, 19 nt, Artificial Sequence
  Description of Artificial Sequence: Synthetic oligonucleotide
  Sense strand starting at position 3182 of SEQ ID NO: 1885621
ggaagaggguuguuauuga

SEQ ID NO: 2355777 - RNA, 19 nt, Artificial Sequence
  Description of Artificial Sequence: Synthetic oligonucleotide
  Antisense strand to SEQ ID NO: 2355776
ucaauaacaacccucuucc

SEQ ID NO: 2355778 - RNA, 19 nt, Artificial Sequence
  Description of Artificial Sequence: Synthetic oligonucleotide
  Sense strand starting at position 3193 of SEQ ID NO: 1885621
guuauugagagcuaagccu

SEQ ID NO: 2355779 - RNA, 19 nt, Artificial Sequence
  Description of Artificial Sequence: Synthetic oligonucleotide
  Antisense strand to SEQ ID NO: 2355778
aggcuuagcucucaauaac

SEQ ID NO: 2355780 - RNA, 19 nt, Artificial Sequence
  Description of Artificial Sequence: Synthetic oligonucleotide
  Sense strand starting at position 3215 of SEQ ID NO: 1885621
ucuggagcuuuccuugaau

SEQ ID NO: 2355781 - RNA, 19 nt, Artificial Sequence
  Description of Artificial Sequence: Synthetic oligonucleotide
  Antisense strand to SEQ ID NO: 2355780
auucaaggaaagcuccaga

SEQ ID NO: 2355782 - RNA, 19 nt, Artificial Sequence
  Description of Artificial Sequence: Synthetic oligonucleotide
  Sense strand starting at position 3218 of SEQ ID NO: 1885621
ggagcuuuccuugaaucuc

SEQ ID NO: 2355783 - RNA, 19 nt, Artificial Sequence
  Description of Artificial Sequence: Synthetic oligonucleotide
  Antisense strand to SEQ ID NO: 2355782
gagauucaaggaaagcucc

SEQ ID NO: 2355784 - RNA, 19 nt, Artificial Sequence
  Description of Artificial Sequence: Synthetic oligonucleotide
  Sense strand starting at position 3236 of SEQ ID NO: 1885621
cucagaugucauggugaaa

SEQ ID NO: 2355785 - RNA, 19 nt, Artificial Sequence
  Description of Artificial Sequence: Synthetic oligonucleotide
  Antisense strand to SEQ ID NO: 2355784
uuucaccaugacaucugag

SEQ ID NO: 2355786 - RNA, 19 nt, Artificial Sequence
  Description of Artificial Sequence: Synthetic oligonucleotide
  Sense strand starting at position 3239 of SEQ ID NO: 1885621
agaugucauggugaaagcu

SEQ ID NO: 2355787 - RNA, 19 nt, Artificial Sequence
  Description of Artificial Sequence: Synthetic oligonucleotide
  Antisense strand to SEQ ID NO: 2355786
agcuuucaccaugacaucu

SEQ ID NO: 2355788 - RNA, 19 nt, Artificial Sequence
  Description of Artificial Sequence: Synthetic oligonucleotide
  Sense strand starting at position 3299 of SEQ ID NO: 1885621
augcaaaguuuaccagaua

SEQ ID NO: 2355789 - RNA, 19 nt, Artificial Sequence
  Description of Artificial Sequence: Synthetic oligonucleotide
  Antisense strand to SEQ ID NO: 2355788
uaucugguaaacuuugcau

SEQ ID NO: 2355790 - RNA, 19 nt, Artificial Sequence
  Description of Artificial Sequence: Synthetic oligonucleotide
  Sense strand starting at position 3350 of SEQ ID NO: 1885621
agggcuucuaugggcagaa

SEQ ID NO: 2355791 - RNA, 19 nt, Artificial Sequence
  Description of Artificial Sequence: Synthetic oligonucleotide
  Antisense strand to SEQ ID NO: 2355790
uucugcccauagaagcccu

SEQ ID NO: 2355792 - RNA, 19 nt, Artificial Sequence
  Description of Artificial Sequence: Synthetic oligonucleotide
  Sense strand starting at position 3351 of SEQ ID NO: 1885621
gggcuucuaugggcagaaa

SEQ ID NO: 2355793 - RNA, 19 nt, Artificial Sequence
  Description of Artificial Sequence: Synthetic oligonucleotide
  Antisense strand to SEQ ID NO: 2355792
uuucugcccauagaagccc

SEQ ID NO: 2355794 - RNA, 19 nt, Artificial Sequence
  Description of Artificial Sequence: Synthetic oligonucleotide
  Sense strand starting at position 3371 of SEQ ID NO: 1885621
uggaaauuggcauaguauu

SEQ ID NO: 2355795 - RNA, 19 nt, Artificial Sequence
  Description of Artificial Sequence: Synthetic oligonucleotide
  Antisense strand to SEQ ID NO: 2355794
aauacuaugccaauuucca

SEQ ID NO: 2355796 - RNA, 19 nt, Artificial Sequence
  Description of Artificial Sequence: Synthetic oligonucleotide
  Sense strand starting at position 3552 of SEQ ID NO: 1885621
ucaaacgaggcccauuaau

SEQ ID NO: 2355797 - RNA, 19 nt, Artificial Sequence
  Description of Artificial Sequence: Synthetic oligonucleotide
  Antisense strand to SEQ ID NO: 2355796
auuaaugggccucguuuga

SEQ ID NO: 2355798 - RNA, 19 nt, Artificial Sequence
  Description of Artificial Sequence: Synthetic oligonucleotide
  Sense strand starting at position 3635 of SEQ ID NO: 1885621
accugaugucugcagaguu

SEQ ID NO: 2355799 - RNA, 19 nt, Artificial Sequence
  Description of Artificial Sequence: Synthetic oligonucleotide
  Antisense strand to SEQ ID NO: 2355798
aacucugcagacaucaggu

SEQ ID NO: 2355800 - RNA, 19 nt, Artificial Sequence
  Description of Artificial Sequence: Synthetic oligonucleotide
  Sense strand starting at position 3678 of SEQ ID NO: 1885621
gggugaagauaucuauauu

SEQ ID NO: 2355801 - RNA, 19 nt, Artificial Sequence
  Description of Artificial Sequence: Synthetic oligonucleotide
  Antisense strand to SEQ ID NO: 2355800
aauauagauaucuucaccc

SEQ ID NO: 2355802 - RNA, 19 nt, Artificial Sequence
  Description of Artificial Sequence: Synthetic oligonucleotide
  Sense strand starting at position 3901 of SEQ ID NO: 1885621
ggauguuucgugucccugu

SEQ ID NO: 2355803 - RNA, 19 nt, Artificial Sequence
  Description of Artificial Sequence: Synthetic oligonucleotide
  Antisense strand to SEQ ID NO: 2355802
acagggacacgaaacaucc

SEQ ID NO: 2355804 - RNA, 19 nt, Artificial Sequence
  Description of Artificial Sequence: Synthetic oligonucleotide
  Sense strand starting at position 265 of SEQ ID NO: 1885622
gugcuaaagcuugaaauaa

SEQ ID NO: 2355805 - RNA, 19 nt, Artificial Sequence
  Description of Artificial Sequence: Synthetic oligonucleotide
  Antisense strand to SEQ ID NO: 2355804
uuauuucaagcuuuagcac

SEQ ID NO: 2355806 - RNA, 19 nt, Artificial Sequence
  Description of Artificial Sequence: Synthetic oligonucleotide
  Sense strand starting at position 302 of SEQ ID NO: 1885622
acuggaaacuaguuauuga

SEQ ID NO: 2355807 - RNA, 19 nt, Artificial Sequence
  Description of Artificial Sequence: Synthetic oligonucleotide
  Antisense strand to SEQ ID NO: 2355806
ucaauaacuaguuuccagu

SEQ ID NO: 2355808 - RNA, 19 nt, Artificial Sequence
  Description of Artificial Sequence: Synthetic oligonucleotide
  Sense strand starting at position 305 of SEQ ID NO: 1885622
ggaaacuaguuauugauuc

SEQ ID NO: 2355809 - RNA, 19 nt, Artificial Sequence
  Description of Artificial Sequence: Synthetic oligonucleotide
  Antisense strand to SEQ ID NO: 2355808
gaaucaauaacuaguuucc

SEQ ID NO: 2355810 - RNA, 19 nt, Artificial Sequence
  Description of Artificial Sequence: Synthetic oligonucleotide
  Sense strand starting at position 359 of SEQ ID NO: 1885622
agagauaugucauugauua

SEQ ID NO: 2355811 - RNA, 19 nt, Artificial Sequence
  Description of Artificial Sequence: Synthetic oligonucleotide
  Antisense strand to SEQ ID NO: 2355810
uaaucaaugacauaucucu

SEQ ID NO: 2355812 - RNA, 19 nt, Artificial Sequence
  Description of Artificial Sequence: Synthetic oligonucleotide
  Sense strand starting at position 360 of SEQ ID NO: 1885622
gagauaugucauugauuau

SEQ ID NO: 2355813 - RNA, 19 nt, Artificial Sequence
  Description of Artificial Sequence: Synthetic oligonucleotide
  Antisense strand to SEQ ID NO: 2355812
auaaucaaugacauaucuc

SEQ ID NO: 2355814 - RNA, 19 nt, Artificial Sequence
  Description of Artificial Sequence: Synthetic oligonucleotide
  Sense strand starting at position 363 of SEQ ID NO: 1885622
auaugucauugauuaucac

SEQ ID NO: 2355815 - RNA, 19 nt, Artificial Sequence
  Description of Artificial Sequence: Synthetic oligonucleotide
  Antisense strand to SEQ ID NO: 2355814
gugauaaucaaugacauau

SEQ ID NO: 2355816 - RNA, 19 nt, Artificial Sequence
  Description of Artificial Sequence: Synthetic oligonucleotide
  Sense strand starting at position 370 of SEQ ID NO: 1885622
auugauuaucacugccaug

SEQ ID NO: 2355817 - RNA, 19 nt, Artificial Sequence
  Description of Artificial Sequence: Synthetic oligonucleotide
  Antisense strand to SEQ ID NO: 2355816
cauggcagugauaaucaau

SEQ ID NO: 2355818 - RNA, 19 nt, Artificial Sequence
  Description of Artificial Sequence: Synthetic oligonucleotide
  Sense strand starting at position 558 of SEQ ID NO: 1885622
aaauaugacgcaugaggaa

SEQ ID NO: 2355819 - RNA, 19 nt, Artificial Sequence
  Description of Artificial Sequence: Synthetic oligonucleotide
  Antisense strand to SEQ ID NO: 2355818
uuccucaugcgucauauuu

SEQ ID NO: 2355820 - RNA, 19 nt, Artificial Sequence
  Description of Artificial Sequence: Synthetic oligonucleotide
  Sense strand starting at position 570 of SEQ ID NO: 1885622
ugaggaaguuuauucggaa

SEQ ID NO: 2355821 - RNA, 19 nt, Artificial Sequence
  Description of Artificial Sequence: Synthetic oligonucleotide
  Antisense strand to SEQ ID NO: 2355820
uuccgaauaaacuuccuca

SEQ ID NO: 2355822 - RNA, 19 nt, Artificial Sequence
  Description of Artificial Sequence: Synthetic oligonucleotide
  Sense strand starting at position 571 of SEQ ID NO: 1885622
gaggaaguuuauucggaaa

SEQ ID NO: 2355823 - RNA, 19 nt, Artificial Sequence
  Description of Artificial Sequence: Synthetic oligonucleotide
  Antisense strand to SEQ ID NO: 2355822
uuuccgaauaaacuuccuc

SEQ ID NO: 2355824 - RNA, 19 nt, Artificial Sequence
  Description of Artificial Sequence: Synthetic oligonucleotide
  Sense strand starting at position 589 of SEQ ID NO: 1885622
agaugacauugaguuucua

SEQ ID NO: 2355825 - RNA, 19 nt, Artificial Sequence
  Description of Artificial Sequence: Synthetic oligonucleotide
  Antisense strand to SEQ ID NO: 2355824
uagaaacucaaugucaucu

SEQ ID NO: 2355826 - RNA, 19 nt, Artificial Sequence
  Description of Artificial Sequence: Synthetic oligonucleotide
  Sense strand starting at position 645 of SEQ ID NO: 1885622
ugagauaaaucuuugcaug

SEQ ID NO: 2355827 - RNA, 19 nt, Artificial Sequence
  Description of Artificial Sequence: Synthetic oligonucleotide
  Antisense strand to SEQ ID NO: 2355826
caugcaaagauuuaucuca

SEQ ID NO: 2355828 - RNA, 19 nt, Artificial Sequence
  Description of Artificial Sequence: Synthetic oligonucleotide
  Sense strand starting at position 646 of SEQ ID NO: 1885622
gagauaaaucuuugcaugu

SEQ ID NO: 2355829 - RNA, 19 nt, Artificial Sequence
  Description of Artificial Sequence: Synthetic oligonucleotide
  Antisense strand to SEQ ID NO: 2355828
acaugcaaagauuuaucuc

SEQ ID NO: 2355830 - RNA, 19 nt, Artificial Sequence
  Description of Artificial Sequence: Synthetic oligonucleotide
  Sense strand starting at position 647 of SEQ ID NO: 1885622
agauaaaucuuugcaugug

SEQ ID NO: 2355831 - RNA, 19 nt, Artificial Sequence
  Description of Artificial Sequence: Synthetic oligonucleotide
  Antisense strand to SEQ ID NO: 2355830
cacaugcaaagauuuaucu

SEQ ID NO: 2355832 - RNA, 19 nt, Artificial Sequence
  Description of Artificial Sequence: Synthetic oligonucleotide
  Sense strand starting at position 664 of SEQ ID NO: 1885622
ugcuacaagguauaauaau

SEQ ID NO: 2355833 - RNA, 19 nt, Artificial Sequence
  Description of Artificial Sequence: Synthetic oligonucleotide
  Antisense strand to SEQ ID NO: 2355832
auuauuauaccuuguagca

SEQ ID NO: 2355834 - RNA, 19 nt, Artificial Sequence
  Description of Artificial Sequence: Synthetic oligonucleotide
  Sense strand starting at position 682 of SEQ ID NO: 1885622
uuaugacuggcuuaaacua

SEQ ID NO: 2355835 - RNA, 19 nt, Artificial Sequence
  Description of Artificial Sequence: Synthetic oligonucleotide
  Antisense strand to SEQ ID NO: 2355834
uaguuuaagccagucauaa

SEQ ID NO: 2355836 - RNA, 19 nt, Artificial Sequence
  Description of Artificial Sequence: Synthetic oligonucleotide
  Sense strand starting at position 732 of SEQ ID NO: 1885622
acgucuuauaauugaggga

SEQ ID NO: 2355837 - RNA, 19 nt, Artificial Sequence
  Description of Artificial Sequence: Synthetic oligonucleotide
  Antisense strand to SEQ ID NO: 2355836
ucccucaauuauaagacgu

SEQ ID NO: 2355838 - RNA, 19 nt, Artificial Sequence
  Description of Artificial Sequence: Synthetic oligonucleotide
  Sense strand starting at position 822 of SEQ ID NO: 1885622
ugacuuuauguuuagcauu

SEQ ID NO: 2355839 - RNA, 19 nt, Artificial Sequence
  Description of Artificial Sequence: Synthetic oligonucleotide
  Antisense strand to SEQ ID NO: 2355838
aaugcuaaacauaaaguca

SEQ ID NO: 2355840 - RNA, 19 nt, Artificial Sequence
  Description of Artificial Sequence: Synthetic oligonucleotide
  Sense strand starting at position 919 of SEQ ID NO: 1885622
ugaccaauauaggaagaaa

SEQ ID NO: 2355841 - RNA, 19 nt, Artificial Sequence
  Description of Artificial Sequence: Synthetic oligonucleotide
  Antisense strand to SEQ ID NO: 2355840
uuucuuccuauauugguca

SEQ ID NO: 2355842 - RNA, 19 nt, Artificial Sequence
  Description of Artificial Sequence: Synthetic oligonucleotide
  Sense strand starting at position 1047 of SEQ ID NO: 1885622
agcuuuacagguuauguaa

SEQ ID NO: 2355843 - RNA, 19 nt, Artificial Sequence
  Description of Artificial Sequence: Synthetic oligonucleotide
  Antisense strand to SEQ ID NO: 2355842
uuacauaaccuguaaagcu

SEQ ID NO: 2355844 - RNA, 19 nt, Artificial Sequence
  Description of Artificial Sequence: Synthetic oligonucleotide
  Sense strand starting at position 1088 of SEQ ID NO: 1885622
uuggaagacuugucaugaa

SEQ ID NO: 2355845 - RNA, 19 nt, Artificial Sequence
  Description of Artificial Sequence: Synthetic oligonucleotide
  Antisense strand to SEQ ID NO: 2355844
uucaugacaagucuuccaa

SEQ ID NO: 2355846 - RNA, 19 nt, Artificial Sequence
  Description of Artificial Sequence: Synthetic oligonucleotide
  Sense strand starting at position 1307 of SEQ ID NO: 1885622
aagccagguuaucucuaga

SEQ ID NO: 2355847 - RNA, 19 nt, Artificial Sequence
  Description of Artificial Sequence: Synthetic oligonucleotide
  Antisense strand to SEQ ID NO: 2355846
ucuagagauaaccuggcuu

SEQ ID NO: 2355848 - RNA, 19 nt, Artificial Sequence
  Description of Artificial Sequence: Synthetic oligonucleotide
  Sense strand starting at position 1310 of SEQ ID NO: 1885622
ccagguuaucucuagauac

SEQ ID NO: 2355849 - RNA, 19 nt, Artificial Sequence
  Description of Artificial Sequence: Synthetic oligonucleotide
  Antisense strand to SEQ ID NO: 2355848
guaucuagagauaaccugg

SEQ ID NO: 2355850 - RNA, 19 nt, Artificial Sequence
  Description of Artificial Sequence: Synthetic oligonucleotide
  Sense strand starting at position 1312 of SEQ ID NO: 1885622
agguuaucucuagauacuu

SEQ ID NO: 2355851 - RNA, 19 nt, Artificial Sequence
  Description of Artificial Sequence: Synthetic oligonucleotide
  Antisense strand to SEQ ID NO: 2355850
aaguaucuagagauaaccu

SEQ ID NO: 2355852 - RNA, 19 nt, Artificial Sequence
  Description of Artificial Sequence: Synthetic oligonucleotide
  Sense strand starting at position 1317 of SEQ ID NO: 1885622
aucucuagauacuuggauu

SEQ ID NO: 2355853 - RNA, 19 nt, Artificial Sequence
  Description of Artificial Sequence: Synthetic oligonucleotide
  Antisense strand to SEQ ID NO: 2355852
aauccaaguaucuagagau

SEQ ID NO: 2355854 - RNA, 19 nt, Artificial Sequence
  Description of Artificial Sequence: Synthetic oligonucleotide
  Sense strand starting at position 1697 of SEQ ID NO: 1885622
uucuuauuagcugaguaga

SEQ ID NO: 2355855 - RNA, 19 nt, Artificial Sequence
  Description of Artificial Sequence: Synthetic oligonucleotide
  Antisense strand to SEQ ID NO: 2355854
ucuacucagcuaauaagaa

SEQ ID NO: 2355856 - RNA, 19 nt, Artificial Sequence
  Description of Artificial Sequence: Synthetic oligonucleotide
  Sense strand starting at position 1699 of SEQ ID NO: 1885622
cuuauuagcugaguagaaa

SEQ ID NO: 2355857 - RNA, 19 nt, Artificial Sequence
  Description of Artificial Sequence: Synthetic oligonucleotide
  Antisense strand to SEQ ID NO: 2355856
uuucuacucagcuaauaag

SEQ ID NO: 2355858 - RNA, 19 nt, Artificial Sequence
  Description of Artificial Sequence: Synthetic oligonucleotide
  Sense strand starting at position 1727 of SEQ ID NO: 1885622
caccauuguggcuauggaa

SEQ ID NO: 2355859 - RNA, 19 nt, Artificial Sequence
  Description of Artificial Sequence: Synthetic oligonucleotide
  Antisense strand to SEQ ID NO: 2355858
uuccauagccacaauggug

SEQ ID NO: 2355860 - RNA, 19 nt, Artificial Sequence
  Description of Artificial Sequence: Synthetic oligonucleotide
  Sense strand starting at position 2450 of SEQ ID NO: 1885622
acuugagaaucuuuauguc

SEQ ID NO: 2355861 - RNA, 19 nt, Artificial Sequence
  Description of Artificial Sequence: Synthetic oligonucleotide
  Antisense strand to SEQ ID NO: 2355860
gacauaaagauucucaagu

SEQ ID NO: 2355862 - RNA, 19 nt, Artificial Sequence
  Description of Artificial Sequence: Synthetic oligonucleotide
  Sense strand starting at position 2552 of SEQ ID NO: 1885622
agcugaggguuuguaaaua

SEQ ID NO: 2355863 - RNA, 19 nt, Artificial Sequence
  Description of Artificial Sequence: Synthetic oligonucleotide
  Antisense strand to SEQ ID NO: 2355862
uauuuacaaacccucagcu

SEQ ID NO: 2355864 - RNA, 19 nt, Artificial Sequence
  Description of Artificial Sequence: Synthetic oligonucleotide
  Sense strand starting at position 3195 of SEQ ID NO: 1885622
cagagauauguuugccaua

SEQ ID NO: 2355865 - RNA, 19 nt, Artificial Sequence
  Description of Artificial Sequence: Synthetic oligonucleotide
  Antisense strand to SEQ ID NO: 2355864
uauggcaaacauaucucug

SEQ ID NO: 2355866 - RNA, 19 nt, Artificial Sequence
  Description of Artificial Sequence: Synthetic oligonucleotide
  Sense strand starting at position 3196 of SEQ ID NO: 1885622
agagauauguuugccauac

SEQ ID NO: 2355867 - RNA, 19 nt, Artificial Sequence
  Description of Artificial Sequence: Synthetic oligonucleotide
  Antisense strand to SEQ ID NO: 2355866
guauggcaaacauaucucu

SEQ ID NO: 2355868 - RNA, 19 nt, Artificial Sequence
  Description of Artificial Sequence: Synthetic oligonucleotide
  Sense strand starting at position 3197 of SEQ ID NO: 1885622
gagauauguuugccauaca

SEQ ID NO: 2355869 - RNA, 19 nt, Artificial Sequence
  Description of Artificial Sequence: Synthetic oligonucleotide
  Antisense strand to SEQ ID NO: 2355868
uguauggcaaacauaucuc

SEQ ID NO: 2355870 - RNA, 19 nt, Artificial Sequence
  Description of Artificial Sequence: Synthetic oligonucleotide
  Sense strand starting at position 3359 of SEQ ID NO: 1885622
aauggaguuguauauagcu

SEQ ID NO: 2355871 - RNA, 19 nt, Artificial Sequence
  Description of Artificial Sequence: Synthetic oligonucleotide
  Antisense strand to SEQ ID NO: 2355870
agcuauauacaacuccauu

SEQ ID NO: 2355872 - RNA, 19 nt, Artificial Sequence
  Description of Artificial Sequence: Synthetic oligonucleotide
  Sense strand starting at position 3413 of SEQ ID NO: 1885622
auggaagaaucuuaggaaa

SEQ ID NO: 2355873 - RNA, 19 nt, Artificial Sequence
  Description of Artificial Sequence: Synthetic oligonucleotide
  Antisense strand to SEQ ID NO: 2355872
uuuccuaagauucuuccau

SEQ ID NO: 2355874 - RNA, 19 nt, Artificial Sequence
  Description of Artificial Sequence: Synthetic oligonucleotide
  Sense strand starting at position 3559 of SEQ ID NO: 1885622
aacaguaugauugggaguu

SEQ ID NO: 2355875 - RNA, 19 nt, Artificial Sequence
  Description of Artificial Sequence: Synthetic oligonucleotide
  Antisense strand to SEQ ID NO: 2355874
aacucccaaucauacuguu

SEQ ID NO: 2355876 - RNA, 19 nt, Artificial Sequence
  Description of Artificial Sequence: Synthetic oligonucleotide
  Sense strand starting at position 3718 of SEQ ID NO: 1885622
cuacucaaggucgaguaaa

SEQ ID NO: 2355877 - RNA, 19 nt, Artificial Sequence
  Description of Artificial Sequence: Synthetic oligonucleotide
  Antisense strand to SEQ ID NO: 2355876
uuuacucgaccuugaguag

SEQ ID NO: 2355878 - RNA, 19 nt, Artificial Sequence
  Description of Artificial Sequence: Synthetic oligonucleotide
  Sense strand starting at position 3740 of SEQ ID NO: 1885622
agguguucacaugaugaug

SEQ ID NO: 2355879 - RNA, 19 nt, Artificial Sequence
  Description of Artificial Sequence: Synthetic oligonucleotide
  Antisense strand to SEQ ID NO: 2355878
caucaucaugugaacaccu

SEQ ID NO: 2355880 - RNA, 19 nt, Artificial Sequence
  Description of Artificial Sequence: Synthetic oligonucleotide
  Sense strand starting at position 3917 of SEQ ID NO: 1885622
gacaaaccacuguguuaug

SEQ ID NO: 2355881 - RNA, 19 nt, Artificial Sequence
  Description of Artificial Sequence: Synthetic oligonucleotide
  Antisense strand to SEQ ID NO: 2355880
cauaacacagugguuuguc

SEQ ID NO: 2355882 - RNA, 19 nt, Artificial Sequence
  Description of Artificial Sequence: Synthetic oligonucleotide
  Sense strand starting at position 3939 of SEQ ID NO: 1885622
uuaugaauacaaggucauu

SEQ ID NO: 2355883 - RNA, 19 nt, Artificial Sequence
  Description of Artificial Sequence: Synthetic oligonucleotide
  Antisense strand to SEQ ID NO: 2355882
aaugaccuuguauucauaa

SEQ ID NO: 2355884 - RNA, 19 nt, Artificial Sequence
  Description of Artificial Sequence: Synthetic oligonucleotide
  Sense strand starting at position 299 of SEQ ID NO: 1885623
cugacaugaguuuggcaua

SEQ ID NO: 2355885 - RNA, 19 nt, Artificial Sequence
  Description of Artificial Sequence: Synthetic oligonucleotide
  Antisense strand to SEQ ID NO: 2355884
uaugccaaacucaugucag

SEQ ID NO: 2355886 - RNA, 19 nt, Artificial Sequence
  Description of Artificial Sequence: Synthetic oligonucleotide
  Sense strand starting at position 657 of SEQ ID NO: 1885623
cagcuugggucucaggaua

SEQ ID NO: 2355887 - RNA, 19 nt, Artificial Sequence
  Description of Artificial Sequence: Synthetic oligonucleotide
  Antisense strand to SEQ ID NO: 2355886
uauccugagacccaagcug

SEQ ID NO: 2355888 - RNA, 19 nt, Artificial Sequence
  Description of Artificial Sequence: Synthetic oligonucleotide
  Sense strand starting at position 2162 of SEQ ID NO: 1885623
uugcuugcuugcugaguga

SEQ ID NO: 2355889 - RNA, 19 nt, Artificial Sequence
  Description of Artificial Sequence: Synthetic oligonucleotide
  Antisense strand to SEQ ID NO: 2355888
ucacucagcaagcaagcaa

SEQ ID NO: 2355890 - RNA, 19 nt, Artificial Sequence
  Description of Artificial Sequence: Synthetic oligonucleotide
  Sense strand starting at position 2348 of SEQ ID NO: 1885623
ucacccauuucugauuguu

SEQ ID NO: 2355891 - RNA, 19 nt, Artificial Sequence
  Description of Artificial Sequence: Synthetic oligonucleotide
  Antisense strand to SEQ ID NO: 2355890
aacaaucagaaauggguga

SEQ ID NO: 2355892 - RNA, 19 nt, Artificial Sequence
  Description of Artificial Sequence: Synthetic oligonucleotide
  Sense strand starting at position 3633 of SEQ ID NO: 1885623
ccagucuucucauaaacga

SEQ ID NO: 2355893 - RNA, 19 nt, Artificial Sequence
  Description of Artificial Sequence: Synthetic oligonucleotide
  Antisense strand to SEQ ID NO: 2355892
ucguuuaugagaagacugg

SEQ ID NO: 2355894 - RNA, 19 nt, Artificial Sequence
  Description of Artificial Sequence: Synthetic oligonucleotide
  Sense strand starting at position 3858 of SEQ ID NO: 1885623
uuugcacucuguugguaaa

SEQ ID NO: 2355895 - RNA, 19 nt, Artificial Sequence
  Description of Artificial Sequence: Synthetic oligonucleotide
  Antisense strand to SEQ ID NO: 2355894
uuuaccaacagagugcaaa

SEQ ID NO: 2355896 - RNA, 19 nt, Artificial Sequence
  Description of Artificial Sequence: Synthetic oligonucleotide
  Sense strand starting at position 3861 of SEQ ID NO: 1885623
gcacucuguugguaaacca

SEQ ID NO: 2355897 - RNA, 19 nt, Artificial Sequence
  Description of Artificial Sequence: Synthetic oligonucleotide
  Antisense strand to SEQ ID NO: 2355896
ugguuuaccaacagagugc

SEQ ID NO: 2355898 - RNA, 19 nt, Artificial Sequence
  Description of Artificial Sequence: Synthetic oligonucleotide
  Sense strand starting at position 97 of SEQ ID NO: 1885624
gcccuuagucucugcucaa

SEQ ID NO: 2355899 - RNA, 19 nt, Artificial Sequence
  Description of Artificial Sequence: Synthetic oligonucleotide
  Antisense strand to SEQ ID NO: 2355898
uugagcagagacuaagggc

SEQ ID NO: 2355900 - RNA, 19 nt, Artificial Sequence
  Description of Artificial Sequence: Synthetic oligonucleotide
  Sense strand starting at position 100 of SEQ ID NO: 1885624
cuuagucucugcucaaaga

SEQ ID NO: 2355901 - RNA, 19 nt, Artificial Sequence
  Description of Artificial Sequence: Synthetic oligonucleotide
  Antisense strand to SEQ ID NO: 2355900
ucuuugagcagagacuaag

SEQ ID NO: 2355902 - RNA, 19 nt, Artificial Sequence
  Description of Artificial Sequence: Synthetic oligonucleotide
  Sense strand starting at position 203 of SEQ ID NO: 1885624
caucuaagcugagagucaa

SEQ ID NO: 2355903 - RNA, 19 nt, Artificial Sequence
  Description of Artificial Sequence: Synthetic oligonucleotide
  Antisense strand to SEQ ID NO: 2355902
uugacucucagcuuagaug

SEQ ID NO: 2355904 - RNA, 19 nt, Artificial Sequence
  Description of Artificial Sequence: Synthetic oligonucleotide
  Sense strand starting at position 302 of SEQ ID NO: 1885624
ucgcuauaaugagaauuau

SEQ ID NO: 2355905 - RNA, 19 nt, Artificial Sequence
  Description of Artificial Sequence: Synthetic oligonucleotide
  Antisense strand to SEQ ID NO: 2355904
auaauucucauuauagcga

SEQ ID NO: 2355906 - RNA, 19 nt, Artificial Sequence
  Description of Artificial Sequence: Synthetic oligonucleotide
  Sense strand starting at position 821 of SEQ ID NO: 1885624
agguacaauaugugugcaa

SEQ ID NO: 2355907 - RNA, 19 nt, Artificial Sequence
  Description of Artificial Sequence: Synthetic oligonucleotide
  Antisense strand to SEQ ID NO: 2355906
uugcacacauauuguaccu

SEQ ID NO: 2355908 - RNA, 19 nt, Artificial Sequence
  Description of Artificial Sequence: Synthetic oligonucleotide
  Sense strand starting at position 822 of SEQ ID NO: 1885624
gguacaauaugugugcaaa

SEQ ID NO: 2355909 - RNA, 19 nt, Artificial Sequence
  Description of Artificial Sequence: Synthetic oligonucleotide
  Antisense strand to SEQ ID NO: 2355908
uuugcacacauauuguacc

SEQ ID NO: 2355910 - RNA, 19 nt, Artificial Sequence
  Description of Artificial Sequence: Synthetic oligonucleotide
  Sense strand starting at position 906 of SEQ ID NO: 1885624
ucuggucuucgacaaagcu

SEQ ID NO: 2355911 - RNA, 19 nt, Artificial Sequence
  Description of Artificial Sequence: Synthetic oligonucleotide
  Antisense strand to SEQ ID NO: 2355910
agcuuugucgaagaccaga

SEQ ID NO: 2355912 - RNA, 19 nt, Artificial Sequence
  Description of Artificial Sequence: Synthetic oligonucleotide
  Sense strand starting at position 961 of SEQ ID NO: 1885624
acuaaaggcugcuguaaua

SEQ ID NO: 2355913 - RNA, 19 nt, Artificial Sequence
  Description of Artificial Sequence: Synthetic oligonucleotide
  Antisense strand to SEQ ID NO: 2355912
uauuacagcagccuuuagu

SEQ ID NO: 2355914 - RNA, 19 nt, Artificial Sequence
  Description of Artificial Sequence: Synthetic oligonucleotide
  Sense strand starting at position 1040 of SEQ ID NO: 1885624
uccacucuagauggauuaa

SEQ ID NO: 2355915 - RNA, 19 nt, Artificial Sequence
  Description of Artificial Sequence: Synthetic oligonucleotide
  Antisense strand to SEQ ID NO: 2355914
uuaauccaucuagagugga

SEQ ID NO: 2355916 - RNA, 19 nt, Artificial Sequence
  Description of Artificial Sequence: Synthetic oligonucleotide
  Sense strand starting at position 1082 of SEQ ID NO: 1885624
cuguaaugauccuagaagg

SEQ ID NO: 2355917 - RNA, 19 nt, Artificial Sequence
  Description of Artificial Sequence: Synthetic oligonucleotide
  Antisense strand to SEQ ID NO: 2355916
ccuucuaggaucauuacag

SEQ ID NO: 2355918 - RNA, 19 nt, Artificial Sequence
  Description of Artificial Sequence: Synthetic oligonucleotide
  Sense strand starting at position 1289 of SEQ ID NO: 1885624
auguuucuuuguuggcuua

SEQ ID NO: 2355919 - RNA, 19 nt, Artificial Sequence
  Description of Artificial Sequence: Synthetic oligonucleotide
  Antisense strand to SEQ ID NO: 2355918
uaagccaacaaagaaacau

SEQ ID NO: 2355920 - RNA, 19 nt, Artificial Sequence
  Description of Artificial Sequence: Synthetic oligonucleotide
  Sense strand starting at position 1303 of SEQ ID NO: 1885624
gcuuauccaucugacaaag

SEQ ID NO: 2355921 - RNA, 19 nt, Artificial Sequence
  Description of Artificial Sequence: Synthetic oligonucleotide
  Antisense strand to SEQ ID NO: 2355920
cuuugucagauggauaagc

SEQ ID NO: 2355922 - RNA, 19 nt, Artificial Sequence
  Description of Artificial Sequence: Synthetic oligonucleotide
  Sense strand starting at position 1579 of SEQ ID NO: 1885624
ggugguuugcuugugaguu

SEQ ID NO: 2355923 - RNA, 19 nt, Artificial Sequence
  Description of Artificial Sequence: Synthetic oligonucleotide
  Antisense strand to SEQ ID NO: 2355922
aacucacaagcaaaccacc

SEQ ID NO: 2355924 - RNA, 19 nt, Artificial Sequence
  Description of Artificial Sequence: Synthetic oligonucleotide
  Sense strand starting at position 1580 of SEQ ID NO: 1885624
gugguuugcuugugaguuu

SEQ ID NO: 2355925 - RNA, 19 nt, Artificial Sequence
  Description of Artificial Sequence: Synthetic oligonucleotide
  Antisense strand to SEQ ID NO: 2355924
aaacucacaagcaaaccac

SEQ ID NO: 2355926 - RNA, 19 nt, Artificial Sequence
  Description of Artificial Sequence: Synthetic oligonucleotide
  Sense strand starting at position 1581 of SEQ ID NO: 1885624
ugguuugcuugugaguuua

SEQ ID NO: 2355927 - RNA, 19 nt, Artificial Sequence
  Description of Artificial Sequence: Synthetic oligonucleotide
  Antisense strand to SEQ ID NO: 2355926
uaaacucacaagcaaacca

SEQ ID NO: 2355928 - RNA, 19 nt, Artificial Sequence
  Description of Artificial Sequence: Synthetic oligonucleotide
  Sense strand starting at position 1583 of SEQ ID NO: 1885624
guuugcuugugaguuuaca

SEQ ID NO: 2355929 - RNA, 19 nt, Artificial Sequence
  Description of Artificial Sequence: Synthetic oligonucleotide
  Antisense strand to SEQ ID NO: 2355928
uguaaacucacaagcaaac

SEQ ID NO: 2355930 - RNA, 19 nt, Artificial Sequence
  Description of Artificial Sequence: Synthetic oligonucleotide
  Sense strand starting at position 1731 of SEQ ID NO: 1885624
guguauaaccaagggaaua

SEQ ID NO: 2355931 - RNA, 19 nt, Artificial Sequence
  Description of Artificial Sequence: Synthetic oligonucleotide
  Antisense strand to SEQ ID NO: 2355930
uauucccuugguuauacac

SEQ ID NO: 2355932 - RNA, 19 nt, Artificial Sequence
  Description of Artificial Sequence: Synthetic oligonucleotide
  Sense strand starting at position 3207 of SEQ ID NO: 1885624
aaacgcucuguaggauauu

SEQ ID NO: 2355933 - RNA, 19 nt, Artificial Sequence
  Description of Artificial Sequence: Synthetic oligonucleotide
  Antisense strand to SEQ ID NO: 2355932
aauauccuacagagcguuu

SEQ ID NO: 2355934 - RNA, 19 nt, Artificial Sequence
  Description of Artificial Sequence: Synthetic oligonucleotide
  Sense strand starting at position 3208 of SEQ ID NO: 1885624
aacgcucuguaggauauua

SEQ ID NO: 2355935 - RNA, 19 nt, Artificial Sequence
  Description of Artificial Sequence: Synthetic oligonucleotide
  Antisense strand to SEQ ID NO: 2355934
uaauauccuacagagcguu

SEQ ID NO: 2355936 - RNA, 19 nt, Artificial Sequence
  Description of Artificial Sequence: Synthetic oligonucleotide
  Sense strand starting at position 54 of SEQ ID NO: 1885625
cuuugaaguccauagccuu

SEQ ID NO: 2355937 - RNA, 19 nt, Artificial Sequence
  Description of Artificial Sequence: Synthetic oligonucleotide
  Antisense strand to SEQ ID NO: 2355936
aaggcuauggacuucaaag

SEQ ID NO: 2355938 - RNA, 19 nt, Artificial Sequence
  Description of Artificial Sequence: Synthetic oligonucleotide
  Sense strand starting at position 57 of SEQ ID NO: 1885625
ugaaguccauagccuuaau

SEQ ID NO: 2355939 - RNA, 19 nt, Artificial Sequence
  Description of Artificial Sequence: Synthetic oligonucleotide
  Antisense strand to SEQ ID NO: 2355938
auuaaggcuauggacuuca

SEQ ID NO: 2355940 - RNA, 19 nt, Artificial Sequence
  Description of Artificial Sequence: Synthetic oligonucleotide
  Sense strand starting at position 87 of SEQ ID NO: 1885625
uuaucuggaucucagauuu

SEQ ID NO: 2355941 - RNA, 19 nt, Artificial Sequence
  Description of Artificial Sequence: Synthetic oligonucleotide
  Antisense strand to SEQ ID NO: 2355940
aaaucugagauccagauaa

SEQ ID NO: 2355942 - RNA, 19 nt, Artificial Sequence
  Description of Artificial Sequence: Synthetic oligonucleotide
  Sense strand starting at position 201 of SEQ ID NO: 1885625
auauaagucuguuugcaga

SEQ ID NO: 2355943 - RNA, 19 nt, Artificial Sequence
  Description of Artificial Sequence: Synthetic oligonucleotide
  Antisense strand to SEQ ID NO: 2355942
ucugcaaacagacuuauau

SEQ ID NO: 2355944 - RNA, 19 nt, Artificial Sequence
  Description of Artificial Sequence: Synthetic oligonucleotide
  Sense strand starting at position 212 of SEQ ID NO: 1885625
uuugcagaucagcacuauu

SEQ ID NO: 2355945 - RNA, 19 nt, Artificial Sequence
  Description of Artificial Sequence: Synthetic oligonucleotide
  Antisense strand to SEQ ID NO: 2355944
aauagugcugaucugcaaa

SEQ ID NO: 2355946 - RNA, 19 nt, Artificial Sequence
  Description of Artificial Sequence: Synthetic oligonucleotide
  Sense strand starting at position 612 of SEQ ID NO: 1885625
cuggaucacaggugugaga

SEQ ID NO: 2355947 - RNA, 19 nt, Artificial Sequence
  Description of Artificial Sequence: Synthetic oligonucleotide
  Antisense strand to SEQ ID NO: 2355946
ucucacaccugugauccag

SEQ ID NO: 2355948 - RNA, 19 nt, Artificial Sequence
  Description of Artificial Sequence: Synthetic oligonucleotide
  Sense strand starting at position 904 of SEQ ID NO: 1885625
agggaaagccuuugugaaa

SEQ ID NO: 2355949 - RNA, 19 nt, Artificial Sequence
  Description of Artificial Sequence: Synthetic oligonucleotide
  Antisense strand to SEQ ID NO: 2355948
uuucacaaaggcuuucccu

SEQ ID NO: 2355950 - RNA, 19 nt, Artificial Sequence
  Description of Artificial Sequence: Synthetic oligonucleotide
  Sense strand starting at position 905 of SEQ ID NO: 1885625
gggaaagccuuugugaaac

SEQ ID NO: 2355951 - RNA, 19 nt, Artificial Sequence
  Description of Artificial Sequence: Synthetic oligonucleotide
  Antisense strand to SEQ ID NO: 2355950
guuucacaaaggcuuuccc

SEQ ID NO: 2355952 - RNA, 19 nt, Artificial Sequence
  Description of Artificial Sequence: Synthetic oligonucleotide
  Sense strand starting at position 915 of SEQ ID NO: 1885625
uugugaaacuuccugagga

SEQ ID NO: 2355953 - RNA, 19 nt, Artificial Sequence
  Description of Artificial Sequence: Synthetic oligonucleotide
  Antisense strand to SEQ ID NO: 2355952
uccucaggaaguuucacaa

SEQ ID NO: 2355954 - RNA, 19 nt, Artificial Sequence
  Description of Artificial Sequence: Synthetic oligonucleotide
  Sense strand starting at position 961 of SEQ ID NO: 1885625
aguuuagaacuuugguuaa

SEQ ID NO: 2355955 - RNA, 19 nt, Artificial Sequence
  Description of Artificial Sequence: Synthetic oligonucleotide
  Antisense strand to SEQ ID NO: 2355954
uuaaccaaaguucuaaacu

SEQ ID NO: 2355956 - RNA, 19 nt, Artificial Sequence
  Description of Artificial Sequence: Synthetic oligonucleotide
  Sense strand starting at position 980 of SEQ ID NO: 1885625
ggcagcguccuguauuuga

SEQ ID NO: 2355957 - RNA, 19 nt, Artificial Sequence
  Description of Artificial Sequence: Synthetic oligonucleotide
  Antisense strand to SEQ ID NO: 2355956
ucaaauacaggacgcugcc

SEQ ID NO: 2355958 - RNA, 19 nt, Artificial Sequence
  Description of Artificial Sequence: Synthetic oligonucleotide
  Sense strand starting at position 1057 of SEQ ID NO: 1885625
uucuaauucgcagauggag

SEQ ID NO: 2355959 - RNA, 19 nt, Artificial Sequence
  Description of Artificial Sequence: Synthetic oligonucleotide
  Antisense strand to SEQ ID NO: 2355958
cuccaucugcgaauuagaa

SEQ ID NO: 2355960 - RNA, 19 nt, Artificial Sequence
  Description of Artificial Sequence: Synthetic oligonucleotide
  Sense strand starting at position 1153 of SEQ ID NO: 1885625
ggucccacccgauauagau

SEQ ID NO: 2355961 - RNA, 19 nt, Artificial Sequence
  Description of Artificial Sequence: Synthetic oligonucleotide
  Antisense strand to SEQ ID NO: 2355960
aucuauaucgggugggacc

SEQ ID NO: 2355962 - RNA, 19 nt, Artificial Sequence
  Description of Artificial Sequence: Synthetic oligonucleotide
  Sense strand starting at position 1278 of SEQ ID NO: 1885625
gaaguuccagugcaucauu

SEQ ID NO: 2355963 - RNA, 19 nt, Artificial Sequence
  Description of Artificial Sequence: Synthetic oligonucleotide
  Antisense strand to SEQ ID NO: 2355962
aaugaugcacuggaacuuc

SEQ ID NO: 2355964 - RNA, 19 nt, Artificial Sequence
  Description of Artificial Sequence: Synthetic oligonucleotide
  Sense strand starting at position 1334 of SEQ ID NO: 1885625
cggacugucgucaguccua

SEQ ID NO: 2355965 - RNA, 19 nt, Artificial Sequence
  Description of Artificial Sequence: Synthetic oligonucleotide
  Antisense strand to SEQ ID NO: 2355964
uaggacugacgacaguccg

SEQ ID NO: 2355966 - RNA, 19 nt, Artificial Sequence
  Description of Artificial Sequence: Synthetic oligonucleotide
  Sense strand starting at position 1403 of SEQ ID NO: 1885625
caggaauacacuggugguu

SEQ ID NO: 2355967 - RNA, 19 nt, Artificial Sequence
  Description of Artificial Sequence: Synthetic oligonucleotide
  Antisense strand to SEQ ID NO: 2355966
aaccaccaguguauuccug

SEQ ID NO: 2355968 - RNA, 19 nt, Artificial Sequence
  Description of Artificial Sequence: Synthetic oligonucleotide
  Sense strand starting at position 1406 of SEQ ID NO: 1885625
gaauacacuggugguuaaa

SEQ ID NO: 2355969 - RNA, 19 nt, Artificial Sequence
  Description of Artificial Sequence: Synthetic oligonucleotide
  Antisense strand to SEQ ID NO: 2355968
uuuaaccaccaguguauuc

SEQ ID NO: 2355970 - RNA, 19 nt, Artificial Sequence
  Description of Artificial Sequence: Synthetic oligonucleotide
  Sense strand starting at position 1617 of SEQ ID NO: 1885625
gacucaugcgagucguucu

SEQ ID NO: 2355971 - RNA, 19 nt, Artificial Sequence
  Description of Artificial Sequence: Synthetic oligonucleotide
  Antisense strand to SEQ ID NO: 2355970
agaacgacucgcaugaguc

SEQ ID NO: 2355972 - RNA, 19 nt, Artificial Sequence
  Description of Artificial Sequence: Synthetic oligonucleotide
  Sense strand starting at position 2271 of SEQ ID NO: 1885625
cguuguaaguaauuuguau

SEQ ID NO: 2355973 - RNA, 19 nt, Artificial Sequence
  Description of Artificial Sequence: Synthetic oligonucleotide
  Antisense strand to SEQ ID NO: 2355972
auacaaauuacuuacaacg

SEQ ID NO: 2355974 - RNA, 19 nt, Artificial Sequence
  Description of Artificial Sequence: Synthetic oligonucleotide
  Sense strand starting at position 2818 of SEQ ID NO: 1885625
aauguaggagcacgaguua

SEQ ID NO: 2355975 - RNA, 19 nt, Artificial Sequence
  Description of Artificial Sequence: Synthetic oligonucleotide
  Antisense strand to SEQ ID NO: 2355974
uaacucgugcuccuacauu

SEQ ID NO: 2355976 - RNA, 19 nt, Artificial Sequence
  Description of Artificial Sequence: Synthetic oligonucleotide
  Sense strand starting at position 2842 of SEQ ID NO: 1885625
ccagcuuugagcguugagu

SEQ ID NO: 2355977 - RNA, 19 nt, Artificial Sequence
  Description of Artificial Sequence: Synthetic oligonucleotide
  Antisense strand to SEQ ID NO: 2355976
acucaacgcucaaagcugg

SEQ ID NO: 2355978 - RNA, 19 nt, Artificial Sequence
  Description of Artificial Sequence: Synthetic oligonucleotide
  Sense strand starting at position 3011 of SEQ ID NO: 1885625
ucuaucucuggugauacuu

SEQ ID NO: 2355979 - RNA, 19 nt, Artificial Sequence
  Description of Artificial Sequence: Synthetic oligonucleotide
  Antisense strand to SEQ ID NO: 2355978
aaguaucaccagagauaga

SEQ ID NO: 2355980 - RNA, 19 nt, Artificial Sequence
  Description of Artificial Sequence: Synthetic oligonucleotide
  Sense strand starting at position 3041 of SEQ ID NO: 1885625
guuguaaggcuugaagcua

SEQ ID NO: 2355981 - RNA, 19 nt, Artificial Sequence
  Description of Artificial Sequence: Synthetic oligonucleotide
  Antisense strand to SEQ ID NO: 2355980
uagcuucaagccuuacaac

SEQ ID NO: 2355982 - RNA, 19 nt, Artificial Sequence
  Description of Artificial Sequence: Synthetic oligonucleotide
  Sense strand starting at position 3167 of SEQ ID NO: 1885625
gcucauugccaguagauua

SEQ ID NO: 2355983 - RNA, 19 nt, Artificial Sequence
  Description of Artificial Sequence: Synthetic oligonucleotide
  Antisense strand to SEQ ID NO: 2355982
uaaucuacuggcaaugagc

SEQ ID NO: 2355984 - RNA, 19 nt, Artificial Sequence
  Description of Artificial Sequence: Synthetic oligonucleotide
  Sense strand starting at position 3203 of SEQ ID NO: 1885625
gcaaauauacagcauugua

SEQ ID NO: 2355985 - RNA, 19 nt, Artificial Sequence
  Description of Artificial Sequence: Synthetic oligonucleotide
  Antisense strand to SEQ ID NO: 2355984
uacaaugcuguauauuugc

SEQ ID NO: 2355986 - RNA, 19 nt, Artificial Sequence
  Description of Artificial Sequence: Synthetic oligonucleotide
  Sense strand starting at position 3258 of SEQ ID NO: 1885625
ugaauauugaagcguaaga

SEQ ID NO: 2355987 - RNA, 19 nt, Artificial Sequence
  Description of Artificial Sequence: Synthetic oligonucleotide
  Antisense strand to SEQ ID NO: 2355986
ucuuacgcuucaauauuca

SEQ ID NO: 2355988 - RNA, 19 nt, Artificial Sequence
  Description of Artificial Sequence: Synthetic oligonucleotide
  Sense strand starting at position 3260 of SEQ ID NO: 1885625
aauauugaagcguaagagu

SEQ ID NO: 2355989 - RNA, 19 nt, Artificial Sequence
  Description of Artificial Sequence: Synthetic oligonucleotide
  Antisense strand to SEQ ID NO: 2355988
acucuuacgcuucaauauu

SEQ ID NO: 2355990 - RNA, 19 nt, Artificial Sequence
  Description of Artificial Sequence: Synthetic oligonucleotide
  Sense strand starting at position 3268 of SEQ ID NO: 1885625
agcguaagagugccucuuu

SEQ ID NO: 2355991 - RNA, 19 nt, Artificial Sequence
  Description of Artificial Sequence: Synthetic oligonucleotide
  Antisense strand to SEQ ID NO: 2355990
aaagaggcacucuuacgcu

SEQ ID NO: 2355992 - RNA, 19 nt, Artificial Sequence
  Description of Artificial Sequence: Synthetic oligonucleotide
  Sense strand starting at position 3383 of SEQ ID NO: 1885625
gugguuucuagacaucgaa

SEQ ID NO: 2355993 - RNA, 19 nt, Artificial Sequence
  Description of Artificial Sequence: Synthetic oligonucleotide
  Antisense strand to SEQ ID NO: 2355992
uucgaugucuagaaaccac

SEQ ID NO: 2355994 - RNA, 19 nt, Artificial Sequence
  Description of Artificial Sequence: Synthetic oligonucleotide
  Sense strand starting at position 3390 of SEQ ID NO: 1885625
cuagacaucgaauguagua

SEQ ID NO: 2355995 - RNA, 19 nt, Artificial Sequence
  Description of Artificial Sequence: Synthetic oligonucleotide
  Antisense strand to SEQ ID NO: 2355994
uacuacauucgaugucuag

SEQ ID NO: 2355996 - RNA, 19 nt, Artificial Sequence
  Description of Artificial Sequence: Synthetic oligonucleotide
  Sense strand starting at position 3495 of SEQ ID NO: 1885625
gaauguguuucuuuacagg

SEQ ID NO: 2355997 - RNA, 19 nt, Artificial Sequence
  Description of Artificial Sequence: Synthetic oligonucleotide
  Antisense strand to SEQ ID NO: 2355996
ccuguaaagaaacacauuc

SEQ ID NO: 2355998 - RNA, 19 nt, Artificial Sequence
  Description of Artificial Sequence: Synthetic oligonucleotide
  Sense strand starting at position 3518 of SEQ ID NO: 1885625
acucuaacuuuggcacaga

SEQ ID NO: 2355999 - RNA, 19 nt, Artificial Sequence
  Description of Artificial Sequence: Synthetic oligonucleotide
  Antisense strand to SEQ ID NO: 2355998
ucugugccaaaguuagagu

SEQ ID NO: 2356000 - RNA, 19 nt, Artificial Sequence
  Description of Artificial Sequence: Synthetic oligonucleotide
  Sense strand starting at position 3624 of SEQ ID NO: 1885625
acauuacuucugugaugaa

SEQ ID NO: 2356001 - RNA, 19 nt, Artificial Sequence
  Description of Artificial Sequence: Synthetic oligonucleotide
  Antisense strand to SEQ ID NO: 2356000
uucaucacagaaguaaugu

SEQ ID NO: 2356002 - RNA, 19 nt, Artificial Sequence
  Description of Artificial Sequence: Synthetic oligonucleotide
  Sense strand starting at position 3694 of SEQ ID NO: 1885625
augguuucuguuuauugau

SEQ ID NO: 2356003 - RNA, 19 nt, Artificial Sequence
  Description of Artificial Sequence: Synthetic oligonucleotide
  Antisense strand to SEQ ID NO: 2356002
aucaauaaacagaaaccau

SEQ ID NO: 2356004 - RNA, 19 nt, Artificial Sequence
  Description of Artificial Sequence: Synthetic oligonucleotide
  Sense strand starting at position 3750 of SEQ ID NO: 1885625
gagucuaagcaagauuguu

SEQ ID NO: 2356005 - RNA, 19 nt, Artificial Sequence
  Description of Artificial Sequence: Synthetic oligonucleotide
  Antisense strand to SEQ ID NO: 2356004
aacaaucuugcuuagacuc

SEQ ID NO: 2356006 - RNA, 19 nt, Artificial Sequence
  Description of Artificial Sequence: Synthetic oligonucleotide
  Sense strand starting at position 3790 of SEQ ID NO: 1885625
ggagauaaauguuugcagu

SEQ ID NO: 2356007 - RNA, 19 nt, Artificial Sequence
  Description of Artificial Sequence: Synthetic oligonucleotide
  Antisense strand to SEQ ID NO: 2356006
acugcaaacauuuaucucc

SEQ ID NO: 2356008 - RNA, 19 nt, Artificial Sequence
  Description of Artificial Sequence: Synthetic oligonucleotide
  Sense strand starting at position 3791 of SEQ ID NO: 1885625
gagauaaauguuugcagug

SEQ ID NO: 2356009 - RNA, 19 nt, Artificial Sequence
  Description of Artificial Sequence: Synthetic oligonucleotide
  Antisense strand to SEQ ID NO: 2356008
cacugcaaacauuuaucuc

SEQ ID NO: 2356010 - RNA, 19 nt, Artificial Sequence
  Description of Artificial Sequence: Synthetic oligonucleotide
  Sense strand starting at position 3792 of SEQ ID NO: 1885625
agauaaauguuugcaguga

SEQ ID NO: 2356011 - RNA, 19 nt, Artificial Sequence
  Description of Artificial Sequence: Synthetic oligonucleotide
  Antisense strand to SEQ ID NO: 2356010
ucacugcaaacauuuaucu

SEQ ID NO: 2356012 - RNA, 19 nt, Artificial Sequence
  Description of Artificial Sequence: Synthetic oligonucleotide
  Sense strand starting at position 3805 of SEQ ID NO: 1885625
cagugaugucgugaugacu

SEQ ID NO: 2356013 - RNA, 19 nt, Artificial Sequence
  Description of Artificial Sequence: Synthetic oligonucleotide
  Antisense strand to SEQ ID NO: 2356012
agucaucacgacaucacug

SEQ ID NO: 2356014 - RNA, 19 nt, Artificial Sequence
  Description of Artificial Sequence: Synthetic oligonucleotide
  Sense strand starting at position 3816 of SEQ ID NO: 1885625
ugaugacugcguuauuaag

SEQ ID NO: 2356015 - RNA, 19 nt, Artificial Sequence
  Description of Artificial Sequence: Synthetic oligonucleotide
  Antisense strand to SEQ ID NO: 2356014
cuuaauaacgcagucauca

SEQ ID NO: 2356016 - RNA, 19 nt, Artificial Sequence
  Description of Artificial Sequence: Synthetic oligonucleotide
  Sense strand starting at position 503 of SEQ ID NO: 1885626
ccuguccggcgguguuaua

SEQ ID NO: 2356017 - RNA, 19 nt, Artificial Sequence
  Description of Artificial Sequence: Synthetic oligonucleotide
  Antisense strand to SEQ ID NO: 2356016
uauaacaccgccggacagg

SEQ ID NO: 2356018 - RNA, 19 nt, Artificial Sequence
  Description of Artificial Sequence: Synthetic oligonucleotide
  Sense strand starting at position 1085 of SEQ ID NO: 1885626
gggagaauauugugggaga

SEQ ID NO: 2356019 - RNA, 19 nt, Artificial Sequence
  Description of Artificial Sequence: Synthetic oligonucleotide
  Antisense strand to SEQ ID NO: 2356018
ucucccacaauauucuccc

SEQ ID NO: 2356020 - RNA, 19 nt, Artificial Sequence
  Description of Artificial Sequence: Synthetic oligonucleotide
  Sense strand starting at position 1086 of SEQ ID NO: 1885626
ggagaauauugugggagaa

SEQ ID NO: 2356021 - RNA, 19 nt, Artificial Sequence
  Description of Artificial Sequence: Synthetic oligonucleotide
  Antisense strand to SEQ ID NO: 2356020
uucucccacaauauucucc

SEQ ID NO: 2356022 - RNA, 19 nt, Artificial Sequence
  Description of Artificial Sequence: Synthetic oligonucleotide
  Sense strand starting at position 1088 of SEQ ID NO: 1885626
agaauauugugggagaaag

SEQ ID NO: 2356023 - RNA, 19 nt, Artificial Sequence
  Description of Artificial Sequence: Synthetic oligonucleotide
  Antisense strand to SEQ ID NO: 2356022
cuuucucccacaauauucu

SEQ ID NO: 2356024 - RNA, 19 nt, Artificial Sequence
  Description of Artificial Sequence: Synthetic oligonucleotide
  Sense strand starting at position 1114 of SEQ ID NO: 1885626
ugaacagaacugcaguuau

SEQ ID NO: 2356025 - RNA, 19 nt, Artificial Sequence
  Description of Artificial Sequence: Synthetic oligonucleotide
  Antisense strand to SEQ ID NO: 2356024
auaacugcaguucuguuca

SEQ ID NO: 2356026 - RNA, 19 nt, Artificial Sequence
  Description of Artificial Sequence: Synthetic oligonucleotide
  Sense strand starting at position 1344 of SEQ ID NO: 1885626
ggcugaugguaggucucaa

SEQ ID NO: 2356027 - RNA, 19 nt, Artificial Sequence
  Description of Artificial Sequence: Synthetic oligonucleotide
  Antisense strand to SEQ ID NO: 2356026
uugagaccuaccaucagcc

SEQ ID NO: 2356028 - RNA, 19 nt, Artificial Sequence
  Description of Artificial Sequence: Synthetic oligonucleotide
  Sense strand starting at position 1439 of SEQ ID NO: 1885626
gcgucucggcuuccaagaa

SEQ ID NO: 2356029 - RNA, 19 nt, Artificial Sequence
  Description of Artificial Sequence: Synthetic oligonucleotide
  Antisense strand to SEQ ID NO: 2356028
uucuuggaagccgagacgc

SEQ ID NO: 2356030 - RNA, 19 nt, Artificial Sequence
  Description of Artificial Sequence: Synthetic oligonucleotide
  Sense strand starting at position 2014 of SEQ ID NO: 1885626
ggaggauuccgaggguuuc

SEQ ID NO: 2356031 - RNA, 19 nt, Artificial Sequence
  Description of Artificial Sequence: Synthetic oligonucleotide
  Antisense strand to SEQ ID NO: 2356030
gaaacccucggaauccucc

SEQ ID NO: 2356032 - RNA, 19 nt, Artificial Sequence
  Description of Artificial Sequence: Synthetic oligonucleotide
  Sense strand starting at position 2015 of SEQ ID NO: 1885626
gaggauuccgaggguuuca

SEQ ID NO: 2356033 - RNA, 19 nt, Artificial Sequence
  Description of Artificial Sequence: Synthetic oligonucleotide
  Antisense strand to SEQ ID NO: 2356032
ugaaacccucggaauccuc

SEQ ID NO: 2356034 - RNA, 19 nt, Artificial Sequence
  Description of Artificial Sequence: Synthetic oligonucleotide
  Sense strand starting at position 2072 of SEQ ID NO: 1885626
cgcuguuucccgagggaag

SEQ ID NO: 2356035 - RNA, 19 nt, Artificial Sequence
  Description of Artificial Sequence: Synthetic oligonucleotide
  Antisense strand to SEQ ID NO: 2356034
cuucccucgggaaacagcg

SEQ ID NO: 2356036 - RNA, 19 nt, Artificial Sequence
  Description of Artificial Sequence: Synthetic oligonucleotide
  Sense strand starting at position 2119 of SEQ ID NO: 1885626
ggcacuuagaacugucuga

SEQ ID NO: 2356037 - RNA, 19 nt, Artificial Sequence
  Description of Artificial Sequence: Synthetic oligonucleotide
  Antisense strand to SEQ ID NO: 2356036
ucagacaguucuaagugcc

SEQ ID NO: 2356038 - RNA, 19 nt, Artificial Sequence
  Description of Artificial Sequence: Synthetic oligonucleotide
  Sense strand starting at position 2238 of SEQ ID NO: 1885626
ggcuuuauauggcuguauu

SEQ ID NO: 2356039 - RNA, 19 nt, Artificial Sequence
  Description of Artificial Sequence: Synthetic oligonucleotide
  Antisense strand to SEQ ID NO: 2356038
aauacagccauauaaagcc

SEQ ID NO: 2356040 - RNA, 19 nt, Artificial Sequence
  Description of Artificial Sequence: Synthetic oligonucleotide
  Sense strand starting at position 2263 of SEQ ID NO: 1885626
ggcaauuccugcugaacaa

SEQ ID NO: 2356041 - RNA, 19 nt, Artificial Sequence
  Description of Artificial Sequence: Synthetic oligonucleotide
  Antisense strand to SEQ ID NO: 2356040
uuguucagcaggaauugcc

SEQ ID NO: 2356042 - RNA, 19 nt, Artificial Sequence
  Description of Artificial Sequence: Synthetic oligonucleotide
  Sense strand starting at position 2264 of SEQ ID NO: 1885626
gcaauuccugcugaacaaa

SEQ ID NO: 2356043 - RNA, 19 nt, Artificial Sequence
  Description of Artificial Sequence: Synthetic oligonucleotide
  Antisense strand to SEQ ID NO: 2356042
uuuguucagcaggaauugc

SEQ ID NO: 2356044 - RNA, 19 nt, Artificial Sequence
  Description of Artificial Sequence: Synthetic oligonucleotide
  Sense strand starting at position 2308 of SEQ ID NO: 1885626
uggagugugacuggcuuaa

SEQ ID NO: 2356045 - RNA, 19 nt, Artificial Sequence
  Description of Artificial Sequence: Synthetic oligonucleotide
  Antisense strand to SEQ ID NO: 2356044
uuaagccagucacacucca

SEQ ID NO: 2356046 - RNA, 19 nt, Artificial Sequence
  Description of Artificial Sequence: Synthetic oligonucleotide
  Sense strand starting at position 2310 of SEQ ID NO: 1885626
gagugugacuggcuuaacu

SEQ ID NO: 2356047 - RNA, 19 nt, Artificial Sequence
  Description of Artificial Sequence: Synthetic oligonucleotide
  Antisense strand to SEQ ID NO: 2356046
aguuaagccagucacacuc

SEQ ID NO: 2356048 - RNA, 19 nt, Artificial Sequence
  Description of Artificial Sequence: Synthetic oligonucleotide
  Sense strand starting at position 2365 of SEQ ID NO: 1885626
aggccuucguacucuugau

SEQ ID NO: 2356049 - RNA, 19 nt, Artificial Sequence
  Description of Artificial Sequence: Synthetic oligonucleotide
  Antisense strand to SEQ ID NO: 2356048
aucaagaguacgaaggccu

SEQ ID NO: 2356050 - RNA, 19 nt, Artificial Sequence
  Description of Artificial Sequence: Synthetic oligonucleotide
  Sense strand starting at position 2384 of SEQ ID NO: 1885626
uuucuugauugauugaacu

SEQ ID NO: 2356051 - RNA, 19 nt, Artificial Sequence
  Description of Artificial Sequence: Synthetic oligonucleotide
  Antisense strand to SEQ ID NO: 2356050
aguucaaucaaucaagaaa

SEQ ID NO: 2356052 - RNA, 19 nt, Artificial Sequence
  Description of Artificial Sequence: Synthetic oligonucleotide
  Sense strand starting at position 2474 of SEQ ID NO: 1885626
cguggucuugccuccuuaa

SEQ ID NO: 2356053 - RNA, 19 nt, Artificial Sequence
  Description of Artificial Sequence: Synthetic oligonucleotide
  Antisense strand to SEQ ID NO: 2356052
uuaaggaggcaagaccacg

SEQ ID NO: 2356054 - RNA, 19 nt, Artificial Sequence
  Description of Artificial Sequence: Synthetic oligonucleotide
  Sense strand starting at position 2524 of SEQ ID NO: 1885626
accuaauccuagccguaua

SEQ ID NO: 2356055 - RNA, 19 nt, Artificial Sequence
  Description of Artificial Sequence: Synthetic oligonucleotide
  Antisense strand to SEQ ID NO: 2356054
uauacggcuaggauuaggu

SEQ ID NO: 2356056 - RNA, 19 nt, Artificial Sequence
  Description of Artificial Sequence: Synthetic oligonucleotide
  Sense strand starting at position 2529 of SEQ ID NO: 1885626
auccuagccguauauuaaa

SEQ ID NO: 2356057 - RNA, 19 nt, Artificial Sequence
  Description of Artificial Sequence: Synthetic oligonucleotide
  Antisense strand to SEQ ID NO: 2356056
uuuaauauacggcuaggau

SEQ ID NO: 2356058 - RNA, 19 nt, Artificial Sequence
  Description of Artificial Sequence: Synthetic oligonucleotide
  Sense strand starting at position 2553 of SEQ ID NO: 1885626
uauugugucugaguuauac

SEQ ID NO: 2356059 - RNA, 19 nt, Artificial Sequence
  Description of Artificial Sequence: Synthetic oligonucleotide
  Antisense strand to SEQ ID NO: 2356058
guauaacucagacacaaua

SEQ ID NO: 2356060 - RNA, 19 nt, Artificial Sequence
  Description of Artificial Sequence: Synthetic oligonucleotide
  Sense strand starting at position 2565 of SEQ ID NO: 1885626
guuauacuuccguaauggu

SEQ ID NO: 2356061 - RNA, 19 nt, Artificial Sequence
  Description of Artificial Sequence: Synthetic oligonucleotide
  Antisense strand to SEQ ID NO: 2356060
accauuacggaaguauaac

SEQ ID NO: 2356062 - RNA, 19 nt, Artificial Sequence
  Description of Artificial Sequence: Synthetic oligonucleotide
  Sense strand starting at position 2568 of SEQ ID NO: 1885626
auacuuccguaaugguaaa

SEQ ID NO: 2356063 - RNA, 19 nt, Artificial Sequence
  Description of Artificial Sequence: Synthetic oligonucleotide
  Antisense strand to SEQ ID NO: 2356062
uuuaccauuacggaaguau

SEQ ID NO: 2356064 - RNA, 19 nt, Artificial Sequence
  Description of Artificial Sequence: Synthetic oligonucleotide
  Sense strand starting at position 2632 of SEQ ID NO: 1885626
gugauuuauucucaaauga

SEQ ID NO: 2356065 - RNA, 19 nt, Artificial Sequence
  Description of Artificial Sequence: Synthetic oligonucleotide
  Antisense strand to SEQ ID NO: 2356064
ucauuugagaauaaaucac

SEQ ID NO: 2356066 - RNA, 19 nt, Artificial Sequence
  Description of Artificial Sequence: Synthetic oligonucleotide
  Sense strand starting at position 2673 of SEQ ID NO: 1885626
ccugaaguguugucaguua

SEQ ID NO: 2356067 - RNA, 19 nt, Artificial Sequence
  Description of Artificial Sequence: Synthetic oligonucleotide
  Antisense strand to SEQ ID NO: 2356066
uaacugacaacacuucagg

SEQ ID NO: 2356068 - RNA, 19 nt, Artificial Sequence
  Description of Artificial Sequence: Synthetic oligonucleotide
  Sense strand starting at position 2694 of SEQ ID NO: 1885626
uccucauucuuugaaacgu

SEQ ID NO: 2356069 - RNA, 19 nt, Artificial Sequence
  Description of Artificial Sequence: Synthetic oligonucleotide
  Antisense strand to SEQ ID NO: 2356068
acguuucaaagaaugagga

SEQ ID NO: 2356070 - RNA, 19 nt, Artificial Sequence
  Description of Artificial Sequence: Synthetic oligonucleotide
  Sense strand starting at position 2709 of SEQ ID NO: 1885626
acguaauaguuccuggaaa

SEQ ID NO: 2356071 - RNA, 19 nt, Artificial Sequence
  Description of Artificial Sequence: Synthetic oligonucleotide
  Antisense strand to SEQ ID NO: 2356070
uuuccaggaacuauuacgu

SEQ ID NO: 2356072 - RNA, 19 nt, Artificial Sequence
  Description of Artificial Sequence: Synthetic oligonucleotide
  Sense strand starting at position 3073 of SEQ ID NO: 1885626
guacaucuaguagagcauu

SEQ ID NO: 2356073 - RNA, 19 nt, Artificial Sequence
  Description of Artificial Sequence: Synthetic oligonucleotide
  Antisense strand to SEQ ID NO: 2356072
aaugcucuacuagauguac

SEQ ID NO: 2356074 - RNA, 19 nt, Artificial Sequence
  Description of Artificial Sequence: Synthetic oligonucleotide
  Sense strand starting at position 3093 of SEQ ID NO: 1885626
aaacgcgacucagcauuua

SEQ ID NO: 2356075 - RNA, 19 nt, Artificial Sequence
  Description of Artificial Sequence: Synthetic oligonucleotide
  Antisense strand to SEQ ID NO: 2356074
uaaaugcugagucgcguuu

SEQ ID NO: 2356076 - RNA, 19 nt, Artificial Sequence
  Description of Artificial Sequence: Synthetic oligonucleotide
  Sense strand starting at position 3187 of SEQ ID NO: 1885626
uuuguucuuugagagggua

SEQ ID NO: 2356077 - RNA, 19 nt, Artificial Sequence
  Description of Artificial Sequence: Synthetic oligonucleotide
  Antisense strand to SEQ ID NO: 2356076
uacccucucaaagaacaaa

SEQ ID NO: 2356078 - RNA, 19 nt, Artificial Sequence
  Description of Artificial Sequence: Synthetic oligonucleotide
  Sense strand starting at position 3189 of SEQ ID NO: 1885626
uguucuuugagaggguaau

SEQ ID NO: 2356079 - RNA, 19 nt, Artificial Sequence
  Description of Artificial Sequence: Synthetic oligonucleotide
  Antisense strand to SEQ ID NO: 2356078
auuacccucucaaagaaca

SEQ ID NO: 2356080 - RNA, 19 nt, Artificial Sequence
  Description of Artificial Sequence: Synthetic oligonucleotide
  Sense strand starting at position 3190 of SEQ ID NO: 1885626
guucuuugagaggguaaua

SEQ ID NO: 2356081 - RNA, 19 nt, Artificial Sequence
  Description of Artificial Sequence: Synthetic oligonucleotide
  Antisense strand to SEQ ID NO: 2356080
uauuacccucucaaagaac

SEQ ID NO: 2356082 - RNA, 19 nt, Artificial Sequence
  Description of Artificial Sequence: Synthetic oligonucleotide
  Sense strand starting at position 3195 of SEQ ID NO: 1885626
uugagaggguaauaaugua

SEQ ID NO: 2356083 - RNA, 19 nt, Artificial Sequence
  Description of Artificial Sequence: Synthetic oligonucleotide
  Antisense strand to SEQ ID NO: 2356082
uacauuauuacccucucaa

SEQ ID NO: 2356084 - RNA, 19 nt, Artificial Sequence
  Description of Artificial Sequence: Synthetic oligonucleotide
  Sense strand starting at position 3255 of SEQ ID NO: 1885626
uuaaauggacucugaacuu

SEQ ID NO: 2356085 - RNA, 19 nt, Artificial Sequence
  Description of Artificial Sequence: Synthetic oligonucleotide
  Antisense strand to SEQ ID NO: 2356084
aaguucagaguccauuuaa

SEQ ID NO: 2356086 - RNA, 19 nt, Artificial Sequence
  Description of Artificial Sequence: Synthetic oligonucleotide
  Sense strand starting at position 3330 of SEQ ID NO: 1885626
uagaaauguuccgccaggu

SEQ ID NO: 2356087 - RNA, 19 nt, Artificial Sequence
  Description of Artificial Sequence: Synthetic oligonucleotide
  Antisense strand to SEQ ID NO: 2356086
accuggcggaacauuucua

SEQ ID NO: 2356088 - RNA, 19 nt, Artificial Sequence
  Description of Artificial Sequence: Synthetic oligonucleotide
  Sense strand starting at position 3400 of SEQ ID NO: 1885626
gaucgcuuagcccagaagu

SEQ ID NO: 2356089 - RNA, 19 nt, Artificial Sequence
  Description of Artificial Sequence: Synthetic oligonucleotide
  Antisense strand to SEQ ID NO: 2356088
acuucugggcuaagcgauc

SEQ ID NO: 2356090 - RNA, 19 nt, Artificial Sequence
  Description of Artificial Sequence: Synthetic oligonucleotide
  Sense strand starting at position 3845 of SEQ ID NO: 1885626
agagguagugagcgaagaa

SEQ ID NO: 2356091 - RNA, 19 nt, Artificial Sequence
  Description of Artificial Sequence: Synthetic oligonucleotide
  Antisense strand to SEQ ID NO: 2356090
uucuucgcucacuaccucu

SEQ ID NO: 2356092 - RNA, 19 nt, Artificial Sequence
  Description of Artificial Sequence: Synthetic oligonucleotide
  Sense strand starting at position 3931 of SEQ ID NO: 1885626
aguccuuuauuugguguua

SEQ ID NO: 2356093 - RNA, 19 nt, Artificial Sequence
  Description of Artificial Sequence: Synthetic oligonucleotide
  Antisense strand to SEQ ID NO: 2356092
uaacaccaaauaaaggacu

SEQ ID NO: 2356094 - RNA, 19 nt, Artificial Sequence
  Description of Artificial Sequence: Synthetic oligonucleotide
  Sense strand starting at position 3933 of SEQ ID NO: 1885626
uccuuuauuugguguuacu

SEQ ID NO: 2356095 - RNA, 19 nt, Artificial Sequence
  Description of Artificial Sequence: Synthetic oligonucleotide
  Antisense strand to SEQ ID NO: 2356094
aguaacaccaaauaaagga

SEQ ID NO: 2356096 - RNA, 19 nt, Artificial Sequence
  Description of Artificial Sequence: Synthetic oligonucleotide
  Sense strand starting at position 140 of SEQ ID NO: 1885627
cuucuauugguugagcuau

SEQ ID NO: 2356097 - RNA, 19 nt, Artificial Sequence
  Description of Artificial Sequence: Synthetic oligonucleotide
  Antisense strand to SEQ ID NO: 2356096
auagcucaaccaauagaag

SEQ ID NO: 2356098 - RNA, 19 nt, Artificial Sequence
  Description of Artificial Sequence: Synthetic oligonucleotide
  Sense strand starting at position 413 of SEQ ID NO: 1885627
agguauuaaugguuuccau

SEQ ID NO: 2356099 - RNA, 19 nt, Artificial Sequence
  Description of Artificial Sequence: Synthetic oligonucleotide
  Antisense strand to SEQ ID NO: 2356098
auggaaaccauuaauaccu

SEQ ID NO: 2356100 - RNA, 19 nt, Artificial Sequence
  Description of Artificial Sequence: Synthetic oligonucleotide
  Sense strand starting at position 503 of SEQ ID NO: 1885627
acuauaguucucuggaacu

SEQ ID NO: 2356101 - RNA, 19 nt, Artificial Sequence
  Description of Artificial Sequence: Synthetic oligonucleotide
  Antisense strand to SEQ ID NO: 2356100
aguuccagagaacuauagu

SEQ ID NO: 2356102 - RNA, 19 nt, Artificial Sequence
  Description of Artificial Sequence: Synthetic oligonucleotide
  Sense strand starting at position 520 of SEQ ID NO: 1885627
cugaauggauguuucugua

SEQ ID NO: 2356103 - RNA, 19 nt, Artificial Sequence
  Description of Artificial Sequence: Synthetic oligonucleotide
  Antisense strand to SEQ ID NO: 2356102
uacagaaacauccauucag

SEQ ID NO: 2356104 - RNA, 19 nt, Artificial Sequence
  Description of Artificial Sequence: Synthetic oligonucleotide
  Sense strand starting at position 627 of SEQ ID NO: 1885627
agaucuucucuuugaagac

SEQ ID NO: 2356105 - RNA, 19 nt, Artificial Sequence
  Description of Artificial Sequence: Synthetic oligonucleotide
  Antisense strand to SEQ ID NO: 2356104
gucuucaaagagaagaucu

SEQ ID NO: 2356106 - RNA, 19 nt, Artificial Sequence
  Description of Artificial Sequence: Synthetic oligonucleotide
  Sense strand starting at position 851 of SEQ ID NO: 1885627
uguuuaauggguuaauugu

SEQ ID NO: 2356107 - RNA, 19 nt, Artificial Sequence
  Description of Artificial Sequence: Synthetic oligonucleotide
  Antisense strand to SEQ ID NO: 2356106
acaauuaacccauuaaaca

SEQ ID NO: 2356108 - RNA, 19 nt, Artificial Sequence
  Description of Artificial Sequence: Synthetic oligonucleotide
  Sense strand starting at position 900 of SEQ ID NO: 1885627
acauaaucguucuccauga

SEQ ID NO: 2356109 - RNA, 19 nt, Artificial Sequence
  Description of Artificial Sequence: Synthetic oligonucleotide
  Antisense strand to SEQ ID NO: 2356108
ucauggagaacgauuaugu

SEQ ID NO: 2356110 - RNA, 19 nt, Artificial Sequence
  Description of Artificial Sequence: Synthetic oligonucleotide
  Sense strand starting at position 965 of SEQ ID NO: 1885627
gugagaguugguuaggaug

SEQ ID NO: 2356111 - RNA, 19 nt, Artificial Sequence
  Description of Artificial Sequence: Synthetic oligonucleotide
  Antisense strand to SEQ ID NO: 2356110
cauccuaaccaacucucac

SEQ ID NO: 2356112 - RNA, 19 nt, Artificial Sequence
  Description of Artificial Sequence: Synthetic oligonucleotide
  Sense strand starting at position 1006 of SEQ ID NO: 1885627
uucucugcccaguagaagu

SEQ ID NO: 2356113 - RNA, 19 nt, Artificial Sequence
  Description of Artificial Sequence: Synthetic oligonucleotide
  Antisense strand to SEQ ID NO: 2356112
acuucuacugggcagagaa

SEQ ID NO: 2356114 - RNA, 19 nt, Artificial Sequence
  Description of Artificial Sequence: Synthetic oligonucleotide
  Sense strand starting at position 1017 of SEQ ID NO: 1885627
guagaaguccuguaugggu

SEQ ID NO: 2356115 - RNA, 19 nt, Artificial Sequence
  Description of Artificial Sequence: Synthetic oligonucleotide
  Antisense strand to SEQ ID NO: 2356114
acccauacaggacuucuac

SEQ ID NO: 2356116 - RNA, 19 nt, Artificial Sequence
  Description of Artificial Sequence: Synthetic oligonucleotide
  Sense strand starting at position 1022 of SEQ ID NO: 1885627
aguccuguaugggucaaau

SEQ ID NO: 2356117 - RNA, 19 nt, Artificial Sequence
  Description of Artificial Sequence: Synthetic oligonucleotide
  Antisense strand to SEQ ID NO: 2356116
auuugacccauacaggacu

SEQ ID NO: 2356118 - RNA, 19 nt, Artificial Sequence
  Description of Artificial Sequence: Synthetic oligonucleotide
  Sense strand starting at position 1024 of SEQ ID NO: 1885627
uccuguaugggucaaauua

SEQ ID NO: 2356119 - RNA, 19 nt, Artificial Sequence
  Description of Artificial Sequence: Synthetic oligonucleotide
  Antisense strand to SEQ ID NO: 2356118
uaauuugacccauacagga

SEQ ID NO: 2356120 - RNA, 19 nt, Artificial Sequence
  Description of Artificial Sequence: Synthetic oligonucleotide
  Sense strand starting at position 1044 of SEQ ID NO: 1885627
uuccuccuuuggguauaaa

SEQ ID NO: 2356121 - RNA, 19 nt, Artificial Sequence
  Description of Artificial Sequence: Synthetic oligonucleotide
  Antisense strand to SEQ ID NO: 2356120
uuuauacccaaaggaggaa

SEQ ID NO: 2356122 - RNA, 19 nt, Artificial Sequence
  Description of Artificial Sequence: Synthetic oligonucleotide
  Sense strand starting at position 1076 of SEQ ID NO: 1885627
aucaguuaccacugauggu

SEQ ID NO: 2356123 - RNA, 19 nt, Artificial Sequence
  Description of Artificial Sequence: Synthetic oligonucleotide
  Antisense strand to SEQ ID NO: 2356122
accaucagugguaacugau

SEQ ID NO: 2356124 - RNA, 19 nt, Artificial Sequence
  Description of Artificial Sequence: Synthetic oligonucleotide
  Sense strand starting at position 1172 of SEQ ID NO: 1885627
ucuuaauuggugcaguaaa

SEQ ID NO: 2356125 - RNA, 19 nt, Artificial Sequence
  Description of Artificial Sequence: Synthetic oligonucleotide
  Antisense strand to SEQ ID NO: 2356124
uuuacugcaccaauuaaga

SEQ ID NO: 2356126 - RNA, 19 nt, Artificial Sequence
  Description of Artificial Sequence: Synthetic oligonucleotide
  Sense strand starting at position 1250 of SEQ ID NO: 1885627
cccugacugccucaguaaa

SEQ ID NO: 2356127 - RNA, 19 nt, Artificial Sequence
  Description of Artificial Sequence: Synthetic oligonucleotide
  Antisense strand to SEQ ID NO: 2356126
uuuacugaggcagucaggg

SEQ ID NO: 2356128 - RNA, 19 nt, Artificial Sequence
  Description of Artificial Sequence: Synthetic oligonucleotide
  Sense strand starting at position 1358 of SEQ ID NO: 1885627
uugguauggcuuggaagga

SEQ ID NO: 2356129 - RNA, 19 nt, Artificial Sequence
  Description of Artificial Sequence: Synthetic oligonucleotide
  Antisense strand to SEQ ID NO: 2356128
uccuuccaagccauaccaa

SEQ ID NO: 2356130 - RNA, 19 nt, Artificial Sequence
  Description of Artificial Sequence: Synthetic oligonucleotide
  Sense strand starting at position 1390 of SEQ ID NO: 1885627
aaagacucccggugaugua

SEQ ID NO: 2356131 - RNA, 19 nt, Artificial Sequence
  Description of Artificial Sequence: Synthetic oligonucleotide
  Antisense strand to SEQ ID NO: 2356130
uacaucaccgggagucuuu

SEQ ID NO: 2356132 - RNA, 19 nt, Artificial Sequence
  Description of Artificial Sequence: Synthetic oligonucleotide
  Sense strand starting at position 1428 of SEQ ID NO: 1885627
gacggauucugaccuuauc

SEQ ID NO: 2356133 - RNA, 19 nt, Artificial Sequence
  Description of Artificial Sequence: Synthetic oligonucleotide
  Antisense strand to SEQ ID NO: 2356132
gauaaggucagaauccguc

SEQ ID NO: 2356134 - RNA, 19 nt, Artificial Sequence
  Description of Artificial Sequence: Synthetic oligonucleotide
  Sense strand starting at position 2444 of SEQ ID NO: 1885627
ccaugaucgcuugaaaugu

SEQ ID NO: 2356135 - RNA, 19 nt, Artificial Sequence
  Description of Artificial Sequence: Synthetic oligonucleotide
  Antisense strand to SEQ ID NO: 2356134
acauuucaagcgaucaugg

SEQ ID NO: 2356136 - RNA, 19 nt, Artificial Sequence
  Description of Artificial Sequence: Synthetic oligonucleotide
  Sense strand starting at position 2476 of SEQ ID NO: 1885627
ugacaugugcuguaaggua

SEQ ID NO: 2356137 - RNA, 19 nt, Artificial Sequence
  Description of Artificial Sequence: Synthetic oligonucleotide
  Antisense strand to SEQ ID NO: 2356136
uaccuuacagcacauguca

SEQ ID NO: 2356138 - RNA, 19 nt, Artificial Sequence
  Description of Artificial Sequence: Synthetic oligonucleotide
  Sense strand starting at position 2488 of SEQ ID NO: 1885627
uaagguacgcauuguauuu

SEQ ID NO: 2356139 - RNA, 19 nt, Artificial Sequence
  Description of Artificial Sequence: Synthetic oligonucleotide
  Antisense strand to SEQ ID NO: 2356138
aaauacaaugcguaccuua

SEQ ID NO: 2356140 - RNA, 19 nt, Artificial Sequence
  Description of Artificial Sequence: Synthetic oligonucleotide
  Sense strand starting at position 2662 of SEQ ID NO: 1885627
uugcauguaugacuugaau

SEQ ID NO: 2356141 - RNA, 19 nt, Artificial Sequence
  Description of Artificial Sequence: Synthetic oligonucleotide
  Antisense strand to SEQ ID NO: 2356140
auucaagucauacaugcaa

SEQ ID NO: 2356142 - RNA, 19 nt, Artificial Sequence
  Description of Artificial Sequence: Synthetic oligonucleotide
  Sense strand starting at position 2714 of SEQ ID NO: 1885627
gguucagucgguuugugua

SEQ ID NO: 2356143 - RNA, 19 nt, Artificial Sequence
  Description of Artificial Sequence: Synthetic oligonucleotide
  Antisense strand to SEQ ID NO: 2356142
uacacaaaccgacugaacc

SEQ ID NO: 2356144 - RNA, 19 nt, Artificial Sequence
  Description of Artificial Sequence: Synthetic oligonucleotide
  Sense strand starting at position 2819 of SEQ ID NO: 1885627
ugaacugcuuucccaagaa

SEQ ID NO: 2356145 - RNA, 19 nt, Artificial Sequence
  Description of Artificial Sequence: Synthetic oligonucleotide
  Antisense strand to SEQ ID NO: 2356144
uucuugggaaagcaguuca

SEQ ID NO: 2356146 - RNA, 19 nt, Artificial Sequence
  Description of Artificial Sequence: Synthetic oligonucleotide
  Sense strand starting at position 2924 of SEQ ID NO: 1885627
uauagaccguuuguaaaga

SEQ ID NO: 2356147 - RNA, 19 nt, Artificial Sequence
  Description of Artificial Sequence: Synthetic oligonucleotide
  Antisense strand to SEQ ID NO: 2356146
ucuuuacaaacggucuaua

SEQ ID NO: 2356148 - RNA, 19 nt, Artificial Sequence
  Description of Artificial Sequence: Synthetic oligonucleotide
  Sense strand starting at position 3119 of SEQ ID NO: 1885627
ucugaaauguaguugaaca

SEQ ID NO: 2356149 - RNA, 19 nt, Artificial Sequence
  Description of Artificial Sequence: Synthetic oligonucleotide
  Antisense strand to SEQ ID NO: 2356148
uguucaacuacauuucaga

SEQ ID NO: 2356150 - RNA, 19 nt, Artificial Sequence
  Description of Artificial Sequence: Synthetic oligonucleotide
  Sense strand starting at position 3198 of SEQ ID NO: 1885627
aguugagauuucuacacuu

SEQ ID NO: 2356151 - RNA, 19 nt, Artificial Sequence
  Description of Artificial Sequence: Synthetic oligonucleotide
  Antisense strand to SEQ ID NO: 2356150
aaguguagaaaucucaacu

SEQ ID NO: 2356152 - RNA, 19 nt, Artificial Sequence
  Description of Artificial Sequence: Synthetic oligonucleotide
  Sense strand starting at position 3250 of SEQ ID NO: 1885627
gcgaauuaucuacacuaag

SEQ ID NO: 2356153 - RNA, 19 nt, Artificial Sequence
  Description of Artificial Sequence: Synthetic oligonucleotide
  Antisense strand to SEQ ID NO: 2356152
cuuaguguagauaauucgc

SEQ ID NO: 2356154 - RNA, 19 nt, Artificial Sequence
  Description of Artificial Sequence: Synthetic oligonucleotide
  Sense strand starting at position 3284 of SEQ ID NO: 1885627
gguccagcucugggaugaa

SEQ ID NO: 2356155 - RNA, 19 nt, Artificial Sequence
  Description of Artificial Sequence: Synthetic oligonucleotide
  Antisense strand to SEQ ID NO: 2356154
uucaucccagagcuggacc

SEQ ID NO: 2356156 - RNA, 19 nt, Artificial Sequence
  Description of Artificial Sequence: Synthetic oligonucleotide
  Sense strand starting at position 3287 of SEQ ID NO: 1885627
ccagcucugggaugaaagu

SEQ ID NO: 2356157 - RNA, 19 nt, Artificial Sequence
  Description of Artificial Sequence: Synthetic oligonucleotide
  Antisense strand to SEQ ID NO: 2356156
acuuucaucccagagcugg

SEQ ID NO: 2356158 - RNA, 19 nt, Artificial Sequence
  Description of Artificial Sequence: Synthetic oligonucleotide
  Sense strand starting at position 3347 of SEQ ID NO: 1885627
uuuccugaccagugaaaga

SEQ ID NO: 2356159 - RNA, 19 nt, Artificial Sequence
  Description of Artificial Sequence: Synthetic oligonucleotide
  Antisense strand to SEQ ID NO: 2356158
ucuuucacuggucaggaaa

SEQ ID NO: 2356160 - RNA, 19 nt, Artificial Sequence
  Description of Artificial Sequence: Synthetic oligonucleotide
  Sense strand starting at position 3417 of SEQ ID NO: 1885627
gauuguuauuauucuaggu

SEQ ID NO: 2356161 - RNA, 19 nt, Artificial Sequence
  Description of Artificial Sequence: Synthetic oligonucleotide
  Antisense strand to SEQ ID NO: 2356160
accuagaauaauaacaauc

SEQ ID NO: 2356162 - RNA, 19 nt, Artificial Sequence
  Description of Artificial Sequence: Synthetic oligonucleotide
  Sense strand starting at position 3421 of SEQ ID NO: 1885627
guuauuauucuagguaaag

SEQ ID NO: 2356163 - RNA, 19 nt, Artificial Sequence
  Description of Artificial Sequence: Synthetic oligonucleotide
  Antisense strand to SEQ ID NO: 2356162
cuuuaccuagaauaauaac

SEQ ID NO: 2356164 - RNA, 19 nt, Artificial Sequence
  Description of Artificial Sequence: Synthetic oligonucleotide
  Sense strand starting at position 3422 of SEQ ID NO: 1885627
uuauuauucuagguaaagc

SEQ ID NO: 2356165 - RNA, 19 nt, Artificial Sequence
  Description of Artificial Sequence: Synthetic oligonucleotide
  Antisense strand to SEQ ID NO: 2356164
gcuuuaccuagaauaauaa

SEQ ID NO: 2356166 - RNA, 19 nt, Artificial Sequence
  Description of Artificial Sequence: Synthetic oligonucleotide
  Sense strand starting at position 3479 of SEQ ID NO: 1885627
ugcauagcuguagacuuaa

SEQ ID NO: 2356167 - RNA, 19 nt, Artificial Sequence
  Description of Artificial Sequence: Synthetic oligonucleotide
  Antisense strand to SEQ ID NO: 2356166
uuaagucuacagcuaugca

SEQ ID NO: 2356168 - RNA, 19 nt, Artificial Sequence
  Description of Artificial Sequence: Synthetic oligonucleotide
  Sense strand starting at position 3495 of SEQ ID NO: 1885627
uaagaacuauuggugacuu

SEQ ID NO: 2356169 - RNA, 19 nt, Artificial Sequence
  Description of Artificial Sequence: Synthetic oligonucleotide
  Antisense strand to SEQ ID NO: 2356168
aagucaccaauaguucuua

SEQ ID NO: 2356170 - RNA, 19 nt, Artificial Sequence
  Description of Artificial Sequence: Synthetic oligonucleotide
  Sense strand starting at position 3524 of SEQ ID NO: 1885627
agccuuuguccacagggua

SEQ ID NO: 2356171 - RNA, 19 nt, Artificial Sequence
  Description of Artificial Sequence: Synthetic oligonucleotide
  Antisense strand to SEQ ID NO: 2356170
uacccuguggacaaaggcu

SEQ ID NO: 2356172 - RNA, 19 nt, Artificial Sequence
  Description of Artificial Sequence: Synthetic oligonucleotide
  Sense strand starting at position 3574 of SEQ ID NO: 1885627
uucgaaauguuguuugaag

SEQ ID NO: 2356173 - RNA, 19 nt, Artificial Sequence
  Description of Artificial Sequence: Synthetic oligonucleotide
  Antisense strand to SEQ ID NO: 2356172
cuucaaacaacauuucgaa

SEQ ID NO: 2356174 - RNA, 19 nt, Artificial Sequence
  Description of Artificial Sequence: Synthetic oligonucleotide
  Sense strand starting at position 3957 of SEQ ID NO: 1885627
ggugacuuugcagacccaa

SEQ ID NO: 2356175 - RNA, 19 nt, Artificial Sequence
  Description of Artificial Sequence: Synthetic oligonucleotide
  Antisense strand to SEQ ID NO: 2356174
uugggucugcaaagucacc

SEQ ID NO: 2356176 - RNA, 19 nt, Artificial Sequence
  Description of Artificial Sequence: Synthetic oligonucleotide
  Sense strand starting at position 17 of SEQ ID NO: 1885628
cgcugauucugauuuauuc

SEQ ID NO: 2356177 - RNA, 19 nt, Artificial Sequence
  Description of Artificial Sequence: Synthetic oligonucleotide
  Antisense strand to SEQ ID NO: 2356176
gaauaaaucagaaucagcg

SEQ ID NO: 2356178 - RNA, 19 nt, Artificial Sequence
  Description of Artificial Sequence: Synthetic oligonucleotide
  Sense strand starting at position 25 of SEQ ID NO: 1885628
cugauuuauucugugugua

SEQ ID NO: 2356179 - RNA, 19 nt, Artificial Sequence
  Description of Artificial Sequence: Synthetic oligonucleotide
  Antisense strand to SEQ ID NO: 2356178
uacacacagaauaaaucag

SEQ ID NO: 2356180 - RNA, 19 nt, Artificial Sequence
  Description of Artificial Sequence: Synthetic oligonucleotide
  Sense strand starting at position 27 of SEQ ID NO: 1885628
gauuuauucuguguguauu

SEQ ID NO: 2356181 - RNA, 19 nt, Artificial Sequence
  Description of Artificial Sequence: Synthetic oligonucleotide
  Antisense strand to SEQ ID NO: 2356180
aauacacacagaauaaauc

SEQ ID NO: 2356182 - RNA, 19 nt, Artificial Sequence
  Description of Artificial Sequence: Synthetic oligonucleotide
  Sense strand starting at position 28 of SEQ ID NO: 1885628
auuuauucuguguguauuc

SEQ ID NO: 2356183 - RNA, 19 nt, Artificial Sequence
  Description of Artificial Sequence: Synthetic oligonucleotide
  Antisense strand to SEQ ID NO: 2356182
gaauacacacagaauaaau

SEQ ID NO: 2356184 - RNA, 19 nt, Artificial Sequence
  Description of Artificial Sequence: Synthetic oligonucleotide
  Sense strand starting at position 77 of SEQ ID NO: 1885628
ccauauuacugucucagac

SEQ ID NO: 2356185 - RNA, 19 nt, Artificial Sequence
  Description of Artificial Sequence: Synthetic oligonucleotide
  Antisense strand to SEQ ID NO: 2356184
gucugagacaguaauaugg

SEQ ID NO: 2356186 - RNA, 19 nt, Artificial Sequence
  Description of Artificial Sequence: Synthetic oligonucleotide
  Sense strand starting at position 106 of SEQ ID NO: 1885628
uggaauuagugcuuaucua

SEQ ID NO: 2356187 - RNA, 19 nt, Artificial Sequence
  Description of Artificial Sequence: Synthetic oligonucleotide
  Antisense strand to SEQ ID NO: 2356186
uagauaagcacuaauucca

SEQ ID NO: 2356188 - RNA, 19 nt, Artificial Sequence
  Description of Artificial Sequence: Synthetic oligonucleotide
  Sense strand starting at position 107 of SEQ ID NO: 1885628
ggaauuagugcuuaucuaa

SEQ ID NO: 2356189 - RNA, 19 nt, Artificial Sequence
  Description of Artificial Sequence: Synthetic oligonucleotide
  Antisense strand to SEQ ID NO: 2356188
uuagauaagcacuaauucc

SEQ ID NO: 2356190 - RNA, 19 nt, Artificial Sequence
  Description of Artificial Sequence: Synthetic oligonucleotide
  Sense strand starting at position 192 of SEQ ID NO: 1885628
ggucucauccaucaccuuu

SEQ ID NO: 2356191 - RNA, 19 nt, Artificial Sequence
  Description of Artificial Sequence: Synthetic oligonucleotide
  Antisense strand to SEQ ID NO: 2356190
aaaggugauggaugagacc

SEQ ID NO: 2356192 - RNA, 19 nt, Artificial Sequence
  Description of Artificial Sequence: Synthetic oligonucleotide
  Sense strand starting at position 368 of SEQ ID NO: 1885628
auaccauguugugcuagau

SEQ ID NO: 2356193 - RNA, 19 nt, Artificial Sequence
  Description of Artificial Sequence: Synthetic oligonucleotide
  Antisense strand to SEQ ID NO: 2356192
aucuagcacaacaugguau

SEQ ID NO: 2356194 - RNA, 19 nt, Artificial Sequence
  Description of Artificial Sequence: Synthetic oligonucleotide
  Sense strand starting at position 372 of SEQ ID NO: 1885628
cauguugugcuagauucua

SEQ ID NO: 2356195 - RNA, 19 nt, Artificial Sequence
  Description of Artificial Sequence: Synthetic oligonucleotide
  Antisense strand to SEQ ID NO: 2356194
uagaaucuagcacaacaug

SEQ ID NO: 2356196 - RNA, 19 nt, Artificial Sequence
  Description of Artificial Sequence: Synthetic oligonucleotide
  Sense strand starting at position 381 of SEQ ID NO: 1885628
cuagauucuacgggucuau

SEQ ID NO: 2356197 - RNA, 19 nt, Artificial Sequence
  Description of Artificial Sequence: Synthetic oligonucleotide
  Antisense strand to SEQ ID NO: 2356196
auagacccguagaaucuag

SEQ ID NO: 2356198 - RNA, 19 nt, Artificial Sequence
  Description of Artificial Sequence: Synthetic oligonucleotide
  Sense strand starting at position 404 of SEQ ID NO: 1885628
gucacaugacuugguuaaa

SEQ ID NO: 2356199 - RNA, 19 nt, Artificial Sequence
  Description of Artificial Sequence: Synthetic oligonucleotide
  Antisense strand to SEQ ID NO: 2356198
uuuaaccaagucaugugac

SEQ ID NO: 2356200 - RNA, 19 nt, Artificial Sequence
  Description of Artificial Sequence: Synthetic oligonucleotide
  Sense strand starting at position 503 of SEQ ID NO: 1885628
ugaccacuuugcccugaaa

SEQ ID NO: 2356201 - RNA, 19 nt, Artificial Sequence
  Description of Artificial Sequence: Synthetic oligonucleotide
  Antisense strand to SEQ ID NO: 2356200
uuucagggcaaagugguca

SEQ ID NO: 2356202 - RNA, 19 nt, Artificial Sequence
  Description of Artificial Sequence: Synthetic oligonucleotide
  Sense strand starting at position 721 of SEQ ID NO: 1885628
ucaccuuagugguuaacau

SEQ ID NO: 2356203 - RNA, 19 nt, Artificial Sequence
  Description of Artificial Sequence: Synthetic oligonucleotide
  Antisense strand to SEQ ID NO: 2356202
auguuaaccacuaagguga

SEQ ID NO: 2356204 - RNA, 19 nt, Artificial Sequence
  Description of Artificial Sequence: Synthetic oligonucleotide
  Sense strand starting at position 728 of SEQ ID NO: 1885628
agugguuaacauuagaguu

SEQ ID NO: 2356205 - RNA, 19 nt, Artificial Sequence
  Description of Artificial Sequence: Synthetic oligonucleotide
  Antisense strand to SEQ ID NO: 2356204
aacucuaauguuaaccacu

SEQ ID NO: 2356206 - RNA, 19 nt, Artificial Sequence
  Description of Artificial Sequence: Synthetic oligonucleotide
  Sense strand starting at position 843 of SEQ ID NO: 1885628
agacguaccgcagauugaa

SEQ ID NO: 2356207 - RNA, 19 nt, Artificial Sequence
  Description of Artificial Sequence: Synthetic oligonucleotide
  Antisense strand to SEQ ID NO: 2356206
uucaaucugcgguacgucu

SEQ ID NO: 2356208 - RNA, 19 nt, Artificial Sequence
  Description of Artificial Sequence: Synthetic oligonucleotide
  Sense strand starting at position 868 of SEQ ID NO: 1885628
guugcucuuccuggaauaa

SEQ ID NO: 2356209 - RNA, 19 nt, Artificial Sequence
  Description of Artificial Sequence: Synthetic oligonucleotide
  Antisense strand to SEQ ID NO: 2356208
uuauuccaggaagagcaac

SEQ ID NO: 2356210 - RNA, 19 nt, Artificial Sequence
  Description of Artificial Sequence: Synthetic oligonucleotide
  Sense strand starting at position 869 of SEQ ID NO: 1885628
uugcucuuccuggaauaag

SEQ ID NO: 2356211 - RNA, 19 nt, Artificial Sequence
  Description of Artificial Sequence: Synthetic oligonucleotide
  Antisense strand to SEQ ID NO: 2356210
cuuauuccaggaagagcaa

SEQ ID NO: 2356212 - RNA, 19 nt, Artificial Sequence
  Description of Artificial Sequence: Synthetic oligonucleotide
  Sense strand starting at position 1627 of SEQ ID NO: 1885628
gucaucguuaucgcucauu

SEQ ID NO: 2356213 - RNA, 19 nt, Artificial Sequence
  Description of Artificial Sequence: Synthetic oligonucleotide
  Antisense strand to SEQ ID NO: 2356212
aaugagcgauaacgaugac

SEQ ID NO: 2356214 - RNA, 19 nt, Artificial Sequence
  Description of Artificial Sequence: Synthetic oligonucleotide
  Sense strand starting at position 1632 of SEQ ID NO: 1885628
cguuaucgcucauuuccua

SEQ ID NO: 2356215 - RNA, 19 nt, Artificial Sequence
  Description of Artificial Sequence: Synthetic oligonucleotide
  Antisense strand to SEQ ID NO: 2356214
uaggaaaugagcgauaacg

SEQ ID NO: 2356216 - RNA, 19 nt, Artificial Sequence
  Description of Artificial Sequence: Synthetic oligonucleotide
  Sense strand starting at position 2105 of SEQ ID NO: 1885628
ccgcgaguugucaggagau

SEQ ID NO: 2356217 - RNA, 19 nt, Artificial Sequence
  Description of Artificial Sequence: Synthetic oligonucleotide
  Antisense strand to SEQ ID NO: 2356216
aucuccugacaacucgcgg

SEQ ID NO: 2356218 - RNA, 19 nt, Artificial Sequence
  Description of Artificial Sequence: Synthetic oligonucleotide
  Sense strand starting at position 2285 of SEQ ID NO: 1885628
uuuggugugacugguuaua

SEQ ID NO: 2356219 - RNA, 19 nt, Artificial Sequence
  Description of Artificial Sequence: Synthetic oligonucleotide
  Antisense strand to SEQ ID NO: 2356218
uauaaccagucacaccaaa

SEQ ID NO: 2356220 - RNA, 19 nt, Artificial Sequence
  Description of Artificial Sequence: Synthetic oligonucleotide
  Sense strand starting at position 2287 of SEQ ID NO: 1885628
uggugugacugguuauacu

SEQ ID NO: 2356221 - RNA, 19 nt, Artificial Sequence
  Description of Artificial Sequence: Synthetic oligonucleotide
  Antisense strand to SEQ ID NO: 2356220
aguauaaccagucacacca

SEQ ID NO: 2356222 - RNA, 19 nt, Artificial Sequence
  Description of Artificial Sequence: Synthetic oligonucleotide
  Sense strand starting at position 2515 of SEQ ID NO: 1885628
agaauccuguauucguuua

SEQ ID NO: 2356223 - RNA, 19 nt, Artificial Sequence
  Description of Artificial Sequence: Synthetic oligonucleotide
  Antisense strand to SEQ ID NO: 2356222
uaaacgaauacaggauucu

SEQ ID NO: 2356224 - RNA, 19 nt, Artificial Sequence
  Description of Artificial Sequence: Synthetic oligonucleotide
  Sense strand starting at position 2526 of SEQ ID NO: 1885628
uucguuuaucugggaguga

SEQ ID NO: 2356225 - RNA, 19 nt, Artificial Sequence
  Description of Artificial Sequence: Synthetic oligonucleotide
  Antisense strand to SEQ ID NO: 2356224
ucacucccagauaaacgaa

SEQ ID NO: 2356226 - RNA, 19 nt, Artificial Sequence
  Description of Artificial Sequence: Synthetic oligonucleotide
  Sense strand starting at position 2643 of SEQ ID NO: 1885628
uguuguagcccagacaguu

SEQ ID NO: 2356227 - RNA, 19 nt, Artificial Sequence
  Description of Artificial Sequence: Synthetic oligonucleotide
  Antisense strand to SEQ ID NO: 2356226
aacugucugggcuacaaca

SEQ ID NO: 2356228 - RNA, 19 nt, Artificial Sequence
  Description of Artificial Sequence: Synthetic oligonucleotide
  Sense strand starting at position 2653 of SEQ ID NO: 1885628
cagacaguuuaggcaauau

SEQ ID NO: 2356229 - RNA, 19 nt, Artificial Sequence
  Description of Artificial Sequence: Synthetic oligonucleotide
  Antisense strand to SEQ ID NO: 2356228
auauugccuaaacugucug

SEQ ID NO: 2356230 - RNA, 19 nt, Artificial Sequence
  Description of Artificial Sequence: Synthetic oligonucleotide
  Sense strand starting at position 2707 of SEQ ID NO: 1885628
ggaucaauaugggaaacuu

SEQ ID NO: 2356231 - RNA, 19 nt, Artificial Sequence
  Description of Artificial Sequence: Synthetic oligonucleotide
  Antisense strand to SEQ ID NO: 2356230
aaguuucccauauugaucc

SEQ ID NO: 2356232 - RNA, 19 nt, Artificial Sequence
  Description of Artificial Sequence: Synthetic oligonucleotide
  Sense strand starting at position 2769 of SEQ ID NO: 1885628
caugaaguguaaucacaug

SEQ ID NO: 2356233 - RNA, 19 nt, Artificial Sequence
  Description of Artificial Sequence: Synthetic oligonucleotide
  Antisense strand to SEQ ID NO: 2356232
caugugauuacacuucaug

SEQ ID NO: 2356234 - RNA, 19 nt, Artificial Sequence
  Description of Artificial Sequence: Synthetic oligonucleotide
  Sense strand starting at position 2794 of SEQ ID NO: 1885628
accgauauuuauugaacac

SEQ ID NO: 2356235 - RNA, 19 nt, Artificial Sequence
  Description of Artificial Sequence: Synthetic oligonucleotide
  Antisense strand to SEQ ID NO: 2356234
guguucaauaaauaucggu

SEQ ID NO: 2356236 - RNA, 19 nt, Artificial Sequence
  Description of Artificial Sequence: Synthetic oligonucleotide
  Sense strand starting at position 2913 of SEQ ID NO: 1885628
auuguaagagugugcaaca

SEQ ID NO: 2356237 - RNA, 19 nt, Artificial Sequence
  Description of Artificial Sequence: Synthetic oligonucleotide
  Antisense strand to SEQ ID NO: 2356236
uguugcacacucuuacaau

SEQ ID NO: 2356238 - RNA, 19 nt, Artificial Sequence
  Description of Artificial Sequence: Synthetic oligonucleotide
  Sense strand starting at position 2914 of SEQ ID NO: 1885628
uuguaagagugugcaacaa

SEQ ID NO: 2356239 - RNA, 19 nt, Artificial Sequence
  Description of Artificial Sequence: Synthetic oligonucleotide
  Antisense strand to SEQ ID NO: 2356238
uuguugcacacucuuacaa

SEQ ID NO: 2356240 - RNA, 19 nt, Artificial Sequence
  Description of Artificial Sequence: Synthetic oligonucleotide
  Sense strand starting at position 3053 of SEQ ID NO: 1885628
cugauucccggaugaauac

SEQ ID NO: 2356241 - RNA, 19 nt, Artificial Sequence
  Description of Artificial Sequence: Synthetic oligonucleotide
  Antisense strand to SEQ ID NO: 2356240
guauucauccgggaaucag

SEQ ID NO: 2356242 - RNA, 19 nt, Artificial Sequence
  Description of Artificial Sequence: Synthetic oligonucleotide
  Sense strand starting at position 3539 of SEQ ID NO: 1885628
caccgcucgcggucuaaua

SEQ ID NO: 2356243 - RNA, 19 nt, Artificial Sequence
  Description of Artificial Sequence: Synthetic oligonucleotide
  Antisense strand to SEQ ID NO: 2356242
uauuagaccgcgagcggug

SEQ ID NO: 2356244 - RNA, 19 nt, Artificial Sequence
  Description of Artificial Sequence: Synthetic oligonucleotide
  Sense strand starting at position 3540 of SEQ ID NO: 1885628
accgcucgcggucuaauau

SEQ ID NO: 2356245 - RNA, 19 nt, Artificial Sequence
  Description of Artificial Sequence: Synthetic oligonucleotide
  Antisense strand to SEQ ID NO: 2356244
auauuagaccgcgagcggu

SEQ ID NO: 2356246 - RNA, 19 nt, Artificial Sequence
  Description of Artificial Sequence: Synthetic oligonucleotide
  Sense strand starting at position 3683 of SEQ ID NO: 1885628
uaagcagaccauuauguga

SEQ ID NO: 2356247 - RNA, 19 nt, Artificial Sequence
  Description of Artificial Sequence: Synthetic oligonucleotide
  Antisense strand to SEQ ID NO: 2356246
ucacauaauggucugcuua

SEQ ID NO: 2356248 - RNA, 19 nt, Artificial Sequence
  Description of Artificial Sequence: Synthetic oligonucleotide
  Sense strand starting at position 3686 of SEQ ID NO: 1885628
gcagaccauuaugugauaa

SEQ ID NO: 2356249 - RNA, 19 nt, Artificial Sequence
  Description of Artificial Sequence: Synthetic oligonucleotide
  Antisense strand to SEQ ID NO: 2356248
uuaucacauaauggucugc

SEQ ID NO: 2356250 - RNA, 19 nt, Artificial Sequence
  Description of Artificial Sequence: Synthetic oligonucleotide
  Sense strand starting at position 3746 of SEQ ID NO: 1885628
ugaguuaauuaacuggaua

SEQ ID NO: 2356251 - RNA, 19 nt, Artificial Sequence
  Description of Artificial Sequence: Synthetic oligonucleotide
  Antisense strand to SEQ ID NO: 2356250
uauccaguuaauuaacuca

SEQ ID NO: 2356252 - RNA, 19 nt, Artificial Sequence
  Description of Artificial Sequence: Synthetic oligonucleotide
  Sense strand starting at position 3770 of SEQ ID NO: 1885628
aguuaaagcuaauugauga

SEQ ID NO: 2356253 - RNA, 19 nt, Artificial Sequence
  Description of Artificial Sequence: Synthetic oligonucleotide
  Antisense strand to SEQ ID NO: 2356252
ucaucaauuagcuuuaacu

SEQ ID NO: 2356254 - RNA, 19 nt, Artificial Sequence
  Description of Artificial Sequence: Synthetic oligonucleotide
  Sense strand starting at position 3777 of SEQ ID NO: 1885628
gcuaauugaugauuacaac

SEQ ID NO: 2356255 - RNA, 19 nt, Artificial Sequence
  Description of Artificial Sequence: Synthetic oligonucleotide
  Antisense strand to SEQ ID NO: 2356254
guuguaaucaucaauuagc

SEQ ID NO: 2356256 - RNA, 19 nt, Artificial Sequence
  Description of Artificial Sequence: Synthetic oligonucleotide
  Sense strand starting at position 75 of SEQ ID NO: 1885629
aaugguauguggccaaaua

SEQ ID NO: 2356257 - RNA, 19 nt, Artificial Sequence
  Description of Artificial Sequence: Synthetic oligonucleotide
  Antisense strand to SEQ ID NO: 2356256
uauuuggccacauaccauu

SEQ ID NO: 2356258 - RNA, 19 nt, Artificial Sequence
  Description of Artificial Sequence: Synthetic oligonucleotide
  Sense strand starting at position 76 of SEQ ID NO: 1885629
augguauguggccaaauaa

SEQ ID NO: 2356259 - RNA, 19 nt, Artificial Sequence
  Description of Artificial Sequence: Synthetic oligonucleotide
  Antisense strand to SEQ ID NO: 2356258
uuauuuggccacauaccau

SEQ ID NO: 2356260 - RNA, 19 nt, Artificial Sequence
  Description of Artificial Sequence: Synthetic oligonucleotide
  Sense strand starting at position 108 of SEQ ID NO: 1885629
augucauagagugaaguga

SEQ ID NO: 2356261 - RNA, 19 nt, Artificial Sequence
  Description of Artificial Sequence: Synthetic oligonucleotide
  Antisense strand to SEQ ID NO: 2356260
ucacuucacucuaugacau

SEQ ID NO: 2356262 - RNA, 19 nt, Artificial Sequence
  Description of Artificial Sequence: Synthetic oligonucleotide
  Sense strand starting at position 205 of SEQ ID NO: 1885629
gcucuuugguacguaauuu

SEQ ID NO: 2356263 - RNA, 19 nt, Artificial Sequence
  Description of Artificial Sequence: Synthetic oligonucleotide
  Antisense strand to SEQ ID NO: 2356262
aaauuacguaccaaagagc

SEQ ID NO: 2356264 - RNA, 19 nt, Artificial Sequence
  Description of Artificial Sequence: Synthetic oligonucleotide
  Sense strand starting at position 209 of SEQ ID NO: 1885629
uuugguacguaauuucuua

SEQ ID NO: 2356265 - RNA, 19 nt, Artificial Sequence
  Description of Artificial Sequence: Synthetic oligonucleotide
  Antisense strand to SEQ ID NO: 2356264
uaagaaauuacguaccaaa

SEQ ID NO: 2356266 - RNA, 19 nt, Artificial Sequence
  Description of Artificial Sequence: Synthetic oligonucleotide
  Sense strand starting at position 772 of SEQ ID NO: 1885629
uuaguagagacagguagua

SEQ ID NO: 2356267 - RNA, 19 nt, Artificial Sequence
  Description of Artificial Sequence: Synthetic oligonucleotide
  Antisense strand to SEQ ID NO: 2356266
uacuaccugucucuacuaa

SEQ ID NO: 2356268 - RNA, 19 nt, Artificial Sequence
  Description of Artificial Sequence: Synthetic oligonucleotide
  Sense strand starting at position 921 of SEQ ID NO: 1885629
auaagcuaggccuaugagu

SEQ ID NO: 2356269 - RNA, 19 nt, Artificial Sequence
  Description of Artificial Sequence: Synthetic oligonucleotide
  Antisense strand to SEQ ID NO: 2356268
acucauaggccuagcuuau

SEQ ID NO: 2356270 - RNA, 19 nt, Artificial Sequence
  Description of Artificial Sequence: Synthetic oligonucleotide
  Sense strand starting at position 936 of SEQ ID NO: 1885629
gaguuccuacaucgggauu

SEQ ID NO: 2356271 - RNA, 19 nt, Artificial Sequence
  Description of Artificial Sequence: Synthetic oligonucleotide
  Antisense strand to SEQ ID NO: 2356270
aaucccgauguaggaacuc

SEQ ID NO: 2356272 - RNA, 19 nt, Artificial Sequence
  Description of Artificial Sequence: Synthetic oligonucleotide
  Sense strand starting at position 1168 of SEQ ID NO: 1885629
agagguucauagcuaguga

SEQ ID NO: 2356273 - RNA, 19 nt, Artificial Sequence
  Description of Artificial Sequence: Synthetic oligonucleotide
  Antisense strand to SEQ ID NO: 2356272
ucacuagcuaugaaccucu

SEQ ID NO: 2356274 - RNA, 19 nt, Artificial Sequence
  Description of Artificial Sequence: Synthetic oligonucleotide
  Sense strand starting at position 1308 of SEQ ID NO: 1885629
uuucuuauaucuguggaag

SEQ ID NO: 2356275 - RNA, 19 nt, Artificial Sequence
  Description of Artificial Sequence: Synthetic oligonucleotide
  Antisense strand to SEQ ID NO: 2356274
cuuccacagauauaagaaa

SEQ ID NO: 2356276 - RNA, 19 nt, Artificial Sequence
  Description of Artificial Sequence: Synthetic oligonucleotide
  Sense strand starting at position 1383 of SEQ ID NO: 1885629
agaauuccagcacagcaua

SEQ ID NO: 2356277 - RNA, 19 nt, Artificial Sequence
  Description of Artificial Sequence: Synthetic oligonucleotide
  Antisense strand to SEQ ID NO: 2356276
uaugcugugcuggaauucu

SEQ ID NO: 2356278 - RNA, 19 nt, Artificial Sequence
  Description of Artificial Sequence: Synthetic oligonucleotide
  Sense strand starting at position 1401 of SEQ ID NO: 1885629
agaaauaaugcguagucuu

SEQ ID NO: 2356279 - RNA, 19 nt, Artificial Sequence
  Description of Artificial Sequence: Synthetic oligonucleotide
  Antisense strand to SEQ ID NO: 2356278
aagacuacgcauuauuucu

SEQ ID NO: 2356280 - RNA, 19 nt, Artificial Sequence
  Description of Artificial Sequence: Synthetic oligonucleotide
  Sense strand starting at position 1421 of SEQ ID NO: 1885629
ugaagauguugacccggaa

SEQ ID NO: 2356281 - RNA, 19 nt, Artificial Sequence
  Description of Artificial Sequence: Synthetic oligonucleotide
  Antisense strand to SEQ ID NO: 2356280
uuccgggucaacaucuuca

SEQ ID NO: 2356282 - RNA, 19 nt, Artificial Sequence
  Description of Artificial Sequence: Synthetic oligonucleotide
  Sense strand starting at position 1463 of SEQ ID NO: 1885629
aggccuacagucuggagaa

SEQ ID NO: 2356283 - RNA, 19 nt, Artificial Sequence
  Description of Artificial Sequence: Synthetic oligonucleotide
  Antisense strand to SEQ ID NO: 2356282
uucuccagacuguaggccu

SEQ ID NO: 2356284 - RNA, 19 nt, Artificial Sequence
  Description of Artificial Sequence: Synthetic oligonucleotide
  Sense strand starting at position 1477 of SEQ ID NO: 1885629
gagaaugggugcucaauug

SEQ ID NO: 2356285 - RNA, 19 nt, Artificial Sequence
  Description of Artificial Sequence: Synthetic oligonucleotide
  Antisense strand to SEQ ID NO: 2356284
caauugagcacccauucuc

SEQ ID NO: 2356286 - RNA, 19 nt, Artificial Sequence
  Description of Artificial Sequence: Synthetic oligonucleotide
  Sense strand starting at position 1483 of SEQ ID NO: 1885629
gggugcucaauugaggaua

SEQ ID NO: 2356287 - RNA, 19 nt, Artificial Sequence
  Description of Artificial Sequence: Synthetic oligonucleotide
  Antisense strand to SEQ ID NO: 2356286
uauccucaauugagcaccc

SEQ ID NO: 2356288 - RNA, 19 nt, Artificial Sequence
  Description of Artificial Sequence: Synthetic oligonucleotide
  Sense strand starting at position 1511 of SEQ ID NO: 1885629
gagauaaauuguccuagau

SEQ ID NO: 2356289 - RNA, 19 nt, Artificial Sequence
  Description of Artificial Sequence: Synthetic oligonucleotide
  Antisense strand to SEQ ID NO: 2356288
aucuaggacaauuuaucuc

SEQ ID NO: 2356290 - RNA, 19 nt, Artificial Sequence
  Description of Artificial Sequence: Synthetic oligonucleotide
  Sense strand starting at position 1989 of SEQ ID NO: 1885629
caggaacgauuaucgaauu

SEQ ID NO: 2356291 - RNA, 19 nt, Artificial Sequence
  Description of Artificial Sequence: Synthetic oligonucleotide
  Antisense strand to SEQ ID NO: 2356290
aauucgauaaucguuccug

SEQ ID NO: 2356292 - RNA, 19 nt, Artificial Sequence
  Description of Artificial Sequence: Synthetic oligonucleotide
  Sense strand starting at position 2031 of SEQ ID NO: 1885629
aggcaauguuaacuaaguu

SEQ ID NO: 2356293 - RNA, 19 nt, Artificial Sequence
  Description of Artificial Sequence: Synthetic oligonucleotide
  Antisense strand to SEQ ID NO: 2356292
aacuuaguuaacauugccu

SEQ ID NO: 2356294 - RNA, 19 nt, Artificial Sequence
  Description of Artificial Sequence: Synthetic oligonucleotide
  Sense strand starting at position 2472 of SEQ ID NO: 1885629
uugcucuguuaauugauuu

SEQ ID NO: 2356295 - RNA, 19 nt, Artificial Sequence
  Description of Artificial Sequence: Synthetic oligonucleotide
  Antisense strand to SEQ ID NO: 2356294
aaaucaauuaacagagcaa

SEQ ID NO: 2356296 - RNA, 19 nt, Artificial Sequence
  Description of Artificial Sequence: Synthetic oligonucleotide
  Sense strand starting at position 2830 of SEQ ID NO: 1885629
ucaguuguuucccucauuu

SEQ ID NO: 2356297 - RNA, 19 nt, Artificial Sequence
  Description of Artificial Sequence: Synthetic oligonucleotide
  Antisense strand to SEQ ID NO: 2356296
aaaugagggaaacaacuga

SEQ ID NO: 2356298 - RNA, 19 nt, Artificial Sequence
  Description of Artificial Sequence: Synthetic oligonucleotide
  Sense strand starting at position 2942 of SEQ ID NO: 1885629
aggaaagaaucuuuaguuu

SEQ ID NO: 2356299 - RNA, 19 nt, Artificial Sequence
  Description of Artificial Sequence: Synthetic oligonucleotide
  Antisense strand to SEQ ID NO: 2356298
aaacuaaagauucuuuccu

SEQ ID NO: 2356300 - RNA, 19 nt, Artificial Sequence
  Description of Artificial Sequence: Synthetic oligonucleotide
  Sense strand starting at position 2995 of SEQ ID NO: 1885629
cuguauugucaggacaaau

SEQ ID NO: 2356301 - RNA, 19 nt, Artificial Sequence
  Description of Artificial Sequence: Synthetic oligonucleotide
  Antisense strand to SEQ ID NO: 2356300
auuuguccugacaauacag

SEQ ID NO: 2356302 - RNA, 19 nt, Artificial Sequence
  Description of Artificial Sequence: Synthetic oligonucleotide
  Sense strand starting at position 3023 of SEQ ID NO: 1885629
cucauccuguuguuaaaga

SEQ ID NO: 2356303 - RNA, 19 nt, Artificial Sequence
  Description of Artificial Sequence: Synthetic oligonucleotide
  Antisense strand to SEQ ID NO: 2356302
ucuuuaacaacaggaugag

SEQ ID NO: 2356304 - RNA, 19 nt, Artificial Sequence
  Description of Artificial Sequence: Synthetic oligonucleotide
  Sense strand starting at position 3061 of SEQ ID NO: 1885629
cugacauuccuuuguauua

SEQ ID NO: 2356305 - RNA, 19 nt, Artificial Sequence
  Description of Artificial Sequence: Synthetic oligonucleotide
  Antisense strand to SEQ ID NO: 2356304
uaauacaaaggaaugucag

SEQ ID NO: 2356306 - RNA, 19 nt, Artificial Sequence
  Description of Artificial Sequence: Synthetic oligonucleotide
  Sense strand starting at position 3157 of SEQ ID NO: 1885629
auaguugauucuucccuua

SEQ ID NO: 2356307 - RNA, 19 nt, Artificial Sequence
  Description of Artificial Sequence: Synthetic oligonucleotide
  Antisense strand to SEQ ID NO: 2356306
uaagggaagaaucaacuau

SEQ ID NO: 2356308 - RNA, 19 nt, Artificial Sequence
  Description of Artificial Sequence: Synthetic oligonucleotide
  Sense strand starting at position 3184 of SEQ ID NO: 1885629
uuugcugucccagaaugau

SEQ ID NO: 2356309 - RNA, 19 nt, Artificial Sequence
  Description of Artificial Sequence: Synthetic oligonucleotide
  Antisense strand to SEQ ID NO: 2356308
aucauucugggacagcaaa

SEQ ID NO: 2356310 - RNA, 19 nt, Artificial Sequence
  Description of Artificial Sequence: Synthetic oligonucleotide
  Sense strand starting at position 3190 of SEQ ID NO: 1885629
gucccagaaugauuauuau

SEQ ID NO: 2356311 - RNA, 19 nt, Artificial Sequence
  Description of Artificial Sequence: Synthetic oligonucleotide
  Antisense strand to SEQ ID NO: 2356310
auaauaaucauucugggac

SEQ ID NO: 2356312 - RNA, 19 nt, Artificial Sequence
  Description of Artificial Sequence: Synthetic oligonucleotide
  Sense strand starting at position 3241 of SEQ ID NO: 1885629
gauguaugauggcuaauaa

SEQ ID NO: 2356313 - RNA, 19 nt, Artificial Sequence
  Description of Artificial Sequence: Synthetic oligonucleotide
  Antisense strand to SEQ ID NO: 2356312
uuauuagccaucauacauc

SEQ ID NO: 2356314 - RNA, 19 nt, Artificial Sequence
  Description of Artificial Sequence: Synthetic oligonucleotide
  Sense strand starting at position 3242 of SEQ ID NO: 1885629
auguaugauggcuaauaac

SEQ ID NO: 2356315 - RNA, 19 nt, Artificial Sequence
  Description of Artificial Sequence: Synthetic oligonucleotide
  Antisense strand to SEQ ID NO: 2356314
guuauuagccaucauacau

SEQ ID NO: 2356316 - RNA, 19 nt, Artificial Sequence
  Description of Artificial Sequence: Synthetic oligonucleotide
  Sense strand starting at position 3380 of SEQ ID NO: 1885629
gucccuuggcuccaugaga

SEQ ID NO: 2356317 - RNA, 19 nt, Artificial Sequence
  Description of Artificial Sequence: Synthetic oligonucleotide
  Antisense strand to SEQ ID NO: 2356316
ucucauggagccaagggac

SEQ ID NO: 2356318 - RNA, 19 nt, Artificial Sequence
  Description of Artificial Sequence: Synthetic oligonucleotide
  Sense strand starting at position 3412 of SEQ ID NO: 1885629
aauuaauaucuguggauag

SEQ ID NO: 2356319 - RNA, 19 nt, Artificial Sequence
  Description of Artificial Sequence: Synthetic oligonucleotide
  Antisense strand to SEQ ID NO: 2356318
cuauccacagauauuaauu

SEQ ID NO: 2356320 - RNA, 19 nt, Artificial Sequence
  Description of Artificial Sequence: Synthetic oligonucleotide
  Sense strand starting at position 3581 of SEQ ID NO: 1885629
gcaacuuaauaugugacua

SEQ ID NO: 2356321 - RNA, 19 nt, Artificial Sequence
  Description of Artificial Sequence: Synthetic oligonucleotide
  Antisense strand to SEQ ID NO: 2356320
uagucacauauuaaguugc

SEQ ID NO: 2356322 - RNA, 19 nt, Artificial Sequence
  Description of Artificial Sequence: Synthetic oligonucleotide
  Sense strand starting at position 3733 of SEQ ID NO: 1885629
aguagaaaugucugggcau

SEQ ID NO: 2356323 - RNA, 19 nt, Artificial Sequence
  Description of Artificial Sequence: Synthetic oligonucleotide
  Antisense strand to SEQ ID NO: 2356322
augcccagacauuucuacu

SEQ ID NO: 2356324 - RNA, 19 nt, Artificial Sequence
  Description of Artificial Sequence: Synthetic oligonucleotide
  Sense strand starting at position 3735 of SEQ ID NO: 1885629
uagaaaugucugggcauau

SEQ ID NO: 2356325 - RNA, 19 nt, Artificial Sequence
  Description of Artificial Sequence: Synthetic oligonucleotide
  Antisense strand to SEQ ID NO: 2356324
auaugcccagacauuucua

SEQ ID NO: 2356326 - RNA, 19 nt, Artificial Sequence
  Description of Artificial Sequence: Synthetic oligonucleotide
  Sense strand starting at position 3736 of SEQ ID NO: 1885629
agaaaugucugggcauauu

SEQ ID NO: 2356327 - RNA, 19 nt, Artificial Sequence
  Description of Artificial Sequence: Synthetic oligonucleotide
  Antisense strand to SEQ ID NO: 2356326
aauaugcccagacauuucu

SEQ ID NO: 2356328 - RNA, 19 nt, Artificial Sequence
  Description of Artificial Sequence: Synthetic oligonucleotide
  Sense strand starting at position 3848 of SEQ ID NO: 1885629
caaccucugccagaagagu

SEQ ID NO: 2356329 - RNA, 19 nt, Artificial Sequence
  Description of Artificial Sequence: Synthetic oligonucleotide
  Antisense strand to SEQ ID NO: 2356328
acucuucuggcagagguug

SEQ ID NO: 2356330 - RNA, 19 nt, Artificial Sequence
  Description of Artificial Sequence: Synthetic oligonucleotide
  Sense strand starting at position 3913 of SEQ ID NO: 1885629
uuagcuaggacuuggcaaa

SEQ ID NO: 2356331 - RNA, 19 nt, Artificial Sequence
  Description of Artificial Sequence: Synthetic oligonucleotide
  Antisense strand to SEQ ID NO: 2356330
uuugccaaguccuagcuaa

SEQ ID NO: 2356332 - RNA, 19 nt, Artificial Sequence
  Description of Artificial Sequence: Synthetic oligonucleotide
  Sense strand starting at position 3932 of SEQ ID NO: 1885629
cucagaugccaggaguagu

SEQ ID NO: 2356333 - RNA, 19 nt, Artificial Sequence
  Description of Artificial Sequence: Synthetic oligonucleotide
  Antisense strand to SEQ ID NO: 2356332
acuacuccuggcaucugag

SEQ ID NO: 2356334 - RNA, 19 nt, Artificial Sequence
  Description of Artificial Sequence: Synthetic oligonucleotide
  Sense strand starting at position 3943 of SEQ ID NO: 1885629
ggaguaguucuacaguucu

SEQ ID NO: 2356335 - RNA, 19 nt, Artificial Sequence
  Description of Artificial Sequence: Synthetic oligonucleotide
  Antisense strand to SEQ ID NO: 2356334
agaacuguagaacuacucc

SEQ ID NO: 2356336 - RNA, 19 nt, Artificial Sequence
  Description of Artificial Sequence: Synthetic oligonucleotide
  Sense strand starting at position 340 of SEQ ID NO: 1885630
cugugacaucgcuggaaag

SEQ ID NO: 2356337 - RNA, 19 nt, Artificial Sequence
  Description of Artificial Sequence: Synthetic oligonucleotide
  Antisense strand to SEQ ID NO: 2356336
cuuuccagcgaugucacag

SEQ ID NO: 2356338 - RNA, 19 nt, Artificial Sequence
  Description of Artificial Sequence: Synthetic oligonucleotide
  Sense strand starting at position 342 of SEQ ID NO: 1885630
gugacaucgcuggaaagua

SEQ ID NO: 2356339 - RNA, 19 nt, Artificial Sequence
  Description of Artificial Sequence: Synthetic oligonucleotide
  Antisense strand to SEQ ID NO: 2356338
uacuuuccagcgaugucac

SEQ ID NO: 2356340 - RNA, 19 nt, Artificial Sequence
  Description of Artificial Sequence: Synthetic oligonucleotide
  Sense strand starting at position 480 of SEQ ID NO: 1885630
ccucacugaccuugucaca

SEQ ID NO: 2356341 - RNA, 19 nt, Artificial Sequence
  Description of Artificial Sequence: Synthetic oligonucleotide
  Antisense strand to SEQ ID NO: 2356340
ugugacaaggucagugagg

SEQ ID NO: 2356342 - RNA, 19 nt, Artificial Sequence
  Description of Artificial Sequence: Synthetic oligonucleotide
  Sense strand starting at position 674 of SEQ ID NO: 1885630
cuguucccucuuggguaaa

SEQ ID NO: 2356343 - RNA, 19 nt, Artificial Sequence
  Description of Artificial Sequence: Synthetic oligonucleotide
  Antisense strand to SEQ ID NO: 2356342
uuuacccaagagggaacag

SEQ ID NO: 2356344 - RNA, 19 nt, Artificial Sequence
  Description of Artificial Sequence: Synthetic oligonucleotide
  Sense strand starting at position 1232 of SEQ ID NO: 1885630
cucucuccacugugaaagu

SEQ ID NO: 2356345 - RNA, 19 nt, Artificial Sequence
  Description of Artificial Sequence: Synthetic oligonucleotide
  Antisense strand to SEQ ID NO: 2356344
acuuucacaguggagagag

SEQ ID NO: 2356346 - RNA, 19 nt, Artificial Sequence
  Description of Artificial Sequence: Synthetic oligonucleotide
  Sense strand starting at position 1241 of SEQ ID NO: 1885630
cugugaaaguggcugauca

SEQ ID NO: 2356347 - RNA, 19 nt, Artificial Sequence
  Description of Artificial Sequence: Synthetic oligonucleotide
  Antisense strand to SEQ ID NO: 2356346
ugaucagccacuuucacag

SEQ ID NO: 2356348 - RNA, 19 nt, Artificial Sequence
  Description of Artificial Sequence: Synthetic oligonucleotide
  Sense strand starting at position 1261 of SEQ ID NO: 1885630
ggcagaaccagaugauauc

SEQ ID NO: 2356349 - RNA, 19 nt, Artificial Sequence
  Description of Artificial Sequence: Synthetic oligonucleotide
  Antisense strand to SEQ ID NO: 2356348
gauaucaucugguucugcc

SEQ ID NO: 2356350 - RNA, 19 nt, Artificial Sequence
  Description of Artificial Sequence: Synthetic oligonucleotide
  Sense strand starting at position 1268 of SEQ ID NO: 1885630
ccagaugauaucggguaga

SEQ ID NO: 2356351 - RNA, 19 nt, Artificial Sequence
  Description of Artificial Sequence: Synthetic oligonucleotide
  Antisense strand to SEQ ID NO: 2356350
ucuacccgauaucaucugg

SEQ ID NO: 2356352 - RNA, 19 nt, Artificial Sequence
  Description of Artificial Sequence: Synthetic oligonucleotide
  Sense strand starting at position 1321 of SEQ ID NO: 1885630
gcacuaaaccuguguauuu

SEQ ID NO: 2356353 - RNA, 19 nt, Artificial Sequence
  Description of Artificial Sequence: Synthetic oligonucleotide
  Antisense strand to SEQ ID NO: 2356352
aaauacacagguuuagugc

SEQ ID NO: 2356354 - RNA, 19 nt, Artificial Sequence
  Description of Artificial Sequence: Synthetic oligonucleotide
  Sense strand starting at position 1419 of SEQ ID NO: 1885630
ggcaaauaugcccgggaga

SEQ ID NO: 2356355 - RNA, 19 nt, Artificial Sequence
  Description of Artificial Sequence: Synthetic oligonucleotide
  Antisense strand to SEQ ID NO: 2356354
ucucccgggcauauuugcc

SEQ ID NO: 2356356 - RNA, 19 nt, Artificial Sequence
  Description of Artificial Sequence: Synthetic oligonucleotide
  Sense strand starting at position 1420 of SEQ ID NO: 1885630
gcaaauaugcccgggagac

SEQ ID NO: 2356357 - RNA, 19 nt, Artificial Sequence
  Description of Artificial Sequence: Synthetic oligonucleotide
  Antisense strand to SEQ ID NO: 2356356
gucucccgggcauauuugc

SEQ ID NO: 2356358 - RNA, 19 nt, Artificial Sequence
  Description of Artificial Sequence: Synthetic oligonucleotide
  Sense strand starting at position 1482 of SEQ ID NO: 1885630
gaaggcaucgccgccauau

SEQ ID NO: 2356359 - RNA, 19 nt, Artificial Sequence
  Description of Artificial Sequence: Synthetic oligonucleotide
  Antisense strand to SEQ ID NO: 2356358
auauggcggcgaugccuuc

SEQ ID NO: 2356360 - RNA, 19 nt, Artificial Sequence
  Description of Artificial Sequence: Synthetic oligonucleotide
  Sense strand starting at position 1694 of SEQ ID NO: 1885630
agggaaaugugccucaaga

SEQ ID NO: 2356361 - RNA, 19 nt, Artificial Sequence
  Description of Artificial Sequence: Synthetic oligonucleotide
  Antisense strand to SEQ ID NO: 2356360
ucuugaggcacauuucccu

SEQ ID NO: 2356362 - RNA, 19 nt, Artificial Sequence
  Description of Artificial Sequence: Synthetic oligonucleotide
  Sense strand starting at position 1696 of SEQ ID NO: 1885630
ggaaaugugccucaagauu

SEQ ID NO: 2356363 - RNA, 19 nt, Artificial Sequence
  Description of Artificial Sequence: Synthetic oligonucleotide
  Antisense strand to SEQ ID NO: 2356362
aaucuugaggcacauuucc

SEQ ID NO: 2356364 - RNA, 19 nt, Artificial Sequence
  Description of Artificial Sequence: Synthetic oligonucleotide
  Sense strand starting at position 1859 of SEQ ID NO: 1885630
cauccuuugcggcaaggau

SEQ ID NO: 2356365 - RNA, 19 nt, Artificial Sequence
  Description of Artificial Sequence: Synthetic oligonucleotide
  Antisense strand to SEQ ID NO: 2356364
auccuugccgcaaaggaug

SEQ ID NO: 2356366 - RNA, 19 nt, Artificial Sequence
  Description of Artificial Sequence: Synthetic oligonucleotide
  Sense strand starting at position 2050 of SEQ ID NO: 1885630
cagcgcauucugcugcaau

SEQ ID NO: 2356367 - RNA, 19 nt, Artificial Sequence
  Description of Artificial Sequence: Synthetic oligonucleotide
  Antisense strand to SEQ ID NO: 2356366
auugcagcagaaugcgcug

SEQ ID NO: 2356368 - RNA, 19 nt, Artificial Sequence
  Description of Artificial Sequence: Synthetic oligonucleotide
  Sense strand starting at position 2067 of SEQ ID NO: 1885630
augcgcucauuucucuaaa

SEQ ID NO: 2356369 - RNA, 19 nt, Artificial Sequence
  Description of Artificial Sequence: Synthetic oligonucleotide
  Antisense strand to SEQ ID NO: 2356368
uuuagagaaaugagcgcau

SEQ ID NO: 2356370 - RNA, 19 nt, Artificial Sequence
  Description of Artificial Sequence: Synthetic oligonucleotide
  Sense strand starting at position 2143 of SEQ ID NO: 1885630
cccagauugcagcaaagaa

SEQ ID NO: 2356371 - RNA, 19 nt, Artificial Sequence
  Description of Artificial Sequence: Synthetic oligonucleotide
  Antisense strand to SEQ ID NO: 2356370
uucuuugcugcaaucuggg

SEQ ID NO: 2356372 - RNA, 19 nt, Artificial Sequence
  Description of Artificial Sequence: Synthetic oligonucleotide
  Sense strand starting at position 2364 of SEQ ID NO: 1885630
gcgguuucggaacauccau

SEQ ID NO: 2356373 - RNA, 19 nt, Artificial Sequence
  Description of Artificial Sequence: Synthetic oligonucleotide
  Antisense strand to SEQ ID NO: 2356372
auggauguuccgaaaccgc

SEQ ID NO: 2356374 - RNA, 19 nt, Artificial Sequence
  Description of Artificial Sequence: Synthetic oligonucleotide
  Sense strand starting at position 2516 of SEQ ID NO: 1885630
ucugacugguucucuuuga

SEQ ID NO: 2356375 - RNA, 19 nt, Artificial Sequence
  Description of Artificial Sequence: Synthetic oligonucleotide
  Antisense strand to SEQ ID NO: 2356374
ucaaagagaaccagucaga

SEQ ID NO: 2356376 - RNA, 19 nt, Artificial Sequence
  Description of Artificial Sequence: Synthetic oligonucleotide
  Sense strand starting at position 2520 of SEQ ID NO: 1885630
acugguucucuuugacaug

SEQ ID NO: 2356377 - RNA, 19 nt, Artificial Sequence
  Description of Artificial Sequence: Synthetic oligonucleotide
  Antisense strand to SEQ ID NO: 2356376
caugucaaagagaaccagu

SEQ ID NO: 2356378 - RNA, 19 nt, Artificial Sequence
  Description of Artificial Sequence: Synthetic oligonucleotide
  Sense strand starting at position 2525 of SEQ ID NO: 1885630
uucucuuugacaugggaga

SEQ ID NO: 2356379 - RNA, 19 nt, Artificial Sequence
  Description of Artificial Sequence: Synthetic oligonucleotide
  Antisense strand to SEQ ID NO: 2356378
ucucccaugucaaagagaa

SEQ ID NO: 2356380 - RNA, 19 nt, Artificial Sequence
  Description of Artificial Sequence: Synthetic oligonucleotide
  Sense strand starting at position 2551 of SEQ ID NO: 1885630
ccgcgucuccgagucagaa

SEQ ID NO: 2356381 - RNA, 19 nt, Artificial Sequence
  Description of Artificial Sequence: Synthetic oligonucleotide
  Antisense strand to SEQ ID NO: 2356380
uucugacucggagacgcgg

SEQ ID NO: 2356382 - RNA, 19 nt, Artificial Sequence
  Description of Artificial Sequence: Synthetic oligonucleotide
  Sense strand starting at position 2552 of SEQ ID NO: 1885630
cgcgucuccgagucagaaa

SEQ ID NO: 2356383 - RNA, 19 nt, Artificial Sequence
  Description of Artificial Sequence: Synthetic oligonucleotide
  Antisense strand to SEQ ID NO: 2356382
uuucugacucggagacgcg

SEQ ID NO: 2356384 - RNA, 19 nt, Artificial Sequence
  Description of Artificial Sequence: Synthetic oligonucleotide
  Sense strand starting at position 2589 of SEQ ID NO: 1885630
cgggcucugccgcuuacaa

SEQ ID NO: 2356385 - RNA, 19 nt, Artificial Sequence
  Description of Artificial Sequence: Synthetic oligonucleotide
  Antisense strand to SEQ ID NO: 2356384
uuguaagcggcagagcccg

SEQ ID NO: 2356386 - RNA, 19 nt, Artificial Sequence
  Description of Artificial Sequence: Synthetic oligonucleotide
  Sense strand starting at position 2691 of SEQ ID NO: 1885630
acacaccaggguuguaaua

SEQ ID NO: 2356387 - RNA, 19 nt, Artificial Sequence
  Description of Artificial Sequence: Synthetic oligonucleotide
  Antisense strand to SEQ ID NO: 2356386
uauuacaacccuggugugu

SEQ ID NO: 2356388 - RNA, 19 nt, Artificial Sequence
  Description of Artificial Sequence: Synthetic oligonucleotide
  Sense strand starting at position 2724 of SEQ ID NO: 1885630
agccgugcccucuaaggaa

SEQ ID NO: 2356389 - RNA, 19 nt, Artificial Sequence
  Description of Artificial Sequence: Synthetic oligonucleotide
  Antisense strand to SEQ ID NO: 2356388
uuccuuagagggcacggcu

SEQ ID NO: 2356390 - RNA, 19 nt, Artificial Sequence
  Description of Artificial Sequence: Synthetic oligonucleotide
  Sense strand starting at position 2728 of SEQ ID NO: 1885630
gugcccucuaaggaaagua

SEQ ID NO: 2356391 - RNA, 19 nt, Artificial Sequence
  Description of Artificial Sequence: Synthetic oligonucleotide
  Antisense strand to SEQ ID NO: 2356390
uacuuuccuuagagggcac

SEQ ID NO: 2356392 - RNA, 19 nt, Artificial Sequence
  Description of Artificial Sequence: Synthetic oligonucleotide
  Sense strand starting at position 2762 of SEQ ID NO: 1885630
cugugucccauguggagau

SEQ ID NO: 2356393 - RNA, 19 nt, Artificial Sequence
  Description of Artificial Sequence: Synthetic oligonucleotide
  Antisense strand to SEQ ID NO: 2356392
aucuccacaugggacacag

SEQ ID NO: 2356394 - RNA, 19 nt, Artificial Sequence
  Description of Artificial Sequence: Synthetic oligonucleotide
  Sense strand starting at position 2772 of SEQ ID NO: 1885630
uguggagaugccugagcua

SEQ ID NO: 2356395 - RNA, 19 nt, Artificial Sequence
  Description of Artificial Sequence: Synthetic oligonucleotide
  Antisense strand to SEQ ID NO: 2356394
uagcucaggcaucuccaca

SEQ ID NO: 2356396 - RNA, 19 nt, Artificial Sequence
  Description of Artificial Sequence: Synthetic oligonucleotide
  Sense strand starting at position 2817 of SEQ ID NO: 1885630
acacaugcccuuugaaaga

SEQ ID NO: 2356397 - RNA, 19 nt, Artificial Sequence
  Description of Artificial Sequence: Synthetic oligonucleotide
  Antisense strand to SEQ ID NO: 2356396
ucuuucaaagggcaugugu

SEQ ID NO: 2356398 - RNA, 19 nt, Artificial Sequence
  Description of Artificial Sequence: Synthetic oligonucleotide
  Sense strand starting at position 2915 of SEQ ID NO: 1885630
gggaguuaaucccuaacag

SEQ ID NO: 2356399 - RNA, 19 nt, Artificial Sequence
  Description of Artificial Sequence: Synthetic oligonucleotide
  Antisense strand to SEQ ID NO: 2356398
cuguuagggauuaacuccc

SEQ ID NO: 2356400 - RNA, 19 nt, Artificial Sequence
  Description of Artificial Sequence: Synthetic oligonucleotide
  Sense strand starting at position 3083 of SEQ ID NO: 1885630
gauggagugcucggugaca

SEQ ID NO: 2356401 - RNA, 19 nt, Artificial Sequence
  Description of Artificial Sequence: Synthetic oligonucleotide
  Antisense strand to SEQ ID NO: 2356400
ugucaccgagcacuccauc

SEQ ID NO: 2356402 - RNA, 19 nt, Artificial Sequence
  Description of Artificial Sequence: Synthetic oligonucleotide
  Sense strand starting at position 3085 of SEQ ID NO: 1885630
uggagugcucggugacaga

SEQ ID NO: 2356403 - RNA, 19 nt, Artificial Sequence
  Description of Artificial Sequence: Synthetic oligonucleotide
  Antisense strand to SEQ ID NO: 2356402
ucugucaccgagcacucca

SEQ ID NO: 2356404 - RNA, 19 nt, Artificial Sequence
  Description of Artificial Sequence: Synthetic oligonucleotide
  Sense strand starting at position 3086 of SEQ ID NO: 1885630
ggagugcucggugacagaa

SEQ ID NO: 2356405 - RNA, 19 nt, Artificial Sequence
  Description of Artificial Sequence: Synthetic oligonucleotide
  Antisense strand to SEQ ID NO: 2356404
uucugucaccgagcacucc

SEQ ID NO: 2356406 - RNA, 19 nt, Artificial Sequence
  Description of Artificial Sequence: Synthetic oligonucleotide
  Sense strand starting at position 3266 of SEQ ID NO: 1885630
gggagauuccagggcugaa

SEQ ID NO: 2356407 - RNA, 19 nt, Artificial Sequence
  Description of Artificial Sequence: Synthetic oligonucleotide
  Antisense strand to SEQ ID NO: 2356406
uucagcccuggaaucuccc

SEQ ID NO: 2356408 - RNA, 19 nt, Artificial Sequence
  Description of Artificial Sequence: Synthetic oligonucleotide
  Sense strand starting at position 3298 of SEQ ID NO: 1885630
ggcuauuucuacguccaca

SEQ ID NO: 2356409 - RNA, 19 nt, Artificial Sequence
  Description of Artificial Sequence: Synthetic oligonucleotide
  Antisense strand to SEQ ID NO: 2356408
uguggacguagaaauagcc

SEQ ID NO: 2356410 - RNA, 19 nt, Artificial Sequence
  Description of Artificial Sequence: Synthetic oligonucleotide
  Sense strand starting at position 3645 of SEQ ID NO: 1885630
ggagaacguuuauuagcca

SEQ ID NO: 2356411 - RNA, 19 nt, Artificial Sequence
  Description of Artificial Sequence: Synthetic oligonucleotide
  Antisense strand to SEQ ID NO: 2356410
uggcuaauaaacguucucc

SEQ ID NO: 2356412 - RNA, 19 nt, Artificial Sequence
  Description of Artificial Sequence: Synthetic oligonucleotide
  Sense strand starting at position 3652 of SEQ ID NO: 1885630
guuuauuagccacaguauu

SEQ ID NO: 2356413 - RNA, 19 nt, Artificial Sequence
  Description of Artificial Sequence: Synthetic oligonucleotide
  Antisense strand to SEQ ID NO: 2356412
aauacuguggcuaauaaac

SEQ ID NO: 2356414 - RNA, 19 nt, Artificial Sequence
  Description of Artificial Sequence: Synthetic oligonucleotide
  Sense strand starting at position 3664 of SEQ ID NO: 1885630
caguauuaauagcuaggaa

SEQ ID NO: 2356415 - RNA, 19 nt, Artificial Sequence
  Description of Artificial Sequence: Synthetic oligonucleotide
  Antisense strand to SEQ ID NO: 2356414
uuccuagcuauuaauacug

SEQ ID NO: 2356416 - RNA, 19 nt, Artificial Sequence
  Description of Artificial Sequence: Synthetic oligonucleotide
  Sense strand starting at position 364 of SEQ ID NO: 1885631
cugugacaucgcuggaaag

SEQ ID NO: 2356417 - RNA, 19 nt, Artificial Sequence
  Description of Artificial Sequence: Synthetic oligonucleotide
  Antisense strand to SEQ ID NO: 2356416
cuuuccagcgaugucacag

SEQ ID NO: 2356418 - RNA, 19 nt, Artificial Sequence
  Description of Artificial Sequence: Synthetic oligonucleotide
  Sense strand starting at position 366 of SEQ ID NO: 1885631
gugacaucgcuggaaagua

SEQ ID NO: 2356419 - RNA, 19 nt, Artificial Sequence
  Description of Artificial Sequence: Synthetic oligonucleotide
  Antisense strand to SEQ ID NO: 2356418
uacuuuccagcgaugucac

SEQ ID NO: 2356420 - RNA, 19 nt, Artificial Sequence
  Description of Artificial Sequence: Synthetic oligonucleotide
  Sense strand starting at position 504 of SEQ ID NO: 1885631
ccucacugaccuugucaca

SEQ ID NO: 2356421 - RNA, 19 nt, Artificial Sequence
  Description of Artificial Sequence: Synthetic oligonucleotide
  Antisense strand to SEQ ID NO: 2356420
ugugacaaggucagugagg

SEQ ID NO: 2356422 - RNA, 19 nt, Artificial Sequence
  Description of Artificial Sequence: Synthetic oligonucleotide
  Sense strand starting at position 698 of SEQ ID NO: 1885631
cuguucccucuuggguaaa

SEQ ID NO: 2356423 - RNA, 19 nt, Artificial Sequence
  Description of Artificial Sequence: Synthetic oligonucleotide
  Antisense strand to SEQ ID NO: 2356422
uuuacccaagagggaacag

SEQ ID NO: 2356424 - RNA, 19 nt, Artificial Sequence
  Description of Artificial Sequence: Synthetic oligonucleotide
  Sense strand starting at position 1256 of SEQ ID NO: 1885631
cucucuccacugugaaagu

SEQ ID NO: 2356425 - RNA, 19 nt, Artificial Sequence
  Description of Artificial Sequence: Synthetic oligonucleotide
  Antisense strand to SEQ ID NO: 2356424
acuuucacaguggagagag

SEQ ID NO: 2356426 - RNA, 19 nt, Artificial Sequence
  Description of Artificial Sequence: Synthetic oligonucleotide
  Sense strand starting at position 1265 of SEQ ID NO: 1885631
cugugaaaguggcugauca

SEQ ID NO: 2356427 - RNA, 19 nt, Artificial Sequence
  Description of Artificial Sequence: Synthetic oligonucleotide
  Antisense strand to SEQ ID NO: 2356426
ugaucagccacuuucacag

SEQ ID NO: 2356428 - RNA, 19 nt, Artificial Sequence
  Description of Artificial Sequence: Synthetic oligonucleotide
  Sense strand starting at position 1285 of SEQ ID NO: 1885631
ggcagaaccagaugauauc

SEQ ID NO: 2356429 - RNA, 19 nt, Artificial Sequence
  Description of Artificial Sequence: Synthetic oligonucleotide
  Antisense strand to SEQ ID NO: 2356428
gauaucaucugguucugcc

SEQ ID NO: 2356430 - RNA, 19 nt, Artificial Sequence
  Description of Artificial Sequence: Synthetic oligonucleotide
  Sense strand starting at position 1292 of SEQ ID NO: 1885631
ccagaugauaucggguaga

SEQ ID NO: 2356431 - RNA, 19 nt, Artificial Sequence
  Description of Artificial Sequence: Synthetic oligonucleotide
  Antisense strand to SEQ ID NO: 2356430
ucuacccgauaucaucugg

SEQ ID NO: 2356432 - RNA, 19 nt, Artificial Sequence
  Description of Artificial Sequence: Synthetic oligonucleotide
  Sense strand starting at position 1345 of SEQ ID NO: 1885631
gcacuaaaccuguguauuu

SEQ ID NO: 2356433 - RNA, 19 nt, Artificial Sequence
  Description of Artificial Sequence: Synthetic oligonucleotide
  Antisense strand to SEQ ID NO: 2356432
aaauacacagguuuagugc

SEQ ID NO: 2356434 - RNA, 19 nt, Artificial Sequence
  Description of Artificial Sequence: Synthetic oligonucleotide
  Sense strand starting at position 1443 of SEQ ID NO: 1885631
ggcaaauaugcccgggaga

SEQ ID NO: 2356435 - RNA, 19 nt, Artificial Sequence
  Description of Artificial Sequence: Synthetic oligonucleotide
  Antisense strand to SEQ ID NO: 2356434
ucucccgggcauauuugcc

SEQ ID NO: 2356436 - RNA, 19 nt, Artificial Sequence
  Description of Artificial Sequence: Synthetic oligonucleotide
  Sense strand starting at position 1444 of SEQ ID NO: 1885631
gcaaauaugcccgggagac

SEQ ID NO: 2356437 - RNA, 19 nt, Artificial Sequence
  Description of Artificial Sequence: Synthetic oligonucleotide
  Antisense strand to SEQ ID NO: 2356436
gucucccgggcauauuugc

SEQ ID NO: 2356438 - RNA, 19 nt, Artificial Sequence
  Description of Artificial Sequence: Synthetic oligonucleotide
  Sense strand starting at position 1506 of SEQ ID NO: 1885631
gaaggcaucgccgccauau

SEQ ID NO: 2356439 - RNA, 19 nt, Artificial Sequence
  Description of Artificial Sequence: Synthetic oligonucleotide
  Antisense strand to SEQ ID NO: 2356438
auauggcggcgaugccuuc

SEQ ID NO: 2356440 - RNA, 19 nt, Artificial Sequence
  Description of Artificial Sequence: Synthetic oligonucleotide
  Sense strand starting at position 1718 of SEQ ID NO: 1885631
agggaaaugugccucaaga

SEQ ID NO: 2356441 - RNA, 19 nt, Artificial Sequence
  Description of Artificial Sequence: Synthetic oligonucleotide
  Antisense strand to SEQ ID NO: 2356440
ucuugaggcacauuucccu

SEQ ID NO: 2356442 - RNA, 19 nt, Artificial Sequence
  Description of Artificial Sequence: Synthetic oligonucleotide
  Sense strand starting at position 1720 of SEQ ID NO: 1885631
ggaaaugugccucaagauu

SEQ ID NO: 2356443 - RNA, 19 nt, Artificial Sequence
  Description of Artificial Sequence: Synthetic oligonucleotide
  Antisense strand to SEQ ID NO: 2356442
aaucuugaggcacauuucc

SEQ ID NO: 2356444 - RNA, 19 nt, Artificial Sequence
  Description of Artificial Sequence: Synthetic oligonucleotide
  Sense strand starting at position 1883 of SEQ ID NO: 1885631
cauccuuugcggcaaggau

SEQ ID NO: 2356445 - RNA, 19 nt, Artificial Sequence
  Description of Artificial Sequence: Synthetic oligonucleotide
  Antisense strand to SEQ ID NO: 2356444
auccuugccgcaaaggaug

SEQ ID NO: 2356446 - RNA, 19 nt, Artificial Sequence
  Description of Artificial Sequence: Synthetic oligonucleotide
  Sense strand starting at position 2074 of SEQ ID NO: 1885631
cagcgcauucugcugcaau

SEQ ID NO: 2356447 - RNA, 19 nt, Artificial Sequence
  Description of Artificial Sequence: Synthetic oligonucleotide
  Antisense strand to SEQ ID NO: 2356446
auugcagcagaaugcgcug

SEQ ID NO: 2356448 - RNA, 19 nt, Artificial Sequence
  Description of Artificial Sequence: Synthetic oligonucleotide
  Sense strand starting at position 2091 of SEQ ID NO: 1885631
augcgcucauuucucuaaa

SEQ ID NO: 2356449 - RNA, 19 nt, Artificial Sequence
  Description of Artificial Sequence: Synthetic oligonucleotide
  Antisense strand to SEQ ID NO: 2356448
uuuagagaaaugagcgcau

SEQ ID NO: 2356450 - RNA, 19 nt, Artificial Sequence
  Description of Artificial Sequence: Synthetic oligonucleotide
  Sense strand starting at position 2167 of SEQ ID NO: 1885631
cccagauugcagcaaagaa

SEQ ID NO: 2356451 - RNA, 19 nt, Artificial Sequence
  Description of Artificial Sequence: Synthetic oligonucleotide
  Antisense strand to SEQ ID NO: 2356450
uucuuugcugcaaucuggg

SEQ ID NO: 2356452 - RNA, 19 nt, Artificial Sequence
  Description of Artificial Sequence: Synthetic oligonucleotide
  Sense strand starting at position 2388 of SEQ ID NO: 1885631
gcgguuucggaacauccau

SEQ ID NO: 2356453 - RNA, 19 nt, Artificial Sequence
  Description of Artificial Sequence: Synthetic oligonucleotide
  Antisense strand to SEQ ID NO: 2356452
auggauguuccgaaaccgc

SEQ ID NO: 2356454 - RNA, 19 nt, Artificial Sequence
  Description of Artificial Sequence: Synthetic oligonucleotide
  Sense strand starting at position 2540 of SEQ ID NO: 1885631
ucugacugguucucuuuga

SEQ ID NO: 2356455 - RNA, 19 nt, Artificial Sequence
  Description of Artificial Sequence: Synthetic oligonucleotide
  Antisense strand to SEQ ID NO: 2356454
ucaaagagaaccagucaga

SEQ ID NO: 2356456 - RNA, 19 nt, Artificial Sequence
  Description of Artificial Sequence: Synthetic oligonucleotide
  Sense strand starting at position 2544 of SEQ ID NO: 1885631
acugguucucuuugacaug

SEQ ID NO: 2356457 - RNA, 19 nt, Artificial Sequence
  Description of Artificial Sequence: Synthetic oligonucleotide
  Antisense strand to SEQ ID NO: 2356456
caugucaaagagaaccagu

SEQ ID NO: 2356458 - RNA, 19 nt, Artificial Sequence
  Description of Artificial Sequence: Synthetic oligonucleotide
  Sense strand starting at position 2549 of SEQ ID NO: 1885631
uucucuuugacaugggaga

SEQ ID NO: 2356459 - RNA, 19 nt, Artificial Sequence
  Description of Artificial Sequence: Synthetic oligonucleotide
  Antisense strand to SEQ ID NO: 2356458
ucucccaugucaaagagaa

SEQ ID NO: 2356460 - RNA, 19 nt, Artificial Sequence
  Description of Artificial Sequence: Synthetic oligonucleotide
  Sense strand starting at position 2575 of SEQ ID NO: 1885631
ccgcgucuccgagucagaa

SEQ ID NO: 2356461 - RNA, 19 nt, Artificial Sequence
  Description of Artificial Sequence: Synthetic oligonucleotide
  Antisense strand to SEQ ID NO: 2356460
uucugacucggagacgcgg

SEQ ID NO: 2356462 - RNA, 19 nt, Artificial Sequence
  Description of Artificial Sequence: Synthetic oligonucleotide
  Sense strand starting at position 2576 of SEQ ID NO: 1885631
cgcgucuccgagucagaaa

SEQ ID NO: 2356463 - RNA, 19 nt, Artificial Sequence
  Description of Artificial Sequence: Synthetic oligonucleotide
  Antisense strand to SEQ ID NO: 2356462
uuucugacucggagacgcg

SEQ ID NO: 2356464 - RNA, 19 nt, Artificial Sequence
  Description of Artificial Sequence: Synthetic oligonucleotide
  Sense strand starting at position 2613 of SEQ ID NO: 1885631
cgggcucugccgcuuacaa

SEQ ID NO: 2356465 - RNA, 19 nt, Artificial Sequence
  Description of Artificial Sequence: Synthetic oligonucleotide
  Antisense strand to SEQ ID NO: 2356464
uuguaagcggcagagcccg

SEQ ID NO: 2356466 - RNA, 19 nt, Artificial Sequence
  Description of Artificial Sequence: Synthetic oligonucleotide
  Sense strand starting at position 2715 of SEQ ID NO: 1885631
acacaccaggguuguaaua

SEQ ID NO: 2356467 - RNA, 19 nt, Artificial Sequence
  Description of Artificial Sequence: Synthetic oligonucleotide
  Antisense strand to SEQ ID NO: 2356466
uauuacaacccuggugugu

SEQ ID NO: 2356468 - RNA, 19 nt, Artificial Sequence
  Description of Artificial Sequence: Synthetic oligonucleotide
  Sense strand starting at position 2748 of SEQ ID NO: 1885631
agccgugcccucuaaggaa

SEQ ID NO: 2356469 - RNA, 19 nt, Artificial Sequence
  Description of Artificial Sequence: Synthetic oligonucleotide
  Antisense strand to SEQ ID NO: 2356468
uuccuuagagggcacggcu

SEQ ID NO: 2356470 - RNA, 19 nt, Artificial Sequence
  Description of Artificial Sequence: Synthetic oligonucleotide
  Sense strand starting at position 2752 of SEQ ID NO: 1885631
gugcccucuaaggaaagua

SEQ ID NO: 2356471 - RNA, 19 nt, Artificial Sequence
  Description of Artificial Sequence: Synthetic oligonucleotide
  Antisense strand to SEQ ID NO: 2356470
uacuuuccuuagagggcac

SEQ ID NO: 2356472 - RNA, 19 nt, Artificial Sequence
  Description of Artificial Sequence: Synthetic oligonucleotide
  Sense strand starting at position 2786 of SEQ ID NO: 1885631
cugugucccauguggagau

SEQ ID NO: 2356473 - RNA, 19 nt, Artificial Sequence
  Description of Artificial Sequence: Synthetic oligonucleotide
  Antisense strand to SEQ ID NO: 2356472
aucuccacaugggacacag

SEQ ID NO: 2356474 - RNA, 19 nt, Artificial Sequence
  Description of Artificial Sequence: Synthetic oligonucleotide
  Sense strand starting at position 2796 of SEQ ID NO: 1885631
uguggagaugccugagcua

SEQ ID NO: 2356475 - RNA, 19 nt, Artificial Sequence
  Description of Artificial Sequence: Synthetic oligonucleotide
  Antisense strand to SEQ ID NO: 2356474
uagcucaggcaucuccaca

SEQ ID NO: 2356476 - RNA, 19 nt, Artificial Sequence
  Description of Artificial Sequence: Synthetic oligonucleotide
  Sense strand starting at position 2841 of SEQ ID NO: 1885631
acacaugcccuuugaaaga

SEQ ID NO: 2356477 - RNA, 19 nt, Artificial Sequence
  Description of Artificial Sequence: Synthetic oligonucleotide
  Antisense strand to SEQ ID NO: 2356476
ucuuucaaagggcaugugu

SEQ ID NO: 2356478 - RNA, 19 nt, Artificial Sequence
  Description of Artificial Sequence: Synthetic oligonucleotide
  Sense strand starting at position 2939 of SEQ ID NO: 1885631
gggaguuaaucccuaacag

SEQ ID NO: 2356479 - RNA, 19 nt, Artificial Sequence
  Description of Artificial Sequence: Synthetic oligonucleotide
  Antisense strand to SEQ ID NO: 2356478
cuguuagggauuaacuccc

SEQ ID NO: 2356480 - RNA, 19 nt, Artificial Sequence
  Description of Artificial Sequence: Synthetic oligonucleotide
  Sense strand starting at position 3107 of SEQ ID NO: 1885631
gauggagugcucggugaca

SEQ ID NO: 2356481 - RNA, 19 nt, Artificial Sequence
  Description of Artificial Sequence: Synthetic oligonucleotide
  Antisense strand to SEQ ID NO: 2356480
ugucaccgagcacuccauc

SEQ ID NO: 2356482 - RNA, 19 nt, Artificial Sequence
  Description of Artificial Sequence: Synthetic oligonucleotide
  Sense strand starting at position 3109 of SEQ ID NO: 1885631
uggagugcucggugacaga

SEQ ID NO: 2356483 - RNA, 19 nt, Artificial Sequence
  Description of Artificial Sequence: Synthetic oligonucleotide
  Antisense strand to SEQ ID NO: 2356482
ucugucaccgagcacucca

SEQ ID NO: 2356484 - RNA, 19 nt, Artificial Sequence
  Description of Artificial Sequence: Synthetic oligonucleotide
  Sense strand starting at position 3110 of SEQ ID NO: 1885631
ggagugcucggugacagaa

SEQ ID NO: 2356485 - RNA, 19 nt, Artificial Sequence
  Description of Artificial Sequence: Synthetic oligonucleotide
  Antisense strand to SEQ ID NO: 2356484
uucugucaccgagcacucc

SEQ ID NO: 2356486 - RNA, 19 nt, Artificial Sequence
  Description of Artificial Sequence: Synthetic oligonucleotide
  Sense strand starting at position 3290 of SEQ ID NO: 1885631
gggagauuccagggcugaa

SEQ ID NO: 2356487 - RNA, 19 nt, Artificial Sequence
  Description of Artificial Sequence: Synthetic oligonucleotide
  Antisense strand to SEQ ID NO: 2356486
uucagcccuggaaucuccc

SEQ ID NO: 2356488 - RNA, 19 nt, Artificial Sequence
  Description of Artificial Sequence: Synthetic oligonucleotide
  Sense strand starting at position 3322 of SEQ ID NO: 1885631
ggcuauuucuacguccaca

SEQ ID NO: 2356489 - RNA, 19 nt, Artificial Sequence
  Description of Artificial Sequence: Synthetic oligonucleotide
  Antisense strand to SEQ ID NO: 2356488
uguggacguagaaauagcc

SEQ ID NO: 2356490 - RNA, 19 nt, Artificial Sequence
  Description of Artificial Sequence: Synthetic oligonucleotide
  Sense strand starting at position 3669 of SEQ ID NO: 1885631
ggagaacguuuauuagcca

SEQ ID NO: 2356491 - RNA, 19 nt, Artificial Sequence
  Description of Artificial Sequence: Synthetic oligonucleotide
  Antisense strand to SEQ ID NO: 2356490
uggcuaauaaacguucucc

SEQ ID NO: 2356492 - RNA, 19 nt, Artificial Sequence
  Description of Artificial Sequence: Synthetic oligonucleotide
  Sense strand starting at position 3676 of SEQ ID NO: 1885631
guuuauuagccacaguauu

SEQ ID NO: 2356493 - RNA, 19 nt, Artificial Sequence
  Description of Artificial Sequence: Synthetic oligonucleotide
  Antisense strand to SEQ ID NO: 2356492
aauacuguggcuaauaaac

SEQ ID NO: 2356494 - RNA, 19 nt, Artificial Sequence
  Description of Artificial Sequence: Synthetic oligonucleotide
  Sense strand starting at position 3688 of SEQ ID NO: 1885631
caguauuaauagcuaggaa

SEQ ID NO: 2356495 - RNA, 19 nt, Artificial Sequence
  Description of Artificial Sequence: Synthetic oligonucleotide
  Antisense strand to SEQ ID NO: 2356494
uuccuagcuauuaauacug

SEQ ID NO: 2356496 - RNA, 19 nt, Artificial Sequence
  Description of Artificial Sequence: Synthetic oligonucleotide
  Sense strand starting at position 15 of SEQ ID NO: 1885632
auguuucuucccgacucua

SEQ ID NO: 2356497 - RNA, 19 nt, Artificial Sequence
  Description of Artificial Sequence: Synthetic oligonucleotide
  Antisense strand to SEQ ID NO: 2356496
uagagucgggaagaaacau

SEQ ID NO: 2356498 - RNA, 19 nt, Artificial Sequence
  Description of Artificial Sequence: Synthetic oligonucleotide
  Sense strand starting at position 258 of SEQ ID NO: 1885632
gugugacaaggaugugaca

SEQ ID NO: 2356499 - RNA, 19 nt, Artificial Sequence
  Description of Artificial Sequence: Synthetic oligonucleotide
  Antisense strand to SEQ ID NO: 2356498
ugucacauccuugucacac

SEQ ID NO: 2356500 - RNA, 19 nt, Artificial Sequence
  Description of Artificial Sequence: Synthetic oligonucleotide
  Sense strand starting at position 282 of SEQ ID NO: 1885632
acucccaucuacguagaaa

SEQ ID NO: 2356501 - RNA, 19 nt, Artificial Sequence
  Description of Artificial Sequence: Synthetic oligonucleotide
  Antisense strand to SEQ ID NO: 2356500
uuucuacguagaugggagu

SEQ ID NO: 2356502 - RNA, 19 nt, Artificial Sequence
  Description of Artificial Sequence: Synthetic oligonucleotide
  Sense strand starting at position 393 of SEQ ID NO: 1885632
acagaucacuaauugguua

SEQ ID NO: 2356503 - RNA, 19 nt, Artificial Sequence
  Description of Artificial Sequence: Synthetic oligonucleotide
  Antisense strand to SEQ ID NO: 2356502
uaaccaauuagugaucugu

SEQ ID NO: 2356504 - RNA, 19 nt, Artificial Sequence
  Description of Artificial Sequence: Synthetic oligonucleotide
  Sense strand starting at position 405 of SEQ ID NO: 1885632
uugguuaauugguuaaaug

SEQ ID NO: 2356505 - RNA, 19 nt, Artificial Sequence
  Description of Artificial Sequence: Synthetic oligonucleotide
  Antisense strand to SEQ ID NO: 2356504
cauuuaaccaauuaaccaa

SEQ ID NO: 2356506 - RNA, 19 nt, Artificial Sequence
  Description of Artificial Sequence: Synthetic oligonucleotide
  Sense strand starting at position 406 of SEQ ID NO: 1885632
ugguuaauugguuaaaugu

SEQ ID NO: 2356507 - RNA, 19 nt, Artificial Sequence
  Description of Artificial Sequence: Synthetic oligonucleotide
  Antisense strand to SEQ ID NO: 2356506
acauuuaaccaauuaacca

SEQ ID NO: 2356508 - RNA, 19 nt, Artificial Sequence
  Description of Artificial Sequence: Synthetic oligonucleotide
  Sense strand starting at position 415 of SEQ ID NO: 1885632
gguuaaaugucuucccucu

SEQ ID NO: 2356509 - RNA, 19 nt, Artificial Sequence
  Description of Artificial Sequence: Synthetic oligonucleotide
  Antisense strand to SEQ ID NO: 2356508
agagggaagacauuuaacc

SEQ ID NO: 2356510 - RNA, 19 nt, Artificial Sequence
  Description of Artificial Sequence: Synthetic oligonucleotide
  Sense strand starting at position 449 of SEQ ID NO: 1885632
gacagaggccuucgagaac

SEQ ID NO: 2356511 - RNA, 19 nt, Artificial Sequence
  Description of Artificial Sequence: Synthetic oligonucleotide
  Antisense strand to SEQ ID NO: 2356510
guucucgaaggccucuguc

SEQ ID NO: 2356512 - RNA, 19 nt, Artificial Sequence
  Description of Artificial Sequence: Synthetic oligonucleotide
  Sense strand starting at position 460 of SEQ ID NO: 1885632
ucgagaacuucuuuacccu

SEQ ID NO: 2356513 - RNA, 19 nt, Artificial Sequence
  Description of Artificial Sequence: Synthetic oligonucleotide
  Antisense strand to SEQ ID NO: 2356512
aggguaaagaaguucucga

SEQ ID NO: 2356514 - RNA, 19 nt, Artificial Sequence
  Description of Artificial Sequence: Synthetic oligonucleotide
  Sense strand starting at position 505 of SEQ ID NO: 1885632
caugacuuugugcggaaga

SEQ ID NO: 2356515 - RNA, 19 nt, Artificial Sequence
  Description of Artificial Sequence: Synthetic oligonucleotide
  Antisense strand to SEQ ID NO: 2356514
ucuuccgcacaaagucaug

SEQ ID NO: 2356516 - RNA, 19 nt, Artificial Sequence
  Description of Artificial Sequence: Synthetic oligonucleotide
  Sense strand starting at position 507 of SEQ ID NO: 1885632
ugacuuugugcggaagaaa

SEQ ID NO: 2356517 - RNA, 19 nt, Artificial Sequence
  Description of Artificial Sequence: Synthetic oligonucleotide
  Antisense strand to SEQ ID NO: 2356516
uuucuuccgcacaaaguca

SEQ ID NO: 2356518 - RNA, 19 nt, Artificial Sequence
  Description of Artificial Sequence: Synthetic oligonucleotide
  Sense strand starting at position 516 of SEQ ID NO: 1885632
gcggaagaaaucugagaca

SEQ ID NO: 2356519 - RNA, 19 nt, Artificial Sequence
  Description of Artificial Sequence: Synthetic oligonucleotide
  Antisense strand to SEQ ID NO: 2356518
ugucucagauuucuuccgc

SEQ ID NO: 2356520 - RNA, 19 nt, Artificial Sequence
  Description of Artificial Sequence: Synthetic oligonucleotide
  Sense strand starting at position 519 of SEQ ID NO: 1885632
gaagaaaucugagacaggu

SEQ ID NO: 2356521 - RNA, 19 nt, Artificial Sequence
  Description of Artificial Sequence: Synthetic oligonucleotide
  Antisense strand to SEQ ID NO: 2356520
accugucucagauuucuuc

SEQ ID NO: 2356522 - RNA, 19 nt, Artificial Sequence
  Description of Artificial Sequence: Synthetic oligonucleotide
  Sense strand starting at position 616 of SEQ ID NO: 1885632
uuuaguuuggacugaguuu

SEQ ID NO: 2356523 - RNA, 19 nt, Artificial Sequence
  Description of Artificial Sequence: Synthetic oligonucleotide
  Antisense strand to SEQ ID NO: 2356522
aaacucaguccaaacuaaa

SEQ ID NO: 2356524 - RNA, 19 nt, Artificial Sequence
  Description of Artificial Sequence: Synthetic oligonucleotide
  Sense strand starting at position 628 of SEQ ID NO: 1885632
ugaguuugauuccugugaa

SEQ ID NO: 2356525 - RNA, 19 nt, Artificial Sequence
  Description of Artificial Sequence: Synthetic oligonucleotide
  Antisense strand to SEQ ID NO: 2356524
uucacaggaaucaaacuca

SEQ ID NO: 2356526 - RNA, 19 nt, Artificial Sequence
  Description of Artificial Sequence: Synthetic oligonucleotide
  Sense strand starting at position 649 of SEQ ID NO: 1885632
ccuugaggugauugcuaua

SEQ ID NO: 2356527 - RNA, 19 nt, Artificial Sequence
  Description of Artificial Sequence: Synthetic oligonucleotide
  Antisense strand to SEQ ID NO: 2356526
uauagcaaucaccucaagg

SEQ ID NO: 2356528 - RNA, 19 nt, Artificial Sequence
  Description of Artificial Sequence: Synthetic oligonucleotide
  Sense strand starting at position 1025 of SEQ ID NO: 1885632
ugagguuaccugcauccaa

SEQ ID NO: 2356529 - RNA, 19 nt, Artificial Sequence
  Description of Artificial Sequence: Synthetic oligonucleotide
  Antisense strand to SEQ ID NO: 2356528
uuggaugcagguaaccuca

SEQ ID NO: 2356530 - RNA, 19 nt, Artificial Sequence
  Description of Artificial Sequence: Synthetic oligonucleotide
  Sense strand starting at position 1084 of SEQ ID NO: 1885632
cucucaaaguccgcauaaa

SEQ ID NO: 2356531 - RNA, 19 nt, Artificial Sequence
  Description of Artificial Sequence: Synthetic oligonucleotide
  Antisense strand to SEQ ID NO: 2356530
uuuaugcggacuuugagag

SEQ ID NO: 2356532 - RNA, 19 nt, Artificial Sequence
  Description of Artificial Sequence: Synthetic oligonucleotide
  Sense strand starting at position 1407 of SEQ ID NO: 1885632
gccacauguccacagucau

SEQ ID NO: 2356533 - RNA, 19 nt, Artificial Sequence
  Description of Artificial Sequence: Synthetic oligonucleotide
  Antisense strand to SEQ ID NO: 2356532
augacuguggacauguggc

SEQ ID NO: 2356534 - RNA, 19 nt, Artificial Sequence
  Description of Artificial Sequence: Synthetic oligonucleotide
  Sense strand starting at position 1551 of SEQ ID NO: 1885632
ucuguauaucauggugaua

SEQ ID NO: 2356535 - RNA, 19 nt, Artificial Sequence
  Description of Artificial Sequence: Synthetic oligonucleotide
  Antisense strand to SEQ ID NO: 2356534
uaucaccaugauauacaga

SEQ ID NO: 2356536 - RNA, 19 nt, Artificial Sequence
  Description of Artificial Sequence: Synthetic oligonucleotide
  Sense strand starting at position 1634 of SEQ ID NO: 1885632
uggauaacacacuguguua

SEQ ID NO: 2356537 - RNA, 19 nt, Artificial Sequence
  Description of Artificial Sequence: Synthetic oligonucleotide
  Antisense strand to SEQ ID NO: 2356536
uaacacaguguguuaucca

SEQ ID NO: 2356538 - RNA, 19 nt, Artificial Sequence
  Description of Artificial Sequence: Synthetic oligonucleotide
  Sense strand starting at position 1645 of SEQ ID NO: 1885632
cuguguuaagguuauacga

SEQ ID NO: 2356539 - RNA, 19 nt, Artificial Sequence
  Description of Artificial Sequence: Synthetic oligonucleotide
  Antisense strand to SEQ ID NO: 2356538
ucguauaaccuuaacacag

SEQ ID NO: 2356540 - RNA, 19 nt, Artificial Sequence
  Description of Artificial Sequence: Synthetic oligonucleotide
  Sense strand starting at position 1698 of SEQ ID NO: 1885632
ggcuguuaggugggagaga

SEQ ID NO: 2356541 - RNA, 19 nt, Artificial Sequence
  Description of Artificial Sequence: Synthetic oligonucleotide
  Antisense strand to SEQ ID NO: 2356540
ucucucccaccuaacagcc

SEQ ID NO: 2356542 - RNA, 19 nt, Artificial Sequence
  Description of Artificial Sequence: Synthetic oligonucleotide
  Sense strand starting at position 2030 of SEQ ID NO: 1885632
gcucccuucccaggagaaa

SEQ ID NO: 2356543 - RNA, 19 nt, Artificial Sequence
  Description of Artificial Sequence: Synthetic oligonucleotide
  Antisense strand to SEQ ID NO: 2356542
uuucuccugggaagggagc

SEQ ID NO: 2356544 - RNA, 19 nt, Artificial Sequence
  Description of Artificial Sequence: Synthetic oligonucleotide
  Sense strand starting at position 2176 of SEQ ID NO: 1885632
cugugugcugagggaagau

SEQ ID NO: 2356545 - RNA, 19 nt, Artificial Sequence
  Description of Artificial Sequence: Synthetic oligonucleotide
  Antisense strand to SEQ ID NO: 2356544
aucuucccucagcacacag

SEQ ID NO: 2356546 - RNA, 19 nt, Artificial Sequence
  Description of Artificial Sequence: Synthetic oligonucleotide
  Sense strand starting at position 2202 of SEQ ID NO: 1885632
aggagucaccaaugcagau

SEQ ID NO: 2356547 - RNA, 19 nt, Artificial Sequence
  Description of Artificial Sequence: Synthetic oligonucleotide
  Antisense strand to SEQ ID NO: 2356546
aucugcauuggugacuccu

SEQ ID NO: 2356548 - RNA, 19 nt, Artificial Sequence
  Description of Artificial Sequence: Synthetic oligonucleotide
  Sense strand starting at position 2206 of SEQ ID NO: 1885632
gucaccaaugcagauuaau

SEQ ID NO: 2356549 - RNA, 19 nt, Artificial Sequence
  Description of Artificial Sequence: Synthetic oligonucleotide
  Antisense strand to SEQ ID NO: 2356548
auuaaucugcauuggugac

SEQ ID NO: 2356550 - RNA, 19 nt, Artificial Sequence
  Description of Artificial Sequence: Synthetic oligonucleotide
  Sense strand starting at position 2362 of SEQ ID NO: 1885632
gugcuaaauuaagauuuac

SEQ ID NO: 2356551 - RNA, 19 nt, Artificial Sequence
  Description of Artificial Sequence: Synthetic oligonucleotide
  Antisense strand to SEQ ID NO: 2356550
guaaaucuuaauuuagcac

SEQ ID NO: 2356552 - RNA, 19 nt, Artificial Sequence
  Description of Artificial Sequence: Synthetic oligonucleotide
  Sense strand starting at position 2895 of SEQ ID NO: 1885632
cccaguccggguuauuaaa

SEQ ID NO: 2356553 - RNA, 19 nt, Artificial Sequence
  Description of Artificial Sequence: Synthetic oligonucleotide
  Antisense strand to SEQ ID NO: 2356552
uuuaauaacccggacuggg

SEQ ID NO: 2356554 - RNA, 19 nt, Artificial Sequence
  Description of Artificial Sequence: Synthetic oligonucleotide
  Sense strand starting at position 2959 of SEQ ID NO: 1885632
ucggauuccucuucugaaa

SEQ ID NO: 2356555 - RNA, 19 nt, Artificial Sequence
  Description of Artificial Sequence: Synthetic oligonucleotide
  Antisense strand to SEQ ID NO: 2356554
uuucagaagaggaauccga

SEQ ID NO: 2356556 - RNA, 19 nt, Artificial Sequence
  Description of Artificial Sequence: Synthetic oligonucleotide
  Sense strand starting at position 3007 of SEQ ID NO: 1885632
agcuucuuagaacgauuga

SEQ ID NO: 2356557 - RNA, 19 nt, Artificial Sequence
  Description of Artificial Sequence: Synthetic oligonucleotide
  Antisense strand to SEQ ID NO: 2356556
ucaaucguucuaagaagcu

SEQ ID NO: 2356558 - RNA, 19 nt, Artificial Sequence
  Description of Artificial Sequence: Synthetic oligonucleotide
  Sense strand starting at position 3431 of SEQ ID NO: 1885632
gguuaaaguguucauucgu

SEQ ID NO: 2356559 - RNA, 19 nt, Artificial Sequence
  Description of Artificial Sequence: Synthetic oligonucleotide
  Antisense strand to SEQ ID NO: 2356558
acgaaugaacacuuuaacc

SEQ ID NO: 2356560 - RNA, 19 nt, Artificial Sequence
  Description of Artificial Sequence: Synthetic oligonucleotide
  Sense strand starting at position 3568 of SEQ ID NO: 1885632
gcuagaaugaguugggaau

SEQ ID NO: 2356561 - RNA, 19 nt, Artificial Sequence
  Description of Artificial Sequence: Synthetic oligonucleotide
  Antisense strand to SEQ ID NO: 2356560
auucccaacucauucuagc

SEQ ID NO: 2356562 - RNA, 19 nt, Artificial Sequence
  Description of Artificial Sequence: Synthetic oligonucleotide
  Sense strand starting at position 3632 of SEQ ID NO: 1885632
ccacucuuguggucuggau

SEQ ID NO: 2356563 - RNA, 19 nt, Artificial Sequence
  Description of Artificial Sequence: Synthetic oligonucleotide
  Antisense strand to SEQ ID NO: 2356562
auccagaccacaagagugg

SEQ ID NO: 2356564 - RNA, 19 nt, Artificial Sequence
  Description of Artificial Sequence: Synthetic oligonucleotide
  Sense strand starting at position 3698 of SEQ ID NO: 1885632
uggcaucucuggcucugaa

SEQ ID NO: 2356565 - RNA, 19 nt, Artificial Sequence
  Description of Artificial Sequence: Synthetic oligonucleotide
  Antisense strand to SEQ ID NO: 2356564
uucagagccagagaugcca

SEQ ID NO: 2356566 - RNA, 19 nt, Artificial Sequence
  Description of Artificial Sequence: Synthetic oligonucleotide
  Sense strand starting at position 3766 of SEQ ID NO: 1885632
ugcuccugcccaggagaaa

SEQ ID NO: 2356567 - RNA, 19 nt, Artificial Sequence
  Description of Artificial Sequence: Synthetic oligonucleotide
  Antisense strand to SEQ ID NO: 2356566
uuucuccugggcaggagca

SEQ ID NO: 2356568 - RNA, 19 nt, Artificial Sequence
  Description of Artificial Sequence: Synthetic oligonucleotide
  Sense strand starting at position 3775 of SEQ ID NO: 1885632
ccaggagaaaccuggcuuu

SEQ ID NO: 2356569 - RNA, 19 nt, Artificial Sequence
  Description of Artificial Sequence: Synthetic oligonucleotide
  Antisense strand to SEQ ID NO: 2356568
aaagccagguuucuccugg

SEQ ID NO: 2356570 - RNA, 19 nt, Artificial Sequence
  Description of Artificial Sequence: Synthetic oligonucleotide
  Sense strand starting at position 3778 of SEQ ID NO: 1885632
ggagaaaccuggcuuuaaa

SEQ ID NO: 2356571 - RNA, 19 nt, Artificial Sequence
  Description of Artificial Sequence: Synthetic oligonucleotide
  Antisense strand to SEQ ID NO: 2356570
uuuaaagccagguuucucc

SEQ ID NO: 2356572 - RNA, 19 nt, Artificial Sequence
  Description of Artificial Sequence: Synthetic oligonucleotide
  Sense strand starting at position 3848 of SEQ ID NO: 1885632
ccaguuuaacucuguaaga

SEQ ID NO: 2356573 - RNA, 19 nt, Artificial Sequence
  Description of Artificial Sequence: Synthetic oligonucleotide
  Antisense strand to SEQ ID NO: 2356572
ucuuacagaguuaaacugg

SEQ ID NO: 2356574 - RNA, 19 nt, Artificial Sequence
  Description of Artificial Sequence: Synthetic oligonucleotide
  Sense strand starting at position 3953 of SEQ ID NO: 1885632
agagacucauuugaaugua

SEQ ID NO: 2356575 - RNA, 19 nt, Artificial Sequence
  Description of Artificial Sequence: Synthetic oligonucleotide
  Antisense strand to SEQ ID NO: 2356574
uacauucaaaugagucucu

SEQ ID NO: 2356576 - RNA, 19 nt, Artificial Sequence
  Description of Artificial Sequence: Synthetic oligonucleotide
  Sense strand starting at position 1461 of SEQ ID NO: 1885633
gugcuuccuccuggugaua

SEQ ID NO: 2356577 - RNA, 19 nt, Artificial Sequence
  Description of Artificial Sequence: Synthetic oligonucleotide
  Antisense strand to SEQ ID NO: 2356576
uaucaccaggaggaagcac

SEQ ID NO: 2356578 - RNA, 19 nt, Artificial Sequence
  Description of Artificial Sequence: Synthetic oligonucleotide
  Sense strand starting at position 1463 of SEQ ID NO: 1885633
gcuuccuccuggugauaga

SEQ ID NO: 2356579 - RNA, 19 nt, Artificial Sequence
  Description of Artificial Sequence: Synthetic oligonucleotide
  Antisense strand to SEQ ID NO: 2356578
ucuaucaccaggaggaagc

SEQ ID NO: 2356580 - RNA, 19 nt, Artificial Sequence
  Description of Artificial Sequence: Synthetic oligonucleotide
  Sense strand starting at position 1527 of SEQ ID NO: 1885633
acuggugucuauggucaga

SEQ ID NO: 2356581 - RNA, 19 nt, Artificial Sequence
  Description of Artificial Sequence: Synthetic oligonucleotide
  Antisense strand to SEQ ID NO: 2356580
ucugaccauagacaccagu

SEQ ID NO: 2356582 - RNA, 19 nt, Artificial Sequence
  Description of Artificial Sequence: Synthetic oligonucleotide
  Sense strand starting at position 1529 of SEQ ID NO: 1885633
uggugucuauggucagauu

SEQ ID NO: 2356583 - RNA, 19 nt, Artificial Sequence
  Description of Artificial Sequence: Synthetic oligonucleotide
  Antisense strand to SEQ ID NO: 2356582
aaucugaccauagacacca

SEQ ID NO: 2356584 - RNA, 19 nt, Artificial Sequence
  Description of Artificial Sequence: Synthetic oligonucleotide
  Sense strand starting at position 1669 of SEQ ID NO: 1885633
gguccuggcuuggugauuu

SEQ ID NO: 2356585 - RNA, 19 nt, Artificial Sequence
  Description of Artificial Sequence: Synthetic oligonucleotide
  Antisense strand to SEQ ID NO: 2356584
aaaucaccaagccaggacc

SEQ ID NO: 2356586 - RNA, 19 nt, Artificial Sequence
  Description of Artificial Sequence: Synthetic oligonucleotide
  Sense strand starting at position 1789 of SEQ ID NO: 1885633
gggagacagugcucagaac

SEQ ID NO: 2356587 - RNA, 19 nt, Artificial Sequence
  Description of Artificial Sequence: Synthetic oligonucleotide
  Antisense strand to SEQ ID NO: 2356586
guucugagcacugucuccc

SEQ ID NO: 2356588 - RNA, 19 nt, Artificial Sequence
  Description of Artificial Sequence: Synthetic oligonucleotide
  Sense strand starting at position 2174 of SEQ ID NO: 1885633
caacauaggucuuugguau

SEQ ID NO: 2356589 - RNA, 19 nt, Artificial Sequence
  Description of Artificial Sequence: Synthetic oligonucleotide
  Antisense strand to SEQ ID NO: 2356588
auaccaaagaccuauguug

SEQ ID NO: 2356590 - RNA, 19 nt, Artificial Sequence
  Description of Artificial Sequence: Synthetic oligonucleotide
  Sense strand starting at position 2175 of SEQ ID NO: 1885633
aacauaggucuuugguauu

SEQ ID NO: 2356591 - RNA, 19 nt, Artificial Sequence
  Description of Artificial Sequence: Synthetic oligonucleotide
  Antisense strand to SEQ ID NO: 2356590
aauaccaaagaccuauguu

SEQ ID NO: 2356592 - RNA, 19 nt, Artificial Sequence
  Description of Artificial Sequence: Synthetic oligonucleotide
  Sense strand starting at position 2198 of SEQ ID NO: 1885633
ugcccaucaugcuuugagu

SEQ ID NO: 2356593 - RNA, 19 nt, Artificial Sequence
  Description of Artificial Sequence: Synthetic oligonucleotide
  Antisense strand to SEQ ID NO: 2356592
acucaaagcaugaugggca

SEQ ID NO: 2356594 - RNA, 19 nt, Artificial Sequence
  Description of Artificial Sequence: Synthetic oligonucleotide
  Sense strand starting at position 2201 of SEQ ID NO: 1885633
ccaucaugcuuugagucuu

SEQ ID NO: 2356595 - RNA, 19 nt, Artificial Sequence
  Description of Artificial Sequence: Synthetic oligonucleotide
  Antisense strand to SEQ ID NO: 2356594
aagacucaaagcaugaugg

SEQ ID NO: 2356596 - RNA, 19 nt, Artificial Sequence
  Description of Artificial Sequence: Synthetic oligonucleotide
  Sense strand starting at position 2207 of SEQ ID NO: 1885633
ugcuuugagucuucugaca

SEQ ID NO: 2356597 - RNA, 19 nt, Artificial Sequence
  Description of Artificial Sequence: Synthetic oligonucleotide
  Antisense strand to SEQ ID NO: 2356596
ugucagaagacucaaagca

SEQ ID NO: 2356598 - RNA, 19 nt, Artificial Sequence
  Description of Artificial Sequence: Synthetic oligonucleotide
  Sense strand starting at position 2212 of SEQ ID NO: 1885633
ugagucuucugacaaagca

SEQ ID NO: 2356599 - RNA, 19 nt, Artificial Sequence
  Description of Artificial Sequence: Synthetic oligonucleotide
  Antisense strand to SEQ ID NO: 2356598
ugcuuugucagaagacuca

SEQ ID NO: 2356600 - RNA, 19 nt, Artificial Sequence
  Description of Artificial Sequence: Synthetic oligonucleotide
  Sense strand starting at position 2328 of SEQ ID NO: 1885633
ccaugaauauucuggcaag

SEQ ID NO: 2356601 - RNA, 19 nt, Artificial Sequence
  Description of Artificial Sequence: Synthetic oligonucleotide
  Antisense strand to SEQ ID NO: 2356600
cuugccagaauauucaugg

SEQ ID NO: 2356602 - RNA, 19 nt, Artificial Sequence
  Description of Artificial Sequence: Synthetic oligonucleotide
  Sense strand starting at position 2363 of SEQ ID NO: 1885633
gugagccuaccucaucaua

SEQ ID NO: 2356603 - RNA, 19 nt, Artificial Sequence
  Description of Artificial Sequence: Synthetic oligonucleotide
  Antisense strand to SEQ ID NO: 2356602
uaugaugagguaggcucac

SEQ ID NO: 2356604 - RNA, 19 nt, Artificial Sequence
  Description of Artificial Sequence: Synthetic oligonucleotide
  Sense strand starting at position 2398 of SEQ ID NO: 1885633
ggcccauucggugagcgau

SEQ ID NO: 2356605 - RNA, 19 nt, Artificial Sequence
  Description of Artificial Sequence: Synthetic oligonucleotide
  Antisense strand to SEQ ID NO: 2356604
aucgcucaccgaaugggcc

SEQ ID NO: 2356606 - RNA, 19 nt, Artificial Sequence
  Description of Artificial Sequence: Synthetic oligonucleotide
  Sense strand starting at position 2411 of SEQ ID NO: 1885633
agcgaucugucuuccagga

SEQ ID NO: 2356607 - RNA, 19 nt, Artificial Sequence
  Description of Artificial Sequence: Synthetic oligonucleotide
  Antisense strand to SEQ ID NO: 2356606
uccuggaagacagaucgcu

SEQ ID NO: 2356608 - RNA, 19 nt, Artificial Sequence
  Description of Artificial Sequence: Synthetic oligonucleotide
  Sense strand starting at position 2413 of SEQ ID NO: 1885633
cgaucugucuuccaggaca

SEQ ID NO: 2356609 - RNA, 19 nt, Artificial Sequence
  Description of Artificial Sequence: Synthetic oligonucleotide
  Antisense strand to SEQ ID NO: 2356608
uguccuggaagacagaucg

SEQ ID NO: 2356610 - RNA, 19 nt, Artificial Sequence
  Description of Artificial Sequence: Synthetic oligonucleotide
  Sense strand starting at position 2415 of SEQ ID NO: 1885633
aucugucuuccaggacaca

SEQ ID NO: 2356611 - RNA, 19 nt, Artificial Sequence
  Description of Artificial Sequence: Synthetic oligonucleotide
  Antisense strand to SEQ ID NO: 2356610
uguguccuggaagacagau

SEQ ID NO: 2356612 - RNA, 19 nt, Artificial Sequence
  Description of Artificial Sequence: Synthetic oligonucleotide
  Sense strand starting at position 2646 of SEQ ID NO: 1885633
ccucuuaucucccgcugaa

SEQ ID NO: 2356613 - RNA, 19 nt, Artificial Sequence
  Description of Artificial Sequence: Synthetic oligonucleotide
  Antisense strand to SEQ ID NO: 2356612
uucagcgggagauaagagg

SEQ ID NO: 2356614 - RNA, 19 nt, Artificial Sequence
  Description of Artificial Sequence: Synthetic oligonucleotide
  Sense strand starting at position 2649 of SEQ ID NO: 1885633
cuuaucucccgcugaaaca

SEQ ID NO: 2356615 - RNA, 19 nt, Artificial Sequence
  Description of Artificial Sequence: Synthetic oligonucleotide
  Antisense strand to SEQ ID NO: 2356614
uguuucagcgggagauaag

SEQ ID NO: 2356616 - RNA, 19 nt, Artificial Sequence
  Description of Artificial Sequence: Synthetic oligonucleotide
  Sense strand starting at position 2650 of SEQ ID NO: 1885633
uuaucucccgcugaaacaa

SEQ ID NO: 2356617 - RNA, 19 nt, Artificial Sequence
  Description of Artificial Sequence: Synthetic oligonucleotide
  Antisense strand to SEQ ID NO: 2356616
uuguuucagcgggagauaa

SEQ ID NO: 2356618 - RNA, 19 nt, Artificial Sequence
  Description of Artificial Sequence: Synthetic oligonucleotide
  Sense strand starting at position 2763 of SEQ ID NO: 1885633
gagcacaccucgugaacuu

SEQ ID NO: 2356619 - RNA, 19 nt, Artificial Sequence
  Description of Artificial Sequence: Synthetic oligonucleotide
  Antisense strand to SEQ ID NO: 2356618
aaguucacgaggugugcuc

SEQ ID NO: 2356620 - RNA, 19 nt, Artificial Sequence
  Description of Artificial Sequence: Synthetic oligonucleotide
  Sense strand starting at position 2827 of SEQ ID NO: 1885633
cacagagccucugguugaa

SEQ ID NO: 2356621 - RNA, 19 nt, Artificial Sequence
  Description of Artificial Sequence: Synthetic oligonucleotide
  Antisense strand to SEQ ID NO: 2356620
uucaaccagaggcucugug

SEQ ID NO: 2356622 - RNA, 19 nt, Artificial Sequence
  Description of Artificial Sequence: Synthetic oligonucleotide
  Sense strand starting at position 2888 of SEQ ID NO: 1885633
guucuuauuuggcuuaucu

SEQ ID NO: 2356623 - RNA, 19 nt, Artificial Sequence
  Description of Artificial Sequence: Synthetic oligonucleotide
  Antisense strand to SEQ ID NO: 2356622
agauaagccaaauaagaac

SEQ ID NO: 2356624 - RNA, 19 nt, Artificial Sequence
  Description of Artificial Sequence: Synthetic oligonucleotide
  Sense strand starting at position 2895 of SEQ ID NO: 1885633
uuuggcuuaucugaugaga

SEQ ID NO: 2356625 - RNA, 19 nt, Artificial Sequence
  Description of Artificial Sequence: Synthetic oligonucleotide
  Antisense strand to SEQ ID NO: 2356624
ucucaucagauaagccaaa

SEQ ID NO: 2356626 - RNA, 19 nt, Artificial Sequence
  Description of Artificial Sequence: Synthetic oligonucleotide
  Sense strand starting at position 2897 of SEQ ID NO: 1885633
uggcuuaucugaugagaaa

SEQ ID NO: 2356627 - RNA, 19 nt, Artificial Sequence
  Description of Artificial Sequence: Synthetic oligonucleotide
  Antisense strand to SEQ ID NO: 2356626
uuucucaucagauaagcca

SEQ ID NO: 2356628 - RNA, 19 nt, Artificial Sequence
  Description of Artificial Sequence: Synthetic oligonucleotide
  Sense strand starting at position 3003 of SEQ ID NO: 1885633
ggucacuguguuuggguua

SEQ ID NO: 2356629 - RNA, 19 nt, Artificial Sequence
  Description of Artificial Sequence: Synthetic oligonucleotide
  Antisense strand to SEQ ID NO: 2356628
uaacccaaacacagugacc

SEQ ID NO: 2356630 - RNA, 19 nt, Artificial Sequence
  Description of Artificial Sequence: Synthetic oligonucleotide
  Sense strand starting at position 3006 of SEQ ID NO: 1885633
cacuguguuuggguuagaa

SEQ ID NO: 2356631 - RNA, 19 nt, Artificial Sequence
  Description of Artificial Sequence: Synthetic oligonucleotide
  Antisense strand to SEQ ID NO: 2356630
uucuaacccaaacacagug

SEQ ID NO: 2356632 - RNA, 19 nt, Artificial Sequence
  Description of Artificial Sequence: Synthetic oligonucleotide
  Sense strand starting at position 3008 of SEQ ID NO: 1885633
cuguguuuggguuagaaau

SEQ ID NO: 2356633 - RNA, 19 nt, Artificial Sequence
  Description of Artificial Sequence: Synthetic oligonucleotide
  Antisense strand to SEQ ID NO: 2356632
auuucuaacccaaacacag

SEQ ID NO: 2356634 - RNA, 19 nt, Artificial Sequence
  Description of Artificial Sequence: Synthetic oligonucleotide
  Sense strand starting at position 3095 of SEQ ID NO: 1885633
gcgugaugcacccagcacu

SEQ ID NO: 2356635 - RNA, 19 nt, Artificial Sequence
  Description of Artificial Sequence: Synthetic oligonucleotide
  Antisense strand to SEQ ID NO: 2356634
agugcugggugcaucacgc

SEQ ID NO: 2356636 - RNA, 19 nt, Artificial Sequence
  Description of Artificial Sequence: Synthetic oligonucleotide
  Sense strand starting at position 3195 of SEQ ID NO: 1885633
gcuauuaaauaaggcuaau

SEQ ID NO: 2356637 - RNA, 19 nt, Artificial Sequence
  Description of Artificial Sequence: Synthetic oligonucleotide
  Antisense strand to SEQ ID NO: 2356636
auuagccuuauuuaauagc

SEQ ID NO: 2356638 - RNA, 19 nt, Artificial Sequence
  Description of Artificial Sequence: Synthetic oligonucleotide
  Sense strand starting at position 3250 of SEQ ID NO: 1885633
caaagauguguagaugcau

SEQ ID NO: 2356639 - RNA, 19 nt, Artificial Sequence
  Description of Artificial Sequence: Synthetic oligonucleotide
  Antisense strand to SEQ ID NO: 2356638
augcaucuacacaucuuug

SEQ ID NO: 2356640 - RNA, 19 nt, Artificial Sequence
  Description of Artificial Sequence: Synthetic oligonucleotide
  Sense strand starting at position 3722 of SEQ ID NO: 1885633
ggacuccauuagucaauca

SEQ ID NO: 2356641 - RNA, 19 nt, Artificial Sequence
  Description of Artificial Sequence: Synthetic oligonucleotide
  Antisense strand to SEQ ID NO: 2356640
ugauugacuaauggagucc

SEQ ID NO: 2356642 - RNA, 19 nt, Artificial Sequence
  Description of Artificial Sequence: Synthetic oligonucleotide
  Sense strand starting at position 3822 of SEQ ID NO: 1885633
agaaauuucugccaaugag

SEQ ID NO: 2356643 - RNA, 19 nt, Artificial Sequence
  Description of Artificial Sequence: Synthetic oligonucleotide
  Antisense strand to SEQ ID NO: 2356642
cucauuggcagaaauuucu

SEQ ID NO: 2356644 - RNA, 19 nt, Artificial Sequence
  Description of Artificial Sequence: Synthetic oligonucleotide
  Sense strand starting at position 3837 of SEQ ID NO: 1885633
ugagaaaucucacagucua

SEQ ID NO: 2356645 - RNA, 19 nt, Artificial Sequence
  Description of Artificial Sequence: Synthetic oligonucleotide
  Antisense strand to SEQ ID NO: 2356644
uagacugugagauuucuca

SEQ ID NO: 2356646 - RNA, 19 nt, Artificial Sequence
  Description of Artificial Sequence: Synthetic oligonucleotide
  Sense strand starting at position 3899 of SEQ ID NO: 1885633
acuguaagcuaggaagaaa

SEQ ID NO: 2356647 - RNA, 19 nt, Artificial Sequence
  Description of Artificial Sequence: Synthetic oligonucleotide
  Antisense strand to SEQ ID NO: 2356646
uuucuuccuagcuuacagu

SEQ ID NO: 2356648 - RNA, 19 nt, Artificial Sequence
  Description of Artificial Sequence: Synthetic oligonucleotide
  Sense strand starting at position 3935 of SEQ ID NO: 1885633
gguagaaugugauagggaa

SEQ ID NO: 2356649 - RNA, 19 nt, Artificial Sequence
  Description of Artificial Sequence: Synthetic oligonucleotide
  Antisense strand to SEQ ID NO: 2356648
uucccuaucacauucuacc

SEQ ID NO: 2356650 - RNA, 19 nt, Artificial Sequence
  Description of Artificial Sequence: Synthetic oligonucleotide
  Sense strand starting at position 3972 of SEQ ID NO: 1885633
uuuauaggguuaucaggga

SEQ ID NO: 2356651 - RNA, 19 nt, Artificial Sequence
  Description of Artificial Sequence: Synthetic oligonucleotide
  Antisense strand to SEQ ID NO: 2356650
ucccugauaacccuauaaa

SEQ ID NO: 2356652 - RNA, 19 nt, Artificial Sequence
  Description of Artificial Sequence: Synthetic oligonucleotide
  Sense strand starting at position 3976 of SEQ ID NO: 1885633
uaggguuaucagggaugac

SEQ ID NO: 2356653 - RNA, 19 nt, Artificial Sequence
  Description of Artificial Sequence: Synthetic oligonucleotide
  Antisense strand to SEQ ID NO: 2356652
gucaucccugauaacccua

SEQ ID NO: 2356654 - RNA, 19 nt, Artificial Sequence
  Description of Artificial Sequence: Synthetic oligonucleotide
  Sense strand starting at position 3979 of SEQ ID NO: 1885633
gguuaucagggaugaccuu

SEQ ID NO: 2356655 - RNA, 19 nt, Artificial Sequence
  Description of Artificial Sequence: Synthetic oligonucleotide
  Antisense strand to SEQ ID NO: 2356654
aaggucaucccugauaacc

SEQ ID NO: 2356656 - RNA, 19 nt, Artificial Sequence
  Description of Artificial Sequence: Synthetic oligonucleotide
  Sense strand starting at position 243 of SEQ ID NO: 1885634
ugaggagucccuggaacau

SEQ ID NO: 2356657 - RNA, 19 nt, Artificial Sequence
  Description of Artificial Sequence: Synthetic oligonucleotide
  Antisense strand to SEQ ID NO: 2356656
auguuccagggacuccuca

SEQ ID NO: 2356658 - RNA, 19 nt, Artificial Sequence
  Description of Artificial Sequence: Synthetic oligonucleotide
  Sense strand starting at position 336 of SEQ ID NO: 1885634
cuggcaguguucccauaug

SEQ ID NO: 2356659 - RNA, 19 nt, Artificial Sequence
  Description of Artificial Sequence: Synthetic oligonucleotide
  Antisense strand to SEQ ID NO: 2356658
cauaugggaacacugccag

SEQ ID NO: 2356660 - RNA, 19 nt, Artificial Sequence
  Description of Artificial Sequence: Synthetic oligonucleotide
  Sense strand starting at position 457 of SEQ ID NO: 1885634
agaggagaucuccgacuug

SEQ ID NO: 2356661 - RNA, 19 nt, Artificial Sequence
  Description of Artificial Sequence: Synthetic oligonucleotide
  Antisense strand to SEQ ID NO: 2356660
caagucggagaucuccucu

SEQ ID NO: 2356662 - RNA, 19 nt, Artificial Sequence
  Description of Artificial Sequence: Synthetic oligonucleotide
  Sense strand starting at position 485 of SEQ ID NO: 1885634
uuggguuccagcggaaaga

SEQ ID NO: 2356663 - RNA, 19 nt, Artificial Sequence
  Description of Artificial Sequence: Synthetic oligonucleotide
  Antisense strand to SEQ ID NO: 2356662
ucuuuccgcuggaacccaa

SEQ ID NO: 2356664 - RNA, 19 nt, Artificial Sequence
  Description of Artificial Sequence: Synthetic oligonucleotide
  Sense strand starting at position 504 of SEQ ID NO: 1885634
cuauccaugagcuggagaa

SEQ ID NO: 2356665 - RNA, 19 nt, Artificial Sequence
  Description of Artificial Sequence: Synthetic oligonucleotide
  Antisense strand to SEQ ID NO: 2356664
uucuccagcucauggauag

SEQ ID NO: 2356666 - RNA, 19 nt, Artificial Sequence
  Description of Artificial Sequence: Synthetic oligonucleotide
  Sense strand starting at position 714 of SEQ ID NO: 1885634
guaggcauucagugaagau

SEQ ID NO: 2356667 - RNA, 19 nt, Artificial Sequence
  Description of Artificial Sequence: Synthetic oligonucleotide
  Antisense strand to SEQ ID NO: 2356666
aucuucacugaaugccuac

SEQ ID NO: 2356668 - RNA, 19 nt, Artificial Sequence
  Description of Artificial Sequence: Synthetic oligonucleotide
  Sense strand starting at position 879 of SEQ ID NO: 1885634
gccucuguuuccuuggcaa

SEQ ID NO: 2356669 - RNA, 19 nt, Artificial Sequence
  Description of Artificial Sequence: Synthetic oligonucleotide
  Antisense strand to SEQ ID NO: 2356668
uugccaaggaaacagaggc

SEQ ID NO: 2356670 - RNA, 19 nt, Artificial Sequence
  Description of Artificial Sequence: Synthetic oligonucleotide
  Sense strand starting at position 1044 of SEQ ID NO: 1885634
ugaagucacuucguaucca

SEQ ID NO: 2356671 - RNA, 19 nt, Artificial Sequence
  Description of Artificial Sequence: Synthetic oligonucleotide
  Antisense strand to SEQ ID NO: 2356670
uggauacgaagugacuuca

SEQ ID NO: 2356672 - RNA, 19 nt, Artificial Sequence
  Description of Artificial Sequence: Synthetic oligonucleotide
  Sense strand starting at position 1045 of SEQ ID NO: 1885634
gaagucacuucguauccau

SEQ ID NO: 2356673 - RNA, 19 nt, Artificial Sequence
  Description of Artificial Sequence: Synthetic oligonucleotide
  Antisense strand to SEQ ID NO: 2356672
auggauacgaagugacuuc

SEQ ID NO: 2356674 - RNA, 19 nt, Artificial Sequence
  Description of Artificial Sequence: Synthetic oligonucleotide
  Sense strand starting at position 1048 of SEQ ID NO: 1885634
gucacuucguauccaugau

SEQ ID NO: 2356675 - RNA, 19 nt, Artificial Sequence
  Description of Artificial Sequence: Synthetic oligonucleotide
  Antisense strand to SEQ ID NO: 2356674
aucauggauacgaagugac

SEQ ID NO: 2356676 - RNA, 19 nt, Artificial Sequence
  Description of Artificial Sequence: Synthetic oligonucleotide
  Sense strand starting at position 1052 of SEQ ID NO: 1885634
cuucguauccaugauuagu

SEQ ID NO: 2356677 - RNA, 19 nt, Artificial Sequence
  Description of Artificial Sequence: Synthetic oligonucleotide
  Antisense strand to SEQ ID NO: 2356676
acuaaucauggauacgaag

SEQ ID NO: 2356678 - RNA, 19 nt, Artificial Sequence
  Description of Artificial Sequence: Synthetic oligonucleotide
  Sense strand starting at position 1054 of SEQ ID NO: 1885634
ucguauccaugauuaguga

SEQ ID NO: 2356679 - RNA, 19 nt, Artificial Sequence
  Description of Artificial Sequence: Synthetic oligonucleotide
  Antisense strand to SEQ ID NO: 2356678
ucacuaaucauggauacga

SEQ ID NO: 2356680 - RNA, 19 nt, Artificial Sequence
  Description of Artificial Sequence: Synthetic oligonucleotide
  Sense strand starting at position 1428 of SEQ ID NO: 1885634
gccuccagagcuuguugaa

SEQ ID NO: 2356681 - RNA, 19 nt, Artificial Sequence
  Description of Artificial Sequence: Synthetic oligonucleotide
  Antisense strand to SEQ ID NO: 2356680
uucaacaagcucuggaggc

SEQ ID NO: 2356682 - RNA, 19 nt, Artificial Sequence
  Description of Artificial Sequence: Synthetic oligonucleotide
  Sense strand starting at position 1431 of SEQ ID NO: 1885634
uccagagcuuguugaaggu

SEQ ID NO: 2356683 - RNA, 19 nt, Artificial Sequence
  Description of Artificial Sequence: Synthetic oligonucleotide
  Antisense strand to SEQ ID NO: 2356682
accuucaacaagcucugga

SEQ ID NO: 2356684 - RNA, 19 nt, Artificial Sequence
  Description of Artificial Sequence: Synthetic oligonucleotide
  Sense strand starting at position 1774 of SEQ ID NO: 1885634
gcaggagcugauugagacu

SEQ ID NO: 2356685 - RNA, 19 nt, Artificial Sequence
  Description of Artificial Sequence: Synthetic oligonucleotide
  Antisense strand to SEQ ID NO: 2356684
agucucaaucagcuccugc

SEQ ID NO: 2356686 - RNA, 19 nt, Artificial Sequence
  Description of Artificial Sequence: Synthetic oligonucleotide
  Sense strand starting at position 1777 of SEQ ID NO: 1885634
ggagcugauugagacuagu

SEQ ID NO: 2356687 - RNA, 19 nt, Artificial Sequence
  Description of Artificial Sequence: Synthetic oligonucleotide
  Antisense strand to SEQ ID NO: 2356686
acuagucucaaucagcucc

SEQ ID NO: 2356688 - RNA, 19 nt, Artificial Sequence
  Description of Artificial Sequence: Synthetic oligonucleotide
  Sense strand starting at position 1836 of SEQ ID NO: 1885634
cugcucauuccugaaggga

SEQ ID NO: 2356689 - RNA, 19 nt, Artificial Sequence
  Description of Artificial Sequence: Synthetic oligonucleotide
  Antisense strand to SEQ ID NO: 2356688
ucccuucaggaaugagcag

SEQ ID NO: 2356690 - RNA, 19 nt, Artificial Sequence
  Description of Artificial Sequence: Synthetic oligonucleotide
  Sense strand starting at position 1879 of SEQ ID NO: 1885634
aggcuugagagcuaugcau

SEQ ID NO: 2356691 - RNA, 19 nt, Artificial Sequence
  Description of Artificial Sequence: Synthetic oligonucleotide
  Antisense strand to SEQ ID NO: 2356690
augcauagcucucaagccu

SEQ ID NO: 2356692 - RNA, 19 nt, Artificial Sequence
  Description of Artificial Sequence: Synthetic oligonucleotide
  Sense strand starting at position 1881 of SEQ ID NO: 1885634
gcuugagagcuaugcauag

SEQ ID NO: 2356693 - RNA, 19 nt, Artificial Sequence
  Description of Artificial Sequence: Synthetic oligonucleotide
  Antisense strand to SEQ ID NO: 2356692
cuaugcauagcucucaagc

SEQ ID NO: 2356694 - RNA, 19 nt, Artificial Sequence
  Description of Artificial Sequence: Synthetic oligonucleotide
  Sense strand starting at position 1883 of SEQ ID NO: 1885634
uugagagcuaugcauagau

SEQ ID NO: 2356695 - RNA, 19 nt, Artificial Sequence
  Description of Artificial Sequence: Synthetic oligonucleotide
  Antisense strand to SEQ ID NO: 2356694
aucuaugcauagcucucaa

SEQ ID NO: 2356696 - RNA, 19 nt, Artificial Sequence
  Description of Artificial Sequence: Synthetic oligonucleotide
  Sense strand starting at position 2522 of SEQ ID NO: 1885634
gaaugaagaguuugcucuu

SEQ ID NO: 2356697 - RNA, 19 nt, Artificial Sequence
  Description of Artificial Sequence: Synthetic oligonucleotide
  Antisense strand to SEQ ID NO: 2356696
aagagcaaacucuucauuc

SEQ ID NO: 2356698 - RNA, 19 nt, Artificial Sequence
  Description of Artificial Sequence: Synthetic oligonucleotide
  Sense strand starting at position 2523 of SEQ ID NO: 1885634
aaugaagaguuugcucuua

SEQ ID NO: 2356699 - RNA, 19 nt, Artificial Sequence
  Description of Artificial Sequence: Synthetic oligonucleotide
  Antisense strand to SEQ ID NO: 2356698
uaagagcaaacucuucauu

SEQ ID NO: 2356700 - RNA, 19 nt, Artificial Sequence
  Description of Artificial Sequence: Synthetic oligonucleotide
  Sense strand starting at position 2525 of SEQ ID NO: 1885634
ugaagaguuugcucuuagc

SEQ ID NO: 2356701 - RNA, 19 nt, Artificial Sequence
  Description of Artificial Sequence: Synthetic oligonucleotide
  Antisense strand to SEQ ID NO: 2356700
gcuaagagcaaacucuuca

SEQ ID NO: 2356702 - RNA, 19 nt, Artificial Sequence
  Description of Artificial Sequence: Synthetic oligonucleotide
  Sense strand starting at position 2905 of SEQ ID NO: 1885634
ccaggaugucacuaucucu

SEQ ID NO: 2356703 - RNA, 19 nt, Artificial Sequence
  Description of Artificial Sequence: Synthetic oligonucleotide
  Antisense strand to SEQ ID NO: 2356702
agagauagugacauccugg

SEQ ID NO: 2356704 - RNA, 19 nt, Artificial Sequence
  Description of Artificial Sequence: Synthetic oligonucleotide
  Sense strand starting at position 2908 of SEQ ID NO: 1885634
ggaugucacuaucucucua

SEQ ID NO: 2356705 - RNA, 19 nt, Artificial Sequence
  Description of Artificial Sequence: Synthetic oligonucleotide
  Antisense strand to SEQ ID NO: 2356704
uagagagauagugacaucc

SEQ ID NO: 2356706 - RNA, 19 nt, Artificial Sequence
  Description of Artificial Sequence: Synthetic oligonucleotide
  Sense strand starting at position 2937 of SEQ ID NO: 1885634
guccuuaacuuagauuaag

SEQ ID NO: 2356707 - RNA, 19 nt, Artificial Sequence
  Description of Artificial Sequence: Synthetic oligonucleotide
  Antisense strand to SEQ ID NO: 2356706
cuuaaucuaaguuaaggac

SEQ ID NO: 2356708 - RNA, 19 nt, Artificial Sequence
  Description of Artificial Sequence: Synthetic oligonucleotide
  Sense strand starting at position 2945 of SEQ ID NO: 1885634
cuuagauuaagucaguguu

SEQ ID NO: 2356709 - RNA, 19 nt, Artificial Sequence
  Description of Artificial Sequence: Synthetic oligonucleotide
  Antisense strand to SEQ ID NO: 2356708
aacacugacuuaaucuaag

SEQ ID NO: 2356710 - RNA, 19 nt, Artificial Sequence
  Description of Artificial Sequence: Synthetic oligonucleotide
  Sense strand starting at position 3151 of SEQ ID NO: 1885634
uuuggacucuuuccuggua

SEQ ID NO: 2356711 - RNA, 19 nt, Artificial Sequence
  Description of Artificial Sequence: Synthetic oligonucleotide
  Antisense strand to SEQ ID NO: 2356710
uaccaggaaagaguccaaa

SEQ ID NO: 2356712 - RNA, 19 nt, Artificial Sequence
  Description of Artificial Sequence: Synthetic oligonucleotide
  Sense strand starting at position 3153 of SEQ ID NO: 1885634
uggacucuuuccugguaca

SEQ ID NO: 2356713 - RNA, 19 nt, Artificial Sequence
  Description of Artificial Sequence: Synthetic oligonucleotide
  Antisense strand to SEQ ID NO: 2356712
uguaccaggaaagagucca

SEQ ID NO: 2356714 - RNA, 19 nt, Artificial Sequence
  Description of Artificial Sequence: Synthetic oligonucleotide
  Sense strand starting at position 3156 of SEQ ID NO: 1885634
acucuuuccugguacagau

SEQ ID NO: 2356715 - RNA, 19 nt, Artificial Sequence
  Description of Artificial Sequence: Synthetic oligonucleotide
  Antisense strand to SEQ ID NO: 2356714
aucuguaccaggaaagagu

SEQ ID NO: 2356716 - RNA, 19 nt, Artificial Sequence
  Description of Artificial Sequence: Synthetic oligonucleotide
  Sense strand starting at position 3187 of SEQ ID NO: 1885634
uuacacauauuugguaaga

SEQ ID NO: 2356717 - RNA, 19 nt, Artificial Sequence
  Description of Artificial Sequence: Synthetic oligonucleotide
  Antisense strand to SEQ ID NO: 2356716
ucuuaccaaauauguguaa

SEQ ID NO: 2356718 - RNA, 19 nt, Artificial Sequence
  Description of Artificial Sequence: Synthetic oligonucleotide
  Sense strand starting at position 3189 of SEQ ID NO: 1885634
acacauauuugguaagaaa

SEQ ID NO: 2356719 - RNA, 19 nt, Artificial Sequence
  Description of Artificial Sequence: Synthetic oligonucleotide
  Antisense strand to SEQ ID NO: 2356718
uuucuuaccaaauaugugu

SEQ ID NO: 2356720 - RNA, 19 nt, Artificial Sequence
  Description of Artificial Sequence: Synthetic oligonucleotide
  Sense strand starting at position 3221 of SEQ ID NO: 1885634
ucaaguguuuagugaggau

SEQ ID NO: 2356721 - RNA, 19 nt, Artificial Sequence
  Description of Artificial Sequence: Synthetic oligonucleotide
  Antisense strand to SEQ ID NO: 2356720
auccucacuaaacacuuga

SEQ ID NO: 2356722 - RNA, 19 nt, Artificial Sequence
  Description of Artificial Sequence: Synthetic oligonucleotide
  Sense strand starting at position 3225 of SEQ ID NO: 1885634
guguuuagugaggaucaga

SEQ ID NO: 2356723 - RNA, 19 nt, Artificial Sequence
  Description of Artificial Sequence: Synthetic oligonucleotide
  Antisense strand to SEQ ID NO: 2356722
ucugauccucacuaaacac

SEQ ID NO: 2356724 - RNA, 19 nt, Artificial Sequence
  Description of Artificial Sequence: Synthetic oligonucleotide
  Sense strand starting at position 3230 of SEQ ID NO: 1885634
uagugaggaucagaaagua

SEQ ID NO: 2356725 - RNA, 19 nt, Artificial Sequence
  Description of Artificial Sequence: Synthetic oligonucleotide
  Antisense strand to SEQ ID NO: 2356724
uacuuucugauccucacua

SEQ ID NO: 2356726 - RNA, 19 nt, Artificial Sequence
  Description of Artificial Sequence: Synthetic oligonucleotide
  Sense strand starting at position 3248 of SEQ ID NO: 1885634
agaauugggucaggauauc

SEQ ID NO: 2356727 - RNA, 19 nt, Artificial Sequence
  Description of Artificial Sequence: Synthetic oligonucleotide
  Antisense strand to SEQ ID NO: 2356726
gauauccugacccaauucu

SEQ ID NO: 2356728 - RNA, 19 nt, Artificial Sequence
  Description of Artificial Sequence: Synthetic oligonucleotide
  Sense strand starting at position 3665 of SEQ ID NO: 1885634
ggccaagagccgugacauu

SEQ ID NO: 2356729 - RNA, 19 nt, Artificial Sequence
  Description of Artificial Sequence: Synthetic oligonucleotide
  Antisense strand to SEQ ID NO: 2356728
aaugucacggcucuuggcc

SEQ ID NO: 2356730 - RNA, 19 nt, Artificial Sequence
  Description of Artificial Sequence: Synthetic oligonucleotide
  Sense strand starting at position 3676 of SEQ ID NO: 1885634
gugacauuggcacgaaggu

SEQ ID NO: 2356731 - RNA, 19 nt, Artificial Sequence
  Description of Artificial Sequence: Synthetic oligonucleotide
  Antisense strand to SEQ ID NO: 2356730
accuucgugccaaugucac

SEQ ID NO: 2356732 - RNA, 19 nt, Artificial Sequence
  Description of Artificial Sequence: Synthetic oligonucleotide
  Sense strand starting at position 3823 of SEQ ID NO: 1885634
uaaugcaguucucugugau

SEQ ID NO: 2356733 - RNA, 19 nt, Artificial Sequence
  Description of Artificial Sequence: Synthetic oligonucleotide
  Antisense strand to SEQ ID NO: 2356732
aucacagagaacugcauua

SEQ ID NO: 2356734 - RNA, 19 nt, Artificial Sequence
  Description of Artificial Sequence: Synthetic oligonucleotide
  Sense strand starting at position 3826 of SEQ ID NO: 1885634
ugcaguucucugugauuuc

SEQ ID NO: 2356735 - RNA, 19 nt, Artificial Sequence
  Description of Artificial Sequence: Synthetic oligonucleotide
  Antisense strand to SEQ ID NO: 2356734
gaaaucacagagaacugca

SEQ ID NO: 2356736 - RNA, 19 nt, Artificial Sequence
  Description of Artificial Sequence: Synthetic oligonucleotide
  Sense strand starting at position 415 of SEQ ID NO: 1885635
guguaugacuugguaccaa

SEQ ID NO: 2356737 - RNA, 19 nt, Artificial Sequence
  Description of Artificial Sequence: Synthetic oligonucleotide
  Antisense strand to SEQ ID NO: 2356736
uugguaccaagucauacac

SEQ ID NO: 2356738 - RNA, 19 nt, Artificial Sequence
  Description of Artificial Sequence: Synthetic oligonucleotide
  Sense strand starting at position 649 of SEQ ID NO: 1885635
ggcuuuguccuggagacaa

SEQ ID NO: 2356739 - RNA, 19 nt, Artificial Sequence
  Description of Artificial Sequence: Synthetic oligonucleotide
  Antisense strand to SEQ ID NO: 2356738
uugucuccaggacaaagcc

SEQ ID NO: 2356740 - RNA, 19 nt, Artificial Sequence
  Description of Artificial Sequence: Synthetic oligonucleotide
  Sense strand starting at position 691 of SEQ ID NO: 1885635
acaguuugauacgcaaaug

SEQ ID NO: 2356741 - RNA, 19 nt, Artificial Sequence
  Description of Artificial Sequence: Synthetic oligonucleotide
  Antisense strand to SEQ ID NO: 2356740
cauuugcguaucaaacugu

SEQ ID NO: 2356742 - RNA, 19 nt, Artificial Sequence
  Description of Artificial Sequence: Synthetic oligonucleotide
  Sense strand starting at position 814 of SEQ ID NO: 1885635
ggucuuugccggaguggac

SEQ ID NO: 2356743 - RNA, 19 nt, Artificial Sequence
  Description of Artificial Sequence: Synthetic oligonucleotide
  Antisense strand to SEQ ID NO: 2356742
guccacuccggcaaagacc

SEQ ID NO: 2356744 - RNA, 19 nt, Artificial Sequence
  Description of Artificial Sequence: Synthetic oligonucleotide
  Sense strand starting at position 1119 of SEQ ID NO: 1885635
ccggcaagacauggaguua

SEQ ID NO: 2356745 - RNA, 19 nt, Artificial Sequence
  Description of Artificial Sequence: Synthetic oligonucleotide
  Antisense strand to SEQ ID NO: 2356744
uaacuccaugucuugccgg

SEQ ID NO: 2356746 - RNA, 19 nt, Artificial Sequence
  Description of Artificial Sequence: Synthetic oligonucleotide
  Sense strand starting at position 1120 of SEQ ID NO: 1885635
cggcaagacauggaguuau

SEQ ID NO: 2356747 - RNA, 19 nt, Artificial Sequence
  Description of Artificial Sequence: Synthetic oligonucleotide
  Antisense strand to SEQ ID NO: 2356746
auaacuccaugucuugccg

SEQ ID NO: 2356748 - RNA, 19 nt, Artificial Sequence
  Description of Artificial Sequence: Synthetic oligonucleotide
  Sense strand starting at position 1207 of SEQ ID NO: 1885635
cugguuguccuagagauga

SEQ ID NO: 2356749 - RNA, 19 nt, Artificial Sequence
  Description of Artificial Sequence: Synthetic oligonucleotide
  Antisense strand to SEQ ID NO: 2356748
ucaucucuaggacaaccag

SEQ ID NO: 2356750 - RNA, 19 nt, Artificial Sequence
  Description of Artificial Sequence: Synthetic oligonucleotide
  Sense strand starting at position 1248 of SEQ ID NO: 1885635
uguaccuaccucgaaacaa

SEQ ID NO: 2356751 - RNA, 19 nt, Artificial Sequence
  Description of Artificial Sequence: Synthetic oligonucleotide
  Antisense strand to SEQ ID NO: 2356750
uuguuucgagguagguaca

SEQ ID NO: 2356752 - RNA, 19 nt, Artificial Sequence
  Description of Artificial Sequence: Synthetic oligonucleotide
  Sense strand starting at position 1345 of SEQ ID NO: 1885635
aggugcaaucacuggacaa

SEQ ID NO: 2356753 - RNA, 19 nt, Artificial Sequence
  Description of Artificial Sequence: Synthetic oligonucleotide
  Antisense strand to SEQ ID NO: 2356752
uuguccagugauugcaccu

SEQ ID NO: 2356754 - RNA, 19 nt, Artificial Sequence
  Description of Artificial Sequence: Synthetic oligonucleotide
  Sense strand starting at position 1346 of SEQ ID NO: 1885635
ggugcaaucacuggacaau

SEQ ID NO: 2356755 - RNA, 19 nt, Artificial Sequence
  Description of Artificial Sequence: Synthetic oligonucleotide
  Antisense strand to SEQ ID NO: 2356754
auuguccagugauugcacc

SEQ ID NO: 2356756 - RNA, 19 nt, Artificial Sequence
  Description of Artificial Sequence: Synthetic oligonucleotide
  Sense strand starting at position 1347 of SEQ ID NO: 1885635
gugcaaucacuggacaaug

SEQ ID NO: 2356757 - RNA, 19 nt, Artificial Sequence
  Description of Artificial Sequence: Synthetic oligonucleotide
  Antisense strand to SEQ ID NO: 2356756
cauuguccagugauugcac

SEQ ID NO: 2356758 - RNA, 19 nt, Artificial Sequence
  Description of Artificial Sequence: Synthetic oligonucleotide
  Sense strand starting at position 1434 of SEQ ID NO: 1885635
accaguaacuugccuuaga

SEQ ID NO: 2356759 - RNA, 19 nt, Artificial Sequence
  Description of Artificial Sequence: Synthetic oligonucleotide
  Antisense strand to SEQ ID NO: 2356758
ucuaaggcaaguuacuggu

SEQ ID NO: 2356760 - RNA, 19 nt, Artificial Sequence
  Description of Artificial Sequence: Synthetic oligonucleotide
  Sense strand starting at position 1435 of SEQ ID NO: 1885635
ccaguaacuugccuuagaa

SEQ ID NO: 2356761 - RNA, 19 nt, Artificial Sequence
  Description of Artificial Sequence: Synthetic oligonucleotide
  Antisense strand to SEQ ID NO: 2356760
uucuaaggcaaguuacugg

SEQ ID NO: 2356762 - RNA, 19 nt, Artificial Sequence
  Description of Artificial Sequence: Synthetic oligonucleotide
  Sense strand starting at position 1437 of SEQ ID NO: 1885635
aguaacuugccuuagaaca

SEQ ID NO: 2356763 - RNA, 19 nt, Artificial Sequence
  Description of Artificial Sequence: Synthetic oligonucleotide
  Antisense strand to SEQ ID NO: 2356762
uguucuaaggcaaguuacu

SEQ ID NO: 2356764 - RNA, 19 nt, Artificial Sequence
  Description of Artificial Sequence: Synthetic oligonucleotide
  Sense strand starting at position 1585 of SEQ ID NO: 1885635
ucguguguccggagaggug

SEQ ID NO: 2356765 - RNA, 19 nt, Artificial Sequence
  Description of Artificial Sequence: Synthetic oligonucleotide
  Antisense strand to SEQ ID NO: 2356764
caccucuccggacacacga

SEQ ID NO: 2356766 - RNA, 19 nt, Artificial Sequence
  Description of Artificial Sequence: Synthetic oligonucleotide
  Sense strand starting at position 1622 of SEQ ID NO: 1885635
caggaagcccucuggguau

SEQ ID NO: 2356767 - RNA, 19 nt, Artificial Sequence
  Description of Artificial Sequence: Synthetic oligonucleotide
  Antisense strand to SEQ ID NO: 2356766
auacccagagggcuuccug

SEQ ID NO: 2356768 - RNA, 19 nt, Artificial Sequence
  Description of Artificial Sequence: Synthetic oligonucleotide
  Sense strand starting at position 1633 of SEQ ID NO: 1885635
cuggguaugacuugguaug

SEQ ID NO: 2356769 - RNA, 19 nt, Artificial Sequence
  Description of Artificial Sequence: Synthetic oligonucleotide
  Antisense strand to SEQ ID NO: 2356768
cauaccaagucauacccag

SEQ ID NO: 2356770 - RNA, 19 nt, Artificial Sequence
  Description of Artificial Sequence: Synthetic oligonucleotide
  Sense strand starting at position 1635 of SEQ ID NO: 1885635
ggguaugacuugguaugga

SEQ ID NO: 2356771 - RNA, 19 nt, Artificial Sequence
  Description of Artificial Sequence: Synthetic oligonucleotide
  Antisense strand to SEQ ID NO: 2356770
uccauaccaagucauaccc

SEQ ID NO: 2356772 - RNA, 19 nt, Artificial Sequence
  Description of Artificial Sequence: Synthetic oligonucleotide
  Sense strand starting at position 1657 of SEQ ID NO: 1885635
gaggcagauccaugugauu

SEQ ID NO: 2356773 - RNA, 19 nt, Artificial Sequence
  Description of Artificial Sequence: Synthetic oligonucleotide
  Antisense strand to SEQ ID NO: 2356772
aaucacauggaucugccuc

SEQ ID NO: 2356774 - RNA, 19 nt, Artificial Sequence
  Description of Artificial Sequence: Synthetic oligonucleotide
  Sense strand starting at position 1868 of SEQ ID NO: 1885635
aggcuuuguccuggagaca

SEQ ID NO: 2356775 - RNA, 19 nt, Artificial Sequence
  Description of Artificial Sequence: Synthetic oligonucleotide
  Antisense strand to SEQ ID NO: 2356774
ugucuccaggacaaagccu

SEQ ID NO: 2356776 - RNA, 19 nt, Artificial Sequence
  Description of Artificial Sequence: Synthetic oligonucleotide
  Sense strand starting at position 1869 of SEQ ID NO: 1885635
ggcuuuguccuggagacag

SEQ ID NO: 2356777 - RNA, 19 nt, Artificial Sequence
  Description of Artificial Sequence: Synthetic oligonucleotide
  Antisense strand to SEQ ID NO: 2356776
cugucuccaggacaaagcc

SEQ ID NO: 2356778 - RNA, 19 nt, Artificial Sequence
  Description of Artificial Sequence: Synthetic oligonucleotide
  Sense strand starting at position 1912 of SEQ ID NO: 1885635
agaguuugauacgcaaaua

SEQ ID NO: 2356779 - RNA, 19 nt, Artificial Sequence
  Description of Artificial Sequence: Synthetic oligonucleotide
  Antisense strand to SEQ ID NO: 2356778
uauuugcguaucaaacucu

SEQ ID NO: 2356780 - RNA, 19 nt, Artificial Sequence
  Description of Artificial Sequence: Synthetic oligonucleotide
  Sense strand starting at position 2486 of SEQ ID NO: 1885635
guuaguuguuacucagaag

SEQ ID NO: 2356781 - RNA, 19 nt, Artificial Sequence
  Description of Artificial Sequence: Synthetic oligonucleotide
  Antisense strand to SEQ ID NO: 2356780
cuucugaguaacaacuaac

SEQ ID NO: 2356782 - RNA, 19 nt, Artificial Sequence
  Description of Artificial Sequence: Synthetic oligonucleotide
  Sense strand starting at position 2487 of SEQ ID NO: 1885635
uuaguuguuacucagaagu

SEQ ID NO: 2356783 - RNA, 19 nt, Artificial Sequence
  Description of Artificial Sequence: Synthetic oligonucleotide
  Antisense strand to SEQ ID NO: 2356782
acuucugaguaacaacuaa

SEQ ID NO: 2356784 - RNA, 19 nt, Artificial Sequence
  Description of Artificial Sequence: Synthetic oligonucleotide
  Sense strand starting at position 2514 of SEQ ID NO: 1885635
agggcaagauucgucaaag

SEQ ID NO: 2356785 - RNA, 19 nt, Artificial Sequence
  Description of Artificial Sequence: Synthetic oligonucleotide
  Antisense strand to SEQ ID NO: 2356784
cuuugacgaaucuugcccu

SEQ ID NO: 2356786 - RNA, 19 nt, Artificial Sequence
  Description of Artificial Sequence: Synthetic oligonucleotide
  Sense strand starting at position 2515 of SEQ ID NO: 1885635
gggcaagauucgucaaagg

SEQ ID NO: 2356787 - RNA, 19 nt, Artificial Sequence
  Description of Artificial Sequence: Synthetic oligonucleotide
  Antisense strand to SEQ ID NO: 2356786
ccuuugacgaaucuugccc

SEQ ID NO: 2356788 - RNA, 19 nt, Artificial Sequence
  Description of Artificial Sequence: Synthetic oligonucleotide
  Sense strand starting at position 2538 of SEQ ID NO: 1885635
ugagauucucaugggccaa

SEQ ID NO: 2356789 - RNA, 19 nt, Artificial Sequence
  Description of Artificial Sequence: Synthetic oligonucleotide
  Antisense strand to SEQ ID NO: 2356788
uuggcccaugagaaucuca

SEQ ID NO: 2356790 - RNA, 19 nt, Artificial Sequence
  Description of Artificial Sequence: Synthetic oligonucleotide
  Sense strand starting at position 2584 of SEQ ID NO: 1885635
ccaggaauccaagggucuu

SEQ ID NO: 2356791 - RNA, 19 nt, Artificial Sequence
  Description of Artificial Sequence: Synthetic oligonucleotide
  Antisense strand to SEQ ID NO: 2356790
aagacccuuggauuccugg

SEQ ID NO: 2356792 - RNA, 19 nt, Artificial Sequence
  Description of Artificial Sequence: Synthetic oligonucleotide
  Sense strand starting at position 2590 of SEQ ID NO: 1885635
auccaagggucuuuccauu

SEQ ID NO: 2356793 - RNA, 19 nt, Artificial Sequence
  Description of Artificial Sequence: Synthetic oligonucleotide
  Antisense strand to SEQ ID NO: 2356792
aauggaaagacccuuggau

SEQ ID NO: 2356794 - RNA, 19 nt, Artificial Sequence
  Description of Artificial Sequence: Synthetic oligonucleotide
  Sense strand starting at position 2598 of SEQ ID NO: 1885635
gucuuuccauuggcaagaa

SEQ ID NO: 2356795 - RNA, 19 nt, Artificial Sequence
  Description of Artificial Sequence: Synthetic oligonucleotide
  Antisense strand to SEQ ID NO: 2356794
uucuugccaauggaaagac

SEQ ID NO: 2356796 - RNA, 19 nt, Artificial Sequence
  Description of Artificial Sequence: Synthetic oligonucleotide
  Sense strand starting at position 2928 of SEQ ID NO: 1885635
cauggaugcuuugugauaa

SEQ ID NO: 2356797 - RNA, 19 nt, Artificial Sequence
  Description of Artificial Sequence: Synthetic oligonucleotide
  Antisense strand to SEQ ID NO: 2356796
uuaucacaaagcauccaug

SEQ ID NO: 2356798 - RNA, 19 nt, Artificial Sequence
  Description of Artificial Sequence: Synthetic oligonucleotide
  Sense strand starting at position 2990 of SEQ ID NO: 1885635
uuaaccuauuguguugaga

SEQ ID NO: 2356799 - RNA, 19 nt, Artificial Sequence
  Description of Artificial Sequence: Synthetic oligonucleotide
  Antisense strand to SEQ ID NO: 2356798
ucucaacacaauagguuaa

SEQ ID NO: 2356800 - RNA, 19 nt, Artificial Sequence
  Description of Artificial Sequence: Synthetic oligonucleotide
  Sense strand starting at position 3352 of SEQ ID NO: 1885635
gcaucucuuccagaaaguu

SEQ ID NO: 2356801 - RNA, 19 nt, Artificial Sequence
  Description of Artificial Sequence: Synthetic oligonucleotide
  Antisense strand to SEQ ID NO: 2356800
aacuuucuggaagagaugc

SEQ ID NO: 2356802 - RNA, 19 nt, Artificial Sequence
  Description of Artificial Sequence: Synthetic oligonucleotide
  Sense strand starting at position 3360 of SEQ ID NO: 1885635
uccagaaaguucuuggaag

SEQ ID NO: 2356803 - RNA, 19 nt, Artificial Sequence
  Description of Artificial Sequence: Synthetic oligonucleotide
  Antisense strand to SEQ ID NO: 2356802
cuuccaagaacuuucugga

SEQ ID NO: 2356804 - RNA, 19 nt, Artificial Sequence
  Description of Artificial Sequence: Synthetic oligonucleotide
  Sense strand starting at position 3466 of SEQ ID NO: 1885635
ggcuauccuggccaucuaa

SEQ ID NO: 2356805 - RNA, 19 nt, Artificial Sequence
  Description of Artificial Sequence: Synthetic oligonucleotide
  Antisense strand to SEQ ID NO: 2356804
uuagauggccaggauagcc

SEQ ID NO: 2356806 - RNA, 19 nt, Artificial Sequence
  Description of Artificial Sequence: Synthetic oligonucleotide
  Sense strand starting at position 3637 of SEQ ID NO: 1885635
gccauuuccucugugacua

SEQ ID NO: 2356807 - RNA, 19 nt, Artificial Sequence
  Description of Artificial Sequence: Synthetic oligonucleotide
  Antisense strand to SEQ ID NO: 2356806
uagucacagaggaaauggc

SEQ ID NO: 2356808 - RNA, 19 nt, Artificial Sequence
  Description of Artificial Sequence: Synthetic oligonucleotide
  Sense strand starting at position 3696 of SEQ ID NO: 1885635
ugggaucugcauggugaga

SEQ ID NO: 2356809 - RNA, 19 nt, Artificial Sequence
  Description of Artificial Sequence: Synthetic oligonucleotide
  Antisense strand to SEQ ID NO: 2356808
ucucaccaugcagauccca

SEQ ID NO: 2356810 - RNA, 19 nt, Artificial Sequence
  Description of Artificial Sequence: Synthetic oligonucleotide
  Sense strand starting at position 3816 of SEQ ID NO: 1885635
ucagguauucucuaaggua

SEQ ID NO: 2356811 - RNA, 19 nt, Artificial Sequence
  Description of Artificial Sequence: Synthetic oligonucleotide
  Antisense strand to SEQ ID NO: 2356810
uaccuuagagaauaccuga

SEQ ID NO: 2356812 - RNA, 19 nt, Artificial Sequence
  Description of Artificial Sequence: Synthetic oligonucleotide
  Sense strand starting at position 3831 of SEQ ID NO: 1885635
gguacaacuagucacagua

SEQ ID NO: 2356813 - RNA, 19 nt, Artificial Sequence
  Description of Artificial Sequence: Synthetic oligonucleotide
  Antisense strand to SEQ ID NO: 2356812
uacugugacuaguuguacc

SEQ ID NO: 2356814 - RNA, 19 nt, Artificial Sequence
  Description of Artificial Sequence: Synthetic oligonucleotide
  Sense strand starting at position 3935 of SEQ ID NO: 1885635
agaacacagccuuguaaca

SEQ ID NO: 2356815 - RNA, 19 nt, Artificial Sequence
  Description of Artificial Sequence: Synthetic oligonucleotide
  Antisense strand to SEQ ID NO: 2356814
uguuacaaggcuguguucu

SEQ ID NO: 2356816 - RNA, 19 nt, Artificial Sequence
  Description of Artificial Sequence: Synthetic oligonucleotide
  Sense strand starting at position 56 of SEQ ID NO: 1885636
ucccuaaagucauccaggu

SEQ ID NO: 2356817 - RNA, 19 nt, Artificial Sequence
  Description of Artificial Sequence: Synthetic oligonucleotide
  Antisense strand to SEQ ID NO: 2356816
accuggaugacuuuaggga

SEQ ID NO: 2356818 - RNA, 19 nt, Artificial Sequence
  Description of Artificial Sequence: Synthetic oligonucleotide
  Sense strand starting at position 80 of SEQ ID NO: 1885636
ugaaguccucucugugaag

SEQ ID NO: 2356819 - RNA, 19 nt, Artificial Sequence
  Description of Artificial Sequence: Synthetic oligonucleotide
  Antisense strand to SEQ ID NO: 2356818
cuucacagagaggacuuca

SEQ ID NO: 2356820 - RNA, 19 nt, Artificial Sequence
  Description of Artificial Sequence: Synthetic oligonucleotide
  Sense strand starting at position 106 of SEQ ID NO: 1885636
ccgugaacgauuugccaca

SEQ ID NO: 2356821 - RNA, 19 nt, Artificial Sequence
  Description of Artificial Sequence: Synthetic oligonucleotide
  Antisense strand to SEQ ID NO: 2356820
uguggcaaaucguucacgg

SEQ ID NO: 2356822 - RNA, 19 nt, Artificial Sequence
  Description of Artificial Sequence: Synthetic oligonucleotide
  Sense strand starting at position 190 of SEQ ID NO: 1885636
caagacaagguuugauacu

SEQ ID NO: 2356823 - RNA, 19 nt, Artificial Sequence
  Description of Artificial Sequence: Synthetic oligonucleotide
  Antisense strand to SEQ ID NO: 2356822
aguaucaaaccuugucuug

SEQ ID NO: 2356824 - RNA, 19 nt, Artificial Sequence
  Description of Artificial Sequence: Synthetic oligonucleotide
  Sense strand starting at position 196 of SEQ ID NO: 1885636
aagguuugauacucacaga

SEQ ID NO: 2356825 - RNA, 19 nt, Artificial Sequence
  Description of Artificial Sequence: Synthetic oligonucleotide
  Antisense strand to SEQ ID NO: 2356824
ucugugaguaucaaaccuu

SEQ ID NO: 2356826 - RNA, 19 nt, Artificial Sequence
  Description of Artificial Sequence: Synthetic oligonucleotide
  Sense strand starting at position 514 of SEQ ID NO: 1885636
auuagaacuuguuccugaa

SEQ ID NO: 2356827 - RNA, 19 nt, Artificial Sequence
  Description of Artificial Sequence: Synthetic oligonucleotide
  Antisense strand to SEQ ID NO: 2356826
uucaggaacaaguucuaau

SEQ ID NO: 2356828 - RNA, 19 nt, Artificial Sequence
  Description of Artificial Sequence: Synthetic oligonucleotide
  Sense strand starting at position 637 of SEQ ID NO: 1885636
gcaccucuccaggaaguuu

SEQ ID NO: 2356829 - RNA, 19 nt, Artificial Sequence
  Description of Artificial Sequence: Synthetic oligonucleotide
  Antisense strand to SEQ ID NO: 2356828
aaacuuccuggagaggugc

SEQ ID NO: 2356830 - RNA, 19 nt, Artificial Sequence
  Description of Artificial Sequence: Synthetic oligonucleotide
  Sense strand starting at position 978 of SEQ ID NO: 1885636
cagguuaugugacucauua

SEQ ID NO: 2356831 - RNA, 19 nt, Artificial Sequence
  Description of Artificial Sequence: Synthetic oligonucleotide
  Antisense strand to SEQ ID NO: 2356830
uaaugagucacauaaccug

SEQ ID NO: 2356832 - RNA, 19 nt, Artificial Sequence
  Description of Artificial Sequence: Synthetic oligonucleotide
  Sense strand starting at position 982 of SEQ ID NO: 1885636
uuaugugacucauuaccca

SEQ ID NO: 2356833 - RNA, 19 nt, Artificial Sequence
  Description of Artificial Sequence: Synthetic oligonucleotide
  Antisense strand to SEQ ID NO: 2356832
uggguaaugagucacauaa

SEQ ID NO: 2356834 - RNA, 19 nt, Artificial Sequence
  Description of Artificial Sequence: Synthetic oligonucleotide
  Sense strand starting at position 1141 of SEQ ID NO: 1885636
caaggagugucuccacaaa

SEQ ID NO: 2356835 - RNA, 19 nt, Artificial Sequence
  Description of Artificial Sequence: Synthetic oligonucleotide
  Antisense strand to SEQ ID NO: 2356834
uuuguggagacacuccuug

SEQ ID NO: 2356836 - RNA, 19 nt, Artificial Sequence
  Description of Artificial Sequence: Synthetic oligonucleotide
  Sense strand starting at position 1636 of SEQ ID NO: 1885636
guguaugacuugguaccaa

SEQ ID NO: 2356837 - RNA, 19 nt, Artificial Sequence
  Description of Artificial Sequence: Synthetic oligonucleotide
  Antisense strand to SEQ ID NO: 2356836
uugguaccaagucauacac

SEQ ID NO: 2356838 - RNA, 19 nt, Artificial Sequence
  Description of Artificial Sequence: Synthetic oligonucleotide
  Sense strand starting at position 1869 of SEQ ID NO: 1885636
aggcuuuguccuggagaca

SEQ ID NO: 2356839 - RNA, 19 nt, Artificial Sequence
  Description of Artificial Sequence: Synthetic oligonucleotide
  Antisense strand to SEQ ID NO: 2356838
ugucuccaggacaaagccu

SEQ ID NO: 2356840 - RNA, 19 nt, Artificial Sequence
  Description of Artificial Sequence: Synthetic oligonucleotide
  Sense strand starting at position 1870 of SEQ ID NO: 1885636
ggcuuuguccuggagacaa

SEQ ID NO: 2356841 - RNA, 19 nt, Artificial Sequence
  Description of Artificial Sequence: Synthetic oligonucleotide
  Antisense strand to SEQ ID NO: 2356840
uugucuccaggacaaagcc

SEQ ID NO: 2356842 - RNA, 19 nt, Artificial Sequence
  Description of Artificial Sequence: Synthetic oligonucleotide
  Sense strand starting at position 1912 of SEQ ID NO: 1885636
acaguuugauacgcaaaug

SEQ ID NO: 2356843 - RNA, 19 nt, Artificial Sequence
  Description of Artificial Sequence: Synthetic oligonucleotide
  Antisense strand to SEQ ID NO: 2356842
cauuugcguaucaaacugu

SEQ ID NO: 2356844 - RNA, 19 nt, Artificial Sequence
  Description of Artificial Sequence: Synthetic oligonucleotide
  Sense strand starting at position 2035 of SEQ ID NO: 1885636
ggucuuugccggaguggac

SEQ ID NO: 2356845 - RNA, 19 nt, Artificial Sequence
  Description of Artificial Sequence: Synthetic oligonucleotide
  Antisense strand to SEQ ID NO: 2356844
guccacuccggcaaagacc

SEQ ID NO: 2356846 - RNA, 19 nt, Artificial Sequence
  Description of Artificial Sequence: Synthetic oligonucleotide
  Sense strand starting at position 2340 of SEQ ID NO: 1885636
ccggcaagacauggaguua

SEQ ID NO: 2356847 - RNA, 19 nt, Artificial Sequence
  Description of Artificial Sequence: Synthetic oligonucleotide
  Antisense strand to SEQ ID NO: 2356846
uaacuccaugucuugccgg

SEQ ID NO: 2356848 - RNA, 19 nt, Artificial Sequence
  Description of Artificial Sequence: Synthetic oligonucleotide
  Sense strand starting at position 2341 of SEQ ID NO: 1885636
cggcaagacauggaguuau

SEQ ID NO: 2356849 - RNA, 19 nt, Artificial Sequence
  Description of Artificial Sequence: Synthetic oligonucleotide
  Antisense strand to SEQ ID NO: 2356848
auaacuccaugucuugccg

SEQ ID NO: 2356850 - RNA, 19 nt, Artificial Sequence
  Description of Artificial Sequence: Synthetic oligonucleotide
  Sense strand starting at position 2428 of SEQ ID NO: 1885636
cugguuguccuagagauga

SEQ ID NO: 2356851 - RNA, 19 nt, Artificial Sequence
  Description of Artificial Sequence: Synthetic oligonucleotide
  Antisense strand to SEQ ID NO: 2356850
ucaucucuaggacaaccag

SEQ ID NO: 2356852 - RNA, 19 nt, Artificial Sequence
  Description of Artificial Sequence: Synthetic oligonucleotide
  Sense strand starting at position 2469 of SEQ ID NO: 1885636
uguaccuaccucgaaacaa

SEQ ID NO: 2356853 - RNA, 19 nt, Artificial Sequence
  Description of Artificial Sequence: Synthetic oligonucleotide
  Antisense strand to SEQ ID NO: 2356852
uuguuucgagguagguaca

SEQ ID NO: 2356854 - RNA, 19 nt, Artificial Sequence
  Description of Artificial Sequence: Synthetic oligonucleotide
  Sense strand starting at position 2566 of SEQ ID NO: 1885636
aggugcaaucacuggacaa

SEQ ID NO: 2356855 - RNA, 19 nt, Artificial Sequence
  Description of Artificial Sequence: Synthetic oligonucleotide
  Antisense strand to SEQ ID NO: 2356854
uuguccagugauugcaccu

SEQ ID NO: 2356856 - RNA, 19 nt, Artificial Sequence
  Description of Artificial Sequence: Synthetic oligonucleotide
  Sense strand starting at position 2567 of SEQ ID NO: 1885636
ggugcaaucacuggacaau

SEQ ID NO: 2356857 - RNA, 19 nt, Artificial Sequence
  Description of Artificial Sequence: Synthetic oligonucleotide
  Antisense strand to SEQ ID NO: 2356856
auuguccagugauugcacc

SEQ ID NO: 2356858 - RNA, 19 nt, Artificial Sequence
  Description of Artificial Sequence: Synthetic oligonucleotide
  Sense strand starting at position 2568 of SEQ ID NO: 1885636
gugcaaucacuggacaaug

SEQ ID NO: 2356859 - RNA, 19 nt, Artificial Sequence
  Description of Artificial Sequence: Synthetic oligonucleotide
  Antisense strand to SEQ ID NO: 2356858
cauuguccagugauugcac

SEQ ID NO: 2356860 - RNA, 19 nt, Artificial Sequence
  Description of Artificial Sequence: Synthetic oligonucleotide
  Sense strand starting at position 2655 of SEQ ID NO: 1885636
accaguaacuugccuuaga

SEQ ID NO: 2356861 - RNA, 19 nt, Artificial Sequence
  Description of Artificial Sequence: Synthetic oligonucleotide
  Antisense strand to SEQ ID NO: 2356860
ucuaaggcaaguuacuggu

SEQ ID NO: 2356862 - RNA, 19 nt, Artificial Sequence
  Description of Artificial Sequence: Synthetic oligonucleotide
  Sense strand starting at position 2656 of SEQ ID NO: 1885636
ccaguaacuugccuuagaa

SEQ ID NO: 2356863 - RNA, 19 nt, Artificial Sequence
  Description of Artificial Sequence: Synthetic oligonucleotide
  Antisense strand to SEQ ID NO: 2356862
uucuaaggcaaguuacugg

SEQ ID NO: 2356864 - RNA, 19 nt, Artificial Sequence
  Description of Artificial Sequence: Synthetic oligonucleotide
  Sense strand starting at position 2658 of SEQ ID NO: 1885636
aguaacuugccuuagaaca

SEQ ID NO: 2356865 - RNA, 19 nt, Artificial Sequence
  Description of Artificial Sequence: Synthetic oligonucleotide
  Antisense strand to SEQ ID NO: 2356864
uguucuaaggcaaguuacu

SEQ ID NO: 2356866 - RNA, 19 nt, Artificial Sequence
  Description of Artificial Sequence: Synthetic oligonucleotide
  Sense strand starting at position 2806 of SEQ ID NO: 1885636
ucguguguccggagaggug

SEQ ID NO: 2356867 - RNA, 19 nt, Artificial Sequence
  Description of Artificial Sequence: Synthetic oligonucleotide
  Antisense strand to SEQ ID NO: 2356866
caccucuccggacacacga

SEQ ID NO: 2356868 - RNA, 19 nt, Artificial Sequence
  Description of Artificial Sequence: Synthetic oligonucleotide
  Sense strand starting at position 2843 of SEQ ID NO: 1885636
caggaagcccucuggguau

SEQ ID NO: 2356869 - RNA, 19 nt, Artificial Sequence
  Description of Artificial Sequence: Synthetic oligonucleotide
  Antisense strand to SEQ ID NO: 2356868
auacccagagggcuuccug

SEQ ID NO: 2356870 - RNA, 19 nt, Artificial Sequence
  Description of Artificial Sequence: Synthetic oligonucleotide
  Sense strand starting at position 2854 of SEQ ID NO: 1885636
cuggguaugacuugguaug

SEQ ID NO: 2356871 - RNA, 19 nt, Artificial Sequence
  Description of Artificial Sequence: Synthetic oligonucleotide
  Antisense strand to SEQ ID NO: 2356870
cauaccaagucauacccag

SEQ ID NO: 2356872 - RNA, 19 nt, Artificial Sequence
  Description of Artificial Sequence: Synthetic oligonucleotide
  Sense strand starting at position 2856 of SEQ ID NO: 1885636
ggguaugacuugguaugga

SEQ ID NO: 2356873 - RNA, 19 nt, Artificial Sequence
  Description of Artificial Sequence: Synthetic oligonucleotide
  Antisense strand to SEQ ID NO: 2356872
uccauaccaagucauaccc

SEQ ID NO: 2356874 - RNA, 19 nt, Artificial Sequence
  Description of Artificial Sequence: Synthetic oligonucleotide
  Sense strand starting at position 2878 of SEQ ID NO: 1885636
gaggcagauccaugugauu

SEQ ID NO: 2356875 - RNA, 19 nt, Artificial Sequence
  Description of Artificial Sequence: Synthetic oligonucleotide
  Antisense strand to SEQ ID NO: 2356874
aaucacauggaucugccuc

SEQ ID NO: 2356876 - RNA, 19 nt, Artificial Sequence
  Description of Artificial Sequence: Synthetic oligonucleotide
  Sense strand starting at position 3090 of SEQ ID NO: 1885636
ggcuuuguccuggagacag

SEQ ID NO: 2356877 - RNA, 19 nt, Artificial Sequence
  Description of Artificial Sequence: Synthetic oligonucleotide
  Antisense strand to SEQ ID NO: 2356876
cugucuccaggacaaagcc

SEQ ID NO: 2356878 - RNA, 19 nt, Artificial Sequence
  Description of Artificial Sequence: Synthetic oligonucleotide
  Sense strand starting at position 3133 of SEQ ID NO: 1885636
agaguuugauacgcaaaua

SEQ ID NO: 2356879 - RNA, 19 nt, Artificial Sequence
  Description of Artificial Sequence: Synthetic oligonucleotide
  Antisense strand to SEQ ID NO: 2356878
uauuugcguaucaaacucu

SEQ ID NO: 2356880 - RNA, 19 nt, Artificial Sequence
  Description of Artificial Sequence: Synthetic oligonucleotide
  Sense strand starting at position 3707 of SEQ ID NO: 1885636
guuaguuguuacucagaag

SEQ ID NO: 2356881 - RNA, 19 nt, Artificial Sequence
  Description of Artificial Sequence: Synthetic oligonucleotide
  Antisense strand to SEQ ID NO: 2356880
cuucugaguaacaacuaac

SEQ ID NO: 2356882 - RNA, 19 nt, Artificial Sequence
  Description of Artificial Sequence: Synthetic oligonucleotide
  Sense strand starting at position 3708 of SEQ ID NO: 1885636
uuaguuguuacucagaagu

SEQ ID NO: 2356883 - RNA, 19 nt, Artificial Sequence
  Description of Artificial Sequence: Synthetic oligonucleotide
  Antisense strand to SEQ ID NO: 2356882
acuucugaguaacaacuaa

SEQ ID NO: 2356884 - RNA, 19 nt, Artificial Sequence
  Description of Artificial Sequence: Synthetic oligonucleotide
  Sense strand starting at position 3735 of SEQ ID NO: 1885636
agggcaagauucgucaaag

SEQ ID NO: 2356885 - RNA, 19 nt, Artificial Sequence
  Description of Artificial Sequence: Synthetic oligonucleotide
  Antisense strand to SEQ ID NO: 2356884
cuuugacgaaucuugcccu

SEQ ID NO: 2356886 - RNA, 19 nt, Artificial Sequence
  Description of Artificial Sequence: Synthetic oligonucleotide
  Sense strand starting at position 3736 of SEQ ID NO: 1885636
gggcaagauucgucaaagg

SEQ ID NO: 2356887 - RNA, 19 nt, Artificial Sequence
  Description of Artificial Sequence: Synthetic oligonucleotide
  Antisense strand to SEQ ID NO: 2356886
ccuuugacgaaucuugccc

SEQ ID NO: 2356888 - RNA, 19 nt, Artificial Sequence
  Description of Artificial Sequence: Synthetic oligonucleotide
  Sense strand starting at position 3759 of SEQ ID NO: 1885636
ugagauucucaugggccaa

SEQ ID NO: 2356889 - RNA, 19 nt, Artificial Sequence
  Description of Artificial Sequence: Synthetic oligonucleotide
  Antisense strand to SEQ ID NO: 2356888
uuggcccaugagaaucuca

SEQ ID NO: 2356890 - RNA, 19 nt, Artificial Sequence
  Description of Artificial Sequence: Synthetic oligonucleotide
  Sense strand starting at position 3805 of SEQ ID NO: 1885636
ccaggaauccaagggucuu

SEQ ID NO: 2356891 - RNA, 19 nt, Artificial Sequence
  Description of Artificial Sequence: Synthetic oligonucleotide
  Antisense strand to SEQ ID NO: 2356890
aagacccuuggauuccugg

SEQ ID NO: 2356892 - RNA, 19 nt, Artificial Sequence
  Description of Artificial Sequence: Synthetic oligonucleotide
  Sense strand starting at position 3811 of SEQ ID NO: 1885636
auccaagggucuuuccauu

SEQ ID NO: 2356893 - RNA, 19 nt, Artificial Sequence
  Description of Artificial Sequence: Synthetic oligonucleotide
  Antisense strand to SEQ ID NO: 2356892
aauggaaagacccuuggau

SEQ ID NO: 2356894 - RNA, 19 nt, Artificial Sequence
  Description of Artificial Sequence: Synthetic oligonucleotide
  Sense strand starting at position 3819 of SEQ ID NO: 1885636
gucuuuccauuggcaagaa

SEQ ID NO: 2356895 - RNA, 19 nt, Artificial Sequence
  Description of Artificial Sequence: Synthetic oligonucleotide
  Antisense strand to SEQ ID NO: 2356894
uucuugccaauggaaagac

SEQ ID NO: 2356896 - RNA, 19 nt, Artificial Sequence
  Description of Artificial Sequence: Synthetic oligonucleotide
  Sense strand starting at position 464 of SEQ ID NO: 1885637
aagugucugcccugaugga

SEQ ID NO: 2356897 - RNA, 19 nt, Artificial Sequence
  Description of Artificial Sequence: Synthetic oligonucleotide
  Antisense strand to SEQ ID NO: 2356896
uccaucagggcagacacuu

SEQ ID NO: 2356898 - RNA, 19 nt, Artificial Sequence
  Description of Artificial Sequence: Synthetic oligonucleotide
  Sense strand starting at position 490 of SEQ ID NO: 1885637
agccaagggagucgucaua

SEQ ID NO: 2356899 - RNA, 19 nt, Artificial Sequence
  Description of Artificial Sequence: Synthetic oligonucleotide
  Antisense strand to SEQ ID NO: 2356898
uaugacgacucccuuggcu

SEQ ID NO: 2356900 - RNA, 19 nt, Artificial Sequence
  Description of Artificial Sequence: Synthetic oligonucleotide
  Sense strand starting at position 704 of SEQ ID NO: 1885637
ugacuuggugguggcaaau

SEQ ID NO: 2356901 - RNA, 19 nt, Artificial Sequence
  Description of Artificial Sequence: Synthetic oligonucleotide
  Antisense strand to SEQ ID NO: 2356900
auuugccaccaccaaguca

SEQ ID NO: 2356902 - RNA, 19 nt, Artificial Sequence
  Description of Artificial Sequence: Synthetic oligonucleotide
  Sense strand starting at position 795 of SEQ ID NO: 1885637
uuggguucggccguguaau

SEQ ID NO: 2356903 - RNA, 19 nt, Artificial Sequence
  Description of Artificial Sequence: Synthetic oligonucleotide
  Antisense strand to SEQ ID NO: 2356902
auuacacggccgaacccaa

SEQ ID NO: 2356904 - RNA, 19 nt, Artificial Sequence
  Description of Artificial Sequence: Synthetic oligonucleotide
  Sense strand starting at position 811 of SEQ ID NO: 1885637
aauuguucuggucaaugau

SEQ ID NO: 2356905 - RNA, 19 nt, Artificial Sequence
  Description of Artificial Sequence: Synthetic oligonucleotide
  Antisense strand to SEQ ID NO: 2356904
aucauugaccagaacaauu

SEQ ID NO: 2356906 - RNA, 19 nt, Artificial Sequence
  Description of Artificial Sequence: Synthetic oligonucleotide
  Sense strand starting at position 819 of SEQ ID NO: 1885637
uggucaaugaucugugggu

SEQ ID NO: 2356907 - RNA, 19 nt, Artificial Sequence
  Description of Artificial Sequence: Synthetic oligonucleotide
  Antisense strand to SEQ ID NO: 2356906
acccacagaucauugacca

SEQ ID NO: 2356908 - RNA, 19 nt, Artificial Sequence
  Description of Artificial Sequence: Synthetic oligonucleotide
  Sense strand starting at position 820 of SEQ ID NO: 1885637
ggucaaugaucugugggua

SEQ ID NO: 2356909 - RNA, 19 nt, Artificial Sequence
  Description of Artificial Sequence: Synthetic oligonucleotide
  Antisense strand to SEQ ID NO: 2356908
uacccacagaucauugacc

SEQ ID NO: 2356910 - RNA, 19 nt, Artificial Sequence
  Description of Artificial Sequence: Synthetic oligonucleotide
  Sense strand starting at position 821 of SEQ ID NO: 1885637
gucaaugaucuguggguag

SEQ ID NO: 2356911 - RNA, 19 nt, Artificial Sequence
  Description of Artificial Sequence: Synthetic oligonucleotide
  Antisense strand to SEQ ID NO: 2356910
cuacccacagaucauugac

SEQ ID NO: 2356912 - RNA, 19 nt, Artificial Sequence
  Description of Artificial Sequence: Synthetic oligonucleotide
  Sense strand starting at position 823 of SEQ ID NO: 1885637
caaugaucuguggguagaa

SEQ ID NO: 2356913 - RNA, 19 nt, Artificial Sequence
  Description of Artificial Sequence: Synthetic oligonucleotide
  Antisense strand to SEQ ID NO: 2356912
uucuacccacagaucauug

SEQ ID NO: 2356914 - RNA, 19 nt, Artificial Sequence
  Description of Artificial Sequence: Synthetic oligonucleotide
  Sense strand starting at position 824 of SEQ ID NO: 1885637
aaugaucuguggguagaaa

SEQ ID NO: 2356915 - RNA, 19 nt, Artificial Sequence
  Description of Artificial Sequence: Synthetic oligonucleotide
  Antisense strand to SEQ ID NO: 2356914
uuucuacccacagaucauu

SEQ ID NO: 2356916 - RNA, 19 nt, Artificial Sequence
  Description of Artificial Sequence: Synthetic oligonucleotide
  Sense strand starting at position 1049 of SEQ ID NO: 1885637
uagaaugucugcucucaga

SEQ ID NO: 2356917 - RNA, 19 nt, Artificial Sequence
  Description of Artificial Sequence: Synthetic oligonucleotide
  Antisense strand to SEQ ID NO: 2356916
ucugagagcagacauucua

SEQ ID NO: 2356918 - RNA, 19 nt, Artificial Sequence
  Description of Artificial Sequence: Synthetic oligonucleotide
  Sense strand starting at position 1289 of SEQ ID NO: 1885637
gauucugaguggucccaac

SEQ ID NO: 2356919 - RNA, 19 nt, Artificial Sequence
  Description of Artificial Sequence: Synthetic oligonucleotide
  Antisense strand to SEQ ID NO: 2356918
guugggaccacucagaauc

SEQ ID NO: 2356920 - RNA, 19 nt, Artificial Sequence
  Description of Artificial Sequence: Synthetic oligonucleotide
  Sense strand starting at position 1469 of SEQ ID NO: 1885637
uggcaagcuuugucagaca

SEQ ID NO: 2356921 - RNA, 19 nt, Artificial Sequence
  Description of Artificial Sequence: Synthetic oligonucleotide
  Antisense strand to SEQ ID NO: 2356920
ugucugacaaagcuugcca

SEQ ID NO: 2356922 - RNA, 19 nt, Artificial Sequence
  Description of Artificial Sequence: Synthetic oligonucleotide
  Sense strand starting at position 1867 of SEQ ID NO: 1885637
cccacaucuucuccgaagu

SEQ ID NO: 2356923 - RNA, 19 nt, Artificial Sequence
  Description of Artificial Sequence: Synthetic oligonucleotide
  Antisense strand to SEQ ID NO: 2356922
acuucggagaagauguggg

SEQ ID NO: 2356924 - RNA, 19 nt, Artificial Sequence
  Description of Artificial Sequence: Synthetic oligonucleotide
  Sense strand starting at position 1868 of SEQ ID NO: 1885637
ccacaucuucuccgaaguu

SEQ ID NO: 2356925 - RNA, 19 nt, Artificial Sequence
  Description of Artificial Sequence: Synthetic oligonucleotide
  Antisense strand to SEQ ID NO: 2356924
aacuucggagaagaugugg

SEQ ID NO: 2356926 - RNA, 19 nt, Artificial Sequence
  Description of Artificial Sequence: Synthetic oligonucleotide
  Sense strand starting at position 2039 of SEQ ID NO: 1885637
guugcuagcguguccagaa

SEQ ID NO: 2356927 - RNA, 19 nt, Artificial Sequence
  Description of Artificial Sequence: Synthetic oligonucleotide
  Antisense strand to SEQ ID NO: 2356926
uucuggacacgcuagcaac

SEQ ID NO: 2356928 - RNA, 19 nt, Artificial Sequence
  Description of Artificial Sequence: Synthetic oligonucleotide
  Sense strand starting at position 2404 of SEQ ID NO: 1885637
cucuccuucgaguaucgaa

SEQ ID NO: 2356929 - RNA, 19 nt, Artificial Sequence
  Description of Artificial Sequence: Synthetic oligonucleotide
  Antisense strand to SEQ ID NO: 2356928
uucgauacucgaaggagag

SEQ ID NO: 2356930 - RNA, 19 nt, Artificial Sequence
  Description of Artificial Sequence: Synthetic oligonucleotide
  Sense strand starting at position 2490 of SEQ ID NO: 1885637
gugucaccuccaggaagau

SEQ ID NO: 2356931 - RNA, 19 nt, Artificial Sequence
  Description of Artificial Sequence: Synthetic oligonucleotide
  Antisense strand to SEQ ID NO: 2356930
aucuuccuggaggugacac

SEQ ID NO: 2356932 - RNA, 19 nt, Artificial Sequence
  Description of Artificial Sequence: Synthetic oligonucleotide
  Sense strand starting at position 2552 of SEQ ID NO: 1885637
cuucuauuugcguguccca

SEQ ID NO: 2356933 - RNA, 19 nt, Artificial Sequence
  Description of Artificial Sequence: Synthetic oligonucleotide
  Antisense strand to SEQ ID NO: 2356932
ugggacacgcaaauagaag

SEQ ID NO: 2356934 - RNA, 19 nt, Artificial Sequence
  Description of Artificial Sequence: Synthetic oligonucleotide
  Sense strand starting at position 2621 of SEQ ID NO: 1885637
agagguugcccgggaaaca

SEQ ID NO: 2356935 - RNA, 19 nt, Artificial Sequence
  Description of Artificial Sequence: Synthetic oligonucleotide
  Antisense strand to SEQ ID NO: 2356934
uguuucccgggcaaccucu

SEQ ID NO: 2356936 - RNA, 19 nt, Artificial Sequence
  Description of Artificial Sequence: Synthetic oligonucleotide
  Sense strand starting at position 2622 of SEQ ID NO: 1885637
gagguugcccgggaaacau

SEQ ID NO: 2356937 - RNA, 19 nt, Artificial Sequence
  Description of Artificial Sequence: Synthetic oligonucleotide
  Antisense strand to SEQ ID NO: 2356936
auguuucccgggcaaccuc

SEQ ID NO: 2356938 - RNA, 19 nt, Artificial Sequence
  Description of Artificial Sequence: Synthetic oligonucleotide
  Sense strand starting at position 2692 of SEQ ID NO: 1885637
agcuuuccugacgguggaa

SEQ ID NO: 2356939 - RNA, 19 nt, Artificial Sequence
  Description of Artificial Sequence: Synthetic oligonucleotide
  Antisense strand to SEQ ID NO: 2356938
uuccaccgucaggaaagcu

SEQ ID NO: 2356940 - RNA, 19 nt, Artificial Sequence
  Description of Artificial Sequence: Synthetic oligonucleotide
  Sense strand starting at position 2753 of SEQ ID NO: 1885637
uagucauaaugguuugcau

SEQ ID NO: 2356941 - RNA, 19 nt, Artificial Sequence
  Description of Artificial Sequence: Synthetic oligonucleotide
  Antisense strand to SEQ ID NO: 2356940
augcaaaccauuaugacua

SEQ ID NO: 2356942 - RNA, 19 nt, Artificial Sequence
  Description of Artificial Sequence: Synthetic oligonucleotide
  Sense strand starting at position 2776 of SEQ ID NO: 1885637
aagucagugcgucaagaga

SEQ ID NO: 2356943 - RNA, 19 nt, Artificial Sequence
  Description of Artificial Sequence: Synthetic oligonucleotide
  Antisense strand to SEQ ID NO: 2356942
ucucuugacgcacugacuu

SEQ ID NO: 2356944 - RNA, 19 nt, Artificial Sequence
  Description of Artificial Sequence: Synthetic oligonucleotide
  Sense strand starting at position 2791 of SEQ ID NO: 1885637
gagagcucaugaguaaauc

SEQ ID NO: 2356945 - RNA, 19 nt, Artificial Sequence
  Description of Artificial Sequence: Synthetic oligonucleotide
  Antisense strand to SEQ ID NO: 2356944
gauuuacucaugagcucuc

SEQ ID NO: 2356946 - RNA, 19 nt, Artificial Sequence
  Description of Artificial Sequence: Synthetic oligonucleotide
  Sense strand starting at position 2792 of SEQ ID NO: 1885637
agagcucaugaguaaaucu

SEQ ID NO: 2356947 - RNA, 19 nt, Artificial Sequence
  Description of Artificial Sequence: Synthetic oligonucleotide
  Antisense strand to SEQ ID NO: 2356946
agauuuacucaugagcucu

SEQ ID NO: 2356948 - RNA, 19 nt, Artificial Sequence
  Description of Artificial Sequence: Synthetic oligonucleotide
  Sense strand starting at position 2800 of SEQ ID NO: 1885637
ugaguaaaucucgaauucu

SEQ ID NO: 2356949 - RNA, 19 nt, Artificial Sequence
  Description of Artificial Sequence: Synthetic oligonucleotide
  Antisense strand to SEQ ID NO: 2356948
agaauucgagauuuacuca

SEQ ID NO: 2356950 - RNA, 19 nt, Artificial Sequence
  Description of Artificial Sequence: Synthetic oligonucleotide
  Sense strand starting at position 2811 of SEQ ID NO: 1885637
cgaauucuguggucaagaa

SEQ ID NO: 2356951 - RNA, 19 nt, Artificial Sequence
  Description of Artificial Sequence: Synthetic oligonucleotide
  Antisense strand to SEQ ID NO: 2356950
uucuugaccacagaauucg

SEQ ID NO: 2356952 - RNA, 19 nt, Artificial Sequence
  Description of Artificial Sequence: Synthetic oligonucleotide
  Sense strand starting at position 2929 of SEQ ID NO: 1885637
gauacauggcaccgaggaa

SEQ ID NO: 2356953 - RNA, 19 nt, Artificial Sequence
  Description of Artificial Sequence: Synthetic oligonucleotide
  Antisense strand to SEQ ID NO: 2356952
uuccucggugccauguauc

SEQ ID NO: 2356954 - RNA, 19 nt, Artificial Sequence
  Description of Artificial Sequence: Synthetic oligonucleotide
  Sense strand starting at position 3206 of SEQ ID NO: 1885637
ggaguacuguuaucuccag

SEQ ID NO: 2356955 - RNA, 19 nt, Artificial Sequence
  Description of Artificial Sequence: Synthetic oligonucleotide
  Antisense strand to SEQ ID NO: 2356954
cuggagauaacaguacucc

SEQ ID NO: 2356956 - RNA, 19 nt, Artificial Sequence
  Description of Artificial Sequence: Synthetic oligonucleotide
  Sense strand starting at position 3207 of SEQ ID NO: 1885637
gaguacuguuaucuccaga

SEQ ID NO: 2356957 - RNA, 19 nt, Artificial Sequence
  Description of Artificial Sequence: Synthetic oligonucleotide
  Antisense strand to SEQ ID NO: 2356956
ucuggagauaacaguacuc

SEQ ID NO: 2356958 - RNA, 19 nt, Artificial Sequence
  Description of Artificial Sequence: Synthetic oligonucleotide
  Sense strand starting at position 3212 of SEQ ID NO: 1885637
cuguuaucuccagacucuu

SEQ ID NO: 2356959 - RNA, 19 nt, Artificial Sequence
  Description of Artificial Sequence: Synthetic oligonucleotide
  Antisense strand to SEQ ID NO: 2356958
aagagucuggagauaacag

SEQ ID NO: 2356960 - RNA, 19 nt, Artificial Sequence
  Description of Artificial Sequence: Synthetic oligonucleotide
  Sense strand starting at position 3240 of SEQ ID NO: 1885637
aacagagaguuagaucaau

SEQ ID NO: 2356961 - RNA, 19 nt, Artificial Sequence
  Description of Artificial Sequence: Synthetic oligonucleotide
  Antisense strand to SEQ ID NO: 2356960
auugaucuaacucucuguu

SEQ ID NO: 2356962 - RNA, 19 nt, Artificial Sequence
  Description of Artificial Sequence: Synthetic oligonucleotide
  Sense strand starting at position 3356 of SEQ ID NO: 1885637
ggagcagaggucugagaag

SEQ ID NO: 2356963 - RNA, 19 nt, Artificial Sequence
  Description of Artificial Sequence: Synthetic oligonucleotide
  Antisense strand to SEQ ID NO: 2356962
cuucucagaccucugcucc

SEQ ID NO: 2356964 - RNA, 19 nt, Artificial Sequence
  Description of Artificial Sequence: Synthetic oligonucleotide
  Sense strand starting at position 3515 of SEQ ID NO: 1885637
gucacauggccuugacaca

SEQ ID NO: 2356965 - RNA, 19 nt, Artificial Sequence
  Description of Artificial Sequence: Synthetic oligonucleotide
  Antisense strand to SEQ ID NO: 2356964
ugugucaaggccaugugac

SEQ ID NO: 2356966 - RNA, 19 nt, Artificial Sequence
  Description of Artificial Sequence: Synthetic oligonucleotide
  Sense strand starting at position 3639 of SEQ ID NO: 1885637
auauguucucucugguuau

SEQ ID NO: 2356967 - RNA, 19 nt, Artificial Sequence
  Description of Artificial Sequence: Synthetic oligonucleotide
  Antisense strand to SEQ ID NO: 2356966
auaaccagagagaacauau

SEQ ID NO: 2356968 - RNA, 19 nt, Artificial Sequence
  Description of Artificial Sequence: Synthetic oligonucleotide
  Sense strand starting at position 3642 of SEQ ID NO: 1885637
uguucucucugguuauaaa

SEQ ID NO: 2356969 - RNA, 19 nt, Artificial Sequence
  Description of Artificial Sequence: Synthetic oligonucleotide
  Antisense strand to SEQ ID NO: 2356968
uuuauaaccagagagaaca

SEQ ID NO: 2356970 - RNA, 19 nt, Artificial Sequence
  Description of Artificial Sequence: Synthetic oligonucleotide
  Sense strand starting at position 3908 of SEQ ID NO: 1885637
gcauuacugccagacagga

SEQ ID NO: 2356971 - RNA, 19 nt, Artificial Sequence
  Description of Artificial Sequence: Synthetic oligonucleotide
  Antisense strand to SEQ ID NO: 2356970
uccugucuggcaguaaugc

SEQ ID NO: 2356972 - RNA, 19 nt, Artificial Sequence
  Description of Artificial Sequence: Synthetic oligonucleotide
  Sense strand starting at position 3974 of SEQ ID NO: 1885637
gggccugacaacugucuua

SEQ ID NO: 2356973 - RNA, 19 nt, Artificial Sequence
  Description of Artificial Sequence: Synthetic oligonucleotide
  Antisense strand to SEQ ID NO: 2356972
uaagacaguugucaggccc

SEQ ID NO: 2356974 - RNA, 19 nt, Artificial Sequence
  Description of Artificial Sequence: Synthetic oligonucleotide
  Sense strand starting at position 3981 of SEQ ID NO: 1885637
acaacugucuuauccggaa

SEQ ID NO: 2356975 - RNA, 19 nt, Artificial Sequence
  Description of Artificial Sequence: Synthetic oligonucleotide
  Antisense strand to SEQ ID NO: 2356974
uuccggauaagacaguugu

SEQ ID NO: 2356976 - RNA, 19 nt, Artificial Sequence
  Description of Artificial Sequence: Synthetic oligonucleotide
  Sense strand starting at position 82 of SEQ ID NO: 1885638
gccgaaagagccugaauua

SEQ ID NO: 2356977 - RNA, 19 nt, Artificial Sequence
  Description of Artificial Sequence: Synthetic oligonucleotide
  Antisense strand to SEQ ID NO: 2356976
uaauucaggcucuuucggc

SEQ ID NO: 2356978 - RNA, 19 nt, Artificial Sequence
  Description of Artificial Sequence: Synthetic oligonucleotide
  Sense strand starting at position 83 of SEQ ID NO: 1885638
ccgaaagagccugaauuac

SEQ ID NO: 2356979 - RNA, 19 nt, Artificial Sequence
  Description of Artificial Sequence: Synthetic oligonucleotide
  Antisense strand to SEQ ID NO: 2356978
guaauucaggcucuuucgg

SEQ ID NO: 2356980 - RNA, 19 nt, Artificial Sequence
  Description of Artificial Sequence: Synthetic oligonucleotide
  Sense strand starting at position 240 of SEQ ID NO: 1885638
gaggguuagcgcaaucggu

SEQ ID NO: 2356981 - RNA, 19 nt, Artificial Sequence
  Description of Artificial Sequence: Synthetic oligonucleotide
  Antisense strand to SEQ ID NO: 2356980
accgauugcgcuaacccuc

SEQ ID NO: 2356982 - RNA, 19 nt, Artificial Sequence
  Description of Artificial Sequence: Synthetic oligonucleotide
  Sense strand starting at position 303 of SEQ ID NO: 1885638
gcucgugucuccuuauuua

SEQ ID NO: 2356983 - RNA, 19 nt, Artificial Sequence
  Description of Artificial Sequence: Synthetic oligonucleotide
  Antisense strand to SEQ ID NO: 2356982
uaaauaaggagacacgagc

SEQ ID NO: 2356984 - RNA, 19 nt, Artificial Sequence
  Description of Artificial Sequence: Synthetic oligonucleotide
  Sense strand starting at position 306 of SEQ ID NO: 1885638
cgugucuccuuauuuaugu

SEQ ID NO: 2356985 - RNA, 19 nt, Artificial Sequence
  Description of Artificial Sequence: Synthetic oligonucleotide
  Antisense strand to SEQ ID NO: 2356984
acauaaauaaggagacacg

SEQ ID NO: 2356986 - RNA, 19 nt, Artificial Sequence
  Description of Artificial Sequence: Synthetic oligonucleotide
  Sense strand starting at position 526 of SEQ ID NO: 1885638
aguccuguuaaauacggau

SEQ ID NO: 2356987 - RNA, 19 nt, Artificial Sequence
  Description of Artificial Sequence: Synthetic oligonucleotide
  Antisense strand to SEQ ID NO: 2356986
auccguauuuaacaggacu

SEQ ID NO: 2356988 - RNA, 19 nt, Artificial Sequence
  Description of Artificial Sequence: Synthetic oligonucleotide
  Sense strand starting at position 599 of SEQ ID NO: 1885638
cuucgugguuaaccauaga

SEQ ID NO: 2356989 - RNA, 19 nt, Artificial Sequence
  Description of Artificial Sequence: Synthetic oligonucleotide
  Antisense strand to SEQ ID NO: 2356988
ucuaugguuaaccacgaag

SEQ ID NO: 2356990 - RNA, 19 nt, Artificial Sequence
  Description of Artificial Sequence: Synthetic oligonucleotide
  Sense strand starting at position 871 of SEQ ID NO: 1885638
agcguuaguuaguugauuu

SEQ ID NO: 2356991 - RNA, 19 nt, Artificial Sequence
  Description of Artificial Sequence: Synthetic oligonucleotide
  Antisense strand to SEQ ID NO: 2356990
aaaucaacuaacuaacgcu

SEQ ID NO: 2356992 - RNA, 19 nt, Artificial Sequence
  Description of Artificial Sequence: Synthetic oligonucleotide
  Sense strand starting at position 872 of SEQ ID NO: 1885638
gcguuaguuaguugauuug

SEQ ID NO: 2356993 - RNA, 19 nt, Artificial Sequence
  Description of Artificial Sequence: Synthetic oligonucleotide
  Antisense strand to SEQ ID NO: 2356992
caaaucaacuaacuaacgc

SEQ ID NO: 2356994 - RNA, 19 nt, Artificial Sequence
  Description of Artificial Sequence: Synthetic oligonucleotide
  Sense strand starting at position 878 of SEQ ID NO: 1885638
guuaguugauuugccggaa

SEQ ID NO: 2356995 - RNA, 19 nt, Artificial Sequence
  Description of Artificial Sequence: Synthetic oligonucleotide
  Antisense strand to SEQ ID NO: 2356994
uuccggcaaaucaacuaac

SEQ ID NO: 2356996 - RNA, 19 nt, Artificial Sequence
  Description of Artificial Sequence: Synthetic oligonucleotide
  Sense strand starting at position 1028 of SEQ ID NO: 1885638
cagcuaucgcguuuagggu

SEQ ID NO: 2356997 - RNA, 19 nt, Artificial Sequence
  Description of Artificial Sequence: Synthetic oligonucleotide
  Antisense strand to SEQ ID NO: 2356996
acccuaaacgcgauagcug

SEQ ID NO: 2356998 - RNA, 19 nt, Artificial Sequence
  Description of Artificial Sequence: Synthetic oligonucleotide
  Sense strand starting at position 1218 of SEQ ID NO: 1885638
aggacuuugggaugguaua

SEQ ID NO: 2356999 - RNA, 19 nt, Artificial Sequence
  Description of Artificial Sequence: Synthetic oligonucleotide
  Antisense strand to SEQ ID NO: 2356998
uauaccaucccaaaguccu

SEQ ID NO: 2357000 - RNA, 19 nt, Artificial Sequence
  Description of Artificial Sequence: Synthetic oligonucleotide
  Sense strand starting at position 1429 of SEQ ID NO: 1885638
acaccucuuccaggaaguu

SEQ ID NO: 2357001 - RNA, 19 nt, Artificial Sequence
  Description of Artificial Sequence: Synthetic oligonucleotide
  Antisense strand to SEQ ID NO: 2357000
aacuuccuggaagaggugu

SEQ ID NO: 2357002 - RNA, 19 nt, Artificial Sequence
  Description of Artificial Sequence: Synthetic oligonucleotide
  Sense strand starting at position 1628 of SEQ ID NO: 1885638
gugaguuaucgucacacac

SEQ ID NO: 2357003 - RNA, 19 nt, Artificial Sequence
  Description of Artificial Sequence: Synthetic oligonucleotide
  Antisense strand to SEQ ID NO: 2357002
gugugugacgauaacucac

SEQ ID NO: 2357004 - RNA, 19 nt, Artificial Sequence
  Description of Artificial Sequence: Synthetic oligonucleotide
  Sense strand starting at position 1716 of SEQ ID NO: 1885638
ugauguuagcuccaggaaa

SEQ ID NO: 2357005 - RNA, 19 nt, Artificial Sequence
  Description of Artificial Sequence: Synthetic oligonucleotide
  Antisense strand to SEQ ID NO: 2357004
uuuccuggagcuaacauca

SEQ ID NO: 2357006 - RNA, 19 nt, Artificial Sequence
  Description of Artificial Sequence: Synthetic oligonucleotide
  Sense strand starting at position 1893 of SEQ ID NO: 1885638
gaagucuuccaaggcgaga

SEQ ID NO: 2357007 - RNA, 19 nt, Artificial Sequence
  Description of Artificial Sequence: Synthetic oligonucleotide
  Antisense strand to SEQ ID NO: 2357006
ucucgccuuggaagacuuc

SEQ ID NO: 2357008 - RNA, 19 nt, Artificial Sequence
  Description of Artificial Sequence: Synthetic oligonucleotide
  Sense strand starting at position 1902 of SEQ ID NO: 1885638
caaggcgagaugugauauu

SEQ ID NO: 2357009 - RNA, 19 nt, Artificial Sequence
  Description of Artificial Sequence: Synthetic oligonucleotide
  Antisense strand to SEQ ID NO: 2357008
aauaucacaucucgccuug

SEQ ID NO: 2357010 - RNA, 19 nt, Artificial Sequence
  Description of Artificial Sequence: Synthetic oligonucleotide
  Sense strand starting at position 2183 of SEQ ID NO: 1885638
ccaaauggccaauguaaua

SEQ ID NO: 2357011 - RNA, 19 nt, Artificial Sequence
  Description of Artificial Sequence: Synthetic oligonucleotide
  Antisense strand to SEQ ID NO: 2357010
uauuacauuggccauuugg

SEQ ID NO: 2357012 - RNA, 19 nt, Artificial Sequence
  Description of Artificial Sequence: Synthetic oligonucleotide
  Sense strand starting at position 2454 of SEQ ID NO: 1885638
ugggaagcccucuaugacu

SEQ ID NO: 2357013 - RNA, 19 nt, Artificial Sequence
  Description of Artificial Sequence: Synthetic oligonucleotide
  Antisense strand to SEQ ID NO: 2357012
agucauagagggcuuccca

SEQ ID NO: 2357014 - RNA, 19 nt, Artificial Sequence
  Description of Artificial Sequence: Synthetic oligonucleotide
  Sense strand starting at position 2459 of SEQ ID NO: 1885638
agcccucuaugacugaauu

SEQ ID NO: 2357015 - RNA, 19 nt, Artificial Sequence
  Description of Artificial Sequence: Synthetic oligonucleotide
  Antisense strand to SEQ ID NO: 2357014
aauucagucauagagggcu

SEQ ID NO: 2357016 - RNA, 19 nt, Artificial Sequence
  Description of Artificial Sequence: Synthetic oligonucleotide
  Sense strand starting at position 2469 of SEQ ID NO: 1885638
gacugaauuugauauugag

SEQ ID NO: 2357017 - RNA, 19 nt, Artificial Sequence
  Description of Artificial Sequence: Synthetic oligonucleotide
  Antisense strand to SEQ ID NO: 2357016
cucaauaucaaauucaguc

SEQ ID NO: 2357018 - RNA, 19 nt, Artificial Sequence
  Description of Artificial Sequence: Synthetic oligonucleotide
  Sense strand starting at position 2472 of SEQ ID NO: 1885638
ugaauuugauauugagaag

SEQ ID NO: 2357019 - RNA, 19 nt, Artificial Sequence
  Description of Artificial Sequence: Synthetic oligonucleotide
  Antisense strand to SEQ ID NO: 2357018
cuucucaauaucaaauuca

SEQ ID NO: 2357020 - RNA, 19 nt, Artificial Sequence
  Description of Artificial Sequence: Synthetic oligonucleotide
  Sense strand starting at position 2626 of SEQ ID NO: 1885638
ugaggccugauguaguauu

SEQ ID NO: 2357021 - RNA, 19 nt, Artificial Sequence
  Description of Artificial Sequence: Synthetic oligonucleotide
  Antisense strand to SEQ ID NO: 2357020
aauacuacaucaggccuca

SEQ ID NO: 2357022 - RNA, 19 nt, Artificial Sequence
  Description of Artificial Sequence: Synthetic oligonucleotide
  Sense strand starting at position 2659 of SEQ ID NO: 1885638
augcaaugucugccgcaga

SEQ ID NO: 2357023 - RNA, 19 nt, Artificial Sequence
  Description of Artificial Sequence: Synthetic oligonucleotide
  Antisense strand to SEQ ID NO: 2357022
ucugcggcagacauugcau

SEQ ID NO: 2357024 - RNA, 19 nt, Artificial Sequence
  Description of Artificial Sequence: Synthetic oligonucleotide
  Sense strand starting at position 2714 of SEQ ID NO: 1885638
ggagaugaugcuggaacua

SEQ ID NO: 2357025 - RNA, 19 nt, Artificial Sequence
  Description of Artificial Sequence: Synthetic oligonucleotide
  Antisense strand to SEQ ID NO: 2357024
uaguuccagcaucaucucc

SEQ ID NO: 2357026 - RNA, 19 nt, Artificial Sequence
  Description of Artificial Sequence: Synthetic oligonucleotide
  Sense strand starting at position 2727 of SEQ ID NO: 1885638
gaacuagugcuaugacuga

SEQ ID NO: 2357027 - RNA, 19 nt, Artificial Sequence
  Description of Artificial Sequence: Synthetic oligonucleotide
  Antisense strand to SEQ ID NO: 2357026
ucagucauagcacuaguuc

SEQ ID NO: 2357028 - RNA, 19 nt, Artificial Sequence
  Description of Artificial Sequence: Synthetic oligonucleotide
  Sense strand starting at position 2731 of SEQ ID NO: 1885638
uagugcuaugacugacacu

SEQ ID NO: 2357029 - RNA, 19 nt, Artificial Sequence
  Description of Artificial Sequence: Synthetic oligonucleotide
  Antisense strand to SEQ ID NO: 2357028
agugucagucauagcacua

SEQ ID NO: 2357030 - RNA, 19 nt, Artificial Sequence
  Description of Artificial Sequence: Synthetic oligonucleotide
  Sense strand starting at position 2888 of SEQ ID NO: 1885638
gugcuuugucuccuaagcu

SEQ ID NO: 2357031 - RNA, 19 nt, Artificial Sequence
  Description of Artificial Sequence: Synthetic oligonucleotide
  Antisense strand to SEQ ID NO: 2357030
agcuuaggagacaaagcac

SEQ ID NO: 2357032 - RNA, 19 nt, Artificial Sequence
  Description of Artificial Sequence: Synthetic oligonucleotide
  Sense strand starting at position 2922 of SEQ ID NO: 1885638
ggagacuuuccaggcugaa

SEQ ID NO: 2357033 - RNA, 19 nt, Artificial Sequence
  Description of Artificial Sequence: Synthetic oligonucleotide
  Antisense strand to SEQ ID NO: 2357032
uucagccuggaaagucucc

SEQ ID NO: 2357034 - RNA, 19 nt, Artificial Sequence
  Description of Artificial Sequence: Synthetic oligonucleotide
  Sense strand starting at position 2955 of SEQ ID NO: 1885638
agaaguagaccauguuaca

SEQ ID NO: 2357035 - RNA, 19 nt, Artificial Sequence
  Description of Artificial Sequence: Synthetic oligonucleotide
  Antisense strand to SEQ ID NO: 2357034
uguaacauggucuacuucu

SEQ ID NO: 2357036 - RNA, 19 nt, Artificial Sequence
  Description of Artificial Sequence: Synthetic oligonucleotide
  Sense strand starting at position 3136 of SEQ ID NO: 1885638
ggaggcacuuccucuguaa

SEQ ID NO: 2357037 - RNA, 19 nt, Artificial Sequence
  Description of Artificial Sequence: Synthetic oligonucleotide
  Antisense strand to SEQ ID NO: 2357036
uuacagaggaagugccucc

SEQ ID NO: 2357038 - RNA, 19 nt, Artificial Sequence
  Description of Artificial Sequence: Synthetic oligonucleotide
  Sense strand starting at position 3138 of SEQ ID NO: 1885638
aggcacuuccucuguaaac

SEQ ID NO: 2357039 - RNA, 19 nt, Artificial Sequence
  Description of Artificial Sequence: Synthetic oligonucleotide
  Antisense strand to SEQ ID NO: 2357038
guuuacagaggaagugccu

SEQ ID NO: 2357040 - RNA, 19 nt, Artificial Sequence
  Description of Artificial Sequence: Synthetic oligonucleotide
  Sense strand starting at position 3139 of SEQ ID NO: 1885638
ggcacuuccucuguaaaca

SEQ ID NO: 2357041 - RNA, 19 nt, Artificial Sequence
  Description of Artificial Sequence: Synthetic oligonucleotide
  Antisense strand to SEQ ID NO: 2357040
uguuuacagaggaagugcc

SEQ ID NO: 2357042 - RNA, 19 nt, Artificial Sequence
  Description of Artificial Sequence: Synthetic oligonucleotide
  Sense strand starting at position 3224 of SEQ ID NO: 1885638
ccgagauggcuagacuuga

SEQ ID NO: 2357043 - RNA, 19 nt, Artificial Sequence
  Description of Artificial Sequence: Synthetic oligonucleotide
  Antisense strand to SEQ ID NO: 2357042
ucaagucuagccaucucgg

SEQ ID NO: 2357044 - RNA, 19 nt, Artificial Sequence
  Description of Artificial Sequence: Synthetic oligonucleotide
  Sense strand starting at position 3228 of SEQ ID NO: 1885638
gauggcuagacuugagaug

SEQ ID NO: 2357045 - RNA, 19 nt, Artificial Sequence
  Description of Artificial Sequence: Synthetic oligonucleotide
  Antisense strand to SEQ ID NO: 2357044
caucucaagucuagccauc

SEQ ID NO: 2357046 - RNA, 19 nt, Artificial Sequence
  Description of Artificial Sequence: Synthetic oligonucleotide
  Sense strand starting at position 3287 of SEQ ID NO: 1885638
cgagucagugcgucuucaa

SEQ ID NO: 2357047 - RNA, 19 nt, Artificial Sequence
  Description of Artificial Sequence: Synthetic oligonucleotide
  Antisense strand to SEQ ID NO: 2357046
uugaagacgcacugacucg

SEQ ID NO: 2357048 - RNA, 19 nt, Artificial Sequence
  Description of Artificial Sequence: Synthetic oligonucleotide
  Sense strand starting at position 3363 of SEQ ID NO: 1885638
ccugaagucaucugaggag

SEQ ID NO: 2357049 - RNA, 19 nt, Artificial Sequence
  Description of Artificial Sequence: Synthetic oligonucleotide
  Antisense strand to SEQ ID NO: 2357048
cuccucagaugacuucagg

SEQ ID NO: 2357050 - RNA, 19 nt, Artificial Sequence
  Description of Artificial Sequence: Synthetic oligonucleotide
  Sense strand starting at position 3541 of SEQ ID NO: 1885638
guguuuggcacugaggaga

SEQ ID NO: 2357051 - RNA, 19 nt, Artificial Sequence
  Description of Artificial Sequence: Synthetic oligonucleotide
  Antisense strand to SEQ ID NO: 2357050
ucuccucagugccaaacac

SEQ ID NO: 2357052 - RNA, 19 nt, Artificial Sequence
  Description of Artificial Sequence: Synthetic oligonucleotide
  Sense strand starting at position 3668 of SEQ ID NO: 1885638
aggcuuucuccagggaggu

SEQ ID NO: 2357053 - RNA, 19 nt, Artificial Sequence
  Description of Artificial Sequence: Synthetic oligonucleotide
  Antisense strand to SEQ ID NO: 2357052
accucccuggagaaagccu

SEQ ID NO: 2357054 - RNA, 19 nt, Artificial Sequence
  Description of Artificial Sequence: Synthetic oligonucleotide
  Sense strand starting at position 3917 of SEQ ID NO: 1885638
gucauugagcaccauggaa

SEQ ID NO: 2357055 - RNA, 19 nt, Artificial Sequence
  Description of Artificial Sequence: Synthetic oligonucleotide
  Antisense strand to SEQ ID NO: 2357054
uuccauggugcucaaugac

SEQ ID NO: 2357056 - RNA, 19 nt, Artificial Sequence
  Description of Artificial Sequence: Synthetic oligonucleotide
  Sense strand starting at position 87 of SEQ ID NO: 1885639
gguugcucuggaggagaga

SEQ ID NO: 2357057 - RNA, 19 nt, Artificial Sequence
  Description of Artificial Sequence: Synthetic oligonucleotide
  Antisense strand to SEQ ID NO: 2357056
ucucuccuccagagcaacc

SEQ ID NO: 2357058 - RNA, 19 nt, Artificial Sequence
  Description of Artificial Sequence: Synthetic oligonucleotide
  Sense strand starting at position 158 of SEQ ID NO: 1885639
cagguucuguguuccaaag

SEQ ID NO: 2357059 - RNA, 19 nt, Artificial Sequence
  Description of Artificial Sequence: Synthetic oligonucleotide
  Antisense strand to SEQ ID NO: 2357058
cuuuggaacacagaaccug

SEQ ID NO: 2357060 - RNA, 19 nt, Artificial Sequence
  Description of Artificial Sequence: Synthetic oligonucleotide
  Sense strand starting at position 202 of SEQ ID NO: 1885639
uguccucaccugcauaaga

SEQ ID NO: 2357061 - RNA, 19 nt, Artificial Sequence
  Description of Artificial Sequence: Synthetic oligonucleotide
  Antisense strand to SEQ ID NO: 2357060
ucuuaugcaggugaggaca

SEQ ID NO: 2357062 - RNA, 19 nt, Artificial Sequence
  Description of Artificial Sequence: Synthetic oligonucleotide
  Sense strand starting at position 247 of SEQ ID NO: 1885639
agccuuguccaauauuaug

SEQ ID NO: 2357063 - RNA, 19 nt, Artificial Sequence
  Description of Artificial Sequence: Synthetic oligonucleotide
  Antisense strand to SEQ ID NO: 2357062
cauaauauuggacaaggcu

SEQ ID NO: 2357064 - RNA, 19 nt, Artificial Sequence
  Description of Artificial Sequence: Synthetic oligonucleotide
  Sense strand starting at position 283 of SEQ ID NO: 1885639
guguauucugugggcccaa

SEQ ID NO: 2357065 - RNA, 19 nt, Artificial Sequence
  Description of Artificial Sequence: Synthetic oligonucleotide
  Antisense strand to SEQ ID NO: 2357064
uugggcccacagaauacac

SEQ ID NO: 2357066 - RNA, 19 nt, Artificial Sequence
  Description of Artificial Sequence: Synthetic oligonucleotide
  Sense strand starting at position 372 of SEQ ID NO: 1885639
cuagaaagaguguggauca

SEQ ID NO: 2357067 - RNA, 19 nt, Artificial Sequence
  Description of Artificial Sequence: Synthetic oligonucleotide
  Antisense strand to SEQ ID NO: 2357066
ugauccacacucuuucuag

SEQ ID NO: 2357068 - RNA, 19 nt, Artificial Sequence
  Description of Artificial Sequence: Synthetic oligonucleotide
  Sense strand starting at position 716 of SEQ ID NO: 1885639
uugagagauuguccaguaa

SEQ ID NO: 2357069 - RNA, 19 nt, Artificial Sequence
  Description of Artificial Sequence: Synthetic oligonucleotide
  Antisense strand to SEQ ID NO: 2357068
uuacuggacaaucucucaa

SEQ ID NO: 2357070 - RNA, 19 nt, Artificial Sequence
  Description of Artificial Sequence: Synthetic oligonucleotide
  Sense strand starting at position 871 of SEQ ID NO: 1885639
agaggaugauuggcuaacu

SEQ ID NO: 2357071 - RNA, 19 nt, Artificial Sequence
  Description of Artificial Sequence: Synthetic oligonucleotide
  Antisense strand to SEQ ID NO: 2357070
aguuagccaaucauccucu

SEQ ID NO: 2357072 - RNA, 19 nt, Artificial Sequence
  Description of Artificial Sequence: Synthetic oligonucleotide
  Sense strand starting at position 1019 of SEQ ID NO: 1885639
gcuggcuucccucuacgua

SEQ ID NO: 2357073 - RNA, 19 nt, Artificial Sequence
  Description of Artificial Sequence: Synthetic oligonucleotide
  Antisense strand to SEQ ID NO: 2357072
uacguagagggaagccagc

SEQ ID NO: 2357074 - RNA, 19 nt, Artificial Sequence
  Description of Artificial Sequence: Synthetic oligonucleotide
  Sense strand starting at position 1075 of SEQ ID NO: 1885639
agagaaaucgccugacugg

SEQ ID NO: 2357075 - RNA, 19 nt, Artificial Sequence
  Description of Artificial Sequence: Synthetic oligonucleotide
  Antisense strand to SEQ ID NO: 2357074
ccagucaggcgauuucucu

SEQ ID NO: 2357076 - RNA, 19 nt, Artificial Sequence
  Description of Artificial Sequence: Synthetic oligonucleotide
  Sense strand starting at position 1397 of SEQ ID NO: 1885639
gcugucuccgucccgagaa

SEQ ID NO: 2357077 - RNA, 19 nt, Artificial Sequence
  Description of Artificial Sequence: Synthetic oligonucleotide
  Antisense strand to SEQ ID NO: 2357076
uucucgggacggagacagc

SEQ ID NO: 2357078 - RNA, 19 nt, Artificial Sequence
  Description of Artificial Sequence: Synthetic oligonucleotide
  Sense strand starting at position 47 of SEQ ID NO: 1885640
ugacaaugcuuuccgauuu

SEQ ID NO: 2357079 - RNA, 19 nt, Artificial Sequence
  Description of Artificial Sequence: Synthetic oligonucleotide
  Antisense strand to SEQ ID NO: 2357078
aaaucggaaagcauuguca

SEQ ID NO: 2357080 - RNA, 19 nt, Artificial Sequence
  Description of Artificial Sequence: Synthetic oligonucleotide
  Sense strand starting at position 119 of SEQ ID NO: 1885640
guuacuuguguguuauguu

SEQ ID NO: 2357081 - RNA, 19 nt, Artificial Sequence
  Description of Artificial Sequence: Synthetic oligonucleotide
  Antisense strand to SEQ ID NO: 2357080
aacauaacacacaaguaac

SEQ ID NO: 2357082 - RNA, 19 nt, Artificial Sequence
  Description of Artificial Sequence: Synthetic oligonucleotide
  Sense strand starting at position 124 of SEQ ID NO: 1885640
uuguguguuauguuuagcu

SEQ ID NO: 2357083 - RNA, 19 nt, Artificial Sequence
  Description of Artificial Sequence: Synthetic oligonucleotide
  Antisense strand to SEQ ID NO: 2357082
agcuaaacauaacacacaa

SEQ ID NO: 2357084 - RNA, 19 nt, Artificial Sequence
  Description of Artificial Sequence: Synthetic oligonucleotide
  Sense strand starting at position 196 of SEQ ID NO: 1885640
cccugugauuuguugucau

SEQ ID NO: 2357085 - RNA, 19 nt, Artificial Sequence
  Description of Artificial Sequence: Synthetic oligonucleotide
  Antisense strand to SEQ ID NO: 2357084
augacaacaaaucacaggg

SEQ ID NO: 2357086 - RNA, 19 nt, Artificial Sequence
  Description of Artificial Sequence: Synthetic oligonucleotide
  Sense strand starting at position 225 of SEQ ID NO: 1885640
agcugagcuucuuuauaga

SEQ ID NO: 2357087 - RNA, 19 nt, Artificial Sequence
  Description of Artificial Sequence: Synthetic oligonucleotide
  Antisense strand to SEQ ID NO: 2357086
ucuauaaagaagcucagcu

SEQ ID NO: 2357088 - RNA, 19 nt, Artificial Sequence
  Description of Artificial Sequence: Synthetic oligonucleotide
  Sense strand starting at position 290 of SEQ ID NO: 1885640
ugugaaagugccuauaaag

SEQ ID NO: 2357089 - RNA, 19 nt, Artificial Sequence
  Description of Artificial Sequence: Synthetic oligonucleotide
  Antisense strand to SEQ ID NO: 2357088
cuuuauaggcacuuucaca

SEQ ID NO: 2357090 - RNA, 19 nt, Artificial Sequence
  Description of Artificial Sequence: Synthetic oligonucleotide
  Sense strand starting at position 361 of SEQ ID NO: 1885640
ggauaagcccagugucaau

SEQ ID NO: 2357091 - RNA, 19 nt, Artificial Sequence
  Description of Artificial Sequence: Synthetic oligonucleotide
  Antisense strand to SEQ ID NO: 2357090
auugacacugggcuuaucc

SEQ ID NO: 2357092 - RNA, 19 nt, Artificial Sequence
  Description of Artificial Sequence: Synthetic oligonucleotide
  Sense strand starting at position 399 of SEQ ID NO: 1885640
gggcaugaauccuugaggu

SEQ ID NO: 2357093 - RNA, 19 nt, Artificial Sequence
  Description of Artificial Sequence: Synthetic oligonucleotide
  Antisense strand to SEQ ID NO: 2357092
accucaaggauucaugccc

SEQ ID NO: 2357094 - RNA, 19 nt, Artificial Sequence
  Description of Artificial Sequence: Synthetic oligonucleotide
  Sense strand starting at position 401 of SEQ ID NO: 1885640
gcaugaauccuugaggugu

SEQ ID NO: 2357095 - RNA, 19 nt, Artificial Sequence
  Description of Artificial Sequence: Synthetic oligonucleotide
  Antisense strand to SEQ ID NO: 2357094
acaccucaaggauucaugc

SEQ ID NO: 2357096 - RNA, 19 nt, Artificial Sequence
  Description of Artificial Sequence: Synthetic oligonucleotide
  Sense strand starting at position 430 of SEQ ID NO: 1885640
gggcgacugauaugacagu

SEQ ID NO: 2357097 - RNA, 19 nt, Artificial Sequence
  Description of Artificial Sequence: Synthetic oligonucleotide
  Antisense strand to SEQ ID NO: 2357096
acugucauaucagucgccc

SEQ ID NO: 2357098 - RNA, 19 nt, Artificial Sequence
  Description of Artificial Sequence: Synthetic oligonucleotide
  Sense strand starting at position 478 of SEQ ID NO: 1885640
uggugagcaccuugaggaa

SEQ ID NO: 2357099 - RNA, 19 nt, Artificial Sequence
  Description of Artificial Sequence: Synthetic oligonucleotide
  Antisense strand to SEQ ID NO: 2357098
uuccucaaggugcucacca

SEQ ID NO: 2357100 - RNA, 19 nt, Artificial Sequence
  Description of Artificial Sequence: Synthetic oligonucleotide
  Sense strand starting at position 538 of SEQ ID NO: 1885640
agcauagugccugaucuac

SEQ ID NO: 2357101 - RNA, 19 nt, Artificial Sequence
  Description of Artificial Sequence: Synthetic oligonucleotide
  Antisense strand to SEQ ID NO: 2357100
guagaucaggcacuaugcu

SEQ ID NO: 2357102 - RNA, 19 nt, Artificial Sequence
  Description of Artificial Sequence: Synthetic oligonucleotide
  Sense strand starting at position 971 of SEQ ID NO: 1885640
guagguuuccuguauacag

SEQ ID NO: 2357103 - RNA, 19 nt, Artificial Sequence
  Description of Artificial Sequence: Synthetic oligonucleotide
  Antisense strand to SEQ ID NO: 2357102
cuguauacaggaaaccuac

SEQ ID NO: 2357104 - RNA, 19 nt, Artificial Sequence
  Description of Artificial Sequence: Synthetic oligonucleotide
  Sense strand starting at position 973 of SEQ ID NO: 1885640
agguuuccuguauacagau

SEQ ID NO: 2357105 - RNA, 19 nt, Artificial Sequence
  Description of Artificial Sequence: Synthetic oligonucleotide
  Antisense strand to SEQ ID NO: 2357104
aucuguauacaggaaaccu

SEQ ID NO: 2357106 - RNA, 19 nt, Artificial Sequence
  Description of Artificial Sequence: Synthetic oligonucleotide
  Sense strand starting at position 1064 of SEQ ID NO: 1885640
uucccuguaucacugauga

SEQ ID NO: 2357107 - RNA, 19 nt, Artificial Sequence
  Description of Artificial Sequence: Synthetic oligonucleotide
  Antisense strand to SEQ ID NO: 2357106
ucaucagugauacagggaa

SEQ ID NO: 2357108 - RNA, 19 nt, Artificial Sequence
  Description of Artificial Sequence: Synthetic oligonucleotide
  Sense strand starting at position 1144 of SEQ ID NO: 1885640
gagucagaaucuguacuca

SEQ ID NO: 2357109 - RNA, 19 nt, Artificial Sequence
  Description of Artificial Sequence: Synthetic oligonucleotide
  Antisense strand to SEQ ID NO: 2357108
ugaguacagauucugacuc

SEQ ID NO: 2357110 - RNA, 19 nt, Artificial Sequence
  Description of Artificial Sequence: Synthetic oligonucleotide
  Sense strand starting at position 1162 of SEQ ID NO: 1885640
aggucuaucuggcuccaga

SEQ ID NO: 2357111 - RNA, 19 nt, Artificial Sequence
  Description of Artificial Sequence: Synthetic oligonucleotide
  Antisense strand to SEQ ID NO: 2357110
ucuggagccagauagaccu

SEQ ID NO: 2357112 - RNA, 19 nt, Artificial Sequence
  Description of Artificial Sequence: Synthetic oligonucleotide
  Sense strand starting at position 1206 of SEQ ID NO: 1885640
cugccuugcagaugaggaa

SEQ ID NO: 2357113 - RNA, 19 nt, Artificial Sequence
  Description of Artificial Sequence: Synthetic oligonucleotide
  Antisense strand to SEQ ID NO: 2357112
uuccucaucugcaaggcag

SEQ ID NO: 2357114 - RNA, 19 nt, Artificial Sequence
  Description of Artificial Sequence: Synthetic oligonucleotide
  Sense strand starting at position 1224 of SEQ ID NO: 1885640
aacucaagucugggagcaa

SEQ ID NO: 2357115 - RNA, 19 nt, Artificial Sequence
  Description of Artificial Sequence: Synthetic oligonucleotide
  Antisense strand to SEQ ID NO: 2357114
uugcucccagacuugaguu

SEQ ID NO: 2357116 - RNA, 19 nt, Artificial Sequence
  Description of Artificial Sequence: Synthetic oligonucleotide
  Sense strand starting at position 1236 of SEQ ID NO: 1885640
ggagcaaugacuugguuug

SEQ ID NO: 2357117 - RNA, 19 nt, Artificial Sequence
  Description of Artificial Sequence: Synthetic oligonucleotide
  Antisense strand to SEQ ID NO: 2357116
caaaccaagucauugcucc

SEQ ID NO: 2357118 - RNA, 19 nt, Artificial Sequence
  Description of Artificial Sequence: Synthetic oligonucleotide
  Sense strand starting at position 1241 of SEQ ID NO: 1885640
aaugacuugguuuggucua

SEQ ID NO: 2357119 - RNA, 19 nt, Artificial Sequence
  Description of Artificial Sequence: Synthetic oligonucleotide
  Antisense strand to SEQ ID NO: 2357118
uagaccaaaccaagucauu

SEQ ID NO: 2357120 - RNA, 19 nt, Artificial Sequence
  Description of Artificial Sequence: Synthetic oligonucleotide
  Sense strand starting at position 1346 of SEQ ID NO: 1885640
gccucacauuuagagggaa

SEQ ID NO: 2357121 - RNA, 19 nt, Artificial Sequence
  Description of Artificial Sequence: Synthetic oligonucleotide
  Antisense strand to SEQ ID NO: 2357120
uucccucuaaaugugaggc

SEQ ID NO: 2357122 - RNA, 19 nt, Artificial Sequence
  Description of Artificial Sequence: Synthetic oligonucleotide
  Sense strand starting at position 1827 of SEQ ID NO: 1885640
cucaguauccuagagucca

SEQ ID NO: 2357123 - RNA, 19 nt, Artificial Sequence
  Description of Artificial Sequence: Synthetic oligonucleotide
  Antisense strand to SEQ ID NO: 2357122
uggacucuaggauacugag

SEQ ID NO: 2357124 - RNA, 19 nt, Artificial Sequence
  Description of Artificial Sequence: Synthetic oligonucleotide
  Sense strand starting at position 2253 of SEQ ID NO: 1885640
cucaaugggucucauuuga

SEQ ID NO: 2357125 - RNA, 19 nt, Artificial Sequence
  Description of Artificial Sequence: Synthetic oligonucleotide
  Antisense strand to SEQ ID NO: 2357124
ucaaaugagacccauugag

SEQ ID NO: 2357126 - RNA, 19 nt, Artificial Sequence
  Description of Artificial Sequence: Synthetic oligonucleotide
  Sense strand starting at position 2350 of SEQ ID NO: 1885640
cugggaacucccugacuau

SEQ ID NO: 2357127 - RNA, 19 nt, Artificial Sequence
  Description of Artificial Sequence: Synthetic oligonucleotide
  Antisense strand to SEQ ID NO: 2357126
auagucagggaguucccag

SEQ ID NO: 2357128 - RNA, 19 nt, Artificial Sequence
  Description of Artificial Sequence: Synthetic oligonucleotide
  Sense strand starting at position 2581 of SEQ ID NO: 1885640
cgcugugugccaguacuca

SEQ ID NO: 2357129 - RNA, 19 nt, Artificial Sequence
  Description of Artificial Sequence: Synthetic oligonucleotide
  Antisense strand to SEQ ID NO: 2357128
ugaguacuggcacacagcg

SEQ ID NO: 2357130 - RNA, 19 nt, Artificial Sequence
  Description of Artificial Sequence: Synthetic oligonucleotide
  Sense strand starting at position 2666 of SEQ ID NO: 1885640
accauuugcucugugcuga

SEQ ID NO: 2357131 - RNA, 19 nt, Artificial Sequence
  Description of Artificial Sequence: Synthetic oligonucleotide
  Antisense strand to SEQ ID NO: 2357130
ucagcacagagcaaauggu

SEQ ID NO: 2357132 - RNA, 19 nt, Artificial Sequence
  Description of Artificial Sequence: Synthetic oligonucleotide
  Sense strand starting at position 2707 of SEQ ID NO: 1885640
gaaauaaacugguucugug

SEQ ID NO: 2357133 - RNA, 19 nt, Artificial Sequence
  Description of Artificial Sequence: Synthetic oligonucleotide
  Antisense strand to SEQ ID NO: 2357132
cacagaaccaguuuauuuc

SEQ ID NO: 2357134 - RNA, 19 nt, Artificial Sequence
  Description of Artificial Sequence: Synthetic oligonucleotide
  Sense strand starting at position 3115 of SEQ ID NO: 1885640
uggugugauacagaccuca

SEQ ID NO: 2357135 - RNA, 19 nt, Artificial Sequence
  Description of Artificial Sequence: Synthetic oligonucleotide
  Antisense strand to SEQ ID NO: 2357134
ugaggucuguaucacacca

SEQ ID NO: 2357136 - RNA, 19 nt, Artificial Sequence
  Description of Artificial Sequence: Synthetic oligonucleotide
  Sense strand starting at position 3209 of SEQ ID NO: 1885640
ggaggaaggugccuauuaa

SEQ ID NO: 2357137 - RNA, 19 nt, Artificial Sequence
  Description of Artificial Sequence: Synthetic oligonucleotide
  Antisense strand to SEQ ID NO: 2357136
uuaauaggcaccuuccucc

SEQ ID NO: 2357138 - RNA, 19 nt, Artificial Sequence
  Description of Artificial Sequence: Synthetic oligonucleotide
  Sense strand starting at position 3216 of SEQ ID NO: 1885640
ggugccuauuaaucagaau

SEQ ID NO: 2357139 - RNA, 19 nt, Artificial Sequence
  Description of Artificial Sequence: Synthetic oligonucleotide
  Antisense strand to SEQ ID NO: 2357138
auucugauuaauaggcacc

SEQ ID NO: 2357140 - RNA, 19 nt, Artificial Sequence
  Description of Artificial Sequence: Synthetic oligonucleotide
  Sense strand starting at position 3261 of SEQ ID NO: 1885640
agacaaacuucucuugugu

SEQ ID NO: 2357141 - RNA, 19 nt, Artificial Sequence
  Description of Artificial Sequence: Synthetic oligonucleotide
  Antisense strand to SEQ ID NO: 2357140
acacaagagaaguuugucu

SEQ ID NO: 2357142 - RNA, 19 nt, Artificial Sequence
  Description of Artificial Sequence: Synthetic oligonucleotide
  Sense strand starting at position 3277 of SEQ ID NO: 1885640
uguuuaugccauuacacau

SEQ ID NO: 2357143 - RNA, 19 nt, Artificial Sequence
  Description of Artificial Sequence: Synthetic oligonucleotide
  Antisense strand to SEQ ID NO: 2357142
auguguaauggcauaaaca

SEQ ID NO: 2357144 - RNA, 19 nt, Artificial Sequence
  Description of Artificial Sequence: Synthetic oligonucleotide
  Sense strand starting at position 3325 of SEQ ID NO: 1885640
ugauccauggucugaagca

SEQ ID NO: 2357145 - RNA, 19 nt, Artificial Sequence
  Description of Artificial Sequence: Synthetic oligonucleotide
  Antisense strand to SEQ ID NO: 2357144
ugcuucagaccauggauca

SEQ ID NO: 2357146 - RNA, 19 nt, Artificial Sequence
  Description of Artificial Sequence: Synthetic oligonucleotide
  Sense strand starting at position 3422 of SEQ ID NO: 1885640
uugaguaggcaugauugga

SEQ ID NO: 2357147 - RNA, 19 nt, Artificial Sequence
  Description of Artificial Sequence: Synthetic oligonucleotide
  Antisense strand to SEQ ID NO: 2357146
uccaaucaugccuacucaa

SEQ ID NO: 2357148 - RNA, 19 nt, Artificial Sequence
  Description of Artificial Sequence: Synthetic oligonucleotide
  Sense strand starting at position 3430 of SEQ ID NO: 1885640
gcaugauuggagcagguuu

SEQ ID NO: 2357149 - RNA, 19 nt, Artificial Sequence
  Description of Artificial Sequence: Synthetic oligonucleotide
  Antisense strand to SEQ ID NO: 2357148
aaaccugcuccaaucaugc

SEQ ID NO: 2357150 - RNA, 19 nt, Artificial Sequence
  Description of Artificial Sequence: Synthetic oligonucleotide
  Sense strand starting at position 3545 of SEQ ID NO: 1885640
uccaguuucucagccaaga

SEQ ID NO: 2357151 - RNA, 19 nt, Artificial Sequence
  Description of Artificial Sequence: Synthetic oligonucleotide
  Antisense strand to SEQ ID NO: 2357150
ucuuggcugagaaacugga

SEQ ID NO: 2357152 - RNA, 19 nt, Artificial Sequence
  Description of Artificial Sequence: Synthetic oligonucleotide
  Sense strand starting at position 3826 of SEQ ID NO: 1885640
uggcuuuggaaaggucuaa

SEQ ID NO: 2357153 - RNA, 19 nt, Artificial Sequence
  Description of Artificial Sequence: Synthetic oligonucleotide
  Antisense strand to SEQ ID NO: 2357152
uuagaccuuuccaaagcca

SEQ ID NO: 2357154 - RNA, 19 nt, Artificial Sequence
  Description of Artificial Sequence: Synthetic oligonucleotide
  Sense strand starting at position 3859 of SEQ ID NO: 1885640
cugugucugagucauccua

SEQ ID NO: 2357155 - RNA, 19 nt, Artificial Sequence
  Description of Artificial Sequence: Synthetic oligonucleotide
  Antisense strand to SEQ ID NO: 2357154
uaggaugacucagacacag

SEQ ID NO: 2357156 - RNA, 19 nt, Artificial Sequence
  Description of Artificial Sequence: Synthetic oligonucleotide
  Sense strand starting at position 3867 of SEQ ID NO: 1885640
gagucauccuaagcaugga

SEQ ID NO: 2357157 - RNA, 19 nt, Artificial Sequence
  Description of Artificial Sequence: Synthetic oligonucleotide
  Antisense strand to SEQ ID NO: 2357156
uccaugcuuaggaugacuc

SEQ ID NO: 2357158 - RNA, 19 nt, Artificial Sequence
  Description of Artificial Sequence: Synthetic oligonucleotide
  Sense strand starting at position 4 of SEQ ID NO: 1885641
ugauuaguugggcaucuga

SEQ ID NO: 2357159 - RNA, 19 nt, Artificial Sequence
  Description of Artificial Sequence: Synthetic oligonucleotide
  Antisense strand to SEQ ID NO: 2357158
ucagaugcccaacuaauca

SEQ ID NO: 2357160 - RNA, 19 nt, Artificial Sequence
  Description of Artificial Sequence: Synthetic oligonucleotide
  Sense strand starting at position 13 of SEQ ID NO: 1885641
gggcaucugauuuguccuu

SEQ ID NO: 2357161 - RNA, 19 nt, Artificial Sequence
  Description of Artificial Sequence: Synthetic oligonucleotide
  Antisense strand to SEQ ID NO: 2357160
aaggacaaaucagaugccc

SEQ ID NO: 2357162 - RNA, 19 nt, Artificial Sequence
  Description of Artificial Sequence: Synthetic oligonucleotide
  Sense strand starting at position 15 of SEQ ID NO: 1885641
gcaucugauuuguccuuga

SEQ ID NO: 2357163 - RNA, 19 nt, Artificial Sequence
  Description of Artificial Sequence: Synthetic oligonucleotide
  Antisense strand to SEQ ID NO: 2357162
ucaaggacaaaucagaugc

SEQ ID NO: 2357164 - RNA, 19 nt, Artificial Sequence
  Description of Artificial Sequence: Synthetic oligonucleotide
  Sense strand starting at position 177 of SEQ ID NO: 1885641
uuuccauccgacgaaauga

SEQ ID NO: 2357165 - RNA, 19 nt, Artificial Sequence
  Description of Artificial Sequence: Synthetic oligonucleotide
  Antisense strand to SEQ ID NO: 2357164
ucauuucgucggauggaaa

SEQ ID NO: 2357166 - RNA, 19 nt, Artificial Sequence
  Description of Artificial Sequence: Synthetic oligonucleotide
  Sense strand starting at position 389 of SEQ ID NO: 1885641
ggaagagcugcccacugau

SEQ ID NO: 2357167 - RNA, 19 nt, Artificial Sequence
  Description of Artificial Sequence: Synthetic oligonucleotide
  Antisense strand to SEQ ID NO: 2357166
aucagugggcagcucuucc

SEQ ID NO: 2357168 - RNA, 19 nt, Artificial Sequence
  Description of Artificial Sequence: Synthetic oligonucleotide
  Sense strand starting at position 488 of SEQ ID NO: 1885641
ggaggagucaugcaacggu

SEQ ID NO: 2357169 - RNA, 19 nt, Artificial Sequence
  Description of Artificial Sequence: Synthetic oligonucleotide
  Antisense strand to SEQ ID NO: 2357168
accguugcaugacuccucc

SEQ ID NO: 2357170 - RNA, 19 nt, Artificial Sequence
  Description of Artificial Sequence: Synthetic oligonucleotide
  Sense strand starting at position 821 of SEQ ID NO: 1885641
cagagaauuccacgaguuc

SEQ ID NO: 2357171 - RNA, 19 nt, Artificial Sequence
  Description of Artificial Sequence: Synthetic oligonucleotide
  Antisense strand to SEQ ID NO: 2357170
gaacucguggaauucucug

SEQ ID NO: 2357172 - RNA, 19 nt, Artificial Sequence
  Description of Artificial Sequence: Synthetic oligonucleotide
  Sense strand starting at position 865 of SEQ ID NO: 1885641
agagcuacccaagaauguu

SEQ ID NO: 2357173 - RNA, 19 nt, Artificial Sequence
  Description of Artificial Sequence: Synthetic oligonucleotide
  Antisense strand to SEQ ID NO: 2357172
aacauucuuggguagcucu

SEQ ID NO: 2357174 - RNA, 19 nt, Artificial Sequence
  Description of Artificial Sequence: Synthetic oligonucleotide
  Sense strand starting at position 897 of SEQ ID NO: 1885641
cugagaguuggcuauguca

SEQ ID NO: 2357175 - RNA, 19 nt, Artificial Sequence
  Description of Artificial Sequence: Synthetic oligonucleotide
  Antisense strand to SEQ ID NO: 2357174
ugacauagccaacucucag

SEQ ID NO: 2357176 - RNA, 19 nt, Artificial Sequence
  Description of Artificial Sequence: Synthetic oligonucleotide
  Sense strand starting at position 904 of SEQ ID NO: 1885641
uuggcuaugucaucaauca

SEQ ID NO: 2357177 - RNA, 19 nt, Artificial Sequence
  Description of Artificial Sequence: Synthetic oligonucleotide
  Antisense strand to SEQ ID NO: 2357176
ugauugaugacauagccaa

SEQ ID NO: 2357178 - RNA, 19 nt, Artificial Sequence
  Description of Artificial Sequence: Synthetic oligonucleotide
  Sense strand starting at position 905 of SEQ ID NO: 1885641
uggcuaugucaucaaucac

SEQ ID NO: 2357179 - RNA, 19 nt, Artificial Sequence
  Description of Artificial Sequence: Synthetic oligonucleotide
  Antisense strand to SEQ ID NO: 2357178
gugauugaugacauagcca

SEQ ID NO: 2357180 - RNA, 19 nt, Artificial Sequence
  Description of Artificial Sequence: Synthetic oligonucleotide
  Sense strand starting at position 928 of SEQ ID NO: 1885641
ccggcuuggcauuagaaug

SEQ ID NO: 2357181 - RNA, 19 nt, Artificial Sequence
  Description of Artificial Sequence: Synthetic oligonucleotide
  Antisense strand to SEQ ID NO: 2357180
cauucuaaugccaagccgg

SEQ ID NO: 2357182 - RNA, 19 nt, Artificial Sequence
  Description of Artificial Sequence: Synthetic oligonucleotide
  Sense strand starting at position 935 of SEQ ID NO: 1885641
ggcauuagaaugggccaaa

SEQ ID NO: 2357183 - RNA, 19 nt, Artificial Sequence
  Description of Artificial Sequence: Synthetic oligonucleotide
  Antisense strand to SEQ ID NO: 2357182
uuuggcccauucuaaugcc

SEQ ID NO: 2357184 - RNA, 19 nt, Artificial Sequence
  Description of Artificial Sequence: Synthetic oligonucleotide
  Sense strand starting at position 1097 of SEQ ID NO: 1885641
ugaguacaucgaugaguuc

SEQ ID NO: 2357185 - RNA, 19 nt, Artificial Sequence
  Description of Artificial Sequence: Synthetic oligonucleotide
  Antisense strand to SEQ ID NO: 2357184
gaacucaucgauguacuca

SEQ ID NO: 2357186 - RNA, 19 nt, Artificial Sequence
  Description of Artificial Sequence: Synthetic oligonucleotide
  Sense strand starting at position 1106 of SEQ ID NO: 1885641
cgaugaguuccagagccug

SEQ ID NO: 2357187 - RNA, 19 nt, Artificial Sequence
  Description of Artificial Sequence: Synthetic oligonucleotide
  Antisense strand to SEQ ID NO: 2357186
caggcucuggaacucaucg

SEQ ID NO: 2357188 - RNA, 19 nt, Artificial Sequence
  Description of Artificial Sequence: Synthetic oligonucleotide
  Sense strand starting at position 1388 of SEQ ID NO: 1885641
aguccauccggacaucaau

SEQ ID NO: 2357189 - RNA, 19 nt, Artificial Sequence
  Description of Artificial Sequence: Synthetic oligonucleotide
  Antisense strand to SEQ ID NO: 2357188
auugauguccggauggacu

SEQ ID NO: 2357190 - RNA, 19 nt, Artificial Sequence
  Description of Artificial Sequence: Synthetic oligonucleotide
  Sense strand starting at position 1505 of SEQ ID NO: 1885641
ggaugagaaguucgcccaa

SEQ ID NO: 2357191 - RNA, 19 nt, Artificial Sequence
  Description of Artificial Sequence: Synthetic oligonucleotide
  Antisense strand to SEQ ID NO: 2357190
uugggcgaacuucucaucc

SEQ ID NO: 2357192 - RNA, 19 nt, Artificial Sequence
  Description of Artificial Sequence: Synthetic oligonucleotide
  Sense strand starting at position 1507 of SEQ ID NO: 1885641
augagaaguucgcccaaga

SEQ ID NO: 2357193 - RNA, 19 nt, Artificial Sequence
  Description of Artificial Sequence: Synthetic oligonucleotide
  Antisense strand to SEQ ID NO: 2357192
ucuugggcgaacuucucau

SEQ ID NO: 2357194 - RNA, 19 nt, Artificial Sequence
  Description of Artificial Sequence: Synthetic oligonucleotide
  Sense strand starting at position 1661 of SEQ ID NO: 1885641
cgaauuugacaucguaccu

SEQ ID NO: 2357195 - RNA, 19 nt, Artificial Sequence
  Description of Artificial Sequence: Synthetic oligonucleotide
  Antisense strand to SEQ ID NO: 2357194
agguacgaugucaaauucg

SEQ ID NO: 2357196 - RNA, 19 nt, Artificial Sequence
  Description of Artificial Sequence: Synthetic oligonucleotide
  Sense strand starting at position 1733 of SEQ ID NO: 1885641
cgaagucgacuggaucaaa

SEQ ID NO: 2357197 - RNA, 19 nt, Artificial Sequence
  Description of Artificial Sequence: Synthetic oligonucleotide
  Antisense strand to SEQ ID NO: 2357196
uuugauccagucgacuucg

SEQ ID NO: 2357198 - RNA, 19 nt, Artificial Sequence
  Description of Artificial Sequence: Synthetic oligonucleotide
  Sense strand starting at position 1771 of SEQ ID NO: 1885641
cucccuacugccugaagaa

SEQ ID NO: 2357199 - RNA, 19 nt, Artificial Sequence
  Description of Artificial Sequence: Synthetic oligonucleotide
  Antisense strand to SEQ ID NO: 2357198
uucuucaggcaguagggag

SEQ ID NO: 2357200 - RNA, 19 nt, Artificial Sequence
  Description of Artificial Sequence: Synthetic oligonucleotide
  Sense strand starting at position 1810 of SEQ ID NO: 1885641
caugcauugcccuagagag

SEQ ID NO: 2357201 - RNA, 19 nt, Artificial Sequence
  Description of Artificial Sequence: Synthetic oligonucleotide
  Antisense strand to SEQ ID NO: 2357200
cucucuagggcaaugcaug

SEQ ID NO: 2357202 - RNA, 19 nt, Artificial Sequence
  Description of Artificial Sequence: Synthetic oligonucleotide
  Sense strand starting at position 1883 of SEQ ID NO: 1885641
cguguuuaacccgaaggaa

SEQ ID NO: 2357203 - RNA, 19 nt, Artificial Sequence
  Description of Artificial Sequence: Synthetic oligonucleotide
  Antisense strand to SEQ ID NO: 2357202
uuccuucggguuaaacacg

SEQ ID NO: 2357204 - RNA, 19 nt, Artificial Sequence
  Description of Artificial Sequence: Synthetic oligonucleotide
  Sense strand starting at position 2144 of SEQ ID NO: 1885641
ggaacuguuugaccaguua

SEQ ID NO: 2357205 - RNA, 19 nt, Artificial Sequence
  Description of Artificial Sequence: Synthetic oligonucleotide
  Antisense strand to SEQ ID NO: 2357204
uaacuggucaaacaguucc

SEQ ID NO: 2357206 - RNA, 19 nt, Artificial Sequence
  Description of Artificial Sequence: Synthetic oligonucleotide
  Sense strand starting at position 2200 of SEQ ID NO: 1885641
ggaccauuguggaggaaag

SEQ ID NO: 2357207 - RNA, 19 nt, Artificial Sequence
  Description of Artificial Sequence: Synthetic oligonucleotide
  Antisense strand to SEQ ID NO: 2357206
cuuuccuccacaauggucc

SEQ ID NO: 2357208 - RNA, 19 nt, Artificial Sequence
  Description of Artificial Sequence: Synthetic oligonucleotide
  Sense strand starting at position 2234 of SEQ ID NO: 1885641
caccgaagauguguggaaa

SEQ ID NO: 2357209 - RNA, 19 nt, Artificial Sequence
  Description of Artificial Sequence: Synthetic oligonucleotide
  Antisense strand to SEQ ID NO: 2357208
uuuccacacaucuucggug

SEQ ID NO: 2357210 - RNA, 19 nt, Artificial Sequence
  Description of Artificial Sequence: Synthetic oligonucleotide
  Sense strand starting at position 2237 of SEQ ID NO: 1885641
cgaagauguguggaaagca

SEQ ID NO: 2357211 - RNA, 19 nt, Artificial Sequence
  Description of Artificial Sequence: Synthetic oligonucleotide
  Antisense strand to SEQ ID NO: 2357210
ugcuuuccacacaucuucg

SEQ ID NO: 2357212 - RNA, 19 nt, Artificial Sequence
  Description of Artificial Sequence: Synthetic oligonucleotide
  Sense strand starting at position 2366 of SEQ ID NO: 1885641
guucuuugugcuuucuuau

SEQ ID NO: 2357213 - RNA, 19 nt, Artificial Sequence
  Description of Artificial Sequence: Synthetic oligonucleotide
  Antisense strand to SEQ ID NO: 2357212
auaagaaagcacaaagaac

SEQ ID NO: 2357214 - RNA, 19 nt, Artificial Sequence
  Description of Artificial Sequence: Synthetic oligonucleotide
  Sense strand starting at position 2398 of SEQ ID NO: 1885641
ugaucuacucaaugaguca

SEQ ID NO: 2357215 - RNA, 19 nt, Artificial Sequence
  Description of Artificial Sequence: Synthetic oligonucleotide
  Antisense strand to SEQ ID NO: 2357214
ugacucauugaguagauca

SEQ ID NO: 2357216 - RNA, 19 nt, Artificial Sequence
  Description of Artificial Sequence: Synthetic oligonucleotide
  Sense strand starting at position 2473 of SEQ ID NO: 1885641
ucuacugcucccuggacaa

SEQ ID NO: 2357217 - RNA, 19 nt, Artificial Sequence
  Description of Artificial Sequence: Synthetic oligonucleotide
  Antisense strand to SEQ ID NO: 2357216
uuguccagggagcaguaga

SEQ ID NO: 2357218 - RNA, 19 nt, Artificial Sequence
  Description of Artificial Sequence: Synthetic oligonucleotide
  Sense strand starting at position 2564 of SEQ ID NO: 1885641
gaacgucaugaccaucaua

SEQ ID NO: 2357219 - RNA, 19 nt, Artificial Sequence
  Description of Artificial Sequence: Synthetic oligonucleotide
  Antisense strand to SEQ ID NO: 2357218
uaugauggucaugacguuc

SEQ ID NO: 2357220 - RNA, 19 nt, Artificial Sequence
  Description of Artificial Sequence: Synthetic oligonucleotide
  Sense strand starting at position 2567 of SEQ ID NO: 1885641
cgucaugaccaucauaaca

SEQ ID NO: 2357221 - RNA, 19 nt, Artificial Sequence
  Description of Artificial Sequence: Synthetic oligonucleotide
  Antisense strand to SEQ ID NO: 2357220
uguuaugauggucaugacg

SEQ ID NO: 2357222 - RNA, 19 nt, Artificial Sequence
  Description of Artificial Sequence: Synthetic oligonucleotide
  Sense strand starting at position 2899 of SEQ ID NO: 1885641
gcgcuuucuacucccgcaa

SEQ ID NO: 2357223 - RNA, 19 nt, Artificial Sequence
  Description of Artificial Sequence: Synthetic oligonucleotide
  Antisense strand to SEQ ID NO: 2357222
uugcgggaguagaaagcgc

SEQ ID NO: 2357224 - RNA, 19 nt, Artificial Sequence
  Description of Artificial Sequence: Synthetic oligonucleotide
  Sense strand starting at position 2931 of SEQ ID NO: 1885641
gagguugaguacucucaag

SEQ ID NO: 2357225 - RNA, 19 nt, Artificial Sequence
  Description of Artificial Sequence: Synthetic oligonucleotide
  Antisense strand to SEQ ID NO: 2357224
cuugagaguacucaaccuc

SEQ ID NO: 2357226 - RNA, 19 nt, Artificial Sequence
  Description of Artificial Sequence: Synthetic oligonucleotide
  Sense strand starting at position 2938 of SEQ ID NO: 1885641
aguacucucaagcggagau

SEQ ID NO: 2357227 - RNA, 19 nt, Artificial Sequence
  Description of Artificial Sequence: Synthetic oligonucleotide
  Antisense strand to SEQ ID NO: 2357226
aucuccgcuugagaguacu

SEQ ID NO: 2357228 - RNA, 19 nt, Artificial Sequence
  Description of Artificial Sequence: Synthetic oligonucleotide
  Sense strand starting at position 3166 of SEQ ID NO: 1885641
cucugccaccugugagaaa

SEQ ID NO: 2357229 - RNA, 19 nt, Artificial Sequence
  Description of Artificial Sequence: Synthetic oligonucleotide
  Antisense strand to SEQ ID NO: 2357228
uuucucacagguggcagag

SEQ ID NO: 2357230 - RNA, 19 nt, Artificial Sequence
  Description of Artificial Sequence: Synthetic oligonucleotide
  Sense strand starting at position 3177 of SEQ ID NO: 1885641
gugagaaaccuccggugga

SEQ ID NO: 2357231 - RNA, 19 nt, Artificial Sequence
  Description of Artificial Sequence: Synthetic oligonucleotide
  Antisense strand to SEQ ID NO: 2357230
uccaccggagguuucucac

SEQ ID NO: 2357232 - RNA, 19 nt, Artificial Sequence
  Description of Artificial Sequence: Synthetic oligonucleotide
  Sense strand starting at position 3335 of SEQ ID NO: 1885641
agagcugcuggccaugaua

SEQ ID NO: 2357233 - RNA, 19 nt, Artificial Sequence
  Description of Artificial Sequence: Synthetic oligonucleotide
  Antisense strand to SEQ ID NO: 2357232
uaucauggccagcagcucu

SEQ ID NO: 2357234 - RNA, 19 nt, Artificial Sequence
  Description of Artificial Sequence: Synthetic oligonucleotide
  Sense strand starting at position 3436 of SEQ ID NO: 1885641
gccuccuguacuggaagaa

SEQ ID NO: 2357235 - RNA, 19 nt, Artificial Sequence
  Description of Artificial Sequence: Synthetic oligonucleotide
  Antisense strand to SEQ ID NO: 2357234
uucuuccaguacaggaggc

SEQ ID NO: 2357236 - RNA, 19 nt, Artificial Sequence
  Description of Artificial Sequence: Synthetic oligonucleotide
  Sense strand starting at position 3564 of SEQ ID NO: 1885641
cgacucauccuggauucgu

SEQ ID NO: 2357237 - RNA, 19 nt, Artificial Sequence
  Description of Artificial Sequence: Synthetic oligonucleotide
  Antisense strand to SEQ ID NO: 2357236
acgaauccaggaugagucg

SEQ ID NO: 2357238 - RNA, 19 nt, Artificial Sequence
  Description of Artificial Sequence: Synthetic oligonucleotide
  Sense strand starting at position 64 of SEQ ID NO: 1885642
uugucaacaugucuaagaa

SEQ ID NO: 2357239 - RNA, 19 nt, Artificial Sequence
  Description of Artificial Sequence: Synthetic oligonucleotide
  Antisense strand to SEQ ID NO: 2357238
uucuuagacauguugacaa

SEQ ID NO: 2357240 - RNA, 19 nt, Artificial Sequence
  Description of Artificial Sequence: Synthetic oligonucleotide
  Sense strand starting at position 84 of SEQ ID NO: 1885642
uccuuccuccaugguaaga

SEQ ID NO: 2357241 - RNA, 19 nt, Artificial Sequence
  Description of Artificial Sequence: Synthetic oligonucleotide
  Antisense strand to SEQ ID NO: 2357240
ucuuaccauggaggaagga

SEQ ID NO: 2357242 - RNA, 19 nt, Artificial Sequence
  Description of Artificial Sequence: Synthetic oligonucleotide
  Sense strand starting at position 204 of SEQ ID NO: 1885642
gggucuugagcacagauca

SEQ ID NO: 2357243 - RNA, 19 nt, Artificial Sequence
  Description of Artificial Sequence: Synthetic oligonucleotide
  Antisense strand to SEQ ID NO: 2357242
ugaucugugcucaagaccc

SEQ ID NO: 2357244 - RNA, 19 nt, Artificial Sequence
  Description of Artificial Sequence: Synthetic oligonucleotide
  Sense strand starting at position 321 of SEQ ID NO: 1885642
guggaaccaacaugaguau

SEQ ID NO: 2357245 - RNA, 19 nt, Artificial Sequence
  Description of Artificial Sequence: Synthetic oligonucleotide
  Antisense strand to SEQ ID NO: 2357244
auacucauguugguuccac

SEQ ID NO: 2357246 - RNA, 19 nt, Artificial Sequence
  Description of Artificial Sequence: Synthetic oligonucleotide
  Sense strand starting at position 618 of SEQ ID NO: 1885642
aggauuagugugcacagaa

SEQ ID NO: 2357247 - RNA, 19 nt, Artificial Sequence
  Description of Artificial Sequence: Synthetic oligonucleotide
  Antisense strand to SEQ ID NO: 2357246
uucugugcacacuaauccu

SEQ ID NO: 2357248 - RNA, 19 nt, Artificial Sequence
  Description of Artificial Sequence: Synthetic oligonucleotide
  Sense strand starting at position 797 of SEQ ID NO: 1885642
gaauucucuggagggugua

SEQ ID NO: 2357249 - RNA, 19 nt, Artificial Sequence
  Description of Artificial Sequence: Synthetic oligonucleotide
  Antisense strand to SEQ ID NO: 2357248
uacacccuccagagaauuc

SEQ ID NO: 2357250 - RNA, 19 nt, Artificial Sequence
  Description of Artificial Sequence: Synthetic oligonucleotide
  Sense strand starting at position 903 of SEQ ID NO: 1885642
cuucuagaugcccaagauu

SEQ ID NO: 2357251 - RNA, 19 nt, Artificial Sequence
  Description of Artificial Sequence: Synthetic oligonucleotide
  Antisense strand to SEQ ID NO: 2357250
aaucuugggcaucuagaag

SEQ ID NO: 2357252 - RNA, 19 nt, Artificial Sequence
  Description of Artificial Sequence: Synthetic oligonucleotide
  Sense strand starting at position 929 of SEQ ID NO: 1885642
aagguugaauuugauagga

SEQ ID NO: 2357253 - RNA, 19 nt, Artificial Sequence
  Description of Artificial Sequence: Synthetic oligonucleotide
  Antisense strand to SEQ ID NO: 2357252
uccuaucaaauucaaccuu

SEQ ID NO: 2357254 - RNA, 19 nt, Artificial Sequence
  Description of Artificial Sequence: Synthetic oligonucleotide
  Sense strand starting at position 931 of SEQ ID NO: 1885642
gguugaauuugauaggaau

SEQ ID NO: 2357255 - RNA, 19 nt, Artificial Sequence
  Description of Artificial Sequence: Synthetic oligonucleotide
  Antisense strand to SEQ ID NO: 2357254
auuccuaucaaauucaacc

SEQ ID NO: 2357256 - RNA, 19 nt, Artificial Sequence
  Description of Artificial Sequence: Synthetic oligonucleotide
  Sense strand starting at position 1066 of SEQ ID NO: 1885642
cagcuuggacucuaaaguu

SEQ ID NO: 2357257 - RNA, 19 nt, Artificial Sequence
  Description of Artificial Sequence: Synthetic oligonucleotide
  Antisense strand to SEQ ID NO: 2357256
aacuuuagaguccaagcug

SEQ ID NO: 2357258 - RNA, 19 nt, Artificial Sequence
  Description of Artificial Sequence: Synthetic oligonucleotide
  Sense strand starting at position 1095 of SEQ ID NO: 1885642
uuacaugcauccucaggaa

SEQ ID NO: 2357259 - RNA, 19 nt, Artificial Sequence
  Description of Artificial Sequence: Synthetic oligonucleotide
  Antisense strand to SEQ ID NO: 2357258
uuccugaggaugcauguaa

SEQ ID NO: 2357260 - RNA, 19 nt, Artificial Sequence
  Description of Artificial Sequence: Synthetic oligonucleotide
  Sense strand starting at position 1184 of SEQ ID NO: 1885642
ggcagaauuugacacuaaa

SEQ ID NO: 2357261 - RNA, 19 nt, Artificial Sequence
  Description of Artificial Sequence: Synthetic oligonucleotide
  Antisense strand to SEQ ID NO: 2357260
uuuagugucaaauucugcc

SEQ ID NO: 2357262 - RNA, 19 nt, Artificial Sequence
  Description of Artificial Sequence: Synthetic oligonucleotide
  Sense strand starting at position 1288 of SEQ ID NO: 1885642
ugagaaauccauugccucu

SEQ ID NO: 2357263 - RNA, 19 nt, Artificial Sequence
  Description of Artificial Sequence: Synthetic oligonucleotide
  Antisense strand to SEQ ID NO: 2357262
agaggcaauggauuucuca

SEQ ID NO: 2357264 - RNA, 19 nt, Artificial Sequence
  Description of Artificial Sequence: Synthetic oligonucleotide
  Sense strand starting at position 1340 of SEQ ID NO: 1885642
guuaggaaugggugggaua

SEQ ID NO: 2357265 - RNA, 19 nt, Artificial Sequence
  Description of Artificial Sequence: Synthetic oligonucleotide
  Antisense strand to SEQ ID NO: 2357264
uaucccacccauuccuaac

SEQ ID NO: 2357266 - RNA, 19 nt, Artificial Sequence
  Description of Artificial Sequence: Synthetic oligonucleotide
  Sense strand starting at position 1342 of SEQ ID NO: 1885642
uaggaaugggugggauagu

SEQ ID NO: 2357267 - RNA, 19 nt, Artificial Sequence
  Description of Artificial Sequence: Synthetic oligonucleotide
  Antisense strand to SEQ ID NO: 2357266
acuaucccacccauuccua

SEQ ID NO: 2357268 - RNA, 19 nt, Artificial Sequence
  Description of Artificial Sequence: Synthetic oligonucleotide
  Sense strand starting at position 1593 of SEQ ID NO: 1885642
caggaugcuggguauuaga

SEQ ID NO: 2357269 - RNA, 19 nt, Artificial Sequence
  Description of Artificial Sequence: Synthetic oligonucleotide
  Antisense strand to SEQ ID NO: 2357268
ucuaauacccagcauccug

SEQ ID NO: 2357270 - RNA, 19 nt, Artificial Sequence
  Description of Artificial Sequence: Synthetic oligonucleotide
  Sense strand starting at position 1640 of SEQ ID NO: 1885642
gcacaugcucugggaagaa

SEQ ID NO: 2357271 - RNA, 19 nt, Artificial Sequence
  Description of Artificial Sequence: Synthetic oligonucleotide
  Antisense strand to SEQ ID NO: 2357270
uucuucccagagcaugugc

SEQ ID NO: 2357272 - RNA, 19 nt, Artificial Sequence
  Description of Artificial Sequence: Synthetic oligonucleotide
  Sense strand starting at position 1898 of SEQ ID NO: 1885642
uggaaagucuuccuggagu

SEQ ID NO: 2357273 - RNA, 19 nt, Artificial Sequence
  Description of Artificial Sequence: Synthetic oligonucleotide
  Antisense strand to SEQ ID NO: 2357272
acuccaggaagacuuucca

SEQ ID NO: 2357274 - RNA, 19 nt, Artificial Sequence
  Description of Artificial Sequence: Synthetic oligonucleotide
  Sense strand starting at position 1917 of SEQ ID NO: 1885642
gggagugaugcugaggguu

SEQ ID NO: 2357275 - RNA, 19 nt, Artificial Sequence
  Description of Artificial Sequence: Synthetic oligonucleotide
  Antisense strand to SEQ ID NO: 2357274
aacccucagcaucacuccc

SEQ ID NO: 2357276 - RNA, 19 nt, Artificial Sequence
  Description of Artificial Sequence: Synthetic oligonucleotide
  Sense strand starting at position 2160 of SEQ ID NO: 1885642
ggauuaucgggccagguga

SEQ ID NO: 2357277 - RNA, 19 nt, Artificial Sequence
  Description of Artificial Sequence: Synthetic oligonucleotide
  Antisense strand to SEQ ID NO: 2357276
ucaccuggcccgauaaucc

SEQ ID NO: 2357278 - RNA, 19 nt, Artificial Sequence
  Description of Artificial Sequence: Synthetic oligonucleotide
  Sense strand starting at position 2175 of SEQ ID NO: 1885642
gugacuuacagcuagguca

SEQ ID NO: 2357279 - RNA, 19 nt, Artificial Sequence
  Description of Artificial Sequence: Synthetic oligonucleotide
  Antisense strand to SEQ ID NO: 2357278
ugaccuagcuguaagucac

SEQ ID NO: 2357280 - RNA, 19 nt, Artificial Sequence
  Description of Artificial Sequence: Synthetic oligonucleotide
  Sense strand starting at position 2279 of SEQ ID NO: 1885642
ccaggaaguccuuagaggu

SEQ ID NO: 2357281 - RNA, 19 nt, Artificial Sequence
  Description of Artificial Sequence: Synthetic oligonucleotide
  Antisense strand to SEQ ID NO: 2357280
accucuaaggacuuccugg

SEQ ID NO: 2357282 - RNA, 19 nt, Artificial Sequence
  Description of Artificial Sequence: Synthetic oligonucleotide
  Sense strand starting at position 2285 of SEQ ID NO: 1885642
aguccuuagagguagcauu

SEQ ID NO: 2357283 - RNA, 19 nt, Artificial Sequence
  Description of Artificial Sequence: Synthetic oligonucleotide
  Antisense strand to SEQ ID NO: 2357282
aaugcuaccucuaaggacu

SEQ ID NO: 2357284 - RNA, 19 nt, Artificial Sequence
  Description of Artificial Sequence: Synthetic oligonucleotide
  Sense strand starting at position 2587 of SEQ ID NO: 1885642
uugaaauugugguccugaa

SEQ ID NO: 2357285 - RNA, 19 nt, Artificial Sequence
  Description of Artificial Sequence: Synthetic oligonucleotide
  Antisense strand to SEQ ID NO: 2357284
uucaggaccacaauuucaa

SEQ ID NO: 2357286 - RNA, 19 nt, Artificial Sequence
  Description of Artificial Sequence: Synthetic oligonucleotide
  Sense strand starting at position 2591 of SEQ ID NO: 1885642
aauugugguccugaaucca

SEQ ID NO: 2357287 - RNA, 19 nt, Artificial Sequence
  Description of Artificial Sequence: Synthetic oligonucleotide
  Antisense strand to SEQ ID NO: 2357286
uggauucaggaccacaauu

SEQ ID NO: 2357288 - RNA, 19 nt, Artificial Sequence
  Description of Artificial Sequence: Synthetic oligonucleotide
  Sense strand starting at position 2611 of SEQ ID NO: 1885642
acgcacaagguuuagaaau

SEQ ID NO: 2357289 - RNA, 19 nt, Artificial Sequence
  Description of Artificial Sequence: Synthetic oligonucleotide
  Antisense strand to SEQ ID NO: 2357288
auuucuaaaccuugugcgu

SEQ ID NO: 2357290 - RNA, 19 nt, Artificial Sequence
  Description of Artificial Sequence: Synthetic oligonucleotide
  Sense strand starting at position 2636 of SEQ ID NO: 1885642
agggaagccacuugucaca

SEQ ID NO: 2357291 - RNA, 19 nt, Artificial Sequence
  Description of Artificial Sequence: Synthetic oligonucleotide
  Antisense strand to SEQ ID NO: 2357290
ugugacaaguggcuucccu

SEQ ID NO: 2357292 - RNA, 19 nt, Artificial Sequence
  Description of Artificial Sequence: Synthetic oligonucleotide
  Sense strand starting at position 2728 of SEQ ID NO: 1885642
ugaguuauccaucaagcac

SEQ ID NO: 2357293 - RNA, 19 nt, Artificial Sequence
  Description of Artificial Sequence: Synthetic oligonucleotide
  Antisense strand to SEQ ID NO: 2357292
gugcuugauggauaacuca

SEQ ID NO: 2357294 - RNA, 19 nt, Artificial Sequence
  Description of Artificial Sequence: Synthetic oligonucleotide
  Sense strand starting at position 2888 of SEQ ID NO: 1885642
cuggguagauucucuauca

SEQ ID NO: 2357295 - RNA, 19 nt, Artificial Sequence
  Description of Artificial Sequence: Synthetic oligonucleotide
  Antisense strand to SEQ ID NO: 2357294
ugauagagaaucuacccag

SEQ ID NO: 2357296 - RNA, 19 nt, Artificial Sequence
  Description of Artificial Sequence: Synthetic oligonucleotide
  Sense strand starting at position 2889 of SEQ ID NO: 1885642
uggguagauucucuaucaa

SEQ ID NO: 2357297 - RNA, 19 nt, Artificial Sequence
  Description of Artificial Sequence: Synthetic oligonucleotide
  Antisense strand to SEQ ID NO: 2357296
uugauagagaaucuaccca

SEQ ID NO: 2357298 - RNA, 19 nt, Artificial Sequence
  Description of Artificial Sequence: Synthetic oligonucleotide
  Sense strand starting at position 3325 of SEQ ID NO: 1885642
cgucucuuccaccagaaug

SEQ ID NO: 2357299 - RNA, 19 nt, Artificial Sequence
  Description of Artificial Sequence: Synthetic oligonucleotide
  Antisense strand to SEQ ID NO: 2357298
cauucugguggaagagacg

SEQ ID NO: 2357300 - RNA, 19 nt, Artificial Sequence
  Description of Artificial Sequence: Synthetic oligonucleotide
  Sense strand starting at position 3393 of SEQ ID NO: 1885642
gguccagaaucaccuagaa

SEQ ID NO: 2357301 - RNA, 19 nt, Artificial Sequence
  Description of Artificial Sequence: Synthetic oligonucleotide
  Antisense strand to SEQ ID NO: 2357300
uucuaggugauucuggacc

SEQ ID NO: 2357302 - RNA, 19 nt, Artificial Sequence
  Description of Artificial Sequence: Synthetic oligonucleotide
  Sense strand starting at position 3427 of SEQ ID NO: 1885642
aucacuauuuauggaauga

SEQ ID NO: 2357303 - RNA, 19 nt, Artificial Sequence
  Description of Artificial Sequence: Synthetic oligonucleotide
  Antisense strand to SEQ ID NO: 2357302
ucauuccauaaauagugau

SEQ ID NO: 2357304 - RNA, 19 nt, Artificial Sequence
  Description of Artificial Sequence: Synthetic oligonucleotide
  Sense strand starting at position 3449 of SEQ ID NO: 1885642
agucauuccuuguuauuug

SEQ ID NO: 2357305 - RNA, 19 nt, Artificial Sequence
  Description of Artificial Sequence: Synthetic oligonucleotide
  Antisense strand to SEQ ID NO: 2357304
caaauaacaaggaaugacu

SEQ ID NO: 2357306 - RNA, 19 nt, Artificial Sequence
  Description of Artificial Sequence: Synthetic oligonucleotide
  Sense strand starting at position 3472 of SEQ ID NO: 1885642
acucaugaaccauguaguu

SEQ ID NO: 2357307 - RNA, 19 nt, Artificial Sequence
  Description of Artificial Sequence: Synthetic oligonucleotide
  Antisense strand to SEQ ID NO: 2357306
aacuacaugguucaugagu

SEQ ID NO: 2357308 - RNA, 19 nt, Artificial Sequence
  Description of Artificial Sequence: Synthetic oligonucleotide
  Sense strand starting at position 3485 of SEQ ID NO: 1885642
guaguuaugcuauaaacaa

SEQ ID NO: 2357309 - RNA, 19 nt, Artificial Sequence
  Description of Artificial Sequence: Synthetic oligonucleotide
  Antisense strand to SEQ ID NO: 2357308
uuguuuauagcauaacuac

SEQ ID NO: 2357310 - RNA, 19 nt, Artificial Sequence
  Description of Artificial Sequence: Synthetic oligonucleotide
  Sense strand starting at position 3546 of SEQ ID NO: 1885642
aaaucaugguggccaaagu

SEQ ID NO: 2357311 - RNA, 19 nt, Artificial Sequence
  Description of Artificial Sequence: Synthetic oligonucleotide
  Antisense strand to SEQ ID NO: 2357310
acuuuggccaccaugauuu

SEQ ID NO: 2357312 - RNA, 19 nt, Artificial Sequence
  Description of Artificial Sequence: Synthetic oligonucleotide
  Sense strand starting at position 3716 of SEQ ID NO: 1885642
ggcggugcugcuuccagaa

SEQ ID NO: 2357313 - RNA, 19 nt, Artificial Sequence
  Description of Artificial Sequence: Synthetic oligonucleotide
  Antisense strand to SEQ ID NO: 2357312
uucuggaagcagcaccgcc

SEQ ID NO: 2357314 - RNA, 19 nt, Artificial Sequence
  Description of Artificial Sequence: Synthetic oligonucleotide
  Sense strand starting at position 3820 of SEQ ID NO: 1885642
ggcugaugacaguaacacu

SEQ ID NO: 2357315 - RNA, 19 nt, Artificial Sequence
  Description of Artificial Sequence: Synthetic oligonucleotide
  Antisense strand to SEQ ID NO: 2357314
aguguuacugucaucagcc

SEQ ID NO: 2357316 - RNA, 19 nt, Artificial Sequence
  Description of Artificial Sequence: Synthetic oligonucleotide
  Sense strand starting at position 3845 of SEQ ID NO: 1885642
ccagcaugucuccagagau

SEQ ID NO: 2357317 - RNA, 19 nt, Artificial Sequence
  Description of Artificial Sequence: Synthetic oligonucleotide
  Antisense strand to SEQ ID NO: 2357316
aucucuggagacaugcugg

SEQ ID NO: 2357318 - RNA, 19 nt, Artificial Sequence
  Description of Artificial Sequence: Synthetic oligonucleotide
  Sense strand starting at position 2 of SEQ ID NO: 1885643
auauuagagguuuggaauu

SEQ ID NO: 2357319 - RNA, 19 nt, Artificial Sequence
  Description of Artificial Sequence: Synthetic oligonucleotide
  Antisense strand to SEQ ID NO: 2357318
aauuccaaaccucuaauau

SEQ ID NO: 2357320 - RNA, 19 nt, Artificial Sequence
  Description of Artificial Sequence: Synthetic oligonucleotide
  Sense strand starting at position 67 of SEQ ID NO: 1885643
gaguuaauuucugcaaugu

SEQ ID NO: 2357321 - RNA, 19 nt, Artificial Sequence
  Description of Artificial Sequence: Synthetic oligonucleotide
  Antisense strand to SEQ ID NO: 2357320
acauugcagaaauuaacuc

SEQ ID NO: 2357322 - RNA, 19 nt, Artificial Sequence
  Description of Artificial Sequence: Synthetic oligonucleotide
  Sense strand starting at position 142 of SEQ ID NO: 1885643
auuuguauacugugcuuua

SEQ ID NO: 2357323 - RNA, 19 nt, Artificial Sequence
  Description of Artificial Sequence: Synthetic oligonucleotide
  Antisense strand to SEQ ID NO: 2357322
uaaagcacaguauacaaau

SEQ ID NO: 2357324 - RNA, 19 nt, Artificial Sequence
  Description of Artificial Sequence: Synthetic oligonucleotide
  Sense strand starting at position 169 of SEQ ID NO: 1885643
ugaucucuaccuugaggaa

SEQ ID NO: 2357325 - RNA, 19 nt, Artificial Sequence
  Description of Artificial Sequence: Synthetic oligonucleotide
  Antisense strand to SEQ ID NO: 2357324
uuccucaagguagagauca

SEQ ID NO: 2357326 - RNA, 19 nt, Artificial Sequence
  Description of Artificial Sequence: Synthetic oligonucleotide
  Sense strand starting at position 267 of SEQ ID NO: 1885643
auauguuuacgcuagaagg

SEQ ID NO: 2357327 - RNA, 19 nt, Artificial Sequence
  Description of Artificial Sequence: Synthetic oligonucleotide
  Antisense strand to SEQ ID NO: 2357326
ccuucuagcguaaacauau

SEQ ID NO: 2357328 - RNA, 19 nt, Artificial Sequence
  Description of Artificial Sequence: Synthetic oligonucleotide
  Sense strand starting at position 278 of SEQ ID NO: 1885643
cuagaagguuuggauuuaa

SEQ ID NO: 2357329 - RNA, 19 nt, Artificial Sequence
  Description of Artificial Sequence: Synthetic oligonucleotide
  Antisense strand to SEQ ID NO: 2357328
uuaaauccaaaccuucuag

SEQ ID NO: 2357330 - RNA, 19 nt, Artificial Sequence
  Description of Artificial Sequence: Synthetic oligonucleotide
  Sense strand starting at position 292 of SEQ ID NO: 1885643
uuuaauauugcagacagua

SEQ ID NO: 2357331 - RNA, 19 nt, Artificial Sequence
  Description of Artificial Sequence: Synthetic oligonucleotide
  Antisense strand to SEQ ID NO: 2357330
uacugucugcaauauuaaa

SEQ ID NO: 2357332 - RNA, 19 nt, Artificial Sequence
  Description of Artificial Sequence: Synthetic oligonucleotide
  Sense strand starting at position 496 of SEQ ID NO: 1885643
gguccaguggcuuagaaga

SEQ ID NO: 2357333 - RNA, 19 nt, Artificial Sequence
  Description of Artificial Sequence: Synthetic oligonucleotide
  Antisense strand to SEQ ID NO: 2357332
ucuucuaagccacuggacc

SEQ ID NO: 2357334 - RNA, 19 nt, Artificial Sequence
  Description of Artificial Sequence: Synthetic oligonucleotide
  Sense strand starting at position 779 of SEQ ID NO: 1885643
agauacaugucuguuggga

SEQ ID NO: 2357335 - RNA, 19 nt, Artificial Sequence
  Description of Artificial Sequence: Synthetic oligonucleotide
  Antisense strand to SEQ ID NO: 2357334
ucccaacagacauguaucu

SEQ ID NO: 2357336 - RNA, 19 nt, Artificial Sequence
  Description of Artificial Sequence: Synthetic oligonucleotide
  Sense strand starting at position 890 of SEQ ID NO: 1885643
uggagaggcgugcagauau

SEQ ID NO: 2357337 - RNA, 19 nt, Artificial Sequence
  Description of Artificial Sequence: Synthetic oligonucleotide
  Antisense strand to SEQ ID NO: 2357336
auaucugcacgccucucca

SEQ ID NO: 2357338 - RNA, 19 nt, Artificial Sequence
  Description of Artificial Sequence: Synthetic oligonucleotide
  Sense strand starting at position 980 of SEQ ID NO: 1885643
aguggagauuguaggaaga

SEQ ID NO: 2357339 - RNA, 19 nt, Artificial Sequence
  Description of Artificial Sequence: Synthetic oligonucleotide
  Antisense strand to SEQ ID NO: 2357338
ucuuccuacaaucuccacu

SEQ ID NO: 2357340 - RNA, 19 nt, Artificial Sequence
  Description of Artificial Sequence: Synthetic oligonucleotide
  Sense strand starting at position 1122 of SEQ ID NO: 1885643
gcaguuauccagcacauag

SEQ ID NO: 2357341 - RNA, 19 nt, Artificial Sequence
  Description of Artificial Sequence: Synthetic oligonucleotide
  Antisense strand to SEQ ID NO: 2357340
cuaugugcuggauaacugc

SEQ ID NO: 2357342 - RNA, 19 nt, Artificial Sequence
  Description of Artificial Sequence: Synthetic oligonucleotide
  Sense strand starting at position 1124 of SEQ ID NO: 1885643
aguuauccagcacauagua

SEQ ID NO: 2357343 - RNA, 19 nt, Artificial Sequence
  Description of Artificial Sequence: Synthetic oligonucleotide
  Antisense strand to SEQ ID NO: 2357342
uacuaugugcuggauaacu

SEQ ID NO: 2357344 - RNA, 19 nt, Artificial Sequence
  Description of Artificial Sequence: Synthetic oligonucleotide
  Sense strand starting at position 1136 of SEQ ID NO: 1885643
cauaguagguauguuauaa

SEQ ID NO: 2357345 - RNA, 19 nt, Artificial Sequence
  Description of Artificial Sequence: Synthetic oligonucleotide
  Antisense strand to SEQ ID NO: 2357344
uuauaacauaccuacuaug

SEQ ID NO: 2357346 - RNA, 19 nt, Artificial Sequence
  Description of Artificial Sequence: Synthetic oligonucleotide
  Sense strand starting at position 1322 of SEQ ID NO: 1885643
gcaucuuugcuagagauuc

SEQ ID NO: 2357347 - RNA, 19 nt, Artificial Sequence
  Description of Artificial Sequence: Synthetic oligonucleotide
  Antisense strand to SEQ ID NO: 2357346
gaaucucuagcaaagaugc

SEQ ID NO: 2357348 - RNA, 19 nt, Artificial Sequence
  Description of Artificial Sequence: Synthetic oligonucleotide
  Sense strand starting at position 1427 of SEQ ID NO: 1885643
gugauucucaggugaccaa

SEQ ID NO: 2357349 - RNA, 19 nt, Artificial Sequence
  Description of Artificial Sequence: Synthetic oligonucleotide
  Antisense strand to SEQ ID NO: 2357348
uuggucaccugagaaucac

SEQ ID NO: 2357350 - RNA, 19 nt, Artificial Sequence
  Description of Artificial Sequence: Synthetic oligonucleotide
  Sense strand starting at position 1456 of SEQ ID NO: 1885643
gaggauugaccaggugcau

SEQ ID NO: 2357351 - RNA, 19 nt, Artificial Sequence
  Description of Artificial Sequence: Synthetic oligonucleotide
  Antisense strand to SEQ ID NO: 2357350
augcaccuggucaauccuc

SEQ ID NO: 2357352 - RNA, 19 nt, Artificial Sequence
  Description of Artificial Sequence: Synthetic oligonucleotide
  Sense strand starting at position 1727 of SEQ ID NO: 1885643
ugauuaguugggcaucuga

SEQ ID NO: 2357353 - RNA, 19 nt, Artificial Sequence
  Description of Artificial Sequence: Synthetic oligonucleotide
  Antisense strand to SEQ ID NO: 2357352
ucagaugcccaacuaauca

SEQ ID NO: 2357354 - RNA, 19 nt, Artificial Sequence
  Description of Artificial Sequence: Synthetic oligonucleotide
  Sense strand starting at position 1736 of SEQ ID NO: 1885643
gggcaucugauuuguccuu

SEQ ID NO: 2357355 - RNA, 19 nt, Artificial Sequence
  Description of Artificial Sequence: Synthetic oligonucleotide
  Antisense strand to SEQ ID NO: 2357354
aaggacaaaucagaugccc

SEQ ID NO: 2357356 - RNA, 19 nt, Artificial Sequence
  Description of Artificial Sequence: Synthetic oligonucleotide
  Sense strand starting at position 1738 of SEQ ID NO: 1885643
gcaucugauuuguccuuga

SEQ ID NO: 2357357 - RNA, 19 nt, Artificial Sequence
  Description of Artificial Sequence: Synthetic oligonucleotide
  Antisense strand to SEQ ID NO: 2357356
ucaaggacaaaucagaugc

SEQ ID NO: 2357358 - RNA, 19 nt, Artificial Sequence
  Description of Artificial Sequence: Synthetic oligonucleotide
  Sense strand starting at position 1900 of SEQ ID NO: 1885643
uuuccauccgacgaaauga

SEQ ID NO: 2357359 - RNA, 19 nt, Artificial Sequence
  Description of Artificial Sequence: Synthetic oligonucleotide
  Antisense strand to SEQ ID NO: 2357358
ucauuucgucggauggaaa

SEQ ID NO: 2357360 - RNA, 19 nt, Artificial Sequence
  Description of Artificial Sequence: Synthetic oligonucleotide
  Sense strand starting at position 2112 of SEQ ID NO: 1885643
ggaagagcugcccacugau

SEQ ID NO: 2357361 - RNA, 19 nt, Artificial Sequence
  Description of Artificial Sequence: Synthetic oligonucleotide
  Antisense strand to SEQ ID NO: 2357360
aucagugggcagcucuucc

SEQ ID NO: 2357362 - RNA, 19 nt, Artificial Sequence
  Description of Artificial Sequence: Synthetic oligonucleotide
  Sense strand starting at position 2211 of SEQ ID NO: 1885643
ggaggagucaugcaacggu

SEQ ID NO: 2357363 - RNA, 19 nt, Artificial Sequence
  Description of Artificial Sequence: Synthetic oligonucleotide
  Antisense strand to SEQ ID NO: 2357362
accguugcaugacuccucc

SEQ ID NO: 2357364 - RNA, 19 nt, Artificial Sequence
  Description of Artificial Sequence: Synthetic oligonucleotide
  Sense strand starting at position 2544 of SEQ ID NO: 1885643
cagagaauuccacgaguuc

SEQ ID NO: 2357365 - RNA, 19 nt, Artificial Sequence
  Description of Artificial Sequence: Synthetic oligonucleotide
  Antisense strand to SEQ ID NO: 2357364
gaacucguggaauucucug

SEQ ID NO: 2357366 - RNA, 19 nt, Artificial Sequence
  Description of Artificial Sequence: Synthetic oligonucleotide
  Sense strand starting at position 2588 of SEQ ID NO: 1885643
agagcuacccaagaauguu

SEQ ID NO: 2357367 - RNA, 19 nt, Artificial Sequence
  Description of Artificial Sequence: Synthetic oligonucleotide
  Antisense strand to SEQ ID NO: 2357366
aacauucuuggguagcucu

SEQ ID NO: 2357368 - RNA, 19 nt, Artificial Sequence
  Description of Artificial Sequence: Synthetic oligonucleotide
  Sense strand starting at position 2620 of SEQ ID NO: 1885643
cugagaguuggcuauguca

SEQ ID NO: 2357369 - RNA, 19 nt, Artificial Sequence
  Description of Artificial Sequence: Synthetic oligonucleotide
  Antisense strand to SEQ ID NO: 2357368
ugacauagccaacucucag

SEQ ID NO: 2357370 - RNA, 19 nt, Artificial Sequence
  Description of Artificial Sequence: Synthetic oligonucleotide
  Sense strand starting at position 2628 of SEQ ID NO: 1885643
uggcuaugucaucaaucac

SEQ ID NO: 2357371 - RNA, 19 nt, Artificial Sequence
  Description of Artificial Sequence: Synthetic oligonucleotide
  Antisense strand to SEQ ID NO: 2357370
gugauugaugacauagcca

SEQ ID NO: 2357372 - RNA, 19 nt, Artificial Sequence
  Description of Artificial Sequence: Synthetic oligonucleotide
  Sense strand starting at position 2658 of SEQ ID NO: 1885643
ggcauuagaaugggccaaa

SEQ ID NO: 2357373 - RNA, 19 nt, Artificial Sequence
  Description of Artificial Sequence: Synthetic oligonucleotide
  Antisense strand to SEQ ID NO: 2357372
uuuggcccauucuaaugcc

SEQ ID NO: 2357374 - RNA, 19 nt, Artificial Sequence
  Description of Artificial Sequence: Synthetic oligonucleotide
  Sense strand starting at position 2829 of SEQ ID NO: 1885643
cgaugaguuccagagccug

SEQ ID NO: 2357375 - RNA, 19 nt, Artificial Sequence
  Description of Artificial Sequence: Synthetic oligonucleotide
  Antisense strand to SEQ ID NO: 2357374
caggcucuggaacucaucg

SEQ ID NO: 2357376 - RNA, 19 nt, Artificial Sequence
  Description of Artificial Sequence: Synthetic oligonucleotide
  Sense strand starting at position 3111 of SEQ ID NO: 1885643
aguccauccggacaucaau

SEQ ID NO: 2357377 - RNA, 19 nt, Artificial Sequence
  Description of Artificial Sequence: Synthetic oligonucleotide
  Antisense strand to SEQ ID NO: 2357376
auugauguccggauggacu

SEQ ID NO: 2357378 - RNA, 19 nt, Artificial Sequence
  Description of Artificial Sequence: Synthetic oligonucleotide
  Sense strand starting at position 3230 of SEQ ID NO: 1885643
augagaaguucgcccaaga

SEQ ID NO: 2357379 - RNA, 19 nt, Artificial Sequence
  Description of Artificial Sequence: Synthetic oligonucleotide
  Antisense strand to SEQ ID NO: 2357378
ucuugggcgaacuucucau

SEQ ID NO: 2357380 - RNA, 19 nt, Artificial Sequence
  Description of Artificial Sequence: Synthetic oligonucleotide
  Sense strand starting at position 3384 of SEQ ID NO: 1885643
cgaauuugacaucguaccu

SEQ ID NO: 2357381 - RNA, 19 nt, Artificial Sequence
  Description of Artificial Sequence: Synthetic oligonucleotide
  Antisense strand to SEQ ID NO: 2357380
agguacgaugucaaauucg

SEQ ID NO: 2357382 - RNA, 19 nt, Artificial Sequence
  Description of Artificial Sequence: Synthetic oligonucleotide
  Sense strand starting at position 3456 of SEQ ID NO: 1885643
cgaagucgacuggaucaaa

SEQ ID NO: 2357383 - RNA, 19 nt, Artificial Sequence
  Description of Artificial Sequence: Synthetic oligonucleotide
  Antisense strand to SEQ ID NO: 2357382
uuugauccagucgacuucg

SEQ ID NO: 2357384 - RNA, 19 nt, Artificial Sequence
  Description of Artificial Sequence: Synthetic oligonucleotide
  Sense strand starting at position 3494 of SEQ ID NO: 1885643
cucccuacugccugaagaa

SEQ ID NO: 2357385 - RNA, 19 nt, Artificial Sequence
  Description of Artificial Sequence: Synthetic oligonucleotide
  Antisense strand to SEQ ID NO: 2357384
uucuucaggcaguagggag

SEQ ID NO: 2357386 - RNA, 19 nt, Artificial Sequence
  Description of Artificial Sequence: Synthetic oligonucleotide
  Sense strand starting at position 3533 of SEQ ID NO: 1885643
caugcauugcccuagagag

SEQ ID NO: 2357387 - RNA, 19 nt, Artificial Sequence
  Description of Artificial Sequence: Synthetic oligonucleotide
  Antisense strand to SEQ ID NO: 2357386
cucucuagggcaaugcaug

SEQ ID NO: 2357388 - RNA, 19 nt, Artificial Sequence
  Description of Artificial Sequence: Synthetic oligonucleotide
  Sense strand starting at position 3606 of SEQ ID NO: 1885643
cguguuuaacccgaaggaa

SEQ ID NO: 2357389 - RNA, 19 nt, Artificial Sequence
  Description of Artificial Sequence: Synthetic oligonucleotide
  Antisense strand to SEQ ID NO: 2357388
uuccuucggguuaaacacg

SEQ ID NO: 2357390 - RNA, 19 nt, Artificial Sequence
  Description of Artificial Sequence: Synthetic oligonucleotide
  Sense strand starting at position 3867 of SEQ ID NO: 1885643
ggaacuguuugaccaguua

SEQ ID NO: 2357391 - RNA, 19 nt, Artificial Sequence
  Description of Artificial Sequence: Synthetic oligonucleotide
  Antisense strand to SEQ ID NO: 2357390
uaacuggucaaacaguucc

SEQ ID NO: 2357392 - RNA, 19 nt, Artificial Sequence
  Description of Artificial Sequence: Synthetic oligonucleotide
  Sense strand starting at position 3923 of SEQ ID NO: 1885643
ggaccauuguggaggaaag

SEQ ID NO: 2357393 - RNA, 19 nt, Artificial Sequence
  Description of Artificial Sequence: Synthetic oligonucleotide
  Antisense strand to SEQ ID NO: 2357392
cuuuccuccacaauggucc

SEQ ID NO: 2357394 - RNA, 19 nt, Artificial Sequence
  Description of Artificial Sequence: Synthetic oligonucleotide
  Sense strand starting at position 3957 of SEQ ID NO: 1885643
caccgaagauguguggaaa

SEQ ID NO: 2357395 - RNA, 19 nt, Artificial Sequence
  Description of Artificial Sequence: Synthetic oligonucleotide
  Antisense strand to SEQ ID NO: 2357394
uuuccacacaucuucggug

SEQ ID NO: 2357396 - RNA, 19 nt, Artificial Sequence
  Description of Artificial Sequence: Synthetic oligonucleotide
  Sense strand starting at position 3960 of SEQ ID NO: 1885643
cgaagauguguggaaagca

SEQ ID NO: 2357397 - RNA, 19 nt, Artificial Sequence
  Description of Artificial Sequence: Synthetic oligonucleotide
  Antisense strand to SEQ ID NO: 2357396
ugcuuuccacacaucuucg

SEQ ID NO: 2357398 - RNA, 19 nt, Artificial Sequence
  Description of Artificial Sequence: Synthetic oligonucleotide
  Sense strand starting at position 22 of SEQ ID NO: 1885644
gcauucccucaugaaagau

SEQ ID NO: 2357399 - RNA, 19 nt, Artificial Sequence
  Description of Artificial Sequence: Synthetic oligonucleotide
  Antisense strand to SEQ ID NO: 2357398
aucuuucaugagggaaugc

SEQ ID NO: 2357400 - RNA, 19 nt, Artificial Sequence
  Description of Artificial Sequence: Synthetic oligonucleotide
  Sense strand starting at position 119 of SEQ ID NO: 1885644
aggagaggguugaguaacu

SEQ ID NO: 2357401 - RNA, 19 nt, Artificial Sequence
  Description of Artificial Sequence: Synthetic oligonucleotide
  Antisense strand to SEQ ID NO: 2357400
aguuacucaacccucuccu

SEQ ID NO: 2357402 - RNA, 19 nt, Artificial Sequence
  Description of Artificial Sequence: Synthetic oligonucleotide
  Sense strand starting at position 124 of SEQ ID NO: 1885644
aggguugaguaacuggauu

SEQ ID NO: 2357403 - RNA, 19 nt, Artificial Sequence
  Description of Artificial Sequence: Synthetic oligonucleotide
  Antisense strand to SEQ ID NO: 2357402
aauccaguuacucaacccu

SEQ ID NO: 2357404 - RNA, 19 nt, Artificial Sequence
  Description of Artificial Sequence: Synthetic oligonucleotide
  Sense strand starting at position 145 of SEQ ID NO: 1885644
gacuguuucuucgcauuug

SEQ ID NO: 2357405 - RNA, 19 nt, Artificial Sequence
  Description of Artificial Sequence: Synthetic oligonucleotide
  Antisense strand to SEQ ID NO: 2357404
caaaugcgaagaaacaguc

SEQ ID NO: 2357406 - RNA, 19 nt, Artificial Sequence
  Description of Artificial Sequence: Synthetic oligonucleotide
  Sense strand starting at position 156 of SEQ ID NO: 1885644
cgcauuugguucucacuaa

SEQ ID NO: 2357407 - RNA, 19 nt, Artificial Sequence
  Description of Artificial Sequence: Synthetic oligonucleotide
  Antisense strand to SEQ ID NO: 2357406
uuagugagaaccaaaugcg

SEQ ID NO: 2357408 - RNA, 19 nt, Artificial Sequence
  Description of Artificial Sequence: Synthetic oligonucleotide
  Sense strand starting at position 160 of SEQ ID NO: 1885644
uuugguucucacuaaugaa

SEQ ID NO: 2357409 - RNA, 19 nt, Artificial Sequence
  Description of Artificial Sequence: Synthetic oligonucleotide
  Antisense strand to SEQ ID NO: 2357408
uucauuagugagaaccaaa

SEQ ID NO: 2357410 - RNA, 19 nt, Artificial Sequence
  Description of Artificial Sequence: Synthetic oligonucleotide
  Sense strand starting at position 173 of SEQ ID NO: 1885644
aaugaaaucuugucagacg

SEQ ID NO: 2357411 - RNA, 19 nt, Artificial Sequence
  Description of Artificial Sequence: Synthetic oligonucleotide
  Antisense strand to SEQ ID NO: 2357410
cgucugacaagauuucauu

SEQ ID NO: 2357412 - RNA, 19 nt, Artificial Sequence
  Description of Artificial Sequence: Synthetic oligonucleotide
  Sense strand starting at position 245 of SEQ ID NO: 1885644
gcaaguuuauuugcaguuu

SEQ ID NO: 2357413 - RNA, 19 nt, Artificial Sequence
  Description of Artificial Sequence: Synthetic oligonucleotide
  Antisense strand to SEQ ID NO: 2357412
aaacugcaaauaaacuugc

SEQ ID NO: 2357414 - RNA, 19 nt, Artificial Sequence
  Description of Artificial Sequence: Synthetic oligonucleotide
  Sense strand starting at position 371 of SEQ ID NO: 1885644
gacuuuauacagugggacu

SEQ ID NO: 2357415 - RNA, 19 nt, Artificial Sequence
  Description of Artificial Sequence: Synthetic oligonucleotide
  Antisense strand to SEQ ID NO: 2357414
agucccacuguauaaaguc

SEQ ID NO: 2357416 - RNA, 19 nt, Artificial Sequence
  Description of Artificial Sequence: Synthetic oligonucleotide
  Sense strand starting at position 425 of SEQ ID NO: 1885644
ugggaauccgggcgaauua

SEQ ID NO: 2357417 - RNA, 19 nt, Artificial Sequence
  Description of Artificial Sequence: Synthetic oligonucleotide
  Antisense strand to SEQ ID NO: 2357416
uaauucgcccggauuccca

SEQ ID NO: 2357418 - RNA, 19 nt, Artificial Sequence
  Description of Artificial Sequence: Synthetic oligonucleotide
  Sense strand starting at position 426 of SEQ ID NO: 1885644
gggaauccgggcgaauuaa

SEQ ID NO: 2357419 - RNA, 19 nt, Artificial Sequence
  Description of Artificial Sequence: Synthetic oligonucleotide
  Antisense strand to SEQ ID NO: 2357418
uuaauucgcccggauuccc

SEQ ID NO: 2357420 - RNA, 19 nt, Artificial Sequence
  Description of Artificial Sequence: Synthetic oligonucleotide
  Sense strand starting at position 474 of SEQ ID NO: 1885644
gcucuuggagcauaaugua

SEQ ID NO: 2357421 - RNA, 19 nt, Artificial Sequence
  Description of Artificial Sequence: Synthetic oligonucleotide
  Antisense strand to SEQ ID NO: 2357420
uacauuaugcuccaagagc

SEQ ID NO: 2357422 - RNA, 19 nt, Artificial Sequence
  Description of Artificial Sequence: Synthetic oligonucleotide
  Sense strand starting at position 516 of SEQ ID NO: 1885644
guguaauaacaucauuggu

SEQ ID NO: 2357423 - RNA, 19 nt, Artificial Sequence
  Description of Artificial Sequence: Synthetic oligonucleotide
  Antisense strand to SEQ ID NO: 2357422
accaaugauguuauuacac

SEQ ID NO: 2357424 - RNA, 19 nt, Artificial Sequence
  Description of Artificial Sequence: Synthetic oligonucleotide
  Sense strand starting at position 518 of SEQ ID NO: 1885644
guaauaacaucauugguau

SEQ ID NO: 2357425 - RNA, 19 nt, Artificial Sequence
  Description of Artificial Sequence: Synthetic oligonucleotide
  Antisense strand to SEQ ID NO: 2357424
auaccaaugauguuauuac

SEQ ID NO: 2357426 - RNA, 19 nt, Artificial Sequence
  Description of Artificial Sequence: Synthetic oligonucleotide
  Sense strand starting at position 555 of SEQ ID NO: 1885644
ccuggugcuggauaauaaa

SEQ ID NO: 2357427 - RNA, 19 nt, Artificial Sequence
  Description of Artificial Sequence: Synthetic oligonucleotide
  Antisense strand to SEQ ID NO: 2357426
uuuauuauccagcaccagg

SEQ ID NO: 2357428 - RNA, 19 nt, Artificial Sequence
  Description of Artificial Sequence: Synthetic oligonucleotide
  Sense strand starting at position 683 of SEQ ID NO: 1885644
agaccuucccgggaagagu

SEQ ID NO: 2357429 - RNA, 19 nt, Artificial Sequence
  Description of Artificial Sequence: Synthetic oligonucleotide
  Antisense strand to SEQ ID NO: 2357428
acucuucccgggaaggucu

SEQ ID NO: 2357430 - RNA, 19 nt, Artificial Sequence
  Description of Artificial Sequence: Synthetic oligonucleotide
  Sense strand starting at position 741 of SEQ ID NO: 1885644
guuguuaaaccucauagcu

SEQ ID NO: 2357431 - RNA, 19 nt, Artificial Sequence
  Description of Artificial Sequence: Synthetic oligonucleotide
  Antisense strand to SEQ ID NO: 2357430
agcuaugagguuuaacaac

SEQ ID NO: 2357432 - RNA, 19 nt, Artificial Sequence
  Description of Artificial Sequence: Synthetic oligonucleotide
  Sense strand starting at position 885 of SEQ ID NO: 1885644
ccuugugccaccugagaga

SEQ ID NO: 2357433 - RNA, 19 nt, Artificial Sequence
  Description of Artificial Sequence: Synthetic oligonucleotide
  Antisense strand to SEQ ID NO: 2357432
ucucucagguggcacaagg

SEQ ID NO: 2357434 - RNA, 19 nt, Artificial Sequence
  Description of Artificial Sequence: Synthetic oligonucleotide
  Sense strand starting at position 993 of SEQ ID NO: 1885644
uucugaaagccggauaugu

SEQ ID NO: 2357435 - RNA, 19 nt, Artificial Sequence
  Description of Artificial Sequence: Synthetic oligonucleotide
  Antisense strand to SEQ ID NO: 2357434
acauauccggcuuucagaa

SEQ ID NO: 2357436 - RNA, 19 nt, Artificial Sequence
  Description of Artificial Sequence: Synthetic oligonucleotide
  Sense strand starting at position 1354 of SEQ ID NO: 1885644
ucuagucagguuggaaauu

SEQ ID NO: 2357437 - RNA, 19 nt, Artificial Sequence
  Description of Artificial Sequence: Synthetic oligonucleotide
  Antisense strand to SEQ ID NO: 2357436
aauuuccaaccugacuaga

SEQ ID NO: 2357438 - RNA, 19 nt, Artificial Sequence
  Description of Artificial Sequence: Synthetic oligonucleotide
  Sense strand starting at position 1547 of SEQ ID NO: 1885644
gaccauguccagcagugaa

SEQ ID NO: 2357439 - RNA, 19 nt, Artificial Sequence
  Description of Artificial Sequence: Synthetic oligonucleotide
  Antisense strand to SEQ ID NO: 2357438
uucacugcuggacaugguc

SEQ ID NO: 2357440 - RNA, 19 nt, Artificial Sequence
  Description of Artificial Sequence: Synthetic oligonucleotide
  Sense strand starting at position 1998 of SEQ ID NO: 1885644
ggugucuggugacugaaca

SEQ ID NO: 2357441 - RNA, 19 nt, Artificial Sequence
  Description of Artificial Sequence: Synthetic oligonucleotide
  Antisense strand to SEQ ID NO: 2357440
uguucagucaccagacacc

SEQ ID NO: 2357442 - RNA, 19 nt, Artificial Sequence
  Description of Artificial Sequence: Synthetic oligonucleotide
  Sense strand starting at position 1999 of SEQ ID NO: 1885644
gugucuggugacugaacaa

SEQ ID NO: 2357443 - RNA, 19 nt, Artificial Sequence
  Description of Artificial Sequence: Synthetic oligonucleotide
  Antisense strand to SEQ ID NO: 2357442
uuguucagucaccagacac

SEQ ID NO: 2357444 - RNA, 19 nt, Artificial Sequence
  Description of Artificial Sequence: Synthetic oligonucleotide
  Sense strand starting at position 2222 of SEQ ID NO: 1885644
gucaccuuggccuacuuau

SEQ ID NO: 2357445 - RNA, 19 nt, Artificial Sequence
  Description of Artificial Sequence: Synthetic oligonucleotide
  Antisense strand to SEQ ID NO: 2357444
auaaguaggccaaggugac

SEQ ID NO: 2357446 - RNA, 19 nt, Artificial Sequence
  Description of Artificial Sequence: Synthetic oligonucleotide
  Sense strand starting at position 2394 of SEQ ID NO: 1885644
gggcaugucacugaccuaa

SEQ ID NO: 2357447 - RNA, 19 nt, Artificial Sequence
  Description of Artificial Sequence: Synthetic oligonucleotide
  Antisense strand to SEQ ID NO: 2357446
uuaggucagugacaugccc

SEQ ID NO: 2357448 - RNA, 19 nt, Artificial Sequence
  Description of Artificial Sequence: Synthetic oligonucleotide
  Sense strand starting at position 2396 of SEQ ID NO: 1885644
gcaugucacugaccuaaga

SEQ ID NO: 2357449 - RNA, 19 nt, Artificial Sequence
  Description of Artificial Sequence: Synthetic oligonucleotide
  Antisense strand to SEQ ID NO: 2357448
ucuuaggucagugacaugc

SEQ ID NO: 2357450 - RNA, 19 nt, Artificial Sequence
  Description of Artificial Sequence: Synthetic oligonucleotide
  Sense strand starting at position 2429 of SEQ ID NO: 1885644
cugugaaauggcugaauca

SEQ ID NO: 2357451 - RNA, 19 nt, Artificial Sequence
  Description of Artificial Sequence: Synthetic oligonucleotide
  Antisense strand to SEQ ID NO: 2357450
ugauucagccauuucacag

SEQ ID NO: 2357452 - RNA, 19 nt, Artificial Sequence
  Description of Artificial Sequence: Synthetic oligonucleotide
  Sense strand starting at position 2474 of SEQ ID NO: 1885644
gguaccaugagaugauguu

SEQ ID NO: 2357453 - RNA, 19 nt, Artificial Sequence
  Description of Artificial Sequence: Synthetic oligonucleotide
  Antisense strand to SEQ ID NO: 2357452
aacaucaucucaugguacc

SEQ ID NO: 2357454 - RNA, 19 nt, Artificial Sequence
  Description of Artificial Sequence: Synthetic oligonucleotide
  Sense strand starting at position 2475 of SEQ ID NO: 1885644
guaccaugagaugauguuu

SEQ ID NO: 2357455 - RNA, 19 nt, Artificial Sequence
  Description of Artificial Sequence: Synthetic oligonucleotide
  Antisense strand to SEQ ID NO: 2357454
aaacaucaucucaugguac

SEQ ID NO: 2357456 - RNA, 19 nt, Artificial Sequence
  Description of Artificial Sequence: Synthetic oligonucleotide
  Sense strand starting at position 2492 of SEQ ID NO: 1885644
uuguaaacauucuuuguca

SEQ ID NO: 2357457 - RNA, 19 nt, Artificial Sequence
  Description of Artificial Sequence: Synthetic oligonucleotide
  Antisense strand to SEQ ID NO: 2357456
ugacaaagaauguuuacaa

SEQ ID NO: 2357458 - RNA, 19 nt, Artificial Sequence
  Description of Artificial Sequence: Synthetic oligonucleotide
  Sense strand starting at position 2521 of SEQ ID NO: 1885644
acuauaacaguuugaaguu

SEQ ID NO: 2357459 - RNA, 19 nt, Artificial Sequence
  Description of Artificial Sequence: Synthetic oligonucleotide
  Antisense strand to SEQ ID NO: 2357458
aacuucaaacuguuauagu

SEQ ID NO: 2357460 - RNA, 19 nt, Artificial Sequence
  Description of Artificial Sequence: Synthetic oligonucleotide
  Sense strand starting at position 2634 of SEQ ID NO: 1885644
ggaucacuucagugugaga

SEQ ID NO: 2357461 - RNA, 19 nt, Artificial Sequence
  Description of Artificial Sequence: Synthetic oligonucleotide
  Antisense strand to SEQ ID NO: 2357460
ucucacacugaagugaucc

SEQ ID NO: 2357462 - RNA, 19 nt, Artificial Sequence
  Description of Artificial Sequence: Synthetic oligonucleotide
  Sense strand starting at position 3063 of SEQ ID NO: 1885644
agaucuuggugguuuggaa

SEQ ID NO: 2357463 - RNA, 19 nt, Artificial Sequence
  Description of Artificial Sequence: Synthetic oligonucleotide
  Antisense strand to SEQ ID NO: 2357462
uuccaaaccaccaagaucu

SEQ ID NO: 2357464 - RNA, 19 nt, Artificial Sequence
  Description of Artificial Sequence: Synthetic oligonucleotide
  Sense strand starting at position 3278 of SEQ ID NO: 1885644
ccaccagucccaggauuau

SEQ ID NO: 2357465 - RNA, 19 nt, Artificial Sequence
  Description of Artificial Sequence: Synthetic oligonucleotide
  Antisense strand to SEQ ID NO: 2357464
auaauccugggacuggugg

SEQ ID NO: 2357466 - RNA, 19 nt, Artificial Sequence
  Description of Artificial Sequence: Synthetic oligonucleotide
  Sense strand starting at position 3290 of SEQ ID NO: 1885644
ggauuaucucccuaacgcu

SEQ ID NO: 2357467 - RNA, 19 nt, Artificial Sequence
  Description of Artificial Sequence: Synthetic oligonucleotide
  Antisense strand to SEQ ID NO: 2357466
agcguuagggagauaaucc

SEQ ID NO: 2357468 - RNA, 19 nt, Artificial Sequence
  Description of Artificial Sequence: Synthetic oligonucleotide
  Sense strand starting at position 3311 of SEQ ID NO: 1885644
uggcgagauuccuuuggag

SEQ ID NO: 2357469 - RNA, 19 nt, Artificial Sequence
  Description of Artificial Sequence: Synthetic oligonucleotide
  Antisense strand to SEQ ID NO: 2357468
cuccaaaggaaucucgcca

SEQ ID NO: 2357470 - RNA, 19 nt, Artificial Sequence
  Description of Artificial Sequence: Synthetic oligonucleotide
  Sense strand starting at position 3331 of SEQ ID NO: 1885644
uuuagucuucuguagauac

SEQ ID NO: 2357471 - RNA, 19 nt, Artificial Sequence
  Description of Artificial Sequence: Synthetic oligonucleotide
  Antisense strand to SEQ ID NO: 2357470
guaucuacagaagacuaaa

SEQ ID NO: 2357472 - RNA, 19 nt, Artificial Sequence
  Description of Artificial Sequence: Synthetic oligonucleotide
  Sense strand starting at position 3368 of SEQ ID NO: 1885644
ccagucaggguuugagaua

SEQ ID NO: 2357473 - RNA, 19 nt, Artificial Sequence
  Description of Artificial Sequence: Synthetic oligonucleotide
  Antisense strand to SEQ ID NO: 2357472
uaucucaaacccugacugg

SEQ ID NO: 2357474 - RNA, 19 nt, Artificial Sequence
  Description of Artificial Sequence: Synthetic oligonucleotide
  Sense strand starting at position 3381 of SEQ ID NO: 1885644
gagauagguggugguucau

SEQ ID NO: 2357475 - RNA, 19 nt, Artificial Sequence
  Description of Artificial Sequence: Synthetic oligonucleotide
  Antisense strand to SEQ ID NO: 2357474
augaaccaccaccuaucuc

SEQ ID NO: 2357476 - RNA, 19 nt, Artificial Sequence
  Description of Artificial Sequence: Synthetic oligonucleotide
  Sense strand starting at position 3485 of SEQ ID NO: 1885644
agcacagugguugacagaa

SEQ ID NO: 2357477 - RNA, 19 nt, Artificial Sequence
  Description of Artificial Sequence: Synthetic oligonucleotide
  Antisense strand to SEQ ID NO: 2357476
uucugucaaccacugugcu

SEQ ID NO: 2357478 - RNA, 19 nt, Artificial Sequence
  Description of Artificial Sequence: Synthetic oligonucleotide
  Sense strand starting at position 46 of SEQ ID NO: 1885645
ucuggaagucucugaagca

SEQ ID NO: 2357479 - RNA, 19 nt, Artificial Sequence
  Description of Artificial Sequence: Synthetic oligonucleotide
  Antisense strand to SEQ ID NO: 2357478
ugcuucagagacuuccaga

SEQ ID NO: 2357480 - RNA, 19 nt, Artificial Sequence
  Description of Artificial Sequence: Synthetic oligonucleotide
  Sense strand starting at position 609 of SEQ ID NO: 1885645
ggcaacauaagguaguaau

SEQ ID NO: 2357481 - RNA, 19 nt, Artificial Sequence
  Description of Artificial Sequence: Synthetic oligonucleotide
  Antisense strand to SEQ ID NO: 2357480
auuacuaccuuauguugcc

SEQ ID NO: 2357482 - RNA, 19 nt, Artificial Sequence
  Description of Artificial Sequence: Synthetic oligonucleotide
  Sense strand starting at position 680 of SEQ ID NO: 1885645
ggaaaugugucuuuaaaca

SEQ ID NO: 2357483 - RNA, 19 nt, Artificial Sequence
  Description of Artificial Sequence: Synthetic oligonucleotide
  Antisense strand to SEQ ID NO: 2357482
uguuuaaagacacauuucc

SEQ ID NO: 2357484 - RNA, 19 nt, Artificial Sequence
  Description of Artificial Sequence: Synthetic oligonucleotide
  Sense strand starting at position 735 of SEQ ID NO: 1885645
ccuugcuucccagagguca

SEQ ID NO: 2357485 - RNA, 19 nt, Artificial Sequence
  Description of Artificial Sequence: Synthetic oligonucleotide
  Antisense strand to SEQ ID NO: 2357484
ugaccucugggaagcaagg

SEQ ID NO: 2357486 - RNA, 19 nt, Artificial Sequence
  Description of Artificial Sequence: Synthetic oligonucleotide
  Sense strand starting at position 766 of SEQ ID NO: 1885645
gguauuugagggcguaaug

SEQ ID NO: 2357487 - RNA, 19 nt, Artificial Sequence
  Description of Artificial Sequence: Synthetic oligonucleotide
  Antisense strand to SEQ ID NO: 2357486
cauuacgcccucaaauacc

SEQ ID NO: 2357488 - RNA, 19 nt, Artificial Sequence
  Description of Artificial Sequence: Synthetic oligonucleotide
  Sense strand starting at position 776 of SEQ ID NO: 1885645
ggcguaauguggaugucuu

SEQ ID NO: 2357489 - RNA, 19 nt, Artificial Sequence
  Description of Artificial Sequence: Synthetic oligonucleotide
  Antisense strand to SEQ ID NO: 2357488
aagacauccacauuacgcc

SEQ ID NO: 2357490 - RNA, 19 nt, Artificial Sequence
  Description of Artificial Sequence: Synthetic oligonucleotide
  Sense strand starting at position 805 of SEQ ID NO: 1885645
aggaguuccuuucccuaaa

SEQ ID NO: 2357491 - RNA, 19 nt, Artificial Sequence
  Description of Artificial Sequence: Synthetic oligonucleotide
  Antisense strand to SEQ ID NO: 2357490
uuuagggaaaggaacuccu

SEQ ID NO: 2357492 - RNA, 19 nt, Artificial Sequence
  Description of Artificial Sequence: Synthetic oligonucleotide
  Sense strand starting at position 806 of SEQ ID NO: 1885645
ggaguuccuuucccuaaag

SEQ ID NO: 2357493 - RNA, 19 nt, Artificial Sequence
  Description of Artificial Sequence: Synthetic oligonucleotide
  Antisense strand to SEQ ID NO: 2357492
cuuuagggaaaggaacucc

SEQ ID NO: 2357494 - RNA, 19 nt, Artificial Sequence
  Description of Artificial Sequence: Synthetic oligonucleotide
  Sense strand starting at position 884 of SEQ ID NO: 1885645
acugacgagucuucaagga

SEQ ID NO: 2357495 - RNA, 19 nt, Artificial Sequence
  Description of Artificial Sequence: Synthetic oligonucleotide
  Antisense strand to SEQ ID NO: 2357494
uccuugaagacucgucagu

SEQ ID NO: 2357496 - RNA, 19 nt, Artificial Sequence
  Description of Artificial Sequence: Synthetic oligonucleotide
  Sense strand starting at position 960 of SEQ ID NO: 1885645
ccuaaugauggccgggaua

SEQ ID NO: 2357497 - RNA, 19 nt, Artificial Sequence
  Description of Artificial Sequence: Synthetic oligonucleotide
  Antisense strand to SEQ ID NO: 2357496
uaucccggccaucauuagg

SEQ ID NO: 2357498 - RNA, 19 nt, Artificial Sequence
  Description of Artificial Sequence: Synthetic oligonucleotide
  Sense strand starting at position 962 of SEQ ID NO: 1885645
uaaugauggccgggauaug

SEQ ID NO: 2357499 - RNA, 19 nt, Artificial Sequence
  Description of Artificial Sequence: Synthetic oligonucleotide
  Antisense strand to SEQ ID NO: 2357498
cauaucccggccaucauua

SEQ ID NO: 2357500 - RNA, 19 nt, Artificial Sequence
  Description of Artificial Sequence: Synthetic oligonucleotide
  Sense strand starting at position 972 of SEQ ID NO: 1885645
cgggauaugagccaaguga

SEQ ID NO: 2357501 - RNA, 19 nt, Artificial Sequence
  Description of Artificial Sequence: Synthetic oligonucleotide
  Antisense strand to SEQ ID NO: 2357500
ucacuuggcucauaucccg

SEQ ID NO: 2357502 - RNA, 19 nt, Artificial Sequence
  Description of Artificial Sequence: Synthetic oligonucleotide
  Sense strand starting at position 976 of SEQ ID NO: 1885645
auaugagccaagugaugua

SEQ ID NO: 2357503 - RNA, 19 nt, Artificial Sequence
  Description of Artificial Sequence: Synthetic oligonucleotide
  Antisense strand to SEQ ID NO: 2357502
uacaucacuuggcucauau

SEQ ID NO: 2357504 - RNA, 19 nt, Artificial Sequence
  Description of Artificial Sequence: Synthetic oligonucleotide
  Sense strand starting at position 981 of SEQ ID NO: 1885645
agccaagugauguaaguca

SEQ ID NO: 2357505 - RNA, 19 nt, Artificial Sequence
  Description of Artificial Sequence: Synthetic oligonucleotide
  Antisense strand to SEQ ID NO: 2357504
ugacuuacaucacuuggcu

SEQ ID NO: 2357506 - RNA, 19 nt, Artificial Sequence
  Description of Artificial Sequence: Synthetic oligonucleotide
  Sense strand starting at position 1011 of SEQ ID NO: 1885645
ccugucaugcggaggugau

SEQ ID NO: 2357507 - RNA, 19 nt, Artificial Sequence
  Description of Artificial Sequence: Synthetic oligonucleotide
  Antisense strand to SEQ ID NO: 2357506
aucaccuccgcaugacagg

SEQ ID NO: 2357508 - RNA, 19 nt, Artificial Sequence
  Description of Artificial Sequence: Synthetic oligonucleotide
  Sense strand starting at position 1372 of SEQ ID NO: 1885645
gagcaccaucugugauaca

SEQ ID NO: 2357509 - RNA, 19 nt, Artificial Sequence
  Description of Artificial Sequence: Synthetic oligonucleotide
  Antisense strand to SEQ ID NO: 2357508
uguaucacagauggugcuc

SEQ ID NO: 2357510 - RNA, 19 nt, Artificial Sequence
  Description of Artificial Sequence: Synthetic oligonucleotide
  Sense strand starting at position 1465 of SEQ ID NO: 1885645
gccucuuucgaggaaacug

SEQ ID NO: 2357511 - RNA, 19 nt, Artificial Sequence
  Description of Artificial Sequence: Synthetic oligonucleotide
  Antisense strand to SEQ ID NO: 2357510
caguuuccucgaaagaggc

SEQ ID NO: 2357512 - RNA, 19 nt, Artificial Sequence
  Description of Artificial Sequence: Synthetic oligonucleotide
  Sense strand starting at position 1475 of SEQ ID NO: 1885645
aggaaacugccaugguaag

SEQ ID NO: 2357513 - RNA, 19 nt, Artificial Sequence
  Description of Artificial Sequence: Synthetic oligonucleotide
  Antisense strand to SEQ ID NO: 2357512
cuuaccauggcaguuuccu

SEQ ID NO: 2357514 - RNA, 19 nt, Artificial Sequence
  Description of Artificial Sequence: Synthetic oligonucleotide
  Sense strand starting at position 1642 of SEQ ID NO: 1885645
aagaguccacuauguagga

SEQ ID NO: 2357515 - RNA, 19 nt, Artificial Sequence
  Description of Artificial Sequence: Synthetic oligonucleotide
  Antisense strand to SEQ ID NO: 2357514
uccuacauaguggacucuu

SEQ ID NO: 2357516 - RNA, 19 nt, Artificial Sequence
  Description of Artificial Sequence: Synthetic oligonucleotide
  Sense strand starting at position 1651 of SEQ ID NO: 1885645
cuauguaggauuggucaaa

SEQ ID NO: 2357517 - RNA, 19 nt, Artificial Sequence
  Description of Artificial Sequence: Synthetic oligonucleotide
  Antisense strand to SEQ ID NO: 2357516
uuugaccaauccuacauag

SEQ ID NO: 2357518 - RNA, 19 nt, Artificial Sequence
  Description of Artificial Sequence: Synthetic oligonucleotide
  Sense strand starting at position 1755 of SEQ ID NO: 1885645
guggcaccaucucuagaaa

SEQ ID NO: 2357519 - RNA, 19 nt, Artificial Sequence
  Description of Artificial Sequence: Synthetic oligonucleotide
  Antisense strand to SEQ ID NO: 2357518
uuucuagagauggugccac

SEQ ID NO: 2357520 - RNA, 19 nt, Artificial Sequence
  Description of Artificial Sequence: Synthetic oligonucleotide
  Sense strand starting at position 1866 of SEQ ID NO: 1885645
agcugacacccugaaguaa

SEQ ID NO: 2357521 - RNA, 19 nt, Artificial Sequence
  Description of Artificial Sequence: Synthetic oligonucleotide
  Antisense strand to SEQ ID NO: 2357520
uuacuucagggugucagcu

SEQ ID NO: 2357522 - RNA, 19 nt, Artificial Sequence
  Description of Artificial Sequence: Synthetic oligonucleotide
  Sense strand starting at position 2078 of SEQ ID NO: 1885645
aacauugacgguuagcaga

SEQ ID NO: 2357523 - RNA, 19 nt, Artificial Sequence
  Description of Artificial Sequence: Synthetic oligonucleotide
  Antisense strand to SEQ ID NO: 2357522
ucugcuaaccgucaauguu

SEQ ID NO: 2357524 - RNA, 19 nt, Artificial Sequence
  Description of Artificial Sequence: Synthetic oligonucleotide
  Sense strand starting at position 2308 of SEQ ID NO: 1885645
cgaggcugacaguaaugau

SEQ ID NO: 2357525 - RNA, 19 nt, Artificial Sequence
  Description of Artificial Sequence: Synthetic oligonucleotide
  Antisense strand to SEQ ID NO: 2357524
aucauuacugucagccucg

SEQ ID NO: 2357526 - RNA, 19 nt, Artificial Sequence
  Description of Artificial Sequence: Synthetic oligonucleotide
  Sense strand starting at position 2466 of SEQ ID NO: 1885645
ucagaaucauggccucauc

SEQ ID NO: 2357527 - RNA, 19 nt, Artificial Sequence
  Description of Artificial Sequence: Synthetic oligonucleotide
  Antisense strand to SEQ ID NO: 2357526
gaugaggccaugauucuga

SEQ ID NO: 2357528 - RNA, 19 nt, Artificial Sequence
  Description of Artificial Sequence: Synthetic oligonucleotide
  Sense strand starting at position 2485 of SEQ ID NO: 1885645
cccaaaggugagcauaauu

SEQ ID NO: 2357529 - RNA, 19 nt, Artificial Sequence
  Description of Artificial Sequence: Synthetic oligonucleotide
  Antisense strand to SEQ ID NO: 2357528
aauuaugcucaccuuuggg

SEQ ID NO: 2357530 - RNA, 19 nt, Artificial Sequence
  Description of Artificial Sequence: Synthetic oligonucleotide
  Sense strand starting at position 2494 of SEQ ID NO: 1885645
gagcauaauuuccaggaag

SEQ ID NO: 2357531 - RNA, 19 nt, Artificial Sequence
  Description of Artificial Sequence: Synthetic oligonucleotide
  Antisense strand to SEQ ID NO: 2357530
cuuccuggaaauuaugcuc

SEQ ID NO: 2357532 - RNA, 19 nt, Artificial Sequence
  Description of Artificial Sequence: Synthetic oligonucleotide
  Sense strand starting at position 2506 of SEQ ID NO: 1885645
caggaagucuuccuaagga

SEQ ID NO: 2357533 - RNA, 19 nt, Artificial Sequence
  Description of Artificial Sequence: Synthetic oligonucleotide
  Antisense strand to SEQ ID NO: 2357532
uccuuaggaagacuuccug

SEQ ID NO: 2357534 - RNA, 19 nt, Artificial Sequence
  Description of Artificial Sequence: Synthetic oligonucleotide
  Sense strand starting at position 2965 of SEQ ID NO: 1885645
aauagugacugagucauaa

SEQ ID NO: 2357535 - RNA, 19 nt, Artificial Sequence
  Description of Artificial Sequence: Synthetic oligonucleotide
  Antisense strand to SEQ ID NO: 2357534
uuaugacucagucacuauu

SEQ ID NO: 2357536 - RNA, 19 nt, Artificial Sequence
  Description of Artificial Sequence: Synthetic oligonucleotide
  Sense strand starting at position 2974 of SEQ ID NO: 1885645
ugagucauaacccgguaaa

SEQ ID NO: 2357537 - RNA, 19 nt, Artificial Sequence
  Description of Artificial Sequence: Synthetic oligonucleotide
  Antisense strand to SEQ ID NO: 2357536
uuuaccggguuaugacuca

SEQ ID NO: 2357538 - RNA, 19 nt, Artificial Sequence
  Description of Artificial Sequence: Synthetic oligonucleotide
  Sense strand starting at position 2975 of SEQ ID NO: 1885645
gagucauaacccgguaaag

SEQ ID NO: 2357539 - RNA, 19 nt, Artificial Sequence
  Description of Artificial Sequence: Synthetic oligonucleotide
  Antisense strand to SEQ ID NO: 2357538
cuuuaccggguuaugacuc

SEQ ID NO: 2357540 - RNA, 19 nt, Artificial Sequence
  Description of Artificial Sequence: Synthetic oligonucleotide
  Sense strand starting at position 2977 of SEQ ID NO: 1885645
gucauaacccgguaaaguc

SEQ ID NO: 2357541 - RNA, 19 nt, Artificial Sequence
  Description of Artificial Sequence: Synthetic oligonucleotide
  Antisense strand to SEQ ID NO: 2357540
gacuuuaccggguuaugac

SEQ ID NO: 2357542 - RNA, 19 nt, Artificial Sequence
  Description of Artificial Sequence: Synthetic oligonucleotide
  Sense strand starting at position 3254 of SEQ ID NO: 1885645
uugagaaguguuggauaaa

SEQ ID NO: 2357543 - RNA, 19 nt, Artificial Sequence
  Description of Artificial Sequence: Synthetic oligonucleotide
  Antisense strand to SEQ ID NO: 2357542
uuuauccaacacuucucaa

SEQ ID NO: 2357544 - RNA, 19 nt, Artificial Sequence
  Description of Artificial Sequence: Synthetic oligonucleotide
  Sense strand starting at position 3508 of SEQ ID NO: 1885645
uuauaauggccagggauaa

SEQ ID NO: 2357545 - RNA, 19 nt, Artificial Sequence
  Description of Artificial Sequence: Synthetic oligonucleotide
  Antisense strand to SEQ ID NO: 2357544
uuaucccuggccauuauaa

SEQ ID NO: 2357546 - RNA, 19 nt, Artificial Sequence
  Description of Artificial Sequence: Synthetic oligonucleotide
  Sense strand starting at position 3559 of SEQ ID NO: 1885645
ugaggucuccugugagaua

SEQ ID NO: 2357547 - RNA, 19 nt, Artificial Sequence
  Description of Artificial Sequence: Synthetic oligonucleotide
  Antisense strand to SEQ ID NO: 2357546
uaucucacaggagaccuca

SEQ ID NO: 2357548 - RNA, 19 nt, Artificial Sequence
  Description of Artificial Sequence: Synthetic oligonucleotide
  Sense strand starting at position 3615 of SEQ ID NO: 1885645
ccagccauaugucugggaa

SEQ ID NO: 2357549 - RNA, 19 nt, Artificial Sequence
  Description of Artificial Sequence: Synthetic oligonucleotide
  Antisense strand to SEQ ID NO: 2357548
uucccagacauauggcugg

SEQ ID NO: 2357550 - RNA, 19 nt, Artificial Sequence
  Description of Artificial Sequence: Synthetic oligonucleotide
  Sense strand starting at position 3616 of SEQ ID NO: 1885645
cagccauaugucugggaau

SEQ ID NO: 2357551 - RNA, 19 nt, Artificial Sequence
  Description of Artificial Sequence: Synthetic oligonucleotide
  Antisense strand to SEQ ID NO: 2357550
auucccagacauauggcug

SEQ ID NO: 2357552 - RNA, 19 nt, Artificial Sequence
  Description of Artificial Sequence: Synthetic oligonucleotide
  Sense strand starting at position 3629 of SEQ ID NO: 1885645
gggaauccuuaagccaaca

SEQ ID NO: 2357553 - RNA, 19 nt, Artificial Sequence
  Description of Artificial Sequence: Synthetic oligonucleotide
  Antisense strand to SEQ ID NO: 2357552
uguuggcuuaaggauuccc

SEQ ID NO: 2357554 - RNA, 19 nt, Artificial Sequence
  Description of Artificial Sequence: Synthetic oligonucleotide
  Sense strand starting at position 3712 of SEQ ID NO: 1885645
aacucaugugcauagggau

SEQ ID NO: 2357555 - RNA, 19 nt, Artificial Sequence
  Description of Artificial Sequence: Synthetic oligonucleotide
  Antisense strand to SEQ ID NO: 2357554
aucccuaugcacaugaguu

SEQ ID NO: 2357556 - RNA, 19 nt, Artificial Sequence
  Description of Artificial Sequence: Synthetic oligonucleotide
  Sense strand starting at position 3719 of SEQ ID NO: 1885645
gugcauagggauugaaaca

SEQ ID NO: 2357557 - RNA, 19 nt, Artificial Sequence
  Description of Artificial Sequence: Synthetic oligonucleotide
  Antisense strand to SEQ ID NO: 2357556
uguuucaaucccuaugcac

SEQ ID NO: 2357558 - RNA, 19 nt, Artificial Sequence
  Description of Artificial Sequence: Synthetic oligonucleotide
  Sense strand starting at position 205 of SEQ ID NO: 1885646
aggucacugcaacgagaaa

SEQ ID NO: 2357559 - RNA, 19 nt, Artificial Sequence
  Description of Artificial Sequence: Synthetic oligonucleotide
  Antisense strand to SEQ ID NO: 2357558
uuucucguugcagugaccu

SEQ ID NO: 2357560 - RNA, 19 nt, Artificial Sequence
  Description of Artificial Sequence: Synthetic oligonucleotide
  Sense strand starting at position 217 of SEQ ID NO: 1885646
cgagaaagcugguggcaga

SEQ ID NO: 2357561 - RNA, 19 nt, Artificial Sequence
  Description of Artificial Sequence: Synthetic oligonucleotide
  Antisense strand to SEQ ID NO: 2357560
ucugccaccagcuuucucg

SEQ ID NO: 2357562 - RNA, 19 nt, Artificial Sequence
  Description of Artificial Sequence: Synthetic oligonucleotide
  Sense strand starting at position 279 of SEQ ID NO: 1885646
gagggagggucuuggguaa

SEQ ID NO: 2357563 - RNA, 19 nt, Artificial Sequence
  Description of Artificial Sequence: Synthetic oligonucleotide
  Antisense strand to SEQ ID NO: 2357562
uuacccaagacccucccuc

SEQ ID NO: 2357564 - RNA, 19 nt, Artificial Sequence
  Description of Artificial Sequence: Synthetic oligonucleotide
  Sense strand starting at position 282 of SEQ ID NO: 1885646
ggagggucuuggguaagga

SEQ ID NO: 2357565 - RNA, 19 nt, Artificial Sequence
  Description of Artificial Sequence: Synthetic oligonucleotide
  Antisense strand to SEQ ID NO: 2357564
uccuuacccaagacccucc

SEQ ID NO: 2357566 - RNA, 19 nt, Artificial Sequence
  Description of Artificial Sequence: Synthetic oligonucleotide
  Sense strand starting at position 334 of SEQ ID NO: 1885646
uucugcuucucugagauua

SEQ ID NO: 2357567 - RNA, 19 nt, Artificial Sequence
  Description of Artificial Sequence: Synthetic oligonucleotide
  Antisense strand to SEQ ID NO: 2357566
uaaucucagagaagcagaa

SEQ ID NO: 2357568 - RNA, 19 nt, Artificial Sequence
  Description of Artificial Sequence: Synthetic oligonucleotide
  Sense strand starting at position 336 of SEQ ID NO: 1885646
cugcuucucugagauuaga

SEQ ID NO: 2357569 - RNA, 19 nt, Artificial Sequence
  Description of Artificial Sequence: Synthetic oligonucleotide
  Antisense strand to SEQ ID NO: 2357568
ucuaaucucagagaagcag

SEQ ID NO: 2357570 - RNA, 19 nt, Artificial Sequence
  Description of Artificial Sequence: Synthetic oligonucleotide
  Sense strand starting at position 430 of SEQ ID NO: 1885646
cagcgaugcuuuggaacau

SEQ ID NO: 2357571 - RNA, 19 nt, Artificial Sequence
  Description of Artificial Sequence: Synthetic oligonucleotide
  Antisense strand to SEQ ID NO: 2357570
auguuccaaagcaucgcug

SEQ ID NO: 2357572 - RNA, 19 nt, Artificial Sequence
  Description of Artificial Sequence: Synthetic oligonucleotide
  Sense strand starting at position 442 of SEQ ID NO: 1885646
ggaacauguuuauugucau

SEQ ID NO: 2357573 - RNA, 19 nt, Artificial Sequence
  Description of Artificial Sequence: Synthetic oligonucleotide
  Antisense strand to SEQ ID NO: 2357572
augacaauaaacauguucc

SEQ ID NO: 2357574 - RNA, 19 nt, Artificial Sequence
  Description of Artificial Sequence: Synthetic oligonucleotide
  Sense strand starting at position 445 of SEQ ID NO: 1885646
acauguuuauugucaucag

SEQ ID NO: 2357575 - RNA, 19 nt, Artificial Sequence
  Description of Artificial Sequence: Synthetic oligonucleotide
  Antisense strand to SEQ ID NO: 2357574
cugaugacaauaaacaugu

SEQ ID NO: 2357576 - RNA, 19 nt, Artificial Sequence
  Description of Artificial Sequence: Synthetic oligonucleotide
  Sense strand starting at position 446 of SEQ ID NO: 1885646
cauguuuauugucaucagu

SEQ ID NO: 2357577 - RNA, 19 nt, Artificial Sequence
  Description of Artificial Sequence: Synthetic oligonucleotide
  Antisense strand to SEQ ID NO: 2357576
acugaugacaauaaacaug

SEQ ID NO: 2357578 - RNA, 19 nt, Artificial Sequence
  Description of Artificial Sequence: Synthetic oligonucleotide
  Sense strand starting at position 448 of SEQ ID NO: 1885646
uguuuauugucaucagucu

SEQ ID NO: 2357579 - RNA, 19 nt, Artificial Sequence
  Description of Artificial Sequence: Synthetic oligonucleotide
  Antisense strand to SEQ ID NO: 2357578
agacugaugacaauaaaca

SEQ ID NO: 2357580 - RNA, 19 nt, Artificial Sequence
  Description of Artificial Sequence: Synthetic oligonucleotide
  Sense strand starting at position 449 of SEQ ID NO: 1885646
guuuauugucaucagucua

SEQ ID NO: 2357581 - RNA, 19 nt, Artificial Sequence
  Description of Artificial Sequence: Synthetic oligonucleotide
  Antisense strand to SEQ ID NO: 2357580
uagacugaugacaauaaac

SEQ ID NO: 2357582 - RNA, 19 nt, Artificial Sequence
  Description of Artificial Sequence: Synthetic oligonucleotide
  Sense strand starting at position 454 of SEQ ID NO: 1885646
uugucaucagucuaaauug

SEQ ID NO: 2357583 - RNA, 19 nt, Artificial Sequence
  Description of Artificial Sequence: Synthetic oligonucleotide
  Antisense strand to SEQ ID NO: 2357582
caauuuagacugaugacaa

SEQ ID NO: 2357584 - RNA, 19 nt, Artificial Sequence
  Description of Artificial Sequence: Synthetic oligonucleotide
  Sense strand starting at position 750 of SEQ ID NO: 1885646
aauggcauuugcugagcaa

SEQ ID NO: 2357585 - RNA, 19 nt, Artificial Sequence
  Description of Artificial Sequence: Synthetic oligonucleotide
  Antisense strand to SEQ ID NO: 2357584
uugcucagcaaaugccauu

SEQ ID NO: 2357586 - RNA, 19 nt, Artificial Sequence
  Description of Artificial Sequence: Synthetic oligonucleotide
  Sense strand starting at position 792 of SEQ ID NO: 1885646
ggaugcucucccgggaacu

SEQ ID NO: 2357587 - RNA, 19 nt, Artificial Sequence
  Description of Artificial Sequence: Synthetic oligonucleotide
  Antisense strand to SEQ ID NO: 2357586
aguucccgggagagcaucc

SEQ ID NO: 2357588 - RNA, 19 nt, Artificial Sequence
  Description of Artificial Sequence: Synthetic oligonucleotide
  Sense strand starting at position 1291 of SEQ ID NO: 1885646
ggguguagucugcaaacuu

SEQ ID NO: 2357589 - RNA, 19 nt, Artificial Sequence
  Description of Artificial Sequence: Synthetic oligonucleotide
  Antisense strand to SEQ ID NO: 2357588
aaguuugcagacuacaccc

SEQ ID NO: 2357590 - RNA, 19 nt, Artificial Sequence
  Description of Artificial Sequence: Synthetic oligonucleotide
  Sense strand starting at position 1336 of SEQ ID NO: 1885646
cgagguccuucacgaguuu

SEQ ID NO: 2357591 - RNA, 19 nt, Artificial Sequence
  Description of Artificial Sequence: Synthetic oligonucleotide
  Antisense strand to SEQ ID NO: 2357590
aaacucgugaaggaccucg

SEQ ID NO: 2357592 - RNA, 19 nt, Artificial Sequence
  Description of Artificial Sequence: Synthetic oligonucleotide
  Sense strand starting at position 1531 of SEQ ID NO: 1885646
gccaguuccucgcugggaa

SEQ ID NO: 2357593 - RNA, 19 nt, Artificial Sequence
  Description of Artificial Sequence: Synthetic oligonucleotide
  Antisense strand to SEQ ID NO: 2357592
uucccagcgaggaacuggc

SEQ ID NO: 2357594 - RNA, 19 nt, Artificial Sequence
  Description of Artificial Sequence: Synthetic oligonucleotide
  Sense strand starting at position 1533 of SEQ ID NO: 1885646
caguuccucgcugggaauu

SEQ ID NO: 2357595 - RNA, 19 nt, Artificial Sequence
  Description of Artificial Sequence: Synthetic oligonucleotide
  Antisense strand to SEQ ID NO: 2357594
aauucccagcgaggaacug

SEQ ID NO: 2357596 - RNA, 19 nt, Artificial Sequence
  Description of Artificial Sequence: Synthetic oligonucleotide
  Sense strand starting at position 1543 of SEQ ID NO: 1885646
cugggaauuccacggaguu

SEQ ID NO: 2357597 - RNA, 19 nt, Artificial Sequence
  Description of Artificial Sequence: Synthetic oligonucleotide
  Antisense strand to SEQ ID NO: 2357596
aacuccguggaauucccag

SEQ ID NO: 2357598 - RNA, 19 nt, Artificial Sequence
  Description of Artificial Sequence: Synthetic oligonucleotide
  Sense strand starting at position 1544 of SEQ ID NO: 1885646
ugggaauuccacggaguuu

SEQ ID NO: 2357599 - RNA, 19 nt, Artificial Sequence
  Description of Artificial Sequence: Synthetic oligonucleotide
  Antisense strand to SEQ ID NO: 2357598
aaacuccguggaauuccca

SEQ ID NO: 2357600 - RNA, 19 nt, Artificial Sequence
  Description of Artificial Sequence: Synthetic oligonucleotide
  Sense strand starting at position 2814 of SEQ ID NO: 1885646
gagggagguuucugcuucu

SEQ ID NO: 2357601 - RNA, 19 nt, Artificial Sequence
  Description of Artificial Sequence: Synthetic oligonucleotide
  Antisense strand to SEQ ID NO: 2357600
agaagcagaaaccucccuc

SEQ ID NO: 2357602 - RNA, 19 nt, Artificial Sequence
  Description of Artificial Sequence: Synthetic oligonucleotide
  Sense strand starting at position 2817 of SEQ ID NO: 1885646
ggagguuucugcuucucag

SEQ ID NO: 2357603 - RNA, 19 nt, Artificial Sequence
  Description of Artificial Sequence: Synthetic oligonucleotide
  Antisense strand to SEQ ID NO: 2357602
cugagaagcagaaaccucc

SEQ ID NO: 2357604 - RNA, 19 nt, Artificial Sequence
  Description of Artificial Sequence: Synthetic oligonucleotide
  Sense strand starting at position 3093 of SEQ ID NO: 1885646
gggcucaggcucuaggaaa

SEQ ID NO: 2357605 - RNA, 19 nt, Artificial Sequence
  Description of Artificial Sequence: Synthetic oligonucleotide
  Antisense strand to SEQ ID NO: 2357604
uuuccuagagccugagccc

SEQ ID NO: 2357606 - RNA, 19 nt, Artificial Sequence
  Description of Artificial Sequence: Synthetic oligonucleotide
  Sense strand starting at position 3149 of SEQ ID NO: 1885646
gagccauuagugugucugu

SEQ ID NO: 2357607 - RNA, 19 nt, Artificial Sequence
  Description of Artificial Sequence: Synthetic oligonucleotide
  Antisense strand to SEQ ID NO: 2357606
acagacacacuaauggcuc

SEQ ID NO: 2357608 - RNA, 19 nt, Artificial Sequence
  Description of Artificial Sequence: Synthetic oligonucleotide
  Sense strand starting at position 3150 of SEQ ID NO: 1885646
agccauuagugugucugua

SEQ ID NO: 2357609 - RNA, 19 nt, Artificial Sequence
  Description of Artificial Sequence: Synthetic oligonucleotide
  Antisense strand to SEQ ID NO: 2357608
uacagacacacuaauggcu

SEQ ID NO: 2357610 - RNA, 19 nt, Artificial Sequence
  Description of Artificial Sequence: Synthetic oligonucleotide
  Sense strand starting at position 3151 of SEQ ID NO: 1885646
gccauuagugugucuguau

SEQ ID NO: 2357611 - RNA, 19 nt, Artificial Sequence
  Description of Artificial Sequence: Synthetic oligonucleotide
  Antisense strand to SEQ ID NO: 2357610
auacagacacacuaauggc

SEQ ID NO: 2357612 - RNA, 19 nt, Artificial Sequence
  Description of Artificial Sequence: Synthetic oligonucleotide
  Sense strand starting at position 3152 of SEQ ID NO: 1885646
ccauuagugugucuguaug

SEQ ID NO: 2357613 - RNA, 19 nt, Artificial Sequence
  Description of Artificial Sequence: Synthetic oligonucleotide
  Antisense strand to SEQ ID NO: 2357612
cauacagacacacuaaugg

SEQ ID NO: 2357614 - RNA, 19 nt, Artificial Sequence
  Description of Artificial Sequence: Synthetic oligonucleotide
  Sense strand starting at position 3455 of SEQ ID NO: 1885646
cacagcucuuggugguaga

SEQ ID NO: 2357615 - RNA, 19 nt, Artificial Sequence
  Description of Artificial Sequence: Synthetic oligonucleotide
  Antisense strand to SEQ ID NO: 2357614
ucuaccaccaagagcugug

SEQ ID NO: 2357616 - RNA, 19 nt, Artificial Sequence
  Description of Artificial Sequence: Synthetic oligonucleotide
  Sense strand starting at position 3458 of SEQ ID NO: 1885646
agcucuuggugguagagaa

SEQ ID NO: 2357617 - RNA, 19 nt, Artificial Sequence
  Description of Artificial Sequence: Synthetic oligonucleotide
  Antisense strand to SEQ ID NO: 2357616
uucucuaccaccaagagcu

SEQ ID NO: 2357618 - RNA, 19 nt, Artificial Sequence
  Description of Artificial Sequence: Synthetic oligonucleotide
  Sense strand starting at position 3686 of SEQ ID NO: 1885646
gaccuagucuugcuguguu

SEQ ID NO: 2357619 - RNA, 19 nt, Artificial Sequence
  Description of Artificial Sequence: Synthetic oligonucleotide
  Antisense strand to SEQ ID NO: 2357618
aacacagcaagacuagguc

SEQ ID NO: 2357620 - RNA, 19 nt, Artificial Sequence
  Description of Artificial Sequence: Synthetic oligonucleotide
  Sense strand starting at position 3868 of SEQ ID NO: 1885646
cauguuggcuguucucaaa

SEQ ID NO: 2357621 - RNA, 19 nt, Artificial Sequence
  Description of Artificial Sequence: Synthetic oligonucleotide
  Antisense strand to SEQ ID NO: 2357620
uuugagaacagccaacaug

SEQ ID NO: 2357622 - RNA, 19 nt, Artificial Sequence
  Description of Artificial Sequence: Synthetic oligonucleotide
  Sense strand starting at position 133 of SEQ ID NO: 1885647
ucgcuugaacugggaagau

SEQ ID NO: 2357623 - RNA, 19 nt, Artificial Sequence
  Description of Artificial Sequence: Synthetic oligonucleotide
  Antisense strand to SEQ ID NO: 2357622
aucuucccaguucaagcga

SEQ ID NO: 2357624 - RNA, 19 nt, Artificial Sequence
  Description of Artificial Sequence: Synthetic oligonucleotide
  Sense strand starting at position 254 of SEQ ID NO: 1885647
guggguucuucuugcccau

SEQ ID NO: 2357625 - RNA, 19 nt, Artificial Sequence
  Description of Artificial Sequence: Synthetic oligonucleotide
  Antisense strand to SEQ ID NO: 2357624
augggcaagaagaacccac

SEQ ID NO: 2357626 - RNA, 19 nt, Artificial Sequence
  Description of Artificial Sequence: Synthetic oligonucleotide
  Sense strand starting at position 435 of SEQ ID NO: 1885647
caccaagagcugugcaauc

SEQ ID NO: 2357627 - RNA, 19 nt, Artificial Sequence
  Description of Artificial Sequence: Synthetic oligonucleotide
  Antisense strand to SEQ ID NO: 2357626
gauugcacagcucuuggug

SEQ ID NO: 2357628 - RNA, 19 nt, Artificial Sequence
  Description of Artificial Sequence: Synthetic oligonucleotide
  Sense strand starting at position 819 of SEQ ID NO: 1885647
gcugccauguucugcugaa

SEQ ID NO: 2357629 - RNA, 19 nt, Artificial Sequence
  Description of Artificial Sequence: Synthetic oligonucleotide
  Antisense strand to SEQ ID NO: 2357628
uucagcagaacauggcagc

SEQ ID NO: 2357630 - RNA, 19 nt, Artificial Sequence
  Description of Artificial Sequence: Synthetic oligonucleotide
  Sense strand starting at position 1131 of SEQ ID NO: 1885647
ccacgaaguucccuuugaa

SEQ ID NO: 2357631 - RNA, 19 nt, Artificial Sequence
  Description of Artificial Sequence: Synthetic oligonucleotide
  Antisense strand to SEQ ID NO: 2357630
uucaaagggaacuucgugg

SEQ ID NO: 2357632 - RNA, 19 nt, Artificial Sequence
  Description of Artificial Sequence: Synthetic oligonucleotide
  Sense strand starting at position 1134 of SEQ ID NO: 1885647
cgaaguucccuuugaagug

SEQ ID NO: 2357633 - RNA, 19 nt, Artificial Sequence
  Description of Artificial Sequence: Synthetic oligonucleotide
  Antisense strand to SEQ ID NO: 2357632
cacuucaaagggaacuucg

SEQ ID NO: 2357634 - RNA, 19 nt, Artificial Sequence
  Description of Artificial Sequence: Synthetic oligonucleotide
  Sense strand starting at position 1135 of SEQ ID NO: 1885647
gaaguucccuuugaaguga

SEQ ID NO: 2357635 - RNA, 19 nt, Artificial Sequence
  Description of Artificial Sequence: Synthetic oligonucleotide
  Antisense strand to SEQ ID NO: 2357634
ucacuucaaagggaacuuc

SEQ ID NO: 2357636 - RNA, 19 nt, Artificial Sequence
  Description of Artificial Sequence: Synthetic oligonucleotide
  Sense strand starting at position 1482 of SEQ ID NO: 1885647
ggaucagucgcgggaccua

SEQ ID NO: 2357637 - RNA, 19 nt, Artificial Sequence
  Description of Artificial Sequence: Synthetic oligonucleotide
  Antisense strand to SEQ ID NO: 2357636
uaggucccgcgacugaucc

SEQ ID NO: 2357638 - RNA, 19 nt, Artificial Sequence
  Description of Artificial Sequence: Synthetic oligonucleotide
  Sense strand starting at position 2336 of SEQ ID NO: 1885647
ccucgaaacuccguggaau

SEQ ID NO: 2357639 - RNA, 19 nt, Artificial Sequence
  Description of Artificial Sequence: Synthetic oligonucleotide
  Antisense strand to SEQ ID NO: 2357638
auuccacggaguuucgagg

SEQ ID NO: 2357640 - RNA, 19 nt, Artificial Sequence
  Description of Artificial Sequence: Synthetic oligonucleotide
  Sense strand starting at position 2337 of SEQ ID NO: 1885647
cucgaaacuccguggaauu

SEQ ID NO: 2357641 - RNA, 19 nt, Artificial Sequence
  Description of Artificial Sequence: Synthetic oligonucleotide
  Antisense strand to SEQ ID NO: 2357640
aauuccacggaguuucgag

SEQ ID NO: 2357642 - RNA, 19 nt, Artificial Sequence
  Description of Artificial Sequence: Synthetic oligonucleotide
  Sense strand starting at position 2338 of SEQ ID NO: 1885647
ucgaaacuccguggaauuc

SEQ ID NO: 2357643 - RNA, 19 nt, Artificial Sequence
  Description of Artificial Sequence: Synthetic oligonucleotide
  Antisense strand to SEQ ID NO: 2357642
gaauuccacggaguuucga

SEQ ID NO: 2357644 - RNA, 19 nt, Artificial Sequence
  Description of Artificial Sequence: Synthetic oligonucleotide
  Sense strand starting at position 2349 of SEQ ID NO: 1885647
uggaauucccagcgaggaa

SEQ ID NO: 2357645 - RNA, 19 nt, Artificial Sequence
  Description of Artificial Sequence: Synthetic oligonucleotide
  Antisense strand to SEQ ID NO: 2357644
uuccucgcugggaauucca

SEQ ID NO: 2357646 - RNA, 19 nt, Artificial Sequence
  Description of Artificial Sequence: Synthetic oligonucleotide
  Sense strand starting at position 2544 of SEQ ID NO: 1885647
gcgcuaaacucgugaagga

SEQ ID NO: 2357647 - RNA, 19 nt, Artificial Sequence
  Description of Artificial Sequence: Synthetic oligonucleotide
  Antisense strand to SEQ ID NO: 2357646
uccuucacgaguuuagcgc

SEQ ID NO: 2357648 - RNA, 19 nt, Artificial Sequence
  Description of Artificial Sequence: Synthetic oligonucleotide
  Sense strand starting at position 2589 of SEQ ID NO: 1885647
ggaggaaguuugcagacua

SEQ ID NO: 2357649 - RNA, 19 nt, Artificial Sequence
  Description of Artificial Sequence: Synthetic oligonucleotide
  Antisense strand to SEQ ID NO: 2357648
uagucugcaaacuuccucc

SEQ ID NO: 2357650 - RNA, 19 nt, Artificial Sequence
  Description of Artificial Sequence: Synthetic oligonucleotide
  Sense strand starting at position 2696 of SEQ ID NO: 1885647
agaggugugcgcgucaauc

SEQ ID NO: 2357651 - RNA, 19 nt, Artificial Sequence
  Description of Artificial Sequence: Synthetic oligonucleotide
  Antisense strand to SEQ ID NO: 2357650
gauugacgcgcacaccucu

SEQ ID NO: 2357652 - RNA, 19 nt, Artificial Sequence
  Description of Artificial Sequence: Synthetic oligonucleotide
  Sense strand starting at position 2706 of SEQ ID NO: 1885647
gcgucaaucugcgugugaa

SEQ ID NO: 2357653 - RNA, 19 nt, Artificial Sequence
  Description of Artificial Sequence: Synthetic oligonucleotide
  Antisense strand to SEQ ID NO: 2357652
uucacacgcagauugacgc

SEQ ID NO: 2357654 - RNA, 19 nt, Artificial Sequence
  Description of Artificial Sequence: Synthetic oligonucleotide
  Sense strand starting at position 2707 of SEQ ID NO: 1885647
cgucaaucugcgugugaag

SEQ ID NO: 2357655 - RNA, 19 nt, Artificial Sequence
  Description of Artificial Sequence: Synthetic oligonucleotide
  Antisense strand to SEQ ID NO: 2357654
cuucacacgcagauugacg

SEQ ID NO: 2357656 - RNA, 19 nt, Artificial Sequence
  Description of Artificial Sequence: Synthetic oligonucleotide
  Sense strand starting at position 2991 of SEQ ID NO: 1885647
ggguugaugugaggagaca

SEQ ID NO: 2357657 - RNA, 19 nt, Artificial Sequence
  Description of Artificial Sequence: Synthetic oligonucleotide
  Antisense strand to SEQ ID NO: 2357656
ugucuccucacaucaaccc

SEQ ID NO: 2357658 - RNA, 19 nt, Artificial Sequence
  Description of Artificial Sequence: Synthetic oligonucleotide
  Sense strand starting at position 3128 of SEQ ID NO: 1885647
uccucuguugcucagcaaa

SEQ ID NO: 2357659 - RNA, 19 nt, Artificial Sequence
  Description of Artificial Sequence: Synthetic oligonucleotide
  Antisense strand to SEQ ID NO: 2357658
uuugcugagcaacagagga

SEQ ID NO: 2357660 - RNA, 19 nt, Artificial Sequence
  Description of Artificial Sequence: Synthetic oligonucleotide
  Sense strand starting at position 3130 of SEQ ID NO: 1885647
cucuguugcucagcaaaug

SEQ ID NO: 2357661 - RNA, 19 nt, Artificial Sequence
  Description of Artificial Sequence: Synthetic oligonucleotide
  Antisense strand to SEQ ID NO: 2357660
cauuugcugagcaacagag

SEQ ID NO: 2357662 - RNA, 19 nt, Artificial Sequence
  Description of Artificial Sequence: Synthetic oligonucleotide
  Sense strand starting at position 3416 of SEQ ID NO: 1885647
cggugugcgucuguacaau

SEQ ID NO: 2357663 - RNA, 19 nt, Artificial Sequence
  Description of Artificial Sequence: Synthetic oligonucleotide
  Antisense strand to SEQ ID NO: 2357662
auuguacagacgcacaccg

SEQ ID NO: 2357664 - RNA, 19 nt, Artificial Sequence
  Description of Artificial Sequence: Synthetic oligonucleotide
  Sense strand starting at position 3435 of SEQ ID NO: 1885647
uuagacugaugacaauaaa

SEQ ID NO: 2357665 - RNA, 19 nt, Artificial Sequence
  Description of Artificial Sequence: Synthetic oligonucleotide
  Antisense strand to SEQ ID NO: 2357664
uuuauugucaucagucuaa

SEQ ID NO: 2357666 - RNA, 19 nt, Artificial Sequence
  Description of Artificial Sequence: Synthetic oligonucleotide
  Sense strand starting at position 3512 of SEQ ID NO: 1885647
cgugguuucucccuugaaa

SEQ ID NO: 2357667 - RNA, 19 nt, Artificial Sequence
  Description of Artificial Sequence: Synthetic oligonucleotide
  Antisense strand to SEQ ID NO: 2357666
uuucaagggagaaaccacg

SEQ ID NO: 2357668 - RNA, 19 nt, Artificial Sequence
  Description of Artificial Sequence: Synthetic oligonucleotide
  Sense strand starting at position 3514 of SEQ ID NO: 1885647
ugguuucucccuugaaagc

SEQ ID NO: 2357669 - RNA, 19 nt, Artificial Sequence
  Description of Artificial Sequence: Synthetic oligonucleotide
  Antisense strand to SEQ ID NO: 2357668
gcuuucaagggagaaacca

SEQ ID NO: 2357670 - RNA, 19 nt, Artificial Sequence
  Description of Artificial Sequence: Synthetic oligonucleotide
  Sense strand starting at position 3515 of SEQ ID NO: 1885647
gguuucucccuugaaagca

SEQ ID NO: 2357671 - RNA, 19 nt, Artificial Sequence
  Description of Artificial Sequence: Synthetic oligonucleotide
  Antisense strand to SEQ ID NO: 2357670
ugcuuucaagggagaaacc

SEQ ID NO: 2357672 - RNA, 19 nt, Artificial Sequence
  Description of Artificial Sequence: Synthetic oligonucleotide
  Sense strand starting at position 3638 of SEQ ID NO: 1885647
gcacuuuggucuccaggga

SEQ ID NO: 2357673 - RNA, 19 nt, Artificial Sequence
  Description of Artificial Sequence: Synthetic oligonucleotide
  Antisense strand to SEQ ID NO: 2357672
ucccuggagaccaaagugc

SEQ ID NO: 2357674 - RNA, 19 nt, Artificial Sequence
  Description of Artificial Sequence: Synthetic oligonucleotide
  Sense strand starting at position 3675 of SEQ ID NO: 1885647
ccagcuuucucguugcagu

SEQ ID NO: 2357675 - RNA, 19 nt, Artificial Sequence
  Description of Artificial Sequence: Synthetic oligonucleotide
  Antisense strand to SEQ ID NO: 2357674
acugcaacgagaaagcugg

SEQ ID NO: 2357676 - RNA, 19 nt, Artificial Sequence
  Description of Artificial Sequence: Synthetic oligonucleotide
  Sense strand starting at position 3677 of SEQ ID NO: 1885647
agcuuucucguugcaguga

SEQ ID NO: 2357677 - RNA, 19 nt, Artificial Sequence
  Description of Artificial Sequence: Synthetic oligonucleotide
  Antisense strand to SEQ ID NO: 2357676
ucacugcaacgagaaagcu

SEQ ID NO: 2357678 - RNA, 19 nt, Artificial Sequence
  Description of Artificial Sequence: Synthetic oligonucleotide
  Sense strand starting at position 122 of SEQ ID NO: 1885648
ggagaaagugcuggacucu

SEQ ID NO: 2357679 - RNA, 19 nt, Artificial Sequence
  Description of Artificial Sequence: Synthetic oligonucleotide
  Antisense strand to SEQ ID NO: 2357678
agaguccagcacuuucucc

SEQ ID NO: 2357680 - RNA, 19 nt, Artificial Sequence
  Description of Artificial Sequence: Synthetic oligonucleotide
  Sense strand starting at position 207 of SEQ ID NO: 1885648
gcauaaauuccugaccugu

SEQ ID NO: 2357681 - RNA, 19 nt, Artificial Sequence
  Description of Artificial Sequence: Synthetic oligonucleotide
  Antisense strand to SEQ ID NO: 2357680
acaggucaggaauuuaugc

SEQ ID NO: 2357682 - RNA, 19 nt, Artificial Sequence
  Description of Artificial Sequence: Synthetic oligonucleotide
  Sense strand starting at position 215 of SEQ ID NO: 1885648
uccugaccugucuaaagua

SEQ ID NO: 2357683 - RNA, 19 nt, Artificial Sequence
  Description of Artificial Sequence: Synthetic oligonucleotide
  Antisense strand to SEQ ID NO: 2357682
uacuuuagacaggucagga

SEQ ID NO: 2357684 - RNA, 19 nt, Artificial Sequence
  Description of Artificial Sequence: Synthetic oligonucleotide
  Sense strand starting at position 343 of SEQ ID NO: 1885648
auucccaggugcuuagaaa

SEQ ID NO: 2357685 - RNA, 19 nt, Artificial Sequence
  Description of Artificial Sequence: Synthetic oligonucleotide
  Antisense strand to SEQ ID NO: 2357684
uuucuaagcaccugggaau

SEQ ID NO: 2357686 - RNA, 19 nt, Artificial Sequence
  Description of Artificial Sequence: Synthetic oligonucleotide
  Sense strand starting at position 344 of SEQ ID NO: 1885648
uucccaggugcuuagaaau

SEQ ID NO: 2357687 - RNA, 19 nt, Artificial Sequence
  Description of Artificial Sequence: Synthetic oligonucleotide
  Antisense strand to SEQ ID NO: 2357686
auuucuaagcaccugggaa

SEQ ID NO: 2357688 - RNA, 19 nt, Artificial Sequence
  Description of Artificial Sequence: Synthetic oligonucleotide
  Sense strand starting at position 350 of SEQ ID NO: 1885648
ggugcuuagaaaugaagag

SEQ ID NO: 2357689 - RNA, 19 nt, Artificial Sequence
  Description of Artificial Sequence: Synthetic oligonucleotide
  Antisense strand to SEQ ID NO: 2357688
cucuucauuucuaagcacc

SEQ ID NO: 2357690 - RNA, 19 nt, Artificial Sequence
  Description of Artificial Sequence: Synthetic oligonucleotide
  Sense strand starting at position 351 of SEQ ID NO: 1885648
gugcuuagaaaugaagagu

SEQ ID NO: 2357691 - RNA, 19 nt, Artificial Sequence
  Description of Artificial Sequence: Synthetic oligonucleotide
  Antisense strand to SEQ ID NO: 2357690
acucuucauuucuaagcac

SEQ ID NO: 2357692 - RNA, 19 nt, Artificial Sequence
  Description of Artificial Sequence: Synthetic oligonucleotide
  Sense strand starting at position 444 of SEQ ID NO: 1885648
auaugagguauguacaguu

SEQ ID NO: 2357693 - RNA, 19 nt, Artificial Sequence
  Description of Artificial Sequence: Synthetic oligonucleotide
  Antisense strand to SEQ ID NO: 2357692
aacuguacauaccucauau

SEQ ID NO: 2357694 - RNA, 19 nt, Artificial Sequence
  Description of Artificial Sequence: Synthetic oligonucleotide
  Sense strand starting at position 525 of SEQ ID NO: 1885648
cagugaaaguccucaagcu

SEQ ID NO: 2357695 - RNA, 19 nt, Artificial Sequence
  Description of Artificial Sequence: Synthetic oligonucleotide
  Antisense strand to SEQ ID NO: 2357694
agcuugaggacuuucacug

SEQ ID NO: 2357696 - RNA, 19 nt, Artificial Sequence
  Description of Artificial Sequence: Synthetic oligonucleotide
  Sense strand starting at position 526 of SEQ ID NO: 1885648
agugaaaguccucaagcug

SEQ ID NO: 2357697 - RNA, 19 nt, Artificial Sequence
  Description of Artificial Sequence: Synthetic oligonucleotide
  Antisense strand to SEQ ID NO: 2357696
cagcuugaggacuuucacu

SEQ ID NO: 2357698 - RNA, 19 nt, Artificial Sequence
  Description of Artificial Sequence: Synthetic oligonucleotide
  Sense strand starting at position 589 of SEQ ID NO: 1885648
cccacugucuaagugguua

SEQ ID NO: 2357699 - RNA, 19 nt, Artificial Sequence
  Description of Artificial Sequence: Synthetic oligonucleotide
  Antisense strand to SEQ ID NO: 2357698
uaaccacuuagacaguggg

SEQ ID NO: 2357700 - RNA, 19 nt, Artificial Sequence
  Description of Artificial Sequence: Synthetic oligonucleotide
  Sense strand starting at position 593 of SEQ ID NO: 1885648
cugucuaagugguuauuau

SEQ ID NO: 2357701 - RNA, 19 nt, Artificial Sequence
  Description of Artificial Sequence: Synthetic oligonucleotide
  Antisense strand to SEQ ID NO: 2357700
auaauaaccacuuagacag

SEQ ID NO: 2357702 - RNA, 19 nt, Artificial Sequence
  Description of Artificial Sequence: Synthetic oligonucleotide
  Sense strand starting at position 594 of SEQ ID NO: 1885648
ugucuaagugguuauuauu

SEQ ID NO: 2357703 - RNA, 19 nt, Artificial Sequence
  Description of Artificial Sequence: Synthetic oligonucleotide
  Antisense strand to SEQ ID NO: 2357702
aauaauaaccacuuagaca

SEQ ID NO: 2357704 - RNA, 19 nt, Artificial Sequence
  Description of Artificial Sequence: Synthetic oligonucleotide
  Sense strand starting at position 605 of SEQ ID NO: 1885648
uuauuauuauggccagauu

SEQ ID NO: 2357705 - RNA, 19 nt, Artificial Sequence
  Description of Artificial Sequence: Synthetic oligonucleotide
  Antisense strand to SEQ ID NO: 2357704
aaucuggccauaauaauaa

SEQ ID NO: 2357706 - RNA, 19 nt, Artificial Sequence
  Description of Artificial Sequence: Synthetic oligonucleotide
  Sense strand starting at position 608 of SEQ ID NO: 1885648
uuauuauggccagauucca

SEQ ID NO: 2357707 - RNA, 19 nt, Artificial Sequence
  Description of Artificial Sequence: Synthetic oligonucleotide
  Antisense strand to SEQ ID NO: 2357706
uggaaucuggccauaauaa

SEQ ID NO: 2357708 - RNA, 19 nt, Artificial Sequence
  Description of Artificial Sequence: Synthetic oligonucleotide
  Sense strand starting at position 708 of SEQ ID NO: 1885648
ggcagucauggguagugaa

SEQ ID NO: 2357709 - RNA, 19 nt, Artificial Sequence
  Description of Artificial Sequence: Synthetic oligonucleotide
  Antisense strand to SEQ ID NO: 2357708
uucacuacccaugacugcc

SEQ ID NO: 2357710 - RNA, 19 nt, Artificial Sequence
  Description of Artificial Sequence: Synthetic oligonucleotide
  Sense strand starting at position 720 of SEQ ID NO: 1885648
uagugaauaguggguagau

SEQ ID NO: 2357711 - RNA, 19 nt, Artificial Sequence
  Description of Artificial Sequence: Synthetic oligonucleotide
  Antisense strand to SEQ ID NO: 2357710
aucuacccacuauucacua

SEQ ID NO: 2357712 - RNA, 19 nt, Artificial Sequence
  Description of Artificial Sequence: Synthetic oligonucleotide
  Sense strand starting at position 721 of SEQ ID NO: 1885648
agugaauaguggguagaua

SEQ ID NO: 2357713 - RNA, 19 nt, Artificial Sequence
  Description of Artificial Sequence: Synthetic oligonucleotide
  Antisense strand to SEQ ID NO: 2357712
uaucuacccacuauucacu

SEQ ID NO: 2357714 - RNA, 19 nt, Artificial Sequence
  Description of Artificial Sequence: Synthetic oligonucleotide
  Sense strand starting at position 965 of SEQ ID NO: 1885648
cucaguaagguccgagauu

SEQ ID NO: 2357715 - RNA, 19 nt, Artificial Sequence
  Description of Artificial Sequence: Synthetic oligonucleotide
  Antisense strand to SEQ ID NO: 2357714
aaucucggaccuuacugag

SEQ ID NO: 2357716 - RNA, 19 nt, Artificial Sequence
  Description of Artificial Sequence: Synthetic oligonucleotide
  Sense strand starting at position 966 of SEQ ID NO: 1885648
ucaguaagguccgagauuu

SEQ ID NO: 2357717 - RNA, 19 nt, Artificial Sequence
  Description of Artificial Sequence: Synthetic oligonucleotide
  Antisense strand to SEQ ID NO: 2357716
aaaucucggaccuuacuga

SEQ ID NO: 2357718 - RNA, 19 nt, Artificial Sequence
  Description of Artificial Sequence: Synthetic oligonucleotide
  Sense strand starting at position 1152 of SEQ ID NO: 1885648
cguucuugagcuugaagag

SEQ ID NO: 2357719 - RNA, 19 nt, Artificial Sequence
  Description of Artificial Sequence: Synthetic oligonucleotide
  Antisense strand to SEQ ID NO: 2357718
cucuucaagcucaagaacg

SEQ ID NO: 2357720 - RNA, 19 nt, Artificial Sequence
  Description of Artificial Sequence: Synthetic oligonucleotide
  Sense strand starting at position 1481 of SEQ ID NO: 1885648
ugguccaccuugucaaagu

SEQ ID NO: 2357721 - RNA, 19 nt, Artificial Sequence
  Description of Artificial Sequence: Synthetic oligonucleotide
  Antisense strand to SEQ ID NO: 2357720
acuuugacaagguggacca

SEQ ID NO: 2357722 - RNA, 19 nt, Artificial Sequence
  Description of Artificial Sequence: Synthetic oligonucleotide
  Sense strand starting at position 1591 of SEQ ID NO: 1885648
ggucuucuccagugaggag

SEQ ID NO: 2357723 - RNA, 19 nt, Artificial Sequence
  Description of Artificial Sequence: Synthetic oligonucleotide
  Antisense strand to SEQ ID NO: 2357722
cuccucacuggagaagacc

SEQ ID NO: 2357724 - RNA, 19 nt, Artificial Sequence
  Description of Artificial Sequence: Synthetic oligonucleotide
  Sense strand starting at position 1603 of SEQ ID NO: 1885648
ugaggagcacuuggcauua

SEQ ID NO: 2357725 - RNA, 19 nt, Artificial Sequence
  Description of Artificial Sequence: Synthetic oligonucleotide
  Antisense strand to SEQ ID NO: 2357724
uaaugccaagugcuccuca

SEQ ID NO: 2357726 - RNA, 19 nt, Artificial Sequence
  Description of Artificial Sequence: Synthetic oligonucleotide
  Sense strand starting at position 1802 of SEQ ID NO: 1885648
ccugcucaugccuggaaca

SEQ ID NO: 2357727 - RNA, 19 nt, Artificial Sequence
  Description of Artificial Sequence: Synthetic oligonucleotide
  Antisense strand to SEQ ID NO: 2357726
uguuccaggcaugagcagg

SEQ ID NO: 2357728 - RNA, 19 nt, Artificial Sequence
  Description of Artificial Sequence: Synthetic oligonucleotide
  Sense strand starting at position 1804 of SEQ ID NO: 1885648
ugcucaugccuggaacaga

SEQ ID NO: 2357729 - RNA, 19 nt, Artificial Sequence
  Description of Artificial Sequence: Synthetic oligonucleotide
  Antisense strand to SEQ ID NO: 2357728
ucuguuccaggcaugagca

SEQ ID NO: 2357730 - RNA, 19 nt, Artificial Sequence
  Description of Artificial Sequence: Synthetic oligonucleotide
  Sense strand starting at position 1956 of SEQ ID NO: 1885648
auacgugagcaucagguau

SEQ ID NO: 2357731 - RNA, 19 nt, Artificial Sequence
  Description of Artificial Sequence: Synthetic oligonucleotide
  Antisense strand to SEQ ID NO: 2357730
auaccugaugcucacguau

SEQ ID NO: 2357732 - RNA, 19 nt, Artificial Sequence
  Description of Artificial Sequence: Synthetic oligonucleotide
  Sense strand starting at position 1969 of SEQ ID NO: 1885648
agguauaacccgggccaaa

SEQ ID NO: 2357733 - RNA, 19 nt, Artificial Sequence
  Description of Artificial Sequence: Synthetic oligonucleotide
  Antisense strand to SEQ ID NO: 2357732
uuuggcccggguuauaccu

SEQ ID NO: 2357734 - RNA, 19 nt, Artificial Sequence
  Description of Artificial Sequence: Synthetic oligonucleotide
  Sense strand starting at position 2509 of SEQ ID NO: 1885648
gcaccucacuguuugagga

SEQ ID NO: 2357735 - RNA, 19 nt, Artificial Sequence
  Description of Artificial Sequence: Synthetic oligonucleotide
  Antisense strand to SEQ ID NO: 2357734
uccucaaacagugaggugc

SEQ ID NO: 2357736 - RNA, 19 nt, Artificial Sequence
  Description of Artificial Sequence: Synthetic oligonucleotide
  Sense strand starting at position 2615 of SEQ ID NO: 1885648
gggucuuucccuugcagag

SEQ ID NO: 2357737 - RNA, 19 nt, Artificial Sequence
  Description of Artificial Sequence: Synthetic oligonucleotide
  Antisense strand to SEQ ID NO: 2357736
cucugcaagggaaagaccc

SEQ ID NO: 2357738 - RNA, 19 nt, Artificial Sequence
  Description of Artificial Sequence: Synthetic oligonucleotide
  Sense strand starting at position 2759 of SEQ ID NO: 1885648
ccuccauuugcuggguaua

SEQ ID NO: 2357739 - RNA, 19 nt, Artificial Sequence
  Description of Artificial Sequence: Synthetic oligonucleotide
  Antisense strand to SEQ ID NO: 2357738
uauacccagcaaauggagg

SEQ ID NO: 2357740 - RNA, 19 nt, Artificial Sequence
  Description of Artificial Sequence: Synthetic oligonucleotide
  Sense strand starting at position 2792 of SEQ ID NO: 1885648
gggucagcugcgagauuag

SEQ ID NO: 2357741 - RNA, 19 nt, Artificial Sequence
  Description of Artificial Sequence: Synthetic oligonucleotide
  Antisense strand to SEQ ID NO: 2357740
cuaaucucgcagcugaccc

SEQ ID NO: 2357742 - RNA, 19 nt, Artificial Sequence
  Description of Artificial Sequence: Synthetic oligonucleotide
  Sense strand starting at position 2801 of SEQ ID NO: 1885648
gcgagauuagcgccuccuu

SEQ ID NO: 2357743 - RNA, 19 nt, Artificial Sequence
  Description of Artificial Sequence: Synthetic oligonucleotide
  Antisense strand to SEQ ID NO: 2357742
aaggaggcgcuaaucucgc

SEQ ID NO: 2357744 - RNA, 19 nt, Artificial Sequence
  Description of Artificial Sequence: Synthetic oligonucleotide
  Sense strand starting at position 2802 of SEQ ID NO: 1885648
cgagauuagcgccuccuuu

SEQ ID NO: 2357745 - RNA, 19 nt, Artificial Sequence
  Description of Artificial Sequence: Synthetic oligonucleotide
  Antisense strand to SEQ ID NO: 2357744
aaaggaggcgcuaaucucg

SEQ ID NO: 2357746 - RNA, 19 nt, Artificial Sequence
  Description of Artificial Sequence: Synthetic oligonucleotide
  Sense strand starting at position 2839 of SEQ ID NO: 1885648
aacucuccuggaggugaaa

SEQ ID NO: 2357747 - RNA, 19 nt, Artificial Sequence
  Description of Artificial Sequence: Synthetic oligonucleotide
  Antisense strand to SEQ ID NO: 2357746
uuucaccuccaggagaguu

SEQ ID NO: 2357748 - RNA, 19 nt, Artificial Sequence
  Description of Artificial Sequence: Synthetic oligonucleotide
  Sense strand starting at position 2962 of SEQ ID NO: 1885648
aaaucauugagggagcguu

SEQ ID NO: 2357749 - RNA, 19 nt, Artificial Sequence
  Description of Artificial Sequence: Synthetic oligonucleotide
  Antisense strand to SEQ ID NO: 2357748
aacgcucccucaaugauuu

SEQ ID NO: 2357750 - RNA, 19 nt, Artificial Sequence
  Description of Artificial Sequence: Synthetic oligonucleotide
  Sense strand starting at position 3032 of SEQ ID NO: 1885648
gagacacuuucuccagguu

SEQ ID NO: 2357751 - RNA, 19 nt, Artificial Sequence
  Description of Artificial Sequence: Synthetic oligonucleotide
  Antisense strand to SEQ ID NO: 2357750
aaccuggagaaagugucuc

SEQ ID NO: 2357752 - RNA, 19 nt, Artificial Sequence
  Description of Artificial Sequence: Synthetic oligonucleotide
  Sense strand starting at position 3033 of SEQ ID NO: 1885648
agacacuuucuccagguuu

SEQ ID NO: 2357753 - RNA, 19 nt, Artificial Sequence
  Description of Artificial Sequence: Synthetic oligonucleotide
  Antisense strand to SEQ ID NO: 2357752
aaaccuggagaaagugucu

SEQ ID NO: 2357754 - RNA, 19 nt, Artificial Sequence
  Description of Artificial Sequence: Synthetic oligonucleotide
  Sense strand starting at position 3917 of SEQ ID NO: 1885648
aacaguuggcaaugucuga

SEQ ID NO: 2357755 - RNA, 19 nt, Artificial Sequence
  Description of Artificial Sequence: Synthetic oligonucleotide
  Antisense strand to SEQ ID NO: 2357754
ucagacauugccaacuguu

SEQ ID NO: 2357756 - RNA, 19 nt, Artificial Sequence
  Description of Artificial Sequence: Synthetic oligonucleotide
  Sense strand starting at position 3924 of SEQ ID NO: 1885648
ggcaaugucugauugucau

SEQ ID NO: 2357757 - RNA, 19 nt, Artificial Sequence
  Description of Artificial Sequence: Synthetic oligonucleotide
  Antisense strand to SEQ ID NO: 2357756
augacaaucagacauugcc

SEQ ID NO: 2357758 - RNA, 19 nt, Artificial Sequence
  Description of Artificial Sequence: Synthetic oligonucleotide
  Sense strand starting at position 308 of SEQ ID NO: 1885649
gggccugcucacuaaucau

SEQ ID NO: 2357759 - RNA, 19 nt, Artificial Sequence
  Description of Artificial Sequence: Synthetic oligonucleotide
  Antisense strand to SEQ ID NO: 2357758
augauuagugagcaggccc

SEQ ID NO: 2357760 - RNA, 19 nt, Artificial Sequence
  Description of Artificial Sequence: Synthetic oligonucleotide
  Sense strand starting at position 337 of SEQ ID NO: 1885649
ugacuucaagaguggugua

SEQ ID NO: 2357761 - RNA, 19 nt, Artificial Sequence
  Description of Artificial Sequence: Synthetic oligonucleotide
  Antisense strand to SEQ ID NO: 2357760
uacaccacucuugaaguca

SEQ ID NO: 2357762 - RNA, 19 nt, Artificial Sequence
  Description of Artificial Sequence: Synthetic oligonucleotide
  Sense strand starting at position 349 of SEQ ID NO: 1885649
ugguguaagugguucaaag

SEQ ID NO: 2357763 - RNA, 19 nt, Artificial Sequence
  Description of Artificial Sequence: Synthetic oligonucleotide
  Antisense strand to SEQ ID NO: 2357762
cuuugaaccacuuacacca

SEQ ID NO: 2357764 - RNA, 19 nt, Artificial Sequence
  Description of Artificial Sequence: Synthetic oligonucleotide
  Sense strand starting at position 351 of SEQ ID NO: 1885649
guguaagugguucaaagaa

SEQ ID NO: 2357765 - RNA, 19 nt, Artificial Sequence
  Description of Artificial Sequence: Synthetic oligonucleotide
  Antisense strand to SEQ ID NO: 2357764
uucuuugaaccacuuacac

SEQ ID NO: 2357766 - RNA, 19 nt, Artificial Sequence
  Description of Artificial Sequence: Synthetic oligonucleotide
  Sense strand starting at position 507 of SEQ ID NO: 1885649
ggcaaucagguauagagua

SEQ ID NO: 2357767 - RNA, 19 nt, Artificial Sequence
  Description of Artificial Sequence: Synthetic oligonucleotide
  Antisense strand to SEQ ID NO: 2357766
uacucuauaccugauugcc

SEQ ID NO: 2357768 - RNA, 19 nt, Artificial Sequence
  Description of Artificial Sequence: Synthetic oligonucleotide
  Sense strand starting at position 558 of SEQ ID NO: 1885649
ccgggagguauguggaaau

SEQ ID NO: 2357769 - RNA, 19 nt, Artificial Sequence
  Description of Artificial Sequence: Synthetic oligonucleotide
  Antisense strand to SEQ ID NO: 2357768
auuuccacauaccucccgg

SEQ ID NO: 2357770 - RNA, 19 nt, Artificial Sequence
  Description of Artificial Sequence: Synthetic oligonucleotide
  Sense strand starting at position 575 of SEQ ID NO: 1885649
augggaagcucagcuaaga

SEQ ID NO: 2357771 - RNA, 19 nt, Artificial Sequence
  Description of Artificial Sequence: Synthetic oligonucleotide
  Antisense strand to SEQ ID NO: 2357770
ucuuagcugagcuucccau

SEQ ID NO: 2357772 - RNA, 19 nt, Artificial Sequence
  Description of Artificial Sequence: Synthetic oligonucleotide
  Sense strand starting at position 588 of SEQ ID NO: 1885649
cuaagaugcaauggguaaa

SEQ ID NO: 2357773 - RNA, 19 nt, Artificial Sequence
  Description of Artificial Sequence: Synthetic oligonucleotide
  Antisense strand to SEQ ID NO: 2357772
uuuacccauugcaucuuag

SEQ ID NO: 2357774 - RNA, 19 nt, Artificial Sequence
  Description of Artificial Sequence: Synthetic oligonucleotide
  Sense strand starting at position 608 of SEQ ID NO: 1885649
uguuuaugugaagagaguu

SEQ ID NO: 2357775 - RNA, 19 nt, Artificial Sequence
  Description of Artificial Sequence: Synthetic oligonucleotide
  Antisense strand to SEQ ID NO: 2357774
aacucucuucacauaaaca

SEQ ID NO: 2357776 - RNA, 19 nt, Artificial Sequence
  Description of Artificial Sequence: Synthetic oligonucleotide
  Sense strand starting at position 880 of SEQ ID NO: 1885649
gauagucuuuccgcuggaa

SEQ ID NO: 2357777 - RNA, 19 nt, Artificial Sequence
  Description of Artificial Sequence: Synthetic oligonucleotide
  Antisense strand to SEQ ID NO: 2357776
uuccagcggaaagacuauc

SEQ ID NO: 2357778 - RNA, 19 nt, Artificial Sequence
  Description of Artificial Sequence: Synthetic oligonucleotide
  Sense strand starting at position 1111 of SEQ ID NO: 1885649
gcuugaaggucuccagaug

SEQ ID NO: 2357779 - RNA, 19 nt, Artificial Sequence
  Description of Artificial Sequence: Synthetic oligonucleotide
  Antisense strand to SEQ ID NO: 2357778
caucuggagaccuucaagc

SEQ ID NO: 2357780 - RNA, 19 nt, Artificial Sequence
  Description of Artificial Sequence: Synthetic oligonucleotide
  Sense strand starting at position 1112 of SEQ ID NO: 1885649
cuugaaggucuccagaugu

SEQ ID NO: 2357781 - RNA, 19 nt, Artificial Sequence
  Description of Artificial Sequence: Synthetic oligonucleotide
  Antisense strand to SEQ ID NO: 2357780
acaucuggagaccuucaag

SEQ ID NO: 2357782 - RNA, 19 nt, Artificial Sequence
  Description of Artificial Sequence: Synthetic oligonucleotide
  Sense strand starting at position 1150 of SEQ ID NO: 1885649
cguucuugaguuugaagag

SEQ ID NO: 2357783 - RNA, 19 nt, Artificial Sequence
  Description of Artificial Sequence: Synthetic oligonucleotide
  Antisense strand to SEQ ID NO: 2357782
cucuucaaacucaagaacg

SEQ ID NO: 2357784 - RNA, 19 nt, Artificial Sequence
  Description of Artificial Sequence: Synthetic oligonucleotide
  Sense strand starting at position 1554 of SEQ ID NO: 1885649
cgaggagcacuuggcauua

SEQ ID NO: 2357785 - RNA, 19 nt, Artificial Sequence
  Description of Artificial Sequence: Synthetic oligonucleotide
  Antisense strand to SEQ ID NO: 2357784
uaaugccaagugcuccucg

SEQ ID NO: 2357786 - RNA, 19 nt, Artificial Sequence
  Description of Artificial Sequence: Synthetic oligonucleotide
  Sense strand starting at position 1919 of SEQ ID NO: 1885649
gcacucugcccucagacaa

SEQ ID NO: 2357787 - RNA, 19 nt, Artificial Sequence
  Description of Artificial Sequence: Synthetic oligonucleotide
  Antisense strand to SEQ ID NO: 2357786
uugucugagggcagagugc

SEQ ID NO: 2357788 - RNA, 19 nt, Artificial Sequence
  Description of Artificial Sequence: Synthetic oligonucleotide
  Sense strand starting at position 1947 of SEQ ID NO: 1885649
ucgucuuauauucggauca

SEQ ID NO: 2357789 - RNA, 19 nt, Artificial Sequence
  Description of Artificial Sequence: Synthetic oligonucleotide
  Antisense strand to SEQ ID NO: 2357788
ugauccgaauauaagacga

SEQ ID NO: 2357790 - RNA, 19 nt, Artificial Sequence
  Description of Artificial Sequence: Synthetic oligonucleotide
  Sense strand starting at position 2027 of SEQ ID NO: 1885649
ccuccuguguugucaaaca

SEQ ID NO: 2357791 - RNA, 19 nt, Artificial Sequence
  Description of Artificial Sequence: Synthetic oligonucleotide
  Antisense strand to SEQ ID NO: 2357790
uguuugacaacacaggagg

SEQ ID NO: 2357792 - RNA, 19 nt, Artificial Sequence
  Description of Artificial Sequence: Synthetic oligonucleotide
  Sense strand starting at position 2035 of SEQ ID NO: 1885649
guugucaaacacuagcuaa

SEQ ID NO: 2357793 - RNA, 19 nt, Artificial Sequence
  Description of Artificial Sequence: Synthetic oligonucleotide
  Antisense strand to SEQ ID NO: 2357792
uuagcuaguguuugacaac

SEQ ID NO: 2357794 - RNA, 19 nt, Artificial Sequence
  Description of Artificial Sequence: Synthetic oligonucleotide
  Sense strand starting at position 2217 of SEQ ID NO: 1885649
ccgaguuggccuuggaaag

SEQ ID NO: 2357795 - RNA, 19 nt, Artificial Sequence
  Description of Artificial Sequence: Synthetic oligonucleotide
  Antisense strand to SEQ ID NO: 2357794
cuuuccaaggccaacucgg

SEQ ID NO: 2357796 - RNA, 19 nt, Artificial Sequence
  Description of Artificial Sequence: Synthetic oligonucleotide
  Sense strand starting at position 2440 of SEQ ID NO: 1885649
uggccucaucuauguccaa

SEQ ID NO: 2357797 - RNA, 19 nt, Artificial Sequence
  Description of Artificial Sequence: Synthetic oligonucleotide
  Antisense strand to SEQ ID NO: 2357796
uuggacauagaugaggcca

SEQ ID NO: 2357798 - RNA, 19 nt, Artificial Sequence
  Description of Artificial Sequence: Synthetic oligonucleotide
  Sense strand starting at position 2441 of SEQ ID NO: 1885649
ggccucaucuauguccaaa

SEQ ID NO: 2357799 - RNA, 19 nt, Artificial Sequence
  Description of Artificial Sequence: Synthetic oligonucleotide
  Antisense strand to SEQ ID NO: 2357798
uuuggacauagaugaggcc

SEQ ID NO: 2357800 - RNA, 19 nt, Artificial Sequence
  Description of Artificial Sequence: Synthetic oligonucleotide
  Sense strand starting at position 2477 of SEQ ID NO: 1885649
augguuuacuguuugcuga

SEQ ID NO: 2357801 - RNA, 19 nt, Artificial Sequence
  Description of Artificial Sequence: Synthetic oligonucleotide
  Antisense strand to SEQ ID NO: 2357800
ucagcaaacaguaaaccau

SEQ ID NO: 2357802 - RNA, 19 nt, Artificial Sequence
  Description of Artificial Sequence: Synthetic oligonucleotide
  Sense strand starting at position 2479 of SEQ ID NO: 1885649
gguuuacuguuugcugaua

SEQ ID NO: 2357803 - RNA, 19 nt, Artificial Sequence
  Description of Artificial Sequence: Synthetic oligonucleotide
  Antisense strand to SEQ ID NO: 2357802
uaucagcaaacaguaaacc

SEQ ID NO: 2357804 - RNA, 19 nt, Artificial Sequence
  Description of Artificial Sequence: Synthetic oligonucleotide
  Sense strand starting at position 2480 of SEQ ID NO: 1885649
guuuacuguuugcugauaa

SEQ ID NO: 2357805 - RNA, 19 nt, Artificial Sequence
  Description of Artificial Sequence: Synthetic oligonucleotide
  Antisense strand to SEQ ID NO: 2357804
uuaucagcaaacaguaaac

SEQ ID NO: 2357806 - RNA, 19 nt, Artificial Sequence
  Description of Artificial Sequence: Synthetic oligonucleotide
  Sense strand starting at position 2508 of SEQ ID NO: 1885649
ccaauacagcagugaacua

SEQ ID NO: 2357807 - RNA, 19 nt, Artificial Sequence
  Description of Artificial Sequence: Synthetic oligonucleotide
  Antisense strand to SEQ ID NO: 2357806
uaguucacugcuguauugg

SEQ ID NO: 2357808 - RNA, 19 nt, Artificial Sequence
  Description of Artificial Sequence: Synthetic oligonucleotide
  Sense strand starting at position 2666 of SEQ ID NO: 1885649
agcuauaagaggcagguua

SEQ ID NO: 2357809 - RNA, 19 nt, Artificial Sequence
  Description of Artificial Sequence: Synthetic oligonucleotide
  Antisense strand to SEQ ID NO: 2357808
uaaccugccucuuauagcu

SEQ ID NO: 2357810 - RNA, 19 nt, Artificial Sequence
  Description of Artificial Sequence: Synthetic oligonucleotide
  Sense strand starting at position 2683 of SEQ ID NO: 1885649
uaguaugaacccuggaguu

SEQ ID NO: 2357811 - RNA, 19 nt, Artificial Sequence
  Description of Artificial Sequence: Synthetic oligonucleotide
  Antisense strand to SEQ ID NO: 2357810
aacuccaggguucauacua

SEQ ID NO: 2357812 - RNA, 19 nt, Artificial Sequence
  Description of Artificial Sequence: Synthetic oligonucleotide
  Sense strand starting at position 2730 of SEQ ID NO: 1885649
ucaugaguccagcaaagug

SEQ ID NO: 2357813 - RNA, 19 nt, Artificial Sequence
  Description of Artificial Sequence: Synthetic oligonucleotide
  Antisense strand to SEQ ID NO: 2357812
cacuuugcuggacucauga

SEQ ID NO: 2357814 - RNA, 19 nt, Artificial Sequence
  Description of Artificial Sequence: Synthetic oligonucleotide
  Sense strand starting at position 2968 of SEQ ID NO: 1885649
caggguuugggcugugauu

SEQ ID NO: 2357815 - RNA, 19 nt, Artificial Sequence
  Description of Artificial Sequence: Synthetic oligonucleotide
  Antisense strand to SEQ ID NO: 2357814
aaucacagcccaaacccug

SEQ ID NO: 2357816 - RNA, 19 nt, Artificial Sequence
  Description of Artificial Sequence: Synthetic oligonucleotide
  Sense strand starting at position 2970 of SEQ ID NO: 1885649
ggguuugggcugugauuuc

SEQ ID NO: 2357817 - RNA, 19 nt, Artificial Sequence
  Description of Artificial Sequence: Synthetic oligonucleotide
  Antisense strand to SEQ ID NO: 2357816
gaaaucacagcccaaaccc

SEQ ID NO: 2357818 - RNA, 19 nt, Artificial Sequence
  Description of Artificial Sequence: Synthetic oligonucleotide
  Sense strand starting at position 2992 of SEQ ID NO: 1885649
uuagaauucuuggagaacu

SEQ ID NO: 2357819 - RNA, 19 nt, Artificial Sequence
  Description of Artificial Sequence: Synthetic oligonucleotide
  Antisense strand to SEQ ID NO: 2357818
aguucuccaagaauucuaa

SEQ ID NO: 2357820 - RNA, 19 nt, Artificial Sequence
  Description of Artificial Sequence: Synthetic oligonucleotide
  Sense strand starting at position 3003 of SEQ ID NO: 1885649
ggagaacuguugguccaca

SEQ ID NO: 2357821 - RNA, 19 nt, Artificial Sequence
  Description of Artificial Sequence: Synthetic oligonucleotide
  Antisense strand to SEQ ID NO: 2357820
uguggaccaacaguucucc

SEQ ID NO: 2357822 - RNA, 19 nt, Artificial Sequence
  Description of Artificial Sequence: Synthetic oligonucleotide
  Sense strand starting at position 3066 of SEQ ID NO: 1885649
gucagugugcuccuugcuu

SEQ ID NO: 2357823 - RNA, 19 nt, Artificial Sequence
  Description of Artificial Sequence: Synthetic oligonucleotide
  Antisense strand to SEQ ID NO: 2357822
aagcaaggagcacacugac

SEQ ID NO: 2357824 - RNA, 19 nt, Artificial Sequence
  Description of Artificial Sequence: Synthetic oligonucleotide
  Sense strand starting at position 3450 of SEQ ID NO: 1885649
uggugaggucguugacaga

SEQ ID NO: 2357825 - RNA, 19 nt, Artificial Sequence
  Description of Artificial Sequence: Synthetic oligonucleotide
  Antisense strand to SEQ ID NO: 2357824
ucugucaacgaccucacca

SEQ ID NO: 2357826 - RNA, 19 nt, Artificial Sequence
  Description of Artificial Sequence: Synthetic oligonucleotide
  Sense strand starting at position 3451 of SEQ ID NO: 1885649
ggugaggucguugacagaa

SEQ ID NO: 2357827 - RNA, 19 nt, Artificial Sequence
  Description of Artificial Sequence: Synthetic oligonucleotide
  Antisense strand to SEQ ID NO: 2357826
uucugucaacgaccucacc

SEQ ID NO: 2357828 - RNA, 19 nt, Artificial Sequence
  Description of Artificial Sequence: Synthetic oligonucleotide
  Sense strand starting at position 3525 of SEQ ID NO: 1885649
ggcacaucuucuccagguu

SEQ ID NO: 2357829 - RNA, 19 nt, Artificial Sequence
  Description of Artificial Sequence: Synthetic oligonucleotide
  Antisense strand to SEQ ID NO: 2357828
aaccuggagaagaugugcc

SEQ ID NO: 2357830 - RNA, 19 nt, Artificial Sequence
  Description of Artificial Sequence: Synthetic oligonucleotide
  Sense strand starting at position 3526 of SEQ ID NO: 1885649
gcacaucuucuccagguua

SEQ ID NO: 2357831 - RNA, 19 nt, Artificial Sequence
  Description of Artificial Sequence: Synthetic oligonucleotide
  Antisense strand to SEQ ID NO: 2357830
uaaccuggagaagaugugc

SEQ ID NO: 2357832 - RNA, 19 nt, Artificial Sequence
  Description of Artificial Sequence: Synthetic oligonucleotide
  Sense strand starting at position 3556 of SEQ ID NO: 1885649
gaaggagaguuauaugaug

SEQ ID NO: 2357833 - RNA, 19 nt, Artificial Sequence
  Description of Artificial Sequence: Synthetic oligonucleotide
  Antisense strand to SEQ ID NO: 2357832
caucauauaacucuccuuc

SEQ ID NO: 2357834 - RNA, 19 nt, Artificial Sequence
  Description of Artificial Sequence: Synthetic oligonucleotide
  Sense strand starting at position 3562 of SEQ ID NO: 1885649
gaguuauaugauggauguu

SEQ ID NO: 2357835 - RNA, 19 nt, Artificial Sequence
  Description of Artificial Sequence: Synthetic oligonucleotide
  Antisense strand to SEQ ID NO: 2357834
aacauccaucauauaacuc

SEQ ID NO: 2357836 - RNA, 19 nt, Artificial Sequence
  Description of Artificial Sequence: Synthetic oligonucleotide
  Sense strand starting at position 3600 of SEQ ID NO: 1885649
ggguguaagaggugcaacu

SEQ ID NO: 2357837 - RNA, 19 nt, Artificial Sequence
  Description of Artificial Sequence: Synthetic oligonucleotide
  Antisense strand to SEQ ID NO: 2357836
aguugcaccucuuacaccc

SEQ ID NO: 2357838 - RNA, 19 nt, Artificial Sequence
  Description of Artificial Sequence: Synthetic oligonucleotide
  Sense strand starting at position 63 of SEQ ID NO: 1885650
gauguuagauggcuagcuu

SEQ ID NO: 2357839 - RNA, 19 nt, Artificial Sequence
  Description of Artificial Sequence: Synthetic oligonucleotide
  Antisense strand to SEQ ID NO: 2357838
aagcuagccaucuaacauc

SEQ ID NO: 2357840 - RNA, 19 nt, Artificial Sequence
  Description of Artificial Sequence: Synthetic oligonucleotide
  Sense strand starting at position 110 of SEQ ID NO: 1885650
acgcucucccugggaagau

SEQ ID NO: 2357841 - RNA, 19 nt, Artificial Sequence
  Description of Artificial Sequence: Synthetic oligonucleotide
  Antisense strand to SEQ ID NO: 2357840
aucuucccagggagagcgu

SEQ ID NO: 2357842 - RNA, 19 nt, Artificial Sequence
  Description of Artificial Sequence: Synthetic oligonucleotide
  Sense strand starting at position 136 of SEQ ID NO: 1885650
gaaguaagacgcugucauu

SEQ ID NO: 2357843 - RNA, 19 nt, Artificial Sequence
  Description of Artificial Sequence: Synthetic oligonucleotide
  Antisense strand to SEQ ID NO: 2357842
aaugacagcgucuuacuuc

SEQ ID NO: 2357844 - RNA, 19 nt, Artificial Sequence
  Description of Artificial Sequence: Synthetic oligonucleotide
  Sense strand starting at position 228 of SEQ ID NO: 1885650
ucaggaaucugggcccaua

SEQ ID NO: 2357845 - RNA, 19 nt, Artificial Sequence
  Description of Artificial Sequence: Synthetic oligonucleotide
  Antisense strand to SEQ ID NO: 2357844
uaugggcccagauuccuga

SEQ ID NO: 2357846 - RNA, 19 nt, Artificial Sequence
  Description of Artificial Sequence: Synthetic oligonucleotide
  Sense strand starting at position 254 of SEQ ID NO: 1885650
ccgagagucuggccuuaug

SEQ ID NO: 2357847 - RNA, 19 nt, Artificial Sequence
  Description of Artificial Sequence: Synthetic oligonucleotide
  Antisense strand to SEQ ID NO: 2357846
cauaaggccagacucucgg

SEQ ID NO: 2357848 - RNA, 19 nt, Artificial Sequence
  Description of Artificial Sequence: Synthetic oligonucleotide
  Sense strand starting at position 382 of SEQ ID NO: 1885650
ggcaucucagagcauugaa

SEQ ID NO: 2357849 - RNA, 19 nt, Artificial Sequence
  Description of Artificial Sequence: Synthetic oligonucleotide
  Antisense strand to SEQ ID NO: 2357848
uucaaugcucugagaugcc

SEQ ID NO: 2357850 - RNA, 19 nt, Artificial Sequence
  Description of Artificial Sequence: Synthetic oligonucleotide
  Sense strand starting at position 385 of SEQ ID NO: 1885650
aucucagagcauugaaugu

SEQ ID NO: 2357851 - RNA, 19 nt, Artificial Sequence
  Description of Artificial Sequence: Synthetic oligonucleotide
  Antisense strand to SEQ ID NO: 2357850
acauucaaugcucugagau

SEQ ID NO: 2357852 - RNA, 19 nt, Artificial Sequence
  Description of Artificial Sequence: Synthetic oligonucleotide
  Sense strand starting at position 465 of SEQ ID NO: 1885650
uccugaaaggcuugagugu

SEQ ID NO: 2357853 - RNA, 19 nt, Artificial Sequence
  Description of Artificial Sequence: Synthetic oligonucleotide
  Antisense strand to SEQ ID NO: 2357852
acacucaagccuuucagga

SEQ ID NO: 2357854 - RNA, 19 nt, Artificial Sequence
  Description of Artificial Sequence: Synthetic oligonucleotide
  Sense strand starting at position 593 of SEQ ID NO: 1885650
gggcccuaauuuggagaaa

SEQ ID NO: 2357855 - RNA, 19 nt, Artificial Sequence
  Description of Artificial Sequence: Synthetic oligonucleotide
  Antisense strand to SEQ ID NO: 2357854
uuucuccaaauuagggccc

SEQ ID NO: 2357856 - RNA, 19 nt, Artificial Sequence
  Description of Artificial Sequence: Synthetic oligonucleotide
  Sense strand starting at position 594 of SEQ ID NO: 1885650
ggcccuaauuuggagaaau

SEQ ID NO: 2357857 - RNA, 19 nt, Artificial Sequence
  Description of Artificial Sequence: Synthetic oligonucleotide
  Antisense strand to SEQ ID NO: 2357856
auuucuccaaauuagggcc

SEQ ID NO: 2357858 - RNA, 19 nt, Artificial Sequence
  Description of Artificial Sequence: Synthetic oligonucleotide
  Sense strand starting at position 1040 of SEQ ID NO: 1885650
guaguacuuccuggaggga

SEQ ID NO: 2357859 - RNA, 19 nt, Artificial Sequence
  Description of Artificial Sequence: Synthetic oligonucleotide
  Antisense strand to SEQ ID NO: 2357858
ucccuccaggaaguacuac

SEQ ID NO: 2357860 - RNA, 19 nt, Artificial Sequence
  Description of Artificial Sequence: Synthetic oligonucleotide
  Sense strand starting at position 1159 of SEQ ID NO: 1885650
gugagugauugggccagga

SEQ ID NO: 2357861 - RNA, 19 nt, Artificial Sequence
  Description of Artificial Sequence: Synthetic oligonucleotide
  Antisense strand to SEQ ID NO: 2357860
uccuggcccaaucacucac

SEQ ID NO: 2357862 - RNA, 19 nt, Artificial Sequence
  Description of Artificial Sequence: Synthetic oligonucleotide
  Sense strand starting at position 1316 of SEQ ID NO: 1885650
uuguguauucugugaauug

SEQ ID NO: 2357863 - RNA, 19 nt, Artificial Sequence
  Description of Artificial Sequence: Synthetic oligonucleotide
  Antisense strand to SEQ ID NO: 2357862
caauucacagaauacacaa

SEQ ID NO: 2357864 - RNA, 19 nt, Artificial Sequence
  Description of Artificial Sequence: Synthetic oligonucleotide
  Sense strand starting at position 1368 of SEQ ID NO: 1885650
ugcguuugaccagaaggua

SEQ ID NO: 2357865 - RNA, 19 nt, Artificial Sequence
  Description of Artificial Sequence: Synthetic oligonucleotide
  Antisense strand to SEQ ID NO: 2357864
uaccuucuggucaaacgca

SEQ ID NO: 2357866 - RNA, 19 nt, Artificial Sequence
  Description of Artificial Sequence: Synthetic oligonucleotide
  Sense strand starting at position 1662 of SEQ ID NO: 1885650
gggccagagaucugagauc

SEQ ID NO: 2357867 - RNA, 19 nt, Artificial Sequence
  Description of Artificial Sequence: Synthetic oligonucleotide
  Antisense strand to SEQ ID NO: 2357866
gaucucagaucucuggccc

SEQ ID NO: 2357868 - RNA, 19 nt, Artificial Sequence
  Description of Artificial Sequence: Synthetic oligonucleotide
  Sense strand starting at position 1743 of SEQ ID NO: 1885650
guucccuuaggucaagauu

SEQ ID NO: 2357869 - RNA, 19 nt, Artificial Sequence
  Description of Artificial Sequence: Synthetic oligonucleotide
  Antisense strand to SEQ ID NO: 2357868
aaucuugaccuaagggaac

SEQ ID NO: 2357870 - RNA, 19 nt, Artificial Sequence
  Description of Artificial Sequence: Synthetic oligonucleotide
  Sense strand starting at position 2024 of SEQ ID NO: 1885650
acuguuaguuccuuaagau

SEQ ID NO: 2357871 - RNA, 19 nt, Artificial Sequence
  Description of Artificial Sequence: Synthetic oligonucleotide
  Antisense strand to SEQ ID NO: 2357870
aucuuaaggaacuaacagu

SEQ ID NO: 2357872 - RNA, 19 nt, Artificial Sequence
  Description of Artificial Sequence: Synthetic oligonucleotide
  Sense strand starting at position 2025 of SEQ ID NO: 1885650
cuguuaguuccuuaagaua

SEQ ID NO: 2357873 - RNA, 19 nt, Artificial Sequence
  Description of Artificial Sequence: Synthetic oligonucleotide
  Antisense strand to SEQ ID NO: 2357872
uaucuuaaggaacuaacag

SEQ ID NO: 2357874 - RNA, 19 nt, Artificial Sequence
  Description of Artificial Sequence: Synthetic oligonucleotide
  Sense strand starting at position 2090 of SEQ ID NO: 1885650
acacuaugucugcagucua

SEQ ID NO: 2357875 - RNA, 19 nt, Artificial Sequence
  Description of Artificial Sequence: Synthetic oligonucleotide
  Antisense strand to SEQ ID NO: 2357874
uagacugcagacauagugu

SEQ ID NO: 2357876 - RNA, 19 nt, Artificial Sequence
  Description of Artificial Sequence: Synthetic oligonucleotide
  Sense strand starting at position 2103 of SEQ ID NO: 1885650
agucuaacuaggugugacu

SEQ ID NO: 2357877 - RNA, 19 nt, Artificial Sequence
  Description of Artificial Sequence: Synthetic oligonucleotide
  Antisense strand to SEQ ID NO: 2357876
agucacaccuaguuagacu

SEQ ID NO: 2357878 - RNA, 19 nt, Artificial Sequence
  Description of Artificial Sequence: Synthetic oligonucleotide
  Sense strand starting at position 2138 of SEQ ID NO: 1885650
ggcaauauguacccagcau

SEQ ID NO: 2357879 - RNA, 19 nt, Artificial Sequence
  Description of Artificial Sequence: Synthetic oligonucleotide
  Antisense strand to SEQ ID NO: 2357878
augcuggguacauauugcc

SEQ ID NO: 2357880 - RNA, 19 nt, Artificial Sequence
  Description of Artificial Sequence: Synthetic oligonucleotide
  Sense strand starting at position 2168 of SEQ ID NO: 1885650
cgagucucagcccagacau

SEQ ID NO: 2357881 - RNA, 19 nt, Artificial Sequence
  Description of Artificial Sequence: Synthetic oligonucleotide
  Antisense strand to SEQ ID NO: 2357880
augucugggcugagacucg

SEQ ID NO: 2357882 - RNA, 19 nt, Artificial Sequence
  Description of Artificial Sequence: Synthetic oligonucleotide
  Sense strand starting at position 2192 of SEQ ID NO: 1885650
ccuagaaauugucccugca

SEQ ID NO: 2357883 - RNA, 19 nt, Artificial Sequence
  Description of Artificial Sequence: Synthetic oligonucleotide
  Antisense strand to SEQ ID NO: 2357882
ugcagggacaauuucuagg

SEQ ID NO: 2357884 - RNA, 19 nt, Artificial Sequence
  Description of Artificial Sequence: Synthetic oligonucleotide
  Sense strand starting at position 2194 of SEQ ID NO: 1885650
uagaaauugucccugcaga

SEQ ID NO: 2357885 - RNA, 19 nt, Artificial Sequence
  Description of Artificial Sequence: Synthetic oligonucleotide
  Antisense strand to SEQ ID NO: 2357884
ucugcagggacaauuucua

SEQ ID NO: 2357886 - RNA, 19 nt, Artificial Sequence
  Description of Artificial Sequence: Synthetic oligonucleotide
  Sense strand starting at position 2195 of SEQ ID NO: 1885650
agaaauugucccugcagaa

SEQ ID NO: 2357887 - RNA, 19 nt, Artificial Sequence
  Description of Artificial Sequence: Synthetic oligonucleotide
  Antisense strand to SEQ ID NO: 2357886
uucugcagggacaauuucu

SEQ ID NO: 2357888 - RNA, 19 nt, Artificial Sequence
  Description of Artificial Sequence: Synthetic oligonucleotide
  Sense strand starting at position 2261 of SEQ ID NO: 1885650
cagcguuaucagucugcaa

SEQ ID NO: 2357889 - RNA, 19 nt, Artificial Sequence
  Description of Artificial Sequence: Synthetic oligonucleotide
  Antisense strand to SEQ ID NO: 2357888
uugcagacugauaacgcug

SEQ ID NO: 2357890 - RNA, 19 nt, Artificial Sequence
  Description of Artificial Sequence: Synthetic oligonucleotide
  Sense strand starting at position 2373 of SEQ ID NO: 1885650
agagguagguccuugacca

SEQ ID NO: 2357891 - RNA, 19 nt, Artificial Sequence
  Description of Artificial Sequence: Synthetic oligonucleotide
  Antisense strand to SEQ ID NO: 2357890
uggucaaggaccuaccucu

SEQ ID NO: 2357892 - RNA, 19 nt, Artificial Sequence
  Description of Artificial Sequence: Synthetic oligonucleotide
  Sense strand starting at position 2374 of SEQ ID NO: 1885650
gagguagguccuugaccau

SEQ ID NO: 2357893 - RNA, 19 nt, Artificial Sequence
  Description of Artificial Sequence: Synthetic oligonucleotide
  Antisense strand to SEQ ID NO: 2357892
auggucaaggaccuaccuc

SEQ ID NO: 2357894 - RNA, 19 nt, Artificial Sequence
  Description of Artificial Sequence: Synthetic oligonucleotide
  Sense strand starting at position 2464 of SEQ ID NO: 1885650
gaggcaucacccugcugaa

SEQ ID NO: 2357895 - RNA, 19 nt, Artificial Sequence
  Description of Artificial Sequence: Synthetic oligonucleotide
  Antisense strand to SEQ ID NO: 2357894
uucagcagggugaugccuc

SEQ ID NO: 2357896 - RNA, 19 nt, Artificial Sequence
  Description of Artificial Sequence: Synthetic oligonucleotide
  Sense strand starting at position 2545 of SEQ ID NO: 1885650
ggauguugaacugaguucu

SEQ ID NO: 2357897 - RNA, 19 nt, Artificial Sequence
  Description of Artificial Sequence: Synthetic oligonucleotide
  Antisense strand to SEQ ID NO: 2357896
agaacucaguucaacaucc

SEQ ID NO: 2357898 - RNA, 19 nt, Artificial Sequence
  Description of Artificial Sequence: Synthetic oligonucleotide
  Sense strand starting at position 2748 of SEQ ID NO: 1885650
cggcucaaugcagaaauca

SEQ ID NO: 2357899 - RNA, 19 nt, Artificial Sequence
  Description of Artificial Sequence: Synthetic oligonucleotide
  Antisense strand to SEQ ID NO: 2357898
ugauuucugcauugagccg

SEQ ID NO: 2357900 - RNA, 19 nt, Artificial Sequence
  Description of Artificial Sequence: Synthetic oligonucleotide
  Sense strand starting at position 3101 of SEQ ID NO: 1885650
gcuugaaaucacugauagg

SEQ ID NO: 2357901 - RNA, 19 nt, Artificial Sequence
  Description of Artificial Sequence: Synthetic oligonucleotide
  Antisense strand to SEQ ID NO: 2357900
ccuaucagugauuucaagc

SEQ ID NO: 2357902 - RNA, 19 nt, Artificial Sequence
  Description of Artificial Sequence: Synthetic oligonucleotide
  Sense strand starting at position 3433 of SEQ ID NO: 1885650
ccucccagucuugaaaguu

SEQ ID NO: 2357903 - RNA, 19 nt, Artificial Sequence
  Description of Artificial Sequence: Synthetic oligonucleotide
  Antisense strand to SEQ ID NO: 2357902
aacuuucaagacugggagg

SEQ ID NO: 2357904 - RNA, 19 nt, Artificial Sequence
  Description of Artificial Sequence: Synthetic oligonucleotide
  Sense strand starting at position 3487 of SEQ ID NO: 1885650
guacauguggcuggcaaga

SEQ ID NO: 2357905 - RNA, 19 nt, Artificial Sequence
  Description of Artificial Sequence: Synthetic oligonucleotide
  Antisense strand to SEQ ID NO: 2357904
ucuugccagccacauguac

SEQ ID NO: 2357906 - RNA, 19 nt, Artificial Sequence
  Description of Artificial Sequence: Synthetic oligonucleotide
  Sense strand starting at position 3503 of SEQ ID NO: 1885650
agaagugcucgagaggcuu

SEQ ID NO: 2357907 - RNA, 19 nt, Artificial Sequence
  Description of Artificial Sequence: Synthetic oligonucleotide
  Antisense strand to SEQ ID NO: 2357906
aagccucucgagcacuucu

SEQ ID NO: 2357908 - RNA, 19 nt, Artificial Sequence
  Description of Artificial Sequence: Synthetic oligonucleotide
  Sense strand starting at position 3694 of SEQ ID NO: 1885650
aaacuccagugcucgagaa

SEQ ID NO: 2357909 - RNA, 19 nt, Artificial Sequence
  Description of Artificial Sequence: Synthetic oligonucleotide
  Antisense strand to SEQ ID NO: 2357908
uucucgagcacuggaguuu

SEQ ID NO: 2357910 - RNA, 19 nt, Artificial Sequence
  Description of Artificial Sequence: Synthetic oligonucleotide
  Sense strand starting at position 3695 of SEQ ID NO: 1885650
aacuccagugcucgagaau

SEQ ID NO: 2357911 - RNA, 19 nt, Artificial Sequence
  Description of Artificial Sequence: Synthetic oligonucleotide
  Antisense strand to SEQ ID NO: 2357910
auucucgagcacuggaguu

SEQ ID NO: 2357912 - RNA, 19 nt, Artificial Sequence
  Description of Artificial Sequence: Synthetic oligonucleotide
  Sense strand starting at position 3696 of SEQ ID NO: 1885650
acuccagugcucgagaauc

SEQ ID NO: 2357913 - RNA, 19 nt, Artificial Sequence
  Description of Artificial Sequence: Synthetic oligonucleotide
  Antisense strand to SEQ ID NO: 2357912
gauucucgagcacuggagu

SEQ ID NO: 2357914 - RNA, 19 nt, Artificial Sequence
  Description of Artificial Sequence: Synthetic oligonucleotide
  Sense strand starting at position 3698 of SEQ ID NO: 1885650
uccagugcucgagaauccu

SEQ ID NO: 2357915 - RNA, 19 nt, Artificial Sequence
  Description of Artificial Sequence: Synthetic oligonucleotide
  Antisense strand to SEQ ID NO: 2357914
aggauucucgagcacugga

SEQ ID NO: 2357916 - RNA, 19 nt, Artificial Sequence
  Description of Artificial Sequence: Synthetic oligonucleotide
  Sense strand starting at position 3856 of SEQ ID NO: 1885650
ccaugauaggcuugggacu

SEQ ID NO: 2357917 - RNA, 19 nt, Artificial Sequence
  Description of Artificial Sequence: Synthetic oligonucleotide
  Antisense strand to SEQ ID NO: 2357916
agucccaagccuaucaugg

SEQ ID NO: 2357918 - RNA, 19 nt, Artificial Sequence
  Description of Artificial Sequence: Synthetic oligonucleotide
  Sense strand starting at position 123 of SEQ ID NO: 1885651
gaagucuuccaaggcgaga

SEQ ID NO: 2357919 - RNA, 19 nt, Artificial Sequence
  Description of Artificial Sequence: Synthetic oligonucleotide
  Antisense strand to SEQ ID NO: 2357918
ucucgccuuggaagacuuc

SEQ ID NO: 2357920 - RNA, 19 nt, Artificial Sequence
  Description of Artificial Sequence: Synthetic oligonucleotide
  Sense strand starting at position 132 of SEQ ID NO: 1885651
caaggcgagaugugauauu

SEQ ID NO: 2357921 - RNA, 19 nt, Artificial Sequence
  Description of Artificial Sequence: Synthetic oligonucleotide
  Antisense strand to SEQ ID NO: 2357920
aauaucacaucucgccuug

SEQ ID NO: 2357922 - RNA, 19 nt, Artificial Sequence
  Description of Artificial Sequence: Synthetic oligonucleotide
  Sense strand starting at position 413 of SEQ ID NO: 1885651
ccaaauggccaauguaaua

SEQ ID NO: 2357923 - RNA, 19 nt, Artificial Sequence
  Description of Artificial Sequence: Synthetic oligonucleotide
  Antisense strand to SEQ ID NO: 2357922
uauuacauuggccauuugg

SEQ ID NO: 2357924 - RNA, 19 nt, Artificial Sequence
  Description of Artificial Sequence: Synthetic oligonucleotide
  Sense strand starting at position 684 of SEQ ID NO: 1885651
ugggaagcccucuaugacu

SEQ ID NO: 2357925 - RNA, 19 nt, Artificial Sequence
  Description of Artificial Sequence: Synthetic oligonucleotide
  Antisense strand to SEQ ID NO: 2357924
agucauagagggcuuccca

SEQ ID NO: 2357926 - RNA, 19 nt, Artificial Sequence
  Description of Artificial Sequence: Synthetic oligonucleotide
  Sense strand starting at position 689 of SEQ ID NO: 1885651
agcccucuaugacugaauu

SEQ ID NO: 2357927 - RNA, 19 nt, Artificial Sequence
  Description of Artificial Sequence: Synthetic oligonucleotide
  Antisense strand to SEQ ID NO: 2357926
aauucagucauagagggcu

SEQ ID NO: 2357928 - RNA, 19 nt, Artificial Sequence
  Description of Artificial Sequence: Synthetic oligonucleotide
  Sense strand starting at position 699 of SEQ ID NO: 1885651
gacugaauuugauauugag

SEQ ID NO: 2357929 - RNA, 19 nt, Artificial Sequence
  Description of Artificial Sequence: Synthetic oligonucleotide
  Antisense strand to SEQ ID NO: 2357928
cucaauaucaaauucaguc

SEQ ID NO: 2357930 - RNA, 19 nt, Artificial Sequence
  Description of Artificial Sequence: Synthetic oligonucleotide
  Sense strand starting at position 702 of SEQ ID NO: 1885651
ugaauuugauauugagaag

SEQ ID NO: 2357931 - RNA, 19 nt, Artificial Sequence
  Description of Artificial Sequence: Synthetic oligonucleotide
  Antisense strand to SEQ ID NO: 2357930
cuucucaauaucaaauuca

SEQ ID NO: 2357932 - RNA, 19 nt, Artificial Sequence
  Description of Artificial Sequence: Synthetic oligonucleotide
  Sense strand starting at position 856 of SEQ ID NO: 1885651
ugaggccugauguaguauu

SEQ ID NO: 2357933 - RNA, 19 nt, Artificial Sequence
  Description of Artificial Sequence: Synthetic oligonucleotide
  Antisense strand to SEQ ID NO: 2357932
aauacuacaucaggccuca

SEQ ID NO: 2357934 - RNA, 19 nt, Artificial Sequence
  Description of Artificial Sequence: Synthetic oligonucleotide
  Sense strand starting at position 889 of SEQ ID NO: 1885651
augcaaugucugccgcaga

SEQ ID NO: 2357935 - RNA, 19 nt, Artificial Sequence
  Description of Artificial Sequence: Synthetic oligonucleotide
  Antisense strand to SEQ ID NO: 2357934
ucugcggcagacauugcau

SEQ ID NO: 2357936 - RNA, 19 nt, Artificial Sequence
  Description of Artificial Sequence: Synthetic oligonucleotide
  Sense strand starting at position 944 of SEQ ID NO: 1885651
ggagaugaugcuggaacua

SEQ ID NO: 2357937 - RNA, 19 nt, Artificial Sequence
  Description of Artificial Sequence: Synthetic oligonucleotide
  Antisense strand to SEQ ID NO: 2357936
uaguuccagcaucaucucc

SEQ ID NO: 2357938 - RNA, 19 nt, Artificial Sequence
  Description of Artificial Sequence: Synthetic oligonucleotide
  Sense strand starting at position 957 of SEQ ID NO: 1885651
gaacuagugcuaugacuga

SEQ ID NO: 2357939 - RNA, 19 nt, Artificial Sequence
  Description of Artificial Sequence: Synthetic oligonucleotide
  Antisense strand to SEQ ID NO: 2357938
ucagucauagcacuaguuc

SEQ ID NO: 2357940 - RNA, 19 nt, Artificial Sequence
  Description of Artificial Sequence: Synthetic oligonucleotide
  Sense strand starting at position 961 of SEQ ID NO: 1885651
uagugcuaugacugacacu

SEQ ID NO: 2357941 - RNA, 19 nt, Artificial Sequence
  Description of Artificial Sequence: Synthetic oligonucleotide
  Antisense strand to SEQ ID NO: 2357940
agugucagucauagcacua

SEQ ID NO: 2357942 - RNA, 19 nt, Artificial Sequence
  Description of Artificial Sequence: Synthetic oligonucleotide
  Sense strand starting at position 1118 of SEQ ID NO: 1885651
gugcuuugucuccuaagcu

SEQ ID NO: 2357943 - RNA, 19 nt, Artificial Sequence
  Description of Artificial Sequence: Synthetic oligonucleotide
  Antisense strand to SEQ ID NO: 2357942
agcuuaggagacaaagcac

SEQ ID NO: 2357944 - RNA, 19 nt, Artificial Sequence
  Description of Artificial Sequence: Synthetic oligonucleotide
  Sense strand starting at position 1152 of SEQ ID NO: 1885651
ggagacuuuccaggcugaa

SEQ ID NO: 2357945 - RNA, 19 nt, Artificial Sequence
  Description of Artificial Sequence: Synthetic oligonucleotide
  Antisense strand to SEQ ID NO: 2357944
uucagccuggaaagucucc

SEQ ID NO: 2357946 - RNA, 19 nt, Artificial Sequence
  Description of Artificial Sequence: Synthetic oligonucleotide
  Sense strand starting at position 1185 of SEQ ID NO: 1885651
agaaguagaccauguuaca

SEQ ID NO: 2357947 - RNA, 19 nt, Artificial Sequence
  Description of Artificial Sequence: Synthetic oligonucleotide
  Antisense strand to SEQ ID NO: 2357946
uguaacauggucuacuucu

SEQ ID NO: 2357948 - RNA, 19 nt, Artificial Sequence
  Description of Artificial Sequence: Synthetic oligonucleotide
  Sense strand starting at position 1366 of SEQ ID NO: 1885651
ggaggcacuuccucuguaa

SEQ ID NO: 2357949 - RNA, 19 nt, Artificial Sequence
  Description of Artificial Sequence: Synthetic oligonucleotide
  Antisense strand to SEQ ID NO: 2357948
uuacagaggaagugccucc

SEQ ID NO: 2357950 - RNA, 19 nt, Artificial Sequence
  Description of Artificial Sequence: Synthetic oligonucleotide
  Sense strand starting at position 1369 of SEQ ID NO: 1885651
ggcacuuccucuguaaaca

SEQ ID NO: 2357951 - RNA, 19 nt, Artificial Sequence
  Description of Artificial Sequence: Synthetic oligonucleotide
  Antisense strand to SEQ ID NO: 2357950
uguuuacagaggaagugcc

SEQ ID NO: 2357952 - RNA, 19 nt, Artificial Sequence
  Description of Artificial Sequence: Synthetic oligonucleotide
  Sense strand starting at position 1454 of SEQ ID NO: 1885651
ccgagauggcuagacuuga

SEQ ID NO: 2357953 - RNA, 19 nt, Artificial Sequence
  Description of Artificial Sequence: Synthetic oligonucleotide
  Antisense strand to SEQ ID NO: 2357952
ucaagucuagccaucucgg

SEQ ID NO: 2357954 - RNA, 19 nt, Artificial Sequence
  Description of Artificial Sequence: Synthetic oligonucleotide
  Sense strand starting at position 1458 of SEQ ID NO: 1885651
gauggcuagacuugagaug

SEQ ID NO: 2357955 - RNA, 19 nt, Artificial Sequence
  Description of Artificial Sequence: Synthetic oligonucleotide
  Antisense strand to SEQ ID NO: 2357954
caucucaagucuagccauc

SEQ ID NO: 2357956 - RNA, 19 nt, Artificial Sequence
  Description of Artificial Sequence: Synthetic oligonucleotide
  Sense strand starting at position 1517 of SEQ ID NO: 1885651
cgagucagugcgucuucaa

SEQ ID NO: 2357957 - RNA, 19 nt, Artificial Sequence
  Description of Artificial Sequence: Synthetic oligonucleotide
  Antisense strand to SEQ ID NO: 2357956
uugaagacgcacugacucg

SEQ ID NO: 2357958 - RNA, 19 nt, Artificial Sequence
  Description of Artificial Sequence: Synthetic oligonucleotide
  Sense strand starting at position 1593 of SEQ ID NO: 1885651
ccugaagucaucugaggag

SEQ ID NO: 2357959 - RNA, 19 nt, Artificial Sequence
  Description of Artificial Sequence: Synthetic oligonucleotide
  Antisense strand to SEQ ID NO: 2357958
cuccucagaugacuucagg

SEQ ID NO: 2357960 - RNA, 19 nt, Artificial Sequence
  Description of Artificial Sequence: Synthetic oligonucleotide
  Sense strand starting at position 1771 of SEQ ID NO: 1885651
guguuuggcacugaggaga

SEQ ID NO: 2357961 - RNA, 19 nt, Artificial Sequence
  Description of Artificial Sequence: Synthetic oligonucleotide
  Antisense strand to SEQ ID NO: 2357960
ucuccucagugccaaacac

SEQ ID NO: 2357962 - RNA, 19 nt, Artificial Sequence
  Description of Artificial Sequence: Synthetic oligonucleotide
  Sense strand starting at position 1898 of SEQ ID NO: 1885651
aggcuuucuccagggaggu

SEQ ID NO: 2357963 - RNA, 19 nt, Artificial Sequence
  Description of Artificial Sequence: Synthetic oligonucleotide
  Antisense strand to SEQ ID NO: 2357962
accucccuggagaaagccu

SEQ ID NO: 2357964 - RNA, 19 nt, Artificial Sequence
  Description of Artificial Sequence: Synthetic oligonucleotide
  Sense strand starting at position 2147 of SEQ ID NO: 1885651
gucauugagcaccauggaa

SEQ ID NO: 2357965 - RNA, 19 nt, Artificial Sequence
  Description of Artificial Sequence: Synthetic oligonucleotide
  Antisense strand to SEQ ID NO: 2357964
uuccauggugcucaaugac

SEQ ID NO: 2357966 - RNA, 19 nt, Artificial Sequence
  Description of Artificial Sequence: Synthetic oligonucleotide
  Sense strand starting at position 2244 of SEQ ID NO: 1885651
gagcgagauuaugccauuu

SEQ ID NO: 2357967 - RNA, 19 nt, Artificial Sequence
  Description of Artificial Sequence: Synthetic oligonucleotide
  Antisense strand to SEQ ID NO: 2357966
aaauggcauaaucucgcuc

SEQ ID NO: 2357968 - RNA, 19 nt, Artificial Sequence
  Description of Artificial Sequence: Synthetic oligonucleotide
  Sense strand starting at position 2306 of SEQ ID NO: 1885651
ucgggugucauggagaagu

SEQ ID NO: 2357969 - RNA, 19 nt, Artificial Sequence
  Description of Artificial Sequence: Synthetic oligonucleotide
  Antisense strand to SEQ ID NO: 2357968
acuucuccaugacacccga

SEQ ID NO: 2357970 - RNA, 19 nt, Artificial Sequence
  Description of Artificial Sequence: Synthetic oligonucleotide
  Sense strand starting at position 2473 of SEQ ID NO: 1885651
cagagaugccgaggacaaa

SEQ ID NO: 2357971 - RNA, 19 nt, Artificial Sequence
  Description of Artificial Sequence: Synthetic oligonucleotide
  Antisense strand to SEQ ID NO: 2357970
uuuguccucggcaucucug

SEQ ID NO: 2357972 - RNA, 19 nt, Artificial Sequence
  Description of Artificial Sequence: Synthetic oligonucleotide
  Sense strand starting at position 2624 of SEQ ID NO: 1885651
acaugaaugcucgaagcag

SEQ ID NO: 2357973 - RNA, 19 nt, Artificial Sequence
  Description of Artificial Sequence: Synthetic oligonucleotide
  Antisense strand to SEQ ID NO: 2357972
cugcuucgagcauucaugu

SEQ ID NO: 2357974 - RNA, 19 nt, Artificial Sequence
  Description of Artificial Sequence: Synthetic oligonucleotide
  Sense strand starting at position 2944 of SEQ ID NO: 1885651
accugaggcccagaucuua

SEQ ID NO: 2357975 - RNA, 19 nt, Artificial Sequence
  Description of Artificial Sequence: Synthetic oligonucleotide
  Antisense strand to SEQ ID NO: 2357974
uaagaucugggccucaggu

SEQ ID NO: 2357976 - RNA, 19 nt, Artificial Sequence
  Description of Artificial Sequence: Synthetic oligonucleotide
  Sense strand starting at position 2966 of SEQ ID NO: 1885651
auuagugagcucuagucuu

SEQ ID NO: 2357977 - RNA, 19 nt, Artificial Sequence
  Description of Artificial Sequence: Synthetic oligonucleotide
  Antisense strand to SEQ ID NO: 2357976
aagacuagagcucacuaau

SEQ ID NO: 2357978 - RNA, 19 nt, Artificial Sequence
  Description of Artificial Sequence: Synthetic oligonucleotide
  Sense strand starting at position 2976 of SEQ ID NO: 1885651
ucuagucuugggcauuaaa

SEQ ID NO: 2357979 - RNA, 19 nt, Artificial Sequence
  Description of Artificial Sequence: Synthetic oligonucleotide
  Antisense strand to SEQ ID NO: 2357978
uuuaaugcccaagacuaga

SEQ ID NO: 2357980 - RNA, 19 nt, Artificial Sequence
  Description of Artificial Sequence: Synthetic oligonucleotide
  Sense strand starting at position 3069 of SEQ ID NO: 1885651
auuagauucugagcaguaa

SEQ ID NO: 2357981 - RNA, 19 nt, Artificial Sequence
  Description of Artificial Sequence: Synthetic oligonucleotide
  Antisense strand to SEQ ID NO: 2357980
uuacugcucagaaucuaau

SEQ ID NO: 2357982 - RNA, 19 nt, Artificial Sequence
  Description of Artificial Sequence: Synthetic oligonucleotide
  Sense strand starting at position 3070 of SEQ ID NO: 1885651
uuagauucugagcaguaac

SEQ ID NO: 2357983 - RNA, 19 nt, Artificial Sequence
  Description of Artificial Sequence: Synthetic oligonucleotide
  Antisense strand to SEQ ID NO: 2357982
guuacugcucagaaucuaa

SEQ ID NO: 2357984 - RNA, 19 nt, Artificial Sequence
  Description of Artificial Sequence: Synthetic oligonucleotide
  Sense strand starting at position 3219 of SEQ ID NO: 1885651
agagguggacauugguaua

SEQ ID NO: 2357985 - RNA, 19 nt, Artificial Sequence
  Description of Artificial Sequence: Synthetic oligonucleotide
  Antisense strand to SEQ ID NO: 2357984
uauaccaauguccaccucu

SEQ ID NO: 2357986 - RNA, 19 nt, Artificial Sequence
  Description of Artificial Sequence: Synthetic oligonucleotide
  Sense strand starting at position 3643 of SEQ ID NO: 1885651
cgaggauggauuggauacu

SEQ ID NO: 2357987 - RNA, 19 nt, Artificial Sequence
  Description of Artificial Sequence: Synthetic oligonucleotide
  Antisense strand to SEQ ID NO: 2357986
aguauccaauccauccucg

SEQ ID NO: 2357988 - RNA, 19 nt, Artificial Sequence
  Description of Artificial Sequence: Synthetic oligonucleotide
  Sense strand starting at position 3660 of SEQ ID NO: 1885651
cugagaguuaguggaccau

SEQ ID NO: 2357989 - RNA, 19 nt, Artificial Sequence
  Description of Artificial Sequence: Synthetic oligonucleotide
  Antisense strand to SEQ ID NO: 2357988
augguccacuaacucucag

SEQ ID NO: 2357990 - RNA, 19 nt, Artificial Sequence
  Description of Artificial Sequence: Synthetic oligonucleotide
  Sense strand starting at position 3801 of SEQ ID NO: 1885651
gcuuucugaggcuggauuu

SEQ ID NO: 2357991 - RNA, 19 nt, Artificial Sequence
  Description of Artificial Sequence: Synthetic oligonucleotide
  Antisense strand to SEQ ID NO: 2357990
aaauccagccucagaaagc

SEQ ID NO: 2357992 - RNA, 19 nt, Artificial Sequence
  Description of Artificial Sequence: Synthetic oligonucleotide
  Sense strand starting at position 3900 of SEQ ID NO: 1885651
ccucuacccuaagugguaa

SEQ ID NO: 2357993 - RNA, 19 nt, Artificial Sequence
  Description of Artificial Sequence: Synthetic oligonucleotide
  Antisense strand to SEQ ID NO: 2357992
uuaccacuuaggguagagg

SEQ ID NO: 2357994 - RNA, 19 nt, Artificial Sequence
  Description of Artificial Sequence: Synthetic oligonucleotide
  Sense strand starting at position 3911 of SEQ ID NO: 1885651
agugguaauuccuccagga

SEQ ID NO: 2357995 - RNA, 19 nt, Artificial Sequence
  Description of Artificial Sequence: Synthetic oligonucleotide
  Antisense strand to SEQ ID NO: 2357994
uccuggaggaauuaccacu

SEQ ID NO: 2357996 - RNA, 19 nt, Artificial Sequence
  Description of Artificial Sequence: Synthetic oligonucleotide
  Sense strand starting at position 3933 of SEQ ID NO: 1885651
ccaugucaacuuggaaaga

SEQ ID NO: 2357997 - RNA, 19 nt, Artificial Sequence
  Description of Artificial Sequence: Synthetic oligonucleotide
  Antisense strand to SEQ ID NO: 2357996
ucuuuccaaguugacaugg

SEQ ID NO: 2357998 - RNA, 19 nt, Artificial Sequence
  Description of Artificial Sequence: Synthetic oligonucleotide
  Sense strand starting at position 8 of SEQ ID NO: 1885652
caggaagcccucuggguau

SEQ ID NO: 2357999 - RNA, 19 nt, Artificial Sequence
  Description of Artificial Sequence: Synthetic oligonucleotide
  Antisense strand to SEQ ID NO: 2357998
auacccagagggcuuccug

SEQ ID NO: 2358000 - RNA, 19 nt, Artificial Sequence
  Description of Artificial Sequence: Synthetic oligonucleotide
  Sense strand starting at position 19 of SEQ ID NO: 1885652
cuggguaugacuugguaug

SEQ ID NO: 2358001 - RNA, 19 nt, Artificial Sequence
  Description of Artificial Sequence: Synthetic oligonucleotide
  Antisense strand to SEQ ID NO: 2358000
cauaccaagucauacccag

SEQ ID NO: 2358002 - RNA, 19 nt, Artificial Sequence
  Description of Artificial Sequence: Synthetic oligonucleotide
  Sense strand starting at position 21 of SEQ ID NO: 1885652
ggguaugacuugguaugga

SEQ ID NO: 2358003 - RNA, 19 nt, Artificial Sequence
  Description of Artificial Sequence: Synthetic oligonucleotide
  Antisense strand to SEQ ID NO: 2358002
uccauaccaagucauaccc

SEQ ID NO: 2358004 - RNA, 19 nt, Artificial Sequence
  Description of Artificial Sequence: Synthetic oligonucleotide
  Sense strand starting at position 43 of SEQ ID NO: 1885652
gaggcagauccaugugauu

SEQ ID NO: 2358005 - RNA, 19 nt, Artificial Sequence
  Description of Artificial Sequence: Synthetic oligonucleotide
  Antisense strand to SEQ ID NO: 2358004
aaucacauggaucugccuc

SEQ ID NO: 2358006 - RNA, 19 nt, Artificial Sequence
  Description of Artificial Sequence: Synthetic oligonucleotide
  Sense strand starting at position 255 of SEQ ID NO: 1885652
ggcuuuguccuggagacag

SEQ ID NO: 2358007 - RNA, 19 nt, Artificial Sequence
  Description of Artificial Sequence: Synthetic oligonucleotide
  Antisense strand to SEQ ID NO: 2358006
cugucuccaggacaaagcc

SEQ ID NO: 2358008 - RNA, 19 nt, Artificial Sequence
  Description of Artificial Sequence: Synthetic oligonucleotide
  Sense strand starting at position 298 of SEQ ID NO: 1885652
agaguuugauacgcaaaua

SEQ ID NO: 2358009 - RNA, 19 nt, Artificial Sequence
  Description of Artificial Sequence: Synthetic oligonucleotide
  Antisense strand to SEQ ID NO: 2358008
uauuugcguaucaaacucu

SEQ ID NO: 2358010 - RNA, 19 nt, Artificial Sequence
  Description of Artificial Sequence: Synthetic oligonucleotide
  Sense strand starting at position 857 of SEQ ID NO: 1885652
aaagccaucugagcaguua

SEQ ID NO: 2358011 - RNA, 19 nt, Artificial Sequence
  Description of Artificial Sequence: Synthetic oligonucleotide
  Antisense strand to SEQ ID NO: 2358010
uaacugcucagauggcuuu

SEQ ID NO: 2358012 - RNA, 19 nt, Artificial Sequence
  Description of Artificial Sequence: Synthetic oligonucleotide
  Sense strand starting at position 872 of SEQ ID NO: 1885652
guuaguuguuacucagaag

SEQ ID NO: 2358013 - RNA, 19 nt, Artificial Sequence
  Description of Artificial Sequence: Synthetic oligonucleotide
  Antisense strand to SEQ ID NO: 2358012
cuucugaguaacaacuaac

SEQ ID NO: 2358014 - RNA, 19 nt, Artificial Sequence
  Description of Artificial Sequence: Synthetic oligonucleotide
  Sense strand starting at position 873 of SEQ ID NO: 1885652
uuaguuguuacucagaagu

SEQ ID NO: 2358015 - RNA, 19 nt, Artificial Sequence
  Description of Artificial Sequence: Synthetic oligonucleotide
  Antisense strand to SEQ ID NO: 2358014
acuucugaguaacaacuaa

SEQ ID NO: 2358016 - RNA, 19 nt, Artificial Sequence
  Description of Artificial Sequence: Synthetic oligonucleotide
  Sense strand starting at position 900 of SEQ ID NO: 1885652
agggcaagauucgucaaag

SEQ ID NO: 2358017 - RNA, 19 nt, Artificial Sequence
  Description of Artificial Sequence: Synthetic oligonucleotide
  Antisense strand to SEQ ID NO: 2358016
cuuugacgaaucuugcccu

SEQ ID NO: 2358018 - RNA, 19 nt, Artificial Sequence
  Description of Artificial Sequence: Synthetic oligonucleotide
  Sense strand starting at position 901 of SEQ ID NO: 1885652
gggcaagauucgucaaagg

SEQ ID NO: 2358019 - RNA, 19 nt, Artificial Sequence
  Description of Artificial Sequence: Synthetic oligonucleotide
  Antisense strand to SEQ ID NO: 2358018
ccuuugacgaaucuugccc

SEQ ID NO: 2358020 - RNA, 19 nt, Artificial Sequence
  Description of Artificial Sequence: Synthetic oligonucleotide
  Sense strand starting at position 924 of SEQ ID NO: 1885652
ugagauucucaugggccaa

SEQ ID NO: 2358021 - RNA, 19 nt, Artificial Sequence
  Description of Artificial Sequence: Synthetic oligonucleotide
  Antisense strand to SEQ ID NO: 2358020
uuggcccaugagaaucuca

SEQ ID NO: 2358022 - RNA, 19 nt, Artificial Sequence
  Description of Artificial Sequence: Synthetic oligonucleotide
  Sense strand starting at position 970 of SEQ ID NO: 1885652
ccaggaauccaagggucuu

SEQ ID NO: 2358023 - RNA, 19 nt, Artificial Sequence
  Description of Artificial Sequence: Synthetic oligonucleotide
  Antisense strand to SEQ ID NO: 2358022
aagacccuuggauuccugg

SEQ ID NO: 2358024 - RNA, 19 nt, Artificial Sequence
  Description of Artificial Sequence: Synthetic oligonucleotide
  Sense strand starting at position 976 of SEQ ID NO: 1885652
auccaagggucuuuccauu

SEQ ID NO: 2358025 - RNA, 19 nt, Artificial Sequence
  Description of Artificial Sequence: Synthetic oligonucleotide
  Antisense strand to SEQ ID NO: 2358024
aauggaaagacccuuggau

SEQ ID NO: 2358026 - RNA, 19 nt, Artificial Sequence
  Description of Artificial Sequence: Synthetic oligonucleotide
  Sense strand starting at position 982 of SEQ ID NO: 1885652
gggucuuuccauuggcaag

SEQ ID NO: 2358027 - RNA, 19 nt, Artificial Sequence
  Description of Artificial Sequence: Synthetic oligonucleotide
  Antisense strand to SEQ ID NO: 2358026
cuugccaauggaaagaccc

SEQ ID NO: 2358028 - RNA, 19 nt, Artificial Sequence
  Description of Artificial Sequence: Synthetic oligonucleotide
  Sense strand starting at position 983 of SEQ ID NO: 1885652
ggucuuuccauuggcaaga

SEQ ID NO: 2358029 - RNA, 19 nt, Artificial Sequence
  Description of Artificial Sequence: Synthetic oligonucleotide
  Antisense strand to SEQ ID NO: 2358028
ucuugccaauggaaagacc

SEQ ID NO: 2358030 - RNA, 19 nt, Artificial Sequence
  Description of Artificial Sequence: Synthetic oligonucleotide
  Sense strand starting at position 984 of SEQ ID NO: 1885652
gucuuuccauuggcaagaa

SEQ ID NO: 2358031 - RNA, 19 nt, Artificial Sequence
  Description of Artificial Sequence: Synthetic oligonucleotide
  Antisense strand to SEQ ID NO: 2358030
uucuugccaauggaaagac

SEQ ID NO: 2358032 - RNA, 19 nt, Artificial Sequence
  Description of Artificial Sequence: Synthetic oligonucleotide
  Sense strand starting at position 1314 of SEQ ID NO: 1885652
cauggaugcuuugugauaa

SEQ ID NO: 2358033 - RNA, 19 nt, Artificial Sequence
  Description of Artificial Sequence: Synthetic oligonucleotide
  Antisense strand to SEQ ID NO: 2358032
uuaucacaaagcauccaug

SEQ ID NO: 2358034 - RNA, 19 nt, Artificial Sequence
  Description of Artificial Sequence: Synthetic oligonucleotide
  Sense strand starting at position 1376 of SEQ ID NO: 1885652
uuaaccuauuguguugaga

SEQ ID NO: 2358035 - RNA, 19 nt, Artificial Sequence
  Description of Artificial Sequence: Synthetic oligonucleotide
  Antisense strand to SEQ ID NO: 2358034
ucucaacacaauagguuaa

SEQ ID NO: 2358036 - RNA, 19 nt, Artificial Sequence
  Description of Artificial Sequence: Synthetic oligonucleotide
  Sense strand starting at position 1734 of SEQ ID NO: 1885652
gccagcaucucuuccagaa

SEQ ID NO: 2358037 - RNA, 19 nt, Artificial Sequence
  Description of Artificial Sequence: Synthetic oligonucleotide
  Antisense strand to SEQ ID NO: 2358036
uucuggaagagaugcuggc

SEQ ID NO: 2358038 - RNA, 19 nt, Artificial Sequence
  Description of Artificial Sequence: Synthetic oligonucleotide
  Sense strand starting at position 1738 of SEQ ID NO: 1885652
gcaucucuuccagaaaguu

SEQ ID NO: 2358039 - RNA, 19 nt, Artificial Sequence
  Description of Artificial Sequence: Synthetic oligonucleotide
  Antisense strand to SEQ ID NO: 2358038
aacuuucuggaagagaugc

SEQ ID NO: 2358040 - RNA, 19 nt, Artificial Sequence
  Description of Artificial Sequence: Synthetic oligonucleotide
  Sense strand starting at position 1746 of SEQ ID NO: 1885652
uccagaaaguucuuggaag

SEQ ID NO: 2358041 - RNA, 19 nt, Artificial Sequence
  Description of Artificial Sequence: Synthetic oligonucleotide
  Antisense strand to SEQ ID NO: 2358040
cuuccaagaacuuucugga

SEQ ID NO: 2358042 - RNA, 19 nt, Artificial Sequence
  Description of Artificial Sequence: Synthetic oligonucleotide
  Sense strand starting at position 1852 of SEQ ID NO: 1885652
ggcuauccuggccaucuaa

SEQ ID NO: 2358043 - RNA, 19 nt, Artificial Sequence
  Description of Artificial Sequence: Synthetic oligonucleotide
  Antisense strand to SEQ ID NO: 2358042
uuagauggccaggauagcc

SEQ ID NO: 2358044 - RNA, 19 nt, Artificial Sequence
  Description of Artificial Sequence: Synthetic oligonucleotide
  Sense strand starting at position 1884 of SEQ ID NO: 1885652
ucagccuuguucccaagaa

SEQ ID NO: 2358045 - RNA, 19 nt, Artificial Sequence
  Description of Artificial Sequence: Synthetic oligonucleotide
  Antisense strand to SEQ ID NO: 2358044
uucuugggaacaaggcuga

SEQ ID NO: 2358046 - RNA, 19 nt, Artificial Sequence
  Description of Artificial Sequence: Synthetic oligonucleotide
  Sense strand starting at position 2023 of SEQ ID NO: 1885652
gccauuuccucugugacua

SEQ ID NO: 2358047 - RNA, 19 nt, Artificial Sequence
  Description of Artificial Sequence: Synthetic oligonucleotide
  Antisense strand to SEQ ID NO: 2358046
uagucacagaggaaauggc

SEQ ID NO: 2358048 - RNA, 19 nt, Artificial Sequence
  Description of Artificial Sequence: Synthetic oligonucleotide
  Sense strand starting at position 2082 of SEQ ID NO: 1885652
ugggaucugcauggugaga

SEQ ID NO: 2358049 - RNA, 19 nt, Artificial Sequence
  Description of Artificial Sequence: Synthetic oligonucleotide
  Antisense strand to SEQ ID NO: 2358048
ucucaccaugcagauccca

SEQ ID NO: 2358050 - RNA, 19 nt, Artificial Sequence
  Description of Artificial Sequence: Synthetic oligonucleotide
  Sense strand starting at position 2202 of SEQ ID NO: 1885652
ucagguauucucuaaggua

SEQ ID NO: 2358051 - RNA, 19 nt, Artificial Sequence
  Description of Artificial Sequence: Synthetic oligonucleotide
  Antisense strand to SEQ ID NO: 2358050
uaccuuagagaauaccuga

SEQ ID NO: 2358052 - RNA, 19 nt, Artificial Sequence
  Description of Artificial Sequence: Synthetic oligonucleotide
  Sense strand starting at position 2217 of SEQ ID NO: 1885652
gguacaacuagucacagua

SEQ ID NO: 2358053 - RNA, 19 nt, Artificial Sequence
  Description of Artificial Sequence: Synthetic oligonucleotide
  Antisense strand to SEQ ID NO: 2358052
uacugugacuaguuguacc

SEQ ID NO: 2358054 - RNA, 19 nt, Artificial Sequence
  Description of Artificial Sequence: Synthetic oligonucleotide
  Sense strand starting at position 2321 of SEQ ID NO: 1885652
agaacacagccuuguaaca

SEQ ID NO: 2358055 - RNA, 19 nt, Artificial Sequence
  Description of Artificial Sequence: Synthetic oligonucleotide
  Antisense strand to SEQ ID NO: 2358054
uguuacaaggcuguguucu

SEQ ID NO: 2358056 - RNA, 19 nt, Artificial Sequence
  Description of Artificial Sequence: Synthetic oligonucleotide
  Sense strand starting at position 2499 of SEQ ID NO: 1885652
agcagcauuugauacugaa

SEQ ID NO: 2358057 - RNA, 19 nt, Artificial Sequence
  Description of Artificial Sequence: Synthetic oligonucleotide
  Antisense strand to SEQ ID NO: 2358056
uucaguaucaaaugcugcu

SEQ ID NO: 2358058 - RNA, 19 nt, Artificial Sequence
  Description of Artificial Sequence: Synthetic oligonucleotide
  Sense strand starting at position 2620 of SEQ ID NO: 1885652
cugugcuugagucaucaga

SEQ ID NO: 2358059 - RNA, 19 nt, Artificial Sequence
  Description of Artificial Sequence: Synthetic oligonucleotide
  Antisense strand to SEQ ID NO: 2358058
ucugaugacucaagcacag

SEQ ID NO: 2358060 - RNA, 19 nt, Artificial Sequence
  Description of Artificial Sequence: Synthetic oligonucleotide
  Sense strand starting at position 2622 of SEQ ID NO: 1885652
gugcuugagucaucagaaa

SEQ ID NO: 2358061 - RNA, 19 nt, Artificial Sequence
  Description of Artificial Sequence: Synthetic oligonucleotide
  Antisense strand to SEQ ID NO: 2358060
uuucugaugacucaagcac

SEQ ID NO: 2358062 - RNA, 19 nt, Artificial Sequence
  Description of Artificial Sequence: Synthetic oligonucleotide
  Sense strand starting at position 2660 of SEQ ID NO: 1885652
acgagcuuccagggaagaa

SEQ ID NO: 2358063 - RNA, 19 nt, Artificial Sequence
  Description of Artificial Sequence: Synthetic oligonucleotide
  Antisense strand to SEQ ID NO: 2358062
uucuucccuggaagcucgu

SEQ ID NO: 2358064 - RNA, 19 nt, Artificial Sequence
  Description of Artificial Sequence: Synthetic oligonucleotide
  Sense strand starting at position 2802 of SEQ ID NO: 1885652
cggucucuuccagaaacau

SEQ ID NO: 2358065 - RNA, 19 nt, Artificial Sequence
  Description of Artificial Sequence: Synthetic oligonucleotide
  Antisense strand to SEQ ID NO: 2358064
auguuucuggaagagaccg

SEQ ID NO: 2358066 - RNA, 19 nt, Artificial Sequence
  Description of Artificial Sequence: Synthetic oligonucleotide
  Sense strand starting at position 3302 of SEQ ID NO: 1885652
gguuucaucccggaaagca

SEQ ID NO: 2358067 - RNA, 19 nt, Artificial Sequence
  Description of Artificial Sequence: Synthetic oligonucleotide
  Antisense strand to SEQ ID NO: 2358066
ugcuuuccgggaugaaacc

SEQ ID NO: 2358068 - RNA, 19 nt, Artificial Sequence
  Description of Artificial Sequence: Synthetic oligonucleotide
  Sense strand starting at position 3318 of SEQ ID NO: 1885652
gcacgaaccuaaguacaau

SEQ ID NO: 2358069 - RNA, 19 nt, Artificial Sequence
  Description of Artificial Sequence: Synthetic oligonucleotide
  Antisense strand to SEQ ID NO: 2358068
auuguacuuagguucgugc

SEQ ID NO: 2358070 - RNA, 19 nt, Artificial Sequence
  Description of Artificial Sequence: Synthetic oligonucleotide
  Sense strand starting at position 3566 of SEQ ID NO: 1885652
gugguuucaguccaggaau

SEQ ID NO: 2358071 - RNA, 19 nt, Artificial Sequence
  Description of Artificial Sequence: Synthetic oligonucleotide
  Antisense strand to SEQ ID NO: 2358070
auuccuggacugaaaccac

SEQ ID NO: 2358072 - RNA, 19 nt, Artificial Sequence
  Description of Artificial Sequence: Synthetic oligonucleotide
  Sense strand starting at position 3568 of SEQ ID NO: 1885652
gguuucaguccaggaaugu

SEQ ID NO: 2358073 - RNA, 19 nt, Artificial Sequence
  Description of Artificial Sequence: Synthetic oligonucleotide
  Antisense strand to SEQ ID NO: 2358072
acauuccuggacugaaacc

SEQ ID NO: 2358074 - RNA, 19 nt, Artificial Sequence
  Description of Artificial Sequence: Synthetic oligonucleotide
  Sense strand starting at position 3577 of SEQ ID NO: 1885652
ccaggaauguuuccaagca

SEQ ID NO: 2358075 - RNA, 19 nt, Artificial Sequence
  Description of Artificial Sequence: Synthetic oligonucleotide
  Antisense strand to SEQ ID NO: 2358074
ugcuuggaaacauuccugg

SEQ ID NO: 2358076 - RNA, 19 nt, Artificial Sequence
  Description of Artificial Sequence: Synthetic oligonucleotide
  Sense strand starting at position 3808 of SEQ ID NO: 1885652
acgcaugucccaggacaga

SEQ ID NO: 2358077 - RNA, 19 nt, Artificial Sequence
  Description of Artificial Sequence: Synthetic oligonucleotide
  Antisense strand to SEQ ID NO: 2358076
ucuguccugggacaugcgu

SEQ ID NO: 2358078 - RNA, 19 nt, Artificial Sequence
  Description of Artificial Sequence: Synthetic oligonucleotide
  Sense strand starting at position 36 of SEQ ID NO: 1885653
gguaaagagcuaugauaca

SEQ ID NO: 2358079 - RNA, 19 nt, Artificial Sequence
  Description of Artificial Sequence: Synthetic oligonucleotide
  Antisense strand to SEQ ID NO: 2358078
uguaucauagcucuuuacc

SEQ ID NO: 2358080 - RNA, 19 nt, Artificial Sequence
  Description of Artificial Sequence: Synthetic oligonucleotide
  Sense strand starting at position 279 of SEQ ID NO: 1885653
aggugauucuggcuagcuc

SEQ ID NO: 2358081 - RNA, 19 nt, Artificial Sequence
  Description of Artificial Sequence: Synthetic oligonucleotide
  Antisense strand to SEQ ID NO: 2358080
gagcuagccagaaucaccu

SEQ ID NO: 2358082 - RNA, 19 nt, Artificial Sequence
  Description of Artificial Sequence: Synthetic oligonucleotide
  Sense strand starting at position 280 of SEQ ID NO: 1885653
ggugauucuggcuagcucu

SEQ ID NO: 2358083 - RNA, 19 nt, Artificial Sequence
  Description of Artificial Sequence: Synthetic oligonucleotide
  Antisense strand to SEQ ID NO: 2358082
agagcuagccagaaucacc

SEQ ID NO: 2358084 - RNA, 19 nt, Artificial Sequence
  Description of Artificial Sequence: Synthetic oligonucleotide
  Sense strand starting at position 320 of SEQ ID NO: 1885653
agguaauagccaugcucaa

SEQ ID NO: 2358085 - RNA, 19 nt, Artificial Sequence
  Description of Artificial Sequence: Synthetic oligonucleotide
  Antisense strand to SEQ ID NO: 2358084
uugagcauggcuauuaccu

SEQ ID NO: 2358086 - RNA, 19 nt, Artificial Sequence
  Description of Artificial Sequence: Synthetic oligonucleotide
  Sense strand starting at position 356 of SEQ ID NO: 1885653
caaacaguggcucacugau

SEQ ID NO: 2358087 - RNA, 19 nt, Artificial Sequence
  Description of Artificial Sequence: Synthetic oligonucleotide
  Antisense strand to SEQ ID NO: 2358086
aucagugagccacuguuug

SEQ ID NO: 2358088 - RNA, 19 nt, Artificial Sequence
  Description of Artificial Sequence: Synthetic oligonucleotide
  Sense strand starting at position 362 of SEQ ID NO: 1885653
guggcucacugaucaagga

SEQ ID NO: 2358089 - RNA, 19 nt, Artificial Sequence
  Description of Artificial Sequence: Synthetic oligonucleotide
  Antisense strand to SEQ ID NO: 2358088
uccuugaucagugagccac

SEQ ID NO: 2358090 - RNA, 19 nt, Artificial Sequence
  Description of Artificial Sequence: Synthetic oligonucleotide
  Sense strand starting at position 412 of SEQ ID NO: 1885653
gacugagaaucacucgauc

SEQ ID NO: 2358091 - RNA, 19 nt, Artificial Sequence
  Description of Artificial Sequence: Synthetic oligonucleotide
  Antisense strand to SEQ ID NO: 2358090
gaucgagugauucucaguc

SEQ ID NO: 2358092 - RNA, 19 nt, Artificial Sequence
  Description of Artificial Sequence: Synthetic oligonucleotide
  Sense strand starting at position 846 of SEQ ID NO: 1885653
gaaccugggucauugauga

SEQ ID NO: 2358093 - RNA, 19 nt, Artificial Sequence
  Description of Artificial Sequence: Synthetic oligonucleotide
  Antisense strand to SEQ ID NO: 2358092
ucaucaaugacccagguuc

SEQ ID NO: 2358094 - RNA, 19 nt, Artificial Sequence
  Description of Artificial Sequence: Synthetic oligonucleotide
  Sense strand starting at position 955 of SEQ ID NO: 1885653
aagcuagcuugaguugaau

SEQ ID NO: 2358095 - RNA, 19 nt, Artificial Sequence
  Description of Artificial Sequence: Synthetic oligonucleotide
  Antisense strand to SEQ ID NO: 2358094
auucaacucaagcuagcuu

SEQ ID NO: 2358096 - RNA, 19 nt, Artificial Sequence
  Description of Artificial Sequence: Synthetic oligonucleotide
  Sense strand starting at position 957 of SEQ ID NO: 1885653
gcuagcuugaguugaauau

SEQ ID NO: 2358097 - RNA, 19 nt, Artificial Sequence
  Description of Artificial Sequence: Synthetic oligonucleotide
  Antisense strand to SEQ ID NO: 2358096
auauucaacucaagcuagc

SEQ ID NO: 2358098 - RNA, 19 nt, Artificial Sequence
  Description of Artificial Sequence: Synthetic oligonucleotide
  Sense strand starting at position 958 of SEQ ID NO: 1885653
cuagcuugaguugaauauu

SEQ ID NO: 2358099 - RNA, 19 nt, Artificial Sequence
  Description of Artificial Sequence: Synthetic oligonucleotide
  Antisense strand to SEQ ID NO: 2358098
aauauucaacucaagcuag

SEQ ID NO: 2358100 - RNA, 19 nt, Artificial Sequence
  Description of Artificial Sequence: Synthetic oligonucleotide
  Sense strand starting at position 961 of SEQ ID NO: 1885653
gcuugaguugaauauucug

SEQ ID NO: 2358101 - RNA, 19 nt, Artificial Sequence
  Description of Artificial Sequence: Synthetic oligonucleotide
  Antisense strand to SEQ ID NO: 2358100
cagaauauucaacucaagc

SEQ ID NO: 2358102 - RNA, 19 nt, Artificial Sequence
  Description of Artificial Sequence: Synthetic oligonucleotide
  Sense strand starting at position 964 of SEQ ID NO: 1885653
ugaguugaauauucuggga

SEQ ID NO: 2358103 - RNA, 19 nt, Artificial Sequence
  Description of Artificial Sequence: Synthetic oligonucleotide
  Antisense strand to SEQ ID NO: 2358102
ucccagaauauucaacuca

SEQ ID NO: 2358104 - RNA, 19 nt, Artificial Sequence
  Description of Artificial Sequence: Synthetic oligonucleotide
  Sense strand starting at position 1630 of SEQ ID NO: 1885653
gccaucaggccacaaauau

SEQ ID NO: 2358105 - RNA, 19 nt, Artificial Sequence
  Description of Artificial Sequence: Synthetic oligonucleotide
  Antisense strand to SEQ ID NO: 2358104
auauuuguggccugauggc

SEQ ID NO: 2358106 - RNA, 19 nt, Artificial Sequence
  Description of Artificial Sequence: Synthetic oligonucleotide
  Sense strand starting at position 1793 of SEQ ID NO: 1885653
auuuguccuuaggaauacu

SEQ ID NO: 2358107 - RNA, 19 nt, Artificial Sequence
  Description of Artificial Sequence: Synthetic oligonucleotide
  Antisense strand to SEQ ID NO: 2358106
aguauuccuaaggacaaau

SEQ ID NO: 2358108 - RNA, 19 nt, Artificial Sequence
  Description of Artificial Sequence: Synthetic oligonucleotide
  Sense strand starting at position 1895 of SEQ ID NO: 1885653
caguucuuccucggcacaa

SEQ ID NO: 2358109 - RNA, 19 nt, Artificial Sequence
  Description of Artificial Sequence: Synthetic oligonucleotide
  Antisense strand to SEQ ID NO: 2358108
uugugccgaggaagaacug

SEQ ID NO: 2358110 - RNA, 19 nt, Artificial Sequence
  Description of Artificial Sequence: Synthetic oligonucleotide
  Sense strand starting at position 1897 of SEQ ID NO: 1885653
guucuuccucggcacaaga

SEQ ID NO: 2358111 - RNA, 19 nt, Artificial Sequence
  Description of Artificial Sequence: Synthetic oligonucleotide
  Antisense strand to SEQ ID NO: 2358110
ucuugugccgaggaagaac

SEQ ID NO: 2358112 - RNA, 19 nt, Artificial Sequence
  Description of Artificial Sequence: Synthetic oligonucleotide
  Sense strand starting at position 2046 of SEQ ID NO: 1885653
gcccuagaccuccaauguu

SEQ ID NO: 2358113 - RNA, 19 nt, Artificial Sequence
  Description of Artificial Sequence: Synthetic oligonucleotide
  Antisense strand to SEQ ID NO: 2358112
aacauuggaggucuagggc

SEQ ID NO: 2358114 - RNA, 19 nt, Artificial Sequence
  Description of Artificial Sequence: Synthetic oligonucleotide
  Sense strand starting at position 2109 of SEQ ID NO: 1885653
uguggauccuauuccuaca

SEQ ID NO: 2358115 - RNA, 19 nt, Artificial Sequence
  Description of Artificial Sequence: Synthetic oligonucleotide
  Antisense strand to SEQ ID NO: 2358114
uguaggaauaggauccaca

SEQ ID NO: 2358116 - RNA, 19 nt, Artificial Sequence
  Description of Artificial Sequence: Synthetic oligonucleotide
  Sense strand starting at position 2183 of SEQ ID NO: 1885653
gguucuguuccuggcauuu

SEQ ID NO: 2358117 - RNA, 19 nt, Artificial Sequence
  Description of Artificial Sequence: Synthetic oligonucleotide
  Antisense strand to SEQ ID NO: 2358116
aaaugccaggaacagaacc

SEQ ID NO: 2358118 - RNA, 19 nt, Artificial Sequence
  Description of Artificial Sequence: Synthetic oligonucleotide
  Sense strand starting at position 2299 of SEQ ID NO: 1885653
auagguagcugguuucuaa

SEQ ID NO: 2358119 - RNA, 19 nt, Artificial Sequence
  Description of Artificial Sequence: Synthetic oligonucleotide
  Antisense strand to SEQ ID NO: 2358118
uuagaaaccagcuaccuau

SEQ ID NO: 2358120 - RNA, 19 nt, Artificial Sequence
  Description of Artificial Sequence: Synthetic oligonucleotide
  Sense strand starting at position 2486 of SEQ ID NO: 1885653
agauuaagguuucuaucag

SEQ ID NO: 2358121 - RNA, 19 nt, Artificial Sequence
  Description of Artificial Sequence: Synthetic oligonucleotide
  Antisense strand to SEQ ID NO: 2358120
cugauagaaaccuuaaucu

SEQ ID NO: 2358122 - RNA, 19 nt, Artificial Sequence
  Description of Artificial Sequence: Synthetic oligonucleotide
  Sense strand starting at position 2595 of SEQ ID NO: 1885653
agcacuacacucugugaua

SEQ ID NO: 2358123 - RNA, 19 nt, Artificial Sequence
  Description of Artificial Sequence: Synthetic oligonucleotide
  Antisense strand to SEQ ID NO: 2358122
uaucacagaguguagugcu

SEQ ID NO: 2358124 - RNA, 19 nt, Artificial Sequence
  Description of Artificial Sequence: Synthetic oligonucleotide
  Sense strand starting at position 2596 of SEQ ID NO: 1885653
gcacuacacucugugauau

SEQ ID NO: 2358125 - RNA, 19 nt, Artificial Sequence
  Description of Artificial Sequence: Synthetic oligonucleotide
  Antisense strand to SEQ ID NO: 2358124
auaucacagaguguagugc

SEQ ID NO: 2358126 - RNA, 19 nt, Artificial Sequence
  Description of Artificial Sequence: Synthetic oligonucleotide
  Sense strand starting at position 2607 of SEQ ID NO: 1885653
ugugauaucuagucccaaa

SEQ ID NO: 2358127 - RNA, 19 nt, Artificial Sequence
  Description of Artificial Sequence: Synthetic oligonucleotide
  Antisense strand to SEQ ID NO: 2358126
uuugggacuagauaucaca

SEQ ID NO: 2358128 - RNA, 19 nt, Artificial Sequence
  Description of Artificial Sequence: Synthetic oligonucleotide
  Sense strand starting at position 3095 of SEQ ID NO: 1885653
gcugaaagccuauagcaua

SEQ ID NO: 2358129 - RNA, 19 nt, Artificial Sequence
  Description of Artificial Sequence: Synthetic oligonucleotide
  Antisense strand to SEQ ID NO: 2358128
uaugcuauaggcuuucagc

SEQ ID NO: 2358130 - RNA, 19 nt, Artificial Sequence
  Description of Artificial Sequence: Synthetic oligonucleotide
  Sense strand starting at position 3116 of SEQ ID NO: 1885653
augcauccucccugacuga

SEQ ID NO: 2358131 - RNA, 19 nt, Artificial Sequence
  Description of Artificial Sequence: Synthetic oligonucleotide
  Antisense strand to SEQ ID NO: 2358130
ucagucagggaggaugcau

SEQ ID NO: 2358132 - RNA, 19 nt, Artificial Sequence
  Description of Artificial Sequence: Synthetic oligonucleotide
  Sense strand starting at position 3138 of SEQ ID NO: 1885653
acugaaaguguuuaauccu

SEQ ID NO: 2358133 - RNA, 19 nt, Artificial Sequence
  Description of Artificial Sequence: Synthetic oligonucleotide
  Antisense strand to SEQ ID NO: 2358132
aggauuaaacacuuucagu

SEQ ID NO: 2358134 - RNA, 19 nt, Artificial Sequence
  Description of Artificial Sequence: Synthetic oligonucleotide
  Sense strand starting at position 3141 of SEQ ID NO: 1885653
gaaaguguuuaauccugua

SEQ ID NO: 2358135 - RNA, 19 nt, Artificial Sequence
  Description of Artificial Sequence: Synthetic oligonucleotide
  Antisense strand to SEQ ID NO: 2358134
uacaggauuaaacacuuuc

SEQ ID NO: 2358136 - RNA, 19 nt, Artificial Sequence
  Description of Artificial Sequence: Synthetic oligonucleotide
  Sense strand starting at position 3323 of SEQ ID NO: 1885653
agaauuuccuuggauauag

SEQ ID NO: 2358137 - RNA, 19 nt, Artificial Sequence
  Description of Artificial Sequence: Synthetic oligonucleotide
  Antisense strand to SEQ ID NO: 2358136
cuauauccaaggaaauucu

SEQ ID NO: 2358138 - RNA, 19 nt, Artificial Sequence
  Description of Artificial Sequence: Synthetic oligonucleotide
  Sense strand starting at position 3334 of SEQ ID NO: 1885653
ggauauaggagcugcauau

SEQ ID NO: 2358139 - RNA, 19 nt, Artificial Sequence
  Description of Artificial Sequence: Synthetic oligonucleotide
  Antisense strand to SEQ ID NO: 2358138
auaugcagcuccuauaucc

SEQ ID NO: 2358140 - RNA, 19 nt, Artificial Sequence
  Description of Artificial Sequence: Synthetic oligonucleotide
  Sense strand starting at position 3338 of SEQ ID NO: 1885653
auaggagcugcauaucuua

SEQ ID NO: 2358141 - RNA, 19 nt, Artificial Sequence
  Description of Artificial Sequence: Synthetic oligonucleotide
  Antisense strand to SEQ ID NO: 2358140
uaagauaugcagcuccuau

SEQ ID NO: 2358142 - RNA, 19 nt, Artificial Sequence
  Description of Artificial Sequence: Synthetic oligonucleotide
  Sense strand starting at position 3411 of SEQ ID NO: 1885653
aacugcagguuguuagaau

SEQ ID NO: 2358143 - RNA, 19 nt, Artificial Sequence
  Description of Artificial Sequence: Synthetic oligonucleotide
  Antisense strand to SEQ ID NO: 2358142
auucuaacaaccugcaguu

SEQ ID NO: 2358144 - RNA, 19 nt, Artificial Sequence
  Description of Artificial Sequence: Synthetic oligonucleotide
  Sense strand starting at position 3438 of SEQ ID NO: 1885653
uguccaccugagugacauu

SEQ ID NO: 2358145 - RNA, 19 nt, Artificial Sequence
  Description of Artificial Sequence: Synthetic oligonucleotide
  Antisense strand to SEQ ID NO: 2358144
aaugucacucagguggaca

SEQ ID NO: 2358146 - RNA, 19 nt, Artificial Sequence
  Description of Artificial Sequence: Synthetic oligonucleotide
  Sense strand starting at position 3558 of SEQ ID NO: 1885653
ggagcacagcuccauaaga

SEQ ID NO: 2358147 - RNA, 19 nt, Artificial Sequence
  Description of Artificial Sequence: Synthetic oligonucleotide
  Antisense strand to SEQ ID NO: 2358146
ucuuauggagcugugcucc

SEQ ID NO: 2358148 - RNA, 19 nt, Artificial Sequence
  Description of Artificial Sequence: Synthetic oligonucleotide
  Sense strand starting at position 3582 of SEQ ID NO: 1885653
acaugagucucauucuuug

SEQ ID NO: 2358149 - RNA, 19 nt, Artificial Sequence
  Description of Artificial Sequence: Synthetic oligonucleotide
  Antisense strand to SEQ ID NO: 2358148
caaagaaugagacucaugu

SEQ ID NO: 2358150 - RNA, 19 nt, Artificial Sequence
  Description of Artificial Sequence: Synthetic oligonucleotide
  Sense strand starting at position 3616 of SEQ ID NO: 1885653
cugcuacaauguucuguau

SEQ ID NO: 2358151 - RNA, 19 nt, Artificial Sequence
  Description of Artificial Sequence: Synthetic oligonucleotide
  Antisense strand to SEQ ID NO: 2358150
auacagaacauuguagcag

SEQ ID NO: 2358152 - RNA, 19 nt, Artificial Sequence
  Description of Artificial Sequence: Synthetic oligonucleotide
  Sense strand starting at position 3619 of SEQ ID NO: 1885653
cuacaauguucuguauaua

SEQ ID NO: 2358153 - RNA, 19 nt, Artificial Sequence
  Description of Artificial Sequence: Synthetic oligonucleotide
  Antisense strand to SEQ ID NO: 2358152
uauauacagaacauuguag

SEQ ID NO: 2358154 - RNA, 19 nt, Artificial Sequence
  Description of Artificial Sequence: Synthetic oligonucleotide
  Sense strand starting at position 3645 of SEQ ID NO: 1885653
guaaauauuugacaaacug

SEQ ID NO: 2358155 - RNA, 19 nt, Artificial Sequence
  Description of Artificial Sequence: Synthetic oligonucleotide
  Antisense strand to SEQ ID NO: 2358154
caguuugucaaauauuuac

SEQ ID NO: 2358156 - RNA, 19 nt, Artificial Sequence
  Description of Artificial Sequence: Synthetic oligonucleotide
  Sense strand starting at position 3731 of SEQ ID NO: 1885653
uucuauucgguuuggaaac

SEQ ID NO: 2358157 - RNA, 19 nt, Artificial Sequence
  Description of Artificial Sequence: Synthetic oligonucleotide
  Antisense strand to SEQ ID NO: 2358156
guuuccaaaccgaauagaa

SEQ ID NO: 2358158 - RNA, 19 nt, Artificial Sequence
  Description of Artificial Sequence: Synthetic oligonucleotide
  Sense strand starting at position 74 of SEQ ID NO: 1885654
gugucauuauauccaggac

SEQ ID NO: 2358159 - RNA, 19 nt, Artificial Sequence
  Description of Artificial Sequence: Synthetic oligonucleotide
  Antisense strand to SEQ ID NO: 2358158
guccuggauauaaugacac

SEQ ID NO: 2358160 - RNA, 19 nt, Artificial Sequence
  Description of Artificial Sequence: Synthetic oligonucleotide
  Sense strand starting at position 250 of SEQ ID NO: 1885654
gccgaaagagccugaauua

SEQ ID NO: 2358161 - RNA, 19 nt, Artificial Sequence
  Description of Artificial Sequence: Synthetic oligonucleotide
  Antisense strand to SEQ ID NO: 2358160
uaauucaggcucuuucggc

SEQ ID NO: 2358162 - RNA, 19 nt, Artificial Sequence
  Description of Artificial Sequence: Synthetic oligonucleotide
  Sense strand starting at position 251 of SEQ ID NO: 1885654
ccgaaagagccugaauuac

SEQ ID NO: 2358163 - RNA, 19 nt, Artificial Sequence
  Description of Artificial Sequence: Synthetic oligonucleotide
  Antisense strand to SEQ ID NO: 2358162
guaauucaggcucuuucgg

SEQ ID NO: 2358164 - RNA, 19 nt, Artificial Sequence
  Description of Artificial Sequence: Synthetic oligonucleotide
  Sense strand starting at position 408 of SEQ ID NO: 1885654
gaggguuagcgcaaucggu

SEQ ID NO: 2358165 - RNA, 19 nt, Artificial Sequence
  Description of Artificial Sequence: Synthetic oligonucleotide
  Antisense strand to SEQ ID NO: 2358164
accgauugcgcuaacccuc

SEQ ID NO: 2358166 - RNA, 19 nt, Artificial Sequence
  Description of Artificial Sequence: Synthetic oligonucleotide
  Sense strand starting at position 471 of SEQ ID NO: 1885654
gcucgugucuccuuauuua

SEQ ID NO: 2358167 - RNA, 19 nt, Artificial Sequence
  Description of Artificial Sequence: Synthetic oligonucleotide
  Antisense strand to SEQ ID NO: 2358166
uaaauaaggagacacgagc

SEQ ID NO: 2358168 - RNA, 19 nt, Artificial Sequence
  Description of Artificial Sequence: Synthetic oligonucleotide
  Sense strand starting at position 474 of SEQ ID NO: 1885654
cgugucuccuuauuuaugu

SEQ ID NO: 2358169 - RNA, 19 nt, Artificial Sequence
  Description of Artificial Sequence: Synthetic oligonucleotide
  Antisense strand to SEQ ID NO: 2358168
acauaaauaaggagacacg

SEQ ID NO: 2358170 - RNA, 19 nt, Artificial Sequence
  Description of Artificial Sequence: Synthetic oligonucleotide
  Sense strand starting at position 694 of SEQ ID NO: 1885654
aguccuguuaaauacggau

SEQ ID NO: 2358171 - RNA, 19 nt, Artificial Sequence
  Description of Artificial Sequence: Synthetic oligonucleotide
  Antisense strand to SEQ ID NO: 2358170
auccguauuuaacaggacu

SEQ ID NO: 2358172 - RNA, 19 nt, Artificial Sequence
  Description of Artificial Sequence: Synthetic oligonucleotide
  Sense strand starting at position 767 of SEQ ID NO: 1885654
cuucgugguuaaccauaga

SEQ ID NO: 2358173 - RNA, 19 nt, Artificial Sequence
  Description of Artificial Sequence: Synthetic oligonucleotide
  Antisense strand to SEQ ID NO: 2358172
ucuaugguuaaccacgaag

SEQ ID NO: 2358174 - RNA, 19 nt, Artificial Sequence
  Description of Artificial Sequence: Synthetic oligonucleotide
  Sense strand starting at position 1039 of SEQ ID NO: 1885654
agcguuaguuaguugauuu

SEQ ID NO: 2358175 - RNA, 19 nt, Artificial Sequence
  Description of Artificial Sequence: Synthetic oligonucleotide
  Antisense strand to SEQ ID NO: 2358174
aaaucaacuaacuaacgcu

SEQ ID NO: 2358176 - RNA, 19 nt, Artificial Sequence
  Description of Artificial Sequence: Synthetic oligonucleotide
  Sense strand starting at position 1040 of SEQ ID NO: 1885654
gcguuaguuaguugauuug

SEQ ID NO: 2358177 - RNA, 19 nt, Artificial Sequence
  Description of Artificial Sequence: Synthetic oligonucleotide
  Antisense strand to SEQ ID NO: 2358176
caaaucaacuaacuaacgc

SEQ ID NO: 2358178 - RNA, 19 nt, Artificial Sequence
  Description of Artificial Sequence: Synthetic oligonucleotide
  Sense strand starting at position 1046 of SEQ ID NO: 1885654
guuaguugauuugccggaa

SEQ ID NO: 2358179 - RNA, 19 nt, Artificial Sequence
  Description of Artificial Sequence: Synthetic oligonucleotide
  Antisense strand to SEQ ID NO: 2358178
uuccggcaaaucaacuaac

SEQ ID NO: 2358180 - RNA, 19 nt, Artificial Sequence
  Description of Artificial Sequence: Synthetic oligonucleotide
  Sense strand starting at position 1196 of SEQ ID NO: 1885654
cagcuaucgcguuuagggu

SEQ ID NO: 2358181 - RNA, 19 nt, Artificial Sequence
  Description of Artificial Sequence: Synthetic oligonucleotide
  Antisense strand to SEQ ID NO: 2358180
acccuaaacgcgauagcug

SEQ ID NO: 2358182 - RNA, 19 nt, Artificial Sequence
  Description of Artificial Sequence: Synthetic oligonucleotide
  Sense strand starting at position 1386 of SEQ ID NO: 1885654
aggacuuugggaugguaua

SEQ ID NO: 2358183 - RNA, 19 nt, Artificial Sequence
  Description of Artificial Sequence: Synthetic oligonucleotide
  Antisense strand to SEQ ID NO: 2358182
uauaccaucccaaaguccu

SEQ ID NO: 2358184 - RNA, 19 nt, Artificial Sequence
  Description of Artificial Sequence: Synthetic oligonucleotide
  Sense strand starting at position 1597 of SEQ ID NO: 1885654
acaccucuuccaggaaguu

SEQ ID NO: 2358185 - RNA, 19 nt, Artificial Sequence
  Description of Artificial Sequence: Synthetic oligonucleotide
  Antisense strand to SEQ ID NO: 2358184
aacuuccuggaagaggugu

SEQ ID NO: 2358186 - RNA, 19 nt, Artificial Sequence
  Description of Artificial Sequence: Synthetic oligonucleotide
  Sense strand starting at position 1796 of SEQ ID NO: 1885654
gugaguuaucgucacacac

SEQ ID NO: 2358187 - RNA, 19 nt, Artificial Sequence
  Description of Artificial Sequence: Synthetic oligonucleotide
  Antisense strand to SEQ ID NO: 2358186
gugugugacgauaacucac

SEQ ID NO: 2358188 - RNA, 19 nt, Artificial Sequence
  Description of Artificial Sequence: Synthetic oligonucleotide
  Sense strand starting at position 1884 of SEQ ID NO: 1885654
ugauguuagcuccaggaaa

SEQ ID NO: 2358189 - RNA, 19 nt, Artificial Sequence
  Description of Artificial Sequence: Synthetic oligonucleotide
  Antisense strand to SEQ ID NO: 2358188
uuuccuggagcuaacauca

SEQ ID NO: 2358190 - RNA, 19 nt, Artificial Sequence
  Description of Artificial Sequence: Synthetic oligonucleotide
  Sense strand starting at position 2061 of SEQ ID NO: 1885654
gaagucuuccaaggcgaga

SEQ ID NO: 2358191 - RNA, 19 nt, Artificial Sequence
  Description of Artificial Sequence: Synthetic oligonucleotide
  Antisense strand to SEQ ID NO: 2358190
ucucgccuuggaagacuuc

SEQ ID NO: 2358192 - RNA, 19 nt, Artificial Sequence
  Description of Artificial Sequence: Synthetic oligonucleotide
  Sense strand starting at position 2070 of SEQ ID NO: 1885654
caaggcgagaugugauauu

SEQ ID NO: 2358193 - RNA, 19 nt, Artificial Sequence
  Description of Artificial Sequence: Synthetic oligonucleotide
  Antisense strand to SEQ ID NO: 2358192
aauaucacaucucgccuug

SEQ ID NO: 2358194 - RNA, 19 nt, Artificial Sequence
  Description of Artificial Sequence: Synthetic oligonucleotide
  Sense strand starting at position 2351 of SEQ ID NO: 1885654
ccaaauggccaauguaaua

SEQ ID NO: 2358195 - RNA, 19 nt, Artificial Sequence
  Description of Artificial Sequence: Synthetic oligonucleotide
  Antisense strand to SEQ ID NO: 2358194
uauuacauuggccauuugg

SEQ ID NO: 2358196 - RNA, 19 nt, Artificial Sequence
  Description of Artificial Sequence: Synthetic oligonucleotide
  Sense strand starting at position 2622 of SEQ ID NO: 1885654
ugggaagcccucuaugacu

SEQ ID NO: 2358197 - RNA, 19 nt, Artificial Sequence
  Description of Artificial Sequence: Synthetic oligonucleotide
  Antisense strand to SEQ ID NO: 2358196
agucauagagggcuuccca

SEQ ID NO: 2358198 - RNA, 19 nt, Artificial Sequence
  Description of Artificial Sequence: Synthetic oligonucleotide
  Sense strand starting at position 2627 of SEQ ID NO: 1885654
agcccucuaugacugaauu

SEQ ID NO: 2358199 - RNA, 19 nt, Artificial Sequence
  Description of Artificial Sequence: Synthetic oligonucleotide
  Antisense strand to SEQ ID NO: 2358198
aauucagucauagagggcu

SEQ ID NO: 2358200 - RNA, 19 nt, Artificial Sequence
  Description of Artificial Sequence: Synthetic oligonucleotide
  Sense strand starting at position 2637 of SEQ ID NO: 1885654
gacugaauuugauauugag

SEQ ID NO: 2358201 - RNA, 19 nt, Artificial Sequence
  Description of Artificial Sequence: Synthetic oligonucleotide
  Antisense strand to SEQ ID NO: 2358200
cucaauaucaaauucaguc

SEQ ID NO: 2358202 - RNA, 19 nt, Artificial Sequence
  Description of Artificial Sequence: Synthetic oligonucleotide
  Sense strand starting at position 2640 of SEQ ID NO: 1885654
ugaauuugauauugagaag

SEQ ID NO: 2358203 - RNA, 19 nt, Artificial Sequence
  Description of Artificial Sequence: Synthetic oligonucleotide
  Antisense strand to SEQ ID NO: 2358202
cuucucaauaucaaauuca

SEQ ID NO: 2358204 - RNA, 19 nt, Artificial Sequence
  Description of Artificial Sequence: Synthetic oligonucleotide
  Sense strand starting at position 2794 of SEQ ID NO: 1885654
ugaggccugauguaguauu

SEQ ID NO: 2358205 - RNA, 19 nt, Artificial Sequence
  Description of Artificial Sequence: Synthetic oligonucleotide
  Antisense strand to SEQ ID NO: 2358204
aauacuacaucaggccuca

SEQ ID NO: 2358206 - RNA, 19 nt, Artificial Sequence
  Description of Artificial Sequence: Synthetic oligonucleotide
  Sense strand starting at position 2827 of SEQ ID NO: 1885654
augcaaugucugccgcaga

SEQ ID NO: 2358207 - RNA, 19 nt, Artificial Sequence
  Description of Artificial Sequence: Synthetic oligonucleotide
  Antisense strand to SEQ ID NO: 2358206
ucugcggcagacauugcau

SEQ ID NO: 2358208 - RNA, 19 nt, Artificial Sequence
  Description of Artificial Sequence: Synthetic oligonucleotide
  Sense strand starting at position 2882 of SEQ ID NO: 1885654
ggagaugaugcuggaacua

SEQ ID NO: 2358209 - RNA, 19 nt, Artificial Sequence
  Description of Artificial Sequence: Synthetic oligonucleotide
  Antisense strand to SEQ ID NO: 2358208
uaguuccagcaucaucucc

SEQ ID NO: 2358210 - RNA, 19 nt, Artificial Sequence
  Description of Artificial Sequence: Synthetic oligonucleotide
  Sense strand starting at position 2895 of SEQ ID NO: 1885654
gaacuagugcuaugacuga

SEQ ID NO: 2358211 - RNA, 19 nt, Artificial Sequence
  Description of Artificial Sequence: Synthetic oligonucleotide
  Antisense strand to SEQ ID NO: 2358210
ucagucauagcacuaguuc

SEQ ID NO: 2358212 - RNA, 19 nt, Artificial Sequence
  Description of Artificial Sequence: Synthetic oligonucleotide
  Sense strand starting at position 2899 of SEQ ID NO: 1885654
uagugcuaugacugacacu

SEQ ID NO: 2358213 - RNA, 19 nt, Artificial Sequence
  Description of Artificial Sequence: Synthetic oligonucleotide
  Antisense strand to SEQ ID NO: 2358212
agugucagucauagcacua

SEQ ID NO: 2358214 - RNA, 19 nt, Artificial Sequence
  Description of Artificial Sequence: Synthetic oligonucleotide
  Sense strand starting at position 3056 of SEQ ID NO: 1885654
gugcuuugucuccuaagcu

SEQ ID NO: 2358215 - RNA, 19 nt, Artificial Sequence
  Description of Artificial Sequence: Synthetic oligonucleotide
  Antisense strand to SEQ ID NO: 2358214
agcuuaggagacaaagcac

SEQ ID NO: 2358216 - RNA, 19 nt, Artificial Sequence
  Description of Artificial Sequence: Synthetic oligonucleotide
  Sense strand starting at position 3090 of SEQ ID NO: 1885654
ggagacuuuccaggcugaa

SEQ ID NO: 2358217 - RNA, 19 nt, Artificial Sequence
  Description of Artificial Sequence: Synthetic oligonucleotide
  Antisense strand to SEQ ID NO: 2358216
uucagccuggaaagucucc

SEQ ID NO: 2358218 - RNA, 19 nt, Artificial Sequence
  Description of Artificial Sequence: Synthetic oligonucleotide
  Sense strand starting at position 3123 of SEQ ID NO: 1885654
agaaguagaccauguuaca

SEQ ID NO: 2358219 - RNA, 19 nt, Artificial Sequence
  Description of Artificial Sequence: Synthetic oligonucleotide
  Antisense strand to SEQ ID NO: 2358218
uguaacauggucuacuucu

SEQ ID NO: 2358220 - RNA, 19 nt, Artificial Sequence
  Description of Artificial Sequence: Synthetic oligonucleotide
  Sense strand starting at position 3304 of SEQ ID NO: 1885654
ggaggcacuuccucuguaa

SEQ ID NO: 2358221 - RNA, 19 nt, Artificial Sequence
  Description of Artificial Sequence: Synthetic oligonucleotide
  Antisense strand to SEQ ID NO: 2358220
uuacagaggaagugccucc

SEQ ID NO: 2358222 - RNA, 19 nt, Artificial Sequence
  Description of Artificial Sequence: Synthetic oligonucleotide
  Sense strand starting at position 3306 of SEQ ID NO: 1885654
aggcacuuccucuguaaac

SEQ ID NO: 2358223 - RNA, 19 nt, Artificial Sequence
  Description of Artificial Sequence: Synthetic oligonucleotide
  Antisense strand to SEQ ID NO: 2358222
guuuacagaggaagugccu

SEQ ID NO: 2358224 - RNA, 19 nt, Artificial Sequence
  Description of Artificial Sequence: Synthetic oligonucleotide
  Sense strand starting at position 3307 of SEQ ID NO: 1885654
ggcacuuccucuguaaaca

SEQ ID NO: 2358225 - RNA, 19 nt, Artificial Sequence
  Description of Artificial Sequence: Synthetic oligonucleotide
  Antisense strand to SEQ ID NO: 2358224
uguuuacagaggaagugcc

SEQ ID NO: 2358226 - RNA, 19 nt, Artificial Sequence
  Description of Artificial Sequence: Synthetic oligonucleotide
  Sense strand starting at position 3392 of SEQ ID NO: 1885654
ccgagauggcuagacuuga

SEQ ID NO: 2358227 - RNA, 19 nt, Artificial Sequence
  Description of Artificial Sequence: Synthetic oligonucleotide
  Antisense strand to SEQ ID NO: 2358226
ucaagucuagccaucucgg

SEQ ID NO: 2358228 - RNA, 19 nt, Artificial Sequence
  Description of Artificial Sequence: Synthetic oligonucleotide
  Sense strand starting at position 3396 of SEQ ID NO: 1885654
gauggcuagacuugagaug

SEQ ID NO: 2358229 - RNA, 19 nt, Artificial Sequence
  Description of Artificial Sequence: Synthetic oligonucleotide
  Antisense strand to SEQ ID NO: 2358228
caucucaagucuagccauc

SEQ ID NO: 2358230 - RNA, 19 nt, Artificial Sequence
  Description of Artificial Sequence: Synthetic oligonucleotide
  Sense strand starting at position 3455 of SEQ ID NO: 1885654
cgagucagugcgucuucaa

SEQ ID NO: 2358231 - RNA, 19 nt, Artificial Sequence
  Description of Artificial Sequence: Synthetic oligonucleotide
  Antisense strand to SEQ ID NO: 2358230
uugaagacgcacugacucg

SEQ ID NO: 2358232 - RNA, 19 nt, Artificial Sequence
  Description of Artificial Sequence: Synthetic oligonucleotide
  Sense strand starting at position 3531 of SEQ ID NO: 1885654
ccugaagucaucugaggag

SEQ ID NO: 2358233 - RNA, 19 nt, Artificial Sequence
  Description of Artificial Sequence: Synthetic oligonucleotide
  Antisense strand to SEQ ID NO: 2358232
cuccucagaugacuucagg

SEQ ID NO: 2358234 - RNA, 19 nt, Artificial Sequence
  Description of Artificial Sequence: Synthetic oligonucleotide
  Sense strand starting at position 3709 of SEQ ID NO: 1885654
guguuuggcacugaggaga

SEQ ID NO: 2358235 - RNA, 19 nt, Artificial Sequence
  Description of Artificial Sequence: Synthetic oligonucleotide
  Antisense strand to SEQ ID NO: 2358234
ucuccucagugccaaacac

SEQ ID NO: 2358236 - RNA, 19 nt, Artificial Sequence
  Description of Artificial Sequence: Synthetic oligonucleotide
  Sense strand starting at position 3836 of SEQ ID NO: 1885654
aggcuuucuccagggaggu

SEQ ID NO: 2358237 - RNA, 19 nt, Artificial Sequence
  Description of Artificial Sequence: Synthetic oligonucleotide
  Antisense strand to SEQ ID NO: 2358236
accucccuggagaaagccu

SEQ ID NO: 2358238 - RNA, 19 nt, Artificial Sequence
  Description of Artificial Sequence: Synthetic oligonucleotide
  Sense strand starting at position 23 of SEQ ID NO: 1885655
ugaggucuccugugagaua

SEQ ID NO: 2358239 - RNA, 19 nt, Artificial Sequence
  Description of Artificial Sequence: Synthetic oligonucleotide
  Antisense strand to SEQ ID NO: 2358238
uaucucacaggagaccuca

SEQ ID NO: 2358240 - RNA, 19 nt, Artificial Sequence
  Description of Artificial Sequence: Synthetic oligonucleotide
  Sense strand starting at position 93 of SEQ ID NO: 1885655
gggaauccuuaagccaaca

SEQ ID NO: 2358241 - RNA, 19 nt, Artificial Sequence
  Description of Artificial Sequence: Synthetic oligonucleotide
  Antisense strand to SEQ ID NO: 2358240
uguuggcuuaaggauuccc

SEQ ID NO: 2358242 - RNA, 19 nt, Artificial Sequence
  Description of Artificial Sequence: Synthetic oligonucleotide
  Sense strand starting at position 176 of SEQ ID NO: 1885655
aacucaugugcauagggau

SEQ ID NO: 2358243 - RNA, 19 nt, Artificial Sequence
  Description of Artificial Sequence: Synthetic oligonucleotide
  Antisense strand to SEQ ID NO: 2358242
aucccuaugcacaugaguu

SEQ ID NO: 2358244 - RNA, 19 nt, Artificial Sequence
  Description of Artificial Sequence: Synthetic oligonucleotide
  Sense strand starting at position 183 of SEQ ID NO: 1885655
gugcauagggauugaaaca

SEQ ID NO: 2358245 - RNA, 19 nt, Artificial Sequence
  Description of Artificial Sequence: Synthetic oligonucleotide
  Antisense strand to SEQ ID NO: 2358244
uguuucaaucccuaugcac

SEQ ID NO: 2358246 - RNA, 19 nt, Artificial Sequence
  Description of Artificial Sequence: Synthetic oligonucleotide
  Sense strand starting at position 509 of SEQ ID NO: 1885655
ccaacaagguuugugaaga

SEQ ID NO: 2358247 - RNA, 19 nt, Artificial Sequence
  Description of Artificial Sequence: Synthetic oligonucleotide
  Antisense strand to SEQ ID NO: 2358246
ucuucacaaaccuuguugg

SEQ ID NO: 2358248 - RNA, 19 nt, Artificial Sequence
  Description of Artificial Sequence: Synthetic oligonucleotide
  Sense strand starting at position 520 of SEQ ID NO: 1885655
ugugaagaucgcuagauaa

SEQ ID NO: 2358249 - RNA, 19 nt, Artificial Sequence
  Description of Artificial Sequence: Synthetic oligonucleotide
  Antisense strand to SEQ ID NO: 2358248
uuaucuagcgaucuucaca

SEQ ID NO: 2358250 - RNA, 19 nt, Artificial Sequence
  Description of Artificial Sequence: Synthetic oligonucleotide
  Sense strand starting at position 553 of SEQ ID NO: 1885655
guaagagcuacauggagaa

SEQ ID NO: 2358251 - RNA, 19 nt, Artificial Sequence
  Description of Artificial Sequence: Synthetic oligonucleotide
  Antisense strand to SEQ ID NO: 2358250
uucuccauguagcucuuac

SEQ ID NO: 2358252 - RNA, 19 nt, Artificial Sequence
  Description of Artificial Sequence: Synthetic oligonucleotide
  Sense strand starting at position 588 of SEQ ID NO: 1885655
uagugaaagccucaaugca

SEQ ID NO: 2358253 - RNA, 19 nt, Artificial Sequence
  Description of Artificial Sequence: Synthetic oligonucleotide
  Antisense strand to SEQ ID NO: 2358252
ugcauugaggcuuucacua

SEQ ID NO: 2358254 - RNA, 19 nt, Artificial Sequence
  Description of Artificial Sequence: Synthetic oligonucleotide
  Sense strand starting at position 613 of SEQ ID NO: 1885655
aguggacaauagcuauaaa

SEQ ID NO: 2358255 - RNA, 19 nt, Artificial Sequence
  Description of Artificial Sequence: Synthetic oligonucleotide
  Antisense strand to SEQ ID NO: 2358254
uuuauagcuauuguccacu

SEQ ID NO: 2358256 - RNA, 19 nt, Artificial Sequence
  Description of Artificial Sequence: Synthetic oligonucleotide
  Sense strand starting at position 835 of SEQ ID NO: 1885655
caaaccuuguggucagaaa

SEQ ID NO: 2358257 - RNA, 19 nt, Artificial Sequence
  Description of Artificial Sequence: Synthetic oligonucleotide
  Antisense strand to SEQ ID NO: 2358256
uuucugaccacaagguuug

SEQ ID NO: 2358258 - RNA, 19 nt, Artificial Sequence
  Description of Artificial Sequence: Synthetic oligonucleotide
  Sense strand starting at position 842 of SEQ ID NO: 1885655
uguggucagaaaugaauuc

SEQ ID NO: 2358259 - RNA, 19 nt, Artificial Sequence
  Description of Artificial Sequence: Synthetic oligonucleotide
  Antisense strand to SEQ ID NO: 2358258
gaauucauuucugaccaca

SEQ ID NO: 2358260 - RNA, 19 nt, Artificial Sequence
  Description of Artificial Sequence: Synthetic oligonucleotide
  Sense strand starting at position 1127 of SEQ ID NO: 1885655
gugguaaagcgagaaacau

SEQ ID NO: 2358261 - RNA, 19 nt, Artificial Sequence
  Description of Artificial Sequence: Synthetic oligonucleotide
  Antisense strand to SEQ ID NO: 2358260
auguuucucgcuuuaccac

SEQ ID NO: 2358262 - RNA, 19 nt, Artificial Sequence
  Description of Artificial Sequence: Synthetic oligonucleotide
  Sense strand starting at position 1292 of SEQ ID NO: 1885655
cagacagguguaugaaauu

SEQ ID NO: 2358263 - RNA, 19 nt, Artificial Sequence
  Description of Artificial Sequence: Synthetic oligonucleotide
  Antisense strand to SEQ ID NO: 2358262
aauuucauacaccugucug

SEQ ID NO: 2358264 - RNA, 19 nt, Artificial Sequence
  Description of Artificial Sequence: Synthetic oligonucleotide
  Sense strand starting at position 1310 of SEQ ID NO: 1885655
uucuaaagcccuuaauggu

SEQ ID NO: 2358265 - RNA, 19 nt, Artificial Sequence
  Description of Artificial Sequence: Synthetic oligonucleotide
  Antisense strand to SEQ ID NO: 2358264
accauuaagggcuuuagaa

SEQ ID NO: 2358266 - RNA, 19 nt, Artificial Sequence
  Description of Artificial Sequence: Synthetic oligonucleotide
  Sense strand starting at position 1325 of SEQ ID NO: 1885655
ugguuauuucugggugcca

SEQ ID NO: 2358267 - RNA, 19 nt, Artificial Sequence
  Description of Artificial Sequence: Synthetic oligonucleotide
  Antisense strand to SEQ ID NO: 2358266
uggcacccagaaauaacca

SEQ ID NO: 2358268 - RNA, 19 nt, Artificial Sequence
  Description of Artificial Sequence: Synthetic oligonucleotide
  Sense strand starting at position 1327 of SEQ ID NO: 1885655
guuauuucugggugccaga

SEQ ID NO: 2358269 - RNA, 19 nt, Artificial Sequence
  Description of Artificial Sequence: Synthetic oligonucleotide
  Antisense strand to SEQ ID NO: 2358268
ucuggcacccagaaauaac

SEQ ID NO: 2358270 - RNA, 19 nt, Artificial Sequence
  Description of Artificial Sequence: Synthetic oligonucleotide
  Sense strand starting at position 1382 of SEQ ID NO: 1885655
uuccacaucgcuugaauuu

SEQ ID NO: 2358271 - RNA, 19 nt, Artificial Sequence
  Description of Artificial Sequence: Synthetic oligonucleotide
  Antisense strand to SEQ ID NO: 2358270
aaauucaagcgauguggaa

SEQ ID NO: 2358272 - RNA, 19 nt, Artificial Sequence
  Description of Artificial Sequence: Synthetic oligonucleotide
  Sense strand starting at position 1596 of SEQ ID NO: 1885655
uugucaacaugucuaagaa

SEQ ID NO: 2358273 - RNA, 19 nt, Artificial Sequence
  Description of Artificial Sequence: Synthetic oligonucleotide
  Antisense strand to SEQ ID NO: 2358272
uucuuagacauguugacaa

SEQ ID NO: 2358274 - RNA, 19 nt, Artificial Sequence
  Description of Artificial Sequence: Synthetic oligonucleotide
  Sense strand starting at position 1616 of SEQ ID NO: 1885655
uccuuccuccaugguaaga

SEQ ID NO: 2358275 - RNA, 19 nt, Artificial Sequence
  Description of Artificial Sequence: Synthetic oligonucleotide
  Antisense strand to SEQ ID NO: 2358274
ucuuaccauggaggaagga

SEQ ID NO: 2358276 - RNA, 19 nt, Artificial Sequence
  Description of Artificial Sequence: Synthetic oligonucleotide
  Sense strand starting at position 1736 of SEQ ID NO: 1885655
gggucuugagcacagauca

SEQ ID NO: 2358277 - RNA, 19 nt, Artificial Sequence
  Description of Artificial Sequence: Synthetic oligonucleotide
  Antisense strand to SEQ ID NO: 2358276
ugaucugugcucaagaccc

SEQ ID NO: 2358278 - RNA, 19 nt, Artificial Sequence
  Description of Artificial Sequence: Synthetic oligonucleotide
  Sense strand starting at position 1853 of SEQ ID NO: 1885655
guggaaccaacaugaguau

SEQ ID NO: 2358279 - RNA, 19 nt, Artificial Sequence
  Description of Artificial Sequence: Synthetic oligonucleotide
  Antisense strand to SEQ ID NO: 2358278
auacucauguugguuccac

SEQ ID NO: 2358280 - RNA, 19 nt, Artificial Sequence
  Description of Artificial Sequence: Synthetic oligonucleotide
  Sense strand starting at position 2150 of SEQ ID NO: 1885655
aggauuagugugcacagaa

SEQ ID NO: 2358281 - RNA, 19 nt, Artificial Sequence
  Description of Artificial Sequence: Synthetic oligonucleotide
  Antisense strand to SEQ ID NO: 2358280
uucugugcacacuaauccu

SEQ ID NO: 2358282 - RNA, 19 nt, Artificial Sequence
  Description of Artificial Sequence: Synthetic oligonucleotide
  Sense strand starting at position 2329 of SEQ ID NO: 1885655
gaauucucuggagggugua

SEQ ID NO: 2358283 - RNA, 19 nt, Artificial Sequence
  Description of Artificial Sequence: Synthetic oligonucleotide
  Antisense strand to SEQ ID NO: 2358282
uacacccuccagagaauuc

SEQ ID NO: 2358284 - RNA, 19 nt, Artificial Sequence
  Description of Artificial Sequence: Synthetic oligonucleotide
  Sense strand starting at position 2435 of SEQ ID NO: 1885655
cuucuagaugcccaagauu

SEQ ID NO: 2358285 - RNA, 19 nt, Artificial Sequence
  Description of Artificial Sequence: Synthetic oligonucleotide
  Antisense strand to SEQ ID NO: 2358284
aaucuugggcaucuagaag

SEQ ID NO: 2358286 - RNA, 19 nt, Artificial Sequence
  Description of Artificial Sequence: Synthetic oligonucleotide
  Sense strand starting at position 2461 of SEQ ID NO: 1885655
aagguugaauuugauagga

SEQ ID NO: 2358287 - RNA, 19 nt, Artificial Sequence
  Description of Artificial Sequence: Synthetic oligonucleotide
  Antisense strand to SEQ ID NO: 2358286
uccuaucaaauucaaccuu

SEQ ID NO: 2358288 - RNA, 19 nt, Artificial Sequence
  Description of Artificial Sequence: Synthetic oligonucleotide
  Sense strand starting at position 2463 of SEQ ID NO: 1885655
gguugaauuugauaggaau

SEQ ID NO: 2358289 - RNA, 19 nt, Artificial Sequence
  Description of Artificial Sequence: Synthetic oligonucleotide
  Antisense strand to SEQ ID NO: 2358288
auuccuaucaaauucaacc

SEQ ID NO: 2358290 - RNA, 19 nt, Artificial Sequence
  Description of Artificial Sequence: Synthetic oligonucleotide
  Sense strand starting at position 2598 of SEQ ID NO: 1885655
cagcuuggacucuaaaguu

SEQ ID NO: 2358291 - RNA, 19 nt, Artificial Sequence
  Description of Artificial Sequence: Synthetic oligonucleotide
  Antisense strand to SEQ ID NO: 2358290
aacuuuagaguccaagcug

SEQ ID NO: 2358292 - RNA, 19 nt, Artificial Sequence
  Description of Artificial Sequence: Synthetic oligonucleotide
  Sense strand starting at position 2627 of SEQ ID NO: 1885655
uuacaugcauccucaggaa

SEQ ID NO: 2358293 - RNA, 19 nt, Artificial Sequence
  Description of Artificial Sequence: Synthetic oligonucleotide
  Antisense strand to SEQ ID NO: 2358292
uuccugaggaugcauguaa

SEQ ID NO: 2358294 - RNA, 19 nt, Artificial Sequence
  Description of Artificial Sequence: Synthetic oligonucleotide
  Sense strand starting at position 2716 of SEQ ID NO: 1885655
ggcagaauuugacacuaaa

SEQ ID NO: 2358295 - RNA, 19 nt, Artificial Sequence
  Description of Artificial Sequence: Synthetic oligonucleotide
  Antisense strand to SEQ ID NO: 2358294
uuuagugucaaauucugcc

SEQ ID NO: 2358296 - RNA, 19 nt, Artificial Sequence
  Description of Artificial Sequence: Synthetic oligonucleotide
  Sense strand starting at position 2820 of SEQ ID NO: 1885655
ugagaaauccauugccucu

SEQ ID NO: 2358297 - RNA, 19 nt, Artificial Sequence
  Description of Artificial Sequence: Synthetic oligonucleotide
  Antisense strand to SEQ ID NO: 2358296
agaggcaauggauuucuca

SEQ ID NO: 2358298 - RNA, 19 nt, Artificial Sequence
  Description of Artificial Sequence: Synthetic oligonucleotide
  Sense strand starting at position 2872 of SEQ ID NO: 1885655
guuaggaaugggugggaua

SEQ ID NO: 2358299 - RNA, 19 nt, Artificial Sequence
  Description of Artificial Sequence: Synthetic oligonucleotide
  Antisense strand to SEQ ID NO: 2358298
uaucccacccauuccuaac

SEQ ID NO: 2358300 - RNA, 19 nt, Artificial Sequence
  Description of Artificial Sequence: Synthetic oligonucleotide
  Sense strand starting at position 2874 of SEQ ID NO: 1885655
uaggaaugggugggauagu

SEQ ID NO: 2358301 - RNA, 19 nt, Artificial Sequence
  Description of Artificial Sequence: Synthetic oligonucleotide
  Antisense strand to SEQ ID NO: 2358300
acuaucccacccauuccua

SEQ ID NO: 2358302 - RNA, 19 nt, Artificial Sequence
  Description of Artificial Sequence: Synthetic oligonucleotide
  Sense strand starting at position 3125 of SEQ ID NO: 1885655
caggaugcuggguauuaga

SEQ ID NO: 2358303 - RNA, 19 nt, Artificial Sequence
  Description of Artificial Sequence: Synthetic oligonucleotide
  Antisense strand to SEQ ID NO: 2358302
ucuaauacccagcauccug

SEQ ID NO: 2358304 - RNA, 19 nt, Artificial Sequence
  Description of Artificial Sequence: Synthetic oligonucleotide
  Sense strand starting at position 3172 of SEQ ID NO: 1885655
gcacaugcucugggaagaa

SEQ ID NO: 2358305 - RNA, 19 nt, Artificial Sequence
  Description of Artificial Sequence: Synthetic oligonucleotide
  Antisense strand to SEQ ID NO: 2358304
uucuucccagagcaugugc

SEQ ID NO: 2358306 - RNA, 19 nt, Artificial Sequence
  Description of Artificial Sequence: Synthetic oligonucleotide
  Sense strand starting at position 3430 of SEQ ID NO: 1885655
uggaaagucuuccuggagu

SEQ ID NO: 2358307 - RNA, 19 nt, Artificial Sequence
  Description of Artificial Sequence: Synthetic oligonucleotide
  Antisense strand to SEQ ID NO: 2358306
acuccaggaagacuuucca

SEQ ID NO: 2358308 - RNA, 19 nt, Artificial Sequence
  Description of Artificial Sequence: Synthetic oligonucleotide
  Sense strand starting at position 3449 of SEQ ID NO: 1885655
gggagugaugcugaggguu

SEQ ID NO: 2358309 - RNA, 19 nt, Artificial Sequence
  Description of Artificial Sequence: Synthetic oligonucleotide
  Antisense strand to SEQ ID NO: 2358308
aacccucagcaucacuccc

SEQ ID NO: 2358310 - RNA, 19 nt, Artificial Sequence
  Description of Artificial Sequence: Synthetic oligonucleotide
  Sense strand starting at position 3692 of SEQ ID NO: 1885655
ggauuaucgggccagguga

SEQ ID NO: 2358311 - RNA, 19 nt, Artificial Sequence
  Description of Artificial Sequence: Synthetic oligonucleotide
  Antisense strand to SEQ ID NO: 2358310
ucaccuggcccgauaaucc

SEQ ID NO: 2358312 - RNA, 19 nt, Artificial Sequence
  Description of Artificial Sequence: Synthetic oligonucleotide
  Sense strand starting at position 3707 of SEQ ID NO: 1885655
gugacuuacagcuagguca

SEQ ID NO: 2358313 - RNA, 19 nt, Artificial Sequence
  Description of Artificial Sequence: Synthetic oligonucleotide
  Antisense strand to SEQ ID NO: 2358312
ugaccuagcuguaagucac

SEQ ID NO: 2358314 - RNA, 19 nt, Artificial Sequence
  Description of Artificial Sequence: Synthetic oligonucleotide
  Sense strand starting at position 3811 of SEQ ID NO: 1885655
ccaggaaguccuuagaggu

SEQ ID NO: 2358315 - RNA, 19 nt, Artificial Sequence
  Description of Artificial Sequence: Synthetic oligonucleotide
  Antisense strand to SEQ ID NO: 2358314
accucuaaggacuuccugg

SEQ ID NO: 2358316 - RNA, 19 nt, Artificial Sequence
  Description of Artificial Sequence: Synthetic oligonucleotide
  Sense strand starting at position 3817 of SEQ ID NO: 1885655
aguccuuagagguagcauu

SEQ ID NO: 2358317 - RNA, 19 nt, Artificial Sequence
  Description of Artificial Sequence: Synthetic oligonucleotide
  Antisense strand to SEQ ID NO: 2358316
aaugcuaccucuaaggacu

SEQ ID NO: 2358318 - RNA, 19 nt, Artificial Sequence
  Description of Artificial Sequence: Synthetic oligonucleotide
  Sense strand starting at position 89 of SEQ ID NO: 1885656
ggagcagaggucugagaag

SEQ ID NO: 2358319 - RNA, 19 nt, Artificial Sequence
  Description of Artificial Sequence: Synthetic oligonucleotide
  Antisense strand to SEQ ID NO: 2358318
cuucucagaccucugcucc

SEQ ID NO: 2358320 - RNA, 19 nt, Artificial Sequence
  Description of Artificial Sequence: Synthetic oligonucleotide
  Sense strand starting at position 248 of SEQ ID NO: 1885656
gucacauggccuugacaca

SEQ ID NO: 2358321 - RNA, 19 nt, Artificial Sequence
  Description of Artificial Sequence: Synthetic oligonucleotide
  Antisense strand to SEQ ID NO: 2358320
ugugucaaggccaugugac

SEQ ID NO: 2358322 - RNA, 19 nt, Artificial Sequence
  Description of Artificial Sequence: Synthetic oligonucleotide
  Sense strand starting at position 375 of SEQ ID NO: 1885656
uguucucucugguuauaaa

SEQ ID NO: 2358323 - RNA, 19 nt, Artificial Sequence
  Description of Artificial Sequence: Synthetic oligonucleotide
  Antisense strand to SEQ ID NO: 2358322
uuuauaaccagagagaaca

SEQ ID NO: 2358324 - RNA, 19 nt, Artificial Sequence
  Description of Artificial Sequence: Synthetic oligonucleotide
  Sense strand starting at position 641 of SEQ ID NO: 1885656
gcauuacugccagacagga

SEQ ID NO: 2358325 - RNA, 19 nt, Artificial Sequence
  Description of Artificial Sequence: Synthetic oligonucleotide
  Antisense strand to SEQ ID NO: 2358324
uccugucuggcaguaaugc

SEQ ID NO: 2358326 - RNA, 19 nt, Artificial Sequence
  Description of Artificial Sequence: Synthetic oligonucleotide
  Sense strand starting at position 707 of SEQ ID NO: 1885656
gggccugacaacugucuua

SEQ ID NO: 2358327 - RNA, 19 nt, Artificial Sequence
  Description of Artificial Sequence: Synthetic oligonucleotide
  Antisense strand to SEQ ID NO: 2358326
uaagacaguugucaggccc

SEQ ID NO: 2358328 - RNA, 19 nt, Artificial Sequence
  Description of Artificial Sequence: Synthetic oligonucleotide
  Sense strand starting at position 714 of SEQ ID NO: 1885656
acaacugucuuauccggaa

SEQ ID NO: 2358329 - RNA, 19 nt, Artificial Sequence
  Description of Artificial Sequence: Synthetic oligonucleotide
  Antisense strand to SEQ ID NO: 2358328
uuccggauaagacaguugu

SEQ ID NO: 2358330 - RNA, 19 nt, Artificial Sequence
  Description of Artificial Sequence: Synthetic oligonucleotide
  Sense strand starting at position 739 of SEQ ID NO: 1885656
caaacugguguuugauacu

SEQ ID NO: 2358331 - RNA, 19 nt, Artificial Sequence
  Description of Artificial Sequence: Synthetic oligonucleotide
  Antisense strand to SEQ ID NO: 2358330
aguaucaaacaccaguuug

SEQ ID NO: 2358332 - RNA, 19 nt, Artificial Sequence
  Description of Artificial Sequence: Synthetic oligonucleotide
  Sense strand starting at position 746 of SEQ ID NO: 1885656
guguuugauacugaagagu

SEQ ID NO: 2358333 - RNA, 19 nt, Artificial Sequence
  Description of Artificial Sequence: Synthetic oligonucleotide
  Antisense strand to SEQ ID NO: 2358332
acucuucaguaucaaacac

SEQ ID NO: 2358334 - RNA, 19 nt, Artificial Sequence
  Description of Artificial Sequence: Synthetic oligonucleotide
  Sense strand starting at position 808 of SEQ ID NO: 1885656
ggaaaccucuccuugagca

SEQ ID NO: 2358335 - RNA, 19 nt, Artificial Sequence
  Description of Artificial Sequence: Synthetic oligonucleotide
  Antisense strand to SEQ ID NO: 2358334
ugcucaaggagagguuucc

SEQ ID NO: 2358336 - RNA, 19 nt, Artificial Sequence
  Description of Artificial Sequence: Synthetic oligonucleotide
  Sense strand starting at position 1029 of SEQ ID NO: 1885656
ccacaauuccugugagaaa

SEQ ID NO: 2358337 - RNA, 19 nt, Artificial Sequence
  Description of Artificial Sequence: Synthetic oligonucleotide
  Antisense strand to SEQ ID NO: 2358336
uuucucacaggaauugugg

SEQ ID NO: 2358338 - RNA, 19 nt, Artificial Sequence
  Description of Artificial Sequence: Synthetic oligonucleotide
  Sense strand starting at position 1127 of SEQ ID NO: 1885656
gugucauuauauccaggac

SEQ ID NO: 2358339 - RNA, 19 nt, Artificial Sequence
  Description of Artificial Sequence: Synthetic oligonucleotide
  Antisense strand to SEQ ID NO: 2358338
guccuggauauaaugacac

SEQ ID NO: 2358340 - RNA, 19 nt, Artificial Sequence
  Description of Artificial Sequence: Synthetic oligonucleotide
  Sense strand starting at position 1303 of SEQ ID NO: 1885656
gccgaaagagccugaauua

SEQ ID NO: 2358341 - RNA, 19 nt, Artificial Sequence
  Description of Artificial Sequence: Synthetic oligonucleotide
  Antisense strand to SEQ ID NO: 2358340
uaauucaggcucuuucggc

SEQ ID NO: 2358342 - RNA, 19 nt, Artificial Sequence
  Description of Artificial Sequence: Synthetic oligonucleotide
  Sense strand starting at position 1304 of SEQ ID NO: 1885656
ccgaaagagccugaauuac

SEQ ID NO: 2358343 - RNA, 19 nt, Artificial Sequence
  Description of Artificial Sequence: Synthetic oligonucleotide
  Antisense strand to SEQ ID NO: 2358342
guaauucaggcucuuucgg

SEQ ID NO: 2358344 - RNA, 19 nt, Artificial Sequence
  Description of Artificial Sequence: Synthetic oligonucleotide
  Sense strand starting at position 1461 of SEQ ID NO: 1885656
gaggguuagcgcaaucggu

SEQ ID NO: 2358345 - RNA, 19 nt, Artificial Sequence
  Description of Artificial Sequence: Synthetic oligonucleotide
  Antisense strand to SEQ ID NO: 2358344
accgauugcgcuaacccuc

SEQ ID NO: 2358346 - RNA, 19 nt, Artificial Sequence
  Description of Artificial Sequence: Synthetic oligonucleotide
  Sense strand starting at position 1524 of SEQ ID NO: 1885656
gcucgugucuccuuauuua

SEQ ID NO: 2358347 - RNA, 19 nt, Artificial Sequence
  Description of Artificial Sequence: Synthetic oligonucleotide
  Antisense strand to SEQ ID NO: 2358346
uaaauaaggagacacgagc

SEQ ID NO: 2358348 - RNA, 19 nt, Artificial Sequence
  Description of Artificial Sequence: Synthetic oligonucleotide
  Sense strand starting at position 1527 of SEQ ID NO: 1885656
cgugucuccuuauuuaugu

SEQ ID NO: 2358349 - RNA, 19 nt, Artificial Sequence
  Description of Artificial Sequence: Synthetic oligonucleotide
  Antisense strand to SEQ ID NO: 2358348
acauaaauaaggagacacg

SEQ ID NO: 2358350 - RNA, 19 nt, Artificial Sequence
  Description of Artificial Sequence: Synthetic oligonucleotide
  Sense strand starting at position 1747 of SEQ ID NO: 1885656
aguccuguuaaauacggau

SEQ ID NO: 2358351 - RNA, 19 nt, Artificial Sequence
  Description of Artificial Sequence: Synthetic oligonucleotide
  Antisense strand to SEQ ID NO: 2358350
auccguauuuaacaggacu

SEQ ID NO: 2358352 - RNA, 19 nt, Artificial Sequence
  Description of Artificial Sequence: Synthetic oligonucleotide
  Sense strand starting at position 1820 of SEQ ID NO: 1885656
cuucgugguuaaccauaga

SEQ ID NO: 2358353 - RNA, 19 nt, Artificial Sequence
  Description of Artificial Sequence: Synthetic oligonucleotide
  Antisense strand to SEQ ID NO: 2358352
ucuaugguuaaccacgaag

SEQ ID NO: 2358354 - RNA, 19 nt, Artificial Sequence
  Description of Artificial Sequence: Synthetic oligonucleotide
  Sense strand starting at position 2092 of SEQ ID NO: 1885656
agcguuaguuaguugauuu

SEQ ID NO: 2358355 - RNA, 19 nt, Artificial Sequence
  Description of Artificial Sequence: Synthetic oligonucleotide
  Antisense strand to SEQ ID NO: 2358354
aaaucaacuaacuaacgcu

SEQ ID NO: 2358356 - RNA, 19 nt, Artificial Sequence
  Description of Artificial Sequence: Synthetic oligonucleotide
  Sense strand starting at position 2093 of SEQ ID NO: 1885656
gcguuaguuaguugauuug

SEQ ID NO: 2358357 - RNA, 19 nt, Artificial Sequence
  Description of Artificial Sequence: Synthetic oligonucleotide
  Antisense strand to SEQ ID NO: 2358356
caaaucaacuaacuaacgc

SEQ ID NO: 2358358 - RNA, 19 nt, Artificial Sequence
  Description of Artificial Sequence: Synthetic oligonucleotide
  Sense strand starting at position 2099 of SEQ ID NO: 1885656
guuaguugauuugccggaa

SEQ ID NO: 2358359 - RNA, 19 nt, Artificial Sequence
  Description of Artificial Sequence: Synthetic oligonucleotide
  Antisense strand to SEQ ID NO: 2358358
uuccggcaaaucaacuaac

SEQ ID NO: 2358360 - RNA, 19 nt, Artificial Sequence
  Description of Artificial Sequence: Synthetic oligonucleotide
  Sense strand starting at position 2183 of SEQ ID NO: 1885656
ccacaucacgucuggaagu

SEQ ID NO: 2358361 - RNA, 19 nt, Artificial Sequence
  Description of Artificial Sequence: Synthetic oligonucleotide
  Antisense strand to SEQ ID NO: 2358360
acuuccagacgugaugugg

SEQ ID NO: 2358362 - RNA, 19 nt, Artificial Sequence
  Description of Artificial Sequence: Synthetic oligonucleotide
  Sense strand starting at position 2249 of SEQ ID NO: 1885656
cagcuaucgcguuuagggu

SEQ ID NO: 2358363 - RNA, 19 nt, Artificial Sequence
  Description of Artificial Sequence: Synthetic oligonucleotide
  Antisense strand to SEQ ID NO: 2358362
acccuaaacgcgauagcug

SEQ ID NO: 2358364 - RNA, 19 nt, Artificial Sequence
  Description of Artificial Sequence: Synthetic oligonucleotide
  Sense strand starting at position 2439 of SEQ ID NO: 1885656
aggacuuugggaugguaua

SEQ ID NO: 2358365 - RNA, 19 nt, Artificial Sequence
  Description of Artificial Sequence: Synthetic oligonucleotide
  Antisense strand to SEQ ID NO: 2358364
uauaccaucccaaaguccu

SEQ ID NO: 2358366 - RNA, 19 nt, Artificial Sequence
  Description of Artificial Sequence: Synthetic oligonucleotide
  Sense strand starting at position 2650 of SEQ ID NO: 1885656
acaccucuuccaggaaguu

SEQ ID NO: 2358367 - RNA, 19 nt, Artificial Sequence
  Description of Artificial Sequence: Synthetic oligonucleotide
  Antisense strand to SEQ ID NO: 2358366
aacuuccuggaagaggugu

SEQ ID NO: 2358368 - RNA, 19 nt, Artificial Sequence
  Description of Artificial Sequence: Synthetic oligonucleotide
  Sense strand starting at position 2849 of SEQ ID NO: 1885656
gugaguuaucgucacacac

SEQ ID NO: 2358369 - RNA, 19 nt, Artificial Sequence
  Description of Artificial Sequence: Synthetic oligonucleotide
  Antisense strand to SEQ ID NO: 2358368
gugugugacgauaacucac

SEQ ID NO: 2358370 - RNA, 19 nt, Artificial Sequence
  Description of Artificial Sequence: Synthetic oligonucleotide
  Sense strand starting at position 2937 of SEQ ID NO: 1885656
ugauguuagcuccaggaaa

SEQ ID NO: 2358371 - RNA, 19 nt, Artificial Sequence
  Description of Artificial Sequence: Synthetic oligonucleotide
  Antisense strand to SEQ ID NO: 2358370
uuuccuggagcuaacauca

SEQ ID NO: 2358372 - RNA, 19 nt, Artificial Sequence
  Description of Artificial Sequence: Synthetic oligonucleotide
  Sense strand starting at position 3114 of SEQ ID NO: 1885656
gaagucuuccaaggcgaga

SEQ ID NO: 2358373 - RNA, 19 nt, Artificial Sequence
  Description of Artificial Sequence: Synthetic oligonucleotide
  Antisense strand to SEQ ID NO: 2358372
ucucgccuuggaagacuuc

SEQ ID NO: 2358374 - RNA, 19 nt, Artificial Sequence
  Description of Artificial Sequence: Synthetic oligonucleotide
  Sense strand starting at position 3123 of SEQ ID NO: 1885656
caaggcgagaugugauauu

SEQ ID NO: 2358375 - RNA, 19 nt, Artificial Sequence
  Description of Artificial Sequence: Synthetic oligonucleotide
  Antisense strand to SEQ ID NO: 2358374
aauaucacaucucgccuug

SEQ ID NO: 2358376 - RNA, 19 nt, Artificial Sequence
  Description of Artificial Sequence: Synthetic oligonucleotide
  Sense strand starting at position 3404 of SEQ ID NO: 1885656
ccaaauggccaauguaaua

SEQ ID NO: 2358377 - RNA, 19 nt, Artificial Sequence
  Description of Artificial Sequence: Synthetic oligonucleotide
  Antisense strand to SEQ ID NO: 2358376
uauuacauuggccauuugg

SEQ ID NO: 2358378 - RNA, 19 nt, Artificial Sequence
  Description of Artificial Sequence: Synthetic oligonucleotide
  Sense strand starting at position 3675 of SEQ ID NO: 1885656
ugggaagcccucuaugacu

SEQ ID NO: 2358379 - RNA, 19 nt, Artificial Sequence
  Description of Artificial Sequence: Synthetic oligonucleotide
  Antisense strand to SEQ ID NO: 2358378
agucauagagggcuuccca

SEQ ID NO: 2358380 - RNA, 19 nt, Artificial Sequence
  Description of Artificial Sequence: Synthetic oligonucleotide
  Sense strand starting at position 3680 of SEQ ID NO: 1885656
agcccucuaugacugaauu

SEQ ID NO: 2358381 - RNA, 19 nt, Artificial Sequence
  Description of Artificial Sequence: Synthetic oligonucleotide
  Antisense strand to SEQ ID NO: 2358380
aauucagucauagagggcu

SEQ ID NO: 2358382 - RNA, 19 nt, Artificial Sequence
  Description of Artificial Sequence: Synthetic oligonucleotide
  Sense strand starting at position 3690 of SEQ ID NO: 1885656
gacugaauuugauauugag

SEQ ID NO: 2358383 - RNA, 19 nt, Artificial Sequence
  Description of Artificial Sequence: Synthetic oligonucleotide
  Antisense strand to SEQ ID NO: 2358382
cucaauaucaaauucaguc

SEQ ID NO: 2358384 - RNA, 19 nt, Artificial Sequence
  Description of Artificial Sequence: Synthetic oligonucleotide
  Sense strand starting at position 3693 of SEQ ID NO: 1885656
ugaauuugauauugagaag

SEQ ID NO: 2358385 - RNA, 19 nt, Artificial Sequence
  Description of Artificial Sequence: Synthetic oligonucleotide
  Antisense strand to SEQ ID NO: 2358384
cuucucaauaucaaauuca

SEQ ID NO: 2358386 - RNA, 19 nt, Artificial Sequence
  Description of Artificial Sequence: Synthetic oligonucleotide
  Sense strand starting at position 3847 of SEQ ID NO: 1885656
ugaggccugauguaguauu

SEQ ID NO: 2358387 - RNA, 19 nt, Artificial Sequence
  Description of Artificial Sequence: Synthetic oligonucleotide
  Antisense strand to SEQ ID NO: 2358386
aauacuacaucaggccuca

SEQ ID NO: 2358388 - RNA, 19 nt, Artificial Sequence
  Description of Artificial Sequence: Synthetic oligonucleotide
  Sense strand starting at position 3880 of SEQ ID NO: 1885656
augcaaugucugccgcaga

SEQ ID NO: 2358389 - RNA, 19 nt, Artificial Sequence
  Description of Artificial Sequence: Synthetic oligonucleotide
  Antisense strand to SEQ ID NO: 2358388
ucugcggcagacauugcau

SEQ ID NO: 2358390 - RNA, 19 nt, Artificial Sequence
  Description of Artificial Sequence: Synthetic oligonucleotide
  Sense strand starting at position 3935 of SEQ ID NO: 1885656
ggagaugaugcuggaacua

SEQ ID NO: 2358391 - RNA, 19 nt, Artificial Sequence
  Description of Artificial Sequence: Synthetic oligonucleotide
  Antisense strand to SEQ ID NO: 2358390
uaguuccagcaucaucucc

SEQ ID NO: 2358392 - RNA, 19 nt, Artificial Sequence
  Description of Artificial Sequence: Synthetic oligonucleotide
  Sense strand starting at position 3948 of SEQ ID NO: 1885656
gaacuagugcuaugacuga

SEQ ID NO: 2358393 - RNA, 19 nt, Artificial Sequence
  Description of Artificial Sequence: Synthetic oligonucleotide
  Antisense strand to SEQ ID NO: 2358392
ucagucauagcacuaguuc

SEQ ID NO: 2358394 - RNA, 19 nt, Artificial Sequence
  Description of Artificial Sequence: Synthetic oligonucleotide
  Sense strand starting at position 3952 of SEQ ID NO: 1885656
uagugcuaugacugacacu

SEQ ID NO: 2358395 - RNA, 19 nt, Artificial Sequence
  Description of Artificial Sequence: Synthetic oligonucleotide
  Antisense strand to SEQ ID NO: 2358394
agugucagucauagcacua

SEQ ID NO: 2358396 - RNA, 19 nt, Artificial Sequence
  Description of Artificial Sequence: Synthetic oligonucleotide
  Sense strand starting at position 3969 of SEQ ID NO: 1885656
cucguuccugccuacagaa

SEQ ID NO: 2358397 - RNA, 19 nt, Artificial Sequence
  Description of Artificial Sequence: Synthetic oligonucleotide
  Antisense strand to SEQ ID NO: 2358396
uucuguaggcaggaacgag

SEQ ID NO: 2358398 - RNA, 19 nt, Artificial Sequence
  Description of Artificial Sequence: Synthetic oligonucleotide
  Sense strand starting at position 254 of SEQ ID NO: 1885657
ggaguacuguuaucuccag

SEQ ID NO: 2358399 - RNA, 19 nt, Artificial Sequence
  Description of Artificial Sequence: Synthetic oligonucleotide
  Antisense strand to SEQ ID NO: 2358398
cuggagauaacaguacucc

SEQ ID NO: 2358400 - RNA, 19 nt, Artificial Sequence
  Description of Artificial Sequence: Synthetic oligonucleotide
  Sense strand starting at position 255 of SEQ ID NO: 1885657
gaguacuguuaucuccaga

SEQ ID NO: 2358401 - RNA, 19 nt, Artificial Sequence
  Description of Artificial Sequence: Synthetic oligonucleotide
  Antisense strand to SEQ ID NO: 2358400
ucuggagauaacaguacuc

SEQ ID NO: 2358402 - RNA, 19 nt, Artificial Sequence
  Description of Artificial Sequence: Synthetic oligonucleotide
  Sense strand starting at position 260 of SEQ ID NO: 1885657
cuguuaucuccagacucuu

SEQ ID NO: 2358403 - RNA, 19 nt, Artificial Sequence
  Description of Artificial Sequence: Synthetic oligonucleotide
  Antisense strand to SEQ ID NO: 2358402
aagagucuggagauaacag

SEQ ID NO: 2358404 - RNA, 19 nt, Artificial Sequence
  Description of Artificial Sequence: Synthetic oligonucleotide
  Sense strand starting at position 288 of SEQ ID NO: 1885657
aacagagaguuagaucaau

SEQ ID NO: 2358405 - RNA, 19 nt, Artificial Sequence
  Description of Artificial Sequence: Synthetic oligonucleotide
  Antisense strand to SEQ ID NO: 2358404
auugaucuaacucucuguu

SEQ ID NO: 2358406 - RNA, 19 nt, Artificial Sequence
  Description of Artificial Sequence: Synthetic oligonucleotide
  Sense strand starting at position 404 of SEQ ID NO: 1885657
ggagcagaggucugagaag

SEQ ID NO: 2358407 - RNA, 19 nt, Artificial Sequence
  Description of Artificial Sequence: Synthetic oligonucleotide
  Antisense strand to SEQ ID NO: 2358406
cuucucagaccucugcucc

SEQ ID NO: 2358408 - RNA, 19 nt, Artificial Sequence
  Description of Artificial Sequence: Synthetic oligonucleotide
  Sense strand starting at position 563 of SEQ ID NO: 1885657
gucacauggccuugacaca

SEQ ID NO: 2358409 - RNA, 19 nt, Artificial Sequence
  Description of Artificial Sequence: Synthetic oligonucleotide
  Antisense strand to SEQ ID NO: 2358408
ugugucaaggccaugugac

SEQ ID NO: 2358410 - RNA, 19 nt, Artificial Sequence
  Description of Artificial Sequence: Synthetic oligonucleotide
  Sense strand starting at position 687 of SEQ ID NO: 1885657
auauguucucucugguuau

SEQ ID NO: 2358411 - RNA, 19 nt, Artificial Sequence
  Description of Artificial Sequence: Synthetic oligonucleotide
  Antisense strand to SEQ ID NO: 2358410
auaaccagagagaacauau

SEQ ID NO: 2358412 - RNA, 19 nt, Artificial Sequence
  Description of Artificial Sequence: Synthetic oligonucleotide
  Sense strand starting at position 690 of SEQ ID NO: 1885657
uguucucucugguuauaaa

SEQ ID NO: 2358413 - RNA, 19 nt, Artificial Sequence
  Description of Artificial Sequence: Synthetic oligonucleotide
  Antisense strand to SEQ ID NO: 2358412
uuuauaaccagagagaaca

SEQ ID NO: 2358414 - RNA, 19 nt, Artificial Sequence
  Description of Artificial Sequence: Synthetic oligonucleotide
  Sense strand starting at position 956 of SEQ ID NO: 1885657
gcauuacugccagacagga

SEQ ID NO: 2358415 - RNA, 19 nt, Artificial Sequence
  Description of Artificial Sequence: Synthetic oligonucleotide
  Antisense strand to SEQ ID NO: 2358414
uccugucuggcaguaaugc

SEQ ID NO: 2358416 - RNA, 19 nt, Artificial Sequence
  Description of Artificial Sequence: Synthetic oligonucleotide
  Sense strand starting at position 1022 of SEQ ID NO: 1885657
gggccugacaacugucuua

SEQ ID NO: 2358417 - RNA, 19 nt, Artificial Sequence
  Description of Artificial Sequence: Synthetic oligonucleotide
  Antisense strand to SEQ ID NO: 2358416
uaagacaguugucaggccc

SEQ ID NO: 2358418 - RNA, 19 nt, Artificial Sequence
  Description of Artificial Sequence: Synthetic oligonucleotide
  Sense strand starting at position 1029 of SEQ ID NO: 1885657
acaacugucuuauccggaa

SEQ ID NO: 2358419 - RNA, 19 nt, Artificial Sequence
  Description of Artificial Sequence: Synthetic oligonucleotide
  Antisense strand to SEQ ID NO: 2358418
uuccggauaagacaguugu

SEQ ID NO: 2358420 - RNA, 19 nt, Artificial Sequence
  Description of Artificial Sequence: Synthetic oligonucleotide
  Sense strand starting at position 1033 of SEQ ID NO: 1885657
cugucuuauccggaagccu

SEQ ID NO: 2358421 - RNA, 19 nt, Artificial Sequence
  Description of Artificial Sequence: Synthetic oligonucleotide
  Antisense strand to SEQ ID NO: 2358420
aggcuuccggauaagacag

SEQ ID NO: 2358422 - RNA, 19 nt, Artificial Sequence
  Description of Artificial Sequence: Synthetic oligonucleotide
  Sense strand starting at position 1054 of SEQ ID NO: 1885657
caaacugguguuugauacu

SEQ ID NO: 2358423 - RNA, 19 nt, Artificial Sequence
  Description of Artificial Sequence: Synthetic oligonucleotide
  Antisense strand to SEQ ID NO: 2358422
aguaucaaacaccaguuug

SEQ ID NO: 2358424 - RNA, 19 nt, Artificial Sequence
  Description of Artificial Sequence: Synthetic oligonucleotide
  Sense strand starting at position 1061 of SEQ ID NO: 1885657
guguuugauacugaagagu

SEQ ID NO: 2358425 - RNA, 19 nt, Artificial Sequence
  Description of Artificial Sequence: Synthetic oligonucleotide
  Antisense strand to SEQ ID NO: 2358424
acucuucaguaucaaacac

SEQ ID NO: 2358426 - RNA, 19 nt, Artificial Sequence
  Description of Artificial Sequence: Synthetic oligonucleotide
  Sense strand starting at position 1123 of SEQ ID NO: 1885657
ggaaaccucuccuugagca

SEQ ID NO: 2358427 - RNA, 19 nt, Artificial Sequence
  Description of Artificial Sequence: Synthetic oligonucleotide
  Antisense strand to SEQ ID NO: 2358426
ugcucaaggagagguuucc

SEQ ID NO: 2358428 - RNA, 19 nt, Artificial Sequence
  Description of Artificial Sequence: Synthetic oligonucleotide
  Sense strand starting at position 1344 of SEQ ID NO: 1885657
ccacaauuccugugagaaa

SEQ ID NO: 2358429 - RNA, 19 nt, Artificial Sequence
  Description of Artificial Sequence: Synthetic oligonucleotide
  Antisense strand to SEQ ID NO: 2358428
uuucucacaggaauugugg

SEQ ID NO: 2358430 - RNA, 19 nt, Artificial Sequence
  Description of Artificial Sequence: Synthetic oligonucleotide
  Sense strand starting at position 1442 of SEQ ID NO: 1885657
gugucauuauauccaggac

SEQ ID NO: 2358431 - RNA, 19 nt, Artificial Sequence
  Description of Artificial Sequence: Synthetic oligonucleotide
  Antisense strand to SEQ ID NO: 2358430
guccuggauauaaugacac

SEQ ID NO: 2358432 - RNA, 19 nt, Artificial Sequence
  Description of Artificial Sequence: Synthetic oligonucleotide
  Sense strand starting at position 1618 of SEQ ID NO: 1885657
gccgaaagagccugaauua

SEQ ID NO: 2358433 - RNA, 19 nt, Artificial Sequence
  Description of Artificial Sequence: Synthetic oligonucleotide
  Antisense strand to SEQ ID NO: 2358432
uaauucaggcucuuucggc

SEQ ID NO: 2358434 - RNA, 19 nt, Artificial Sequence
  Description of Artificial Sequence: Synthetic oligonucleotide
  Sense strand starting at position 1619 of SEQ ID NO: 1885657
ccgaaagagccugaauuac

SEQ ID NO: 2358435 - RNA, 19 nt, Artificial Sequence
  Description of Artificial Sequence: Synthetic oligonucleotide
  Antisense strand to SEQ ID NO: 2358434
guaauucaggcucuuucgg

SEQ ID NO: 2358436 - RNA, 19 nt, Artificial Sequence
  Description of Artificial Sequence: Synthetic oligonucleotide
  Sense strand starting at position 1776 of SEQ ID NO: 1885657
gaggguuagcgcaaucggu

SEQ ID NO: 2358437 - RNA, 19 nt, Artificial Sequence
  Description of Artificial Sequence: Synthetic oligonucleotide
  Antisense strand to SEQ ID NO: 2358436
accgauugcgcuaacccuc

SEQ ID NO: 2358438 - RNA, 19 nt, Artificial Sequence
  Description of Artificial Sequence: Synthetic oligonucleotide
  Sense strand starting at position 1818 of SEQ ID NO: 1885657
acgcuuagugaucagccau

SEQ ID NO: 2358439 - RNA, 19 nt, Artificial Sequence
  Description of Artificial Sequence: Synthetic oligonucleotide
  Antisense strand to SEQ ID NO: 2358438
auggcugaucacuaagcgu

SEQ ID NO: 2358440 - RNA, 19 nt, Artificial Sequence
  Description of Artificial Sequence: Synthetic oligonucleotide
  Sense strand starting at position 1839 of SEQ ID NO: 1885657
gcucgugucuccuuauuua

SEQ ID NO: 2358441 - RNA, 19 nt, Artificial Sequence
  Description of Artificial Sequence: Synthetic oligonucleotide
  Antisense strand to SEQ ID NO: 2358440
uaaauaaggagacacgagc

SEQ ID NO: 2358442 - RNA, 19 nt, Artificial Sequence
  Description of Artificial Sequence: Synthetic oligonucleotide
  Sense strand starting at position 1842 of SEQ ID NO: 1885657
cgugucuccuuauuuaugu

SEQ ID NO: 2358443 - RNA, 19 nt, Artificial Sequence
  Description of Artificial Sequence: Synthetic oligonucleotide
  Antisense strand to SEQ ID NO: 2358442
acauaaauaaggagacacg

SEQ ID NO: 2358444 - RNA, 19 nt, Artificial Sequence
  Description of Artificial Sequence: Synthetic oligonucleotide
  Sense strand starting at position 2062 of SEQ ID NO: 1885657
aguccuguuaaauacggau

SEQ ID NO: 2358445 - RNA, 19 nt, Artificial Sequence
  Description of Artificial Sequence: Synthetic oligonucleotide
  Antisense strand to SEQ ID NO: 2358444
auccguauuuaacaggacu

SEQ ID NO: 2358446 - RNA, 19 nt, Artificial Sequence
  Description of Artificial Sequence: Synthetic oligonucleotide
  Sense strand starting at position 2132 of SEQ ID NO: 1885657
aggcuucgugguuaaccau

SEQ ID NO: 2358447 - RNA, 19 nt, Artificial Sequence
  Description of Artificial Sequence: Synthetic oligonucleotide
  Antisense strand to SEQ ID NO: 2358446
augguuaaccacgaagccu

SEQ ID NO: 2358448 - RNA, 19 nt, Artificial Sequence
  Description of Artificial Sequence: Synthetic oligonucleotide
  Sense strand starting at position 2135 of SEQ ID NO: 1885657
cuucgugguuaaccauaga

SEQ ID NO: 2358449 - RNA, 19 nt, Artificial Sequence
  Description of Artificial Sequence: Synthetic oligonucleotide
  Antisense strand to SEQ ID NO: 2358448
ucuaugguuaaccacgaag

SEQ ID NO: 2358450 - RNA, 19 nt, Artificial Sequence
  Description of Artificial Sequence: Synthetic oligonucleotide
  Sense strand starting at position 2407 of SEQ ID NO: 1885657
agcguuaguuaguugauuu

SEQ ID NO: 2358451 - RNA, 19 nt, Artificial Sequence
  Description of Artificial Sequence: Synthetic oligonucleotide
  Antisense strand to SEQ ID NO: 2358450
aaaucaacuaacuaacgcu

SEQ ID NO: 2358452 - RNA, 19 nt, Artificial Sequence
  Description of Artificial Sequence: Synthetic oligonucleotide
  Sense strand starting at position 2408 of SEQ ID NO: 1885657
gcguuaguuaguugauuug

SEQ ID NO: 2358453 - RNA, 19 nt, Artificial Sequence
  Description of Artificial Sequence: Synthetic oligonucleotide
  Antisense strand to SEQ ID NO: 2358452
caaaucaacuaacuaacgc

SEQ ID NO: 2358454 - RNA, 19 nt, Artificial Sequence
  Description of Artificial Sequence: Synthetic oligonucleotide
  Sense strand starting at position 2414 of SEQ ID NO: 1885657
guuaguugauuugccggaa

SEQ ID NO: 2358455 - RNA, 19 nt, Artificial Sequence
  Description of Artificial Sequence: Synthetic oligonucleotide
  Antisense strand to SEQ ID NO: 2358454
uuccggcaaaucaacuaac

SEQ ID NO: 2358456 - RNA, 19 nt, Artificial Sequence
  Description of Artificial Sequence: Synthetic oligonucleotide
  Sense strand starting at position 2498 of SEQ ID NO: 1885657
ccacaucacgucuggaagu

SEQ ID NO: 2358457 - RNA, 19 nt, Artificial Sequence
  Description of Artificial Sequence: Synthetic oligonucleotide
  Antisense strand to SEQ ID NO: 2358456
acuuccagacgugaugugg

SEQ ID NO: 2358458 - RNA, 19 nt, Artificial Sequence
  Description of Artificial Sequence: Synthetic oligonucleotide
  Sense strand starting at position 2564 of SEQ ID NO: 1885657
cagcuaucgcguuuagggu

SEQ ID NO: 2358459 - RNA, 19 nt, Artificial Sequence
  Description of Artificial Sequence: Synthetic oligonucleotide
  Antisense strand to SEQ ID NO: 2358458
acccuaaacgcgauagcug

SEQ ID NO: 2358460 - RNA, 19 nt, Artificial Sequence
  Description of Artificial Sequence: Synthetic oligonucleotide
  Sense strand starting at position 2754 of SEQ ID NO: 1885657
aggacuuugggaugguaua

SEQ ID NO: 2358461 - RNA, 19 nt, Artificial Sequence
  Description of Artificial Sequence: Synthetic oligonucleotide
  Antisense strand to SEQ ID NO: 2358460
uauaccaucccaaaguccu

SEQ ID NO: 2358462 - RNA, 19 nt, Artificial Sequence
  Description of Artificial Sequence: Synthetic oligonucleotide
  Sense strand starting at position 2965 of SEQ ID NO: 1885657
acaccucuuccaggaaguu

SEQ ID NO: 2358463 - RNA, 19 nt, Artificial Sequence
  Description of Artificial Sequence: Synthetic oligonucleotide
  Antisense strand to SEQ ID NO: 2358462
aacuuccuggaagaggugu

SEQ ID NO: 2358464 - RNA, 19 nt, Artificial Sequence
  Description of Artificial Sequence: Synthetic oligonucleotide
  Sense strand starting at position 3164 of SEQ ID NO: 1885657
gugaguuaucgucacacac

SEQ ID NO: 2358465 - RNA, 19 nt, Artificial Sequence
  Description of Artificial Sequence: Synthetic oligonucleotide
  Antisense strand to SEQ ID NO: 2358464
gugugugacgauaacucac

SEQ ID NO: 2358466 - RNA, 19 nt, Artificial Sequence
  Description of Artificial Sequence: Synthetic oligonucleotide
  Sense strand starting at position 3252 of SEQ ID NO: 1885657
ugauguuagcuccaggaaa

SEQ ID NO: 2358467 - RNA, 19 nt, Artificial Sequence
  Description of Artificial Sequence: Synthetic oligonucleotide
  Antisense strand to SEQ ID NO: 2358466
uuuccuggagcuaacauca

SEQ ID NO: 2358468 - RNA, 19 nt, Artificial Sequence
  Description of Artificial Sequence: Synthetic oligonucleotide
  Sense strand starting at position 3429 of SEQ ID NO: 1885657
gaagucuuccaaggcgaga

SEQ ID NO: 2358469 - RNA, 19 nt, Artificial Sequence
  Description of Artificial Sequence: Synthetic oligonucleotide
  Antisense strand to SEQ ID NO: 2358468
ucucgccuuggaagacuuc

SEQ ID NO: 2358470 - RNA, 19 nt, Artificial Sequence
  Description of Artificial Sequence: Synthetic oligonucleotide
  Sense strand starting at position 3438 of SEQ ID NO: 1885657
caaggcgagaugugauauu

SEQ ID NO: 2358471 - RNA, 19 nt, Artificial Sequence
  Description of Artificial Sequence: Synthetic oligonucleotide
  Antisense strand to SEQ ID NO: 2358470
aauaucacaucucgccuug

SEQ ID NO: 2358472 - RNA, 19 nt, Artificial Sequence
  Description of Artificial Sequence: Synthetic oligonucleotide
  Sense strand starting at position 3447 of SEQ ID NO: 1885657
augugauauugagaagaag

SEQ ID NO: 2358473 - RNA, 19 nt, Artificial Sequence
  Description of Artificial Sequence: Synthetic oligonucleotide
  Antisense strand to SEQ ID NO: 2358472
cuucuucucaauaucacau

SEQ ID NO: 2358474 - RNA, 19 nt, Artificial Sequence
  Description of Artificial Sequence: Synthetic oligonucleotide
  Sense strand starting at position 3700 of SEQ ID NO: 1885657
ugaguucuuggcuggugga

SEQ ID NO: 2358475 - RNA, 19 nt, Artificial Sequence
  Description of Artificial Sequence: Synthetic oligonucleotide
  Antisense strand to SEQ ID NO: 2358474
uccaccagccaagaacuca

SEQ ID NO: 2358476 - RNA, 19 nt, Artificial Sequence
  Description of Artificial Sequence: Synthetic oligonucleotide
  Sense strand starting at position 3719 of SEQ ID NO: 1885657
ccaaauggccaauguaaua

SEQ ID NO: 2358477 - RNA, 19 nt, Artificial Sequence
  Description of Artificial Sequence: Synthetic oligonucleotide
  Antisense strand to SEQ ID NO: 2358476
uauuacauuggccauuugg

SEQ ID NO: 2358478 - RNA, 19 nt, Artificial Sequence
  Description of Artificial Sequence: Synthetic oligonucleotide
  Sense strand starting at position 190 of SEQ ID NO: 1885658
cugagucuuguccaucaac

SEQ ID NO: 2358479 - RNA, 19 nt, Artificial Sequence
  Description of Artificial Sequence: Synthetic oligonucleotide
  Antisense strand to SEQ ID NO: 2358478
guugauggacaagacucag

SEQ ID NO: 2358480 - RNA, 19 nt, Artificial Sequence
  Description of Artificial Sequence: Synthetic oligonucleotide
  Sense strand starting at position 583 of SEQ ID NO: 1885658
cgacaagacccuugucaug

SEQ ID NO: 2358481 - RNA, 19 nt, Artificial Sequence
  Description of Artificial Sequence: Synthetic oligonucleotide
  Antisense strand to SEQ ID NO: 2358480
caugacaagggucuugucg

SEQ ID NO: 2358482 - RNA, 19 nt, Artificial Sequence
  Description of Artificial Sequence: Synthetic oligonucleotide
  Sense strand starting at position 657 of SEQ ID NO: 1885658
cuguccaccugucugagau

SEQ ID NO: 2358483 - RNA, 19 nt, Artificial Sequence
  Description of Artificial Sequence: Synthetic oligonucleotide
  Antisense strand to SEQ ID NO: 2358482
aucucagacagguggacag

SEQ ID NO: 2358484 - RNA, 19 nt, Artificial Sequence
  Description of Artificial Sequence: Synthetic oligonucleotide
  Sense strand starting at position 1090 of SEQ ID NO: 1885658
ggcugucguggcuuguuaa

SEQ ID NO: 2358485 - RNA, 19 nt, Artificial Sequence
  Description of Artificial Sequence: Synthetic oligonucleotide
  Antisense strand to SEQ ID NO: 2358484
uuaacaagccacgacagcc

SEQ ID NO: 2358486 - RNA, 19 nt, Artificial Sequence
  Description of Artificial Sequence: Synthetic oligonucleotide
  Sense strand starting at position 2274 of SEQ ID NO: 1885658
gggagacaggccugauucu

SEQ ID NO: 2358487 - RNA, 19 nt, Artificial Sequence
  Description of Artificial Sequence: Synthetic oligonucleotide
  Antisense strand to SEQ ID NO: 2358486
agaaucaggccugucuccc

SEQ ID NO: 2358488 - RNA, 19 nt, Artificial Sequence
  Description of Artificial Sequence: Synthetic oligonucleotide
  Sense strand starting at position 2297 of SEQ ID NO: 1885658
caggucugugaguggacau

SEQ ID NO: 2358489 - RNA, 19 nt, Artificial Sequence
  Description of Artificial Sequence: Synthetic oligonucleotide
  Antisense strand to SEQ ID NO: 2358488
auguccacucacagaccug

SEQ ID NO: 2358490 - RNA, 19 nt, Artificial Sequence
  Description of Artificial Sequence: Synthetic oligonucleotide
  Sense strand starting at position 2343 of SEQ ID NO: 1885658
cuuugacucccugguacuu

SEQ ID NO: 2358491 - RNA, 19 nt, Artificial Sequence
  Description of Artificial Sequence: Synthetic oligonucleotide
  Antisense strand to SEQ ID NO: 2358490
aaguaccagggagucaaag

SEQ ID NO: 2358492 - RNA, 19 nt, Artificial Sequence
  Description of Artificial Sequence: Synthetic oligonucleotide
  Sense strand starting at position 2384 of SEQ ID NO: 1885658
ugugaaauggguugcaaca

SEQ ID NO: 2358493 - RNA, 19 nt, Artificial Sequence
  Description of Artificial Sequence: Synthetic oligonucleotide
  Antisense strand to SEQ ID NO: 2358492
uguugcaacccauuucaca

SEQ ID NO: 2358494 - RNA, 19 nt, Artificial Sequence
  Description of Artificial Sequence: Synthetic oligonucleotide
  Sense strand starting at position 2449 of SEQ ID NO: 1885658
ucaagaauuucccagagac

SEQ ID NO: 2358495 - RNA, 19 nt, Artificial Sequence
  Description of Artificial Sequence: Synthetic oligonucleotide
  Antisense strand to SEQ ID NO: 2358494
gucucugggaaauucuuga

SEQ ID NO: 2358496 - RNA, 19 nt, Artificial Sequence
  Description of Artificial Sequence: Synthetic oligonucleotide
  Sense strand starting at position 2526 of SEQ ID NO: 1885658
agcugaaggcucuggaguu

SEQ ID NO: 2358497 - RNA, 19 nt, Artificial Sequence
  Description of Artificial Sequence: Synthetic oligonucleotide
  Antisense strand to SEQ ID NO: 2358496
aacuccagagccuucagcu

SEQ ID NO: 2358498 - RNA, 19 nt, Artificial Sequence
  Description of Artificial Sequence: Synthetic oligonucleotide
  Sense strand starting at position 2579 of SEQ ID NO: 1885658
uauggugauaguugcagau

SEQ ID NO: 2358499 - RNA, 19 nt, Artificial Sequence
  Description of Artificial Sequence: Synthetic oligonucleotide
  Antisense strand to SEQ ID NO: 2358498
aucugcaacuaucaccaua

SEQ ID NO: 2358500 - RNA, 19 nt, Artificial Sequence
  Description of Artificial Sequence: Synthetic oligonucleotide
  Sense strand starting at position 2583 of SEQ ID NO: 1885658
gugauaguugcagauaucu

SEQ ID NO: 2358501 - RNA, 19 nt, Artificial Sequence
  Description of Artificial Sequence: Synthetic oligonucleotide
  Antisense strand to SEQ ID NO: 2358500
agauaucugcaacuaucac

SEQ ID NO: 2358502 - RNA, 19 nt, Artificial Sequence
  Description of Artificial Sequence: Synthetic oligonucleotide
  Sense strand starting at position 2589 of SEQ ID NO: 1885658
guugcagauaucugugaau

SEQ ID NO: 2358503 - RNA, 19 nt, Artificial Sequence
  Description of Artificial Sequence: Synthetic oligonucleotide
  Antisense strand to SEQ ID NO: 2358502
auucacagauaucugcaac

SEQ ID NO: 2358504 - RNA, 19 nt, Artificial Sequence
  Description of Artificial Sequence: Synthetic oligonucleotide
  Sense strand starting at position 2620 of SEQ ID NO: 1885658
cuucgcugugagcuuuaau

SEQ ID NO: 2358505 - RNA, 19 nt, Artificial Sequence
  Description of Artificial Sequence: Synthetic oligonucleotide
  Antisense strand to SEQ ID NO: 2358504
auuaaagcucacagcgaag

SEQ ID NO: 2358506 - RNA, 19 nt, Artificial Sequence
  Description of Artificial Sequence: Synthetic oligonucleotide
  Sense strand starting at position 2629 of SEQ ID NO: 1885658
gagcuuuaaugggcggauu

SEQ ID NO: 2358507 - RNA, 19 nt, Artificial Sequence
  Description of Artificial Sequence: Synthetic oligonucleotide
  Antisense strand to SEQ ID NO: 2358506
aauccgcccauuaaagcuc

SEQ ID NO: 2358508 - RNA, 19 nt, Artificial Sequence
  Description of Artificial Sequence: Synthetic oligonucleotide
  Sense strand starting at position 2642 of SEQ ID NO: 1885658
cggauuguguguaugugga

SEQ ID NO: 2358509 - RNA, 19 nt, Artificial Sequence
  Description of Artificial Sequence: Synthetic oligonucleotide
  Antisense strand to SEQ ID NO: 2358508
uccacauacacacaauccg

SEQ ID NO: 2358510 - RNA, 19 nt, Artificial Sequence
  Description of Artificial Sequence: Synthetic oligonucleotide
  Sense strand starting at position 2694 of SEQ ID NO: 1885658
uuccuuuguucuuugacau

SEQ ID NO: 2358511 - RNA, 19 nt, Artificial Sequence
  Description of Artificial Sequence: Synthetic oligonucleotide
  Antisense strand to SEQ ID NO: 2358510
augucaaagaacaaaggaa

SEQ ID NO: 2358512 - RNA, 19 nt, Artificial Sequence
  Description of Artificial Sequence: Synthetic oligonucleotide
  Sense strand starting at position 2695 of SEQ ID NO: 1885658
uccuuuguucuuugacauc

SEQ ID NO: 2358513 - RNA, 19 nt, Artificial Sequence
  Description of Artificial Sequence: Synthetic oligonucleotide
  Antisense strand to SEQ ID NO: 2358512
gaugucaaagaacaaagga

SEQ ID NO: 2358514 - RNA, 19 nt, Artificial Sequence
  Description of Artificial Sequence: Synthetic oligonucleotide
  Sense strand starting at position 2820 of SEQ ID NO: 1885658
aaauaucugugaguaaaug

SEQ ID NO: 2358515 - RNA, 19 nt, Artificial Sequence
  Description of Artificial Sequence: Synthetic oligonucleotide
  Antisense strand to SEQ ID NO: 2358514
cauuuacucacagauauuu

SEQ ID NO: 2358516 - RNA, 19 nt, Artificial Sequence
  Description of Artificial Sequence: Synthetic oligonucleotide
  Sense strand starting at position 2828 of SEQ ID NO: 1885658
gugaguaaaugaccugaua

SEQ ID NO: 2358517 - RNA, 19 nt, Artificial Sequence
  Description of Artificial Sequence: Synthetic oligonucleotide
  Antisense strand to SEQ ID NO: 2358516
uaucaggucauuuacucac

SEQ ID NO: 2358518 - RNA, 19 nt, Artificial Sequence
  Description of Artificial Sequence: Synthetic oligonucleotide
  Sense strand starting at position 2849 of SEQ ID NO: 1885658
auaacauucucugaaagag

SEQ ID NO: 2358519 - RNA, 19 nt, Artificial Sequence
  Description of Artificial Sequence: Synthetic oligonucleotide
  Antisense strand to SEQ ID NO: 2358518
cucuuucagagaauguuau

SEQ ID NO: 2358520 - RNA, 19 nt, Artificial Sequence
  Description of Artificial Sequence: Synthetic oligonucleotide
  Sense strand starting at position 3239 of SEQ ID NO: 1885658
guuggugugacacaucagu

SEQ ID NO: 2358521 - RNA, 19 nt, Artificial Sequence
  Description of Artificial Sequence: Synthetic oligonucleotide
  Antisense strand to SEQ ID NO: 2358520
acugaugugucacaccaac

SEQ ID NO: 2358522 - RNA, 19 nt, Artificial Sequence
  Description of Artificial Sequence: Synthetic oligonucleotide
  Sense strand starting at position 3347 of SEQ ID NO: 1885658
ggaaggucucugggugaug

SEQ ID NO: 2358523 - RNA, 19 nt, Artificial Sequence
  Description of Artificial Sequence: Synthetic oligonucleotide
  Antisense strand to SEQ ID NO: 2358522
caucacccagagaccuucc

SEQ ID NO: 2358524 - RNA, 19 nt, Artificial Sequence
  Description of Artificial Sequence: Synthetic oligonucleotide
  Sense strand starting at position 3350 of SEQ ID NO: 1885658
aggucucugggugaugcau

SEQ ID NO: 2358525 - RNA, 19 nt, Artificial Sequence
  Description of Artificial Sequence: Synthetic oligonucleotide
  Antisense strand to SEQ ID NO: 2358524
augcaucacccagagaccu

SEQ ID NO: 2358526 - RNA, 19 nt, Artificial Sequence
  Description of Artificial Sequence: Synthetic oligonucleotide
  Sense strand starting at position 3507 of SEQ ID NO: 1885658
gagagucucugugugacau

SEQ ID NO: 2358527 - RNA, 19 nt, Artificial Sequence
  Description of Artificial Sequence: Synthetic oligonucleotide
  Antisense strand to SEQ ID NO: 2358526
augucacacagagacucuc

SEQ ID NO: 2358528 - RNA, 19 nt, Artificial Sequence
  Description of Artificial Sequence: Synthetic oligonucleotide
  Sense strand starting at position 3508 of SEQ ID NO: 1885658
agagucucugugugacaua

SEQ ID NO: 2358529 - RNA, 19 nt, Artificial Sequence
  Description of Artificial Sequence: Synthetic oligonucleotide
  Antisense strand to SEQ ID NO: 2358528
uaugucacacagagacucu

SEQ ID NO: 2358530 - RNA, 19 nt, Artificial Sequence
  Description of Artificial Sequence: Synthetic oligonucleotide
  Sense strand starting at position 3584 of SEQ ID NO: 1885658
ggaagagucucucugugac

SEQ ID NO: 2358531 - RNA, 19 nt, Artificial Sequence
  Description of Artificial Sequence: Synthetic oligonucleotide
  Antisense strand to SEQ ID NO: 2358530
gucacagagagacucuucc

SEQ ID NO: 2358532 - RNA, 19 nt, Artificial Sequence
  Description of Artificial Sequence: Synthetic oligonucleotide
  Sense strand starting at position 3586 of SEQ ID NO: 1885658
aagagucucucugugacau

SEQ ID NO: 2358533 - RNA, 19 nt, Artificial Sequence
  Description of Artificial Sequence: Synthetic oligonucleotide
  Antisense strand to SEQ ID NO: 2358532
augucacagagagacucuu

SEQ ID NO: 2358534 - RNA, 19 nt, Artificial Sequence
  Description of Artificial Sequence: Synthetic oligonucleotide
  Sense strand starting at position 3587 of SEQ ID NO: 1885658
agagucucucugugacaua

SEQ ID NO: 2358535 - RNA, 19 nt, Artificial Sequence
  Description of Artificial Sequence: Synthetic oligonucleotide
  Antisense strand to SEQ ID NO: 2358534
uaugucacagagagacucu

SEQ ID NO: 2358536 - RNA, 19 nt, Artificial Sequence
  Description of Artificial Sequence: Synthetic oligonucleotide
  Sense strand starting at position 3693 of SEQ ID NO: 1885658
agagaugcccagugagaca

SEQ ID NO: 2358537 - RNA, 19 nt, Artificial Sequence
  Description of Artificial Sequence: Synthetic oligonucleotide
  Antisense strand to SEQ ID NO: 2358536
ugucucacugggcaucucu

SEQ ID NO: 2358538 - RNA, 19 nt, Artificial Sequence
  Description of Artificial Sequence: Synthetic oligonucleotide
  Sense strand starting at position 3753 of SEQ ID NO: 1885658
gcaauacaucaguggagga

SEQ ID NO: 2358539 - RNA, 19 nt, Artificial Sequence
  Description of Artificial Sequence: Synthetic oligonucleotide
  Antisense strand to SEQ ID NO: 2358538
uccuccacugauguauugc

SEQ ID NO: 2358540 - RNA, 19 nt, Artificial Sequence
  Description of Artificial Sequence: Synthetic oligonucleotide
  Sense strand starting at position 3769 of SEQ ID NO: 1885658
ggaggagcucaguacgaca

SEQ ID NO: 2358541 - RNA, 19 nt, Artificial Sequence
  Description of Artificial Sequence: Synthetic oligonucleotide
  Antisense strand to SEQ ID NO: 2358540
ugucguacugagcuccucc

SEQ ID NO: 2358542 - RNA, 19 nt, Artificial Sequence
  Description of Artificial Sequence: Synthetic oligonucleotide
  Sense strand starting at position 3808 of SEQ ID NO: 1885658
guguuauacaugcaugagg

SEQ ID NO: 2358543 - RNA, 19 nt, Artificial Sequence
  Description of Artificial Sequence: Synthetic oligonucleotide
  Antisense strand to SEQ ID NO: 2358542
ccucaugcauguauaacac

SEQ ID NO: 2358544 - RNA, 19 nt, Artificial Sequence
  Description of Artificial Sequence: Synthetic oligonucleotide
  Sense strand starting at position 3864 of SEQ ID NO: 1885658
gugccuugugaguagagga

SEQ ID NO: 2358545 - RNA, 19 nt, Artificial Sequence
  Description of Artificial Sequence: Synthetic oligonucleotide
  Antisense strand to SEQ ID NO: 2358544
uccucuacucacaaggcac

SEQ ID NO: 2358546 - RNA, 19 nt, Artificial Sequence
  Description of Artificial Sequence: Synthetic oligonucleotide
  Sense strand starting at position 3905 of SEQ ID NO: 1885658
caggaaagaacucggugua

SEQ ID NO: 2358547 - RNA, 19 nt, Artificial Sequence
  Description of Artificial Sequence: Synthetic oligonucleotide
  Antisense strand to SEQ ID NO: 2358546
uacaccgaguucuuuccug

SEQ ID NO: 2358548 - RNA, 19 nt, Artificial Sequence
  Description of Artificial Sequence: Synthetic oligonucleotide
  Sense strand starting at position 3906 of SEQ ID NO: 1885658
aggaaagaacucgguguaa

SEQ ID NO: 2358549 - RNA, 19 nt, Artificial Sequence
  Description of Artificial Sequence: Synthetic oligonucleotide
  Antisense strand to SEQ ID NO: 2358548
uuacaccgaguucuuuccu

SEQ ID NO: 2358550 - RNA, 19 nt, Artificial Sequence
  Description of Artificial Sequence: Synthetic oligonucleotide
  Sense strand starting at position 3908 of SEQ ID NO: 1885658
gaaagaacucgguguaaca

SEQ ID NO: 2358551 - RNA, 19 nt, Artificial Sequence
  Description of Artificial Sequence: Synthetic oligonucleotide
  Antisense strand to SEQ ID NO: 2358550
uguuacaccgaguucuuuc

SEQ ID NO: 2358552 - RNA, 19 nt, Artificial Sequence
  Description of Artificial Sequence: Synthetic oligonucleotide
  Sense strand starting at position 3910 of SEQ ID NO: 1885658
aagaacucgguguaacaca

SEQ ID NO: 2358553 - RNA, 19 nt, Artificial Sequence
  Description of Artificial Sequence: Synthetic oligonucleotide
  Antisense strand to SEQ ID NO: 2358552
uguguuacaccgaguucuu

SEQ ID NO: 2358554 - RNA, 19 nt, Artificial Sequence
  Description of Artificial Sequence: Synthetic oligonucleotide
  Sense strand starting at position 3947 of SEQ ID NO: 1885658
ccaggugacacaugaguca

SEQ ID NO: 2358555 - RNA, 19 nt, Artificial Sequence
  Description of Artificial Sequence: Synthetic oligonucleotide
  Antisense strand to SEQ ID NO: 2358554
ugacucaugugucaccugg

SEQ ID NO: 2358556 - RNA, 19 nt, Artificial Sequence
  Description of Artificial Sequence: Synthetic oligonucleotide
  Sense strand starting at position 3965 of SEQ ID NO: 1885658
agggaagggcucugaguaa

SEQ ID NO: 2358557 - RNA, 19 nt, Artificial Sequence
  Description of Artificial Sequence: Synthetic oligonucleotide
  Antisense strand to SEQ ID NO: 2358556
uuacucagagcccuucccu

SEQ ID NO: 2358558 - RNA, 19 nt, Artificial Sequence
  Description of Artificial Sequence: Synthetic oligonucleotide
  Sense strand starting at position 17 of SEQ ID NO: 1885659
augaaaugacucuggcuac

SEQ ID NO: 2358559 - RNA, 19 nt, Artificial Sequence
  Description of Artificial Sequence: Synthetic oligonucleotide
  Antisense strand to SEQ ID NO: 2358558
guagccagagucauuucau

SEQ ID NO: 2358560 - RNA, 19 nt, Artificial Sequence
  Description of Artificial Sequence: Synthetic oligonucleotide
  Sense strand starting at position 45 of SEQ ID NO: 1885659
gugagaucccaguaucuag

SEQ ID NO: 2358561 - RNA, 19 nt, Artificial Sequence
  Description of Artificial Sequence: Synthetic oligonucleotide
  Antisense strand to SEQ ID NO: 2358560
cuagauacugggaucucac

SEQ ID NO: 2358562 - RNA, 19 nt, Artificial Sequence
  Description of Artificial Sequence: Synthetic oligonucleotide
  Sense strand starting at position 97 of SEQ ID NO: 1885659
ugugccauaugcuuacaaa

SEQ ID NO: 2358563 - RNA, 19 nt, Artificial Sequence
  Description of Artificial Sequence: Synthetic oligonucleotide
  Antisense strand to SEQ ID NO: 2358562
uuuguaagcauauggcaca

SEQ ID NO: 2358564 - RNA, 19 nt, Artificial Sequence
  Description of Artificial Sequence: Synthetic oligonucleotide
  Sense strand starting at position 98 of SEQ ID NO: 1885659
gugccauaugcuuacaaau

SEQ ID NO: 2358565 - RNA, 19 nt, Artificial Sequence
  Description of Artificial Sequence: Synthetic oligonucleotide
  Antisense strand to SEQ ID NO: 2358564
auuuguaagcauauggcac

SEQ ID NO: 2358566 - RNA, 19 nt, Artificial Sequence
  Description of Artificial Sequence: Synthetic oligonucleotide
  Sense strand starting at position 517 of SEQ ID NO: 1885659
uaaggcuuagaauggugaa

SEQ ID NO: 2358567 - RNA, 19 nt, Artificial Sequence
  Description of Artificial Sequence: Synthetic oligonucleotide
  Antisense strand to SEQ ID NO: 2358566
uucaccauucuaagccuua

SEQ ID NO: 2358568 - RNA, 19 nt, Artificial Sequence
  Description of Artificial Sequence: Synthetic oligonucleotide
  Sense strand starting at position 530 of SEQ ID NO: 1885659
ggugaaauggcuugcucaa

SEQ ID NO: 2358569 - RNA, 19 nt, Artificial Sequence
  Description of Artificial Sequence: Synthetic oligonucleotide
  Antisense strand to SEQ ID NO: 2358568
uugagcaagccauuucacc

SEQ ID NO: 2358570 - RNA, 19 nt, Artificial Sequence
  Description of Artificial Sequence: Synthetic oligonucleotide
  Sense strand starting at position 786 of SEQ ID NO: 1885659
cugggcuguaucuacagaa

SEQ ID NO: 2358571 - RNA, 19 nt, Artificial Sequence
  Description of Artificial Sequence: Synthetic oligonucleotide
  Antisense strand to SEQ ID NO: 2358570
uucuguagauacagcccag

SEQ ID NO: 2358572 - RNA, 19 nt, Artificial Sequence
  Description of Artificial Sequence: Synthetic oligonucleotide
  Sense strand starting at position 817 of SEQ ID NO: 1885659
aaaggaaucucgccauuag

SEQ ID NO: 2358573 - RNA, 19 nt, Artificial Sequence
  Description of Artificial Sequence: Synthetic oligonucleotide
  Antisense strand to SEQ ID NO: 2358572
cuaauggcgagauuccuuu

SEQ ID NO: 2358574 - RNA, 19 nt, Artificial Sequence
  Description of Artificial Sequence: Synthetic oligonucleotide
  Sense strand starting at position 820 of SEQ ID NO: 1885659
ggaaucucgccauuagcgu

SEQ ID NO: 2358575 - RNA, 19 nt, Artificial Sequence
  Description of Artificial Sequence: Synthetic oligonucleotide
  Antisense strand to SEQ ID NO: 2358574
acgcuaauggcgagauucc

SEQ ID NO: 2358576 - RNA, 19 nt, Artificial Sequence
  Description of Artificial Sequence: Synthetic oligonucleotide
  Sense strand starting at position 831 of SEQ ID NO: 1885659
auuagcguuagggagauaa

SEQ ID NO: 2358577 - RNA, 19 nt, Artificial Sequence
  Description of Artificial Sequence: Synthetic oligonucleotide
  Antisense strand to SEQ ID NO: 2358576
uuaucucccuaacgcuaau

SEQ ID NO: 2358578 - RNA, 19 nt, Artificial Sequence
  Description of Artificial Sequence: Synthetic oligonucleotide
  Sense strand starting at position 833 of SEQ ID NO: 1885659
uagcguuagggagauaauc

SEQ ID NO: 2358579 - RNA, 19 nt, Artificial Sequence
  Description of Artificial Sequence: Synthetic oligonucleotide
  Antisense strand to SEQ ID NO: 2358578
gauuaucucccuaacgcua

SEQ ID NO: 2358580 - RNA, 19 nt, Artificial Sequence
  Description of Artificial Sequence: Synthetic oligonucleotide
  Sense strand starting at position 835 of SEQ ID NO: 1885659
gcguuagggagauaauccu

SEQ ID NO: 2358581 - RNA, 19 nt, Artificial Sequence
  Description of Artificial Sequence: Synthetic oligonucleotide
  Antisense strand to SEQ ID NO: 2358580
aggauuaucucccuaacgc

SEQ ID NO: 2358582 - RNA, 19 nt, Artificial Sequence
  Description of Artificial Sequence: Synthetic oligonucleotide
  Sense strand starting at position 876 of SEQ ID NO: 1885659
cucucuucucuaggaugua

SEQ ID NO: 2358583 - RNA, 19 nt, Artificial Sequence
  Description of Artificial Sequence: Synthetic oligonucleotide
  Antisense strand to SEQ ID NO: 2358582
uacauccuagagaagagag

SEQ ID NO: 2358584 - RNA, 19 nt, Artificial Sequence
  Description of Artificial Sequence: Synthetic oligonucleotide
  Sense strand starting at position 1029 of SEQ ID NO: 1885659
gacagagccucuucucaga

SEQ ID NO: 2358585 - RNA, 19 nt, Artificial Sequence
  Description of Artificial Sequence: Synthetic oligonucleotide
  Antisense strand to SEQ ID NO: 2358584
ucugagaagaggcucuguc

SEQ ID NO: 2358586 - RNA, 19 nt, Artificial Sequence
  Description of Artificial Sequence: Synthetic oligonucleotide
  Sense strand starting at position 1165 of SEQ ID NO: 1885659
gaaaguguucucugaccau

SEQ ID NO: 2358587 - RNA, 19 nt, Artificial Sequence
  Description of Artificial Sequence: Synthetic oligonucleotide
  Antisense strand to SEQ ID NO: 2358586
auggucagagaacacuuuc

SEQ ID NO: 2358588 - RNA, 19 nt, Artificial Sequence
  Description of Artificial Sequence: Synthetic oligonucleotide
  Sense strand starting at position 1249 of SEQ ID NO: 1885659
uugauauuguuaguuaccu

SEQ ID NO: 2358589 - RNA, 19 nt, Artificial Sequence
  Description of Artificial Sequence: Synthetic oligonucleotide
  Antisense strand to SEQ ID NO: 2358588
agguaacuaacaauaucaa

SEQ ID NO: 2358590 - RNA, 19 nt, Artificial Sequence
  Description of Artificial Sequence: Synthetic oligonucleotide
  Sense strand starting at position 1616 of SEQ ID NO: 1885659
uauaguaauuuagagguga

SEQ ID NO: 2358591 - RNA, 19 nt, Artificial Sequence
  Description of Artificial Sequence: Synthetic oligonucleotide
  Antisense strand to SEQ ID NO: 2358590
ucaccucuaaauuacuaua

SEQ ID NO: 2358592 - RNA, 19 nt, Artificial Sequence
  Description of Artificial Sequence: Synthetic oligonucleotide
  Sense strand starting at position 1726 of SEQ ID NO: 1885659
agucuuaggucagugacau

SEQ ID NO: 2358593 - RNA, 19 nt, Artificial Sequence
  Description of Artificial Sequence: Synthetic oligonucleotide
  Antisense strand to SEQ ID NO: 2358592
augucacugaccuaagacu

SEQ ID NO: 2358594 - RNA, 19 nt, Artificial Sequence
  Description of Artificial Sequence: Synthetic oligonucleotide
  Sense strand starting at position 1727 of SEQ ID NO: 1885659
gucuuaggucagugacaug

SEQ ID NO: 2358595 - RNA, 19 nt, Artificial Sequence
  Description of Artificial Sequence: Synthetic oligonucleotide
  Antisense strand to SEQ ID NO: 2358594
caugucacugaccuaagac

SEQ ID NO: 2358596 - RNA, 19 nt, Artificial Sequence
  Description of Artificial Sequence: Synthetic oligonucleotide
  Sense strand starting at position 1788 of SEQ ID NO: 1885659
ccgaguucacguccgaagu

SEQ ID NO: 2358597 - RNA, 19 nt, Artificial Sequence
  Description of Artificial Sequence: Synthetic oligonucleotide
  Antisense strand to SEQ ID NO: 2358596
acuucggacgugaacucgg

SEQ ID NO: 2358598 - RNA, 19 nt, Artificial Sequence
  Description of Artificial Sequence: Synthetic oligonucleotide
  Sense strand starting at position 1798 of SEQ ID NO: 1885659
guccgaaguuccuuccaca

SEQ ID NO: 2358599 - RNA, 19 nt, Artificial Sequence
  Description of Artificial Sequence: Synthetic oligonucleotide
  Antisense strand to SEQ ID NO: 2358598
uguggaaggaacuucggac

SEQ ID NO: 2358600 - RNA, 19 nt, Artificial Sequence
  Description of Artificial Sequence: Synthetic oligonucleotide
  Sense strand starting at position 2038 of SEQ ID NO: 1885659
ccaucuuagucugcagaga

SEQ ID NO: 2358601 - RNA, 19 nt, Artificial Sequence
  Description of Artificial Sequence: Synthetic oligonucleotide
  Antisense strand to SEQ ID NO: 2358600
ucucugcagacuaagaugg

SEQ ID NO: 2358602 - RNA, 19 nt, Artificial Sequence
  Description of Artificial Sequence: Synthetic oligonucleotide
  Sense strand starting at position 2039 of SEQ ID NO: 1885659
caucuuagucugcagagaa

SEQ ID NO: 2358603 - RNA, 19 nt, Artificial Sequence
  Description of Artificial Sequence: Synthetic oligonucleotide
  Antisense strand to SEQ ID NO: 2358602
uucucugcagacuaagaug

SEQ ID NO: 2358604 - RNA, 19 nt, Artificial Sequence
  Description of Artificial Sequence: Synthetic oligonucleotide
  Sense strand starting at position 2117 of SEQ ID NO: 1885659
cugggagcuuguucaguca

SEQ ID NO: 2358605 - RNA, 19 nt, Artificial Sequence
  Description of Artificial Sequence: Synthetic oligonucleotide
  Antisense strand to SEQ ID NO: 2358604
ugacugaacaagcucccag

SEQ ID NO: 2358606 - RNA, 19 nt, Artificial Sequence
  Description of Artificial Sequence: Synthetic oligonucleotide
  Sense strand starting at position 2673 of SEQ ID NO: 1885659
ugguguguuccugcagcca

SEQ ID NO: 2358607 - RNA, 19 nt, Artificial Sequence
  Description of Artificial Sequence: Synthetic oligonucleotide
  Antisense strand to SEQ ID NO: 2358606
uggcugcaggaacacacca

SEQ ID NO: 2358608 - RNA, 19 nt, Artificial Sequence
  Description of Artificial Sequence: Synthetic oligonucleotide
  Sense strand starting at position 2755 of SEQ ID NO: 1885659
agaggccacuuucugaauu

SEQ ID NO: 2358609 - RNA, 19 nt, Artificial Sequence
  Description of Artificial Sequence: Synthetic oligonucleotide
  Antisense strand to SEQ ID NO: 2358608
aauucagaaaguggccucu

SEQ ID NO: 2358610 - RNA, 19 nt, Artificial Sequence
  Description of Artificial Sequence: Synthetic oligonucleotide
  Sense strand starting at position 2786 of SEQ ID NO: 1885659
agauucaugcagugggaau

SEQ ID NO: 2358611 - RNA, 19 nt, Artificial Sequence
  Description of Artificial Sequence: Synthetic oligonucleotide
  Antisense strand to SEQ ID NO: 2358610
auucccacugcaugaaucu

SEQ ID NO: 2358612 - RNA, 19 nt, Artificial Sequence
  Description of Artificial Sequence: Synthetic oligonucleotide
  Sense strand starting at position 3011 of SEQ ID NO: 1885659
ugaguaagagugugacuga

SEQ ID NO: 2358613 - RNA, 19 nt, Artificial Sequence
  Description of Artificial Sequence: Synthetic oligonucleotide
  Antisense strand to SEQ ID NO: 2358612
ucagucacacucuuacuca

SEQ ID NO: 2358614 - RNA, 19 nt, Artificial Sequence
  Description of Artificial Sequence: Synthetic oligonucleotide
  Sense strand starting at position 3324 of SEQ ID NO: 1885659
agagguaauuuccaaugga

SEQ ID NO: 2358615 - RNA, 19 nt, Artificial Sequence
  Description of Artificial Sequence: Synthetic oligonucleotide
  Antisense strand to SEQ ID NO: 2358614
uccauuggaaauuaccucu

SEQ ID NO: 2358616 - RNA, 19 nt, Artificial Sequence
  Description of Artificial Sequence: Synthetic oligonucleotide
  Sense strand starting at position 3341 of SEQ ID NO: 1885659
gaaagagguuuacaagaag

SEQ ID NO: 2358617 - RNA, 19 nt, Artificial Sequence
  Description of Artificial Sequence: Synthetic oligonucleotide
  Antisense strand to SEQ ID NO: 2358616
cuucuuguaaaccucuuuc

SEQ ID NO: 2358618 - RNA, 19 nt, Artificial Sequence
  Description of Artificial Sequence: Synthetic oligonucleotide
  Sense strand starting at position 3376 of SEQ ID NO: 1885659
cuccaagagcuaugagguu

SEQ ID NO: 2358619 - RNA, 19 nt, Artificial Sequence
  Description of Artificial Sequence: Synthetic oligonucleotide
  Antisense strand to SEQ ID NO: 2358618
aaccucauagcucuuggag

SEQ ID NO: 2358620 - RNA, 19 nt, Artificial Sequence
  Description of Artificial Sequence: Synthetic oligonucleotide
  Sense strand starting at position 3383 of SEQ ID NO: 1885659
agcuaugagguuuaacaac

SEQ ID NO: 2358621 - RNA, 19 nt, Artificial Sequence
  Description of Artificial Sequence: Synthetic oligonucleotide
  Antisense strand to SEQ ID NO: 2358620
guuguuaaaccucauagcu

SEQ ID NO: 2358622 - RNA, 19 nt, Artificial Sequence
  Description of Artificial Sequence: Synthetic oligonucleotide
  Sense strand starting at position 3436 of SEQ ID NO: 1885659
gccugacucuucccgggaa

SEQ ID NO: 2358623 - RNA, 19 nt, Artificial Sequence
  Description of Artificial Sequence: Synthetic oligonucleotide
  Antisense strand to SEQ ID NO: 2358622
uucccgggaagagucaggc

SEQ ID NO: 2358624 - RNA, 19 nt, Artificial Sequence
  Description of Artificial Sequence: Synthetic oligonucleotide
  Sense strand starting at position 3439 of SEQ ID NO: 1885659
ugacucuucccgggaaggu

SEQ ID NO: 2358625 - RNA, 19 nt, Artificial Sequence
  Description of Artificial Sequence: Synthetic oligonucleotide
  Antisense strand to SEQ ID NO: 2358624
accuucccgggaagaguca

SEQ ID NO: 2358626 - RNA, 19 nt, Artificial Sequence
  Description of Artificial Sequence: Synthetic oligonucleotide
  Sense strand starting at position 3707 of SEQ ID NO: 1885659
ccggauucccacuaagcua

SEQ ID NO: 2358627 - RNA, 19 nt, Artificial Sequence
  Description of Artificial Sequence: Synthetic oligonucleotide
  Antisense strand to SEQ ID NO: 2358626
uagcuuagugggaauccgg

SEQ ID NO: 2358628 - RNA, 19 nt, Artificial Sequence
  Description of Artificial Sequence: Synthetic oligonucleotide
  Sense strand starting at position 3759 of SEQ ID NO: 1885659
acuguauaaagucgaugaa

SEQ ID NO: 2358629 - RNA, 19 nt, Artificial Sequence
  Description of Artificial Sequence: Synthetic oligonucleotide
  Antisense strand to SEQ ID NO: 2358628
uucaucgacuuuauacagu

SEQ ID NO: 2358630 - RNA, 19 nt, Artificial Sequence
  Description of Artificial Sequence: Synthetic oligonucleotide
  Sense strand starting at position 3762 of SEQ ID NO: 1885659
guauaaagucgaugaagaa

SEQ ID NO: 2358631 - RNA, 19 nt, Artificial Sequence
  Description of Artificial Sequence: Synthetic oligonucleotide
  Antisense strand to SEQ ID NO: 2358630
uucuucaucgacuuuauac

SEQ ID NO: 2358632 - RNA, 19 nt, Artificial Sequence
  Description of Artificial Sequence: Synthetic oligonucleotide
  Sense strand starting at position 3778 of SEQ ID NO: 1885659
gaacuacucugguugcauc

SEQ ID NO: 2358633 - RNA, 19 nt, Artificial Sequence
  Description of Artificial Sequence: Synthetic oligonucleotide
  Antisense strand to SEQ ID NO: 2358632
gaugcaaccagaguaguuc

SEQ ID NO: 2358634 - RNA, 19 nt, Artificial Sequence
  Description of Artificial Sequence: Synthetic oligonucleotide
  Sense strand starting at position 3798 of SEQ ID NO: 1885659
gggcgaggacccugguaua

SEQ ID NO: 2358635 - RNA, 19 nt, Artificial Sequence
  Description of Artificial Sequence: Synthetic oligonucleotide
  Antisense strand to SEQ ID NO: 2358634
uauaccaggguccucgccc

SEQ ID NO: 2358636 - RNA, 19 nt, Artificial Sequence
  Description of Artificial Sequence: Synthetic oligonucleotide
  Sense strand starting at position 3808 of SEQ ID NO: 1885659
ccugguauaccuuggugga

SEQ ID NO: 2358637 - RNA, 19 nt, Artificial Sequence
  Description of Artificial Sequence: Synthetic oligonucleotide
  Antisense strand to SEQ ID NO: 2358636
uccaccaagguauaccagg

SEQ ID NO: 2358638 - RNA, 19 nt, Artificial Sequence
  Description of Artificial Sequence: Synthetic oligonucleotide
  Sense strand starting at position 73 of SEQ ID NO: 1885660
gggacagagacuugcguuu

SEQ ID NO: 2358639 - RNA, 19 nt, Artificial Sequence
  Description of Artificial Sequence: Synthetic oligonucleotide
  Antisense strand to SEQ ID NO: 2358638
aaacgcaagucucuguccc

SEQ ID NO: 2358640 - RNA, 19 nt, Artificial Sequence
  Description of Artificial Sequence: Synthetic oligonucleotide
  Sense strand starting at position 129 of SEQ ID NO: 1885660
gaaccugucuugugugaga

SEQ ID NO: 2358641 - RNA, 19 nt, Artificial Sequence
  Description of Artificial Sequence: Synthetic oligonucleotide
  Antisense strand to SEQ ID NO: 2358640
ucucacacaagacagguuc

SEQ ID NO: 2358642 - RNA, 19 nt, Artificial Sequence
  Description of Artificial Sequence: Synthetic oligonucleotide
  Sense strand starting at position 131 of SEQ ID NO: 1885660
accugucuugugugagaau

SEQ ID NO: 2358643 - RNA, 19 nt, Artificial Sequence
  Description of Artificial Sequence: Synthetic oligonucleotide
  Antisense strand to SEQ ID NO: 2358642
auucucacacaagacaggu

SEQ ID NO: 2358644 - RNA, 19 nt, Artificial Sequence
  Description of Artificial Sequence: Synthetic oligonucleotide
  Sense strand starting at position 132 of SEQ ID NO: 1885660
ccugucuugugugagaaua

SEQ ID NO: 2358645 - RNA, 19 nt, Artificial Sequence
  Description of Artificial Sequence: Synthetic oligonucleotide
  Antisense strand to SEQ ID NO: 2358644
uauucucacacaagacagg

SEQ ID NO: 2358646 - RNA, 19 nt, Artificial Sequence
  Description of Artificial Sequence: Synthetic oligonucleotide
  Sense strand starting at position 134 of SEQ ID NO: 1885660
ugucuugugugagaauaaa

SEQ ID NO: 2358647 - RNA, 19 nt, Artificial Sequence
  Description of Artificial Sequence: Synthetic oligonucleotide
  Antisense strand to SEQ ID NO: 2358646
uuuauucucacacaagaca

SEQ ID NO: 2358648 - RNA, 19 nt, Artificial Sequence
  Description of Artificial Sequence: Synthetic oligonucleotide
  Sense strand starting at position 327 of SEQ ID NO: 1885660
gguccagggcucuguggaa

SEQ ID NO: 2358649 - RNA, 19 nt, Artificial Sequence
  Description of Artificial Sequence: Synthetic oligonucleotide
  Antisense strand to SEQ ID NO: 2358648
uuccacagagcccuggacc

SEQ ID NO: 2358650 - RNA, 19 nt, Artificial Sequence
  Description of Artificial Sequence: Synthetic oligonucleotide
  Sense strand starting at position 347 of SEQ ID NO: 1885660
augggaguuugagaaagca

SEQ ID NO: 2358651 - RNA, 19 nt, Artificial Sequence
  Description of Artificial Sequence: Synthetic oligonucleotide
  Antisense strand to SEQ ID NO: 2358650
ugcuuucucaaacucccau

SEQ ID NO: 2358652 - RNA, 19 nt, Artificial Sequence
  Description of Artificial Sequence: Synthetic oligonucleotide
  Sense strand starting at position 362 of SEQ ID NO: 1885660
agcacauucugugcuguaa

SEQ ID NO: 2358653 - RNA, 19 nt, Artificial Sequence
  Description of Artificial Sequence: Synthetic oligonucleotide
  Antisense strand to SEQ ID NO: 2358652
uuacagcacagaaugugcu

SEQ ID NO: 2358654 - RNA, 19 nt, Artificial Sequence
  Description of Artificial Sequence: Synthetic oligonucleotide
  Sense strand starting at position 377 of SEQ ID NO: 1885660
guaaccuuauccucaggaa

SEQ ID NO: 2358655 - RNA, 19 nt, Artificial Sequence
  Description of Artificial Sequence: Synthetic oligonucleotide
  Antisense strand to SEQ ID NO: 2358654
uuccugaggauaagguuac

SEQ ID NO: 2358656 - RNA, 19 nt, Artificial Sequence
  Description of Artificial Sequence: Synthetic oligonucleotide
  Sense strand starting at position 380 of SEQ ID NO: 1885660
accuuauccucaggaaaug

SEQ ID NO: 2358657 - RNA, 19 nt, Artificial Sequence
  Description of Artificial Sequence: Synthetic oligonucleotide
  Antisense strand to SEQ ID NO: 2358656
cauuuccugaggauaaggu

SEQ ID NO: 2358658 - RNA, 19 nt, Artificial Sequence
  Description of Artificial Sequence: Synthetic oligonucleotide
  Sense strand starting at position 418 of SEQ ID NO: 1885660
gaacccaaguguccaagau

SEQ ID NO: 2358659 - RNA, 19 nt, Artificial Sequence
  Description of Artificial Sequence: Synthetic oligonucleotide
  Antisense strand to SEQ ID NO: 2358658
aucuuggacacuuggguuc

SEQ ID NO: 2358660 - RNA, 19 nt, Artificial Sequence
  Description of Artificial Sequence: Synthetic oligonucleotide
  Sense strand starting at position 422 of SEQ ID NO: 1885660
ccaaguguccaagauguag

SEQ ID NO: 2358661 - RNA, 19 nt, Artificial Sequence
  Description of Artificial Sequence: Synthetic oligonucleotide
  Antisense strand to SEQ ID NO: 2358660
cuacaucuuggacacuugg

SEQ ID NO: 2358662 - RNA, 19 nt, Artificial Sequence
  Description of Artificial Sequence: Synthetic oligonucleotide
  Sense strand starting at position 565 of SEQ ID NO: 1885660
gccgacugagugcaugauu

SEQ ID NO: 2358663 - RNA, 19 nt, Artificial Sequence
  Description of Artificial Sequence: Synthetic oligonucleotide
  Antisense strand to SEQ ID NO: 2358662
aaucaugcacucagucggc

SEQ ID NO: 2358664 - RNA, 19 nt, Artificial Sequence
  Description of Artificial Sequence: Synthetic oligonucleotide
  Sense strand starting at position 576 of SEQ ID NO: 1885660
gcaugauucccaggcagca

SEQ ID NO: 2358665 - RNA, 19 nt, Artificial Sequence
  Description of Artificial Sequence: Synthetic oligonucleotide
  Antisense strand to SEQ ID NO: 2358664
ugcugccugggaaucaugc

SEQ ID NO: 2358666 - RNA, 19 nt, Artificial Sequence
  Description of Artificial Sequence: Synthetic oligonucleotide
  Sense strand starting at position 1125 of SEQ ID NO: 1885660
ugcacaaugguucgaucau

SEQ ID NO: 2358667 - RNA, 19 nt, Artificial Sequence
  Description of Artificial Sequence: Synthetic oligonucleotide
  Antisense strand to SEQ ID NO: 2358666
augaucgaaccauugugca

SEQ ID NO: 2358668 - RNA, 19 nt, Artificial Sequence
  Description of Artificial Sequence: Synthetic oligonucleotide
  Sense strand starting at position 1126 of SEQ ID NO: 1885660
gcacaaugguucgaucaua

SEQ ID NO: 2358669 - RNA, 19 nt, Artificial Sequence
  Description of Artificial Sequence: Synthetic oligonucleotide
  Antisense strand to SEQ ID NO: 2358668
uaugaucgaaccauugugc

SEQ ID NO: 2358670 - RNA, 19 nt, Artificial Sequence
  Description of Artificial Sequence: Synthetic oligonucleotide
  Sense strand starting at position 1382 of SEQ ID NO: 1885660
caaggagguuucugaagcu

SEQ ID NO: 2358671 - RNA, 19 nt, Artificial Sequence
  Description of Artificial Sequence: Synthetic oligonucleotide
  Antisense strand to SEQ ID NO: 2358670
agcuucagaaaccuccuug

SEQ ID NO: 2358672 - RNA, 19 nt, Artificial Sequence
  Description of Artificial Sequence: Synthetic oligonucleotide
  Sense strand starting at position 1389 of SEQ ID NO: 1885660
guuucugaagcucaacuau

SEQ ID NO: 2358673 - RNA, 19 nt, Artificial Sequence
  Description of Artificial Sequence: Synthetic oligonucleotide
  Antisense strand to SEQ ID NO: 2358672
auaguugagcuucagaaac

SEQ ID NO: 2358674 - RNA, 19 nt, Artificial Sequence
  Description of Artificial Sequence: Synthetic oligonucleotide
  Sense strand starting at position 1502 of SEQ ID NO: 1885660
gcaugugcauucucucaau

SEQ ID NO: 2358675 - RNA, 19 nt, Artificial Sequence
  Description of Artificial Sequence: Synthetic oligonucleotide
  Antisense strand to SEQ ID NO: 2358674
auugagagaaugcacaugc

SEQ ID NO: 2358676 - RNA, 19 nt, Artificial Sequence
  Description of Artificial Sequence: Synthetic oligonucleotide
  Sense strand starting at position 1535 of SEQ ID NO: 1885660
ggucaugcuugucuccuua

SEQ ID NO: 2358677 - RNA, 19 nt, Artificial Sequence
  Description of Artificial Sequence: Synthetic oligonucleotide
  Antisense strand to SEQ ID NO: 2358676
uaaggagacaagcaugacc

SEQ ID NO: 2358678 - RNA, 19 nt, Artificial Sequence
  Description of Artificial Sequence: Synthetic oligonucleotide
  Sense strand starting at position 1580 of SEQ ID NO: 1885660
gccacaugcugucaaggua

SEQ ID NO: 2358679 - RNA, 19 nt, Artificial Sequence
  Description of Artificial Sequence: Synthetic oligonucleotide
  Antisense strand to SEQ ID NO: 2358678
uaccuugacagcauguggc

SEQ ID NO: 2358680 - RNA, 19 nt, Artificial Sequence
  Description of Artificial Sequence: Synthetic oligonucleotide
  Sense strand starting at position 1685 of SEQ ID NO: 1885660
acauccuguuccuaaggua

SEQ ID NO: 2358681 - RNA, 19 nt, Artificial Sequence
  Description of Artificial Sequence: Synthetic oligonucleotide
  Antisense strand to SEQ ID NO: 2358680
uaccuuaggaacaggaugu

SEQ ID NO: 2358682 - RNA, 19 nt, Artificial Sequence
  Description of Artificial Sequence: Synthetic oligonucleotide
  Sense strand starting at position 1688 of SEQ ID NO: 1885660
uccuguuccuaagguaagu

SEQ ID NO: 2358683 - RNA, 19 nt, Artificial Sequence
  Description of Artificial Sequence: Synthetic oligonucleotide
  Antisense strand to SEQ ID NO: 2358682
acuuaccuuaggaacagga

SEQ ID NO: 2358684 - RNA, 19 nt, Artificial Sequence
  Description of Artificial Sequence: Synthetic oligonucleotide
  Sense strand starting at position 1716 of SEQ ID NO: 1885660
uagguaguccaguguaauc

SEQ ID NO: 2358685 - RNA, 19 nt, Artificial Sequence
  Description of Artificial Sequence: Synthetic oligonucleotide
  Antisense strand to SEQ ID NO: 2358684
gauuacacuggacuaccua

SEQ ID NO: 2358686 - RNA, 19 nt, Artificial Sequence
  Description of Artificial Sequence: Synthetic oligonucleotide
  Sense strand starting at position 1725 of SEQ ID NO: 1885660
caguguaaucacugugucu

SEQ ID NO: 2358687 - RNA, 19 nt, Artificial Sequence
  Description of Artificial Sequence: Synthetic oligonucleotide
  Antisense strand to SEQ ID NO: 2358686
agacacagugauuacacug

SEQ ID NO: 2358688 - RNA, 19 nt, Artificial Sequence
  Description of Artificial Sequence: Synthetic oligonucleotide
  Sense strand starting at position 1897 of SEQ ID NO: 1885660
cagagaggcugucgauauu

SEQ ID NO: 2358689 - RNA, 19 nt, Artificial Sequence
  Description of Artificial Sequence: Synthetic oligonucleotide
  Antisense strand to SEQ ID NO: 2358688
aauaucgacagccucucug

SEQ ID NO: 2358690 - RNA, 19 nt, Artificial Sequence
  Description of Artificial Sequence: Synthetic oligonucleotide
  Sense strand starting at position 1900 of SEQ ID NO: 1885660
agaggcugucgauauucaa

SEQ ID NO: 2358691 - RNA, 19 nt, Artificial Sequence
  Description of Artificial Sequence: Synthetic oligonucleotide
  Antisense strand to SEQ ID NO: 2358690
uugaauaucgacagccucu

SEQ ID NO: 2358692 - RNA, 19 nt, Artificial Sequence
  Description of Artificial Sequence: Synthetic oligonucleotide
  Sense strand starting at position 1992 of SEQ ID NO: 1885660
ggguuugggucucugcuua

SEQ ID NO: 2358693 - RNA, 19 nt, Artificial Sequence
  Description of Artificial Sequence: Synthetic oligonucleotide
  Antisense strand to SEQ ID NO: 2358692
uaagcagagacccaaaccc

SEQ ID NO: 2358694 - RNA, 19 nt, Artificial Sequence
  Description of Artificial Sequence: Synthetic oligonucleotide
  Sense strand starting at position 1996 of SEQ ID NO: 1885660
uugggucucugcuuaacau

SEQ ID NO: 2358695 - RNA, 19 nt, Artificial Sequence
  Description of Artificial Sequence: Synthetic oligonucleotide
  Antisense strand to SEQ ID NO: 2358694
auguuaagcagagacccaa

SEQ ID NO: 2358696 - RNA, 19 nt, Artificial Sequence
  Description of Artificial Sequence: Synthetic oligonucleotide
  Sense strand starting at position 1997 of SEQ ID NO: 1885660
ugggucucugcuuaacauu

SEQ ID NO: 2358697 - RNA, 19 nt, Artificial Sequence
  Description of Artificial Sequence: Synthetic oligonucleotide
  Antisense strand to SEQ ID NO: 2358696
aauguuaagcagagaccca

SEQ ID NO: 2358698 - RNA, 19 nt, Artificial Sequence
  Description of Artificial Sequence: Synthetic oligonucleotide
  Sense strand starting at position 2095 of SEQ ID NO: 1885660
cuaccuguguguccuagua

SEQ ID NO: 2358699 - RNA, 19 nt, Artificial Sequence
  Description of Artificial Sequence: Synthetic oligonucleotide
  Antisense strand to SEQ ID NO: 2358698
uacuaggacacacagguag

SEQ ID NO: 2358700 - RNA, 19 nt, Artificial Sequence
  Description of Artificial Sequence: Synthetic oligonucleotide
  Sense strand starting at position 2152 of SEQ ID NO: 1885660
guagguacccacuggaauu

SEQ ID NO: 2358701 - RNA, 19 nt, Artificial Sequence
  Description of Artificial Sequence: Synthetic oligonucleotide
  Antisense strand to SEQ ID NO: 2358700
aauuccaguggguaccuac

SEQ ID NO: 2358702 - RNA, 19 nt, Artificial Sequence
  Description of Artificial Sequence: Synthetic oligonucleotide
  Sense strand starting at position 2264 of SEQ ID NO: 1885660
gccuaaggcugaucugacu

SEQ ID NO: 2358703 - RNA, 19 nt, Artificial Sequence
  Description of Artificial Sequence: Synthetic oligonucleotide
  Antisense strand to SEQ ID NO: 2358702
agucagaucagccuuaggc

SEQ ID NO: 2358704 - RNA, 19 nt, Artificial Sequence
  Description of Artificial Sequence: Synthetic oligonucleotide
  Sense strand starting at position 2275 of SEQ ID NO: 1885660
aucugacuccuacagcgaa

SEQ ID NO: 2358705 - RNA, 19 nt, Artificial Sequence
  Description of Artificial Sequence: Synthetic oligonucleotide
  Antisense strand to SEQ ID NO: 2358704
uucgcuguaggagucagau

SEQ ID NO: 2358706 - RNA, 19 nt, Artificial Sequence
  Description of Artificial Sequence: Synthetic oligonucleotide
  Sense strand starting at position 2414 of SEQ ID NO: 1885660
gucccuugccacugcgaau

SEQ ID NO: 2358707 - RNA, 19 nt, Artificial Sequence
  Description of Artificial Sequence: Synthetic oligonucleotide
  Antisense strand to SEQ ID NO: 2358706
auucgcaguggcaagggac

SEQ ID NO: 2358708 - RNA, 19 nt, Artificial Sequence
  Description of Artificial Sequence: Synthetic oligonucleotide
  Sense strand starting at position 2923 of SEQ ID NO: 1885660
cgcggaguuucgcaacuag

SEQ ID NO: 2358709 - RNA, 19 nt, Artificial Sequence
  Description of Artificial Sequence: Synthetic oligonucleotide
  Antisense strand to SEQ ID NO: 2358708
cuaguugcgaaacuccgcg

SEQ ID NO: 2358710 - RNA, 19 nt, Artificial Sequence
  Description of Artificial Sequence: Synthetic oligonucleotide
  Sense strand starting at position 3805 of SEQ ID NO: 1885660
cgggucucgugggcguaaa

SEQ ID NO: 2358711 - RNA, 19 nt, Artificial Sequence
  Description of Artificial Sequence: Synthetic oligonucleotide
  Antisense strand to SEQ ID NO: 2358710
uuuacgcccacgagacccg

SEQ ID NO: 2358712 - RNA, 19 nt, Artificial Sequence
  Description of Artificial Sequence: Synthetic oligonucleotide
  Sense strand starting at position 3806 of SEQ ID NO: 1885660
gggucucgugggcguaaau

SEQ ID NO: 2358713 - RNA, 19 nt, Artificial Sequence
  Description of Artificial Sequence: Synthetic oligonucleotide
  Antisense strand to SEQ ID NO: 2358712
auuuacgcccacgagaccc

SEQ ID NO: 2358714 - RNA, 19 nt, Artificial Sequence
  Description of Artificial Sequence: Synthetic oligonucleotide
  Sense strand starting at position 3807 of SEQ ID NO: 1885660
ggucucgugggcguaaauu

SEQ ID NO: 2358715 - RNA, 19 nt, Artificial Sequence
  Description of Artificial Sequence: Synthetic oligonucleotide
  Antisense strand to SEQ ID NO: 2358714
aauuuacgcccacgagacc

SEQ ID NO: 2358716 - RNA, 19 nt, Artificial Sequence
  Description of Artificial Sequence: Synthetic oligonucleotide
  Sense strand starting at position 3849 of SEQ ID NO: 1885660
gagggcaggugucuuuauu

SEQ ID NO: 2358717 - RNA, 19 nt, Artificial Sequence
  Description of Artificial Sequence: Synthetic oligonucleotide
  Antisense strand to SEQ ID NO: 2358716
aauaaagacaccugcccuc

SEQ ID NO: 2358718 - RNA, 19 nt, Artificial Sequence
  Description of Artificial Sequence: Synthetic oligonucleotide
  Sense strand starting at position 12 of SEQ ID NO: 1885661
ggacucugcacuuggaaau

SEQ ID NO: 2358719 - RNA, 19 nt, Artificial Sequence
  Description of Artificial Sequence: Synthetic oligonucleotide
  Antisense strand to SEQ ID NO: 2358718
auuuccaagugcagagucc

SEQ ID NO: 2358720 - RNA, 19 nt, Artificial Sequence
  Description of Artificial Sequence: Synthetic oligonucleotide
  Sense strand starting at position 340 of SEQ ID NO: 1885661
ccaggagcucacugaucaa

SEQ ID NO: 2358721 - RNA, 19 nt, Artificial Sequence
  Description of Artificial Sequence: Synthetic oligonucleotide
  Antisense strand to SEQ ID NO: 2358720
uugaucagugagcuccugg

SEQ ID NO: 2358722 - RNA, 19 nt, Artificial Sequence
  Description of Artificial Sequence: Synthetic oligonucleotide
  Sense strand starting at position 343 of SEQ ID NO: 1885661
ggagcucacugaucaacaa

SEQ ID NO: 2358723 - RNA, 19 nt, Artificial Sequence
  Description of Artificial Sequence: Synthetic oligonucleotide
  Antisense strand to SEQ ID NO: 2358722
uuguugaucagugagcucc

SEQ ID NO: 2358724 - RNA, 19 nt, Artificial Sequence
  Description of Artificial Sequence: Synthetic oligonucleotide
  Sense strand starting at position 357 of SEQ ID NO: 1885661
aacaaugagugauaaagga

SEQ ID NO: 2358725 - RNA, 19 nt, Artificial Sequence
  Description of Artificial Sequence: Synthetic oligonucleotide
  Antisense strand to SEQ ID NO: 2358724
uccuuuaucacucauuguu

SEQ ID NO: 2358726 - RNA, 19 nt, Artificial Sequence
  Description of Artificial Sequence: Synthetic oligonucleotide
  Sense strand starting at position 462 of SEQ ID NO: 1885661
ucacuaagucuccagguca

SEQ ID NO: 2358727 - RNA, 19 nt, Artificial Sequence
  Description of Artificial Sequence: Synthetic oligonucleotide
  Antisense strand to SEQ ID NO: 2358726
ugaccuggagacuuaguga

SEQ ID NO: 2358728 - RNA, 19 nt, Artificial Sequence
  Description of Artificial Sequence: Synthetic oligonucleotide
  Sense strand starting at position 528 of SEQ ID NO: 1885661
gggugcaaauaugacauaa

SEQ ID NO: 2358729 - RNA, 19 nt, Artificial Sequence
  Description of Artificial Sequence: Synthetic oligonucleotide
  Antisense strand to SEQ ID NO: 2358728
uuaugucauauuugcaccc

SEQ ID NO: 2358730 - RNA, 19 nt, Artificial Sequence
  Description of Artificial Sequence: Synthetic oligonucleotide
  Sense strand starting at position 793 of SEQ ID NO: 1885661
ggugggauucgauaucgga

SEQ ID NO: 2358731 - RNA, 19 nt, Artificial Sequence
  Description of Artificial Sequence: Synthetic oligonucleotide
  Antisense strand to SEQ ID NO: 2358730
uccgauaucgaaucccacc

SEQ ID NO: 2358732 - RNA, 19 nt, Artificial Sequence
  Description of Artificial Sequence: Synthetic oligonucleotide
  Sense strand starting at position 797 of SEQ ID NO: 1885661
ggauucgauaucggaaaga

SEQ ID NO: 2358733 - RNA, 19 nt, Artificial Sequence
  Description of Artificial Sequence: Synthetic oligonucleotide
  Antisense strand to SEQ ID NO: 2358732
ucuuuccgauaucgaaucc

SEQ ID NO: 2358734 - RNA, 19 nt, Artificial Sequence
  Description of Artificial Sequence: Synthetic oligonucleotide
  Sense strand starting at position 902 of SEQ ID NO: 1885661
ggaggaggcuucuuccaca

SEQ ID NO: 2358735 - RNA, 19 nt, Artificial Sequence
  Description of Artificial Sequence: Synthetic oligonucleotide
  Antisense strand to SEQ ID NO: 2358734
uguggaagaagccuccucc

SEQ ID NO: 2358736 - RNA, 19 nt, Artificial Sequence
  Description of Artificial Sequence: Synthetic oligonucleotide
  Sense strand starting at position 1067 of SEQ ID NO: 1885661
gaaucaugcaggugggauc

SEQ ID NO: 2358737 - RNA, 19 nt, Artificial Sequence
  Description of Artificial Sequence: Synthetic oligonucleotide
  Antisense strand to SEQ ID NO: 2358736
gaucccaccugcaugauuc

SEQ ID NO: 2358738 - RNA, 19 nt, Artificial Sequence
  Description of Artificial Sequence: Synthetic oligonucleotide
  Sense strand starting at position 1074 of SEQ ID NO: 1885661
gcaggugggaucugauacu

SEQ ID NO: 2358739 - RNA, 19 nt, Artificial Sequence
  Description of Artificial Sequence: Synthetic oligonucleotide
  Antisense strand to SEQ ID NO: 2358738
aguaucagaucccaccugc

SEQ ID NO: 2358740 - RNA, 19 nt, Artificial Sequence
  Description of Artificial Sequence: Synthetic oligonucleotide
  Sense strand starting at position 1108 of SEQ ID NO: 1885661
gugucuugugugucaugau

SEQ ID NO: 2358741 - RNA, 19 nt, Artificial Sequence
  Description of Artificial Sequence: Synthetic oligonucleotide
  Antisense strand to SEQ ID NO: 2358740
aucaugacacacaagacac

SEQ ID NO: 2358742 - RNA, 19 nt, Artificial Sequence
  Description of Artificial Sequence: Synthetic oligonucleotide
  Sense strand starting at position 1121 of SEQ ID NO: 1885661
caugauuucugugaaugca

SEQ ID NO: 2358743 - RNA, 19 nt, Artificial Sequence
  Description of Artificial Sequence: Synthetic oligonucleotide
  Antisense strand to SEQ ID NO: 2358742
ugcauucacagaaaucaug

SEQ ID NO: 2358744 - RNA, 19 nt, Artificial Sequence
  Description of Artificial Sequence: Synthetic oligonucleotide
  Sense strand starting at position 1346 of SEQ ID NO: 1885661
guccucugccucgaugaca

SEQ ID NO: 2358745 - RNA, 19 nt, Artificial Sequence
  Description of Artificial Sequence: Synthetic oligonucleotide
  Antisense strand to SEQ ID NO: 2358744
ugucaucgaggcagaggac

SEQ ID NO: 2358746 - RNA, 19 nt, Artificial Sequence
  Description of Artificial Sequence: Synthetic oligonucleotide
  Sense strand starting at position 1692 of SEQ ID NO: 1885661
gugccaucggcucaagaac

SEQ ID NO: 2358747 - RNA, 19 nt, Artificial Sequence
  Description of Artificial Sequence: Synthetic oligonucleotide
  Antisense strand to SEQ ID NO: 2358746
guucuugagccgauggcac

SEQ ID NO: 2358748 - RNA, 19 nt, Artificial Sequence
  Description of Artificial Sequence: Synthetic oligonucleotide
  Sense strand starting at position 1908 of SEQ ID NO: 1885661
gguccuccaaggugagauu

SEQ ID NO: 2358749 - RNA, 19 nt, Artificial Sequence
  Description of Artificial Sequence: Synthetic oligonucleotide
  Antisense strand to SEQ ID NO: 2358748
aaucucaccuuggaggacc

SEQ ID NO: 2358750 - RNA, 19 nt, Artificial Sequence
  Description of Artificial Sequence: Synthetic oligonucleotide
  Sense strand starting at position 1921 of SEQ ID NO: 1885661
gagauuugauacugagaaa

SEQ ID NO: 2358751 - RNA, 19 nt, Artificial Sequence
  Description of Artificial Sequence: Synthetic oligonucleotide
  Antisense strand to SEQ ID NO: 2358750
uuucucaguaucaaaucuc

SEQ ID NO: 2358752 - RNA, 19 nt, Artificial Sequence
  Description of Artificial Sequence: Synthetic oligonucleotide
  Sense strand starting at position 2212 of SEQ ID NO: 1885661
gguggaauuugauaccgaa

SEQ ID NO: 2358753 - RNA, 19 nt, Artificial Sequence
  Description of Artificial Sequence: Synthetic oligonucleotide
  Antisense strand to SEQ ID NO: 2358752
uucgguaucaaauuccacc

SEQ ID NO: 2358754 - RNA, 19 nt, Artificial Sequence
  Description of Artificial Sequence: Synthetic oligonucleotide
  Sense strand starting at position 2306 of SEQ ID NO: 1885661
ggcucagaugcucggacua

SEQ ID NO: 2358755 - RNA, 19 nt, Artificial Sequence
  Description of Artificial Sequence: Synthetic oligonucleotide
  Antisense strand to SEQ ID NO: 2358754
uaguccgagcaucugagcc

SEQ ID NO: 2358756 - RNA, 19 nt, Artificial Sequence
  Description of Artificial Sequence: Synthetic oligonucleotide
  Sense strand starting at position 2472 of SEQ ID NO: 1885661
ucuagagacucuucccaga

SEQ ID NO: 2358757 - RNA, 19 nt, Artificial Sequence
  Description of Artificial Sequence: Synthetic oligonucleotide
  Antisense strand to SEQ ID NO: 2358756
ucugggaagagucucuaga

SEQ ID NO: 2358758 - RNA, 19 nt, Artificial Sequence
  Description of Artificial Sequence: Synthetic oligonucleotide
  Sense strand starting at position 2475 of SEQ ID NO: 1885661
agagacucuucccagaagu

SEQ ID NO: 2358759 - RNA, 19 nt, Artificial Sequence
  Description of Artificial Sequence: Synthetic oligonucleotide
  Antisense strand to SEQ ID NO: 2358758
acuucugggaagagucucu

SEQ ID NO: 2358760 - RNA, 19 nt, Artificial Sequence
  Description of Artificial Sequence: Synthetic oligonucleotide
  Sense strand starting at position 2486 of SEQ ID NO: 1885661
ccagaaguugagugcaaga

SEQ ID NO: 2358761 - RNA, 19 nt, Artificial Sequence
  Description of Artificial Sequence: Synthetic oligonucleotide
  Antisense strand to SEQ ID NO: 2358760
ucuugcacucaacuucugg

SEQ ID NO: 2358762 - RNA, 19 nt, Artificial Sequence
  Description of Artificial Sequence: Synthetic oligonucleotide
  Sense strand starting at position 2807 of SEQ ID NO: 1885661
ucugauuagccucauaaag

SEQ ID NO: 2358763 - RNA, 19 nt, Artificial Sequence
  Description of Artificial Sequence: Synthetic oligonucleotide
  Antisense strand to SEQ ID NO: 2358762
cuuuaugaggcuaaucaga

SEQ ID NO: 2358764 - RNA, 19 nt, Artificial Sequence
  Description of Artificial Sequence: Synthetic oligonucleotide
  Sense strand starting at position 2880 of SEQ ID NO: 1885661
aggugagucacagaugucu

SEQ ID NO: 2358765 - RNA, 19 nt, Artificial Sequence
  Description of Artificial Sequence: Synthetic oligonucleotide
  Antisense strand to SEQ ID NO: 2358764
agacaucugugacucaccu

SEQ ID NO: 2358766 - RNA, 19 nt, Artificial Sequence
  Description of Artificial Sequence: Synthetic oligonucleotide
  Sense strand starting at position 2882 of SEQ ID NO: 1885661
gugagucacagaugucuuc

SEQ ID NO: 2358767 - RNA, 19 nt, Artificial Sequence
  Description of Artificial Sequence: Synthetic oligonucleotide
  Antisense strand to SEQ ID NO: 2358766
gaagacaucugugacucac

SEQ ID NO: 2358768 - RNA, 19 nt, Artificial Sequence
  Description of Artificial Sequence: Synthetic oligonucleotide
  Sense strand starting at position 3087 of SEQ ID NO: 1885661
gaauccuuucccugacguu

SEQ ID NO: 2358769 - RNA, 19 nt, Artificial Sequence
  Description of Artificial Sequence: Synthetic oligonucleotide
  Antisense strand to SEQ ID NO: 2358768
aacgucagggaaaggauuc

SEQ ID NO: 2358770 - RNA, 19 nt, Artificial Sequence
  Description of Artificial Sequence: Synthetic oligonucleotide
  Sense strand starting at position 3165 of SEQ ID NO: 1885661
cgaggccugcuguaaagaa

SEQ ID NO: 2358771 - RNA, 19 nt, Artificial Sequence
  Description of Artificial Sequence: Synthetic oligonucleotide
  Antisense strand to SEQ ID NO: 2358770
uucuuuacagcaggccucg

SEQ ID NO: 2358772 - RNA, 19 nt, Artificial Sequence
  Description of Artificial Sequence: Synthetic oligonucleotide
  Sense strand starting at position 3223 of SEQ ID NO: 1885661
ggcacugaccugcaucaga

SEQ ID NO: 2358773 - RNA, 19 nt, Artificial Sequence
  Description of Artificial Sequence: Synthetic oligonucleotide
  Antisense strand to SEQ ID NO: 2358772
ucugaugcaggucagugcc

SEQ ID NO: 2358774 - RNA, 19 nt, Artificial Sequence
  Description of Artificial Sequence: Synthetic oligonucleotide
  Sense strand starting at position 3421 of SEQ ID NO: 1885661
ucuggaaauucuccaggua

SEQ ID NO: 2358775 - RNA, 19 nt, Artificial Sequence
  Description of Artificial Sequence: Synthetic oligonucleotide
  Antisense strand to SEQ ID NO: 2358774
uaccuggagaauuuccaga

SEQ ID NO: 2358776 - RNA, 19 nt, Artificial Sequence
  Description of Artificial Sequence: Synthetic oligonucleotide
  Sense strand starting at position 3465 of SEQ ID NO: 1885661
gugcaaugcuggucaccaa

SEQ ID NO: 2358777 - RNA, 19 nt, Artificial Sequence
  Description of Artificial Sequence: Synthetic oligonucleotide
  Antisense strand to SEQ ID NO: 2358776
uuggugaccagcauugcac

SEQ ID NO: 2358778 - RNA, 19 nt, Artificial Sequence
  Description of Artificial Sequence: Synthetic oligonucleotide
  Sense strand starting at position 3674 of SEQ ID NO: 1885661
cccagaauguuccuggaug

SEQ ID NO: 2358779 - RNA, 19 nt, Artificial Sequence
  Description of Artificial Sequence: Synthetic oligonucleotide
  Antisense strand to SEQ ID NO: 2358778
cauccaggaacauucuggg

SEQ ID NO: 2358780 - RNA, 19 nt, Artificial Sequence
  Description of Artificial Sequence: Synthetic oligonucleotide
  Sense strand starting at position 3703 of SEQ ID NO: 1885661
caucaauagccuuggaagu

SEQ ID NO: 2358781 - RNA, 19 nt, Artificial Sequence
  Description of Artificial Sequence: Synthetic oligonucleotide
  Antisense strand to SEQ ID NO: 2358780
acuuccaaggcuauugaug

SEQ ID NO: 2358782 - RNA, 19 nt, Artificial Sequence
  Description of Artificial Sequence: Synthetic oligonucleotide
  Sense strand starting at position 3716 of SEQ ID NO: 1885661
ggaagugugaaaggaaagu

SEQ ID NO: 2358783 - RNA, 19 nt, Artificial Sequence
  Description of Artificial Sequence: Synthetic oligonucleotide
  Antisense strand to SEQ ID NO: 2358782
acuuuccuuucacacuucc

SEQ ID NO: 2358784 - RNA, 19 nt, Artificial Sequence
  Description of Artificial Sequence: Synthetic oligonucleotide
  Sense strand starting at position 3772 of SEQ ID NO: 1885661
cuggaagcugcucaggaua

SEQ ID NO: 2358785 - RNA, 19 nt, Artificial Sequence
  Description of Artificial Sequence: Synthetic oligonucleotide
  Antisense strand to SEQ ID NO: 2358784
uauccugagcagcuuccag

SEQ ID NO: 2358786 - RNA, 19 nt, Artificial Sequence
  Description of Artificial Sequence: Synthetic oligonucleotide
  Sense strand starting at position 3786 of SEQ ID NO: 1885661
ggauaaaccugccucucau

SEQ ID NO: 2358787 - RNA, 19 nt, Artificial Sequence
  Description of Artificial Sequence: Synthetic oligonucleotide
  Antisense strand to SEQ ID NO: 2358786
augagaggcagguuuaucc

SEQ ID NO: 2358788 - RNA, 19 nt, Artificial Sequence
  Description of Artificial Sequence: Synthetic oligonucleotide
  Sense strand starting at position 3833 of SEQ ID NO: 1885661
gagacagaugcguaucuga

SEQ ID NO: 2358789 - RNA, 19 nt, Artificial Sequence
  Description of Artificial Sequence: Synthetic oligonucleotide
  Antisense strand to SEQ ID NO: 2358788
ucagauacgcaucugucuc

SEQ ID NO: 2358790 - RNA, 19 nt, Artificial Sequence
  Description of Artificial Sequence: Synthetic oligonucleotide
  Sense strand starting at position 3836 of SEQ ID NO: 1885661
acagaugcguaucugauuu

SEQ ID NO: 2358791 - RNA, 19 nt, Artificial Sequence
  Description of Artificial Sequence: Synthetic oligonucleotide
  Antisense strand to SEQ ID NO: 2358790
aaaucagauacgcaucugu

SEQ ID NO: 2358792 - RNA, 19 nt, Artificial Sequence
  Description of Artificial Sequence: Synthetic oligonucleotide
  Sense strand starting at position 3882 of SEQ ID NO: 1885661
cgcgaaagaauguaaucau

SEQ ID NO: 2358793 - RNA, 19 nt, Artificial Sequence
  Description of Artificial Sequence: Synthetic oligonucleotide
  Antisense strand to SEQ ID NO: 2358792
augauuacauucuuucgcg

SEQ ID NO: 2358794 - RNA, 19 nt, Artificial Sequence
  Description of Artificial Sequence: Synthetic oligonucleotide
  Sense strand starting at position 3891 of SEQ ID NO: 1885661
auguaaucauuuguguauc

SEQ ID NO: 2358795 - RNA, 19 nt, Artificial Sequence
  Description of Artificial Sequence: Synthetic oligonucleotide
  Antisense strand to SEQ ID NO: 2358794
gauacacaaaugauuacau

SEQ ID NO: 2358796 - RNA, 19 nt, Artificial Sequence
  Description of Artificial Sequence: Synthetic oligonucleotide
  Sense strand starting at position 3893 of SEQ ID NO: 1885661
guaaucauuuguguaucac

SEQ ID NO: 2358797 - RNA, 19 nt, Artificial Sequence
  Description of Artificial Sequence: Synthetic oligonucleotide
  Antisense strand to SEQ ID NO: 2358796
gugauacacaaaugauuac

SEQ ID NO: 2358798 - RNA, 19 nt, Artificial Sequence
  Description of Artificial Sequence: Synthetic oligonucleotide
  Sense strand starting at position 4 of SEQ ID NO: 1885662
gcagacuuggagugacaau

SEQ ID NO: 2358799 - RNA, 19 nt, Artificial Sequence
  Description of Artificial Sequence: Synthetic oligonucleotide
  Antisense strand to SEQ ID NO: 2358798
auugucacuccaagucugc

SEQ ID NO: 2358800 - RNA, 19 nt, Artificial Sequence
  Description of Artificial Sequence: Synthetic oligonucleotide
  Sense strand starting at position 13 of SEQ ID NO: 1885662
gagugacaaucauauuuga

SEQ ID NO: 2358801 - RNA, 19 nt, Artificial Sequence
  Description of Artificial Sequence: Synthetic oligonucleotide
  Antisense strand to SEQ ID NO: 2358800
ucaaauaugauugucacuc

SEQ ID NO: 2358802 - RNA, 19 nt, Artificial Sequence
  Description of Artificial Sequence: Synthetic oligonucleotide
  Sense strand starting at position 174 of SEQ ID NO: 1885662
uuauauaguccacaauugu

SEQ ID NO: 2358803 - RNA, 19 nt, Artificial Sequence
  Description of Artificial Sequence: Synthetic oligonucleotide
  Antisense strand to SEQ ID NO: 2358802
acaauuguggacuauauaa

SEQ ID NO: 2358804 - RNA, 19 nt, Artificial Sequence
  Description of Artificial Sequence: Synthetic oligonucleotide
  Sense strand starting at position 239 of SEQ ID NO: 1885662
ugugguccauucuugacau

SEQ ID NO: 2358805 - RNA, 19 nt, Artificial Sequence
  Description of Artificial Sequence: Synthetic oligonucleotide
  Antisense strand to SEQ ID NO: 2358804
augucaagaauggaccaca

SEQ ID NO: 2358806 - RNA, 19 nt, Artificial Sequence
  Description of Artificial Sequence: Synthetic oligonucleotide
  Sense strand starting at position 334 of SEQ ID NO: 1885662
gcccaagaccagugacuau

SEQ ID NO: 2358807 - RNA, 19 nt, Artificial Sequence
  Description of Artificial Sequence: Synthetic oligonucleotide
  Antisense strand to SEQ ID NO: 2358806
auagucacuggucuugggc

SEQ ID NO: 2358808 - RNA, 19 nt, Artificial Sequence
  Description of Artificial Sequence: Synthetic oligonucleotide
  Sense strand starting at position 341 of SEQ ID NO: 1885662
accagugacuauucuguau

SEQ ID NO: 2358809 - RNA, 19 nt, Artificial Sequence
  Description of Artificial Sequence: Synthetic oligonucleotide
  Antisense strand to SEQ ID NO: 2358808
auacagaauagucacuggu

SEQ ID NO: 2358810 - RNA, 19 nt, Artificial Sequence
  Description of Artificial Sequence: Synthetic oligonucleotide
  Sense strand starting at position 345 of SEQ ID NO: 1885662
gugacuauucuguauaccu

SEQ ID NO: 2358811 - RNA, 19 nt, Artificial Sequence
  Description of Artificial Sequence: Synthetic oligonucleotide
  Antisense strand to SEQ ID NO: 2358810
agguauacagaauagucac

SEQ ID NO: 2358812 - RNA, 19 nt, Artificial Sequence
  Description of Artificial Sequence: Synthetic oligonucleotide
  Sense strand starting at position 509 of SEQ ID NO: 1885662
uuaggaguaagaugcaguu

SEQ ID NO: 2358813 - RNA, 19 nt, Artificial Sequence
  Description of Artificial Sequence: Synthetic oligonucleotide
  Antisense strand to SEQ ID NO: 2358812
aacugcaucuuacuccuaa

SEQ ID NO: 2358814 - RNA, 19 nt, Artificial Sequence
  Description of Artificial Sequence: Synthetic oligonucleotide
  Sense strand starting at position 515 of SEQ ID NO: 1885662
guaagaugcaguuaggagu

SEQ ID NO: 2358815 - RNA, 19 nt, Artificial Sequence
  Description of Artificial Sequence: Synthetic oligonucleotide
  Antisense strand to SEQ ID NO: 2358814
acuccuaacugcaucuuac

SEQ ID NO: 2358816 - RNA, 19 nt, Artificial Sequence
  Description of Artificial Sequence: Synthetic oligonucleotide
  Sense strand starting at position 555 of SEQ ID NO: 1885662
gaguacggugacuauaguu

SEQ ID NO: 2358817 - RNA, 19 nt, Artificial Sequence
  Description of Artificial Sequence: Synthetic oligonucleotide
  Antisense strand to SEQ ID NO: 2358816
aacuauagucaccguacuc

SEQ ID NO: 2358818 - RNA, 19 nt, Artificial Sequence
  Description of Artificial Sequence: Synthetic oligonucleotide
  Sense strand starting at position 623 of SEQ ID NO: 1885662
guauucucacugcacacau

SEQ ID NO: 2358819 - RNA, 19 nt, Artificial Sequence
  Description of Artificial Sequence: Synthetic oligonucleotide
  Antisense strand to SEQ ID NO: 2358818
augugugcagugagaauac

SEQ ID NO: 2358820 - RNA, 19 nt, Artificial Sequence
  Description of Artificial Sequence: Synthetic oligonucleotide
  Sense strand starting at position 674 of SEQ ID NO: 1885662
guuaauucgcuugauuaug

SEQ ID NO: 2358821 - RNA, 19 nt, Artificial Sequence
  Description of Artificial Sequence: Synthetic oligonucleotide
  Antisense strand to SEQ ID NO: 2358820
cauaaucaagcgaauuaac

SEQ ID NO: 2358822 - RNA, 19 nt, Artificial Sequence
  Description of Artificial Sequence: Synthetic oligonucleotide
  Sense strand starting at position 922 of SEQ ID NO: 1885662
ucaccuucucugggagaga

SEQ ID NO: 2358823 - RNA, 19 nt, Artificial Sequence
  Description of Artificial Sequence: Synthetic oligonucleotide
  Antisense strand to SEQ ID NO: 2358822
ucucucccagagaagguga

SEQ ID NO: 2358824 - RNA, 19 nt, Artificial Sequence
  Description of Artificial Sequence: Synthetic oligonucleotide
  Sense strand starting at position 950 of SEQ ID NO: 1885662
gugcccauucuauggaaca

SEQ ID NO: 2358825 - RNA, 19 nt, Artificial Sequence
  Description of Artificial Sequence: Synthetic oligonucleotide
  Antisense strand to SEQ ID NO: 2358824
uguuccauagaaugggcac

SEQ ID NO: 2358826 - RNA, 19 nt, Artificial Sequence
  Description of Artificial Sequence: Synthetic oligonucleotide
  Sense strand starting at position 964 of SEQ ID NO: 1885662
gaacauaaagccgguuaaa

SEQ ID NO: 2358827 - RNA, 19 nt, Artificial Sequence
  Description of Artificial Sequence: Synthetic oligonucleotide
  Antisense strand to SEQ ID NO: 2358826
uuuaaccggcuuuauguuc

SEQ ID NO: 2358828 - RNA, 19 nt, Artificial Sequence
  Description of Artificial Sequence: Synthetic oligonucleotide
  Sense strand starting at position 1026 of SEQ ID NO: 1885662
gguuaccagaccuggauua

SEQ ID NO: 2358829 - RNA, 19 nt, Artificial Sequence
  Description of Artificial Sequence: Synthetic oligonucleotide
  Antisense strand to SEQ ID NO: 2358828
uaauccaggucugguaacc

SEQ ID NO: 2358830 - RNA, 19 nt, Artificial Sequence
  Description of Artificial Sequence: Synthetic oligonucleotide
  Sense strand starting at position 1033 of SEQ ID NO: 1885662
agaccuggauuagucauaa

SEQ ID NO: 2358831 - RNA, 19 nt, Artificial Sequence
  Description of Artificial Sequence: Synthetic oligonucleotide
  Antisense strand to SEQ ID NO: 2358830
uuaugacuaauccaggucu

SEQ ID NO: 2358832 - RNA, 19 nt, Artificial Sequence
  Description of Artificial Sequence: Synthetic oligonucleotide
  Sense strand starting at position 1045 of SEQ ID NO: 1885662
gucauaauccuuugcccag

SEQ ID NO: 2358833 - RNA, 19 nt, Artificial Sequence
  Description of Artificial Sequence: Synthetic oligonucleotide
  Antisense strand to SEQ ID NO: 2358832
cugggcaaaggauuaugac

SEQ ID NO: 2358834 - RNA, 19 nt, Artificial Sequence
  Description of Artificial Sequence: Synthetic oligonucleotide
  Sense strand starting at position 1286 of SEQ ID NO: 1885662
gagaauuaccacugguggu

SEQ ID NO: 2358835 - RNA, 19 nt, Artificial Sequence
  Description of Artificial Sequence: Synthetic oligonucleotide
  Antisense strand to SEQ ID NO: 2358834
accaccagugguaauucuc

SEQ ID NO: 2358836 - RNA, 19 nt, Artificial Sequence
  Description of Artificial Sequence: Synthetic oligonucleotide
  Sense strand starting at position 1503 of SEQ ID NO: 1885662
cgagggagagugugaaaua

SEQ ID NO: 2358837 - RNA, 19 nt, Artificial Sequence
  Description of Artificial Sequence: Synthetic oligonucleotide
  Antisense strand to SEQ ID NO: 2358836
uauuucacacucucccucg

SEQ ID NO: 2358838 - RNA, 19 nt, Artificial Sequence
  Description of Artificial Sequence: Synthetic oligonucleotide
  Sense strand starting at position 1702 of SEQ ID NO: 1885662
gggugacaucagcaaagca

SEQ ID NO: 2358839 - RNA, 19 nt, Artificial Sequence
  Description of Artificial Sequence: Synthetic oligonucleotide
  Antisense strand to SEQ ID NO: 2358838
ugcuuugcugaugucaccc

SEQ ID NO: 2358840 - RNA, 19 nt, Artificial Sequence
  Description of Artificial Sequence: Synthetic oligonucleotide
  Sense strand starting at position 2011 of SEQ ID NO: 1885662
acuuguacgguuuguagaa

SEQ ID NO: 2358841 - RNA, 19 nt, Artificial Sequence
  Description of Artificial Sequence: Synthetic oligonucleotide
  Antisense strand to SEQ ID NO: 2358840
uucuacaaaccguacaagu

SEQ ID NO: 2358842 - RNA, 19 nt, Artificial Sequence
  Description of Artificial Sequence: Synthetic oligonucleotide
  Sense strand starting at position 2018 of SEQ ID NO: 1885662
cgguuuguagaaugaggaa

SEQ ID NO: 2358843 - RNA, 19 nt, Artificial Sequence
  Description of Artificial Sequence: Synthetic oligonucleotide
  Antisense strand to SEQ ID NO: 2358842
uuccucauucuacaaaccg

SEQ ID NO: 2358844 - RNA, 19 nt, Artificial Sequence
  Description of Artificial Sequence: Synthetic oligonucleotide
  Sense strand starting at position 2235 of SEQ ID NO: 1885662
cagggaauuguucgggcau

SEQ ID NO: 2358845 - RNA, 19 nt, Artificial Sequence
  Description of Artificial Sequence: Synthetic oligonucleotide
  Antisense strand to SEQ ID NO: 2358844
augcccgaacaauucccug

SEQ ID NO: 2358846 - RNA, 19 nt, Artificial Sequence
  Description of Artificial Sequence: Synthetic oligonucleotide
  Sense strand starting at position 2270 of SEQ ID NO: 1885662
ggcaucagagcuuaaacaa

SEQ ID NO: 2358847 - RNA, 19 nt, Artificial Sequence
  Description of Artificial Sequence: Synthetic oligonucleotide
  Antisense strand to SEQ ID NO: 2358846
uuguuuaagcucugaugcc

SEQ ID NO: 2358848 - RNA, 19 nt, Artificial Sequence
  Description of Artificial Sequence: Synthetic oligonucleotide
  Sense strand starting at position 2372 of SEQ ID NO: 1885662
aagucuaugcagugagauu

SEQ ID NO: 2358849 - RNA, 19 nt, Artificial Sequence
  Description of Artificial Sequence: Synthetic oligonucleotide
  Antisense strand to SEQ ID NO: 2358848
aaucucacugcauagacuu

SEQ ID NO: 2358850 - RNA, 19 nt, Artificial Sequence
  Description of Artificial Sequence: Synthetic oligonucleotide
  Sense strand starting at position 2373 of SEQ ID NO: 1885662
agucuaugcagugagauuc

SEQ ID NO: 2358851 - RNA, 19 nt, Artificial Sequence
  Description of Artificial Sequence: Synthetic oligonucleotide
  Antisense strand to SEQ ID NO: 2358850
gaaucucacugcauagacu

SEQ ID NO: 2358852 - RNA, 19 nt, Artificial Sequence
  Description of Artificial Sequence: Synthetic oligonucleotide
  Sense strand starting at position 2566 of SEQ ID NO: 1885662
agaguuaugguguaggugu

SEQ ID NO: 2358853 - RNA, 19 nt, Artificial Sequence
  Description of Artificial Sequence: Synthetic oligonucleotide
  Antisense strand to SEQ ID NO: 2358852
acaccuacaccauaacucu

SEQ ID NO: 2358854 - RNA, 19 nt, Artificial Sequence
  Description of Artificial Sequence: Synthetic oligonucleotide
  Sense strand starting at position 2628 of SEQ ID NO: 1885662
ugagggagucgugggaaga

SEQ ID NO: 2358855 - RNA, 19 nt, Artificial Sequence
  Description of Artificial Sequence: Synthetic oligonucleotide
  Antisense strand to SEQ ID NO: 2358854
ucuucccacgacucccuca

SEQ ID NO: 2358856 - RNA, 19 nt, Artificial Sequence
  Description of Artificial Sequence: Synthetic oligonucleotide
  Sense strand starting at position 2810 of SEQ ID NO: 1885662
agcagcagggaucauuaau

SEQ ID NO: 2358857 - RNA, 19 nt, Artificial Sequence
  Description of Artificial Sequence: Synthetic oligonucleotide
  Antisense strand to SEQ ID NO: 2358856
auuaaugaucccugcugcu

SEQ ID NO: 2358858 - RNA, 19 nt, Artificial Sequence
  Description of Artificial Sequence: Synthetic oligonucleotide
  Sense strand starting at position 2885 of SEQ ID NO: 1885662
cucguuugauucucacaac

SEQ ID NO: 2358859 - RNA, 19 nt, Artificial Sequence
  Description of Artificial Sequence: Synthetic oligonucleotide
  Antisense strand to SEQ ID NO: 2358858
guugugagaaucaaacgag

SEQ ID NO: 2358860 - RNA, 19 nt, Artificial Sequence
  Description of Artificial Sequence: Synthetic oligonucleotide
  Sense strand starting at position 2899 of SEQ ID NO: 1885662
acaacaguccugugaauua

SEQ ID NO: 2358861 - RNA, 19 nt, Artificial Sequence
  Description of Artificial Sequence: Synthetic oligonucleotide
  Antisense strand to SEQ ID NO: 2358860
uaauucacaggacuguugu

SEQ ID NO: 2358862 - RNA, 19 nt, Artificial Sequence
  Description of Artificial Sequence: Synthetic oligonucleotide
  Sense strand starting at position 3085 of SEQ ID NO: 1885662
gucuaagugccagggauac

SEQ ID NO: 2358863 - RNA, 19 nt, Artificial Sequence
  Description of Artificial Sequence: Synthetic oligonucleotide
  Antisense strand to SEQ ID NO: 2358862
guaucccuggcacuuagac

SEQ ID NO: 2358864 - RNA, 19 nt, Artificial Sequence
  Description of Artificial Sequence: Synthetic oligonucleotide
  Sense strand starting at position 3192 of SEQ ID NO: 1885662
aagccuaaugcaugggaua

SEQ ID NO: 2358865 - RNA, 19 nt, Artificial Sequence
  Description of Artificial Sequence: Synthetic oligonucleotide
  Antisense strand to SEQ ID NO: 2358864
uaucccaugcauuaggcuu

SEQ ID NO: 2358866 - RNA, 19 nt, Artificial Sequence
  Description of Artificial Sequence: Synthetic oligonucleotide
  Sense strand starting at position 3193 of SEQ ID NO: 1885662
agccuaaugcaugggauaa

SEQ ID NO: 2358867 - RNA, 19 nt, Artificial Sequence
  Description of Artificial Sequence: Synthetic oligonucleotide
  Antisense strand to SEQ ID NO: 2358866
uuaucccaugcauuaggcu

SEQ ID NO: 2358868 - RNA, 19 nt, Artificial Sequence
  Description of Artificial Sequence: Synthetic oligonucleotide
  Sense strand starting at position 3286 of SEQ ID NO: 1885662
cggagaugaugauauuuga

SEQ ID NO: 2358869 - RNA, 19 nt, Artificial Sequence
  Description of Artificial Sequence: Synthetic oligonucleotide
  Antisense strand to SEQ ID NO: 2358868
ucaaauaucaucaucuccg

SEQ ID NO: 2358870 - RNA, 19 nt, Artificial Sequence
  Description of Artificial Sequence: Synthetic oligonucleotide
  Sense strand starting at position 3302 of SEQ ID NO: 1885662
ugagcaaagcauuacuagu

SEQ ID NO: 2358871 - RNA, 19 nt, Artificial Sequence
  Description of Artificial Sequence: Synthetic oligonucleotide
  Antisense strand to SEQ ID NO: 2358870
acuaguaaugcuuugcuca

SEQ ID NO: 2358872 - RNA, 19 nt, Artificial Sequence
  Description of Artificial Sequence: Synthetic oligonucleotide
  Sense strand starting at position 3354 of SEQ ID NO: 1885662
gaaguuaagugacuuauaa

SEQ ID NO: 2358873 - RNA, 19 nt, Artificial Sequence
  Description of Artificial Sequence: Synthetic oligonucleotide
  Antisense strand to SEQ ID NO: 2358872
uuauaagucacuuaacuuc

SEQ ID NO: 2358874 - RNA, 19 nt, Artificial Sequence
  Description of Artificial Sequence: Synthetic oligonucleotide
  Sense strand starting at position 3365 of SEQ ID NO: 1885662
acuuauaaguggucacaca

SEQ ID NO: 2358875 - RNA, 19 nt, Artificial Sequence
  Description of Artificial Sequence: Synthetic oligonucleotide
  Antisense strand to SEQ ID NO: 2358874
ugugugaccacuuauaagu

SEQ ID NO: 2358876 - RNA, 19 nt, Artificial Sequence
  Description of Artificial Sequence: Synthetic oligonucleotide
  Sense strand starting at position 3416 of SEQ ID NO: 1885662
ggcagugucgcuccagagu

SEQ ID NO: 2358877 - RNA, 19 nt, Artificial Sequence
  Description of Artificial Sequence: Synthetic oligonucleotide
  Antisense strand to SEQ ID NO: 2358876
acucuggagcgacacugcc

SEQ ID NO: 2358878 - RNA, 19 nt, Artificial Sequence
  Description of Artificial Sequence: Synthetic oligonucleotide
  Sense strand starting at position 276 of SEQ ID NO: 1885663
aaagccaucugagcaguua

SEQ ID NO: 2358879 - RNA, 19 nt, Artificial Sequence
  Description of Artificial Sequence: Synthetic oligonucleotide
  Antisense strand to SEQ ID NO: 2358878
uaacugcucagauggcuuu

SEQ ID NO: 2358880 - RNA, 19 nt, Artificial Sequence
  Description of Artificial Sequence: Synthetic oligonucleotide
  Sense strand starting at position 291 of SEQ ID NO: 1885663
guuaguuguuacucagaag

SEQ ID NO: 2358881 - RNA, 19 nt, Artificial Sequence
  Description of Artificial Sequence: Synthetic oligonucleotide
  Antisense strand to SEQ ID NO: 2358880
cuucugaguaacaacuaac

SEQ ID NO: 2358882 - RNA, 19 nt, Artificial Sequence
  Description of Artificial Sequence: Synthetic oligonucleotide
  Sense strand starting at position 292 of SEQ ID NO: 1885663
uuaguuguuacucagaagu

SEQ ID NO: 2358883 - RNA, 19 nt, Artificial Sequence
  Description of Artificial Sequence: Synthetic oligonucleotide
  Antisense strand to SEQ ID NO: 2358882
acuucugaguaacaacuaa

SEQ ID NO: 2358884 - RNA, 19 nt, Artificial Sequence
  Description of Artificial Sequence: Synthetic oligonucleotide
  Sense strand starting at position 319 of SEQ ID NO: 1885663
agggcaagauucgucaaag

SEQ ID NO: 2358885 - RNA, 19 nt, Artificial Sequence
  Description of Artificial Sequence: Synthetic oligonucleotide
  Antisense strand to SEQ ID NO: 2358884
cuuugacgaaucuugcccu

SEQ ID NO: 2358886 - RNA, 19 nt, Artificial Sequence
  Description of Artificial Sequence: Synthetic oligonucleotide
  Sense strand starting at position 320 of SEQ ID NO: 1885663
gggcaagauucgucaaagg

SEQ ID NO: 2358887 - RNA, 19 nt, Artificial Sequence
  Description of Artificial Sequence: Synthetic oligonucleotide
  Antisense strand to SEQ ID NO: 2358886
ccuuugacgaaucuugccc

SEQ ID NO: 2358888 - RNA, 19 nt, Artificial Sequence
  Description of Artificial Sequence: Synthetic oligonucleotide
  Sense strand starting at position 343 of SEQ ID NO: 1885663
ugagauucucaugggccaa

SEQ ID NO: 2358889 - RNA, 19 nt, Artificial Sequence
  Description of Artificial Sequence: Synthetic oligonucleotide
  Antisense strand to SEQ ID NO: 2358888
uuggcccaugagaaucuca

SEQ ID NO: 2358890 - RNA, 19 nt, Artificial Sequence
  Description of Artificial Sequence: Synthetic oligonucleotide
  Sense strand starting at position 389 of SEQ ID NO: 1885663
ccaggaauccaagggucuu

SEQ ID NO: 2358891 - RNA, 19 nt, Artificial Sequence
  Description of Artificial Sequence: Synthetic oligonucleotide
  Antisense strand to SEQ ID NO: 2358890
aagacccuuggauuccugg

SEQ ID NO: 2358892 - RNA, 19 nt, Artificial Sequence
  Description of Artificial Sequence: Synthetic oligonucleotide
  Sense strand starting at position 395 of SEQ ID NO: 1885663
auccaagggucuuuccauu

SEQ ID NO: 2358893 - RNA, 19 nt, Artificial Sequence
  Description of Artificial Sequence: Synthetic oligonucleotide
  Antisense strand to SEQ ID NO: 2358892
aauggaaagacccuuggau

SEQ ID NO: 2358894 - RNA, 19 nt, Artificial Sequence
  Description of Artificial Sequence: Synthetic oligonucleotide
  Sense strand starting at position 401 of SEQ ID NO: 1885663
gggucuuuccauuggcaag

SEQ ID NO: 2358895 - RNA, 19 nt, Artificial Sequence
  Description of Artificial Sequence: Synthetic oligonucleotide
  Antisense strand to SEQ ID NO: 2358894
cuugccaauggaaagaccc

SEQ ID NO: 2358896 - RNA, 19 nt, Artificial Sequence
  Description of Artificial Sequence: Synthetic oligonucleotide
  Sense strand starting at position 402 of SEQ ID NO: 1885663
ggucuuuccauuggcaaga

SEQ ID NO: 2358897 - RNA, 19 nt, Artificial Sequence
  Description of Artificial Sequence: Synthetic oligonucleotide
  Antisense strand to SEQ ID NO: 2358896
ucuugccaauggaaagacc

SEQ ID NO: 2358898 - RNA, 19 nt, Artificial Sequence
  Description of Artificial Sequence: Synthetic oligonucleotide
  Sense strand starting at position 403 of SEQ ID NO: 1885663
gucuuuccauuggcaagaa

SEQ ID NO: 2358899 - RNA, 19 nt, Artificial Sequence
  Description of Artificial Sequence: Synthetic oligonucleotide
  Antisense strand to SEQ ID NO: 2358898
uucuugccaauggaaagac

SEQ ID NO: 2358900 - RNA, 19 nt, Artificial Sequence
  Description of Artificial Sequence: Synthetic oligonucleotide
  Sense strand starting at position 733 of SEQ ID NO: 1885663
cauggaugcuuugugauaa

SEQ ID NO: 2358901 - RNA, 19 nt, Artificial Sequence
  Description of Artificial Sequence: Synthetic oligonucleotide
  Antisense strand to SEQ ID NO: 2358900
uuaucacaaagcauccaug

SEQ ID NO: 2358902 - RNA, 19 nt, Artificial Sequence
  Description of Artificial Sequence: Synthetic oligonucleotide
  Sense strand starting at position 795 of SEQ ID NO: 1885663
uuaaccuauuguguugaga

SEQ ID NO: 2358903 - RNA, 19 nt, Artificial Sequence
  Description of Artificial Sequence: Synthetic oligonucleotide
  Antisense strand to SEQ ID NO: 2358902
ucucaacacaauagguuaa

SEQ ID NO: 2358904 - RNA, 19 nt, Artificial Sequence
  Description of Artificial Sequence: Synthetic oligonucleotide
  Sense strand starting at position 1153 of SEQ ID NO: 1885663
gccagcaucucuuccagaa

SEQ ID NO: 2358905 - RNA, 19 nt, Artificial Sequence
  Description of Artificial Sequence: Synthetic oligonucleotide
  Antisense strand to SEQ ID NO: 2358904
uucuggaagagaugcuggc

SEQ ID NO: 2358906 - RNA, 19 nt, Artificial Sequence
  Description of Artificial Sequence: Synthetic oligonucleotide
  Sense strand starting at position 1157 of SEQ ID NO: 1885663
gcaucucuuccagaaaguu

SEQ ID NO: 2358907 - RNA, 19 nt, Artificial Sequence
  Description of Artificial Sequence: Synthetic oligonucleotide
  Antisense strand to SEQ ID NO: 2358906
aacuuucuggaagagaugc

SEQ ID NO: 2358908 - RNA, 19 nt, Artificial Sequence
  Description of Artificial Sequence: Synthetic oligonucleotide
  Sense strand starting at position 1165 of SEQ ID NO: 1885663
uccagaaaguucuuggaag

SEQ ID NO: 2358909 - RNA, 19 nt, Artificial Sequence
  Description of Artificial Sequence: Synthetic oligonucleotide
  Antisense strand to SEQ ID NO: 2358908
cuuccaagaacuuucugga

SEQ ID NO: 2358910 - RNA, 19 nt, Artificial Sequence
  Description of Artificial Sequence: Synthetic oligonucleotide
  Sense strand starting at position 1271 of SEQ ID NO: 1885663
ggcuauccuggccaucuaa

SEQ ID NO: 2358911 - RNA, 19 nt, Artificial Sequence
  Description of Artificial Sequence: Synthetic oligonucleotide
  Antisense strand to SEQ ID NO: 2358910
uuagauggccaggauagcc

SEQ ID NO: 2358912 - RNA, 19 nt, Artificial Sequence
  Description of Artificial Sequence: Synthetic oligonucleotide
  Sense strand starting at position 1303 of SEQ ID NO: 1885663
ucagccuuguucccaagaa

SEQ ID NO: 2358913 - RNA, 19 nt, Artificial Sequence
  Description of Artificial Sequence: Synthetic oligonucleotide
  Antisense strand to SEQ ID NO: 2358912
uucuugggaacaaggcuga

SEQ ID NO: 2358914 - RNA, 19 nt, Artificial Sequence
  Description of Artificial Sequence: Synthetic oligonucleotide
  Sense strand starting at position 1442 of SEQ ID NO: 1885663
gccauuuccucugugacua

SEQ ID NO: 2358915 - RNA, 19 nt, Artificial Sequence
  Description of Artificial Sequence: Synthetic oligonucleotide
  Antisense strand to SEQ ID NO: 2358914
uagucacagaggaaauggc

SEQ ID NO: 2358916 - RNA, 19 nt, Artificial Sequence
  Description of Artificial Sequence: Synthetic oligonucleotide
  Sense strand starting at position 1501 of SEQ ID NO: 1885663
ugggaucugcauggugaga

SEQ ID NO: 2358917 - RNA, 19 nt, Artificial Sequence
  Description of Artificial Sequence: Synthetic oligonucleotide
  Antisense strand to SEQ ID NO: 2358916
ucucaccaugcagauccca

SEQ ID NO: 2358918 - RNA, 19 nt, Artificial Sequence
  Description of Artificial Sequence: Synthetic oligonucleotide
  Sense strand starting at position 1621 of SEQ ID NO: 1885663
ucagguauucucuaaggua

SEQ ID NO: 2358919 - RNA, 19 nt, Artificial Sequence
  Description of Artificial Sequence: Synthetic oligonucleotide
  Antisense strand to SEQ ID NO: 2358918
uaccuuagagaauaccuga

SEQ ID NO: 2358920 - RNA, 19 nt, Artificial Sequence
  Description of Artificial Sequence: Synthetic oligonucleotide
  Sense strand starting at position 1636 of SEQ ID NO: 1885663
gguacaacuagucacagua

SEQ ID NO: 2358921 - RNA, 19 nt, Artificial Sequence
  Description of Artificial Sequence: Synthetic oligonucleotide
  Antisense strand to SEQ ID NO: 2358920
uacugugacuaguuguacc

SEQ ID NO: 2358922 - RNA, 19 nt, Artificial Sequence
  Description of Artificial Sequence: Synthetic oligonucleotide
  Sense strand starting at position 1740 of SEQ ID NO: 1885663
agaacacagccuuguaaca

SEQ ID NO: 2358923 - RNA, 19 nt, Artificial Sequence
  Description of Artificial Sequence: Synthetic oligonucleotide
  Antisense strand to SEQ ID NO: 2358922
uguuacaaggcuguguucu

SEQ ID NO: 2358924 - RNA, 19 nt, Artificial Sequence
  Description of Artificial Sequence: Synthetic oligonucleotide
  Sense strand starting at position 1918 of SEQ ID NO: 1885663
agcagcauuugauacugaa

SEQ ID NO: 2358925 - RNA, 19 nt, Artificial Sequence
  Description of Artificial Sequence: Synthetic oligonucleotide
  Antisense strand to SEQ ID NO: 2358924
uucaguaucaaaugcugcu

SEQ ID NO: 2358926 - RNA, 19 nt, Artificial Sequence
  Description of Artificial Sequence: Synthetic oligonucleotide
  Sense strand starting at position 2039 of SEQ ID NO: 1885663
cugugcuugagucaucaga

SEQ ID NO: 2358927 - RNA, 19 nt, Artificial Sequence
  Description of Artificial Sequence: Synthetic oligonucleotide
  Antisense strand to SEQ ID NO: 2358926
ucugaugacucaagcacag

SEQ ID NO: 2358928 - RNA, 19 nt, Artificial Sequence
  Description of Artificial Sequence: Synthetic oligonucleotide
  Sense strand starting at position 2041 of SEQ ID NO: 1885663
gugcuugagucaucagaaa

SEQ ID NO: 2358929 - RNA, 19 nt, Artificial Sequence
  Description of Artificial Sequence: Synthetic oligonucleotide
  Antisense strand to SEQ ID NO: 2358928
uuucugaugacucaagcac

SEQ ID NO: 2358930 - RNA, 19 nt, Artificial Sequence
  Description of Artificial Sequence: Synthetic oligonucleotide
  Sense strand starting at position 2079 of SEQ ID NO: 1885663
acgagcuuccagggaagaa

SEQ ID NO: 2358931 - RNA, 19 nt, Artificial Sequence
  Description of Artificial Sequence: Synthetic oligonucleotide
  Antisense strand to SEQ ID NO: 2358930
uucuucccuggaagcucgu

SEQ ID NO: 2358932 - RNA, 19 nt, Artificial Sequence
  Description of Artificial Sequence: Synthetic oligonucleotide
  Sense strand starting at position 2221 of SEQ ID NO: 1885663
cggucucuuccagaaacau

SEQ ID NO: 2358933 - RNA, 19 nt, Artificial Sequence
  Description of Artificial Sequence: Synthetic oligonucleotide
  Antisense strand to SEQ ID NO: 2358932
auguuucuggaagagaccg

SEQ ID NO: 2358934 - RNA, 19 nt, Artificial Sequence
  Description of Artificial Sequence: Synthetic oligonucleotide
  Sense strand starting at position 2721 of SEQ ID NO: 1885663
gguuucaucccggaaagca

SEQ ID NO: 2358935 - RNA, 19 nt, Artificial Sequence
  Description of Artificial Sequence: Synthetic oligonucleotide
  Antisense strand to SEQ ID NO: 2358934
ugcuuuccgggaugaaacc

SEQ ID NO: 2358936 - RNA, 19 nt, Artificial Sequence
  Description of Artificial Sequence: Synthetic oligonucleotide
  Sense strand starting at position 2737 of SEQ ID NO: 1885663
gcacgaaccuaaguacaau

SEQ ID NO: 2358937 - RNA, 19 nt, Artificial Sequence
  Description of Artificial Sequence: Synthetic oligonucleotide
  Antisense strand to SEQ ID NO: 2358936
auuguacuuagguucgugc

SEQ ID NO: 2358938 - RNA, 19 nt, Artificial Sequence
  Description of Artificial Sequence: Synthetic oligonucleotide
  Sense strand starting at position 2985 of SEQ ID NO: 1885663
gugguuucaguccaggaau

SEQ ID NO: 2358939 - RNA, 19 nt, Artificial Sequence
  Description of Artificial Sequence: Synthetic oligonucleotide
  Antisense strand to SEQ ID NO: 2358938
auuccuggacugaaaccac

SEQ ID NO: 2358940 - RNA, 19 nt, Artificial Sequence
  Description of Artificial Sequence: Synthetic oligonucleotide
  Sense strand starting at position 2987 of SEQ ID NO: 1885663
gguuucaguccaggaaugu

SEQ ID NO: 2358941 - RNA, 19 nt, Artificial Sequence
  Description of Artificial Sequence: Synthetic oligonucleotide
  Antisense strand to SEQ ID NO: 2358940
acauuccuggacugaaacc

SEQ ID NO: 2358942 - RNA, 19 nt, Artificial Sequence
  Description of Artificial Sequence: Synthetic oligonucleotide
  Sense strand starting at position 2996 of SEQ ID NO: 1885663
ccaggaauguuuccaagca

SEQ ID NO: 2358943 - RNA, 19 nt, Artificial Sequence
  Description of Artificial Sequence: Synthetic oligonucleotide
  Antisense strand to SEQ ID NO: 2358942
ugcuuggaaacauuccugg

SEQ ID NO: 2358944 - RNA, 19 nt, Artificial Sequence
  Description of Artificial Sequence: Synthetic oligonucleotide
  Sense strand starting at position 3227 of SEQ ID NO: 1885663
acgcaugucccaggacaga

SEQ ID NO: 2358945 - RNA, 19 nt, Artificial Sequence
  Description of Artificial Sequence: Synthetic oligonucleotide
  Antisense strand to SEQ ID NO: 2358944
ucuguccugggacaugcgu

SEQ ID NO: 2358946 - RNA, 19 nt, Artificial Sequence
  Description of Artificial Sequence: Synthetic oligonucleotide
  Sense strand starting at position 3648 of SEQ ID NO: 1885663
augucucuucccuaaugga

SEQ ID NO: 2358947 - RNA, 19 nt, Artificial Sequence
  Description of Artificial Sequence: Synthetic oligonucleotide
  Antisense strand to SEQ ID NO: 2358946
uccauuagggaagagacau

SEQ ID NO: 2358948 - RNA, 19 nt, Artificial Sequence
  Description of Artificial Sequence: Synthetic oligonucleotide
  Sense strand starting at position 3772 of SEQ ID NO: 1885663
uagggauucuaugcuuuga

SEQ ID NO: 2358949 - RNA, 19 nt, Artificial Sequence
  Description of Artificial Sequence: Synthetic oligonucleotide
  Antisense strand to SEQ ID NO: 2358948
ucaaagcauagaaucccua

SEQ ID NO: 2358950 - RNA, 19 nt, Artificial Sequence
  Description of Artificial Sequence: Synthetic oligonucleotide
  Sense strand starting at position 3774 of SEQ ID NO: 1885663
gggauucuaugcuuugaau

SEQ ID NO: 2358951 - RNA, 19 nt, Artificial Sequence
  Description of Artificial Sequence: Synthetic oligonucleotide
  Antisense strand to SEQ ID NO: 2358950
auucaaagcauagaauccc

SEQ ID NO: 2358952 - RNA, 19 nt, Artificial Sequence
  Description of Artificial Sequence: Synthetic oligonucleotide
  Sense strand starting at position 3875 of SEQ ID NO: 1885663
ccuaaugaccaaugucaug

SEQ ID NO: 2358953 - RNA, 19 nt, Artificial Sequence
  Description of Artificial Sequence: Synthetic oligonucleotide
  Antisense strand to SEQ ID NO: 2358952
caugacauuggucauuagg

SEQ ID NO: 2358954 - RNA, 19 nt, Artificial Sequence
  Description of Artificial Sequence: Synthetic oligonucleotide
  Sense strand starting at position 3962 of SEQ ID NO: 1885663
ugaagcuuguguccagaaa

SEQ ID NO: 2358955 - RNA, 19 nt, Artificial Sequence
  Description of Artificial Sequence: Synthetic oligonucleotide
  Antisense strand to SEQ ID NO: 2358954
uuucuggacacaagcuuca

SEQ ID NO: 2358956 - RNA, 19 nt, Artificial Sequence
  Description of Artificial Sequence: Synthetic oligonucleotide
  Sense strand starting at position 3963 of SEQ ID NO: 1885663
gaagcuuguguccagaaag

SEQ ID NO: 2358957 - RNA, 19 nt, Artificial Sequence
  Description of Artificial Sequence: Synthetic oligonucleotide
  Antisense strand to SEQ ID NO: 2358956
cuuucuggacacaagcuuc

SEQ ID NO: 2358958 - RNA, 19 nt, Artificial Sequence
  Description of Artificial Sequence: Synthetic oligonucleotide
  Sense strand starting at position 20 of SEQ ID NO: 1885664
cauggaugcuuugugauaa

SEQ ID NO: 2358959 - RNA, 19 nt, Artificial Sequence
  Description of Artificial Sequence: Synthetic oligonucleotide
  Antisense strand to SEQ ID NO: 2358958
uuaucacaaagcauccaug

SEQ ID NO: 2358960 - RNA, 19 nt, Artificial Sequence
  Description of Artificial Sequence: Synthetic oligonucleotide
  Sense strand starting at position 82 of SEQ ID NO: 1885664
uuaaccuauuguguugaga

SEQ ID NO: 2358961 - RNA, 19 nt, Artificial Sequence
  Description of Artificial Sequence: Synthetic oligonucleotide
  Antisense strand to SEQ ID NO: 2358960
ucucaacacaauagguuaa

SEQ ID NO: 2358962 - RNA, 19 nt, Artificial Sequence
  Description of Artificial Sequence: Synthetic oligonucleotide
  Sense strand starting at position 440 of SEQ ID NO: 1885664
gccagcaucucuuccagaa

SEQ ID NO: 2358963 - RNA, 19 nt, Artificial Sequence
  Description of Artificial Sequence: Synthetic oligonucleotide
  Antisense strand to SEQ ID NO: 2358962
uucuggaagagaugcuggc

SEQ ID NO: 2358964 - RNA, 19 nt, Artificial Sequence
  Description of Artificial Sequence: Synthetic oligonucleotide
  Sense strand starting at position 444 of SEQ ID NO: 1885664
gcaucucuuccagaaaguu

SEQ ID NO: 2358965 - RNA, 19 nt, Artificial Sequence
  Description of Artificial Sequence: Synthetic oligonucleotide
  Antisense strand to SEQ ID NO: 2358964
aacuuucuggaagagaugc

SEQ ID NO: 2358966 - RNA, 19 nt, Artificial Sequence
  Description of Artificial Sequence: Synthetic oligonucleotide
  Sense strand starting at position 452 of SEQ ID NO: 1885664
uccagaaaguucuuggaag

SEQ ID NO: 2358967 - RNA, 19 nt, Artificial Sequence
  Description of Artificial Sequence: Synthetic oligonucleotide
  Antisense strand to SEQ ID NO: 2358966
cuuccaagaacuuucugga

SEQ ID NO: 2358968 - RNA, 19 nt, Artificial Sequence
  Description of Artificial Sequence: Synthetic oligonucleotide
  Sense strand starting at position 557 of SEQ ID NO: 1885664
gggcuauccuggccaucua

SEQ ID NO: 2358969 - RNA, 19 nt, Artificial Sequence
  Description of Artificial Sequence: Synthetic oligonucleotide
  Antisense strand to SEQ ID NO: 2358968
uagauggccaggauagccc

SEQ ID NO: 2358970 - RNA, 19 nt, Artificial Sequence
  Description of Artificial Sequence: Synthetic oligonucleotide
  Sense strand starting at position 558 of SEQ ID NO: 1885664
ggcuauccuggccaucuaa

SEQ ID NO: 2358971 - RNA, 19 nt, Artificial Sequence
  Description of Artificial Sequence: Synthetic oligonucleotide
  Antisense strand to SEQ ID NO: 2358970
uuagauggccaggauagcc

SEQ ID NO: 2358972 - RNA, 19 nt, Artificial Sequence
  Description of Artificial Sequence: Synthetic oligonucleotide
  Sense strand starting at position 587 of SEQ ID NO: 1885664
gagucagccuuguucccaa

SEQ ID NO: 2358973 - RNA, 19 nt, Artificial Sequence
  Description of Artificial Sequence: Synthetic oligonucleotide
  Antisense strand to SEQ ID NO: 2358972
uugggaacaaggcugacuc

SEQ ID NO: 2358974 - RNA, 19 nt, Artificial Sequence
  Description of Artificial Sequence: Synthetic oligonucleotide
  Sense strand starting at position 590 of SEQ ID NO: 1885664
ucagccuuguucccaagaa

SEQ ID NO: 2358975 - RNA, 19 nt, Artificial Sequence
  Description of Artificial Sequence: Synthetic oligonucleotide
  Antisense strand to SEQ ID NO: 2358974
uucuugggaacaaggcuga

SEQ ID NO: 2358976 - RNA, 19 nt, Artificial Sequence
  Description of Artificial Sequence: Synthetic oligonucleotide
  Sense strand starting at position 729 of SEQ ID NO: 1885664
gccauuuccucugugacua

SEQ ID NO: 2358977 - RNA, 19 nt, Artificial Sequence
  Description of Artificial Sequence: Synthetic oligonucleotide
  Antisense strand to SEQ ID NO: 2358976
uagucacagaggaaauggc

SEQ ID NO: 2358978 - RNA, 19 nt, Artificial Sequence
  Description of Artificial Sequence: Synthetic oligonucleotide
  Sense strand starting at position 733 of SEQ ID NO: 1885664
uuuccucugugacuaaguu

SEQ ID NO: 2358979 - RNA, 19 nt, Artificial Sequence
  Description of Artificial Sequence: Synthetic oligonucleotide
  Antisense strand to SEQ ID NO: 2358978
aacuuagucacagaggaaa

SEQ ID NO: 2358980 - RNA, 19 nt, Artificial Sequence
  Description of Artificial Sequence: Synthetic oligonucleotide
  Sense strand starting at position 788 of SEQ ID NO: 1885664
ugggaucugcauggugaga

SEQ ID NO: 2358981 - RNA, 19 nt, Artificial Sequence
  Description of Artificial Sequence: Synthetic oligonucleotide
  Antisense strand to SEQ ID NO: 2358980
ucucaccaugcagauccca

SEQ ID NO: 2358982 - RNA, 19 nt, Artificial Sequence
  Description of Artificial Sequence: Synthetic oligonucleotide
  Sense strand starting at position 908 of SEQ ID NO: 1885664
ucagguauucucuaaggua

SEQ ID NO: 2358983 - RNA, 19 nt, Artificial Sequence
  Description of Artificial Sequence: Synthetic oligonucleotide
  Antisense strand to SEQ ID NO: 2358982
uaccuuagagaauaccuga

SEQ ID NO: 2358984 - RNA, 19 nt, Artificial Sequence
  Description of Artificial Sequence: Synthetic oligonucleotide
  Sense strand starting at position 923 of SEQ ID NO: 1885664
gguacaacuagucacagua

SEQ ID NO: 2358985 - RNA, 19 nt, Artificial Sequence
  Description of Artificial Sequence: Synthetic oligonucleotide
  Antisense strand to SEQ ID NO: 2358984
uacugugacuaguuguacc

SEQ ID NO: 2358986 - RNA, 19 nt, Artificial Sequence
  Description of Artificial Sequence: Synthetic oligonucleotide
  Sense strand starting at position 1027 of SEQ ID NO: 1885664
agaacacagccuuguaaca

SEQ ID NO: 2358987 - RNA, 19 nt, Artificial Sequence
  Description of Artificial Sequence: Synthetic oligonucleotide
  Antisense strand to SEQ ID NO: 2358986
uguuacaaggcuguguucu

SEQ ID NO: 2358988 - RNA, 19 nt, Artificial Sequence
  Description of Artificial Sequence: Synthetic oligonucleotide
  Sense strand starting at position 1324 of SEQ ID NO: 1885664
accugugcuugagucauca

SEQ ID NO: 2358989 - RNA, 19 nt, Artificial Sequence
  Description of Artificial Sequence: Synthetic oligonucleotide
  Antisense strand to SEQ ID NO: 2358988
ugaugacucaagcacaggu

SEQ ID NO: 2358990 - RNA, 19 nt, Artificial Sequence
  Description of Artificial Sequence: Synthetic oligonucleotide
  Sense strand starting at position 1326 of SEQ ID NO: 1885664
cugugcuugagucaucaga

SEQ ID NO: 2358991 - RNA, 19 nt, Artificial Sequence
  Description of Artificial Sequence: Synthetic oligonucleotide
  Antisense strand to SEQ ID NO: 2358990
ucugaugacucaagcacag

SEQ ID NO: 2358992 - RNA, 19 nt, Artificial Sequence
  Description of Artificial Sequence: Synthetic oligonucleotide
  Sense strand starting at position 1328 of SEQ ID NO: 1885664
gugcuugagucaucagaaa

SEQ ID NO: 2358993 - RNA, 19 nt, Artificial Sequence
  Description of Artificial Sequence: Synthetic oligonucleotide
  Antisense strand to SEQ ID NO: 2358992
uuucugaugacucaagcac

SEQ ID NO: 2358994 - RNA, 19 nt, Artificial Sequence
  Description of Artificial Sequence: Synthetic oligonucleotide
  Sense strand starting at position 1366 of SEQ ID NO: 1885664
acgagcuuccagggaagaa

SEQ ID NO: 2358995 - RNA, 19 nt, Artificial Sequence
  Description of Artificial Sequence: Synthetic oligonucleotide
  Antisense strand to SEQ ID NO: 2358994
uucuucccuggaagcucgu

SEQ ID NO: 2358996 - RNA, 19 nt, Artificial Sequence
  Description of Artificial Sequence: Synthetic oligonucleotide
  Sense strand starting at position 1508 of SEQ ID NO: 1885664
cggucucuuccagaaacau

SEQ ID NO: 2358997 - RNA, 19 nt, Artificial Sequence
  Description of Artificial Sequence: Synthetic oligonucleotide
  Antisense strand to SEQ ID NO: 2358996
auguuucuggaagagaccg

SEQ ID NO: 2358998 - RNA, 19 nt, Artificial Sequence
  Description of Artificial Sequence: Synthetic oligonucleotide
  Sense strand starting at position 1912 of SEQ ID NO: 1885664
ggcagcauuugauacugaa

SEQ ID NO: 2358999 - RNA, 19 nt, Artificial Sequence
  Description of Artificial Sequence: Synthetic oligonucleotide
  Antisense strand to SEQ ID NO: 2358998
uucaguaucaaaugcugcc

SEQ ID NO: 2359000 - RNA, 19 nt, Artificial Sequence
  Description of Artificial Sequence: Synthetic oligonucleotide
  Sense strand starting at position 2007 of SEQ ID NO: 1885664
agguuucaucccggaaagc

SEQ ID NO: 2359001 - RNA, 19 nt, Artificial Sequence
  Description of Artificial Sequence: Synthetic oligonucleotide
  Antisense strand to SEQ ID NO: 2359000
gcuuuccgggaugaaaccu

SEQ ID NO: 2359002 - RNA, 19 nt, Artificial Sequence
  Description of Artificial Sequence: Synthetic oligonucleotide
  Sense strand starting at position 2008 of SEQ ID NO: 1885664
gguuucaucccggaaagca

SEQ ID NO: 2359003 - RNA, 19 nt, Artificial Sequence
  Description of Artificial Sequence: Synthetic oligonucleotide
  Antisense strand to SEQ ID NO: 2359002
ugcuuuccgggaugaaacc

SEQ ID NO: 2359004 - RNA, 19 nt, Artificial Sequence
  Description of Artificial Sequence: Synthetic oligonucleotide
  Sense strand starting at position 2024 of SEQ ID NO: 1885664
gcacgaaccuaaguacaau

SEQ ID NO: 2359005 - RNA, 19 nt, Artificial Sequence
  Description of Artificial Sequence: Synthetic oligonucleotide
  Antisense strand to SEQ ID NO: 2359004
auuguacuuagguucgugc

SEQ ID NO: 2359006 - RNA, 19 nt, Artificial Sequence
  Description of Artificial Sequence: Synthetic oligonucleotide
  Sense strand starting at position 2163 of SEQ ID NO: 1885664
gugggugguccgcagacau

SEQ ID NO: 2359007 - RNA, 19 nt, Artificial Sequence
  Description of Artificial Sequence: Synthetic oligonucleotide
  Antisense strand to SEQ ID NO: 2359006
augucugcggaccacccac

SEQ ID NO: 2359008 - RNA, 19 nt, Artificial Sequence
  Description of Artificial Sequence: Synthetic oligonucleotide
  Sense strand starting at position 2264 of SEQ ID NO: 1885664
cccugauggugguuucagu

SEQ ID NO: 2359009 - RNA, 19 nt, Artificial Sequence
  Description of Artificial Sequence: Synthetic oligonucleotide
  Antisense strand to SEQ ID NO: 2359008
acugaaaccaccaucaggg

SEQ ID NO: 2359010 - RNA, 19 nt, Artificial Sequence
  Description of Artificial Sequence: Synthetic oligonucleotide
  Sense strand starting at position 2272 of SEQ ID NO: 1885664
gugguuucaguccaggaau

SEQ ID NO: 2359011 - RNA, 19 nt, Artificial Sequence
  Description of Artificial Sequence: Synthetic oligonucleotide
  Antisense strand to SEQ ID NO: 2359010
auuccuggacugaaaccac

SEQ ID NO: 2359012 - RNA, 19 nt, Artificial Sequence
  Description of Artificial Sequence: Synthetic oligonucleotide
  Sense strand starting at position 2274 of SEQ ID NO: 1885664
gguuucaguccaggaaugu

SEQ ID NO: 2359013 - RNA, 19 nt, Artificial Sequence
  Description of Artificial Sequence: Synthetic oligonucleotide
  Antisense strand to SEQ ID NO: 2359012
acauuccuggacugaaacc

SEQ ID NO: 2359014 - RNA, 19 nt, Artificial Sequence
  Description of Artificial Sequence: Synthetic oligonucleotide
  Sense strand starting at position 2283 of SEQ ID NO: 1885664
ccaggaauguuuccaagca

SEQ ID NO: 2359015 - RNA, 19 nt, Artificial Sequence
  Description of Artificial Sequence: Synthetic oligonucleotide
  Antisense strand to SEQ ID NO: 2359014
ugcuuggaaacauuccugg

SEQ ID NO: 2359016 - RNA, 19 nt, Artificial Sequence
  Description of Artificial Sequence: Synthetic oligonucleotide
  Sense strand starting at position 2298 of SEQ ID NO: 1885664
agcagcauuugauacugaa

SEQ ID NO: 2359017 - RNA, 19 nt, Artificial Sequence
  Description of Artificial Sequence: Synthetic oligonucleotide
  Antisense strand to SEQ ID NO: 2359016
uucaguaucaaaugcugcu

SEQ ID NO: 2359018 - RNA, 19 nt, Artificial Sequence
  Description of Artificial Sequence: Synthetic oligonucleotide
  Sense strand starting at position 2514 of SEQ ID NO: 1885664
acgcaugucccaggacaga

SEQ ID NO: 2359019 - RNA, 19 nt, Artificial Sequence
  Description of Artificial Sequence: Synthetic oligonucleotide
  Antisense strand to SEQ ID NO: 2359018
ucuguccugggacaugcgu

SEQ ID NO: 2359020 - RNA, 19 nt, Artificial Sequence
  Description of Artificial Sequence: Synthetic oligonucleotide
  Sense strand starting at position 2935 of SEQ ID NO: 1885664
augucucuucccuaaugga

SEQ ID NO: 2359021 - RNA, 19 nt, Artificial Sequence
  Description of Artificial Sequence: Synthetic oligonucleotide
  Antisense strand to SEQ ID NO: 2359020
uccauuagggaagagacau

SEQ ID NO: 2359022 - RNA, 19 nt, Artificial Sequence
  Description of Artificial Sequence: Synthetic oligonucleotide
  Sense strand starting at position 2964 of SEQ ID NO: 1885664
ucaagagcguuuccaaagu

SEQ ID NO: 2359023 - RNA, 19 nt, Artificial Sequence
  Description of Artificial Sequence: Synthetic oligonucleotide
  Antisense strand to SEQ ID NO: 2359022
acuuuggaaacgcucuuga

SEQ ID NO: 2359024 - RNA, 19 nt, Artificial Sequence
  Description of Artificial Sequence: Synthetic oligonucleotide
  Sense strand starting at position 3059 of SEQ ID NO: 1885664
uagggauucuaugcuuuga

SEQ ID NO: 2359025 - RNA, 19 nt, Artificial Sequence
  Description of Artificial Sequence: Synthetic oligonucleotide
  Antisense strand to SEQ ID NO: 2359024
ucaaagcauagaaucccua

SEQ ID NO: 2359026 - RNA, 19 nt, Artificial Sequence
  Description of Artificial Sequence: Synthetic oligonucleotide
  Sense strand starting at position 3061 of SEQ ID NO: 1885664
gggauucuaugcuuugaau

SEQ ID NO: 2359027 - RNA, 19 nt, Artificial Sequence
  Description of Artificial Sequence: Synthetic oligonucleotide
  Antisense strand to SEQ ID NO: 2359026
auucaaagcauagaauccc

SEQ ID NO: 2359028 - RNA, 19 nt, Artificial Sequence
  Description of Artificial Sequence: Synthetic oligonucleotide
  Sense strand starting at position 3112 of SEQ ID NO: 1885664
ccugucagguuccuaaagu

SEQ ID NO: 2359029 - RNA, 19 nt, Artificial Sequence
  Description of Artificial Sequence: Synthetic oligonucleotide
  Antisense strand to SEQ ID NO: 2359028
acuuuaggaaccugacagg

SEQ ID NO: 2359030 - RNA, 19 nt, Artificial Sequence
  Description of Artificial Sequence: Synthetic oligonucleotide
  Sense strand starting at position 3162 of SEQ ID NO: 1885664
ccuaaugaccaaugucaug

SEQ ID NO: 2359031 - RNA, 19 nt, Artificial Sequence
  Description of Artificial Sequence: Synthetic oligonucleotide
  Antisense strand to SEQ ID NO: 2359030
caugacauuggucauuagg

SEQ ID NO: 2359032 - RNA, 19 nt, Artificial Sequence
  Description of Artificial Sequence: Synthetic oligonucleotide
  Sense strand starting at position 3249 of SEQ ID NO: 1885664
ugaagcuuguguccagaaa

SEQ ID NO: 2359033 - RNA, 19 nt, Artificial Sequence
  Description of Artificial Sequence: Synthetic oligonucleotide
  Antisense strand to SEQ ID NO: 2359032
uuucuggacacaagcuuca

SEQ ID NO: 2359034 - RNA, 19 nt, Artificial Sequence
  Description of Artificial Sequence: Synthetic oligonucleotide
  Sense strand starting at position 3250 of SEQ ID NO: 1885664
gaagcuuguguccagaaag

SEQ ID NO: 2359035 - RNA, 19 nt, Artificial Sequence
  Description of Artificial Sequence: Synthetic oligonucleotide
  Antisense strand to SEQ ID NO: 2359034
cuuucuggacacaagcuuc

SEQ ID NO: 2359036 - RNA, 19 nt, Artificial Sequence
  Description of Artificial Sequence: Synthetic oligonucleotide
  Sense strand starting at position 3942 of SEQ ID NO: 1885664
gaugcagaggcuuacuaaa

SEQ ID NO: 2359037 - RNA, 19 nt, Artificial Sequence
  Description of Artificial Sequence: Synthetic oligonucleotide
  Antisense strand to SEQ ID NO: 2359036
uuuaguaagccucugcauc

SEQ ID NO: 2359038 - RNA, 19 nt, Artificial Sequence
  Description of Artificial Sequence: Synthetic oligonucleotide
  Sense strand starting at position 43 of SEQ ID NO: 1885665
ccaggaauccaagggucuu

SEQ ID NO: 2359039 - RNA, 19 nt, Artificial Sequence
  Description of Artificial Sequence: Synthetic oligonucleotide
  Antisense strand to SEQ ID NO: 2359038
aagacccuuggauuccugg

SEQ ID NO: 2359040 - RNA, 19 nt, Artificial Sequence
  Description of Artificial Sequence: Synthetic oligonucleotide
  Sense strand starting at position 49 of SEQ ID NO: 1885665
auccaagggucuuuccauu

SEQ ID NO: 2359041 - RNA, 19 nt, Artificial Sequence
  Description of Artificial Sequence: Synthetic oligonucleotide
  Antisense strand to SEQ ID NO: 2359040
aauggaaagacccuuggau

SEQ ID NO: 2359042 - RNA, 19 nt, Artificial Sequence
  Description of Artificial Sequence: Synthetic oligonucleotide
  Sense strand starting at position 55 of SEQ ID NO: 1885665
gggucuuuccauuggcaag

SEQ ID NO: 2359043 - RNA, 19 nt, Artificial Sequence
  Description of Artificial Sequence: Synthetic oligonucleotide
  Antisense strand to SEQ ID NO: 2359042
cuugccaauggaaagaccc

SEQ ID NO: 2359044 - RNA, 19 nt, Artificial Sequence
  Description of Artificial Sequence: Synthetic oligonucleotide
  Sense strand starting at position 56 of SEQ ID NO: 1885665
ggucuuuccauuggcaaga

SEQ ID NO: 2359045 - RNA, 19 nt, Artificial Sequence
  Description of Artificial Sequence: Synthetic oligonucleotide
  Antisense strand to SEQ ID NO: 2359044
ucuugccaauggaaagacc

SEQ ID NO: 2359046 - RNA, 19 nt, Artificial Sequence
  Description of Artificial Sequence: Synthetic oligonucleotide
  Sense strand starting at position 57 of SEQ ID NO: 1885665
gucuuuccauuggcaagaa

SEQ ID NO: 2359047 - RNA, 19 nt, Artificial Sequence
  Description of Artificial Sequence: Synthetic oligonucleotide
  Antisense strand to SEQ ID NO: 2359046
uucuugccaauggaaagac

SEQ ID NO: 2359048 - RNA, 19 nt, Artificial Sequence
  Description of Artificial Sequence: Synthetic oligonucleotide
  Sense strand starting at position 387 of SEQ ID NO: 1885665
cauggaugcuuugugauaa

SEQ ID NO: 2359049 - RNA, 19 nt, Artificial Sequence
  Description of Artificial Sequence: Synthetic oligonucleotide
  Antisense strand to SEQ ID NO: 2359048
uuaucacaaagcauccaug

SEQ ID NO: 2359050 - RNA, 19 nt, Artificial Sequence
  Description of Artificial Sequence: Synthetic oligonucleotide
  Sense strand starting at position 449 of SEQ ID NO: 1885665
uuaaccuauuguguugaga

SEQ ID NO: 2359051 - RNA, 19 nt, Artificial Sequence
  Description of Artificial Sequence: Synthetic oligonucleotide
  Antisense strand to SEQ ID NO: 2359050
ucucaacacaauagguuaa

SEQ ID NO: 2359052 - RNA, 19 nt, Artificial Sequence
  Description of Artificial Sequence: Synthetic oligonucleotide
  Sense strand starting at position 807 of SEQ ID NO: 1885665
gccagcaucucuuccagaa

SEQ ID NO: 2359053 - RNA, 19 nt, Artificial Sequence
  Description of Artificial Sequence: Synthetic oligonucleotide
  Antisense strand to SEQ ID NO: 2359052
uucuggaagagaugcuggc

SEQ ID NO: 2359054 - RNA, 19 nt, Artificial Sequence
  Description of Artificial Sequence: Synthetic oligonucleotide
  Sense strand starting at position 811 of SEQ ID NO: 1885665
gcaucucuuccagaaaguu

SEQ ID NO: 2359055 - RNA, 19 nt, Artificial Sequence
  Description of Artificial Sequence: Synthetic oligonucleotide
  Antisense strand to SEQ ID NO: 2359054
aacuuucuggaagagaugc

SEQ ID NO: 2359056 - RNA, 19 nt, Artificial Sequence
  Description of Artificial Sequence: Synthetic oligonucleotide
  Sense strand starting at position 819 of SEQ ID NO: 1885665
uccagaaaguucuuggaag

SEQ ID NO: 2359057 - RNA, 19 nt, Artificial Sequence
  Description of Artificial Sequence: Synthetic oligonucleotide
  Antisense strand to SEQ ID NO: 2359056
cuuccaagaacuuucugga

SEQ ID NO: 2359058 - RNA, 19 nt, Artificial Sequence
  Description of Artificial Sequence: Synthetic oligonucleotide
  Sense strand starting at position 924 of SEQ ID NO: 1885665
gggcuauccuggccaucua

SEQ ID NO: 2359059 - RNA, 19 nt, Artificial Sequence
  Description of Artificial Sequence: Synthetic oligonucleotide
  Antisense strand to SEQ ID NO: 2359058
uagauggccaggauagccc

SEQ ID NO: 2359060 - RNA, 19 nt, Artificial Sequence
  Description of Artificial Sequence: Synthetic oligonucleotide
  Sense strand starting at position 925 of SEQ ID NO: 1885665
ggcuauccuggccaucuaa

SEQ ID NO: 2359061 - RNA, 19 nt, Artificial Sequence
  Description of Artificial Sequence: Synthetic oligonucleotide
  Antisense strand to SEQ ID NO: 2359060
uuagauggccaggauagcc

SEQ ID NO: 2359062 - RNA, 19 nt, Artificial Sequence
  Description of Artificial Sequence: Synthetic oligonucleotide
  Sense strand starting at position 957 of SEQ ID NO: 1885665
ucagccuuguucccaagaa

SEQ ID NO: 2359063 - RNA, 19 nt, Artificial Sequence
  Description of Artificial Sequence: Synthetic oligonucleotide
  Antisense strand to SEQ ID NO: 2359062
uucuugggaacaaggcuga

SEQ ID NO: 2359064 - RNA, 19 nt, Artificial Sequence
  Description of Artificial Sequence: Synthetic oligonucleotide
  Sense strand starting at position 1096 of SEQ ID NO: 1885665
gccauuuccucugugacua

SEQ ID NO: 2359065 - RNA, 19 nt, Artificial Sequence
  Description of Artificial Sequence: Synthetic oligonucleotide
  Antisense strand to SEQ ID NO: 2359064
uagucacagaggaaauggc

SEQ ID NO: 2359066 - RNA, 19 nt, Artificial Sequence
  Description of Artificial Sequence: Synthetic oligonucleotide
  Sense strand starting at position 1100 of SEQ ID NO: 1885665
uuuccucugugacuaaguu

SEQ ID NO: 2359067 - RNA, 19 nt, Artificial Sequence
  Description of Artificial Sequence: Synthetic oligonucleotide
  Antisense strand to SEQ ID NO: 2359066
aacuuagucacagaggaaa

SEQ ID NO: 2359068 - RNA, 19 nt, Artificial Sequence
  Description of Artificial Sequence: Synthetic oligonucleotide
  Sense strand starting at position 1155 of SEQ ID NO: 1885665
ugggaucugcauggugaga

SEQ ID NO: 2359069 - RNA, 19 nt, Artificial Sequence
  Description of Artificial Sequence: Synthetic oligonucleotide
  Antisense strand to SEQ ID NO: 2359068
ucucaccaugcagauccca

SEQ ID NO: 2359070 - RNA, 19 nt, Artificial Sequence
  Description of Artificial Sequence: Synthetic oligonucleotide
  Sense strand starting at position 1275 of SEQ ID NO: 1885665
ucagguauucucuaaggua

SEQ ID NO: 2359071 - RNA, 19 nt, Artificial Sequence
  Description of Artificial Sequence: Synthetic oligonucleotide
  Antisense strand to SEQ ID NO: 2359070
uaccuuagagaauaccuga

SEQ ID NO: 2359072 - RNA, 19 nt, Artificial Sequence
  Description of Artificial Sequence: Synthetic oligonucleotide
  Sense strand starting at position 1290 of SEQ ID NO: 1885665
gguacaacuagucacagua

SEQ ID NO: 2359073 - RNA, 19 nt, Artificial Sequence
  Description of Artificial Sequence: Synthetic oligonucleotide
  Antisense strand to SEQ ID NO: 2359072
uacugugacuaguuguacc

SEQ ID NO: 2359074 - RNA, 19 nt, Artificial Sequence
  Description of Artificial Sequence: Synthetic oligonucleotide
  Sense strand starting at position 1394 of SEQ ID NO: 1885665
agaacacagccuuguaaca

SEQ ID NO: 2359075 - RNA, 19 nt, Artificial Sequence
  Description of Artificial Sequence: Synthetic oligonucleotide
  Antisense strand to SEQ ID NO: 2359074
uguuacaaggcuguguucu

SEQ ID NO: 2359076 - RNA, 19 nt, Artificial Sequence
  Description of Artificial Sequence: Synthetic oligonucleotide
  Sense strand starting at position 1693 of SEQ ID NO: 1885665
cugugcuugagucaucaga

SEQ ID NO: 2359077 - RNA, 19 nt, Artificial Sequence
  Description of Artificial Sequence: Synthetic oligonucleotide
  Antisense strand to SEQ ID NO: 2359076
ucugaugacucaagcacag

SEQ ID NO: 2359078 - RNA, 19 nt, Artificial Sequence
  Description of Artificial Sequence: Synthetic oligonucleotide
  Sense strand starting at position 1695 of SEQ ID NO: 1885665
gugcuugagucaucagaaa

SEQ ID NO: 2359079 - RNA, 19 nt, Artificial Sequence
  Description of Artificial Sequence: Synthetic oligonucleotide
  Antisense strand to SEQ ID NO: 2359078
uuucugaugacucaagcac

SEQ ID NO: 2359080 - RNA, 19 nt, Artificial Sequence
  Description of Artificial Sequence: Synthetic oligonucleotide
  Sense strand starting at position 1733 of SEQ ID NO: 1885665
acgagcuuccagggaagaa

SEQ ID NO: 2359081 - RNA, 19 nt, Artificial Sequence
  Description of Artificial Sequence: Synthetic oligonucleotide
  Antisense strand to SEQ ID NO: 2359080
uucuucccuggaagcucgu

SEQ ID NO: 2359082 - RNA, 19 nt, Artificial Sequence
  Description of Artificial Sequence: Synthetic oligonucleotide
  Sense strand starting at position 1875 of SEQ ID NO: 1885665
cggucucuuccagaaacau

SEQ ID NO: 2359083 - RNA, 19 nt, Artificial Sequence
  Description of Artificial Sequence: Synthetic oligonucleotide
  Antisense strand to SEQ ID NO: 2359082
auguuucuggaagagaccg

SEQ ID NO: 2359084 - RNA, 19 nt, Artificial Sequence
  Description of Artificial Sequence: Synthetic oligonucleotide
  Sense strand starting at position 1900 of SEQ ID NO: 1885665
agcagcauuugauacugaa

SEQ ID NO: 2359085 - RNA, 19 nt, Artificial Sequence
  Description of Artificial Sequence: Synthetic oligonucleotide
  Antisense strand to SEQ ID NO: 2359084
uucaguaucaaaugcugcu

SEQ ID NO: 2359086 - RNA, 19 nt, Artificial Sequence
  Description of Artificial Sequence: Synthetic oligonucleotide
  Sense strand starting at position 2279 of SEQ ID NO: 1885665
ggcagcauuugauacugaa

SEQ ID NO: 2359087 - RNA, 19 nt, Artificial Sequence
  Description of Artificial Sequence: Synthetic oligonucleotide
  Antisense strand to SEQ ID NO: 2359086
uucaguaucaaaugcugcc

SEQ ID NO: 2359088 - RNA, 19 nt, Artificial Sequence
  Description of Artificial Sequence: Synthetic oligonucleotide
  Sense strand starting at position 2374 of SEQ ID NO: 1885665
agguuucaucccggaaagc

SEQ ID NO: 2359089 - RNA, 19 nt, Artificial Sequence
  Description of Artificial Sequence: Synthetic oligonucleotide
  Antisense strand to SEQ ID NO: 2359088
gcuuuccgggaugaaaccu

SEQ ID NO: 2359090 - RNA, 19 nt, Artificial Sequence
  Description of Artificial Sequence: Synthetic oligonucleotide
  Sense strand starting at position 2375 of SEQ ID NO: 1885665
gguuucaucccggaaagca

SEQ ID NO: 2359091 - RNA, 19 nt, Artificial Sequence
  Description of Artificial Sequence: Synthetic oligonucleotide
  Antisense strand to SEQ ID NO: 2359090
ugcuuuccgggaugaaacc

SEQ ID NO: 2359092 - RNA, 19 nt, Artificial Sequence
  Description of Artificial Sequence: Synthetic oligonucleotide
  Sense strand starting at position 2391 of SEQ ID NO: 1885665
gcacgaaccuaaguacaau

SEQ ID NO: 2359093 - RNA, 19 nt, Artificial Sequence
  Description of Artificial Sequence: Synthetic oligonucleotide
  Antisense strand to SEQ ID NO: 2359092
auuguacuuagguucgugc

SEQ ID NO: 2359094 - RNA, 19 nt, Artificial Sequence
  Description of Artificial Sequence: Synthetic oligonucleotide
  Sense strand starting at position 2530 of SEQ ID NO: 1885665
gugggugguccgcagacau

SEQ ID NO: 2359095 - RNA, 19 nt, Artificial Sequence
  Description of Artificial Sequence: Synthetic oligonucleotide
  Antisense strand to SEQ ID NO: 2359094
augucugcggaccacccac

SEQ ID NO: 2359096 - RNA, 19 nt, Artificial Sequence
  Description of Artificial Sequence: Synthetic oligonucleotide
  Sense strand starting at position 2639 of SEQ ID NO: 1885665
gugguuucaguccaggaau

SEQ ID NO: 2359097 - RNA, 19 nt, Artificial Sequence
  Description of Artificial Sequence: Synthetic oligonucleotide
  Antisense strand to SEQ ID NO: 2359096
auuccuggacugaaaccac

SEQ ID NO: 2359098 - RNA, 19 nt, Artificial Sequence
  Description of Artificial Sequence: Synthetic oligonucleotide
  Sense strand starting at position 2641 of SEQ ID NO: 1885665
gguuucaguccaggaaugu

SEQ ID NO: 2359099 - RNA, 19 nt, Artificial Sequence
  Description of Artificial Sequence: Synthetic oligonucleotide
  Antisense strand to SEQ ID NO: 2359098
acauuccuggacugaaacc

SEQ ID NO: 2359100 - RNA, 19 nt, Artificial Sequence
  Description of Artificial Sequence: Synthetic oligonucleotide
  Sense strand starting at position 2650 of SEQ ID NO: 1885665
ccaggaauguuuccaagca

SEQ ID NO: 2359101 - RNA, 19 nt, Artificial Sequence
  Description of Artificial Sequence: Synthetic oligonucleotide
  Antisense strand to SEQ ID NO: 2359100
ugcuuggaaacauuccugg

SEQ ID NO: 2359102 - RNA, 19 nt, Artificial Sequence
  Description of Artificial Sequence: Synthetic oligonucleotide
  Sense strand starting at position 2881 of SEQ ID NO: 1885665
acgcaugucccaggacaga

SEQ ID NO: 2359103 - RNA, 19 nt, Artificial Sequence
  Description of Artificial Sequence: Synthetic oligonucleotide
  Antisense strand to SEQ ID NO: 2359102
ucuguccugggacaugcgu

SEQ ID NO: 2359104 - RNA, 19 nt, Artificial Sequence
  Description of Artificial Sequence: Synthetic oligonucleotide
  Sense strand starting at position 3302 of SEQ ID NO: 1885665
augucucuucccuaaugga

SEQ ID NO: 2359105 - RNA, 19 nt, Artificial Sequence
  Description of Artificial Sequence: Synthetic oligonucleotide
  Antisense strand to SEQ ID NO: 2359104
uccauuagggaagagacau

SEQ ID NO: 2359106 - RNA, 19 nt, Artificial Sequence
  Description of Artificial Sequence: Synthetic oligonucleotide
  Sense strand starting at position 3426 of SEQ ID NO: 1885665
uagggauucuaugcuuuga

SEQ ID NO: 2359107 - RNA, 19 nt, Artificial Sequence
  Description of Artificial Sequence: Synthetic oligonucleotide
  Antisense strand to SEQ ID NO: 2359106
ucaaagcauagaaucccua

SEQ ID NO: 2359108 - RNA, 19 nt, Artificial Sequence
  Description of Artificial Sequence: Synthetic oligonucleotide
  Sense strand starting at position 3428 of SEQ ID NO: 1885665
gggauucuaugcuuugaau

SEQ ID NO: 2359109 - RNA, 19 nt, Artificial Sequence
  Description of Artificial Sequence: Synthetic oligonucleotide
  Antisense strand to SEQ ID NO: 2359108
auucaaagcauagaauccc

SEQ ID NO: 2359110 - RNA, 19 nt, Artificial Sequence
  Description of Artificial Sequence: Synthetic oligonucleotide
  Sense strand starting at position 3479 of SEQ ID NO: 1885665
ccugucagguuccuaaagu

SEQ ID NO: 2359111 - RNA, 19 nt, Artificial Sequence
  Description of Artificial Sequence: Synthetic oligonucleotide
  Antisense strand to SEQ ID NO: 2359110
acuuuaggaaccugacagg

SEQ ID NO: 2359112 - RNA, 19 nt, Artificial Sequence
  Description of Artificial Sequence: Synthetic oligonucleotide
  Sense strand starting at position 3529 of SEQ ID NO: 1885665
ccuaaugaccaaugucaug

SEQ ID NO: 2359113 - RNA, 19 nt, Artificial Sequence
  Description of Artificial Sequence: Synthetic oligonucleotide
  Antisense strand to SEQ ID NO: 2359112
caugacauuggucauuagg

SEQ ID NO: 2359114 - RNA, 19 nt, Artificial Sequence
  Description of Artificial Sequence: Synthetic oligonucleotide
  Sense strand starting at position 3616 of SEQ ID NO: 1885665
ugaagcuuguguccagaaa

SEQ ID NO: 2359115 - RNA, 19 nt, Artificial Sequence
  Description of Artificial Sequence: Synthetic oligonucleotide
  Antisense strand to SEQ ID NO: 2359114
uuucuggacacaagcuuca

SEQ ID NO: 2359116 - RNA, 19 nt, Artificial Sequence
  Description of Artificial Sequence: Synthetic oligonucleotide
  Sense strand starting at position 3617 of SEQ ID NO: 1885665
gaagcuuguguccagaaag

SEQ ID NO: 2359117 - RNA, 19 nt, Artificial Sequence
  Description of Artificial Sequence: Synthetic oligonucleotide
  Antisense strand to SEQ ID NO: 2359116
cuuucuggacacaagcuuc

SEQ ID NO: 2359118 - RNA, 19 nt, Artificial Sequence
  Description of Artificial Sequence: Synthetic oligonucleotide
  Sense strand starting at position 61 of SEQ ID NO: 1885666
gccagcaucucuuccagaa

SEQ ID NO: 2359119 - RNA, 19 nt, Artificial Sequence
  Description of Artificial Sequence: Synthetic oligonucleotide
  Antisense strand to SEQ ID NO: 2359118
uucuggaagagaugcuggc

SEQ ID NO: 2359120 - RNA, 19 nt, Artificial Sequence
  Description of Artificial Sequence: Synthetic oligonucleotide
  Sense strand starting at position 65 of SEQ ID NO: 1885666
gcaucucuuccagaaaguu

SEQ ID NO: 2359121 - RNA, 19 nt, Artificial Sequence
  Description of Artificial Sequence: Synthetic oligonucleotide
  Antisense strand to SEQ ID NO: 2359120
aacuuucuggaagagaugc

SEQ ID NO: 2359122 - RNA, 19 nt, Artificial Sequence
  Description of Artificial Sequence: Synthetic oligonucleotide
  Sense strand starting at position 73 of SEQ ID NO: 1885666
uccagaaaguucuuggaag

SEQ ID NO: 2359123 - RNA, 19 nt, Artificial Sequence
  Description of Artificial Sequence: Synthetic oligonucleotide
  Antisense strand to SEQ ID NO: 2359122
cuuccaagaacuuucugga

SEQ ID NO: 2359124 - RNA, 19 nt, Artificial Sequence
  Description of Artificial Sequence: Synthetic oligonucleotide
  Sense strand starting at position 178 of SEQ ID NO: 1885666
gggcuauccuggccaucua

SEQ ID NO: 2359125 - RNA, 19 nt, Artificial Sequence
  Description of Artificial Sequence: Synthetic oligonucleotide
  Antisense strand to SEQ ID NO: 2359124
uagauggccaggauagccc

SEQ ID NO: 2359126 - RNA, 19 nt, Artificial Sequence
  Description of Artificial Sequence: Synthetic oligonucleotide
  Sense strand starting at position 179 of SEQ ID NO: 1885666
ggcuauccuggccaucuaa

SEQ ID NO: 2359127 - RNA, 19 nt, Artificial Sequence
  Description of Artificial Sequence: Synthetic oligonucleotide
  Antisense strand to SEQ ID NO: 2359126
uuagauggccaggauagcc

SEQ ID NO: 2359128 - RNA, 19 nt, Artificial Sequence
  Description of Artificial Sequence: Synthetic oligonucleotide
  Sense strand starting at position 208 of SEQ ID NO: 1885666
gagucagccuuguucccaa

SEQ ID NO: 2359129 - RNA, 19 nt, Artificial Sequence
  Description of Artificial Sequence: Synthetic oligonucleotide
  Antisense strand to SEQ ID NO: 2359128
uugggaacaaggcugacuc

SEQ ID NO: 2359130 - RNA, 19 nt, Artificial Sequence
  Description of Artificial Sequence: Synthetic oligonucleotide
  Sense strand starting at position 211 of SEQ ID NO: 1885666
ucagccuuguucccaagaa

SEQ ID NO: 2359131 - RNA, 19 nt, Artificial Sequence
  Description of Artificial Sequence: Synthetic oligonucleotide
  Antisense strand to SEQ ID NO: 2359130
uucuugggaacaaggcuga

SEQ ID NO: 2359132 - RNA, 19 nt, Artificial Sequence
  Description of Artificial Sequence: Synthetic oligonucleotide
  Sense strand starting at position 350 of SEQ ID NO: 1885666
gccauuuccucugugacua

SEQ ID NO: 2359133 - RNA, 19 nt, Artificial Sequence
  Description of Artificial Sequence: Synthetic oligonucleotide
  Antisense strand to SEQ ID NO: 2359132
uagucacagaggaaauggc

SEQ ID NO: 2359134 - RNA, 19 nt, Artificial Sequence
  Description of Artificial Sequence: Synthetic oligonucleotide
  Sense strand starting at position 354 of SEQ ID NO: 1885666
uuuccucugugacuaaguu

SEQ ID NO: 2359135 - RNA, 19 nt, Artificial Sequence
  Description of Artificial Sequence: Synthetic oligonucleotide
  Antisense strand to SEQ ID NO: 2359134
aacuuagucacagaggaaa

SEQ ID NO: 2359136 - RNA, 19 nt, Artificial Sequence
  Description of Artificial Sequence: Synthetic oligonucleotide
  Sense strand starting at position 409 of SEQ ID NO: 1885666
ugggaucugcauggugaga

SEQ ID NO: 2359137 - RNA, 19 nt, Artificial Sequence
  Description of Artificial Sequence: Synthetic oligonucleotide
  Antisense strand to SEQ ID NO: 2359136
ucucaccaugcagauccca

SEQ ID NO: 2359138 - RNA, 19 nt, Artificial Sequence
  Description of Artificial Sequence: Synthetic oligonucleotide
  Sense strand starting at position 529 of SEQ ID NO: 1885666
ucagguauucucuaaggua

SEQ ID NO: 2359139 - RNA, 19 nt, Artificial Sequence
  Description of Artificial Sequence: Synthetic oligonucleotide
  Antisense strand to SEQ ID NO: 2359138
uaccuuagagaauaccuga

SEQ ID NO: 2359140 - RNA, 19 nt, Artificial Sequence
  Description of Artificial Sequence: Synthetic oligonucleotide
  Sense strand starting at position 544 of SEQ ID NO: 1885666
gguacaacuagucacagua

SEQ ID NO: 2359141 - RNA, 19 nt, Artificial Sequence
  Description of Artificial Sequence: Synthetic oligonucleotide
  Antisense strand to SEQ ID NO: 2359140
uacugugacuaguuguacc

SEQ ID NO: 2359142 - RNA, 19 nt, Artificial Sequence
  Description of Artificial Sequence: Synthetic oligonucleotide
  Sense strand starting at position 648 of SEQ ID NO: 1885666
agaacacagccuuguaaca

SEQ ID NO: 2359143 - RNA, 19 nt, Artificial Sequence
  Description of Artificial Sequence: Synthetic oligonucleotide
  Antisense strand to SEQ ID NO: 2359142
uguuacaaggcuguguucu

SEQ ID NO: 2359144 - RNA, 19 nt, Artificial Sequence
  Description of Artificial Sequence: Synthetic oligonucleotide
  Sense strand starting at position 945 of SEQ ID NO: 1885666
accugugcuugagucauca

SEQ ID NO: 2359145 - RNA, 19 nt, Artificial Sequence
  Description of Artificial Sequence: Synthetic oligonucleotide
  Antisense strand to SEQ ID NO: 2359144
ugaugacucaagcacaggu

SEQ ID NO: 2359146 - RNA, 19 nt, Artificial Sequence
  Description of Artificial Sequence: Synthetic oligonucleotide
  Sense strand starting at position 947 of SEQ ID NO: 1885666
cugugcuugagucaucaga

SEQ ID NO: 2359147 - RNA, 19 nt, Artificial Sequence
  Description of Artificial Sequence: Synthetic oligonucleotide
  Antisense strand to SEQ ID NO: 2359146
ucugaugacucaagcacag

SEQ ID NO: 2359148 - RNA, 19 nt, Artificial Sequence
  Description of Artificial Sequence: Synthetic oligonucleotide
  Sense strand starting at position 949 of SEQ ID NO: 1885666
gugcuugagucaucagaaa

SEQ ID NO: 2359149 - RNA, 19 nt, Artificial Sequence
  Description of Artificial Sequence: Synthetic oligonucleotide
  Antisense strand to SEQ ID NO: 2359148
uuucugaugacucaagcac

SEQ ID NO: 2359150 - RNA, 19 nt, Artificial Sequence
  Description of Artificial Sequence: Synthetic oligonucleotide
  Sense strand starting at position 987 of SEQ ID NO: 1885666
acgagcuuccagggaagaa
